United States Patent Application Publication US 2011/0321197 A1 - sequence listing, part 3

SEQ ID NO: 6087 - DNA, 1338 bp, Klebsiella pneumoniae subsp
  CDS (1)..(1338): transl_table=11
atgagtaaccgcaagtattttggcaccgatggtattcgtggccgcgtcggcgatgcgccgatcactccggagtttgtgctcaagctgggctgggcggcgggcaaagtgctagcgcgtcacggttcgcgtaaaattatcatcggcaaggatacccgtatttcgggctatatgctggaatcggcgctggaagctggactggcagcagcggggctctctgcgtcgttcaccgggcctatgccgacaccggccattgcctacctgacgcgcgccttccgcgccgaggcggggattgttatctctgcttcacataaccctttctacgacaacggcattaaattcttctccattgagggcaccaagctgccggatgatgtcgaagaggcgattgaagccgaaatggagaaagagctcacctgcgtggattcggctgagctgggcaaagccagccgtatcgtcgatgcggcggggcgctacattgaattttgtaagggtacctttcccaacgaactgagcctgggaacgctgaaagtggtggtggattgcgcgcacggcgcgacctatcacatcgcccctaatgtcttccgcgagctgggagcccaggttatcgcgatgggctgcgagccagacggtctcaacatcaacgaagaggtcggcgccactgacgtgcgggcgctgcaggcgcgcgtgctggcggaaaaagccgatctgggtattgcctacgacggcgatggcgatcgggtgattatggttgaccacgaaggcaataaagtcgatggcgaccagatcctctatatcatagcccgggaaggattgcgtcaggggcagctgcgcggcggcgccgtcggcacgctgatgagtaatatggggctggagctggcgctcaagcagttaggcatcccgtttgcccgcgcgaaggtcggtgaccgctatgtactggagatgcttcaggaaaaaggctggcgcatcggtgcggaaaactccggccatgtgatcctgctggataaaaccaccaccggcgatggcattgttgccagcctgcaggtggtcgcggcgatggtccgcaaccacatgagcctgcatgacctgtgcagcgggatgaaaatgttccctcagctgctggtgaatgtccgctttaccgagggcagcggtaacccgctggagaatgagcacgtcaaagcggtgaccgcggaagtggaggcggcgttaggaaaacgcggccgtgtcctgctgcgtaaatcgggtacggagccgctgatccgcgtgatggtggaaggcgagcatgaagatcaggtgcacgagtttgcgcaccgcatcgctgaggcggtaaaaagcgtttag

SEQ ID NO: 6088 - protein, 445 aa, Klebsiella pneumoniae subsp
MSNRKYFGTDGIRGRVGDAPITPEFVLKLGWAAGKVLARHGSRKIIIGKDTRISGYMLESALEAGLAAAGLSASFTGPMPTPAIAYLTRAFRAEAGIVISASHNPFYDNGIKFFSIEGTKLPDDVEEAIEAEMEKELTCVDSAELGKASRIVDAAGRYIEFCKGTFPNELSLGTLKVVVDCAHGATYHIAPNVFRELGAQVIAMGCEPDGLNINEEVGATDVRALQARVLAEKADLGIAYDGDGDRVIMVDHEGNKVDGDQILYIIAREGLRQGQLRGGAVGTLMSNMGLELALKQLGIPFARAKVGDRYVLEMLQEKGWRIGAENSGHVILLDKTTTGDGIVASLQVVAAMVRNHMSLHDLCSGMKMFPQLLVNVRFTEGSGNPLENEHVKAVTAEVEAALGKRGRVLLRKSGTEPLIRVMVEGEHEDQVHEFAHRIAEAVKSV

SEQ ID NO: 6089 - DNA, 1359 bp, Lactobacillus acidophilus
  CDS (1)..(1359): transl_table=11
atgttaaaatattttggaactgatggtgttcgtggagtagctaatcaaggtttaactccagaaatggcttttaaattaggccgtgatggtggttatgttttaactaagaataaaaaagatggtgaacaagctaaggtcttagtttcacgcgacacccgtatttcaggtcaaatgcttgaatatgcacttatctcaggtcttctttccgttggtattgaagttcttgaagttggtgtaattaccactccaggtctttcatacttagttcgtgctcaaggtgcagatgcaggtattcaaatctcagcttcacacaatccagtagaggataacggtattaagttctttggtagcgatggtttgaaactttcagatgaaatggaaggcgaaattgaaaagttaattgatgctgaagaagatactttaccccgtccttctgctgaaggtcttggtactgttactgacttccatgaaggtagcgcaaaatatttacaatttatcgaaaatactattcctgaagaattagatggtatcaaagtcgttattgatggcgctaatggtgcttcaagtgcgcttatttcaagattatttgctgattgtggtgttgactttactacaatttacactcatcctaatggtttaaatattaatgatcactgtggtgctacccataccgaaaacttacaaaaagaagttgttaagcaaggtgcacaacttggtttagcttttgatggtgatgctgaccgttgtattgctgttgacgaaaatggtaacgaagttgatggtgaccacattatgtacgtaatcggttcatacttagctgaacatggtcgtcttaagaaggatactattgttactactgtaatgagtaatcttggctttacaaaggctcttgaaaaagaggatcttaagaatgttcgtactcaagtaggtgaccgttacgtttcagaagaaatgcgtgcacatggttacaatttgggtggtgaacaatcaggtcacgttattatgagcgattaccataatactggtgatggtatgcttacaggtcttcacttgatgttagtaatgaagaagactggtaaatcacttagtgaacttttgaaggatttcaaagattacccacaatgtttagtgaatgttccagttactgataaaaagagttggaaagaacatcaaccaattcttgatgtgattgctgaagttgaaaaagatatggctggcaatggtcgtgtgcttgttcgtccttcaggtacacaagatcttcttagagttatggcagaaggtccaactcaagaagaaactgatgcatatgtagatcgcattgttaaggtagtagaaaaagaaatgggtactaataaatag

SEQ ID NO: 6090 - protein, 452 aa, Lactobacillus acidophilus
MLKYFGTDGVRGVANQGLTPEMAFKLGRDGGYVLTKNKKDGEQAKVLVSRDTRISGQMLEYALISGLLSVGIEVLEVGVITTPGLSYLVRAQGADAGIQISASHNPVEDNGIKFFGSDGLKLSDEMEGEIEKLIDAEEDTLPRPSAEGLGTVTDFHEGSAKYLQFIENTIPEELDGIKVVIDGANGASSALISRLFADCGVDFTTIYTHPNGLNINDHCGATHTENLQKEVVKQGAQLGLAFDGDADRCIAVDENGNEVDGDHIMYVIGSYLAEHGRLKKDTIVTTVMSNLGFTKALEKEDLKNVRTQVGDRYVSEEMRAHGYNLGGEQSGHVIMSDYHNTGDGMLTGLHLMLVMKKTGKSLSELLKDFKDYPQCLVNVPVTDKKSWKEHQPILDVIAEVEKDMAGNGRVLVRPSGTQDLLRVMAEGPTQEETDAYVDRIVKVVEKEMGTNK

SEQ ID NO: 6091 - DNA, 1368 bp, Lactobacillus johnsonii; identical to SEQ ID NO: 5821
  CDS (13)..(1368): transl_table=11

SEQ ID NO: 6092 - protein, 451 aa, Lactobacillus johnsonii
MLKYFGTDGVRGVANAGLTPEMAFKLGRDGGYVLTKDKKDGERAKVLVSRDTRISGQMLEYALISGLLSVGIEVLEVGVITTPGLSYLVRAQGADAGVQISASHNPVEDNGIKFFGSDGLKLSDAKEEEIEKLIDAPEDKLPRPSAEGLGTVTNYHEGASKYLQFIENTLPEELSGIKVVVDGANGAASALISRLFADMGVDFTTIATHPDGLNINDHVGATHTKKLQEEVVKQGAQLGLAFDGDADRCIAVDENGNEVDGDHIMYVIGSYLADHGRLKKDTIVTTVMSNLGFTKALERRGLKNIRTQVGDRYVSEEMRANGYNLGGEQSGHVIISDYHNTGDGMLTGLHLLYVMKDTGKSLSELLSDFKEYPQRLINVPVENKKDWKEHKRITEAIEKVEKELSDEGRIFVRPSGTQSLLRVMTEAPTQELADKYCEEVAKVVEEEMGSN

SEQ ID NO: 6093 - DNA, 1359 bp, Lactococcus lactis subsp
  CDS (1)..(1359): transl_table=11
atgggtaaatatttcggaacagacggtgttcgcggggaagcaaatgttgaattaacgccggagatggcttttaaacttggtcgttttggtggctatgtccttagtcaacatgaattaggtacaccaaaagtttatgttggtcgcgatacacgaatttctggacaaatgcttgcgagcagtttgatttcaggacttttgtctgttgggattgaagtttatgatttaggagtcattgcaacaccaggtgtagcatatttagttaaaaaagatggtgcctctgctggggtcatgatttcagccagccataatccagcacttgataatggaattaaattctttggtggtgatggttataaattagaggatgaaaaagaacttgaaattgaagcattgattgacgctgaagaagacacattgccacgtccatctgctcaaggcttaggaatgctgcatgactatatcgaaggtgttcgtaaatatcaagctttcttaaaaacaacagcagaaggtaattttgaaggctataaggttgttcttgataccgctaatggtgcagcttatacttctgctcgtgccgtttttgctgatttagaagcgaatttgacagttattggtgaaaatcctgatggactcaatatcaatgtaaaagtaggctcaactcatcctgaagcgatggctaaaaaagttgtcgaaacaggaagtgacctcggacttgcctttgacggtgatgctgaccgcctgattgccgttgatgaaaatggagaaattgttgatggcgataaaattatgtttatcgttgggaaatatcttcttggacaaggaaaattggctcaagatacgctagtaacaactgtgatgtctaatcttggatttcatttagcgcttgaagaagcagggattaattcagtgattacagccgttggtgaccgttatgttgttgaagaaatgaagaaaaataattacaacttcggtggtgaacaatcgggtcatatgattttccttgattacaacacaacaggagatggtcaactttcagccattcaattgttgaaagtaatgcgtgaaactggcaaatctttatctgaattagcaagtgaagttacgatttatccacaaaaattagttaatgttcgggtaaaagataatgcagctaaaaaatcagcaatggatgtgccagcgattcaaaaagtaatttcagaaatggaaacttcaatgaatgggaaaggtcgtattttagttcgcccttcaggaactgaaccactcttgcgtgtcatggctgaagcgccaactcatgaagaggtcaatcatgttgtagataccattgttgaagttgttgaagcagaaattggtgtaaaataa

SEQ ID NO: 6094 - protein, 452 aa, Lactococcus lactis subsp
MGKYFGTDGVRGEANVELTPEMAFKLGRFGGYVLSQHELGTPKVYVGRDTRISGQMLASSLISGLLSVGIEVYDLGVIATPGVAYLVKKDGASAGVMISASHNPALDNGIKFFGGDGYKLEDEKELEIEALIDAEEDTLPRPSAQGLGMLHDYIEGVRKYQAFLKTTAEGNFEGYKVVLDTANGAAYTSARAVFADLEANLTVIGENPDGLNINVKVGSTHPEAMAKKVVETGSDLGLAFDGDADRLIAVDENGEIVDGDKIMFIVGKYLLGQGKLAQDTLVTTVMSNLGFHLALEEAGINSVITAVGDRYVVEEMKKNNYNFGGEQSGHMIFLDYNTTGDGQLSAIQLLKVMRETGKSLSELASEVTIYPQKLVNVRVKDNAAKKSAMDVPAIQKVISEMETSMNGKGRILVRPSGTEPLLRVMAEAPTHEEVNHVVDTIVEVVEAEIGVK

SEQ ID NO: 6095 - DNA, 1356 bp, Lactobacillus plantarum
  CDS (1)..(1356): transl_table=11
atgaaatattttggtactgatggtgttcggggaattgcaaattcaggcttaacacctgaaatggcttttcgtttaggtcgtgctggtggctacgtattgacggaacatgcggaaaacaagagtacgcaaccacgcgttttagttgcacgcgatacccggatttcgggccaaatgctggaagaagccttgattgccggcttgctttcagccggaattgaagttttacgtctcggtgtaattacgacgccaggagtggcctacttagtacggatccaagatgctgacgcgggtgtcatgatctcggcttctcacaatccagttgaagataacgggatcaagttcttcggtggcgacggcttcaagttgtctgatgccaaggaagaagaaatcgaagaattactggatcaaccgaaagacactttaccacggccagcagcagaaggtctggggacagttgctgattttccagagggtaatcttaaatattcacaattcttggaacaaacgattccagatgacttaagtggcattcatttggctgtcgatggtgccaatggttctaccagtaacttagtttcccggatctttgcggatttgaacgtggaatttgatacgatggctacggcaccagatggcttgaacatcaacaaaggggtcggttcaacacatcccgaagcattatctaaattcgtcgttgaaaaaggcgctcaagttggtttagcctttgatggggacggtgatcgttgtatcgcagtcgatgaacttggaaacattattgacggtgacaagattatgtacatctgtggaaaattcctcagtgaacgaggcaagttgaagcaggatacagtcgtcacaacggtcatgagtaacctgggcttatacaaggccttagaagcagctggtttgcacagcaagcagacccaagttggtgaccgctacgttgtcgaagagatgttgaaggacggctataaccttggtggtgaacaatctggtcacgtggtcttcttagactttaatacgacgggtgatggcatgttgactggaattcagttattgcacgtcatgaaggaaacgggtaagaagctttctgaattagccgccgaagtgacgacttacccacaaaagttagtgaatgttaaggttcaagacaagaaagccgctttgaacaatgataagatcaaggcagttatcaaggacgttgaagatgaaatggccggtgatggtcgcgtcttggtacggccttctggaacccaagatttattgcgggtcatggcagaagcgaagaccgacgaactggttagcgcttatgtagatcggatcgtcgatgtggtcaaagctgaagttggcattgaataa

SEQ ID NO: 6096 - protein, 451 aa, Lactobacillus plantarum
MKYFGTDGVRGIANSGLTPEMAFRLGRAGGYVLTEHAENKSTQPRVLVARDTRISGQMLEEALIAGLLSAGIEVLRLGVITTPGVAYLVRIQDADAGVMISASHNPVEDNGIKFFGGDGFKLSDAKEEEIEELLDQPKDTLPRPAAEGLGTVADFPEGNLKYSQFLEQTIPDDLSGIHLAVDGANGSTSNLVSRIFADLNVEFDTMATAPDGLNINKGVGSTHPEALSKFVVEKGAQVGLAFDGDGDRCIAVDELGNIIDGDKIMYICGKFLSERGKLKQDTVVTTVMSNLGLYKALEAAGLHSKQTQVGDRYVVEEMLKDGYNLGGEQSGHVVFLDFNTTGDGMLTGIQLLHVMKETGKKLSELAAEVTTYPQKLVNVKVQDKKAALNNDKIKAVIKDVEDEMAGDGRVLVRPSGTQDLLRVMAEAKTDELVSAYVDRIVDVVKAEVGIE

SEQ ID NO: 6097 - DNA, 1362 bp, Leifsonia xyli subsp
  CDS (1)..(1362): transl_table=11
atgccccgtcttttcggaaccgacggagtccgcggactcgcgaacggtacgctcactgccgacctcgcgctcggcctcgcccaggcagccgccgctgtcctgacgcgaggccgcagcgccgaggcacgccgcgctgtgggcaagcgcccgctggccatcgtcgcccgcgacccgcgtgtctccggcgagttcctgtcggccgccgtcgcggccggactggccagctcgggcatcgacgtctatgacgccggtgtcattccgacccccgccgcggcgttcctcatcgcggatttcgacgccgacttcggtgtgatggtctcggcttcgcacaaccccgctcccgacaacggcatcaagatcttcgcccgcggcggcaccaagctccccgatgtcgtggaggacaggatcgaggagcaccttcacctggagaagctcacgccgaccggcgccgaggtcgggcgcatccagtgtttcgcggatgccgaagaccgctatgtcttgcacctcctggcgagtctgccgcaccgcctggacggcatccacgtcgtcctcgactgcgcgcacggagccgccgcgggaatctcgccggaggtgttcactgatgccggcgcccgggtgaccgtcatcggcgacgcgccggacggtatgaacatcaacgacggcgtcggctcgacgcacctcgacaggctggcggaggccgtgctggcggccggcgccgatgtcggtatcgcgcacgacggcgacgccgatcgctgcctggcgatcgacgccagtggccgcaccgtcgatggcgatcagatcatggctatcctcgctctcggcatgaaggagcgcggcaagctcagagacgacacgctcgtcgcgacggtgatgagcaacctcgggctcaaactcgccatgcgcgaggccggtgtccgggtggtcgagaccgctgtcggagaccgctacgtcctggaggagatgaacgggcacggctactcgctcggcggcgagcagtctggccacgtcatcatgagcgatttcgccaccacgggtgacggcatcctcaccggcctgcacctgctcagcgagatggcacgccagcgcaagaccctcgccgagctcgcacaggcgatgacggtgtacccgcaggtgatggtcaatgtgcggggggtcgatcaccactcggtccacagcgacgagttgctgcggtcggccgtcgaagccgtggaggcggcgctcggcgacagcggccgggtgctgctgcgcccgtcgggaacggagccgctggtgcgggttatggtggaggcggccgatcaggaaaccgccgtgcggatggcgaacgaactcgcggatgtggtgcgcgagcggctcgcgggctag

SEQ ID NO: 6098 - protein, 453 aa, Leifsonia xyli subsp
MPRLFGTDGVRGLANGTLTADLALGLAQAAAAVLTRGRSAEARRAVGKRPLAIVARDPRVSGEFLSAAVAAGLASSGIDVYDAGVIPTPAAAFLIADFDADFGVMVSASHNPAPDNGIKIFARGGTKLPDVVEDRIEEHLHLEKLTPTGAEVGRIQCFADAEDRYVLHLLASLPHRLDGIHVVLDCAHGAAAGISPEVFTDAGARVTVIGDAPDGMNINDGVGSTHLDRLAEAVLAAGADVGIAHDGDADRCLAIDASGRTVDGDQIMAILALGMKERGKLRDDTLVATVMSNLGLKLAMREAGVRVVETAVGDRYVLEEMNGHGYSLGGEQSGHVIMSDFATTGDGILTGLHLLSEMARQRKTLAELAQAMTVYPQVMVNVRGVDHHSVHSDELLRSAVEAVEAALGDSGRVLLRPSGTEPLVRVMVEAADQETAVRMANELADVVRERLAG

SEQ ID NO: 6099 - DNA, 1368 bp, Leuconostoc mesenteroides subsp
  CDS (1)..(1368): transl_table=11
atgtcagaatttaatcttaaatatttcggaaccgatggtgtaagaggtgttgcaaataaaacacttacacctgagcttgcttttcgtcttggtcgtacaggtggtgcaatattaaccaggcatgccaacgatgaaaacaagaaaccagttgttattgtaggtcgtgatactcgaatttcaggcgaaatgttacaacaagccattattgcaggatttttatcagttggtattgatgtgctgcggttaggcgttattactacgccagctgtagcttttctggttcaaaatttagaggcagacgctggtgtgcagattacagcttcacataatccggcagctgacaatggcataaaattctttggaaatgatggtttcaaattatctgaccaattagaatatgaaattgaacaattattagatgaatcagaagatacactacctcgtcccagtgctgatggattaggtgtcgttaataattatccggaaggcgttcaaaagtacctagaatttcttcaaaaaacaattccaacagaccttaatggtatgcgaattgctcttgatggtgctaatggcgctaccagcggtttattagcacgattgtttgcggatttgggaacagatttcgtaacattaggaacagaaccaaatgggctaaatattaatgatggcgttggatctactaatccagcggcgcttgctgaacttgtaaaagaaaatgatgtacaagcaggtctagcatttgatggtgatggggatcgattaattgctgttgatgaaaatggtgagattgttgatggtgataaaattatgtttatcactggaaaattcttaaatgaacaagggcgtttaaagcacaatgcagttgtctcaacagtaatgagtaatattggtttctataaggcgttggcagaaaatgatatgactagtatcaaaacagcagtcggtgaccgctatgttatggaagaaatgattaaatcggaccataatcttggtggcgaacagtctggtcacattatttttcgtgattgggcaacaactggagatggcttactaacggctctacaattgttatatgtaatgaaagagacgggaaagaagctatctgaactggcagctcctgttcatatttatccacaaaaattagtgaatataactgtcgctgataaagaagaaattcagcatgatcctgatgttattgccaaaattgctgaggttgaagcacagatggcaggggacggtcgagtattagtccgcccttcaggaacagaacctttactacgtgtcatggtggaagcaccaacgcaagagttagtggaaaagtatactgaatccatcgcaaatgttgttcgtgaaaaatctggactataa

SEQ ID NO: 6100 - protein, 455 aa, Leuconostoc mesenteroides subsp
MSEFNLKYFGTDGVRGVANKTLTPELAFRLGRTGGAILTRHANDENKKPVVIVGRDTRISGEMLQQAIIAGFLSVGIDVLRLGVITTPAVAFLVQNLEADAGVQITASHNPAADNGIKFFGNDGFKLSDQLEYEIEQLLDESEDTLPRPSADGLGVVNNYPEGVQKYLEFLQKTIPTDLNGMRIALDGANGATSGLLARLFADLGTDFVTLGTEPNGLNINDGVGSTNPAALAELVKENDVQAGLAFDGDGDRLIAVDENGEIVDGDKIMFITGKFLNEQGRLKHNAVVSTVMSNIGFYKALAENDMTSIKTAVGDRYVMEEMIKSDHNLGGEQSGHIIFRDWATTGDGLLTALQLLYVMKETGKKLSELAAPVHIYPQKLVNITVADKEEIQHDPDVIAKIAEVEAQMAGDGRVLVRPSGTEPLLRVMVEAPTQELVEKYTESIANVVREKSGL

SEQ ID NO: 6101 - DNA, 1353 bp, Listeria innocua
  CDS (1)..(1353): transl_table=11
atgggtaaatattttggtacggatggagttagaggggttgcaaactcagaattaacaccagaacttgcattcagattaggtcgaatgggtgggtatgttttaactcgtcacgttggtgaacacccgcgcgttcttgttgctcgtgatacacgtatatctggagaaatgcttgaatccgctttaattgcaggacttgtatctgtaggaattgaagttatgcgtttaggcgtcatttcaactcctggtgtcgcttatttaacaaaagcgcaaggagcttctgccagcgttatgatttctgcaagccataatccagtagatgataatggaattaagttcttcggttcagacggctttaaactgtcagacgatcaagaagaagaaattgaacaattacttgatacagcagaggatacactacctcgtccaagcggtgaaggtctaggaacagttagcgattactttgaaggtaaacaaaaatatattcaatacttaaaacaaacaatcgagaatgacttcaatggttatcatattgcattagactgtgcaaatggagcaacttctggcttagcaacacatttatttgctgacttagatgccgatattagctcaatgggtgcttctccaaacggtttaaatattaatgacggtgttggctctacacatccagaagccttagctgcatttgtattagataaaaaagcagatgttggtttagcatttgatggtgacggagaccgcgtgattgcaattgatgaaatcggtcaaattgtcgatggcgataaaattatgtttatttgcgcgaaatacttacgtgaacaaggtctattaaatagtaatacaatcgtttccactgttatgagtaacttaggcttctataaaggcttaagagaacttgaaattgaagatgttcaaacagctgttggtgaccgttatgttgtagaagcaatgcgagaaggtaattataaccttggcggagaacaatctggtcatattattttcctagatcataatacaactggtgatggcctgctttccggaattcaattaattaacgttatgaaagcaactgggaaaaaattatctgaacttgcttcagaaatgaaaacattcccacaaaaactggaaaatatccgtgtaagtgataaaaatcatgtaacagataatccaaaggtaagtaaagtaattagtgaagttgaagctgaaatggctggtaatggtcgcgtgcttgttcgtccatctggtacagaaccattagtaagagtcatggtggaagctgcgacaaaagaagcaacagacgaatattgtgaacgtatttcagcggttgttcgttcagaaatggcacttaacgattaa

SEQ ID NO: 6102 - protein, 450 aa, Listeria innocua
MGKYFGTDGVRGVANSELTPELAFRLGRMGGYVLTRHVGEHPRVLVARDTRISGEMLESALIAGLVSVGIEVMRLGVISTPGVAYLTKAQGASASVMISASHNPVDDNGIKFFGSDGFKLSDDQEEEIEQLLDTAEDTLPRPSGEGLGTVSDYFEGKQKYIQYLKQTIENDFNGYHIALDCANGATSGLATHLFADLDADISSMGASPNGLNINDGVGSTHPEALAAFVLDKKADVGLAFDGDGDRVIAIDEIGQIVDGDKIMFICAKYLREQGLLNSNTIVSTVMSNLGFYKGLRELEIEDVQTAVGDRYVVEAMREGNYNLGGEQSGHIIFLDHNTTGDGLLSGIQLINVMKATGKKLSELASEMKTFPQKLENIRVSDKNHVTDNPKVSKVISEVEAEMAGNGRVLVRPSGTEPLVRVMVEAATKEATDEYCERISAVVRSEMALND

SEQ ID NO: 6103 - DNA, 1353 bp, Listeria monocytogenes serotype 4b
  CDS (1)..(1353): transl_table=11
atgggtaaatattttggtacggatggagttagaggtgttgcaaactctgaattaacaccagaacttgcattcagattaggtagaatgggtgggtatgttttaacccgtcacgtaggggaacatccacgtgttcttgtagctcgtgatacacgtatatctggagaaatgcttgaatccgctttaatcgcaggacttgtttctgtagggattgaagtaatgcgtctaggagttatctccacaccaggtgtagcttatttaacaaaagcacaaggcgcttctgctagtgtaatgatctccgccagccataatccagtggatgataacggtattaaattctttggttctgacggctttaaattgtcagatgatcaggaagaagaaattgaacagcttcttgatacagcagaagatacgctacctcgaccaagtggagaaggtcttgggacagtgagcgattattttgaaggcaaacaaaaatatattcaatacttgaaacaaacaatcgaaaatgactttaatggatatcacattgcacttgattgtgcgaatggtgcaacttcaggtcttgcaacgcatttatttgcagatttagatgcggatattagttcgatgggagcgtctccaaacggtttaaatatcaatgatggcgtcggatctacacatccagaagcattagctgcctttgttttagataaaaaagcagatgttggtttagcttttgatggcgatggcgaccgtgttattgcaatagacgaaattggtcaaattgtcgatggagataaaattatgtttatctgcgcgaaatatttacgtgaacaaggcttattaaataacaacacaattgtatcaacagttatgagtaatctaggcttctataaaggtttgaaagagcttgagattgaagatgtacaaactgcagtgggtgaccgttatgtagtagaagctatgcgtgaaggtaattataatcttggcggagaacaatctggtcatattattttcttagatcataatacaactggtgatggacttctttcaggaatccaattaatcaacgtgatgaaagcaactgggaaaaaattatctgagcttgcggctgaaatgaaaacattcccgcaaaaactagaaaacatccgtgtaagtgataaaaaccatgtaacagataatccgaaagtaagtaaagtaatcggtgaagtagaagctgaaatggctggtaatggtcgagttcttgttcgcccatcaggtacagaaccattagtaagagtgatggtagaagctgctacgaaagaagaaacagacgaatattgtgaacgtatttcagcggttgttcgttcagaaatggcacttaacgattaa

SEQ ID NO: 6104 - protein, 450 aa, Listeria monocytogenes serotype 4b
MGKYFGTDGVRGVANSELTPELAFRLGRMGGYVLTRHVGEHPRVLVARDTRISGEMLESALIAGLVSVGIEVMRLGVISTPGVAYLTKAQGASASVMISASHNPVDDNGIKFFGSDGFKLSDDQEEEIEQLLDTAEDTLPRPSGEGLGTVSDYFEGKQKYIQYLKQTIENDFNGYHIALDCANGATSGLATHLFADLDADISSMGASPNGLNINDGVGSTHPEALAAFVLDKKADVGLAFDGDGDRVIAIDEIGQIVDGDKIMFICAKYLREQGLLNNNTIVSTVMSNLGFYKGLKELEIEDVQTAVGDRYVVEAMREGNYNLGGEQSGHIIFLDHNTTGDGLLSGIQLINVMKATGKKLSELAAEMKTFPQKLENIRVSDKNHVTDNPKVSKVIGEVEAEMAGNGRVLVRPSGTEPLVRVMVEAATKEETDEYCERISAVVRSEMALND

SEQ ID NO: 6105 - DNA, 1353 bp, Listeria monocytogenes
  CDS (1)..(1353): transl_table=11
atgggtaaatatttcggtacggatggagttagaggtgttgcaaactctgaattaacaccagaacttgcattcagattaggtagaatgggtgggtatgttttaacccgtcatgtaggggaacatccacgtgtacttgtagctcgggatacacgtatatctggagaaatgcttgaatccgctttaattgcaggacttgtttctgtagggattgaagtaatgcgtctaggagttatctccacaccaggtgtagcttatttaacaaaagcacaaggcgcttctgccagcgtaatgatctccgccagccataatccagtagatgataacggtattaaattttttggttctgatggctttaaattgtccgatgatcaggaagaagaaattgaacaacttcttgatacagcagaagatacgctacctcgaccaagtggtgaagggcttgggacggttagcgattattttgaaggtaaacaaaaatatattcaatacttaaaacaaacaatcgaaaatgattttaatggctatcacattgcacttgattgtgcgaatggtgcaacttcaggtcttgcaacgcatttatttgcagatttagatgcggatattagttcgatgggagcttctccaaacggtttaaatatcaatgatggcgttggatctacacatccagaagcactagcggcctttgttttagataaaaaagcagatgttggtttagcttttgatggcgacggcgaccgtgttattgcgattgacgaaattggtcaaattgtcgatggagataaaattatgtttatttgcgcgaaatatttacgtgaacaaggcttattaaataacaacacgattgtatccactgtcatgagtaatctaggtttctacaaaggcttgaaagagcttgaaattgaagatgtacaaactgctgttggtgaccgttatgtagttgaagctatgcgtgaaggtaattataatcttggcggagaacaatctggccacattattttcttagatcataatacaactggtgatggacttctttcaggaatccaattaatcaacgtgatgaaagcaactgggaaaaaattatctgagcttgcggctgaaatgaaaacattcccgcaaaaattagaaaatattcgtgtaagtgataaaaaccatgtaacggataatccgaaagtaagtaaagtaatcgatgaagtagaagctgaaatggctggtaatggtcgagttcttgttcgcccatctggtacagaaccattagtgagagtgatggtagaagctgctacgaaagaagaaacagacgaatattgtgaacgtatttcagcggttgttcgttcagaaatggcacttaacgattaa

SEQ ID NO: 6106 - protein, 450 aa, Listeria monocytogenes
MGKYFGTDGVRGVANSELTPELAFRLGRMGGYVLTRHVGEHPRVLVARDTRISGEMLESALIAGLVSVGIEVMRLGVISTPGVAYLTKAQGASASVMISASHNPVDDNGIKFFGSDGFKLSDDQEEEIEQLLDTAEDTLPRPSGEGLGTVSDYFEGKQKYIQYLKQTIENDFNGYHIALDCANGATSGLATHLFADLDADISSMGASPNGLNINDGVGSTHPEALAAFVLDKKADVGLAFDGDGDRVIAIDEIGQIVDGDKIMFICAKYLREQGLLNNNTIVSTVMSNLGFYKGLKELEIEDVQTAVGDRYVVEAMREGNYNLGGEQSGHIIFLDHNTTGDGLLSGIQLINVMKATGKKLSELAAEMKTFPQKLENIRVSDKNHVTDNPKVSKVIDEVEAEMAGNGRVLVRPSGTEPLVRVMVEAATKEETDEYCERISAVVRSEMALND

SEQ ID NO: 6107 - DNA, 1452 bp, Magnetococcus sp
  CDS (1)..(1452): transl_table=11
gtggtgcaaaatcgggcgatattctgttttctttccacgatcaagagcgaagagaccatgaccagcgagagccagccgcaagtgacacaaacacgtaaattttttggcacggatggtatacgggggatggccaacattcaccccatgacgccggatctggtgcttaaactgggtcgcgctgccgggcatgtgtttcgtgtgggggataagcgccacacggtgattattggcaaagatacccgtctatcgggctatatgtttgaatcggccctgctggcgggtttgacctctatgggcattcattgtcttcaggtggggccgttgccaactccggcgattgcctttttaacgcgggccttgcgggccgacgctggcattatgatctcggcttcgcacaatccctttcacgataatgggatcaagttttttggacccaatggcatgaaactacccgacgagttggagctggagattgagcgggtgctgctctctgacgaggatctgcccatgcccaccccccaccatttggggcgggcgcaccgtattgatgatgccttgggccgttatatagagtttgctaagaccagctttcctaaagatttacgcctggatgggctgcgggtggtggtggattgtgcccatggtgccgcctacaaggttgcgccggcggtgttgtgggagctgggggcggaggtggttacgttaggcaatcatcccaacggcaccaacattaacgatggggtgggctcgctctatccgcaagagatggtcaagcgggtgcaggaggtacgggccgatgtgggcattgcctttgatggggatgccgaccgtgtggtgatctgcgatgagcggggggagatcctggatggggatgtgatcctcgccatgtcggcgctggagatgaagcgcaagggggtgttgcgcggggatggggtggtggccacagtgatgtccaatttgggtttggagcgggctttggcggcggaggggctgacgttggcgcgcaccaaggtgggggatcgttatgtgctggagcatatgttggcgcatggctttaatttggggggtgagcaatcggggcaccttatctttttggaccacaacaccaccggtgatggtctgatctcggctttgagcgtgttggcgttgatgaccacccaggcccagccgctctccaagcttgccaatgtgatgcagcgggtcccccaggtgttgcagaacgtcaccatagcccgtggcagtgatcccatggatgacagccgggtggtggcggccattgccgaggctgaggcgcagttgggcacgcgggggcggattttggtgcgtaaatccggcaccgagcccaaggtgcgggtgatggtggagggggatgatacggcgcacattaccgcgctggccagtggggtgtgtgaggccattaagcgcgccagcaacggctttggcgaggggtaa

SEQ ID NO: 6108 - protein, 483 aa, Magnetococcus sp
MVQNRAIFCFLSTIKSEETMTSESQPQVTQTRKFFGTDGIRGMANIHPMTPDLVLKLGRAAGHVFRVGDKRHTVIIGKDTRLSGYMFESALLAGLTSMGIHCLQVGPLPTPAIAFLTRALRADAGIMISASHNPFHDNGIKFFGPNGMKLPDELELEIERVLLSDEDLPMPTPHHLGRAHRIDDALGRYIEFAKTSFPKDLRLDGLRVVVDCAHGAAYKVAPAVLWELGAEVVTLGNHPNGTNINDGVGSLYPQEMVKRVQEVRADVGIAFDGDADRVVICDERGEILDGDVILAMSALEMKRKGVLRGDGVVATVMSNLGLERALAAEGLTLARTKVGDRYVLEHMLAHGFNLGGEQSGHLIFLDHNTTGDGLISALSVLALMTTQAQPLSKLANVMQRVPQVLQNVTIARGSDPMDDSRVVAAIAEAEAQLGTRGRILVRKSGTEPKVRVMVEGDDTAHITALASGVCEAIKRASNGFGEG

SEQ ID NO: 6109 - DNA, 1335 bp, Mannheimia succiniciproducens
  CDS (1)..(1335): transl_table=11
atggcagaacgtaaatattttggtactgacggtgtgcgaggtaaagtaggaacttttcctattactccggatttcgcattaaaactggggtgggcggcaggtaaggtccttgcttcacaaggttctcgccaagtattaatcggcaaagatacccgaatttcgggctatatgctggaatcggcacttgaagccggtttagccgcagcagggttgtccgccgcatttatcggtccgatgccgactcccgcagtggcttatttaacccgcacattccgggcggaagcgggtattgtgatttccgcatcgcataatccttattatgataacggtattaaattcttttccgcacaaggtacaaaattacccgatgaaatcgaagaagcaatcgaagctatgctagaacaacctattgattgcgtggaatcggcggaattagggcgtgcgagtcgtattaaagatgcggcgggacgttatattgagttctgtaaaggtactttcccgaccgaattaagtttatccggttataaaatcgtggtggactgtgctaacggcgcaacttatcacatcgcaccgaatgttatgcgtgagctgggtgccgaggtgattgaaatcggtacttcgccaaatggtatgaatatcaatgaaaaatgcggcgcaaccgatataaaagcattaaaagcaaaagtgctggaaaccaaagcggatgtcggtcttgcttatgatggtgacggtgaccgcattatgatggtggatcatttaggaaatgtggtagacggcgaccagattttatttattatcgctcgagaagacttacgtgccggtaaattaaaaggcggtgttgtgggtacattaatgagtaacatgagcctggaaatttcccttaaaacgctaggtattccgtttattcgcgcgaatgtcggtgatcgttatgtgctggaaaaaatggttgaaaacgattggaaattaggcggcgaaaactccgggcatattattattgcggataaaaatactaccggtgacggcattatcgcctcattagcggttctgaccgctatggcgcaacataaattgtcattaaacgaattggcgagcgcagtaaaattatttccgcaggtcttgattaatgtgcgttttagcggcggaacaaatccgttagaaagcgatgcggtgaaagccgtggcggcggaagtggaaaaacgtttagccggaaaaggtcggattttattacgtaaatccggtacggaacctctaatccgggttatggtggaatgttcggatgccgaattagcccgtaaatccgctgaagaaattgtcgaagcggtaaaagcaaactaa

SEQ ID NO: 6110 - protein, 444 aa, Mannheimia succiniciproducens
MAERKYFGTDGVRGKVGTFPITPDFALKLGWAAGKVLASQGSRQVLIGKDTRISGYMLESALEAGLAAAGLSAAFIGPMPTPAVAYLTRTFRAEAGIVISASHNPYYDNGIKFFSAQGTKLPDEIEEAIEAMLEQPIDCVESAELGRASRIKDAAGRYIEFCKGTFPTELSLSGYKIVVDCANGATYHIAPNVMRELGAEVIEIGTSPNGMNINEKCGATDIKALKAKVLETKADVGLAYDGDGDRIMMVDHLGNVVDGDQILFIIAREDLRAGKLKGGVVGTLMSNMSLEISLKTLGIPFIRANVGDRYVLEKMVENDWKLGGENSGHIIIADKNTTGDGIIASLAVLTAMAQHKLSLNELASAVKLFPQVLINVRFSGGTNPLESDAVKAVAAEVEKRLAGKGRILLRKSGTEPLIRVMVECSDAELARKSAEEIVEAVKAN

SEQ ID NO: 6111 - DNA, 1302 bp, Methanococcoides burtonii
  CDS (1)..(1302): transl_table=11
atgaaattattcggatcatccggaataagaggaattaccaataaggaagttacaacagatcttgccctgaaggtaggtcttgcactcgggaaaacaaaaaggagtgcagttgtaggccgtgacccgcgcattgcaggagagatgatagaacacgcaatcatttccgggcttctttcagcaggctgtgatgttgtacgaatcggaatggtcagtaccccaacccttgcatatgcaacaaaggactacgattgtggagtaatgataactgcatcccataatcccgcagaatatgtaggaataaagttatggaaccctgatgggatggcctttgattccagccagcaggaagagatagaggaatgcatagagaaagaagatttcgaacctgtcaattgggatcaaattggcaatgtgtcagaagatgcgaatgccatccgccagcacaccaacatgatattgcagaatgtaaaaaggtcctcaaaacgtgttatcattgactgcggatgcggcgcaggtagcacgataactccatatgtgctccgtaagatggggtgtgaggtcattacccttaattcccaacctgacggttacttcccggcacgcaatcccgaacccaacgatactaaccttactctgctcaaaatagccgtaaaagaattcggtgcagatattggcattgctcaggatggcgatgcagacaggatgatggcgatcgacgagaagggagagttcattactggcgatgagatgcttgcactttttgccagacatgaatgcgacgaaggtgctataattgtagtacccgtggatacctcgatgatggtggacgatgccctgcccggctcaactgtcattcgtacaagggtcggagatgtctacgttgcagaagagatcaaaagatgcaatgccgacattggaggagaaccttcaggaagctggatcttcccgaagatatcctattgcccggatggaatcttcgcttctgcaaagataatggagctaatagagaacagaacattatcagaacttaaaaaagaattaccacattatcccacatatcgcggcacagtgaaatgtgacaacgaaaggaaagcgcatgttatggaagtggtccattccaaactcgagaaatgcgggaagatatctgacatcgatggaatacgcgtggaaatggataacggatgggttcttgtgagaccttcagggacagaaccgaagataaggatcacagccgaagcaagagaaggtgctgatagattgttcagcatggcagagaacattatcaaggaggcacttaattga

SEQ ID NO: 6112 - protein, 433 aa, Methanococcoides burtonii
MKLFGSSGIRGITNKEVTTDLALKVGLALGKTKRSAVVGRDPRIAGEMIEHAIISGLLSAGCDVVRIGMVSTPTLAYATKDYDCGVMITASHNPAEYVGIKLWNPDGMAFDSSQQEEIEECIEKEDFEPVNWDQIGNVSEDANAIRQHTNMILQNVKRSSKRVIIDCGCGAGSTITPYVLRKMGCEVITLNSQPDGYFPARNPEPNDTNLTLLKIAVKEFGADIGIAQDGDADRMMAIDEKGEFITGDEMLALFARHECDEGAIIVVPVDTSMMVDDALPGSTVIRTRVGDVYVAEEIKRCNADIGGEPSGSWIFPKISYCPDGIFASAKIMELIENRTLSELKKELPHYPTYRGTVKCDNERKAHVMEVVHSKLEKCGKISDIDGIRVEMDNGWVLVRPSGTEPKIRITAEAREGADRLFSMAENIIKEALN

SEQ ID NO: 6113 - DNA, 1344 bp, Methylococcus capsulatus
  CDS (1)..(1344): transl_table=11
gtgaagaaagagtatttcgggaccgacggaattcgcggcagggtgggtgattacccgatcactccggatttcatgctcaagctcgggtgggcggcgggctgcgtcttcgcccgggagatgccgggccggcgtgtcctgatcggcaaggatacccggatttccggatacatgttcgaatcggctttggaagccggcttttccgccgccggcgtcgatacgcaactactcggcccgatgccgaccccggcggtcgcttatctgacccgcaccctccgcgcccaggcgggcgtggtgatcagcgcttcacacaacccttattacgacaacggcatcaagtttttcgggccggacggcatgaagctgcccgacgaactggaactgttgatcgaagactatctgggcaggcccatgaccactgtggagtgttcgcacatcggcaaggcgacccgcatcgtggacgcggcggggcgctatatcgagttttgcaagagcacgattcccctgggtatgcatttttccggaatgaaaatcgtggtggactgcgcccacggatcgacctaccacgtcgctcccgacgtgttctcggaactgagagcgaccgtgagtaccctcggggtcgcgccggacggtctcaacatcaacgatcgcgtcggcgccacggatcctgaaaaccttcgccagacggtgctcgaggaaaatgccgatctgggcatagcgctggatggagacggcgatcggctgatcatggtcgaccaccggggggaggtcgtcgacggcgacgaactgctgttcgtcatcgccaatgcccggcacgccgaaggcgaactgaagggttccgtggtgggaaccctgatgagcaatctcggcctggagcaggcgatacggcgcctgggcctggaattcaggcgggccgcggtcggcgaccgctacgtgatggaaatgatgctcgaacacggcagcatgctcggcggcgaagggtcgggacacatcatttgccgcgaccgcaccaccacgggggacggcatcgtctccgccctgcaagtcctggcggagatcgtccgcagcggaaaaaccctgcacgaactgaagcagggcatgaggaaatatccccagcggctggtcaacgtgcggctggcggaacgggtcagtctggcttcggtgccgctggtccagaaagtgaaggccgaggtggaggcggagttgggcgattcgggacgcgtactgttgcgcccgtcgggcacggagcccttgatccgggtgatggtcgaaggagcggacgagggccaggtccgcgagctcgccgaccggttggcgggagccgtggcccgggcgttttccgcctga

SEQ ID NO: 6114 - protein, 447 aa, Methylococcus capsulatus
MKKEYFGTDGIRGRVGDYPITPDFMLKLGWAAGCVFAREMPGRRVLIGKDTRISGYMFESALEAGFSAAGVDTQLLGPMPTPAVAYLTRTLRAQAGVVISASHNPYYDNGIKFFGPDGMKLPDELELLIEDYLGRPMTTVECSHIGKATRIVDAAGRYIEFCKSTIPLGMHFSGMKIVVDCAHGSTYHVAPDVFSELRATVSTLGVAPDGLNINDRVGATDPENLRQTVLEENADLGIALDGDGDRLIMVDHRGEVVDGDELLFVIANARHAEGELKGSVVGTLMSNLGLEQAIRRLGLEFRRAAVGDRYVMEMMLEHGSMLGGEGSGHIICRDRTTTGDGIVSALQVLAEIVRSGKTLHELKQGMRKYPQRLVNVRLAERVSLASVPLVQKVKAEVEAELGDSGRVLLRPSGTEPLIRVMVEGADEGQVRELADRLAGAVARAFSA

SEQ ID NO: 6115 - DNA, 1362 bp, Methylobacillus flagellatus
  CDS (1)..(1362): transl_table=11
atgagtagaaaatattttgggacagatggtgtacgcggcaaggtgggtacatttcccatcaccccggattttgtcatgcgcctgggctatgcagctggtcgcgtattgacgcgcatggatcatcacctggtgcccggcacaaagccattggtgatcattggcaaggacacccgtatttcgggttatatgttcgagacggctttggtttccggcctttgcgcaggcggcgtcaatgtccgtatcactgggccgttgccgacccctgccatcgcgcatgtgacccgtgcacagcgtgcgcaggccggcatcgtgatttcggcttcgcataatccgtttgacgacaacgggatcaagtttttttctgcgcagggtaccaagctgcctgacgaggtggagctcgcgattgaggctgaattggatcagcccatggagcttgtgccgacggaacagattggacgtgtgaagcggatcgatgatgccgcaggtcggtatattgagttctgcaagagcaccttcccgaatgcgttggatttgcgcggcctgaaaatcgtgctcgattgcgcgaacggtgcaacctaccatgtggccccgccggtattccatgaactgggcgctgaggtcatcagcatcggaacccagccgaatggcttgaacatcaacctgaatgtcggctccacacatccagagtccttgcagcaggccgtggttgagcaccaggctgacttaggcattgctttcgatggcgacggtgaccgcgtcgtcatggcagacaatcaaggccaactgctggatggcgatcaattgctctacatcattgccagtcatcgccaccaacgtggccggttgggcggcggtgtggtcggcactctcatgaccaacctggcactcgagcatgccttgggcaaggagggcattccgttccagcgtgccaaggtcggggatcgctacgtcctggaattgctcaatgccaatgaatggcaattgggcggggaaaactccgggcatattctctgcctggacaagcacagcagtggcgatgggatcattgccgccttgcaggtgctgcacgccttgcgtgcctctggcctgagtctggcagactgggccaagcgcttgccgctctacccgcaggtgctcatcaacgtcaaggtcgcacagcggattgacctggatagcaacactgcattgcaggctgctgtgacatctgccgagggtgccttgaagggcactggtcgcgtgttgttgcgcgcctccggcacggaacccaaaatccgggtgatggtcgaggggcaggatcgtcccctggtgcaacgcttggccgaggagattgcggccgtggtgcagcaagaggcagctagctaa

SEQ ID NO: 6116 - protein, 453 aa, Methylobacillus flagellatus
MSRKYFGTDGVRGKVGTFPITPDFVMRLGYAAGRVLTRMDHHLVPGTKPLVIIGKDTRISGYMFETALVSGLCAGGVNVRITGPLPTPAIAHVTRAQRAQAGIVISASHNPFDDNGIKFFSAQGTKLPDEVELAIEAELDQPMELVPTEQIGRVKRIDDAAGRYIEFCKSTFPNALDLRGLKIVLDCANGATYHVAPPVFHELGAEVISIGTQPNGLNINLNVGSTHPESLQQAVVEHQADLGIAFDGDGDRVVMADNQGQLLDGDQLLYIIASHRHQRGRLGGGVVGTLMTNLALEHALGKEGIPFQRAKVGDRYVLELLNANEWQLGGENSGHILCLDKHSSGDGIIAALQVLHALRASGLSLADWAKRLPLYPQVLINVKVAQRIDLDSNTALQAAVTSAEGALKGTGRVLLRASGTEPKIRVMVEGQDRPLVQRLAEEIAAVVQQEAAS

SEQ ID NO: 6117 - DNA, 1359 bp, Methanopyrus kandleri
  CDS (1)..(1359): transl_table=11
gtgggtaaatacttcggtacgtccggtatccgcggtagagtaggggagttcctaactccagagctcgcacttcgagctggacgcgctctcggcgagtacttgggtggcggcacggttgccgtaggtcgcgacacccgggtacactgcgatgcccttcgcgcagccgtgatctcaggactgaccgcccaaggatgtgatgttgtagacatcggggtagtgtgcacaccgactctgggttgttacgtggcgactgagggtctcgacgccggtgtaatgatcacagcttcccacaatcctcccgagtacaacgggataaagttctgggactctgacggaatggcgttctcgcccgaacaagagcgtgaaatagagcagatcatggacggcgatctggagtacccgaattgggacgagtacggtgaggtggtcgacgacgagacggcgttgaacgtacacgtggagaggatactggacgaggtctccgtcgacggggacgggctacgcatcgtggtggactgtgccaacggcccctccgcgttcgtcactccggtagtactccgcgagatggggtgcgaggtaatctctctaaacgcgcatcctgatggacacttcccgggccgggaaccggagccgaagcccgagaacctgaaggacctcatgcgaaccgtgcgggcgacggatgctgatctggggatcgcccacgacggggacgctgatcgtgtagttttcgtcaccgaggaaggtaagttcgccgggtacgacgaagtgctggcgttggtgtgccggcgaatcctcgaggagaagggtccagggaaggtcgccgtgaacgtcgatgcttcgatggttatcgacgaggtagtccgcgagatgggcggcgaggtggtgaggaccaaagtgggagacgtccacgtagccgccgcgatacgggaggaaggatgcgtcttcggaggggaaccgaacggaacctggatacacccggacgtacacatgtgccccgacggtccgctctccgcggcgtggatggtgagcttgctgatcgaggaagggcgaccgctctcggaactgttagccgagatcccgagctacccggtcgtgcgcgaaaccgtcgagtgtcccgacgagctcaagcccgaagtgatgaggctggtggagacgcgcctccgggaggcttacgacgacatcgataccgtagacggcgttcgtgtcgaactggacgatggctgggtgctcgtcaggccctccggcaccgaaccgctcatacggataacggtggaggcggagtccgaggaacgcgcccgagagctcagggatgagttcgtcgatatcgtccgcaggtgtgtcgaggaggtgagggaatga

SEQ ID NO: 6118 - protein, 452 aa, Methanopyrus kandleri
MGKYFGTSGIRGRVGEFLTPELALRAGRALGEYLGGGTVAVGRDTRVHCDALRAAVISGLTAQGCDVVDIGVVCTPTLGCYVATEGLDAGVMITASHNPPEYNGIKFWDSDGMAFSPEQEREIEQIMDGDLEYPNWDEYGEVVDDETALNVHVERILDEVSVDGDGLRIVVDCANGPSAFVTPVVLREMGCEVISLNAHPDGHFPGREPEPKPENLKDLMRTVRATDADLGIAHDGDADRVVFVTEEGKFAGYDEVLALVCRRILEEKGPGKVAVNVDASMVIDEVVREMGGEVVRTKVGDVHVAAAIREEGCVFGGEPNGTWIHPDVHMCPDGPLSAAWMVSLLIEEGRPLSELLAEIPSYPVVRETVECPDELKPEVMRLVETRLREAYDDIDTVDGVRVELDDGWVLVRPSGTEPLIRITVEAESEERARELRDEFVDIVRRCVEEVRE

SEQ ID NO: 6119 - DNA, 1335 bp, Moorella thermoacetica
  CDS (1)..(1335): transl_table=11
atgggtaaattattcggcaccgacggggtacggggcgtggccaatcagggcctcccgccggaactggcctttcgcctgggccgggctggcgccgccgtcctggccgggaagggcgatcgggtccgggtggtggtgggccgcgatacccgcatctccggcgacatgctggaggcggccctggtagccggtatttgctccgttggtggccaggtgttgaaagtgggcattatccctaccccggcggtggcctggctgacccgggacctgggggccgatgccggggtggttatctcggcgtcccataacccggtggccgataacgggattaaattcttcagcgccagcggttataaactaccggacccggtggaggaagagatcgagaggctggtattggctccggaggataacctgccgcggccggtgggggttgatctgggaagggttaaggaagtaaccgaggcgccggaacgctacatcgcccatgtctgcagtacggccggccgcggcctggcggggatgcaggtcgtcctcgattgcgccaacggtgccgcctgcagggtggcaccggcaatcttccagcgtttgggagcagaggtttccctcttgcataatgtaccggatggtactaatataaacgtcaggtgtggctccacccacccggagagcctccaggcggaagtcgtcgcccggggagccgccgtggggctggccttcgacggcgatgccgaccgggtaattgccgttgacgagaaaggccaggttgtagatggggatgtaatcatgactatcctggccctttaccgccaggagcagggtggcctgcccggcggccaggtagtggttactgtcatgagcaactacggcctgcaccaggccctgacagcggcaggcctgagggtccagcagaccagggtaggcgaccggtatgtcctggaggagatgctgaagagcggcgccgtcctgggaggcgagcagtcgggccatatcatccttctggagcataataccaccggtgacggcctgattaccggcgtccaactgctccaggtcatggccgccaccgggcggcccctgtcggaactggcggccgccatgccccgtctgccccagattctggttaacgtaagggtgggggataaagatgccgctatggccagccctgccctgcaggcagcggtggcggcggcccgggagcaactggcaggccggggccgggtgctggtcaggccttcgggaacagaacccattatccgtctcatggtagaaggcccggaccgggaagagctggagaacattatggccggcctgcaacgggttgccagcgggttgtga

SEQ ID NO: 6120 - protein, 444 aa, Moorella thermoacetica
MGKLFGTDGVRGVANQGLPPELAFRLGRAGAAVLAGKGDRVRVVVGRDTRISGDMLEAALVAGICSVGGQVLKVGIIPTPAVAWLTRDLGADAGVVISASHNPVADNGIKFFSASGYKLPDPVEEEIERLVLAPEDNLPRPVGVDLGRVKEVTEAPERYIAHVCSTAGRGLAGMQVVLDCANGAACRVAPAIFQRLGAEVSLLHNVPDGTNINVRCGSTHPESLQAEVVARGAAVGLAFDGDADRVIAVDEKGQVVDGDVIMTILALYRQEQGGLPGGQVVVTVMSNYGLHQALTAAGLRVQQTRVGDRYVLEEMLKSGAVLGGEQSGHIILLEHNTTGDGLITGVQLLQVMAATGRPLSELAAAMPRLPQILVNVRVGDKDAAMASPALQAAVAAAREQLAGRGRVLVRPSGTEPIIRLMVEGPDREELENIMAGLQRVASGL

SEQ ID NO: 6121 - DNA, 1335 bp, Mycobacterium avium
  CDS (1)..(1335): transl_table=11
atgggtcgactattcggcaccgacggcgtgcgcggggtcgccaatcgcgagttgaccgctgagctggcgctggcgctgggcgccgcggcggcgcggcagctggccagcgggtccgcgccgggccggcgggtcgcggtgatcggccgcgatccacgcgccagcggcgagatgctggaggccgcggtgatcgccgggctgaccagtcaaggcgtcgacgcgctgcgggtgggggtgctgcccacccccgcggtggcctacctgaccggcgcctacgacgccgacttcggggtgatgatctcggcgtcgcacaacccgatgcccgacaacggcatcaagatcttcggccccggcggccacaagctcgacgacggcaccgaggaccggatcgaagccctggtcggggacgccgggccgcggccggtcggcgcgggcatcggccgggtgatcgacgccgaggacgccgccgaccgctacctgcgccacctgagcaaggccagcacgctgcgcctggacgggctgaccgtggtggtcgactgcgcgcacggcgcggcctcctccgtggccccgcgcgcctaccgcgcggccggcgcgcgggtgatcgcgatcaacgccgaccccaacgggctcaacatcaacgacaactgcgggtcgacgcatctggattcgctgcgcgccgccgtcgtcgcccaccgcgctgacctgggcctggcgcacgacggggacgccgaccgctgcctggccgtcgacgccgacggcaacctggtcgacggcgaccacatcatggtggtgctcgcgctggcgatgcgtgaggccggcgagctggcgtccgacacgttggtgaccaccgtgatgagcaacctgggactgcacctggcgatgcggtcggccggaatcacggtgcgcaccaccggtgtcggcgaccgctacgtggtcgaggagctgcgcgccggtgactacagcctgggcggtgagcagtccgggcacatcgtgatgcccgcgctgggctcgaccggcgacggcatcgtcaccgggctgcggttgatgacgcgcatggcgcagaccggctcgccgctgtccgatctggcgtcggcgatgcagacgctgccccaggtgctgatcaacgtgacggtcgccgacaaggccaccgccgccaccgcaccgtcggtgcagaccgccgtcggccaggccgcggccgaactgggcgacaccggccgaatcctgttgcgcccgagcggaaccgagccgatgatccgcgtcatggtggaagcacccgagaaagacatcgcgcagcgactcgccacccgggtcgccgaggcggtcagcgccgcgcgctga

SEQ ID NO: 6122 - protein, 444 aa, Mycobacterium avium
MGRLFGTDGVRGVANRELTAELALALGAAAARQLASGSAPGRRVAVIGRDPRASGEMLEAAVIAGLTSQGVDALRVGVLPTPAVAYLTGAYDADFGVMISASHNPMPDNGIKIFGPGGHKLDDGTEDRIEALVGDAGPRPVGAGIGRVIDAEDAADRYLRHLSKASTLRLDGLTVVVDCAHGAASSVAPRAYRAAGARVIAINADPNGLNINDNCGSTHLDSLRAAVVAHRADLGLAHDGDADRCLAVDADGNLVDGDHIMVVLALAMREAGELASDTLVTTVMSNLGLHLAMRSAGITVRTTGVGDRYVVEELRAGDYSLGGEQSGHIVMPALGSTGDGIVTGLRLMTRMAQTGSPLSDLASAMQTLPQVLINVTVADKATAATAPSVQTAVGQAAAELGDTGRILLRPSGTEPMIRVMVEAPEKDIAQRLATRVAEAVSAAR

SEQ ID NO: 6123 - DNA, 1347 bp, Mycobacterium bovis
  CDS (1)..(1347): transl_table=11
atgggtcgactgtttggcaccgatggtgtgcgcggtgtcgccaatcgcgagttgaccgcggaactggccctggcactgggcgccgcggcggcgcgacgattgtcgaggtcgggcgcaccgggtcggcgagtcgcggtgcttggccgcgatccgcgggccagcggcgagatgctggaggccgccgtgatcgccggcctgaccagtgagggcgtcgacgcgctgcgggtcggggtgttgccgacccccgcggtggcctatctgaccggcgcctacgacgccgacttcggggtgatgatctcggcgtcgcataacccgatgcccgataacggcatcaaaatcttcgggcccggcggccacaaattagatgacgacaccgaggatcagatcgaggatctggtcctcggcgtctcccgcggacccgggttgcggccggccggcgcggggattggccgcgttatcgacgccgaggatgcgaccgaacgctacctgcgccacgtggccaaggccgccaccgcccggctcgatgacctggccgtggtggtcgactgcgctcatggggccgcgtcgtcggcggctccgcgcgcctaccgagcggccggtgcccgggttatcgcgatcaacgccgaacccaacggacgcaacatcaacgacggctgtggatcgactcaccttgacccgctgcgggcagcggtgctcgcccatcgggccgacctgggcctggcccatgatggagacgccgatcggtgcctggccgtcgacgccaacggtgacctcgtcgacggtgacgccatcatggtggtgctggcgctggcaatgaaagaggccggtgagttggcctgcaacacattggtggccaccgtgatgagtaacctcgggctgcacctagccatgcgctcggccggcgtcaccgtgcgtacaaccgccgtcggtgaccgctacgtcctcgaagagctgcgggccggtgactacagcctcggaggcgaacaatccggccacatcgtcatgccggcgctgggctccaccggtgacggcatcgtcaccgggctgcggttgatgacccgcatggtgcagaccggctcgtcgttgtccgacctggcgtcggcgatgcggacgttgccgcaggtgctgatcaacgtcgaggttgtcgacaaggccaccgccgccgcggcgccctcggtccgaacggcggtcgagcaggccgcggccgagctgggtgacacgggtcgaatcctcttgcgcccgtccggaactgagccgatgattcgggtgatggtggaggcagccgacgagggcgtcgcccagcggctggcggccacggtcgccgacgcggtgagcaccgcgcgctga

SEQ ID NO: 6124 - protein, 448 aa, Mycobacterium bovis
MGRLFGTDGVRGVANRELTAELALALGAAAARRLSRSGAPGRRVAVLGRDPRASGEMLEAAVIAGLTSEGVDALRVGVLPTPAVAYLTGAYDADFGVMISASHNPMPDNGIKIFGPGGHKLDDDTEDQIEDLVLGVSRGPGLRPAGAGIGRVIDAEDATERYLRHVAKAATARLDDLAVVVDCAHGAASSAAPRAYRAAGARVIAINAEPNGRNINDGCGSTHLDPLRAAVLAHRADLGLAHDGDADRCLAVDANGDLVDGDAIMVVLALAMKEAGELACNTLVATVMSNLGLHLAMRSAGVTVRTTAVGDRYVLEELRAGDYSLGGEQSGHIVMPALGSTGDGIVTGLRLMTRMVQTGSSLSDLASAMRTLPQVLINVEVVDKATAAAAPSVRTAVEQAAAELGDTGRILLRPSGTEPMIRVMVEAADEGVAQRLAATVADAVSTAR

SEQ ID NO: 6125 - DNA, 1392 bp, Mycobacterium leprae
  CDS (1)..(1392): transl_table=11
atgggtcgactattcggcactgatggtgttcgcggagtggccaatcgtgagttgacccctgagctcgtgctggccctaggcgcggcggcggcacggtgcttggccaactcgggcgaaccggggcggcgggtagccgtgatcggtcgcgatccgcgggccagcggtgagatgcttgaggccgctgtcatcgctggcctgaccagtgcgggtgttgacgcactgcgggttggagtgctcccgacacctgcggtggcgtatctgaccggtgcctacgacgccgacttcggggtgatgatttcggcgtcccacaacccgatggtcgacaacggcatcaagatcttcgggccgggcggtcataaattggacgacgacaccgaagaccagatcgaagacctggttaccggcgggcccgggttgcgcccggccggcgtggcgatcggtcgcgtcatcgacgccgaggatgctacggaacgttacttgcgccacgtgggcaaagccagcaccatacggctcgacggcttgacggtggtcgtcgactgcgcacatggcgcggcctcgtcagcggcaccgcgcgcgtatcgcgcagccggtgcccgggtcatcgcgatcaacgccgatcccaacggcatcaacatcaacgatcgctgtggatctacggacctgggttcgttgcgttcagcggtgcttgcccaccgtgctgacctaggcctggcgcacgacggagacgccgaccggtgtcttgccgttgatgctaatggtgatctcgtcgacggcgacgccatcatggtcgtgcttgcgcttgcgatgcaagaagccggcgaactgtcttccaacactttggtgactaccgtgatgagcaatctggggctgcacctggccatgcgttcggtcggcgtcatcgtgcgtacaaccgacgtcggcgaccgttatgtcttggaggagttgcgcgctggtgactttagtctcggcggcgagcaatccggccatatcgtgatgcccgcattgggctccaccggagacggtatcatcactgggttgcgattgatgacccgcatggtgcagaccagctcttcgctggctgccctcgcgtcggcgatgcgggcgttgccgcaggtgttaatcaatgtcgaggttgcagacaaaaccactgctgccgctgcgcctttagtgcagacggcggtcgagactgctgaggtcgaattggggaatacaggtcgaatcctgttgcgtccctcaggaactgagccgatgatccgggtcatggtggaggcagccgaagaagatgtcgcgcaccgagtggcgacgcgagtcgctgcagcggtgagtgctcaggggtcacctctccgatgctggaaccccgacgcgatatcgggcgtcgaattaagattatga

SEQ ID NO: 6126 - protein, 463 aa, Mycobacterium leprae
MGRLFGTDGVRGVANRELTPELVLALGAAAARCLANSGEPGRRVAVIGRDPRASGEMLEAAVIAGLTSAGVDALRVGVLPTPAVAYLTGAYDADFGVMISASHNPMVDNGIKIFGPGGHKLDDDTEDQIEDLVTGGPGLRPAGVAIGRVIDAEDATERYLRHVGKASTIRLDGLTVVVDCAHGAASSAAPRAYRAAGARVIAINADPNGININDRCGSTDLGSLRSAVLAHRADLGLAHDGDADRCLAVDANGDLVDGDAIMVVLALAMQEAGELSSNTLVTTVMSNLGLHLAMRSVGVIVRTTDVGDRYVLEELRAGDFSLGGEQSGHIVMPALGSTGDGIITGLRLMTRMVQTSSSLAALASAMRALPQVLINVEVADKTTAAAAPLVQTAVETAEVELGNTGRILLRPSGTEPMIRVMVEAAEEDVAHRVATRVAAAVSAQGSPLRCWNPDAISGVELRL

SEQ ID NO: 6127 - DNA, 1335 bp, Mycobacterium paratuberculosis
  CDS (1)..(1335): transl_table=11
atgggtcgactattcggcaccgacggcgtgcgcggggtcgccaatcgcgagttgaccgctgagctggcgctggcgctgggcgccgcggcggcgcggcagctggccagcgggtccgcgccgggccggcgggtcgcggtgatcggccgcgatccgcgcgccagcggcgagatgctggaggccgcggtgatcgccgggctgaccagtcaaggcgtcgacgcgctgcgggtgggggtgctgcccacccccgcggtcgcctacctgaccggcgcctacgacgccgacttcggggtgatgatctcggcgtcgcacaacccgatgcccgacaacggcatcaagatcttcggccctggcggccacaagctcgacgacggcaccgaggaccggatcgaagccctggtcggggacgccgggccgcggccggtcggcgcgggcatcggccgggtgatcgacgccgaggatgccgccgaccgctacctgcgccacctgagcaaggccagcacgctgcgcctggacgggctgaccgtggtggtcgactgcgcgcacggcgcggcctccgccgtggccccgcgcgcctaccgcgcggccggcgcgcgggtgatcgcgatcaacgccgaccccaacgggctcaacatcaacgacaactgcgggtcgacgcatctggattcgctgcgcgccgccgtcgtcgcccaccgcgccgacctgggcctggcgcacgacggggacgccgaccgctgccttgccgtcgacgccgacggcaacttggtcgacggcgaccacatcatggtggtgctcgcgctggcgatgcgtgaggccggcgagctggcgtccgacacgttggtgaccaccgtgatgagcaacctgggactgcacctggcgatgaggtcggccggaatcacggtgcgcaccaccggtgtcggcgaccgctacgtggtcgaggagctgcgcgccggtgacttcagcctgggcggtgagcagtccgggcacatcgtgatgcccgcgctgggctcgaccggcgacggcatcgtcaccgggctgcggttgatgacgcgcatggcgcagaccggctcgccgctgtccgatctggcgtcggcgatgcagacgctgccccaggtgctgatcaacgtgacggtcgccgacaaggccaccgccgccaccgcaccgtcggtgcagaccgccgtcggccaggccgcggccgaactgggcgacaccggccggatcctgttgcgcccgagcggaaccgagccgatgatccgcgtcatggtggaagcgcccgagaaagacatcgcgcagcgactcgccacccgggtcgccgaggcggtcagcgccgcgcgctga

SEQ ID NO: 6128 - protein, 444 aa, Mycobacterium paratuberculosis
MGRLFGTDGVRGVANRELTAELALALGAAAARQLASGSAPGRRVAVIGRDPRASGEMLEAAVIAGLTSQGVDALRVGVLPTPAVAYLTGAYDADFGVMISASHNPMPDNGIKIFGPGGHKLDDGTEDRIEALVGDAGPRPVGAGIGRVIDAEDAADRYLRHLSKASTLRLDGLTVVVDCAHGAASAVAPRAYRAAGARVIAINADPNGLNINDNCGSTHLDSLRAAVVAHRADLGLAHDGDADRCLAVDADGNLVDGDHIMVVLALAMREAGELASDTLVTTVMSNLGLHLAMRSAGITVRTTGVGDRYVVEELRAGDFSLGGEQSGHIVMPALGSTGDGIVTGLRLMTRMAQTGSPLSDLASAMQTLPQVLINVTVADKATAATAPSVQTAVGQAAAELGDTGRILLRPSGTEPMIRVMVEAPEKDIAQRLATRVAEAVSAAR

SEQ ID NO: 6129 - DNA, 1362 bp, Mycobacterium smegmatis
  CDS (1)..(1362): transl_table=11
atggctcgactgttcggcaccgatggcgtgcgcggtgtcgccaaccgcgacctgaccgctgaactggcactggccctcggctcggcggcggcgcggcgcctcagcaccatcaccactgccaccgccaccgactcggccgaacgtgcccgccgcgtggccgtcgtgggacgcgatccccgcgccagcggcgagatgctggaggccgccgtgatcgccggcctgaccagcgaaggtgtcgacgcccttcgggtcggtgtgttgcccacccccgcggtcgcctacctgacgagcgcctacgacgccgacttcggcgtgatgatctcggcgtcgcacaacccgatgcccgacaacggcatcaagatcttcggccccggcggccacaaactcgacgacgccaccgaggaccgcatcgaggaactcgtccacgcgggtgccgtggcccggcccaccggtacgggcatcggccgtgtgctggacgccgaggacgcgctggaccggtacctgcgccacgccggcaaggccgtcacgacgcgcctcgacggcctgaccgtcgtcgtcgactgcgcgcacggtgccgcgtgggctgccgcgccgcgggcctaccgtgccgccggtgccaacgtcatcgcgatcaacgccgaaccgaccggcctgaacatcaacgacaactgcggatccacccacatggatgtggtgcgggccgcggtcgtcgaacacggcgccgatctggggctggcccatgacggcgacgccgaccgctgcctggccgtcgacgcgaccggccatgtggtcgacggcgacgcgatcatggtgatcctggccctggccatgcaggaggccggtgagctggccgccaatacgctggtcgcgaccgtgatgagcaatctcggcctgcacctcgcgatgcgcgcggcagggatcgacgtccgcaccacgagcgtcggcgaccggtatgtgctcgaggaactgcggtccggtgagttctcgctgggcggtgagcagtccggccacatcgtgatgccgagcttcggcaccaccggcgacggcatcgtcacgggcctgcgcctgatgtcgcgcatggcccagaccgggtcgtcgctcgccgaactcgccgacgccatgcattcgctgccgcaggtgctgatcaacgtcgcggtcgccgacaagaccacggttgcgcaggcaccgtcggtgcggtcggccgtggccgccgccgaggccgaactgggtgacaccggacggatcctgttgcgcccgtccggaaccgagcaggtggtgcgggtcatggtcgaggcggccgacgaggacaccgcacgccaggtcgcggcgcgggtcgccgaatccgtgagtctgcagggatag

SEQ ID NO: 6130 - protein, 453 aa, Mycobacterium smegmatis
MARLFGTDGVRGVANRDLTAELALALGSAAARRLSTITTATATDSAERARRVAVVGRDPRASGEMLEAAVIAGLTSEGVDALRVGVLPTPAVAYLTSAYDADFGVMISASHNPMPDNGIKIFGPGGHKLDDATEDRIEELVHAGAVARPTGTGIGRVLDAEDALDRYLRHAGKAVTTRLDGLTVVVDCAHGAAWAAAPRAYRAAGANVIAINAEPTGLNINDNCGSTHMDVVRAAVVEHGADLGLAHDGDADRCLAVDATGHVVDGDAIMVILALAMQEAGELAANTLVATVMSNLGLHLAMRAAGIDVRTTSVGDRYVLEELRSGEFSLGGEQSGHIVMPSFGTTGDGIVTGLRLMSRMAQTGSSLAELADAMHSLPQVLINVAVADKTTVAQAPSVRSAVAAAEAELGDTGRILLRPSGTEQVVRVMVEAADEDTARQVAARVAESVSLQG

SEQ ID NO: 6131 - DNA, 1377 bp, Myxococcus xanthus
  CDS (1)..(1377): transl_table=11
atgcctccgaaggaggcgcaggcttcgcagaagctgttcggcacggatggtgttcgcgggaaggcgaacgtctatcccatgactgccgaggtcgcgatgcagctcgggcgggcgctcgcgttcctcatccgcaacggcccgcaccgccaccgcgtcatcgttggcaaggacacgcggctgtccggctacatgttggagcaggcgctggcctccggcctcacctccatgggcgtggacgtggagctcgtcgggccgctgccgaccccgggcatctccaacatcaccacctccatgcgggcggacgcgggcgccgtcatctccgcgtcccacaacccctacgaggacaacggcatcaagttcttctggcgcgacggtttcaagctgccggacgagacggaaggcaagattgaggagctggtgtccagcggctccatcgactccatccggcccacggccacgaagattggccgggccttccgcatggaggacgcgcggggccgctacatcgtcttcctgaaggccaccttcccgcgcgagctgacgctggaggggatgaccatcgtcgtcgactgcgccaacggcgcggcctacaagacggcgcccgccgtgctggaggagctgggcgccaaggtgattgcgctcggcgtttcgccggacggcaagaacatcaaccacaagtgtggcgccctctatccggagaacctggccaagacggtggtgaagcacggcgcgcacctgggcatcgccctggacggtgacgccgaccgcctcatcgtcgtggacgagaagggcaaggtcgtcgacggcgacgccatcatggccatctgcacgggcgagctggtggcccgcaagcaactgaagaagaagatgttggtctccacggtgatgagcaacatcggcctggagcgcgcggtggcgcgctggggcgtgaaggtggctcgcacgcgcgtgggtgaccgctacgtcgtcgatgagatgcgccgcaatggctacaacctgggcggcgagcagagcggccacctcatcttcctggatcacaccaccacgggtgacggaaccctggcggcgctccagttgctggcggtgatgtgccgggcgggcaagcccctgagcgagctggcctccatcttcgagcccgtgccccagacgctggtcaacgtcgtcgtgaagcagaagaaggagctgggcgagctcccgacggtgatgaaggtcatcaagagcgtggagcagcggctgggcaacaccggccgggtgctggtgcgcttctctggcaccgagcccaaggcccgcgtcctcatcgagggcgaggacgccgcccgcaaccaggcctacgcgaaggaaatcgcggacgcgctgtccaaggccctcagcgtctga

SEQ ID NO: 6132 - protein, 458 aa, Myxococcus xanthus
MPPKEAQASQKLFGTDGVRGKANVYPMTAEVAMQLGRALAFLIRNGPHRHRVIVGKDTRLSGYMLEQALASGLTSMGVDVELVGPLPTPGISNITTSMRADAGAVISASHNPYEDNGIKFFWRDGFKLPDETEGKIEELVSSGSIDSIRPTATKIGRAFRMEDARGRYIVFLKATFPRELTLEGMTIVVDCANGAAYKTAPAVLEELGAKVIALGVSPDGKNINHKCGALYPENLAKTVVKHGAHLGIALDGDADRLIVVDEKGKVVDGDAIMAICTGELVARKQLKKKMLVSTVMSNIGLERAVARWGVKVARTRVGDRYVVDEMRRNGYNLGGEQSGHLIFLDHTTTGDGTLAALQLLAVMCRAGKPLSELASIFEPVPQTLVNVVVKQKKELGELPTVMKVIKSVEQRLGNTGRVLVRFSGTEPKARVLIEGEDAARNQAYAKEIADALSKALSV

SEQ ID NO: 6133 - DNA, 1338 bp, Neisseria gonorrhoeae
  CDS (1)..(1338): transl_table=11
atgatggcaaaaaaatatttcggcacggacggcgtgcgcggcgaagtcggtcagtttccgattacgcccgattttgtattgaaactcggctatgcggcggggcaggtgctggtgcagcacgataccgatcagaaaccgaccgtcctcatcggcaaagacacgcgcatttcaggctatatgctggaagccgcgctggtagcgggctttacggcggcgggtgtgaatgtggtacagaccgggccgttgcccacgcccggtgtggcttatctgacccgcgcattgcgcctgtccgccggcgtgatgatttccgcgtcgcacaacacctattccgacaacggcatcaaattctttgccgaaggcggcgtgaaactttccgatgaagtcgagttggaaatcgaagccaaaatcgatgaagaaatgaaaacccaaccgtccgcacgtctcggacgcgcccgccgcatcagcggtgcggacgaccgctatatcgagttttgcaaatccaccttccccggccattccgaccttcggggtttgaagttggttatcgataccgccaacggtgcaggatacggcgttgcacccaaagtgttccacgaactcggcgcacaggtcgtcagcatcggcaacgaacccaacggctacaacatcaacgaaaaatgcggcgcgacccataccaaaaccctccaagccgccgtgttgcaaaacgaagccgattacggtattgccttggacggcgatggcgaccgcctgatgatggtcgataaaaacaggcaggtttacgacggcgacagcctgatttacgtcatcgccaaagcccgcgcccgagaaggtatcaacatcggcggcgtggtcggaacggtcatgaccaatatggcgatggaaatcgccctgaaagagcagggcgtcgatttctgccgcgccaaagtcggcgaccgctatgtgttggaacagctgaaccaacgcggctggctcatcggcggcgaagccagcggccatattttgtgcatggacaaacataacaccggcgacggcattatttccgcgctgcaagtcttggcggcgctgcaaatcctgaaccaagacctcgccaccgtttgcgccgactggcagccgtatccgcaaacgatgattaacgtgcgcatccaaaagggtcagaaatggcaggaggcttcgaaagacgtgttggccgaagtggaaaaagaactcgaaggcaaagggcgtgtcgtgttgcgcgcttcgggaaccgaacccgtcgtgcgcgtgatggtcgaggcgcgtcaggccgattgggcgcgcgacggggcggagcgtatcgccgccgccatcggcggcatttag

SEQ ID NO: 6134 - protein, 445 aa, Neisseria gonorrhoeae
MMAKKYFGTDGVRGEVGQFPITPDFVLKLGYAAGQVLVQHDTDQKPTVLIGKDTRISGYMLEAALVAGFTAAGVNVVQTGPLPTPGVAYLTRALRLSAGVMISASHNTYSDNGIKFFAEGGVKLSDEVELEIEAKIDEEMKTQPSARLGRARRISGADDRYIEFCKSTFPGHSDLRGLKLVIDTANGAGYGVAPKVFHELGAQVVSIGNEPNGYNINEKCGATHTKTLQAAVLQNEADYGIALDGDGDRLMMVDKNRQVYDGDSLIYVIAKARAREGINIGGVVGTVMTNMAMEIALKEQGVDFCRAKVGDRYVLEQLNQRGWLIGGEASGHILCMDKHNTGDGIISALQVLAALQILNQDLATVCADWQPYPQTMINVRIQKGQKWQEASKDVLAEVEKELEGKGRVVLRASGTEPVVRVMVEARQADWARDGAERIAAAIGGI

SEQ ID NO: 6135 - DNA, 1335 bp, Neisseria meningitidis serogroup A
  CDS (1)..(1335): transl_table=11
atggcaaaaaaatatttcggcacggacggcgtgcgcggcgaagtcgggcagtttccgattacgcccgattttgtattgaaactcggctatgcggcgggtcaggttttggttcagcacgacaccgaccagaaaccgaccgtcctcatcggcaaagacacgcgcatttccggctatatgctggaagccgctttggtggcaggttttacggcggcgggtgtgaatgtggtacagaccggaccgctgcccacgcccggcgtggcttatctgacccgcgcgttgcgcctgtccgccggcgtgatgatttccgcgtcgcacaacgcctattccgacaacggcatcaaattctttgccgagggcggcgtgaaactgagcgatgaaatcgagttggaaatcgaagccaaaatcgacgaagaaatgaaaacccagccttctgcacgcctcggtcgcgcacgccgcatcagtggtgcggacgaccgctatatcgaattttgcaaatctacctttcccagccattccgaccttcggggtttgaagttggttatcgatactgccaacggcgcggggtacggtgtcgcacccaaggtgtttcacgaactgggcgcacaagtcgtcagcatcggcgacgaacccaacggctacaatatcaatgaaaaatgcggtgcgacttataccaagacactccaggcagccgttttacagcatgaagccgactacggtatcgccttagacggcgacggagaccgcctgatgatggtcgataaaaacggtaaggtttacgacggcgacagcctgatttacgtcattgctaaagcccgcgcccgagaaggtatcaacatcggcggcgtggtcggcacggtcatgaccaatatggcgatggaaatcgccctgaaagagcagggcgtggatttctgccgcgccaaagtcggcgaccgctatgtgttggaacagctgaaccaacgcagctggctcatcggcggcgaagccagcggccatattttgtgcatggacaaacacaacaccggcgacggcattatttccgcgctgcaagttttggcggcactgcaaacgctgaaccaagacctcgccaccgtttgcgccgattggcagccgtatccgcaaactatgattaacgtgcgcatccaaaaaggtcagaaatggcaggaagcctcaaaagacgtgttggcggaagtggaaaaagaactcgaaggcaaagggcgtgtcgtgttgcgcgcttcgggaaccgaacccgtcgtgcgagtgatggttgaggcgcggcaggcggattgggcgcgcgacggtgcggaacgtattgcttccgccatcggcagcctttag

SEQ ID NO: 6136 - protein, 444 aa, Neisseria meningitidis serogroup A
MAKKYFGTDGVRGEVGQFPITPDFVLKLGYAAGQVLVQHDTDQKPTVLIGKDTRISGYMLEAALVAGFTAAGVNVVQTGPLPTPGVAYLTRALRLSAGVMISASHNAYSDNGIKFFAEGGVKLSDEIELEIEAKIDEEMKTQPSARLGRARRISGADDRYIEFCKSTFPSHSDLRGLKLVIDTANGAGYGVAPKVFHELGAQVVSIGDEPNGYNINEKCGATYTKTLQAAVLQHEADYGIALDGDGDRLMMVDKNGKVYDGDSLIYVIAKARAREGINIGGVVGTVMTNMAMEIALKEQGVDFCRAKVGDRYVLEQLNQRSWLIGGEASGHILCMDKHNTGDGIISALQVLAALQTLNQDLATVCADWQPYPQTMINVRIQKGQKWQEASKDVLAEVEKELEGKGRVVLRASGTEPVVRVMVEARQADWARDGAERIASAIGSL

SEQ ID NO: 6137 - DNA, 1335 bp, Neisseria meningitidis serogroup B
  CDS (1)..(1335): transl_table=11
atggcaaaaaaatatttcggcacggacggcgtgcgcggcgaagtggggcaatttccgattacgcccgatttcgtattgaaactcggctatgcggcggggcaggttttggtgcagcacgacaccgaccagaaaccgaccgtcctcatcggcaaagacacgcgcatttccggctatatgctggaagccgctttggtggccggttttacggcggcgggtgtgaatgtggtacagaccggaccgctgcccacgcccggcgtggcttatctgacccgcgcgttgcgcctgtccgccggcgtgatgatttccgcgtcgcacaacgcctattccgacaacggcatcaaattcttcgccgaaggcggcgtgaaactttccgatgaagtcgagttggaaatcgaagccaaaatcgacggcgaaatgaaaacccaaccgtccgcccgtctcggtcgcgcacgccgcatcagcggtgcggacgaccgctatatcgaattttgcaaatccacctttcccagccattccgaccttcggggtttgaagttggttgtcgataccgccaacggcgcggggtacggtgtcgcccccaaggtgtttcacgaactgggcgcacaggtcgtcagcatcggcaacgaacccaacggctacaacatcaacgaaaaatgcggtgcgacttataccaagacactccaggccgccgttttacagcatgaagccgactacggcatcgccttagacggcgacggcgaccgcctgatgatggtcgataaaaacgggcaggtttacgacggcgacagcctgatttacgtcattgccaaagcccgcgcccgagaaggtatcaacatcggcggcgtggtcggcacggtcatgaccaatatggcgatggaaatcgccctgaaagagcagggcgtggatttctgccgcgccaaagtcggcgaccgctatgtgttggaacagctgaaccaacgcggctggctcatcggcggcgaagccagcggccatattttgtgtatggacaaacacaacaccggcgacggcattatttccgcgctgcaagttttggcggcactgcaaacgctgaaccaagacctcgccaccgtttgcgccgattggcagccgtatccgcaaacgatgattaacgtgcgcatccaaaaaggtcagcaatggcaggaagcttcgaaagacgtgttggcggaagtggaaaaagaactcgaaggcaaagggcgtgtcgtgttgcgcgcttcgggaaccgaacccgtcgtgcgcgtgatggtggaggcgcggcaggcggattgggcgcgcgaaggggcggaacgcattgccgccgccatcggcggcatttag

SEQ ID NO: 6138 - protein, 444 aa, Neisseria meningitidis serogroup B
MAKKYFGTDGVRGEVGQFPITPDFVLKLGYAAGQVLVQHDTDQKPTVLIGKDTRISGYMLEAALVAGFTAAGVNVVQTGPLPTPGVAYLTRALRLSAGVMISASHNAYSDNGIKFFAEGGVKLSDEVELEIEAKIDGEMKTQPSARLGRARRISGADDRYIEFCKSTFPSHSDLRGLKLVVDTANGAGYGVAPKVFHELGAQVVSIGNEPNGYNINEKCGATYTKTLQAAVLQHEADYGIALDGDGDRLMMVDKNGQVYDGDSLIYVIAKARAREGINIGGVVGTVMTNMAMEIALKEQGVDFCRAKVGDRYVLEQLNQRGWLIGGEASGHILCMDKHNTGDGIISALQVLAALQTLNQDLATVCADWQPYPQTMINVRIQKGQQWQEASKDVLAEVEKELEGKGRVVLRASGTEPVVRVMVEARQADWAREGAERIAAAIGGI

SEQ ID NO: 6139 - DNA, 1335 bp, Neisseria meningitidis serogroup C
  CDS (1)..(1335): transl_table=11
atggcaaaaaaatatttcggcacggacggcgtgcgcggcgaagtcgggcagtttccgattacgcccgattttgtattgaaactcggctatgcggcgggtcaggttttggttcagcacgacaccgaccagaaaccgaccgttttaatcggcaaggatacgcgtatttccggttatatgttggaagccgctttggtggcaggttttacggcggcgggtgtgaatgtggtacagaccggaccgctgcccacgcccggcgtggcttatctgacccgcgcgttgcgcctgtccgccggcgtgatgatttccgcgtcgcacaatgcctattccgacaacggcatcaaattcttcgccgaaggcggcgtgaaactttccgatgaagtcgagttggaaatcgaagccaaaatcgacggcgaaatgaaaaccctcccgtccgcccgcctcggtcgcgcacgccgcatcagcggtgcggacgaccgctatatcgaattttgcaaatccacctttcccagccattccgaccttcggggtttgaagttggttatcgatactgccaacggcgcggggtacggtgtcgcacccaaggtgtttcacgaactgggcgcacaagtcgtcagcatcggcgacgaacccaacggctacaatatcaatgaaaaatgcggtgcgacttataccaagacactccaggcagccgttttacagcatgaagccgactacggcatcgccttagacggcgacggagaccgcctgatgatggtcgataaaaacggtaaggtttacgacggcgacagcctgatttacgtcattgctaaagcccgcgcccgagaaggtatcaacatcggcggcgtggtcggcacggtcatgaccaatatggcgatggaaatcgccctgaaagagcagggcgtggatttctgccgcgccaaagtcggcgaccgctatgtgttggcacagctgaaccaacgcagctggctcatcggcggcgaagccagcggccatattttgtgcatggacaaacacaacaccggcgacggcattatttccgcgctgcaagttttggcggcactgcaaacgctgaaccaagacctcgccaccgtttgcgccgattggcagccgtatccgcaaacgatgattaacgtgcgcatccaaaaaggtcagaaatggcaggaagcctcaaaagacgtgttggcggaagtggaaaaagaactcgaaggcaaagggcgtgtcgtgttgcgcgcttcgggaaccgaacccgtcgtgcgtgtgatggtggaggcgcggcaggcggattgggcgcgcgacggtgcggaacgtattgcttccgccatcggcagcctttag

SEQ ID NO: 6140 - protein, 444 aa, Neisseria meningitidis serogroup C
MAKKYFGTDGVRGEVGQFPITPDFVLKLGYAAGQVLVQHDTDQKPTVLIGKDTRISGYMLEAALVAGFTAAGVNVVQTGPLPTPGVAYLTRALRLSAGVMISASHNAYSDNGIKFFAEGGVKLSDEVELEIEAKIDGEMKTLPSARLGRARRISGADDRYIEFCKSTFPSHSDLRGLKLVIDTANGAGYGVAPKVFHELGAQVVSIGDEPNGYNINEKCGATYTKTLQAAVLQHEADYGIALDGDGDRLMMVDKNGKVYDGDSLIYVIAKARAREGINIGGVVGTVMTNMAMEIALKEQGVDFCRAKVGDRYVLAQLNQRSWLIGGEASGHILCMDKHNTGDGIISALQVLAALQTLNQDLATVCADWQPYPQTMINVRIQKGQKWQEASKDVLAEVEKELEGKGRVVLRASGTEPVVRVMVEARQADWARDGAERIASAIGSL

SEQ ID NO: 6141 - DNA, 1338 bp, Neisseria subflava
  CDS (1)..(1338): transl_table=11
atggcaaaaaaatatttcggcacggacggcgtgcgcggcgaagtcggtcaattcccgattacccccgatttcgtattgaagctcggttatgcggcggggcaggtgttggtgcagcatgacggcgggcagaagccgactgtccttatcggcaaagacacgcgtatttccggctacatgcttgaagccgcgctggtggctggttttaccgccgcgggtgtcaacgtcattcaaaccggcccgctgcctacgccgggtgtggcttatctgacccgtgcgctgcgtttgtccgccggtgtgatgatttccgcgtcgcacaatgtatattccgacaacggcatcaaattcttcgctgaaggcggcgtgaagctgagcgatgaaatcgagttggaaatcgaagccaaaatcgacgaggaaatgaaaacccagccgtctgcccgcctcggacgcgcccgccgcatcaacggcgcggacgaccgctacatcgaattctgcaaatccaccttccccagccatttggatttgcgcggtctgaaattggtggtcgataccgcacatggcgcaggctatgacgttgcgcccaaagttttccacgaactcggcgcgcaagtcgtcagcatcggcgatgaacccaatggctacaacattaacgaaaaatgcggcgcgacccaccccaaagccttgcaggccgccgtattgcaaaacgaagccgactacggcatcgcgttggacggggatggcgaccgcctgatgatggtcgaccgcaacggtaaagtgtacgacggcgacagcctgatttacgtcatcgccaaagcccgcgcccgagaaggtatcaacatcggcggcgtggtcggtacggtcatgaccaatatggcgatggaaattgccctgaaagagcagggcgtcgatttctgccgcgccaaagtcggcgaccgctatgtgttggaacagctgaaccaacgcggctggctcatcggcggcgaagccagcggccatattttgtgtatggacaaacacaataccggcgacggcatcatctccgcgctgcaagttttggcggcactgcaaatgctgaaccaagacctcgccaccatttgcgccgattggcagccgtatccgcaaaccatgatcaacgtgcgcatccaaaaaggtcagaaatggcaggaagcctcgaaagacgtgttggcggaagtggaaaaagaactcgaaggcaaaggccgagtcgtgttgcgcgcatcgggtaccgaaccggtcgtgcgcgtcatggtagaagcgcgtcaggcggactgggcgaaaaaaggcgcggaacgcatcgcagcagccatcaccggtaagcagtaa

SEQ ID NO: 6142 - protein, 445 aa, Neisseria subflava
MAKKYFGTDGVRGEVGQFPITPDFVLKLGYAAGQVLVQHDGGQKPTVLIGKDTRISGYMLEAALVAGFTAAGVNVIQTGPLPTPGVAYLTRALRLSAGVMISASHNVYSDNGIKFFAEGGVKLSDEIELEIEAKIDEEMKTQPSARLGRARRINGADDRYIEFCKSTFPSHLDLRGLKLVVDTAHGAGYDVAPKVFHELGAQVVSIGDEPNGYNINEKCGATHPKALQAAVLQNEADYGIALDGDGDRLMMVDRNGKVYDGDSLIYVIAKARAREGINIGGVVGTVMTNMAMEIALKEQGVDFCRAKVGDRYVLEQLNQRGWLIGGEASGHILCMDKHNTGDGIISALQVLAALQMLNQDLATICADWQPYPQTMINVRIQKGQKWQEASKDVLAEVEKELEGKGRVVLRASGTEPVVRVMVEARQADWAKKGAERIAAAITGKQ

SEQ ID NO: 6143 - DNA, 1377 bp, Nitrosomonas europaea
  CDS (1)..(1377): transl_table=11
atgaagaaaaaatattttggtacggatggcattcgcgggaaggtgggagattttccgatcacaccggatttctttctgcgtctggggtacgctgtcggcaaggtgttgctggcttctgaccggcaactggctgcggataaacgaccaacagtgctgataggcaaagatacgcggatatcgggctatatgctggaatccgcactggaagccggtttctcggcagcaggcgtggatgtgctgctgtccgggccattgccgacaccggcagtggcttatctcgtccgggcgttgcgtatccaggcaggtgcagtcatttctgcttcacacaatccgtttgatgataatggcatcaagtttttttcttctgcaggctcaaaattgccagatagcatggagcttcagatcgaggctgaactggatcagcccatgaaaacgacaccttccatcaaattgggcagggtacaacgtctcagagatgccgccggcaggtatatcgaattctgcaaaagtacttttcccaatcagctcgatttgcgggggctgcgcatcgtagtcgattgtgccaatggcgcggactaccatattgccgggcatgtcatgcatgaactgggggccgatgtgataacgacccatgccagcccggatggcttcaacatcaattacgaatgtggagcgactcatatcgagacacttcagggttcaatcctgcagcataaggctgatatcggaattgccgtggatggtgatggtgaccgggtactgatggtcagcagggaaggggtgctgtacgatggcgacagcctggcttacatcattgccaaacaccggcaacagcttggtgagctgcaaggcggggtggccggaacactcatgaccaatctggcggtcgagcaggctttcgagcgactcgggattccatttgcccgggcaaatgtcggagatcgctatgtttccgagctgctgcagcaaaacgactggtatctgggcgccgagaattccggccatatcatctgccgggacaaacacacgacgggggatggcattatttcagccctccaggttttatatgcattgcgtgataccggcctgacactggctgattttatgcgtgatgttccctttttccctcaacgtctgatcaatgtaaaggtttccggaaattttgatttccgcagcaacccggcggttgcagcctgcaaaaatgaagcggaacaggcgctgggaaacgatggacgtattctcctgcgcgcttccggaacggagccgctgatcagggtcatggtggaaggaaaagtactgcaacagaccgattactgggcagaaaaaattgctgaaacgattcgccagcaggcagcttcttcgatgaccggaagctga

SEQ ID NO: 6144 - protein, 458 aa, Nitrosomonas europaea
MKKKYFGTDGIRGKVGDFPITPDFFLRLGYAVGKVLLASDRQLAADKRPTVLIGKDTRISGYMLESALEAGFSAAGVDVLLSGPLPTPAVAYLVRALRIQAGAVISASHNPFDDNGIKFFSSAGSKLPDSMELQIEAELDQPMKTTPSIKLGRVQRLRDAAGRYIEFCKSTFPNQLDLRGLRIVVDCANGADYHIAGHVMHELGADVITTHASPDGFNINYECGATHIETLQGSILQHKADIGIAVDGDGDRVLMVSREGVLYDGDSLAYIIAKHRQQLGELQGGVAGTLMTNLAVEQAFERLGIPFARANVGDRYVSELLQQNDWYLGAENSGHIICRDKHTTGDGIISALQVLYALRDTGLTLADFMRDVPFFPQRLINVKVSGNFDFRSNPAVAACKNEAEQALGNDGRILLRASGTEPLIRVMVEGKVLQQTDYWAEKIAETIRQQAASSMTGS

SEQ ID NO: 6145 - DNA, 1377 bp, Nocardia farcinica
  CDS (1)..(1377): transl_table=11
atgggacgtttgttcggcaccgacggtgtgcgcgggcttgccaacgggtcgttgagcccggagctggcgctgcgtgtgtcgggtgcggccgcacaggtgctcggccgggggaagacccgggcgctggcgctggtcggccgtgatccgcgcgcgtcgggggagatgctggaggccgcggtcacggccgggctcacggccgccggggtgaacgtgttgtcggtcggtgtgctgcccacacccgcggtcgcctacctcaccggcctgtacgacgcgtgcctcggcgtgatgatctccgcctcgcacaatcccatgccggacaacgggatcaagatcttcgccgcgggcgggcacaagctcgacgacgccgtcgaggaccgcatcgaagccctggtcgccgccgacgacccggtccgcccgaccggcgcgggcatcggccgcgtgctcaacgcctccggcgcgcgcgaccacggcctgcacattcccgaccagtacagcgtcgagggcacgcacgagcgctacgtcgagcacttggtcgaggccaccggccgggatctgagcgggctgaccgtcgtggtcgactgcgccaacggcgccgccgccgaggtcgggcccgccgcctaccgggaggcaggcgccacggtcatcgccatcaacgccgaacccgacgggctcaacatcaacgacggctgcggctccacgcacctcgaccaggtgcgccgggcggtcgtggagcacggtgccgacctgggcctggctcacgacggtgacgccgatcgctgcctggcggtggccgccgacggcagcgtcgtcgacggtgacgccatcctcgccgtgctggcgatcgcgatgaaggagtccggcgaactcgcccaggacaccctggtcgccaccgtcatgagcaatctggggctgcatctggcgatgcgggcggccggaatcgccgtgcgcaccaccgcggtcggcgaccgctacgtgctcgaggaactgcgcgcgggcggctacaccctcggcggcgaacagtccgggcacgtcgtgttccccaagtacggcaccaccggtgacggcgtgctgaccgggctcaagctgatggcgcggatggcgcagaccgggcgatcgctggccgatctggccggtgtgctgaccaccgtcccgcaggtgctggtgaacgtgccggtgagcgacaaggcggccgtcgccgcggcaccggatgtgcgcgaggccgtggccgacgccgaacgcgaactcggtgactcgggccggatcctgttgcgccccagtggaaccgagcagctggtccgggtgatggtggaggccaccgacccggtgaaggccgagcagttggccgccgatctggcgaagctggtcgcctcgctgtag

SEQ ID NO: 6146 - protein, 458 aa, Nocardia farcinica
MGRLFGTDGVRGLANGSLSPELALRVSGAAAQVLGRGKTRALALVGRDPRASGEMLEAAVTAGLTAAGVNVLSVGVLPTPAVAYLTGLYDACLGVMISASHNPMPDNGIKIFAAGGHKLDDAVEDRIEALVAADDPVRPTGAGIGRVLNASGARDHGLHIPDQYSVEGTHERYVEHLVEATGRDLSGLTVVVDCANGAAAEVGPAAYREAGATVIAINAEPDGLNINDGCGSTHLDQVRRAVVEHGADLGLAHDGDADRCLAVAADGSVVDGDAILAVLAIAMKESGELAQDTLVATVMSNLGLHLAMRAAGIAVRTTAVGDRYVLEELRAGGYTLGGEQSGHVVFPKYGTTGDGVLTGLKLMARMAQTGRSLADLAGVLTTVPQVLVNVPVSDKAAVAAAPDVREAVADAERELGDSGRILLRPSGTEQLVRVMVEATDPVKAEQLAADLAKLVASL

SEQ ID NO: 6147 - DNA, 1347 bp, Nocardioides sp
  CDS (1)..(1347): transl_table=11
atgacgcgcatcttcggcacggacggggtccggggcctggccaacggtcagctgaccgcggagctggccctggacctgtccgtcgccgcagcccgggtcctggccgaccggggcgagttcaaagggcaccgcccgctcgccgtcgtcggccgggacacgcgcatctcggggcagttcctcgagcacgccgtcgtggccgggctcgcctccgccggcgtggacgtgctccggctgcgggtgctgcccactcccgccgtcgcctacctgaccgaggcgctcggcgccgacctcggtgtcgtgatcagcgcctcgcacaacccgatgcccgacaacggcatcaagttcctcgcccgcggcgggcacaagctcgacgacgcggtcgagaagctcatcgagcagcacctcgccgaggagtgggaccggccggtgggcggtgacgtcgggcgggtgacgccgtacgccacgccggtcgaggagtacgtcgcgcacctggtcggcacgctcacccgctcgctggacggcatcaaggtcgtcctcgactgcgcccacggcgcggcgtacgaagccggcccccgcgcgctgcgcgccgccggcgcagaggtggtcgcgatcgcggtcgagccggacggcctgaacatcaacgccgactgcggctccacgcacctcgcggcgctgcaggccgccgtggtcgagcatggcgcggacgtcgggttcgcgctcgacggcgacgccgaccgctgcctggccgtcgaccacgagggcaacgccgtcgacggtgaccagatcctggcgatcctggccctcggcatggccgagaccggccacctggcgaagaacaccgtggtcgccaccgtcatgagcaacctcggcttcgtgcaggcgatgcgggccgccggcgtcggcgtgcgccagaccaaggtcggagaccgctacgtgctcgaggcgatgcgggtctccggctactccctcggcggcgagcagtccggccacgtgatcatgagcgagcacgccaccaccggcgacggcatcctcaccgcgctgcacgtcctgcagcggatggccgcgaccgggcagagcctgcagtcgctggcctcggtggtcacccggctgccgcaggtgctggtcaacgtgcccgacgtcgacaagagccgcgccgacgacgacgccgtgctcgccgccgccatcgcggaggaggaggccgcgctcggcgactccggccgggtgctgctgcgtccctccggcaccgagcagctggtgcgggtgatggtggaggccgcgacccaggaggaggcggtgtccgtcgccggacgcctggccgatgtcgtgaagcgacagctggccctctag

SEQ ID NO: 6148 - protein, 448 aa, Nocardioides sp
MTRIFGTDGVRGLANGQLTAELALDLSVAAARVLADRGEFKGHRPLAVVGRDTRISGQFLEHAVVAGLASAGVDVLRLRVLPTPAVAYLTEALGADLGVVISASHNPMPDNGIKFLARGGHKLDDAVEKLIEQHLAEEWDRPVGGDVGRVTPYATPVEEYVAHLVGTLTRSLDGIKVVLDCAHGAAYEAGPRALRAAGAEVVAIAVEPDGLNINADCGSTHLAALQAAVVEHGADVGFALDGDADRCLAVDHEGNAVDGDQILAILALGMAETGHLAKNTVVATVMSNLGFVQAMRAAGVGVRQTKVGDRYVLEAMRVSGYSLGGEQSGHVIMSEHATTGDGILTALHVLQRMAATGQSLQSLASVVTRLPQVLVNVPDVDKSRADDDAVLAAAIAEEEAALGDSGRVLLRPSGTEQLVRVMVEAATQEEAVSVAGRLADVVKRQLAL

SEQ ID NO: 6149 - DNA, 1338 bp, Novosphingobium aromaticivorans
  CDS (1)..(1338): transl_table=11
atggcacgcaagttcttcggcaccgatggcatccggggtcggaccaattccggtgtgatgactgccgaaatcgcgatgaaggtcggccaggctgccgggacctatttccagcgcggcacgcaccgccaccgcgtggtcatcggcaaggacacccgcctgtccggctacatgatggaaagcgcgatgaccgccggcttcacctcggtcggcatggacgtggtgctgctcggccccatgcccacgcccgctgtcgccatgctcacccgttcgatgcgcgcggacctcggcgtgatgatctcggccagccacaatccgttcgaggacaacggcatcaagctgttcggccccgatggctacaagctttccgacgaagccgaactgacgatcgaatccatgctcctgcaggagctgccgctggccgacgccgcgcaagtcggtcgggcacgccgcatcgaggacgcgcgtggccgctatatccatgcggtcaaggccagcctgcccgacaatgtccgcctcgacggcctgcgcatcgtcgtcgattgcgccaatggcgccgcataccacgtcacgccctccgcgctctgggaactcggcgccgaagtcatcgccatcggggtcgagcccaacggcaagaacatcaatgccggcgtcggctccacccatcttgacgcgatcaaggcaaaagtgcgcgaaacccgcgccgacatcggcatcgcgctcgatggcgacgccgaccgcctgattgtcgtcgacgagaaatgccagaccgtggacggcgaccagatcatggcgctgatcggaacccagcttgccgcccgcggcgaactgcgcggcggcggcgtggtcgcgaccgtcatgtccaacctcggacttgaacgacacctaaacgcacacggcctcaccctggaacgcaccgccgtcggcgatcgctacgttctggagcgcatgaggtcgggaggcttcaacgtcggcggcgaacagtcgggccacatgatcctgaccgaccacgccaccaccggggacggcaccgtcgccgcgctgcaagtcctcgccgcgctcgtctcctcgggcaagccggcaagcgaactgctccacctgttcgatccggtcccccagctgctcaagaacgtgcgctttaccgggggcaagccgctcgaggccaagtcggtgaaagaggcgattgccgaggccgaggcccgccttgccggcaagggccgcctcgtcatccgcccctccggcaccgaaccgctcatccgcgtcatggccgagggtgacgatgcggacgaagtcgaagcggtcgtcgaccagatctgcgacgccgtgcgaaaggccgcctga

SEQ ID NO: 6150 - protein, 445 aa, Novosphingobium aromaticivorans
MARKFFGTDGIRGRTNSGVMTAEIAMKVGQAAGTYFQRGTHRHRVVIGKDTRLSGYMMESAMTAGFTSVGMDVVLLGPMPTPAVAMLTRSMRADLGVMISASHNPFEDNGIKLFGPDGYKLSDEAELTIESMLLQELPLADAAQVGRARRIEDARGRYIHAVKASLPDNVRLDGLRIVVDCANGAAYHVTPSALWELGAEVIAIGVEPNGKNINAGVGSTHLDAIKAKVRETRADIGIALDGDADRLIVVDEKCQTVDGDQIMALIGTQLAARGELRGGGVVATVMSNLGLERHLNAHGLTLERTAVGDRYVLERMRSGGFNVGGEQSGHMILTDHATTGDGTVAALQVLAALVSSGKPASELLHLFDPVPQLLKNVRFTGGKPLEAKSVKEAIAEAEARLAGKGRLVIRPSGTEPLIRVMAEGDDADEVEAVVDQICDAVRKAA

SEQ ID NO: 6151 - DNA, 1341 bp, Oceanobacillus iheyensis
  CDS (1)..(1341): transl_table=11
atgggtaaattttttggaacagatggcgtgagaggagtagcaaacgaaggtctaacacctgagcttgcatttaagctcggacgttttggtggatatgtacttactaaagatagtgaaagaccacgtatattaattggacgagacacacgtgtttctggacatatgctagaaggtgctcttttagctggtctgttatccattggtgcggaggtaatgcgattaggagtcatttctactccaggggtcgcgtatttgacgaaggcaactagtgcacaagctggtgtgatgatttctgcttctcataatccagtagaagacaatggaattaaattctttgggccagatggctttaaactaacagacgcacaagaaaatgagattgaatcgctaatggagggcgaggataatttacctcgaccaacaggagcagatatcggggttgtcaatgattactttgaaggcggacagaagtatttatcttatcttaaagatacgattgataatgacttcgaaggaattcatattgcgattgattgtgctaacggcgcaacatctagtctggcgacgcatctttttgctgacctagaagcagacatttactctattggttcatctccagatggattaaatataaatgatggttttggatctacgcatccagagaaactacaagaattcgttgtagaaaaaaatgcagatattggtcttgcttttgatggagatggagatcgacttatcgctgttgatgaaaagggtaatttagttgatggggataaaatcatgtttatctgtgctaagtacatgcatgagatagggatgctgcgaaaagatacagtggtatctacagtaatgagtaatctcggcttttacaaagcgttagaaaatattggtctaaacagtaataagacctctgtcggtgacagatatgtaatggaagaaatgcgccaaaacggatataacttgggtggcgaacaatctggtcatataatattcctagattatattactactggtgacggtatgttatcagctattcaacttgttaatgtgatgcgtgaaacaggaaaacctttatccgaacttgctgatgaaatggttgttttccctcaagtgttaaagaatgttcgtgtaatggataagaaccaagctttaagtagctcagttctattagatgaagtagacgcagtagaaaaagaacttggtgaagatggtcgcgtgttagttagaccttctggtacagaaccattagtaagagtgatggtggaagccaagacaaaagaagaatgtgaacaatatgctgaccgaattgtctcggtaattgaacagcacttaggagcatag

SEQ ID NO: 6152 - protein, 446 aa, Oceanobacillus iheyensis
MGKFFGTDGVRGVANEGLTPELAFKLGRFGGYVLTKDSERPRILIGRDTRVSGHMLEGALLAGLLSIGAEVMRLGVISTPGVAYLTKATSAQAGVMISASHNPVEDNGIKFFGPDGFKLTDAQENEIESLMEGEDNLPRPTGADIGVVNDYFEGGQKYLSYLKDTIDNDFEGIHIAIDCANGATSSLATHLFADLEADIYSIGSSPDGLNINDGFGSTHPEKLQEFVVEKNADIGLAFDGDGDRLIAVDEKGNLVDGDKIMFICAKYMHEIGMLRKDTVVSTVMSNLGFYKALENIGLNSNKTSVGDRYVMEEMRQNGYNLGGEQSGHIIFLDYITTGDGMLSAIQLVNVMRETGKPLSELADEMVVFPQVLKNVRVMDKNQALSSSVLLDEVDAVEKELGEDGRVLVRPSGTEPLVRVMVEAKTKEECEQYADRIVSVIEQHLGA

SEQ ID NO: 6153 - DNA, 1335 bp, Pasteurella multocida
  CDS (1)..(1335): transl_table=11
atggcagaacgtaagtattttggtacagatggtgtccgcggcaaagtgggaacattcccaattacccctgattttgctttaaaattgggttgggctgccggcaaagtcttggcgacgcaagggtcaagaaccgtattaattggtaaagatacccgtatttcagggtatatgttggaatcagcacttgaagcgggtttagcggcggcagggctctcagcggcgttcaccggaccgatgccaactccggctattgcttatttaacacgcacatttcgtgcagaagcggggattgtcatctcggcatcgcacaacccttattatgataatggcattaagtttttttctgcccaagggacaaaattaccagatgatgtagaagaagcgattgaagctatgctggatgaaccgatggattgtgtcgaatctgcggagcttggtcgagcaagccggattaatgatgcggtaggacgttatattgagttttgtaaaggaacgtttcccgctcacctgagtttagaaaactataaaattgttgtggattgtgctcatggtgcaacctatcacattgcaccgaatgtaatgcgtgaactgggcgcagaagtgatagaaatcggtgctaagccaaatgggctgaatattaatgagaaatgtggtgccaccgatatcaaagcactgcaagagaaagtgcttgaagtgaaagccgatgtgggacttgcctatgatggtgatggagaccgtttaattatggttgaccatttaggcaataaagtcgatggtgatcaagttttatttattattgcgcgtgaagctttacgtgcaggtcatttaaaaggtggtgtggtgggcaccttaatgagtaatatgagtcttgaacttgcgttaaaacagttaggcattccgtttgttcgtgccaatgtgggtgaccgttatgtgttggagaaaatgcaagaaaaaggctggttattgggaggggaaaactccgggcatattattattttagataaaaacaccactggagatggcattattgcttccttagccgtattaagtgcgatggtacagcataacttatctttaaatgagttagccagtgctgtgccgcttttcccacaagtgttaattaatgtacgttttgctgggggagataatccactcgaaagcgctgcggtaaaagcagttgccgcagaggttgaaaaacgtttggcaggcaaagggcgcattttattacgtaagtcgggtactgaacctttaattcgagtcatggtagaatgtgaagatggtgcattagctcaacaatgtgcagaacagattgcggatgttgtgcgagctaactaa

SEQ ID NO: 6154 - protein, 444 aa, Pasteurella multocida
MAERKYFGTDGVRGKVGTFPITPDFALKLGWAAGKVLATQGSRTVLIGKDTRISGYMLESALEAGLAAAGLSAAFTGPMPTPAIAYLTRTFRAEAGIVISASHNPYYDNGIKFFSAQGTKLPDDVEEAIEAMLDEPMDCVESAELGRASRINDAVGRYIEFCKGTFPAHLSLENYKIVVDCAHGATYHIAPNVMRELGAEVIEIGAKPNGLNINEKCGATDIKALQEKVLEVKADVGLAYDGDGDRLIMVDHLGNKVDGDQVLFIIAREALRAGHLKGGVVGTLMSNMSLELALKQLGIPFVRANVGDRYVLEKMQEKGWLLGGENSGHIIILDKNTTGDGIIASLAVLSAMVQHNLSLNELASAVPLFPQVLINVRFAGGDNPLESAAVKAVAAEVEKRLAGKGRILLRKSGTEPLIRVMVECEDGALAQQCAEQIADVVRAN

SEQ ID NO: 6155 - DNA, 1359 bp, Pediococcus pentosaceus
  CDS (1)..(1359): transl_table=11
atgaaattaaagtattttggtactgacggagttcgaggaattgcaaatgaaacattgactccagaattagcgtttcaattaggccgtgctggtggttatgttttaactaagcatgctaaagatgatgaacaaccacgggttttagtttcaagagatacccgaatttcaggacaattgttaaaacatgcattgatctcaggcttactttcagtcggcattgaagttatggacatgggaattgttacaactcctggtgtggcttatcttgttcgtaaacaagaagctgacgctggtgtaatgattactgcttcacataatccggttcaagataacggaatcaagttctttggttcagatggttacaagctatcagatgaacttgaagctgaaatcgaagtacttttagatgctgataaagacaacttacctcgtccttcatctactggactaggttcagtgactgattatccagaaggtggattaaactatacggcctttcttgaacaaactattcccgatgacttggaaggtttgcatatcgcaattgatgctgctaatggagcaaccagtagctacgtttcacaaatatttgcggacttaaatactgagtttgatacgatggcaacaaatccagatggtttgaacatcaacgctggagttggttctactcatcctgaaggattggctaagtttgtggtcgaaaaaggcgctgatatgggagttgcttttgatggcgatggagaccgttgtattgccgttgatgaattaggtaatatcgttgacggtgacaagattatgtatatctgtggtaaattcttgagcgaacgcggacgtttgaaagacgatactgtggttacaaccgtgatgagtaatctaggactatataaggctctagaagctaatgatatgcactcggttaagacccaagttggtgaccgctatgtggttgaagaaatgcttaaagacggatataaccttggtggtgaacagtccggacacattgtcttcttagaccacaatactactggagatggtatgttaaccgccattcaattgatgtacgtggttaaacaaactggtaaaaagttgtctgagttagctgctgatgtgacaacttaccctcaaaaattagttaacgttcgagtacaagataagaagctagcacttgaaaatcaagcaattaaagatatcattgaaaaagttgaaaatgaaatgaacggtgaaggtcgagttctagtgcgcccttcagggactgaagacctacttcgtattatggccgaagctcctacaaaagaagcagttggtcaatatgttgatcgaattgttgctgtagttcaaagtgaagttggcgtggattaa

SEQ ID NO: 6156 - protein, 452 aa, Pediococcus pentosaceus
MKLKYFGTDGVRGIANETLTPELAFQLGRAGGYVLTKHAKDDEQPRVLVSRDTRISGQLLKHALISGLLSVGIEVMDMGIVTTPGVAYLVRKQEADAGVMITASHNPVQDNGIKFFGSDGYKLSDELEAEIEVLLDADKDNLPRPSSTGLGSVTDYPEGGLNYTAFLEQTIPDDLEGLHIAIDAANGATSSYVSQIFADLNTEFDTMATNPDGLNINAGVGSTHPEGLAKFVVEKGADMGVAFDGDGDRCIAVDELGNIVDGDKIMYICGKFLSERGRLKDDTVVTTVMSNLGLYKALEANDMHSVKTQVGDRYVVEEMLKDGYNLGGEQSGHIVFLDHNTTGDGMLTAIQLMYVVKQTGKKLSELAADVTTYPQKLVNVRVQDKKLALENQAIKDIIEKVENEMNGEGRVLVRPSGTEDLLRIMAEAPTKEAVGQYVDRIVAVVQSEVGVD

SEQ ID NO: 6157 - DNA, 1338 bp, Photorhabdus luminescens subsp
  CDS (1)..(1338): transl_table=11
atgagtaaccgcaaatactttggtaccgatggtatccgtggcaaagtgggagatagcccaattacgccagattttgtgttaaagcttggttgggctgcgggtaaggtactggctcgtcatggttctcgtaagatcattatcggtaaagatacccgtatttctggctatatgctggaatcttctttagaagcaggtttagctgcggctggtttatctgcttcgttcactggtcctatgccaacacctgctgttgcttatctgacccgaactttccgtgctgaagctggaattgttatctctgcttctcataatccttattatgataacggtattaaatttttctctattgatggtacgaaactgccggatgatgtggaagaagcgattgaagctgaaatggaaaagccactgacttgtgtggaatccgcagagttggggcgtgcaaatcgtattgttgatgctgctggtcgttatatcgaattctgtaaaggtacatttccaagtgagcaaagtcttaatggattgaaaattgtacttgattgcgctaacggtgcgacttaccacattgctccaaatgtactcagagaactaggggctgatgttgtgacgattggctgtgaaccaaacggtatcaatattaatgaaaagtgtggtgctaccgatgttcgtttgttgcagcaacgtgttgtagaagagaaagcagatgttggtttggcatttgatggtgatggtgatcgcgttattatggttgaccatttgggacagaaagttgatggcgaccagatcctttatattattgcccgtgaagcattgagacaaggacaactgcgtggtggcgttgttggtacgctgatgagtaatatgggattggagttagcattgaagcagcttggtatcccatttttgcgtgctaaagtgggtgaccgttatgtgctggaaaaattgcaggaagaaggctggcgtttaggggccgaaaactctggtcatgttatcttactggataaaacaactacaggtgacggcattgttgctggccttcagattctgagtgctatggtacgtaaccatatgagtttgcacgatctgtgtagtggtatgaaacttttgccacaggtactggtaaatgttcgtttctccggttcacacgatccacttaaatcggaaaatgtaattaatattactaaatctgttgaaactgaattaaatggtcgtggacgggtattattacgtaaatctggtactgagccattgattcgtgtcatggtagaaggtgaagatgatgtgcaagtcacggccttggctcatcgtattgctgatgcggtgaaacatgcgggctaa

SEQ ID NO: 6158 - protein, 445 aa, Photorhabdus luminescens subsp
MSNRKYFGTDGIRGKVGDSPITPDFVLKLGWAAGKVLARHGSRKIIIGKDTRISGYMLESSLEAGLAAAGLSASFTGPMPTPAVAYLTRTFRAEAGIVISASHNPYYDNGIKFFSIDGTKLPDDVEEAIEAEMEKPLTCVESAELGRANRIVDAAGRYIEFCKGTFPSEQSLNGLKIVLDCANGATYHIAPNVLRELGADVVTIGCEPNGININEKCGATDVRLLQQRVVEEKADVGLAFDGDGDRVIMVDHLGQKVDGDQILYIIAREALRQGQLRGGVVGTLMSNMGLELALKQLGIPFLRAKVGDRYVLEKLQEEGWRLGAENSGHVILLDKTTTGDGIVAGLQILSAMVRNHMSLHDLCSGMKLLPQVLVNVRFSGSHDPLKSENVINITKSVETELNGRGRVLLRKSGTEPLIRVMVEGEDDVQVTALAHRIADAVKHAG

SEQ ID NO: 6159 - DNA, 1353 bp, Propionibacterium acnes
  CDS (1)..(1353): transl_table=11
atggcacgactttttggaactgacggagtgcgcggtgtggctaatcaagacctcaccgccgagttggcccttgacctttcggtcgcggccgcgcacgttctgggcgaggcgggtgctttcggacaccgccaacctaccgcgctggtagcacgtgatcctcgcgcctccggcgaattcctcgaggccgctgtctgcgctgggttagccagcgccggtgttgacgtgttgcgcgtcggcgtgatcccgactcccgcagcggcctacctcgtcaatgagtaccgtactgatttgggcgtgatgctctcggcatctcacaaccccatgcctgataacggcatcaagttcttctcccgcggtggcgtgaaacttcccgacgatcttgaagacgccattgagcagcgtatgggtgagccgtgggctcgccctattggcgacaaggtaggacgtatccgctacaccccgcaggctgtcgacacctacgtcgaccacctggtgcgctcgctgcgccagcaagacaccctcaaggggatgaagattgtcctcgacaccgcaaacggtgcctccttccatacagcgacggctgccttcaccactcagggtgccgaggtcatcgcgatccatgaccagcccgatggcctcaacatcaatgaacggtgcggttccacccacccggagaagctgcaggccaaggttgttgaggttggggctgacatgggattggcctttgacggtgacgctgatcggtgcctggctgtcgaccacgaaggcaatatcgtcgatggggatcacatcatcgcgattctcgcgttggctttgcaggaggatcaccgtctggcctccaacaccgttgtcgcgacgatcatgagcaaccttggcctcatcatcgcaatgcgcgcgcacgatattcacgtcgatcagaccaaggtgggtgaccgctacgtcctcgagtcgatgaacgccaacgggttctcgctgggtggtgagcagtccgggcacgtcattatgagtgagttcgcaaccactggtgacggtgttcttaccggtttgcacctggctgcgcgcgtcgctcgtaccggcaagaccctcaaggagctcgcctcggtgatgacccgtctgccgcaggccctcatcaatgtgcgtggcgtcgacaagttgcgagctggtatcgatccagacgttaataaagcggttgctgacgctaaccagaaactcggcgacgccggtcgagtggtgttgcgtccgtcgggtactgagccggtcgtgcgggtcatggtcgaggctggtacccaggaggaagctgatcagatctgctctgagttggccgagaccgtcaaaatgagcctggcgttgtga

SEQ ID NO: 6160 - protein, 450 aa, Propionibacterium acnes
MARLFGTDGVRGVANQDLTAELALDLSVAAAHVLGEAGAFGHRQPTALVARDPRASGEFLEAAVCAGLASAGVDVLRVGVIPTPAAAYLVNEYRTDLGVMLSASHNPMPDNGIKFFSRGGVKLPDDLEDAIEQRMGEPWARPIGDKVGRIRYTPQAVDTYVDHLVRSLRQQDTLKGMKIVLDTANGASFHTATAAFTTQGAEVIAIHDQPDGLNINERCGSTHPEKLQAKVVEVGADMGLAFDGDADRCLAVDHEGNIVDGDHIIAILALALQEDHRLASNTVVATIMSNLGLIIAMRAHDIHVDQTKVGDRYVLESMNANGFSLGGEQSGHVIMSEFATTGDGVLTGLHLAARVARTGKTLKELASVMTRLPQALINVRGVDKLRAGIDPDVNKAVADANQKLGDAGRVVLRPSGTEPVVRVMVEAGTQEEADQICSELAETVKMSLAL

SEQ ID NO: 6161 - DNA, 1353 bp, Prochlorococcus marinus
  CDS (1)..(1353): transl_table=11
atgcaatcaatttttggaactgatggaataagaggaagatttaatgaagagataacttattctctagcttacaaagtaggatatgctctaggttcgactttagaaaaggaaaagccaattttaattggaagagatacaagaattagtggagatattctgcttcaagcgataacaagaggtcttaatgaaagtgggaaaaaatttataaatcttggaatctgccctaccccagctataccttatttaatcaaacaagagaatctgagtagcgggatcatgatatctgcaagtcataatccgccagaatataatggcataaaaatttttgatcatagtggtcaaaaaattactaaacattttgaaaataaaattcaaaaattaattgaagagttaaatcaaaatatatccgttcctagaaaagtgatccccctaaataaaaataaagatcttatggatatttatattaaaagtctaatccaaacaatggggggagaaaatctaagtggattaaaaataatattagacacatgccatggatcagcgacaacctgcgcaaaaaaaatttttcagtatcttggtgctgatgtaaaagttatcaataactctaaaaatggcttaaaaattaatatgaattgcggttctacaaaccttgagccattaaaaaaagcattgattgagagccctgcacatatgggttttagcttcgatggagatgccgatagagttattggaatagattcaaaaggcaatgtgttagatggtgatcacattctttttctttggggtagagaacttatggaacaaaaaattctcaccaataatttactaatatcaacacaaatggcaaacttaggttttgaaaaagcttgggaaaaaataggaggaattttatatagaactgatgtaggggataaatatgtgcgtgatgcaattaaggaaaaaagagctgtattaggaggtgaacagtcaggtcatatactttcaaaaattaataacttttctggagatgggatattgactgcactccaaatctgtaaatattgtaaaaagaaaaatattaatttaaatgattggctaaaaagtagctttgaaccttttcctcaaaaactaaccaatattaatttagattttaatattaataaattaaatccaaaaactaaaatcttaattgatcaaaccatagaaaattttcaggcaatatattcggataattgtagagtttatataagacctagcggcacagaacctgtaatgagagttctagttgaggccaaaaatcatgataaagttaattccttatcaagcgaaattacaaagaaacttttttcagaaattaataaaataataaattaa

SEQ ID NO: 6162 - protein, 450 aa, Prochlorococcus marinus
MQSIFGTDGIRGRFNEEITYSLAYKVGYALGSTLEKEKPILIGRDTRISGDILLQAITRGLNESGKKFINLGICPTPAIPYLIKQENLSSGIMISASHNPPEYNGIKIFDHSGQKITKHFENKIQKLIEELNQNISVPRKVIPLNKNKDLMDIYIKSLIQTMGGENLSGLKIILDTCHGSATTCAKKIFQYLGADVKVINNSKNGLKINMNCGSTNLEPLKKALIESPAHMGFSFDGDADRVIGIDSKGNVLDGDHILFLWGRELMEQKILTNNLLISTQMANLGFEKAWEKIGGILYRTDVGDKYVRDAIKEKRAVLGGEQSGHILSKINNFSGDGILTALQICKYCKKKNINLNDWLKSSFEPFPQKLTNINLDFNINKLNPKTKILIDQTIENFQAIYSDNCRVYIRPSGTEPVMRVLVEAKNHDKVNSLSSEITKKLFSEINKIIN

SEQ ID NO: 6163 - DNA, 1407 bp, Prochlorococcus marinus
  CDS (1)..(1407): transl_table=11
atggtctttactgctcttgaccctttaggtgttcccctcgggacggcccaggccagtttcggcacagatggcattcgcggtcgggtcggaacgttgttgacgcctgcgtttattttgcaggtgggctactggtgtggtcaggtgttgcctgatcaaggcccggtgttgatcgggatggattcccgtagcagtggggccatggtggcctcggcattgacggctggtttaaccgctgcaggtcgggaagtgtggaccttgggcctatgtcctacccccgcggtgcctggattaattcgcaagcttggcgctgcaggcggtttgatggtttcagcaagtcataacccacctgaagacaatggcatcaaggtgtttggggccgatggtgccaaactcagcccagcaaagcagggtctcatcgaagcggggcttcgcggcgaggccattggtgacaaaggtcgaccaacgatcacgagttgcggccctgcttatcagcgcgacgagctgcttagccactatcgcgatgccctgcttgcctcagtgctgcatcaacgcctggatggcgtgcccattgtgcttgatctctgctggggagcggcaacagcctgtggtgctgaggtgtttgcggcccttggggctgatctcactgtgttgcatggtgaaccggatggaagccgcatcaatgtcggttgtggttctacccagctcgagccgttgcgtcgagctgtgattgagcgcggcgcgatcatgggctttgcctttgatggggatgctgatcggatgctggctttggatggacagggtcgcgtcgtcgatggtgaccatgtgctctacctctggggatcagaccttcaggatcagcaggctttacctcaacaaaggcttgtggccacggtgatgtcgaatctcggctttgagagggcttggcagcaaagaggtggggttcttgaacgcacgccggtgggcgatcagcatgtctatgccgccatggtggagagcaatgcggctttaggtggtgaacagtctggccatatcctttcagcagctcatgggctttgtggtgatggtgtactcactgctttgcagcttgccaccctctgtcatggcagggggctgagtcttggtgagtggttggatcagagtttccaggcgttcccacaaaagttggtcaatgtgcgcgttcctgatttggaacgacgtatgggttggcagcattgtgagcctctgcaggaggcggtcttggcggcagaagcagccatgggtgaagacggcagagtcttggtaagggcgagtggaacggagccgttgttaagggtgatgattgaagcgtcggattctgctgccgtagagttctggacagtacagttggccgaccttgccgagcaacacctcaatcggggttgcgtttga

SEQ ID NO: 6164 - protein, 468 aa, Prochlorococcus marinus
MVFTALDPLGVPLGTAQASFGTDGIRGRVGTLLTPAFILQVGYWCGQVLPDQGPVLIGMDSRSSGAMVASALTAGLTAAGREVWTLGLCPTPAVPGLIRKLGAAGGLMVSASHNPPEDNGIKVFGADGAKLSPAKQGLIEAGLRGEAIGDKGRPTITSCGPAYQRDELLSHYRDALLASVLHQRLDGVPIVLDLCWGAATACGAEVFAALGADLTVLHGEPDGSRINVGCGSTQLEPLRRAVIERGAIMGFAFDGDADRMLALDGQGRVVDGDHVLYLWGSDLQDQQALPQQRLVATVMSNLGFERAWQQRGGVLERTPVGDQHVYAAMVESNAALGGEQSGHILSAAHGLCGDGVLTALQLATLCHGRGLSLGEWLDQSFQAFPQKLVNVRVPDLERRMGWQHCEPLQEAVLAAEAAMGEDGRVLVRASGTEPLLRVMIEASDSAAVEFWTVQLADLAEQHLNRGCV

SEQ ID NO: 6165 - DNA, 1386 bp, Prochlorococcus marinus
  CDS (1)..(1386): transl_table=11
atgtccaccaacacaatcagtcatgttggtgatttaaatgatgagcaagctcttagtttttttggcactgatggaatacgaggcaaatcgcaaacatttttaactaattcattggtttctcagattggttattggtgcaatcatgttcttcttggagaaggacccattcttataggtcaagattcaagagcaagtagcgaaagaattgcttctgctttggctcatggattagctacaaagaatagagaaatatggttactagggttatgccctacgcctgcagtatctcatctgatcaaaaagtacaatgcttctggaggtcttatgatctcagcaagtcacaatcctcctgaagacaatggaataaagatttttgacaaaactggtgaaaaaatatctttagaaaagcaaatctttatcgataacaaactaaaaagaaaagtactgattcctatttgtaaagacaaagataattgtattaatcgtaatgaccttttaaaagattataaaaatagtcttttaaacaccgtagataaagaaagtttaattgatataccaattgttctagatttatgctggggatctgcatcttcatgcggagaaaaactatttaaagctttaggagccaacgtaataagcataaatgcgattccagatggtgaaaagataaatgttaattgcggttcaacacaccttgagcatattaaaaaagttgttcttgaatcaaacgctcaaatgggttttgcatttgatggagatgctgatcgaatgattgcaatagatggaaaaggccgagtaatcgatggagaccattctctgtatttatggggatcatctcttcaagataaaaatatgcttcctgagcaaaggctagtcacaactgtaatgtctaacttaggtttagaaaaagcatggctaaatagaggtgggaagctaacaagaactcctgtaggtgaccagcatgttcataaggctatgttaacaaataaagctagtcttggaggagagcaatcaggtcacattttatctacacttaacgacttatgtggagatggacttttagctgcaatacagctctcaagtatatgtaatcgcaaaggaattcttctttcagaatggcgtgatcaaagcttcaagccttatccacaaaagctaattagtgttcctatagctaagcatataactcaaaattatttaaacaaatctgaaaagtttcgtttatcaatagcggaagccgaattagatcttgggaaagaaggaagagtatttatcaggaaaagtggaacagagccattagtaagagtcatggtcgaatcaatagataaattattagtcgagtcattgacaactaagattgcaaaaatagctttggaagaattcaattaa

SEQ ID NO: 6166 - protein, 461 aa, Prochlorococcus marinus
MSTNTISHVGDLNDEQALSFFGTDGIRGKSQTFLTNSLVSQIGYWCNHVLLGEGPILIGQDSRASSERIASALAHGLATKNREIWLLGLCPTPAVSHLIKKYNASGGLMISASHNPPEDNGIKIFDKTGEKISLEKQIFIDNKLKRKVLIPICKDKDNCINRNDLLKDYKNSLLNTVDKESLIDIPIVLDLCWGSASSCGEKLFKALGANVISINAIPDGEKINVNCGSTHLEHIKKVVLESNAQMGFAFDGDADRMIAIDGKGRVIDGDHSLYLWGSSLQDKNMLPEQRLVTTVMSNLGLEKAWLNRGGKLTRTPVGDQHVHKAMLTNKASLGGEQSGHILSTLNDLCGDGLLAAIQLSSICNRKGILLSEWRDQSFKPYPQKLISVPIAKHITQNYLNKSEKFRLSIAEAELDLGKEGRVFIRKSGTEPLVRVMVESIDKLLVESLTTKIAKIALEEFN

SEQ ID NO: 6167 - DNA, 1407 bp, Prochlorococcus marinus
  CDS (1)..(1407): transl_table=11
atggtctttgctgctcttgaccccttaggtgttcccctcgggacggcccaggccagcttcggcacagatggcattcgcggtcgggtcggaacgttgctgacgcctgcgtttattttgcaggtgggctactggtgtggtcaggtgttgcctgatcaaggcccggtgttgatcgggatggattcccgtagcagtggggccatggtggcctcggcattaacggctggtttaaccgctgcagggcgggaagtgtggaccttgggcttatgtcccaccccagctgtgcctggattaattcgcaagcttggtgctgcaggcggtttgatggtttcagcaagtcataacccacctgaagacaatggcatcaaggtgtttggggccgatggtgccaaattaagcccagcaaagcagggtctcatcgaagcggggcttcgcggcgaggccattggtgacaaaggtcgaccaacgatcacgagttgcggccctgcttatcagcgcaacgagcttcttagccactatcgcgatgccctgcttgcctcagtgctgcatcaacgcctggatggcgtgcccattgtgcttgatctctgctggggagcggcaacagcctgtggtgctgaggtgtttgcggcccttggggctgatctcactgtgttgcatggtgaaccggatggcaggcgcatcaatgtcggttgtggttctacccagctcgagccgttgcgtcgagctgtgattgagcgcggcgcgatcatgggctttgcctttgatggggatgctgatcggatgctggctttggatggacacggtcgcgtcgtcgatggtgaccatgtgctctacctctggggatcagaccttcaggatcggcaggctttacctcaacaaaggcttgtggccacggtgatgtcgaatctcggatttgagagggcttggcagcaaagaggtggggttcttgaacgcacgccggtaggtgatcagcatgtctatgccgccatggtggagagcaatgctgctttaggtggtgaacagtctggccatatcctttcagcagctcatggcctttgtggtgatggtgtgctcactgctttgcagcttgccactctctgtcatggcagggggctgagtcttggtgagtggttggatcagagtttccaggcgttcccacaaaagttggtcaatgtgcgcgttcctgatttggaacgacgtatgggttggcagcattgtgagcctctgcaggaggcggtcttggcggcagaagcagccatgggtgaagatggccgagtcttggtaagggcgagtggaacggagccgttgttaagagtgatgattgaagcggcggattctgctgccgtggagttctggacagcacagttggccgaccttgccgagcaacacctcaatcggggttgcgtttga

SEQ ID NO: 6168 - protein, 468 aa, Prochlorococcus marinus
MVFAALDPLGVPLGTAQASFGTDGIRGRVGTLLTPAFILQVGYWCGQVLPDQGPVLIGMDSRSSGAMVASALTAGLTAAGREVWTLGLCPTPAVPGLIRKLGAAGGLMVSASHNPPEDNGIKVFGADGAKLSPAKQGLIEAGLRGEAIGDKGRPTITSCGPAYQRNELLSHYRDALLASVLHQRLDGVPIVLDLCWGAATACGAEVFAALGADLTVLHGEPDGRRINVGCGSTQLEPLRRAVIERGAIMGFAFDGDADRMLALDGHGRVVDGDHVLYLWGSDLQDRQALPQQRLVATVMSNLGFERAWQQRGGVLERTPVGDQHVYAAMVESNAALGGEQSGHILSAAHGLCGDGVLTALQLATLCHGRGLSLGEWLDQSFQAFPQKLVNVRVPDLERRMGWQHCEPLQEAVLAAEAAMGEDGRVLVRASGTEPLLRVMIEAADSAAVEFWTAQLADLAEQHLNRGCV

SEQ ID NO: 6169 - DNA, 1353 bp, Prochlorococcus marinus
  CDS (1)..(1353): transl_table=11
atgcaatcaatctttggaacagatggaataagaggcagatttaatgaagagttaacttattctctagcttacaaagtagggtatgctctaggttcgactttaaagaagaaaagtccaatattaatagggagagatacgcgaattagtggagatattcttcttcaggcaataacacaaggaataaatgaaagtggcaaaaaatttataaatctaggaatctgccctaccccagcaataccttttttgatcaaaaaagagaatctaagtagcgggatcatgatatctgcaagtcataatccgccagaatataatggcataaaaatttttgatcataatggtcaaaaaattaccagatattttgaaaataaaattcaaaaattaattgaagaaacaaatcaaaatatatcagttcctacaaaagtgatccccctaaatacaaataaaaatcttatggatatttatattaaaagtttagtccaagcaatggatggggaaaaccttagtggcttaaaaataatattagacacatgctatggatcagcaacaacctgcgcaaaagaaatttttcagtctcttggtgctgatgtaagagttatcaataattcaaaaaatgggtctaaaattaatatgaattgtggttctactaacctagcaccattaaaaaaagcattaaaagagagtcctgcagatatgggttttagcttcgacgaagatgccgatagagtaattggaatagattcaaaaggcaatgtattggatggagatcacattctctttctttgggggagagaacttatggaacaaaaaattctcacaaataatttactaatatcaacgcaaatggcaaacttaggttttgaaaaggcatggaagaaaattggaggagttttatatagaactgatgtaggagataaatatgtgcatgaggcaattaaagaaaaaagagctgttttaggaggtgagcagtcaggtcatatactttcgaaaattaataatttttctggagatgggatattgactgcacttcaaatttctaaatattgtaaaaagaaaaatattaatttaaatgattggcttaaaagtagtttcgaaccttttcctcagaaactaaccaatatcaaattaaattttaatattaataaattaagtctaaaagccaaaatcttaattgataaaacaatagaaaattttcaagcattatattcccataattgtagagtttatataaggcctagtggcacagaacccttaattagagttcttgttgaggccaaaagtcataagaaagttaattctttatcaagcgaaataacaaacaaactcagtttagaaattaataaaataataaattaa

SEQ ID NO: 6170 - protein, 450 aa, Prochlorococcus marinus
MQSIFGTDGIRGRFNEELTYSLAYKVGYALGSTLKKKSPILIGRDTRISGDILLQAITQGINESGKKFINLGICPTPAIPFLIKKENLSSGIMISASHNPPEYNGIKIFDHNGQKITRYFENKIQKLIEETNQNISVPTKVIPLNTNKNLMDIYIKSLVQAMDGENLSGLKIILDTCYGSATTCAKEIFQSLGADVRVINNSKNGSKINMNCGSTNLAPLKKALKESPADMGFSFDEDADRVIGIDSKGNVLDGDHILFLWGRELMEQKILTNNLLISTQMANLGFEKAWKKIGGVLYRTDVGDKYVHEAIKEKRAVLGGEQSGHILSKINNFSGDGILTALQISKYCKKKNINLNDWLKSSFEPFPQKLTNIKLNFNINKLSLKAKILIDKTIENFQALYSHNCRVYIRPSGTEPLIRVLVEAKSHKKVNSLSSEITNKLSLEINKIIN

SEQ ID NO: 6171 - DNA, 1344 bp, Pseudomonas syringae pv
  CDS (1)..(1344): transl_table=11
atgactaccagaaaatatttcggaaccgacggcattcgcggtcgtgtagggcaatttccgattacgcccgagttcatgctgaaactgggttgggctgcaggcatggcctttcgcaagatgggcgcctgccggattctcgtcggcaaggacacgcgcatctctggctacatgttcgaatccgcccttgaggccgggctctctgcggccggtgctgacgtgctcctgctggggcctatgccgacacctgccattgcctacctgacgcgtacgtttcatgccgaagcaggcatcgtgatcagtgcttcgcataatcctcactatgacaacggcatcaagttcttctccggtcagggcaccaagctgcctgacgagatcgaaatgatgatcgaagaactgctcgatgcgccgatgaccgtggcggagtccgagaacctcggcaaggtttcgcgaatcaacgatgccgcagggcgttatatcgaattctgcaaaagcagcgtgccgaccagcaccgatttcgccggcctcaaggtggttatcgactgcgcgcatggtgcgacctacaaggtagcgcccaacgtctttcgtgagctcggagcgcaggttgtcgtgctttctgcacagcctgacgggctcaatatcaacaagaattgcggctccactcacatggaggccttgcaggcggcagtggtcgcagagcatgccgacatgggcatcggcttcgacggtgacggcgatcgcgtgttgatggttgaccataccgggaccatcgtcgatggcgacgagctgctttacatcattgcccgtgatctgcatgaacgtggacgcttgcagggtggtgtcgtcggcacgttgatgagtaatctcgggcttgaactggccctggccgaacagagcatcccgtttgttcgcgccaacgtcggtgaccgttatgtgatcgccgagttgcttgagcgcaactggcagatcggcggtgaaaactctggccacatcgtgtgcttccagcacgccaccaccggtgatgcgatcattgcttcgttgcaggtaatactggccctgcgtcgcagcggcatcagcctcgccgaagcgcgcttgaagctgcgcaaatgcccgcagatcctgatcaatgtgcgctttgcaggttcaggtgtagatcccgtttcgcacccgtcggtccagcaagcctgtgcgcgtgttaccgagcagatggccggacggggcagggtactgctgcgcaagtcgggcacagagcctttggtgcgcgtgatggtcgaaggtgaggatgaaacccaggtcagatcgtacgccgaagagctcgcaaaactggttgctgaagtttgcgcctga

SEQ ID NO: 6172 - protein, 447 aa, Pseudomonas syringae pv
MTTRKYFGTDGIRGRVGQFPITPEFMLKLGWAAGMAFRKMGACRILVGKDTRISGYMFESALEAGLSAAGADVLLLGPMPTPAIAYLTRTFHAEAGIVISASHNPHYDNGIKFFSGQGTKLPDEIEMMIEELLDAPMTVAESENLGKVSRINDAAGRYIEFCKSSVPTSTDFAGLKVVIDCAHGATYKVAPNVFRELGAQVVVLSAQPDGLNINKNCGSTHMEALQAAVVAEHADMGIGFDGDGDRVLMVDHTGTIVDGDELLYIIARDLHERGRLQGGVVGTLMSNLGLELALAEQSIPFVRANVGDRYVIAELLERNWQIGGENSGHIVCFQHATTGDAIIASLQVILALRRSGISLAEARLKLRKCPQILINVRFAGSGVDPVSHPSVQQACARVTEQMAGRGRVLLRKSGTEPLVRVMVEGEDETQVRSYAEELAKLVAEVCA

SEQ ID NO: 6173 - DNA, 1338 bp, Pseudomonas aeruginosa
  CDS (1)..(1338): transl_table=11
atgagcagaaaatacttcgggactgacggtatccgtggtcgtgttggcgagtttccgattactccggacttcgttctcaagctgggctgggcggtgggcatggccttccgccggcagggcaactgccgggtcctgatcggcaaggacacgcgcagctcgggttacatgttcgagtcggccttcgaggccgggctctccgcttccggcgccgataccctgttgctgggaccgatgcctacccccggcatcgcctacctgacgcggactttccacgccgaggccggggtggtgatcagcgcttcgcacaatccccacgacgacaacggcatcaagttcttctccgggcaggggaccaagctgccggacgacgtcgagctgatgatcgaggaactgctcgatgcgccgatgaccgtggtggagtccgcccgtctcggcaaggtttcgcggatcaatgacgcggcggggcgctacatcgaattctgcaagagcagcgtgccgaccagcaccgacttcaacggtctcaaggtcgtgctcgactgcgccaacggcgctacctacaagatcgctcccagcgtcttccgggaactgggcgcggaagtgacggtgctggcggccagcccgaatggcctgaacatcaacgacaagtgcggctccactcacctggatggcctgcaggctgcggtggtcgagcaccatgccgacctcggcatcgccttcgacggcgacggcgaccgggtgatgatggtcgaccataccggtgcggtcgtggatggcgacgaactgcttttcctcatcgcgcgcgacctgcaggaaagcgggcggctgcaaggtggtgtggtcggcaccctgatgagcaacctcggcctggagctggctttgcaggaactgcatatcccgttcgtgcgggcgaaggtcggcgatcgctatgtgatggccgaactgctggctcggaactggatgctgggaggggagaattcggggcatatcgtctgctgccagaacaccacgacgggcgatgccatcatcgcggcgctacaggtgctgatggcgctcaagcatcgcggccagaccctggccgaggcgcgccaggggattcgcaagtgcccccaggtgctgatcaatgtgcgcttcaagggcgaaaacgatccgctcgagcacccctcggtgaaggaggccagcgtccgcgtcaccgagcaaatgggcgggcgcggtcgtgtcctgctgcgcaaatccggcacggagccgttggtccgggtgatggtcgagggcgacgaggaagctagcgttcgtgcccacgccgaacagctggcaaaaattgtttctgaggtatgtgcttga

SEQ ID NO: 6174 - protein, 445 aa, Pseudomonas aeruginosa
MSRKYFGTDGIRGRVGEFPITPDFVLKLGWAVGMAFRRQGNCRVLIGKDTRSSGYMFESAFEAGLSASGADTLLLGPMPTPGIAYLTRTFHAEAGVVISASHNPHDDNGIKFFSGQGTKLPDDVELMIEELLDAPMTVVESARLGKVSRINDAAGRYIEFCKSSVPTSTDFNGLKVVLDCANGATYKIAPSVFRELGAEVTVLAASPNGLNINDKCGSTHLDGLQAAVVEHHADLGIAFDGDGDRVMMVDHTGAVVDGDELLFLIARDLQESGRLQGGVVGTLMSNLGLELALQELHIPFVRAKVGDRYVMAELLARNWMLGGENSGHIVCCQNTTTGDAIIAALQVLMALKHRGQTLAEARQGIRKCPQVLINVRFKGENDPLEHPSVKEASVRVTEQMGGRGRVLLRKSGTEPLVRVMVEGDEEASVRAHAEQLAKIVSEVCA

SEQ ID NO: 6175 - DNA, 1338 bp, Pseudomonas fluorescens
  CDS (1)..(1338): transl_table=11
atgactaaaaaatactttggcaccgacggtatccgcggccgtgtaggcgaattccctatcactcctgatttcatgctcaagcttggctgggccgccggcatggcatttcgcagcatgggcgcctgccgcgtgctggtgggcaaggacacgcgtatctccgggtacatgttcgagtctgcactggaggccgggttgtctgcagccggtgctgatgtgatgctcctggggccgatgccgactccggccattgcttacctgacgcgtaccttccatgcggaggcgggcatcgttatcagtgcctcgcacaatcctcatgatgacaacggcatcaagttcttctcgggtgagggcaccaagttgcctgacgaggtggagttgatgatcgaagagttgctggatgcgccgatgaccgtggtggagtcgagcaagctcggcaaggtttcgcggatcaacgacgcttcagggcgttacatcgaattctgcaaaagcagcgtgccttccagcaccagcttcgctggtttgaaagttgttctcgactgcgctcatggtgcgacctacaaggtggcgccaagcgtgttccgcgagttgggggcgcaggtcactgtgctgtccgcgcaacccaatggcttgaacatcaacgagaactgcggttcgactcatatgtcgcaattgcaagcggcggtcctggccgagcacgcggatctgggtattgcctttgatggcgacggtgaccgggtgctgatggtcgatcagactggtgcgatcgtggatggtgatgagctgctgttcatcatcgctcgcgacctgcatgagcgtgacaagctgcaaggcggcgtggtcggaacgctcatgagcaacctggggctggagctggccctggcggacttgggtatcccctttgtccgggccaacgtcggtgaccgttatgtgatcgccgagctgctggagcgcaattggctggtaggtggtgaaaactccgggcacatcgtgtgcttccgtcatgctactaccggggatgcgatcattgccgcgttgcaggtgctgatggcgctcaaggctcgtggtgaaagcctggcccagtcccgtcaggggctgcgcaagtgtcctcaggtgctggtcaatgtgcgctttggcggcggtgagaacccggtcgagcatcctgcggtgaaagaggcttgcgagcgtgtcacggccgctatggctgggcgtggtcgggttctgttgcgcaagtcgggtaccgagcctctggtgcgcgtgatggttgaaggtgacgacgaagctcaggttcgcgcttacgccgaagagctggcgaaactggttgctgaagtttctgcctga

SEQ ID NO: 6176 - protein, 445 aa, Pseudomonas fluorescens
MTKKYFGTDGIRGRVGEFPITPDFMLKLGWAAGMAFRSMGACRVLVGKDTRISGYMFESALEAGLSAAGADVMLLGPMPTPAIAYLTRTFHAEAGIVISASHNPHDDNGIKFFSGEGTKLPDEVELMIEELLDAPMTVVESSKLGKVSRINDASGRYIEFCKSSVPSSTSFAGLKVVLDCAHGATYKVAPSVFRELGAQVTVLSAQPNGLNINENCGSTHMSQLQAAVLAEHADLGIAFDGDGDRVLMVDQTGAIVDGDELLFIIARDLHERDKLQGGVVGTLMSNLGLELALADLGIPFVRANVGDRYVIAELLERNWLVGGENSGHIVCFRHATTGDAIIAALQVLMALKARGESLAQSRQGLRKCPQVLVNVRFGGGENPVEHPAVKEACERVTAAMAGRGRVLLRKSGTEPLVRVMVEGDDEAQVRAYAEELAKLVAEVSA

SEQ ID NO: 6177 - DNA, 1338 bp, Pseudomonas fluorescens
  CDS (1)..(1338): transl_table=11
atgagcaagaaatactttggtactgacggcattcgtggtcgtgtcggggaatacccgatcacgccggacttcatgctcaagctcggctgggctgccggtatggcctttcgcaagatgggcgcctgcaaggtgttggtcggcaaggacacgcggatttccggctacatgtttgaatcggcactcgaggctggccttacatctgcaggtgccgatgtaatgctgctcggccctatgccgactccggccattgcctacctgtcgcgtacattccaggccgaagccggaatcgtgatcagtgcatcgcacaatccccatgacgataacggcatcaagttcttctctggtaaaggcaccaagttgcccgatgagctggagctgatgatagaggaattgcttgatacgccaatgaccgttgtcgagtcgagcaagatcggcaaggtgtcgcgcatcaatgatgcgtcaggccgctatatcgagttctgcaagagctccgtgccgactggcaccagtttctccggcctgaggatcgtcatcgactgcgcacacggtgccacttataaggtagcgccgagtgtttttcgtgagctgggtgccgaggtcgttgttctgtcggctcagcctaacggtctgaacatcaatgacaactgtggctccacgcacatggggcaattgcaggcggcggtgttgtccgaacatgcggatctgggtatcgccttcgatggcgatggcgaccgggtgttgatggtcgatcacaccggggcgattgtcgatggtgacgagctgctgtacatcattgcgcgtgatctgcatgagcgcggcaagttgcagggcggtgtggtgggtaccttgatgagtaacctcgggctggagctcgcgctcgcagatctgggtattcctttcgtacgcgccaatgtcggcgaccgctatgtgatcgccgaactgctggagcgtaactggctggtgggtggcgagaactcggggcatgtcgtgtgtttcaatcacaccaccacgggtgatgcgatcattgctgctttgcaggtgctgatggcgctgaagacgcgtaacgaagggcttgctcaaactcgccaggcgttgcgcaagtgtccgcaggtgctgatcaacgtgcgtttcggtgggggggaaagcccgctggagcacccggctgtcaaggaagcgagcgctcgcgtaacccaggcgatggcgggtcgtggtcgcgtgcttttgcgcaagtccggaacagagcctctggtgcgtgtgatggtcgaaggcgaggacgaatcccaggttcgtggctatgccgaggaactggcaaaactggtaactgaagtttctgcctga

SEQ ID NO: 6178 - protein, 445 aa, Pseudomonas fluorescens
MSKKYFGTDGIRGRVGEYPITPDFMLKLGWAAGMAFRKMGACKVLVGKDTRISGYMFESALEAGLTSAGADVMLLGPMPTPAIAYLSRTFQAEAGIVISASHNPHDDNGIKFFSGKGTKLPDELELMIEELLDTPMTVVESSKIGKVSRINDASGRYIEFCKSSVPTGTSFSGLRIVIDCAHGATYKVAPSVFRELGAEVVVLSAQPNGLNINDNCGSTHMGQLQAAVLSEHADLGIAFDGDGDRVLMVDHTGAIVDGDELLYIIARDLHERGKLQGGVVGTLMSNLGLELALADLGIPFVRANVGDRYVIAELLERNWLVGGENSGHVVCFNHTTTGDAIIAALQVLMALKTRNEGLAQTRQALRKCPQVLINVRFGGGESPLEHPAVKEASARVTQAMAGRGRVLLRKSGTEPLVRVMVEGEDESQVRGYAEELAKLVTEVSA

SEQ ID NO: 6179 - DNA, 1341 bp, Pseudomonas putida
  CDS (1)..(1341): transl_table=11
atgagcagaaaatactttggtaccgacggcattcgtggccgcgtcggcgaatacccgatcacgcctgacttcatgctgaagcttggctgggcggctggcatggcgttccgcaagcagggccattgccgggtgctggtgggcaaggacacgcgtatctctggttacatgttcgagtccgcgctcgaagccggcctggccgccgcgggtgccgatgtcatgctgctggggccaatgcctacaccagccatcgcctacctgacgcgcacattccatgcccaggcgggcattgtcatcagtgcctcgcacaacccgcacgaagacaacggcatcaagttcttctccggtcagggcaccaagctgcctgacgaagtcgagctgatgatcgaggaactgctcgaccagccgatgacggttgtcgattcgagcaagctgggcaaggtgtcgcgcatcaacgacgcggcgggccgctacatcgaattctgcaagagcagcgtgccgagcagcaccagcttcgatggcctcaaactggtggtcgattgcgcccacggcgccacctacaaggtcgcgccaagcgtgttccgcgagttgggtgccgatgtgaccgtgctgcatgcgcaaccagacggcctgaacatcaacgaaggctgcggctcgacccacatcgaatcgctgcaggctgccgtgctggtgggccatgccgaccttggcattgccttcgatggcgacggtgatcgggtgctgatggtcgaccacaccggcgccatcgtcgacggtgacgaactgctgttcatcattgctcgcgacttgcacgatcgtggcaagctgcaaggtggggtagtcggcacgctgatgagcaacctgggcctggagcttgcactgaaagacctggatatcccgttcgtgcgggccaaggtcggcgaccgttatgtcatggctgagctgctggagcgcgagtggctggttggtggcgaaaactccggccatgtcgtgtgctgcaaccacaccaccaccggtgacgcgatcattgccgctttgcaggtgctgatggcgctcaagcgccgtggcgaaaccttggcgcaggcccgtcaggcgctgcgcaagtgcccgcaggtgttgatcaacgtgcgcttcggcgccagcaaggtcgacccgctggagcacccggccgtcaaggatgccagtgccaaggtcactgaagcgttggccggtcgcggtcgtgtgctgttgcgcaagtctggtaccgagccgctggtgcgggtcatggtcgaaggcgaagacgaaacccaggtgcgtggccatgctgaagcactggccaaactggttggcgaagtttgtgtctga

SEQ ID NO: 6180 - protein, 446 aa, Pseudomonas putida
MSRKYFGTDGIRGRVGEYPITPDFMLKLGWAAGMAFRKQGHCRVLVGKDTRISGYMFESALEAGLAAAGADVMLLGPMPTPAIAYLTRTFHAQAGIVISASHNPHEDNGIKFFSGQGTKLPDEVELMIEELLDQPMTVVDSSKLGKVSRINDAAGRYIEFCKSSVPSSTSFDGLKLVVDCAHGATYKVAPSVFRELGADVTVLHAQPDGLNINEGCGSTHIESLQAAVLVGHADLGIAFDGDGDRVLMVDHTGAIVDGDELLFIIARDLHDRGKLQGGVVGTLMSNLGLELALKDLDIPFVRAKVGDRYVMAELLEREWLVGGENSGHVVCCNHTTTGDAIIAALQVLMALKRRGETLAQARQALRKCPQVLINVRFGASKVDPLEHPAVKDASAKVTEALAGRGRVLLRKSGTEPLVRVMVEGEDETQVRGHAEALAKLVGEVCV

SEQ ID NO: 6181 - DNA, 1341 bp, Pseudomonas putida
  CDS (1)..(1341): transl_table=11
atgagcagaaaatactttggtaccgacggcattcgtggccgcgtcggcgaatacccgatcacgcctgacttcatgctgaagcttggctgggcggccggcatggccttccgcaagcaaggccattgccgcgtgctggtgggcaaggacacgcgtatctccggctacatgttcgagtccgcactcgaagccggcctgtccgcggcaggtgccgatgtgatgctgctcgggccgatgccgacaccggccatcgcttacctcacgcgtaccttccacgccgaagccggcatcgtcatcagtgcctcgcacaacccgcacgatgacaacggcatcaagttcttctcgggccagggcaccaagctgccggacgaggtcgagctgatgatcgaagagctgctcgaccaaccgatgaccgttgtcgagtcgggcaagctgggcaaggtttcgcgtatcaacgatgccgccggccgctacatcgaattctgcaagagcagtgtgccgagcagcaccagcttcgaaggcctcaagctggtggtcgactgcgcccatggtgctacctacaaggttgcgcccagcgtattccgtgagctgggtgccgacgtgaccgtgctgcatgcgcaaccggacggcctgaacatcaacgaaggttgcggctcgacacacatcgaatcgctgcaggccgctgtactggtcggacatgccgatctcggcattgcctttgacggtgacggcgatcgcgtgctgatggtcgaccacacgggcgccatcgtcgacggtgacgagctgctgttcatcattgctcgcgacctgcaggaacatggcaagctgcaaggcggggtggtcggtacgctgatgagtaacctgggcctggagctggcgctcaaggacctggacatcccgtttgtgcgagccaaggtcggcgaccgttacgtcatggccgagctgttggagcgtgaatggctggtcggcggtgaaaactccggtcacgtcgtgtgctgcaaccacaccacaaccggcgacgcgatcattgccgcgctgcaggtgctgatggcgctcaagcgccggggcgaaaccctggcccaggcccgtcaggccctgcgcaagtgcccgcaggtgctgatcaatgtgcgctttggcgccagcaaggtcgacccgctggagcaccccgccgtcaaggaagccagtgccaaggttaccgaagcgctggcggggcggggtcgtgtgctgttgcgcaagtccggtaccgagccgttggtgcgggtcatggttgagggcgaggacgaaagccaggtgcgggcccatgctgaagcgctggccaaactggtcggcgaagtttgtgtctga

SEQ ID NO: 6182 - protein, 446 aa, Pseudomonas putida
MSRKYFGTDGIRGRVGEYPITPDFMLKLGWAAGMAFRKQGHCRVLVGKDTRISGYMFESALEAGLSAAGADVMLLGPMPTPAIAYLTRTFHAEAGIVISASHNPHDDNGIKFFSGQGTKLPDEVELMIEELLDQPMTVVESGKLGKVSRINDAAGRYIEFCKSSVPSSTSFEGLKLVVDCAHGATYKVAPSVFRELGADVTVLHAQPDGLNINEGCGSTHIESLQAAVLVGHADLGIAFDGDGDRVLMVDHTGAIVDGDELLFIIARDLQEHGKLQGGVVGTLMSNLGLELALKDLDIPFVRAKVGDRYVMAELLEREWLVGGENSGHVVCCNHTTTGDAIIAALQVLMALKRRGETLAQARQALRKCPQVLINVRFGASKVDPLEHPAVKEASAKVTEALAGRGRVLLRKSGTEPLVRVMVEGEDESQVRAHAEALAKLVGEVCV

SEQ ID NO: 6183 - DNA, 1344 bp, Pseudomonas syringae pv
  CDS (1)..(1344): transl_table=11
atgactaccagaaaatatttcggaaccgacggcattcgtggtcgtgtagggcaattcccgattacacccgagttcatgctgaaactgggctgggctgcaggcatggcctttcgcaagatgggcgcctgccgcattcttgttggcaaggacacgcgtatttccggctacatgttcgaatctgcactggaagcagggctttctgcggcgggcgctgacgtgctgctgctggggccgatgcctacacctgccatcgcgtatctgacgcgcacttttcatgccgaagcaggcatcgtcatcagtgcttcgcacaatccgcactacgacaacggcatcaagttcttctccggccagggcaccaagctgcctgacgagatcgaaatgatgatcgaggagttgctcgacgcaccgatgaccgtggccgagtccgaaaacctcggcaaggtctcgcggatcaacgatgctgccgggcgttacatcgaattctgcaagagcagcgtgccgaccagtaccgattttgccgggctcaaggtggtgatcgattgcgcgcacggcgcgacttacaaggtggcgcccaacgtcttccgtgagttgggggcgcaggttgtggtgctctcggcgcagcctgacgggctcaacatcaacaaggactgcggctctactcacatggaggccttgcaggccgctgtggttgcggagcacgcggacatgggcatcggttttgatggtgacggcgaccgagtgctgatggtcgaccacaccgggaccatcgttgatggcgatgagctgctttacatcattgcgcgcgatctgcacgagcgtggccgcttgcagggaggtgttgtcggcacgctgatgagtaacctgggtcttgagctcgctcttgccgaacagaatattcccttcgtgcgggccaacgttggcgaccgttatgtgattgccgagctgcttgagcgcaattggcagatcggtggtgaaaactccgggcacatcgtgtgtttccagcatgccaccaccggtgacgccattatcgcctcgctgcaggtgatacttgccttgcgtcgcagcggcatcagccttgccgaggcgcgcctgaaattgcgcaagtgcccgcaaatcctgatcaatgtgcgtttcgagggttccagtgtcgacccggttacccacccgtcggtgcaggaagcctgtgcgcgcgtcaccgaacagatggcggggcgtggcagggtgctattgcgcaaatccggcacagagcctctggtgcgggtgatggttgaaggtgaggacgaagcgcaggtcagggcgtacgccgaagagctcgcaaaactggttgctgaagtttgcgcctga

SEQ ID NO: 6184 - protein, 447 aa, Pseudomonas syringae pv
MTTRKYFGTDGIRGRVGQFPITPEFMLKLGWAAGMAFRKMGACRILVGKDTRISGYMFESALEAGLSAAGADVLLLGPMPTPAIAYLTRTFHAEAGIVISASHNPHYDNGIKFFSGQGTKLPDEIEMMIEELLDAPMTVAESENLGKVSRINDAAGRYIEFCKSSVPTSTDFAGLKVVIDCAHGATYKVAPNVFRELGAQVVVLSAQPDGLNINKDCGSTHMEALQAAVVAEHADMGIGFDGDGDRVLMVDHTGTIVDGDELLYIIARDLHERGRLQGGVVGTLMSNLGLELALAEQNIPFVRANVGDRYVIAELLERNWQIGGENSGHIVCFQHATTGDAIIASLQVILALRRSGISLAEARLKLRKCPQILINVRFEGSSVDPVTHPSVQEACARVTEQMAGRGRVLLRKSGTEPLVRVMVEGEDEAQVRAYAEELAKLVAEVCA

SEQ ID NO: 6185 - DNA, 1344 bp, Pseudomonas syringae pv
  CDS (1)..(1344): transl_table=11
atgactagcagaaaatatttcggaaccgacggcattcgcggtcgtgtagggcaattcccgatcactcccgagttcatgctgaaactgggttgggccgccggcatggcgtttcgcaagatgggcgcctgccggattctcgtcggcaaggacacgcgcatctccggctacatgttcgagtccgccctggaggccggcctttctgctgcgggtgccgacgttctcttgctgggcccgatgccgacaccggccatcgcctacctgacacgtaccttccatgccgaggcaggcatcgtcatcagcgcctcgcataacccgcactacgacaacggcatcaagttcttctccggtcagggcaccaagctccctgacgagatcgagatgatgatcgaagagctgctcgatgcgccgatgaccgttgccgagtccgagaacctcggcaaggtctcgcggatcaacgatgcggccgggcgttacatcgaattctgcaaaagcagcgtgcctaccagcaccgacttcgccggcctcaaggtcgtcatcgactgcgcccacggtgcgacctacaaggtggcgcccaacgtatttcgtgagctgggcgcgcaggtcgtggtgctttccgcgcaacctgacgggctcaacatcaacaaggactgcggctccacgcacatggaagccctgcaggcggccgtgcttgccgagcatgcggatatgggcatcggtttcgacggtgacggcgaccgcgtgttgatggtcgatcacaccgggaccatcgtcgatggcgacgaattgctctacatcatcgcccgcgacctgcatgagcggggtcgcttgcagggcggcgtcgtcggcacattgatgagtaacctggggcttgaactggccctggccgagcagggcattccctttgttcgggccaatgtcggtgaccgttatgtgatcgccgaactgctcgagcgcaactggcagattggcggtgaaaactccggtcatatagtctgtttccagcacgctaccaccggtgacgcgattatcgcctcattgcaggtgatactggccctgcgtcgcagtggtgtaagcctggccgaagcgcgtctgaaattgcgcaagtgcccgcaaatcctgatcaacgtccgcttcgccgggtcgggtgttgacccggtttcgcatccgtcggtcaaggaagcctgcgcccgtgtcaccgagcagatggccgggcgtggcagggtgctgctgcgcaaatcgggtaccgagccgttggtgcgcgtcatggtcgaaggcgaggacgaaacgcaggtcagggcgtacgccgaagaactcgcaaaactggttactgaagtttgcgcctga

SEQ ID NO: 6186 - protein, 447 aa, Pseudomonas syringae pv
MTSRKYFGTDGIRGRVGQFPITPEFMLKLGWAAGMAFRKMGACRILVGKDTRISGYMFESALEAGLSAAGADVLLLGPMPTPAIAYLTRTFHAEAGIVISASHNPHYDNGIKFFSGQGTKLPDEIEMMIEELLDAPMTVAESENLGKVSRINDAAGRYIEFCKSSVPTSTDFAGLKVVIDCAHGATYKVAPNVFRELGAQVVVLSAQPDGLNINKDCGSTHMEALQAAVLAEHADMGIGFDGDGDRVLMVDHTGTIVDGDELLYIIARDLHERGRLQGGVVGTLMSNLGLELALAEQGIPFVRANVGDRYVIAELLERNWQIGGENSGHIVCFQHATTGDAIIASLQVILALRRSGVSLAEARLKLRKCPQILINVRFAGSGVDPVSHPSVKEACARVTEQMAGRGRVLLRKSGTEPLVRVMVEGEDETQVRAYAEELAKLVTEVCA

SEQ ID NO: 6187 - DNA, 1368 bp, Psychrobacter arcticus
  CDS (1)..(1368): transl_table=11
atgagctattttggcactgatggtattcgcggtaaatttggtgagctgccaattacgccagattttatcttaaagctcggctatgtcacaggactcgtcctaatagaaaacagtcaaaattcggcgcgtaagccgagtgtggtaattggtaaagacacgcgattatcaggctatgtgattgaaggcgcactacaagcaggctttaacgccgcgggtgtggacgtgcatatgcttggaccattaccaacgcccgctattgctcatttaacgcgtagctttaatgccgatgcaggtgtggttatttctgcctcacacaatccatactatgataatggcatcaaattcttttcaggtgatggcaaaaaactgaccgatgagatgcaaaatgccatcaatgataagttagacaccatcatggctgctacgggcagtaatgatgctctgatgcctattcttgaccctgcgcaattgggtaaaaacaatcgtatcgatgatgcaaaagggcgctatattgaattctgtaagggcagctttccttatcagtatgatctggatcatttgaccgtggttgtcgattgtgcaaatggtgctggttatagcgtagcgccgcgagtgatgcgtgagttgggtgccaatgtcattgctattaaccataagcctgatggcatcaatatcaatgcacattgcggttctacccatcctgaaggtctacaagcagccgttcttaaatatgaagccgatgtgggcattgctttagatggtgatggcgaccgtatcgtgatggttgatgaagccggtcatttggttgatggtgatggtatcttgtatgtgcttgccacccaaggtcagacaaaggtggcaggtgtcgttggcaccctgatgagcaatatgggtttagagttggcgttaaaagcggctgatattgagtttacgcgtgcaaaagtaggcgatcgttatgtgatgcaagagcttgaagcaaacggttggatattgggcggtgagccatcaggtcatattttatgcttggataaaagccgaaccggcgatgccattatcgcaagtttgcagatacttgcagtcatgcaagcaagaggcaaagcgctgagtgatttgacagaagggtttgaagtattgccacaaaaactggtcaatgtgcgcttgtcgcaaatgcaagatccatttgagcatgaagaactggttgccgcttttgataaagcacgtgctactttagaaggtcgcggtcgcttgcttattcgccaatcgggtacagaaccgatgattcgagtcatggttgagtcagatgatgagatagagtgtgatgtgatggcgaatgatttggcagataaaatcaaagatacactgggttaa

SEQ ID NO: 6188 - protein, 455 aa, Psychrobacter arcticus
MSYFGTDGIRGKFGELPITPDFILKLGYVTGLVLIENSQNSARKPSVVIGKDTRLSGYVIEGALQAGFNAAGVDVHMLGPLPTPAIAHLTRSFNADAGVVISASHNPYYDNGIKFFSGDGKKLTDEMQNAINDKLDTIMAATGSNDALMPILDPAQLGKNNRIDDAKGRYIEFCKGSFPYQYDLDHLTVVVDCANGAGYSVAPRVMRELGANVIAINHKPDGININAHCGSTHPEGLQAAVLKYEADVGIALDGDGDRIVMVDEAGHLVDGDGILYVLATQGQTKVAGVVGTLMSNMGLELALKAADIEFTRAKVGDRYVMQELEANGWILGGEPSGHILCLDKSRTGDAIIASLQILAVMQARGKALSDLTEGFEVLPQKLVNVRLSQMQDPFEHEELVAAFDKARATLEGRGRLLIRQSGTEPMIRVMVESDDEIECDVMANDLADKIKDTLG

SEQ ID NO: 6189 - DNA, 1356 bp, Pyrococcus abyssi
  CDS (1)..(1356): transl_table=11
atgggaaaatacttcgggacgagcggaattagagaggtggtaaacgagaagctaacgcccgagctggcactaaaggttggacttgccctgggaacttacttaaatggaggcagagtcgtcatagggaacgacacgagaacgagtagcgagatgctcaaaaaggcagtcataagtggacttttagctagtggggttgatgtcatagatataggtctcgctccaactccactggtaggctttgccataaagctgtacgatgcggatgctggagttaccataaccgcgagccacaacccgccagagtataacgggataaaggtttgggacaggaatggcatggcttacactccggagaaggagagagaactagagaggattattgaggaagaaaaattcaaaagagctccttggaatgagataggccagctaaaacaagctaatcccagggaagaatacatagaagctataatgaaggagataaagcttgataactcttatacggtcgtcatagatcctgggaatggagctggttctataattagcccttacctccacagggagctcgggaacagggtcatcacaataaactcagacccccacggcttcttcgttagggaactggaacccaacaaggaaagcctcagcatgctagctaagacggtcaaagccttgaaagctgatatcggaatagcccacgatggagatgccgacagggttggggttgtagatgaaaacggggaattcgttgagtacgaggttatgctatccctaatagctggttacatgctgaggaaatacggaaaaggtaaggtagttaccaccgtggacgcagggtttgccttggatgactacgttaggggacttggaggagaggtagttagaactagggtaggggacgttgccgtggctgaagaacttatgaagcacggaggagtatttggaggggaaccctcgggaacttggataatgccgcagtggaacctaactccagatggaatcttcgctggagccctagtcttggaaatgatagataggcttggcttaataggagaactggcgaaggaagtcccaaggtacgttacactcaggaagaagataccctgtccaaatgatctaaaagcaaaggccatggaggagatagctaaactaattcccagggaattctcgtacgagagggagataaccatagatgggataaggatagagaacgatgactggtggatcctgtttaggccgagcggaacagagcctataatgaggataactctcgaggcacacacaaaagagagggctgagtctttgatggaaaaggctgaaaagctcgttaaggacgcaataaagaaggcctcttcttaa

SEQ ID NO: 6190 - protein, 451 aa, Pyrococcus abyssi
MGKYFGTSGIREVVNEKLTPELALKVGLALGTYLNGGRVVIGNDTRTSSEMLKKAVISGLLASGVDVIDIGLAPTPLVGFAIKLYDADAGVTITASHNPPEYNGIKVWDRNGMAYTPEKERELERIIEEEKFKRAPWNEIGQLKQANPREEYIEAIMKEIKLDNSYTVVIDPGNGAGSIISPYLHRELGNRVITINSDPHGFFVRELEPNKESLSMLAKTVKALKADIGIAHDGDADRVGVVDENGEFVEYEVMLSLIAGYMLRKYGKGKVVTTVDAGFALDDYVRGLGGEVVRTRVGDVAVAEELMKHGGVFGGEPSGTWIMPQWNLTPDGIFAGALVLEMIDRLGLIGELAKEVPRYVTLRKKIPCPNDLKAKAMEEIAKLIPREFSYEREITIDGIRIENDDWWILFRPSGTEPIMRITLEAHTKERAESLMEKAEKLVKDAIKKASS

SEQ ID NO: 6191 - DNA, 1359 bp, Pyrococcus furiosus
  CDS (1)..(1359): transl_table=11
atgggaaaatactttggaacgagcggaattagggaagtggttaacgaaaaacttacacccgagctggctctaaaggtaggactggccctgggaacttatcttggagaggggagagttgttgttgggattgatactagaacgagcagtgaaatgataaagcatgcccttgtaagtggccttttggcaactggaatcgaggttgtggatataggacttgctcctactcctctaacgggatttgcgattaagctttacaatgcagatgcgggagtcacaattacggcctcgcacaaccctccaaactacaacggtatcaaggtttgggacagaaacggaatggcgtacactccagataaagagagcgagcttgagagaataatcgaagaagaaacctttaagagagtaagttggatggagataggggaagttattaaagctgatcctaaaaaggaatacattaagaatgcagttgagcagataaacttagagaattcatatacagtggtagttgatagcggaaatggggctggatcaatagtaagcccctatcttcagagagagctagggaacaaggtaattagtctaaattcacacccaacgggcttctttgttagagaacttgagccaaatagaaagagcttagatatgctgtctaaagtagttagggaagttggggctgatgttggaatagctcacgatggagatgcagatagaattggtgtggtggatgaccaagggaacttcgtagattatgaggtcatgctttcgctgatagcgggatatatgattgaaaagtacggaaagggcaaagttgtgacaaccgttgacgcaggatttgccctcgatgattacctaaagcccaggggtggagaagttattagaacaaaggttggcgatgttgctgttgcatatgagctcagcaaacatggaggtgtatttggaggggagccaagtggtacttggataatccctcagtggaacttaactcctgatggcatctttgctggagcgttagtggttgagatgattgacaaattaggcccaataagcgagcttgcaaaagaagttcccaggtatgtgacgcttagggagaaaattccctgtccaaatgagctaaagcagaaggtcatgcgtataattgaaaagctggctcttcaaaactttgaatacaagaatttaattgacattgatggaataagaattgaaaatgaggagtggtggatactctttaggccgagcggaactgagccaataatgaggataacccttgaagctcatacaaaagaaaaagctgaagagctgatgaagaaggcgaggggactagttaaggaagcaattgaaaaggccaagctttcttag

SEQ ID NO: 6192 - protein, 452 aa, Pyrococcus furiosus
MGKYFGTSGIREVVNEKLTPELALKVGLALGTYLGEGRVVVGIDTRTSSEMIKHALVSGLLATGIEVVDIGLAPTPLTGFAIKLYNADAGVTITASHNPPNYNGIKVWDRNGMAYTPDKESELERIIEEETFKRVSWMEIGEVIKADPKKEYIKNAVEQINLENSYTVVVDSGNGAGSIVSPYLQRELGNKVISLNSHPTGFFVRELEPNRKSLDMLSKVVREVGADVGIAHDGDADRIGVVDDQGNFVDYEVMLSLIAGYMIEKYGKGKVVTTVDAGFALDDYLKPRGGEVIRTKVGDVAVAYELSKHGGVFGGEPSGTWIIPQWNLTPDGIFAGALVVEMIDKLGPISELAKEVPRYVTLREKIPCPNELKQKVMRIIEKLALQNFEYKNLIDIDGIRIENEEWWILFRPSGTEPIMRITLEAHTKEKAEELMKKARGLVKEAIEKAKLS

SEQ ID NO: 6193 - DNA, 1362 bp, Pyrococcus horikoshii
  CDS (7)..(1362): transl_table=11
gtgagaatggggagatactttggaaccagtggaattagggaggtagttaatgaaaagttaacccctgagttagctctaaaggttggtctagctttgggaacatacctccaggagggaaaggtcgttatagggtgcgacactaggacgagtagcgtgatgcttaagaatgccgttataagtggactactagccacgggaatcgatgttatagatataggcctcgcacctaccccacttacgggatttgctataagattgtacaacgcagaggctggcgttacgataacagcatctcacaatcctccacaatacaatgggatcaaagtttgggatagagatggaatggcatatactccggacaaggagcacgaactcgagaagattatagaatccggaaactttagaagagtaccctggaacgaggtaggaacattgaagacagcaaatcccaggaaagaatatattgaggctattttaagagaaataaatcttaagggatcctataccgttgttatagatgctgggaatggtgcaggttcgatagtaagtccataccttcacagggaacttggaaacagggtgataacgcttaactccgatcctagtggatttttcgttagagagcttgaaccaaataaggagagcctaagcatgcttgaaaaaaccgttaaagtccttaacgcagatatcgggattgcacacgacggagatgcagacagggttggggtcgtcgatgagaacggagaattcgtagaatatgaggtcatgctctcgctaattgcaggttacatgctaaaaaagtatggaaaggggaagatcgtgacaacggtagacgctggatttgctttagacgattacatccgagaactaggaggagaagtcgttagaactagagttggagacgttgccgtcgctgaagagctagttaagcatggaggggttttcggtggggaaccttctggaacttggataatgcctcaatggaatctaaccccagatgggatattcgcaagcgctttggttttggagatgatcgatagattaggcccaattggagagttagcaaaggatgttccaaagtacgtaaccctaagaaagaagatcccctgctcaaacgaactaaagaacaaggtcatgaataagatagccgatttaattccaagggagttctcctatgagaggataataacaattgatggtataaggatagagaatgacgactggtggattttgtttagacccagtggaacggagccgatcatgaggatcacgcttgaggcccacacggaagagatggcagagaggctaatgaaaaaagctgaaaatttagttaaaagcgtgataaaagatttatcttcttaa

SEQ ID NO: 6194 - protein, 451 aa, Pyrococcus horikoshii
MGRYFGTSGIREVVNEKLTPELALKVGLALGTYLQEGKVVIGCDTRTSSVMLKNAVISGLLATGIDVIDIGLAPTPLTGFAIRLYNAEAGVTITASHNPPQYNGIKVWDRDGMAYTPDKEHELEKIIESGNFRRVPWNEVGTLKTANPRKEYIEAILREINLKGSYTVVIDAGNGAGSIVSPYLHRELGNRVITLNSDPSGFFVRELEPNKESLSMLEKTVKVLNADIGIAHDGDADRVGVVDENGEFVEYEVMLSLIAGYMLKKYGKGKIVTTVDAGFALDDYIRELGGEVVRTRVGDVAVAEELVKHGGVFGGEPSGTWIMPQWNLTPDGIFASALVLEMIDRLGPIGELAKDVPKYVTLRKKIPCSNELKNKVMNKIADLIPREFSYERIITIDGIRIENDDWWILFRPSGTEPIMRITLEAHTEEMAERLMKKAENLVKSVIKDLSS

SEQ ID NO: 6195 - DNA, 1344 bp, Ralstonia eutropha
  CDS (1)..(1344): transl_table=11
atgacgcgcaagtatttcgggactgatggcgtacgcggcaaagtcggcgaatcgccgatcacgccagatttcgtcatgcggctgggacatgccgctgggaaggtgctggcacatggtgcgagtaccgggcagggacggcccaccgtgctgattggcaaggatacgcggatttcgggctatatgcttgaggcggcacttgaagccggctttacttcggcaggtgtgcacgtactgctgaccggaccgttgccgacccctggcattgcctatctgactcgcgcgctgcgcctgtcggcgggcgtggtcatttcggctagccacaatccgtactacgacaacggcatcaagttcttctcggccgatggcgacaagctgcccgacgaggtcgaggccaagatcgaggcggcccttgaagagccgatgacctgcgcgccgtccgatgatctgggccgtgcgcggcgcatcaacgacgcgccgggtcgctatatcgagttctgcaagagcacgttcccgaacagccaggacctgcgcggtctcaagctggtggtggactgcgcgcatggcgccgcctaccacattgcgccgcacgtcttccatgaactgggcgcggacgtcatcgcgatcggaaaccagccggacggccgcaacatcaacgacggctacggtgctaccgcgcccggcaagctgatcgaagccgtccgggagcacggcgccgacctgggacttgcattcgacggcgatgcggaccggctgcaggtggtggacagcgaaggtcgcctctacaacggcgacgaactgctgtacctgatcgtgcgcgatcgcatggcggcagggtttgcggtcgaaggcgcggtgggcacgctcatgaccaatatggccgtggagttggcactcaagcgcatcggcgtggaattcgtgcgcgcgaaggtcggcgaccgctatgtcctggaagagttgaacaagcgtcactggacgctcggtggcgagggctcggggcatctgctgtgccttgaccggcacagcacgggcgacggtattgtctcggcgctccaggtgctggcggcgctgcgccgtagcggcaagacgctggccggcttgcttgacggtgtcagcctgtttccgcagaagctcatcaacgttcgggttgagaaggggttcgactggcaatcgcatgccggtctgaaagcggcccgcgcggtcgtggagcctgaactggcagggcgcggccgtgtgctgattcgagcttccggcaccgagcccgtggtgcgtgtgatggtagaggcagagcacgccgagacggccgaacgcgccgcacagacgctcgcggaggcattgcgcgcctga

SEQ ID NO: 6196 - protein, 447 aa, Ralstonia eutropha
MTRKYFGTDGVRGKVGESPITPDFVMRLGHAAGKVLAHGASTGQGRPTVLIGKDTRISGYMLEAALEAGFTSAGVHVLLTGPLPTPGIAYLTRALRLSAGVVISASHNPYYDNGIKFFSADGDKLPDEVEAKIEAALEEPMTCAPSDDLGRARRINDAPGRYIEFCKSTFPNSQDLRGLKLVVDCAHGAAYHIAPHVFHELGADVIAIGNQPDGRNINDGYGATAPGKLIEAVREHGADLGLAFDGDADRLQVVDSEGRLYNGDELLYLIVRDRMAAGFAVEGAVGTLMTNMAVELALKRIGVEFVRAKVGDRYVLEELNKRHWTLGGEGSGHLLCLDRHSTGDGIVSALQVLAALRRSGKTLAGLLDGVSLFPQKLINVRVEKGFDWQSHAGLKAARAVVEPELAGRGRVLIRASGTEPVVRVMVEAEHAETAERAAQTLAEALRA

SEQ ID NO: 6197 - DNA, 1344 bp, Ralstonia metallidurans
  CDS (1)..(1344): transl_table=11
atgacacgcaagtatttcgggacagacggcgtgcggggtcgggtcggcgacgcgccgatcacgccggattttgtgatgcgacttggccatgcggccggcaaggtgctggcgctggggcagaagacttcgcagggcaagcccaccgtcctgatcggcaaggatacgcggatctcgggctatatgctggaagcggcacttgaggccggctttacagcggcgggcgtcaatgtgctgctgactggcccgttgcccacgccgggcattgcctatctcacgcgaacgctccggttggcggcgggcgtggtgatttccgcaagccacaacccgtactacgacaacggtatcaagttcttttcggcatcgggtgacaagctgcccgatgacgtggaatcgcagatcgaggcgatggtcgaagagccgatgacctgcgtgcactcggatgaactcggccgcgcccgccggatcgacgacgctgcgggtcgctacatcgagttctgcaagagcacgttcccgtatgagcatgacctgcatggtctgaagatcgtagtcgattgcgctaatggtgccgcttatcacattgccccgcatgtgttccacgagttgggcgccgaggtgatctcgatcggcaaccagcccaatggccgcaacatcaacgccggatatggtgccaccgcccccgagaagctgatcgaagcagtgaaggctaacggcgcggatcttggcctggcattcgacggcgatgccgaccgcctgcaggtggtggacgccgatggccggttgtacaacggcgatgagttgctctatctgatcgtgcgcgatcgtcaggcgtctggccagcgggtagaaggcgcggtcggcacgctgatgacgaacatggcggtcgaactggcgctcaagcgccttggcgtgtcgttcgtgcgcgccaaggttggcgaccgttacgtgctcgaggaactcaatcggcaccactggcaactcggtggcgagggctccgggcatctgctgtgcctggaccggcataccacgggcgatggcatcgtgtccgcgctgcaggtgctggccgcgctacgccgcagtggcaagactctgccgcaactgctggatggcgtgagcctgttcccgcagacgcttatcaatgtgcgcgtcgagaagggttttgactggcagaaccacgctggactcaaggctgtccgggaccgcgtggagcccgagctggaaggacggggacgggtgctgatccgcgcctcgggaacggagcccgtggtccgtgtgatggtggaggccgagcaggtggaaaccgctgagcgtgccgcgcaggagcttgccgccgcattgcgcgcctga

SEQ ID NO: 6198 - protein, 447 aa, Ralstonia metallidurans
MTRKYFGTDGVRGRVGDAPITPDFVMRLGHAAGKVLALGQKTSQGKPTVLIGKDTRISGYMLEAALEAGFTAAGVNVLLTGPLPTPGIAYLTRTLRLAAGVVISASHNPYYDNGIKFFSASGDKLPDDVESQIEAMVEEPMTCVHSDELGRARRIDDAAGRYIEFCKSTFPYEHDLHGLKIVVDCANGAAYHIAPHVFHELGAEVISIGNQPNGRNINAGYGATAPEKLIEAVKANGADLGLAFDGDADRLQVVDADGRLYNGDELLYLIVRDRQASGQRVEGAVGTLMTNMAVELALKRLGVSFVRAKVGDRYVLEELNRHHWQLGGEGSGHLLCLDRHTTGDGIVSALQVLAALRRSGKTLPQLLDGVSLFPQTLINVRVEKGFDWQNHAGLKAVRDRVEPELEGRGRVLIRASGTEPVVRVMVEAEQVETAERAAQELAAALRA

SEQ ID NO: 6199 - DNA, 1344 bp, Ralstonia solanacearum
  CDS (1)..(1344): transl_table=11
atgtccaggaagtatttcggcaccgacggcatccgcgggcgcgtgggcgaaagcccgatcacgcccgacttcgtgctgcgcctcggctacgcggcgggccgcgtgctggcgcatggcagcgaagcgcatggccacggccggcccaccgtgctgatcggtaaggacacgcgcctgtccggctacatgctggaagccgccctggaggcgggcttcaccgccgccggcgtggacgtgctgatgagcgggccgttgccgacgcccggtgtcgcgtatctcacgcgggcgctgcgcctgtccgcgggcgtggtgatttcggcatcgcacaatccgtattacgacaacgggatcaagttcttctcggccaccggcgacaagctgcccgatgaaaccgagtcgcagatcgaggccgagctcgaaaagccgatggtgtatgcggcgtccgatgcgctgggccgcgcccgccgcatcgacgatgccgccggccgctacatcgagttctgcaagagcaccttccccaacgatctgaacctgttcggcatgaagatcgtgctggacagcgcgcacggcgcggcgtatcacatcgcgccgcacgtgttccatgagctgggtgccgaagtggtctcgatcggcaaccagccgaacgggcgcaacatcaatgacggctatggcgccaccgagcccgccaagctgatcgaggcgacccgccagcacggcgccgacctcggtctggcgtttgatggcgatgccgaccgcctgcaggtggtcgaccggaacggtcgcctgtataacggcgatgaactgctgtacgtgatggtgcaggcccgccgcgcggccggccaggccgtgccgggtgccgtcggcacgctgatgaccaacctggcggtggaactggcgctgaaggcgcagggcgtcgaattcgtgcgcgccaaggtgggcgaccgctatgtgctggaagagttgaagaaacacggctggctgctgggcggcgagggctctggccatctgctgtgcctggacaagcacagcaccggcgacggcatcatctccgcgctgcaggtgctggcggcactgcgccgcagcggccagacgctggagcaggtgctcgatggcgtgcatctgttcccgcagaagctgatcaacgtgcgggtcgagaagggtttcgactggaaagcgcacgcggccttgcaggcggcgttgaaggtgagcgaggctgagctgaacggcaaggggcgggtcctgatccgcccgtcgggaaccgagccggtcgtgcgcgtgatggtcgaggcacaggacgcggccctcgcgaccaagtacgcagagcagctcgcggcaacgctccagtga

SEQ ID NO: 6200 - protein, 447 aa, Ralstonia solanacearum
MSRKYFGTDGIRGRVGESPITPDFVLRLGYAAGRVLAHGSEAHGHGRPTVLIGKDTRLSGYMLEAALEAGFTAAGVDVLMSGPLPTPGVAYLTRALRLSAGVVISASHNPYYDNGIKFFSATGDKLPDETESQIEAELEKPMVYAASDALGRARRIDDAAGRYIEFCKSTFPNDLNLFGMKIVLDSAHGAAYHIAPHVFHELGAEVVSIGNQPNGRNINDGYGATEPAKLIEATRQHGADLGLAFDGDADRLQVVDRNGRLYNGDELLYVMVQARRAAGQAVPGAVGTLMTNLAVELALKAQGVEFVRAKVGDRYVLEELKKHGWLLGGEGSGHLLCLDKHSTGDGIISALQVLAALRRSGQTLEQVLDGVHLFPQKLINVRVEKGFDWKAHAALQAALKVSEAELNGKGRVLIRPSGTEPVVRVMVEAQDAALATKYAEQLAATLQ

SEQ ID NO: 6201 - DNA, 1353 bp, Rhizobium leguminosarum bv
  CDS (1)..(1353): transl_table=11
atgaaaagacgctatttcggtaccgacggcattcgcggccaatccaacgtcttcccgatgacgccggatctcgccatgcgggtcggcattgccgccggtacgatcttccgccgcggcaatcaccgccatcgcgtcgtcatcggcaaggatacgcgcctttccggctatatgctggagaatgccatggtcgcgggcttcacggccgccggtctcgacgcctttattctcggcccgatcccgacgccggctgttgccatgctgacgcgctcgctgcgtgccgatctcggcgtgatgatctcggcgtcgcacaatccttacgaggataacggcatcaagctcttcggccccgacggctacaagctgtccgacgacatcgaggccgagatcgaggatctactcgaaagagacctgaatgcgcagcttgccaagtccgacgatatcggccgcgccaagcgtgtcgacggcgtgcatgaccgctatatcgaacatgccaagcgcacgctgccgcgcgacgtgacgctgcagggcctgaggatcgccatcgattgcgccaatggggctgcctataaggtggcgccggccgtgctctgggaactcggcgccgaggtcgtcacgatcggcaacgagccgaacggcaccaacatcaatctcaattgcggctccaccagccccgtcgcgctgcagaagaaggtcgacgaggtgcgcgccgatatcggcatcgccctcgatggcgatgcggatcgcgtcatcatcgtcgacgagaacggctcgatcgtcgatggagaccagctgatggccgtgatcgccgaaagctgggccgagagccagcagctgcgcggcaatggtatcgttgcgaccgtcatgtccaatctcggcctcgagcgtttcctcgatgacaagggcctcggccttgcccggacgaaggtcggtgaccgttacgtcgtcgagcatatgcgccagcataattacaatgtcggcggcgagcagtccggccacatcgtgctttcggattacggcacgaccggcgacggtctcgtcgcggcgctgcagatcctggccgcagtcaagcgcaccggacggaccgtcagcgaggtctgccgtcgcttcgagccggtgccgcagctcctgcgcaatgtccgcatcagcggtggcaagccgctggaagatatccaggtgcagaaggcgatcgccgatgccgaagccgagcttgccaggaacggccgcctcgtcatccgcccctcgggcaccgagccgctgatccgcgtcatggccgagggtgacgaccgcgcccagatcgagcgcatcgtcaacgaattgatcggcacgatctcgaacgtccggactgccgcctga

SEQ ID NO: 6202 - protein, 450 aa, Rhizobium leguminosarum bv
MKRRYFGTDGIRGQSNVFPMTPDLAMRVGIAAGTIFRRGNHRHRVVIGKDTRLSGYMLENAMVAGFTAAGLDAFILGPIPTPAVAMLTRSLRADLGVMISASHNPYEDNGIKLFGPDGYKLSDDIEAEIEDLLERDLNAQLAKSDDIGRAKRVDGVHDRYIEHAKRTLPRDVTLQGLRIAIDCANGAAYKVAPAVLWELGAEVVTIGNEPNGTNINLNCGSTSPVALQKKVDEVRADIGIALDGDADRVIIVDENGSIVDGDQLMAVIAESWAESQQLRGNGIVATVMSNLGLERFLDDKGLGLARTKVGDRYVVEHMRQHNYNVGGEQSGHIVLSDYGTTGDGLVAALQILAAVKRTGRTVSEVCRRFEPVPQLLRNVRISGGKPLEDIQVQKAIADAEAELARNGRLVIRPSGTEPLIRVMAEGDDRAQIERIVNELIGTISNVRTAA

SEQ ID NO: 6203 - DNA, 1353 bp, Rhizobium loti
  CDS (1)..(1353): transl_table=11
atggcagggaattacttcggcacggacggcatccgcgggcgcgccaacaagtttccgatgaccgcggaaatcgccatgcgggtcggcatggccgccggcctttcgttccagcgtggcagccaccgccaccgcgtcgttctcggcaaggacaccaggctttccggctacatgatcgagaacgcgatggtggcgggtctctgcgccgccggcatggacgtgttcctgctcggaccgatcccgacgcccgccgtcgccatgctggtgcgttcactgcgcgccgatatcggcgtcatgatctcggcttcgcacaacccctattacgacaacggcatcaagctgttcgggccggacggctacaagctctcggacgagatcgaagagcgcatcgagagcatgctcgacaaggatgtcgaactgacactcgccgattccgacgggcttggccgcgccaagcgtgttgatggcgtgcatgaccgctacatcgagttcgccaagcgtacattgccgcgctcgatgtcgctttcgggcctcaggatcgtcgtcgattgcgccaatggcgcggcctacaaggtggcgcccgaggcgctgtgggaactcggcgccgaggtcgtcgccatcaatatcgaacccaacggcttcaacatcaacaaggaatgcggctcgacccatccggccggactgcagaagaaggtgcatgaagtgcgcgccgatatcggcatcgcgcttgacggcgatgcagaccgcgtcgtcatcgtcgacgagaatggcgcgatcgtcgacggcgaccaaatcatggcgatgatcgccgagtcctggcaccagagcggacggcttgccggcggcggcgtggtttcgacggtcatgtccaatctcggcctcgaacgcttcctcggcgacatgaagctgcaattgcaccgcaccaaggtcggcgaccgctatgtcgtggagcatatgcgcgcgcatgggctcaatgtcggcggcgaacagtccggccacatcgtgctgtcggatttctcgaccaccggcgacggcctagtgtcggcgctgcaggtgctggcctgcatcaagcgccagggccgcccggtcagcgaactgtcgaagaaatttgagccggtgccgcaactcttgaagaatgtccgtatcgccggcggcaagccgctcgaggaagctccggtcaaggcggcgatcgaggatgcgcgcaaccgtctcggcaaggccggtcgtctggtcatccgtccgtccggcaccgagccgctgatccgtgtcatggcggagggcgacgatccgcaactggtggaggccgtcgtcaacgacattgtcgaggtcatttcggagacccgcagcgccgcctga

SEQ ID NO: 6204 - protein, 450 aa, Rhizobium loti
MAGNYFGTDGIRGRANKFPMTAEIAMRVGMAAGLSFQRGSHRHRVVLGKDTRLSGYMIENAMVAGLCAAGMDVFLLGPIPTPAVAMLVRSLRADIGVMISASHNPYYDNGIKLFGPDGYKLSDEIEERIESMLDKDVELTLADSDGLGRAKRVDGVHDRYIEFAKRTLPRSMSLSGLRIVVDCANGAAYKVAPEALWELGAEVVAINIEPNGFNINKECGSTHPAGLQKKVHEVRADIGIALDGDADRVVIVDENGAIVDGDQIMAMIAESWHQSGRLAGGGVVSTVMSNLGLERFLGDMKLQLHRTKVGDRYVVEHMRAHGLNVGGEQSGHIVLSDFSTTGDGLVSALQVLACIKRQGRPVSELSKKFEPVPQLLKNVRIAGGKPLEEAPVKAAIEDARNRLGKAGRLVIRPSGTEPLIRVMAEGDDPQLVEAVVNDIVEVISETRSAA

SEQ ID NO: 6205 - DNA, 1353 bp, Rhizobium meliloti
  CDS (1)..(1353): transl_table=11
atgaagcgcagatatttcggcaccgacggcattcgcggccagtccaatatatttccgatgacgccggacctcgccatgcgggtcggcattgcagtgggaaccattttcagaaacggcgctcaccgacaccgggtggtgatcggcaaggatacgcgcctctccggctatatgctcgagaacgcgatggtcgcgggcttcacggcggcggggctcgacgtctttctgctcggcccgatcccgacgccaggcgtcgccatgctgacgcggtcgctgagggccgatatcggcgtgatgatctccgcctcgcacaatgcgtttcgcgacaatggcatcaagctcttcggacccgacggctacaagctttcggatgacatcgagcaaaagatcgaggacctgctggagcaggacatgtccgggcagctcgccaagccggaggatatcggccgggccaagcgcgtcgacggtgacatctaccgttatatcgagcaggccaagcggacgctgccgcgcgacgtcacgctgaaaggtctccggatcgccatcgactgcgcaaacggtgccgcctacaaggtcgcgccctccgccctttgggaactcggcgccgaagtcgttacgatcgggaccgaaccgaacggcgtcaacatcaacctcgaatgcggatcgacgcatccggcggcgcttcagaagaaggtgcacgaggtgagggcggatatcggcatcgcgctcgacggagacgccgaccgtgttctgatcgtcgacgaggagggggcggtcatcgacggggaccagctcatggcggtcatcgccgacagctgggcggcagacggcatgctcaagggcggcggcattgccgcgacagtcatgtcgaatctcggcctcgaacgctaccttcaggcgcgccggctcaagcttcaccgcacgaaggtgggcgaccgctacgtcgtcgagcagatgcgtcaggacggcctgaacgtcggtggcgaacaatcgggccatatcgtgctttccgatttcggcacgaccggcgacggcctcgtcgcggcgctgcagatcctcgcggtcgtcaagcgccagggcaagacggtgagcgaaatctgccgtcgtttcgagccggtgccgcaggtcctgaagaacgttcgcgtgtcggccggcaagcccctggaggatgcggccgtgcagcaggcgatcgccgaagcagaggcgcagctcgccaagaacgggcggctgctcatccggccctccggcaccgaaccgctgatccgcgtcatggcggaaggcgacgaccgcggtcaggtcgagcgcatcgtcgacgaactcgtcaacgtgatcggcggcgtgcgcaacgctgcctga

SEQ ID NO: 6206 - protein, 450 aa, Rhizobium meliloti
MKRRYFGTDGIRGQSNIFPMTPDLAMRVGIAVGTIFRNGAHRHRVVIGKDTRLSGYMLENAMVAGFTAAGLDVFLLGPIPTPGVAMLTRSLRADIGVMISASHNAFRDNGIKLFGPDGYKLSDDIEQKIEDLLEQDMSGQLAKPEDIGRAKRVDGDIYRYIEQAKRTLPRDVTLKGLRIAIDCANGAAYKVAPSALWELGAEVVTIGTEPNGVNINLECGSTHPAALQKKVHEVRADIGIALDGDADRVLIVDEEGAVIDGDQLMAVIADSWAADGMLKGGGIAATVMSNLGLERYLQARRLKLHRTKVGDRYVVEQMRQDGLNVGGEQSGHIVLSDFGTTGDGLVAALQILAVVKRQGKTVSEICRRFEPVPQVLKNVRVSAGKPLEDAAVQQAIAEAEAQLAKNGRLLIRPSGTEPLIRVMAEGDDRGQVERIVDELVNVIGGVRNAA

SEQ ID NO: 6207 - DNA, 1353 bp, Rhodopseudomonas palustris
  CDS (1)..(1353): transl_table=11
atgagccgcagatatttcgggacggacggaatccggggccgcgccaacggtttgatcacgccggagctggccctcaaggtcggccaggccgcgggcctcgcgtttcagcgcggcgagcatcgccatcgggtcgtgatcggcaaagacacccgtctgtccggctacatgatcgagaacgcgctggtcgcgggcttcacctcggtcgggatggacgtgctgctggtcggcccgatgccgaccccggcggttgcgatgctgaccaagtcgatgcgcgccgacctcggcgtgatgatttcggcgtcgcataatctgttcgaggacaacggcattaagctgttcggcccgctcggctacaagctcagcgacgacgtcgaaaagcagatcgagctgatgctcgacgagtccctcgacaagaagctggcgcagagcgccagcctcggccgcgcccgccgcatcgatggcgtccacgatcgctacatcgaattcgccaagcgcaccctgccgcgcgagctgagcctcgaaggcctgcgcgtggtgatcgattgcgccaatggcgccgcctacaaagtggtgcccgaggcgttgtgggagctcggagccgacgtgatctcgatcggcgtcgaaccggacggcttcaacatcaacaaggaatgcggctcgaccgcgccgcaggcgttgtgcgccaaggtccgcgagatgcgcgccgatatcggcatcgcgctcgacggtgacgccgacagggtgatcttggtcgacgagcgcggccatgtggtcgacggcgatcagctgctggcggtgatcggccagagctggaaggaagacggccgcctcgccaagccgggcgtcgtcgccaccgtgatgtccaatctcgggctcgagcgcttccttgcaggcgaaggcatcgcgctgctacgcacgccggtcggcgaccgctacgtgctcgagcagatgctgaaggacggctacaatgtcggcggcgagtcctccggccacatcatcctgtccgacttcaacaccaccggcgatggcttcgtcgccgcgcttcaggtgctggcgatggtgcagaagctcggccgtccggtgtccgaagtctgccaccggttcgatccgctgccgcagatcctgaagaacgtgcgctatcgcagcggccggccgctcgatgatagcggcgtgatctcggcgatccaggacggcgagaagcggctgaacggtcacggccggctgctgatccgcccgtcgggcaccgagccggtgatccgtgtgatgggcgagggcgacgatcacgacgtggtcgaggaagtggtcgacagcatcgtcgacgcgctcggcaacgcggcggctgcagccgcctga

SEQ ID NO: 6208 - protein, 450 aa, Rhodopseudomonas palustris
MSRRYFGTDGIRGRANGLITPELALKVGQAAGLAFQRGEHRHRVVIGKDTRLSGYMIENALVAGFTSVGMDVLLVGPMPTPAVAMLTKSMRADLGVMISASHNLFEDNGIKLFGPLGYKLSDDVEKQIELMLDESLDKKLAQSASLGRARRIDGVHDRYIEFAKRTLPRELSLEGLRVVIDCANGAAYKVVPEALWELGADVISIGVEPDGFNINKECGSTAPQALCAKVREMRADIGIALDGDADRVILVDERGHVVDGDQLLAVIGQSWKEDGRLAKPGVVATVMSNLGLERFLAGEGIALLRTPVGDRYVLEQMLKDGYNVGGESSGHIILSDFNTTGDGFVAALQVLAMVQKLGRPVSEVCHRFDPLPQILKNVRYRSGRPLDDSGVISAIQDGEKRLNGHGRLLIRPSGTEPVIRVMGEGDDHDVVEEVVDSIVDALGNAAAAAA

SEQ ID NO: 6209 - DNA, 1359 bp, Rhodospirillum rubrum
  CDS (1)..(1359): transl_table=11
atggccaagcggacgctgttcggaaccgatggggtgcggggaaccgccaatagggagccgatgaccgccgatacggcgctgcgcatcggcatggcggccggtcacctgctgcgcaacggcgatcatcgccacaccgtggtgatcggcaaggatacccggctgtcgggctatatgctggaaccggccctggccgccgggttcatcagcgtcggcatggacgtggtgctgcttggtcccttgccgaccccggcggtggcgatgctcacgcggtcgttgcgcgccgatctcggggtgatgatcaccgccagccataacccgtttcaagataatggcatcaagctgttcggtcccgatggctacaagctgtccgacgatcaggaagccacgatcgaagccttgctcgacaacggtttggaaggccatcgggcggggccgacggccctgggcaaggcgcggcgcctggatgactgcaacggccgctatgtcgaattcgtcaaaagcacctttccgcgcggtcgccggcttgagggcctgcgcatcgtcgtcgattgcgcccatggcgccgcctatcgggtggcccccaaggtgctgtgggaactgggcgccaccatcgtgccgatcggcgttacccccgatggcaccaatatcaataaggactgcggctcgcttcatagccgggtgatgtgcgagaccgtggtccgcgaaggcgccgacctgggcgtggcgcttgatggtgatgccgaccgggtggtgctgtgcgacgaaaagggcgccctggtcgatggcgaccagttgttggcgctgatcgggcgcaattggaagcgggcgggcacccttcagggcggtggcgtcgtggcgacggtgatgtcgaacctcggtctggaacgcttcctgaaggacgaggggctggctttggcgcgcacgcccgttggtgatcgctatgtggtcgaacacatgcgggcggagggctataacctgggcggcgagcaatcgggccatatcgtgatgagcgatttcggcaccaccggtgatggcctgatggccgccttgcaggtgctttcggccctggtcgccgaggaccgcccggccagcgaggtgctcgacgtgttcacgccgctgccccagcttttgcgcaatgtgcgggtggccggtcacgatccccgcgccatcctggccgatccgcaggtggcccgcgcggtgagcgccggcgagggtcgccttaacggcggcggtcgcctgctcatccgcaaatcgggcaccgaaccgctgatccgggtgatggccgagggcgaggacgaggccctggtcgcccaggtggtcggcgatatctgcgccgtgatcgaaaccgccagccagtaa

SEQ ID NO: 6210 - protein, 452 aa, Rhodospirillum rubrum
MAKRTLFGTDGVRGTANREPMTADTALRIGMAAGHLLRNGDHRHTVVIGKDTRLSGYMLEPALAAGFISVGMDVVLLGPLPTPAVAMLTRSLRADLGVMITASHNPFQDNGIKLFGPDGYKLSDDQEATIEALLDNGLEGHRAGPTALGKARRLDDCNGRYVEFVKSTFPRGRRLEGLRIVVDCAHGAAYRVAPKVLWELGATIVPIGVTPDGTNINKDCGSLHSRVMCETVVREGADLGVALDGDADRVVLCDEKGALVDGDQLLALIGRNWKRAGTLQGGGVVATVMSNLGLERFLKDEGLALARTPVGDRYVVEHMRAEGYNLGGEQSGHIVMSDFGTTGDGLMAALQVLSALVAEDRPASEVLDVFTPLPQLLRNVRVAGHDPRAILADPQVARAVSAGEGRLNGGGRLLIRKSGTEPLIRVMAEGEDEALVAQVVGDICAVIETASQ

SEQ ID NO: 6211 - DNA, 1344 bp, Rhodobacter sphaeroides
  CDS (1)..(1344): transl_table=11
atgacgaggaagctcttcggcaccgatggggtgcgcggcacggccaacacccatccgatgaccgccgagatggcgctgcggctcggcgccgcggcggggcgctatttccgcccggtgggcgcaggctcgccccgggtggtgatcggcaaggacacgcggctctcgggctacatgctcgagaatgcgctgaccgcgggcctcacctcgaccgggatgaacgtgctgcttctggggccggtgcccacgcccgcggtgggctttctcacccgctcgatgcgggcggcgctgggcgtgatgatctcggccagccacaatccgcacgaggacaacgggatcaagttcttcggtcccgacgggttcaagctgtcggacgaggccgaggccgagatcgaggcgatcctcgcgggcgagatccagcccgcgcagcccggcaacatcggccgcgccaagcggatcgaggacgggcgcgggcgctatcaggaatattgcaagacgaccttcccctcgggactgcggctcgacgggctgaaggtcgtgatcgactgcgccaacggcgcggcctaccgcgcggcgcccgaggtgctgtgggagctcggcgccgaggtgatcccggtgggggtcgaacccaacggcaagaacatcaacctgcgctgcggctcgacccatccccaggccgcgggcgaagcggtgcgcgcccatggcgccgatgtggggatctgcctcgacggggatgccgatcgcgtcatcatcctcgacgagaccggcaaggaggccgacggcgaccagatcatggcgctgttcgcggcccgctgggcggacgaggggcgcctccgcgacggaacgctggtggccaccgtcatgtcgaacctcgggctcgagcggttcctcggcgcgcgggggctccggctcgagcggacgccggtgggcgaccgctatgtggtggaagcgatgcggcgcggcggctggaacctcggcggcgagcagtcgggccatatcgtcatgaccgatttcgcgaccaccggcgacgggctgctggcggggctccagttcctcgcggccatggcccagaccgggcggcgcgcctcggaccttgcgcgcagtttcgagaccgtgccgcagcttctgcagaacgtgcgctacgcggccgggcaggagccgctcaaggcgccgggcgtgcaggcggtgatccgcgacgccgaggtgcggctgaacggggcggggcggcttctgatccgcaagtcgggcaccgagccgctgatccgggtcatggccgagtgcgaggacgaggcgctgctccgcgacgtggtcgaggagatcgtggctgccgtccgggacgcggcgtaa

SEQ ID NO: 6212 - protein, 447 aa, Rhodobacter sphaeroides
MTRKLFGTDGVRGTANTHPMTAEMALRLGAAAGRYFRPVGAGSPRVVIGKDTRLSGYMLENALTAGLTSTGMNVLLLGPVPTPAVGFLTRSMRAALGVMISASHNPHEDNGIKFFGPDGFKLSDEAEAEIEAILAGEIQPAQPGNIGRAKRIEDGRGRYQEYCKTTFPSGLRLDGLKVVIDCANGAAYRAAPEVLWELGAEVIPVGVEPNGKNINLRCGSTHPQAAGEAVRAHGADVGICLDGDADRVIILDETGKEADGDQIMALFAARWADEGRLRDGTLVATVMSNLGLERFLGARGLRLERTPVGDRYVVEAMRRGGWNLGGEQSGHIVMTDFATTGDGLLAGLQFLAAMAQTGRRASDLARSFETVPQLLQNVRYAAGQEPLKAPGVQAVIRDAEVRLNGAGRLLIRKSGTEPLIRVMAECEDEALLRDVVEEIVAAVRDAA

SEQ ID NO: 6213 - DNA, 1338 bp, Rhodococcus sp
  CDS (1)..(1338): transl_table=11
atgggtcgattgttcgggacggatggggttcgtggtctcgcgaataccgagctgaccgccgagttggcgttgcaggtggcctccgccgccgcgacggtgctggcgtcgccgggttcggggggacgcaagacggctgtggtcggtcgcgacccgagagccagcggtgaaatgctcgaggcggcggtcgtcgcgggcctgacgtcggccggtgtcgacgttctgaacgtcggggtgctgccgacacccgcggtggcctacctgaccgcggcgctggacgcagctctcggtgtcatgatctccgcctcgcacaatcccatgcccgacaacggcatcaagatcttcgcggccggtggacacaaactcgacgacgaggtggaagaccggatcgaggccgtcgccgccgggaccacgacacggcgggcgccgaccggtgcggggatcggacgtgtccgcacggtgccggatgccgcggaacggtatctgcagcacctggccaccgcactcccgaacagcctcgacgggctgaccgtggtggtggactgcgcgcacggcgcggcatcgggcgtcgctcccgccgcctatcgggccgccggcgccaccgtcgtcgcgatcaacgccgaacccgacggactcaatatcaacgagaactgcgggtcgactcacctcgaaagcctgcagaaggcggtcgtcgagcacggcgccgatctggggctggcgcacgacggggatgcggatcggtgccttgccgtcgacgccgccggttccctcatcgacggcgacgccatcatgaccgtgctcgccctcggtatgcgcgacgcaggcgaactggtggacaacaccctcgtcgcgacggtcatgagtaatctcggtctgcacatcgcgatgcgggaggccgggatcacgctggtcaccactgccgtcggtgatcgctacgtcctcgaaggactccggtccggtggcttcagcctgggcggcgaacagtccggacacgtcgtgttccccgccttcggcaccaccggcgacggagtgttgacaggactgcggctgatgggccggatggcggagaccggacaggcgatcgcagatctggcgtcggcgatgacggcgctcccgcaggttctggtgaacgtgagggtcgccgacaagcgcgccgtcgccgcgtccccggtggtgctggacgcggtcgtggccgccgagcgcagcctgggcgacaacggccgggtgctgctgcggccgtcgggaaccgaacaactcgtccgtgtgatggtcgaggcgtcggacatcgaagtagcccgtaaactcgccgacgaactggcgggcaccgtcgcctccgtgtga

SEQ ID NO: 6214 - protein, 445 aa, Rhodococcus sp
MGRLFGTDGVRGLANTELTAELALQVASAAATVLASPGSGGRKTAVVGRDPRASGEMLEAAVVAGLTSAGVDVLNVGVLPTPAVAYLTAALDAALGVMISASHNPMPDNGIKIFAAGGHKLDDEVEDRIEAVAAGTTTRRAPTGAGIGRVRTVPDAAERYLQHLATALPNSLDGLTVVVDCAHGAASGVAPAAYRAAGATVVAINAEPDGLNINENCGSTHLESLQKAVVEHGADLGLAHDGDADRCLAVDAAGSLIDGDAIMTVLALGMRDAGELVDNTLVATVMSNLGLHIAMREAGITLVTTAVGDRYVLEGLRSGGFSLGGEQSGHVVFPAFGTTGDGVLTGLRLMGRMAETGQAIADLASAMTALPQVLVNVRVADKRAVAASPVVLDAVVAAERSLGDNGRVLLRPSGTEQLVRVMVEASDIEVARKLADELAGTVASV

SEQ ID NO: 6215 - DNA, 1335 bp, Rubrobacter xylanophilus
  CDS (1)..(1335): transl_table=11
ttggagcccaaagaaagagagctggccttcgggaccgacggcgtgcggggggtggccaaccgcgggctgctccccgaggacgccctccggctggggctcgccgccgcccggcgcttcggcgggacggtggtcatcgggcgggacacccggctctcgggggggatgctgtcctcggcgctggccgcgggggtggccagcggcggcgcgcgggcgctggacctcggggtgctgccgacccccggggcggcggcgctggcggcgcgcctcggggcctcggcggcgggggtggtgagcgcctcccacaacccctacccggacaacgggatcaagttcctctccggcgaggggcgcaagctcccgcagcggacggagcgggagctcgagcggctggcgcgggaccccttccccgagaggccggtcgccgggggggtggggagggtggaggcgctggaggacgcgccggagatgtacgccggggcggtgctcggggcgctgaggccggaggtgccggggctcagggtgctcctggactgcgccaacggggccgcctgcgcggtcgccccccggatcttccgggagctcggggtccagctcaccgtggtcggcgacgccccggacgggaccaacataaacgaggggtgcggctcgacccacatagagcgcctggaggtcgcgggccacgacgtggccttcgccttcgacggtgacgccgaccgcgtgctggccctcgacgagcgggggagggtggtggacggcgacaggatcatcgccatcctcgcccgcgacctcaaggagcgcgggcggctcgggggcggggcggtggtcacggtcatgagcaacctgggcctcctcaaggcgctcgagtcgctcgggataccctgcgaggtcaccccggtcggggaccggcacgtcgcggaggcgatgctgcgggttggggcctcggtggggggcgagcagtccgggcacatcatcgtggcggagcacgccacgacgggcgacgggatcgtgacggcgctcgccctgctggacgtgatggcccgcaccgggcgcagcctctccgagctcgccggggtgatggaggtctacccgcaggtgctcgtcaacgtccgggtggagcgggacggcggggccgggcgggtcgccgcctccgggacggtggagagggcggtcgaggatgcccggagggagctcggggagcgggggaggatcgtgctgcggccgagcggcaccgagccggttgtgcgggtgatggtggagcacgaggacgaggaggtgtgccgcagggtgtgcgagagggtcgccggggtggtctcgcgcgaggggggcggggggtga

SEQ ID NO: 6216 - protein, 444 aa, Rubrobacter xylanophilus
MEPKERELAFGTDGVRGVANRGLLPEDALRLGLAAARRFGGTVVIGRDTRLSGGMLSSALAAGVASGGARALDLGVLPTPGAAALAARLGASAAGVVSASHNPYPDNGIKFLSGEGRKLPQRTERELERLARDPFPERPVAGGVGRVEALEDAPEMYAGAVLGALRPEVPGLRVLLDCANGAACAVAPRIFRELGVQLTVVGDAPDGTNINEGCGSTHIERLEVAGHDVAFAFDGDADRVLALDERGRVVDGDRIIAILARDLKERGRLGGGAVVTVMSNLGLLKALESLGIPCEVTPVGDRHVAEAMLRVGASVGGEQSGHIIVAEHATTGDGIVTALALLDVMARTGRSLSELAGVMEVYPQVLVNVRVERDGGAGRVAASGTVERAVEDARRELGERGRIVLRPSGTEPVVRVMVEHEDEEVCRRVCERVAGVVSREGGGG

SEQ ID NO: 6217 - DNA, 1341 bp, Saccharophagus degradans
  CDS (1)..(1341): transl_table=11
atggcacggaaatattttggtaccgacggtattcgtgggttggtgggagagggtgttattactcctcagttcttcctgcaattggggtgggctgtgggcaaggtgctcgctcagcaaaatggcgataaaagtggcggtttggtattgattggtaaagatacccgtatttctggctacatgtttgaatcagcattagaggccggcttaataagtgcgggtgtagatgtaggcttgttgggccccatgcctacgccggcaattgcttatttgacgcgtacctttcaggccagtgccggcatcgtaattagcgcttctcataacccgtacaccgataacggcattaagctatttaataccgacggcaccaaattgccagatgacgtggagttggctattgaagaccagttagatcgcgctatgaccaccgcgtctaaattgggtaaggcgcgccgaattgccgatgccgaaggtcgctatatcgagttctgtaagggttctttgccctggggctttaacttgcgcggcctgaatatagtagtggattgcgccaacggtgccacttacgaggttgcccccaaagtatttggcgagcttggtgccaatgtaattcctattgcgaataagccagatggcctcaatattaatttagattgtggctctactaagctcaaccagctgcaaaagcacgtattagaaaccggtgcagatatgggcattgccttcgatggcgatggcgaccgcgttatgtttgtagatgaaaaaggcgaggtgctcgacggcgatcagctcttgtttattatcgcgtcgcacaagcataaaaacggcggttgttccggtgttgttggtaccttaatgagtaatttcggctttgagttaggccttaaaaaccaaggtattccgtttgagcgcgctaaagttggcgaccgctatgttattgaggcgatgaaaaataacggctggcaggttggcggcgagtcatctggtcatattgtgtgctcagatgttactaccaccggtgacggtattattgctgcgctgcaagtgctgttggccttgaaggcagaaaagcagtcgttgcaccagcttaagttgcgcatgcaaaaaatgccgcaagttatgattaacgtgcgggtcaccaataaggtagaccttgatagccacgagcaggtgcaggcggctatagccagcgcagaaaaacgtttggatggaaaagggcgtgttttattgcgtgcatcgggtaccgagccagttatacgggtgatggtggaagggcaagagcaccagctggtagcttctttagctcaagaattagccgatatagtgggcgaagcagtagcttaa

SEQ ID NO: 6218 - protein, 446 aa, Saccharophagus degradans
MARKYFGTDGIRGLVGEGVITPQFFLQLGWAVGKVLAQQNGDKSGGLVLIGKDTRISGYMFESALEAGLISAGVDVGLLGPMPTPAIAYLTRTFQASAGIVISASHNPYTDNGIKLFNTDGTKLPDDVELAIEDQLDRAMTTASKLGKARRIADAEGRYIEFCKGSLPWGFNLRGLNIVVDCANGATYEVAPKVFGELGANVIPIANKPDGLNINLDCGSTKLNQLQKHVLETGADMGIAFDGDGDRVMFVDEKGEVLDGDQLLFIIASHKHKNGGCSGVVGTLMSNFGFELGLKNQGIPFERAKVGDRYVIEAMKNNGWQVGGESSGHIVCSDVTTTGDGIIAALQVLLALKAEKQSLHQLKLRMQKMPQVMINVRVTNKVDLDSHEQVQAAIASAEKRLDGKGRVLLRASGTEPVIRVMVEGQEHQLVASLAQELADIVGEAVA

SEQ ID NO: 6219 - DNA, 1338 bp, Salmonella arizonae
  CDS (1)..(1338): transl_table=11
atgagtaatcgtaaatatttcggcaccgatgggattcgcgggcgtgtaggcgatgcccccattacacctgattttgtgcttaaactggggtgggccgccggaaaagtgctggcgcgtcatggttcgcgtaaaattattatcggtaaagatacgcgtatttccggctatatgctggaatccgcgctggaggcgggccttgccgctgcggggctgtcggcctcgtttaccggacctatgccaacgccagccgtcgcctatctgacgcggactttccgcgcggaggcgggtatcgttatctcggcgtcgcataacccgttctatgataacgggattaaattcttctctatcgatggcacgaaactgcctgacgatgtggaagaagccatcgaagccgaaatggaaaaagagatcacctgcgtagactccgccgagctggggaaagcgagccgcatcgtcgacgccgccggacgctatattgagttttgtaaaggcaccttcccgaacgaactgagcctcaacggcctgaaagtggtcgtggattgcgccaacggcgcaacctaccacatcgcgccgaatgtgctgcgcgagctgggcgcgagtgttatcgccattggctgcgagccaaacggcgtcaacattaacgaagaggtgggcgcgaccgacgtgcgcgcgttgcaggcgcgcgtgctggcggagaaagcggacctcggtatcgcgcttgacggcgatggcgaccgggtcatcatggttgaccatgaaggcgcaaaagtcgatggcgatcagataatgtatatcatcgcgcgcgaagggctgcgtcaaggccaactgcgcggcggcgcggtgggtacgctgatgagcaatatgggtctggagctggcgctcaagcagcttggtattccgtttgcccgggcgaaagtgggcgaccgctacgtgctggaaaaattgcaggaaaaaggctggcgcatcggcgcggaaaactccggtcacgttattttgctggataaaacgaccactggcgacggtatcgttgcggggctacaggttctggcggcgatggtgcgtaatcacatgagtctgcacgatctgtgtagcggtatgaaaatgttcccgcagattctggttaacgtgcgttataccgctggtagcggcgatccgctggaaaatgaagcggtgaaagcggtaacggcggacgtagaagctacgctcggcaatcgtgggcgggtactgttacgtaaatccggcaccgagccgctgattcgcgtgatggttgaaggcgaagatgaagcgcaggttagggcattcgcccatcgtatcgcggacgcggtaaaagccgtttaa

SEQ ID NO: 6220 - protein, 445 aa, Salmonella arizonae
MSNRKYFGTDGIRGRVGDAPITPDFVLKLGWAAGKVLARHGSRKIIIGKDTRISGYMLESALEAGLAAAGLSASFTGPMPTPAVAYLTRTFRAEAGIVISASHNPFYDNGIKFFSIDGTKLPDDVEEAIEAEMEKEITCVDSAELGKASRIVDAAGRYIEFCKGTFPNELSLNGLKVVVDCANGATYHIAPNVLRELGASVIAIGCEPNGVNINEEVGATDVRALQARVLAEKADLGIALDGDGDRVIMVDHEGAKVDGDQIMYIIAREGLRQGQLRGGAVGTLMSNMGLELALKQLGIPFARAKVGDRYVLEKLQEKGWRIGAENSGHVILLDKTTTGDGIVAGLQVLAAMVRNHMSLHDLCSGMKMFPQILVNVRYTAGSGDPLENEAVKAVTADVEATLGNRGRVLLRKSGTEPLIRVMVEGEDEAQVRAFAHRIADAVKAV

SEQ ID NO: 6221 - DNA, 1338 bp, Salmonella choleraesuis
  CDS (1)..(1338): transl_table=11
atgagtaatcgtaaatatttcggtaccgatgggattcgcggacgtgtaggcaatgcccccattacacctgatttcgtgcttaaactgggttgggctgccggaaaagtgctggcgcgtcatggctcgcgtaaaatcattatcggtaaagatacgcgtatttccggctatatgctggagtccgcgctggaggcgggccttgccgctgcggggctgtcggcctcgtttaccggacctatgccaacgccagccgtcgcctatctgacgcggactttccgcgcggaggcgggtatcgttatctcggcttcgcataacccgttctatgataacggcattaaattcttctctatcgacggtacgaaactgcctgacgatgtggaagaagccatcgaagccgaaatggaaaaagagatcacctgcgtagactccgccgagctggggaaagcgagccgcatcgtcgatgccgccggacgctatattgagttctgtaaaggcaccttcccgaacgaactgagcctcaatggcctgaaagtggttgtggattgcgccaacggcgctacctaccatatcgcaccgaatgtgctgcgcgagctgggcgcgaccgttatcgccatcggctgtgagccaaacggcgtcaacattaacgaagaagtgggcgcgaccgacgtgcgcgcgttgcaggcgcgcgtgttggcggagaaggcggacctcggcatcgcgcttgacggcgacggcgaccgggtcatcatggttgaccatgaaggcaataaagtcgatggcgatcagattatgtatatcatcgcgcgcgaagggctgcgccaggggcaactgcgcggcggcgcggtggggacgctgatgagcaatatggggctggagctggcgctcaagcagcttggcattccgttttcccgggcgaaagtgggcgaccgctacgtgctggaaaaattgcaggaaaaaggctggcgcatcggcgcggaaaactctggtcacgttattctgttggataaaacgaccactggcgacggtattgtagcggggctacaagttctggcggcgatggtgcgtaatcatatgagtctgcacgatctgtgcagcggtatgaaaatgttcccgcagattctggttaacgtgcgttacaccgccggtagcggcgatccgctggaaaatgaagcggtgaaagcggtaacggcggacgtagaagccacgctcggcaatcgtgggcgggtactgctacgtaaatccggtaccgaaccgttgattcgcgtgatggtggaaggcgaggatgaagcgcaggttacggcattcgcccatcgtatcgcggatgcggtaaaagccgtttaa

SEQ ID NO: 6222 - protein, 445 aa, Salmonella choleraesuis
MSNRKYFGTDGIRGRVGNAPITPDFVLKLGWAAGKVLARHGSRKIIIGKDTRISGYMLESALEAGLAAAGLSASFTGPMPTPAVAYLTRTFRAEAGIVISASHNPFYDNGIKFFSIDGTKLPDDVEEAIEAEMEKEITCVDSAELGKASRIVDAAGRYIEFCKGTFPNELSLNGLKVVVDCANGATYHIAPNVLRELGATVIAIGCEPNGVNINEEVGATDVRALQARVLAEKADLGIALDGDGDRVIMVDHEGNKVDGDQIMYIIAREGLRQGQLRGGAVGTLMSNMGLELALKQLGIPFSRAKVGDRYVLEKLQEKGWRIGAENSGHVILLDKTTTGDGIVAGLQVLAAMVRNHMSLHDLCSGMKMFPQILVNVRYTAGSGDPLENEAVKAVTADVEATLGNRGRVLLRKSGTEPLIRVMVEGEDEAQVTAFAHRIADAVKAV

SEQ ID NO: 6223 - DNA, 1338 bp, Salmonella paratyphi A
  CDS (1)..(1338): transl_table=11
atgagtaatcgtaaatatttcggtaccgatgggattcgcggacgtgtaggcaatgcccccattacacctgatttcgtgcttaaactgggttgggctgccggaaaagtgctggcgcgtcatggctcgcgtaaaatcattatcggtaaagatacgcgtatttccggctatatgctggagtccgcgctggaggcgggccttgccgctgcgggactgtcggcctcgtttaccggacctatgccaacgccagccgtcgcctatctgacgcggactttccgcgcggaggcgggtatcgttatctcggcttcgcataacccgttctatgataacggcattaaattcttctctatcgacggtacgaaactgcctgacgatgtggaagaagccatcgaagccgaaatggaaaaagagatcacctgcgtagactccgccgagctgggtaaagccagccgcatcgtcgacgccgccggacgctatatcgagttctgtaaaggcaccttcccgaacgaactgagcctcaatggcctgaaagtggttgtagattgcgccaacggcgctacctaccatatcgcgccgaatgtgctgcgcgagctgggcgcgaccgttatcgctattggctgtgagccaaacggcgtcaacattaacgaagaagtgggcgcgaccgacgtgcgcgcgttgcaggcgcgcgtgttggtggagaaggcggacctcggcatcgcgcttgacggcgacggcgaccgggtcatcatggttgaccatgaaggcaataaagtcgatggcgatcagatcatgtatatcatcgcgcgcgaagggctgcgccaggggcaactgcgcggcggcgcggtggggacgctgatgagcaatatggggctggagctggcgctcaagcagcttggcattccgtttgcccgggcgaaagtgggcgaccgctacgtgctggaaaaattgcaggaaaaaggctggcgcatcggcgcggaaaactctggtcacgttattctgttggataaaacgaccactggcgacggtattgtggcggggctacaagttctggcggcgatggtgcgtaatcatatgagtctgcacgatctgtgcagcggaatgaaaatgttcccgcagattctggttaacgtgcgttacaccgctggtagcggcgatccgctggaaaatgatgcggtgaaagcggtaacggcggacgtagaagccacgctcggcaatcgtgggcgggtactgctacgtaaatccggtaccgaaccgctgattcgcgtgatggttgaaggcgaggatgaagcgcaggttacggctttcgcccatcgtatcgcggatgcggtaaaagccgtttaa

SEQ ID NO: 6224 - protein, 445 aa, Salmonella paratyphi A
MSNRKYFGTDGIRGRVGNAPITPDFVLKLGWAAGKVLARHGSRKIIIGKDTRISGYMLESALEAGLAAAGLSASFTGPMPTPAVAYLTRTFRAEAGIVISASHNPFYDNGIKFFSIDGTKLPDDVEEAIEAEMEKEITCVDSAELGKASRIVDAAGRYIEFCKGTFPNELSLNGLKVVVDCANGATYHIAPNVLRELGATVIAIGCEPNGVNINEEVGATDVRALQARVLVEKADLGIALDGDGDRVIMVDHEGNKVDGDQIMYIIAREGLRQGQLRGGAVGTLMSNMGLELALKQLGIPFARAKVGDRYVLEKLQEKGWRIGAENSGHVILLDKTTTGDGIVAGLQVLAAMVRNHMSLHDLCSGMKMFPQILVNVRYTAGSGDPLENDAVKAVTADVEATLGNRGRVLLRKSGTEPLIRVMVEGEDEAQVTAFAHRIADAVKAV

SEQ ID NO: 6225 - DNA, 1338 bp, Salmonella paratyphi B
  CDS (1)..(1338): transl_table=11
atgagtaatcgtaaatatttcggtaccgatgggattcgcggacgtgtaggcaatgcccccattacacctgatttcgtgcttaaactgggttgggctgccggaaaagtgctggcgcgtcatggttcgcgtaaaatcattatcggtaaagatacgcgtatttccggctatatgctggagtccgcgctggaggcgggtcttgccgctgcgggactgtcggcctcgtttaccgggcctatgccaacgccagccgtcgcctatctgacgcggactttccgcgcggaggcgggtatcgttatctcggcttcgcataacccgttctatgataacggcattaaattcttctctatcgacggtacgaaactgcctgacgatgtggaagaagccatcgaagccgaaatggaaaaagagatcacctgcgtagactccgccgagctggggaaagcgagccgcatcgtcgatgccgccggacgctatattgagttctgtaaaggcaccttcccgaacgaactgagcctcaatggcctgaaagtggttgtggattgcgccaacggcgctacctaccatatcgcgccgaatgtgctgcgcgagctgggcgcgaccgttatcgccatcggctgtgagccaaacggcgtcaacattaacgaagaagtgggcgcgaccgacgtgcgcgcgttgcaggcgcgcgtgttggcggagaaggcggacctcggcatcgcgcttgacggcgacggcgaccgggtcatcatggttgaccatgaaggcaataaagtcgatggcgatcagatcatgtatatcatcgcgcgcgaagggctgcgccaggggcaactgcgcggcggcgcggtggggacgctgatgagcaatatggggctggagctggcgctcaagcagcttggcattccgtttgcccgggcgaaagtgggcgaccgctacgtgctggaaaaattgcaggaaaaaggctggcgcatcggcgcggaaaactctggtcacgttattctgctggataaaacgaccactggcgacggtattgtagcggggctacaagttctggcggcgatggtgcgtaatcatatgagtctgcacgatctgtgcagcggtatgaaaatgttcccgcagattctggttaacgtgcgttacaccgccggtagcggcgatccgctggaaaatgaagcggtgaaagcggtaacggcggacgtagaagccacgctcggcaatcgtgggcgggtactgctacgtaaatccggtaccgaaccgctgattcgcgtgatggttgaaggcgaggatgaagcgcaggttacggcattcgcccatcgtatcgcggatgcggtaaaagccgtttaa

SEQ ID NO: 6226 - protein, 445 aa, Salmonella paratyphi B
MSNRKYFGTDGIRGRVGNAPITPDFVLKLGWAAGKVLARHGSRKIIIGKDTRISGYMLESALEAGLAAAGLSASFTGPMPTPAVAYLTRTFRAEAGIVISASHNPFYDNGIKFFSIDGTKLPDDVEEAIEAEMEKEITCVDSAELGKASRIVDAAGRYIEFCKGTFPNELSLNGLKVVVDCANGATYHIAPNVLRELGATVIAIGCEPNGVNINEEVGATDVRALQARVLAEKADLGIALDGDGDRVIMVDHEGNKVDGDQIMYIIAREGLRQGQLRGGAVGTLMSNMGLELALKQLGIPFARAKVGDRYVLEKLQEKGWRIGAENSGHVILLDKTTTGDGIVAGLQVLAAMVRNHMSLHDLCSGMKMFPQILVNVRYTAGSGDPLENEAVKAVTADVEATLGNRGRVLLRKSGTEPLIRVMVEGEDEAQVTAFAHRIADAVKAV

SEQ ID NO: 6227 - DNA, 1338 bp, Shewanella oneidensis
  CDS (1)..(1338): transl_table=11
atgagcgaacgtaaattttttggaactgatggcattcgtggcaaagtgggctctggccagatgacgcctgaactggcattaaaattgggctgggctgctggaagggtcttatcccgtagtggcactaaaaaagtcattattggtaaagatacccgtatttcaggttatatgtttgaatcagcgttagaggcgggtctttctgccgcagggcttaatgtgatgttaatgggaccaatgccaacgcctgcggtggcttatctcactcgcactttccgcgccgaagcgggcgtggtgatcagtgcatcccacaatccttactatgataatggcattaaatttttctcaaccgatggcagtaaacttgacgacaatctagagctagaaattgaagcagaactcgaaaaaccattggtttgtgttgaatcgcatctcctcggtaaagtgtcacgtatcgaagatgcccgtggccgttatattgaatactgcaaaggtaactttcctgcagatcaaaccttaacggggctaaaaattgtggtggactgtgcccatggtgcaacctatcacattgctccagcggtatttagagagttaggtgctgaagtaattgccattggtgataaaccaaacggagtcaacatcaatgacaaagtgggtgcaacgtccatggcgaagatttgcgaaactgttttggctgaaactgctgatttagggattgcgctcgatggcgatggtgaccgtatcatgatggtcaacagcaaaggtgaagtgatcgacggcgatcaaattctttatatccttgcctgtgatgctaaagcccgtggcgtgttacgcggtggggtggtggggacacttatgtctaacctgggccttgatttagccctgcaagcgttagatattccctttgcccgttcaaaagtgggcgaccgttatgtgatggagttactgaaagaactcgattggcgcattgggggggaaaattcgggtcatattcttaaccttgaccatggtacgacgggcgatggtattgtggcggggattttggtactggcagccatgcgtcgtcaaaacgcaacgttagagcaattaaccgcgcctatggaaatgttgccgcaagtgttagtgaatgtgcgttttgaaggcgaacatgatcccttaagttctgataaagtcaaggcagcacaagcccaagttgaatcagagcttggtgttcgtggccgagtattactacgtaaatcaggaacagaaccattaatccgcgttatggttgaaggcgatgatcacaatacggtgttagcgcacgctaatctgatcgcagatgcggtaaaatcggcgagctaa

SEQ ID NO: 6228 - protein, 445 aa, Shewanella oneidensis
MSERKFFGTDGIRGKVGSGQMTPELALKLGWAAGRVLSRSGTKKVIIGKDTRISGYMFESALEAGLSAAGLNVMLMGPMPTPAVAYLTRTFRAEAGVVISASHNPYYDNGIKFFSTDGSKLDDNLELEIEAELEKPLVCVESHLLGKVSRIEDARGRYIEYCKGNFPADQTLTGLKIVVDCAHGATYHIAPAVFRELGAEVIAIGDKPNGVNINDKVGATSMAKICETVLAETADLGIALDGDGDRIMMVNSKGEVIDGDQILYILACDAKARGVLRGGVVGTLMSNLGLDLALQALDIPFARSKVGDRYVMELLKELDWRIGGENSGHILNLDHGTTGDGIVAGILVLAAMRRQNATLEQLTAPMEMLPQVLVNVRFEGEHDPLSSDKVKAAQAQVESELGVRGRVLLRKSGTEPLIRVMVEGDDHNTVLAHANLIADAVKSAS

SEQ ID NO: 6229 - DNA, 1338 bp, Shewanella sp
  CDS (1)..(1338): transl_table=11
atgagcgaacgtaaattttttggaaccgatggtattcgtggcaaggtaggttcaggccagatgactcccgagctggcattaaagttgggttgggctgctgggcgggtgttatcccgcagcggcacgaaaaaagtgattattggtaaagatacccgtatttcgggttatatgtttgagtctgccttagaggcgggtctttcggcagctggcctcaatgtgatgttaatggggccaatgccaacacctgctgtggcttatctcactcgcactttccgcgcagaggcgggggtggtgatcagtgcatcccacaatccttattacgataatggcattaagtttttctcaaccgatggcagcaagctcgacgataacctagagctggaaattgaagccgaattagaaaagcccttagagtgtgttgagtcacatctattgggcaaagtgtcacgtattgaagatgcgcgtggccgttatatcgaatactgcaagggtaacttccctgcggatcaaaccctaacagggttaaaaattgtcgtggactgtgctcacggagcgacctatcacattgcacctgcggtattccgtgagttaggcgcagaggtgattgccattggtgataagcccaatggcgtcaacatcaatgacaaagtgggcgccacgtccatggcgaaaatttgcgaaaccgtattgaccgaaggcgccgatttagggattgcactcgatggtgacggtgaccgtattatgatggtcaacagccgtggtgaagttatcgatggtgaccaaattctctatattctggcctgcgatgctaaagcccgtggcgtgctgcgtggtggcgttgtcggcacgctaatgtctaatctaggcctcgatttagccttgcaagccttagatattccttttgcccgctctaaagtgggtgaccgttatgtgatggagttactgaaagaactcgattggcgcattggcggcgaaaactcgggccacatccttaaccttgaccatggcacgacgggagatggtatcgtggcaggtatcttggtattggcggcaatgcgtcgacaaaatgccacactagagcaactcactgccccaatggagatgctgccacaagtgttagtgaatgtgcgttttgagggggaacacgacccattaagctcagataaagttaaagccgctcaagctcaggttgaatcagaactgggggcccgaggtcgcgtattactacgtaaatcaggtactgaaccgttaattcgcgtaatggttgaaggtgatgatcacaatactgtgttagcgcacgccaatttgatcgcagatgcggtaaaatcggcgagctaa

SEQ ID NO: 6230 - protein, 445 aa, Shewanella sp
MSERKFFGTDGIRGKVGSGQMTPELALKLGWAAGRVLSRSGTKKVIIGKDTRISGYMFESALEAGLSAAGLNVMLMGPMPTPAVAYLTRTFRAEAGVVISASHNPYYDNGIKFFSTDGSKLDDNLELEIEAELEKPLECVESHLLGKVSRIEDARGRYIEYCKGNFPADQTLTGLKIVVDCAHGATYHIAPAVFRELGAEVIAIGDKPNGVNINDKVGATSMAKICETVLTEGADLGIALDGDGDRIMMVNSRGEVIDGDQILYILACDAKARGVLRGGVVGTLMSNLGLDLALQALDIPFARSKVGDRYVMELLKELDWRIGGENSGHILNLDHGTTGDGIVAGILVLAAMRRQNATLEQLTAPMEMLPQVLVNVRFEGEHDPLSSDKVKAAQAQVESELGARGRVLLRKSGTEPLIRVMVEGDDHNTVLAHANLIADAVKSAS

SEQ ID NO: 6231 - DNA, 1338 bp, Shigella flexneri
  CDS (1)..(1338): transl_table=11
atgagtaatcgtaaatatttcggtaccgatgggattcgtggtcgtgtaggggatgcgccgatcacacctgattttgtgcttaagctgggttgggccgcgggtaaagtgctggcgcgccacggctcccgtaagattattattggtaaagacacgcgtatttctggctatatgctggagtcagcactggaagcgggtctggcggcagcgggcctttccgcactcttcactggcccgatgccaacaccggccgtggcttatctgacgcgtaccttccgcgcagaggccggaattgtgatatctgcatcgcataacccgttctacgataatgggattaaattcttctctatcgacggcactaaactgccggatgcggtagaagaggccatcgaagcggaaatggaaaaggagatcagctgcgttgattcggctgaactgggtaaagccagccgtatcgttgatgccgcgggtcgctatatcgagttttgcaaagccacgttcccgaacgaacttagcctcagtgaactgaagattgtggtggattgtgcaaacggtgcgacttatcacatcgcgccgaacgtgctgcgcgaactgggggcgaacgttatcgctatcggttgtgagccaaacggtgtaaacatcaatgccgaagtgggggctaccgacgttcgcgcgctccaggctcgtgtgctggctgaaaaagcggatctcggtattgccttcgacggcgacggcgatcgcgtgattatggttgaccatgaaggcaataaagtctatggcgatcagatcatgtatatcatcgcgcgtgaaggtcttcgtcagggccacctgcgtggtggtgctgtgggtacattgatgagcaacatggggcttgaactggcgctgaaacagttaggaattccatttgcgcgcgcgaaagtgggtgaccgctacgtactggaaaaaatgcaggagaaaggctggcgtatcggtgcagagaattccggtcatgtgatcctgctggataaaaccactaccggtgccggcatcgttgctggcttgcaggtgctgacggcgatggcacgtaaccatatgagcctgcacgacctttgcagcggcatgaaaatgttcccgcagattctggttaacgtacgttacaccgcaggtagcggcgatccgcttgagcatgagtcagttaaagccgtgaccgcagaggttgaagctgcgctgggcaaccgtggacgcgtgttgctgcgtaaatccggcaccgaaccgttaattcgcgtgatggtggaaggcgaagacgcagcgcaggtgactgaatttgcacaccgcatcaccgatgcagtaaaagccgtttaa

SEQ ID NO: 6232 - protein, 445 aa, Shigella flexneri
MSNRKYFGTDGIRGRVGDAPITPDFVLKLGWAAGKVLARHGSRKIIIGKDTRISGYMLESALEAGLAAAGLSALFTGPMPTPAVAYLTRTFRAEAGIVISASHNPFYDNGIKFFSIDGTKLPDAVEEAIEAEMEKEISCVDSAELGKASRIVDAAGRYIEFCKATFPNELSLSELKIVVDCANGATYHIAPNVLRELGANVIAIGCEPNGVNINAEVGATDVRALQARVLAEKADLGIAFDGDGDRVIMVDHEGNKVYGDQIMYIIAREGLRQGHLRGGAVGTLMSNMGLELALKQLGIPFARAKVGDRYVLEKMQEKGWRIGAENSGHVILLDKTTTGAGIVAGLQVLTAMARNHMSLHDLCSGMKMFPQILVNVRYTAGSGDPLEHESVKAVTAEVEAALGNRGRVLLRKSGTEPLIRVMVEGEDAAQVTEFAHRITDAVKAV

SEQ ID NO: 6233 - DNA, 1347 bp, Silicibacter pomeroyi
  CDS (1)..(1347): transl_table=11
atgcgtaagctgttcggaaccgatggggtgcggggcaccgcgaatacccatccgatgaccgccgaaatggcgctcaggatcggcgcggccgtcgggcgctatttccggcgcgaggctggcggcgtgcatcgtgtcgtcatcggcaaggatacccgcctgtctggctacatgttcgagaacgcgttgaccgcgggccttgcctcgaccggcatgaacgtgctgctgctggggcctgtgcccacacccgccgttggcctgatgacccgttcgatgcgcgccgatctgggcgtgatgatctcggccagccacaattcagccgaggataacggtatcaagttcttcggtcccgacgggttcaagctgtccgatcaggccgagatggagatcgaggagatggtcgcgaccggcgtgcggctggcgcaggcgcataatattggccgtgtgcgccgggtggatgatgcgcgctttcgctatggcgagcgggtgaaatcctcgctcacgcgcgggctgcggctcgacgggctcaaggtggtggtggattgcgccaacggggccgcgcatcgcaccgcacctgaaatcctgtgggaactgggtgccgatgtggtgccgattgggacgtcgccggacggtctcaacatcaaccgtggctgcggctcgacctgtccgcgcaccgcgtccgaggcggtggtggcccatggcgcggatgtggggatctgcctggacggggacgccgaccgggtcatcgtgatcgatcaacttggaaatgttgccgatggcgaccagatcatggcgctgttggcggcgcgctgggcggccgagggccgattgcagggcggcgccctggtggcgaccgtgatgtcgaacctggggcttgaacggtttctgggcgatcgcggcatcgggctggagcggaccgcggtcggtgatcgctatgtggtcgagcggatgcgcgaaggtggcttcaacctggggggcgagcaatcgggccatatcgtgatgagcgacttcgccaccacgggtgacgggctgatggcgggcttgcatttcctgggcgagatgatgcggtctggtcagccctcctccgagttggtgcgccagttcgttccggtcccgcaactgctcaagaacgtgcggtttgcaaaggggcagaccccgcttgacgccgcatcggtgcaatcggcgatagccgaggccgagggggtgttgaacggctctgggcgtctgttgatccgcaagtcgggcaccgaaccgctgatccgggtgatggccgagtgtgaggacgaggcgctgctgaccagggcggtcgacagcgtggtcgaggcggtggccgacgcggtccaggcttga

SEQ ID NO: 6234 - protein, 448 aa, Silicibacter pomeroyi
MRKLFGTDGVRGTANTHPMTAEMALRIGAAVGRYFRREAGGVHRVVIGKDTRLSGYMFENALTAGLASTGMNVLLLGPVPTPAVGLMTRSMRADLGVMISASHNSAEDNGIKFFGPDGFKLSDQAEMEIEEMVATGVRLAQAHNIGRVRRVDDARFRYGERVKSSLTRGLRLDGLKVVVDCANGAAHRTAPEILWELGADVVPIGTSPDGLNINRGCGSTCPRTASEAVVAHGADVGICLDGDADRVIVIDQLGNVADGDQIMALLAARWAAEGRLQGGALVATVMSNLGLERFLGDRGIGLERTAVGDRYVVERMREGGFNLGGEQSGHIVMSDFATTGDGLMAGLHFLGEMMRSGQPSSELVRQFVPVPQLLKNVRFAKGQTPLDAASVQSAIAEAEGVLNGSGRLLIRKSGTEPLIRVMAECEDEALLTRAVDSVVEAVADAVQA

SEQ ID NO: 6235 - DNA, 1344 bp, Silicibacter sp
  CDS (1)..(1344): transl_table=11
atgcggaaactctttggaaccgatggcgtgcgtggcaaggccaatatgcatccgatgaccgccgagatggcgcttcggatcggggccgctgttgggcgctacttccggcgtgaaaacgacaccgtgcaccgggtggtgatcggcaaggacacccgcctctcgggctatatgtttgaaaacgcgctgacggcggggctgacctcgacaggcatgaatgtgcttttgctggggcccgtgccaacgcctgccgtgggtctgatgacccgctcgatgcgggcagatttgggcgtgatgatctctgccagccacaacccggccgaggacaatggcatcaagttctttggccccgatggctataagctctcggatgaggtggaactggagcttgaggcgctgattgaggcgggtgtcgagcctgcacaggcgcagaacattggtcgcgccaaacggatcgatgatgcacggtttcgctatggcgagcgggtcaagagctctttgccgcgtgacatgcgtctggatggcctgaaggttgtgatcgattgcgcgaatggggccgcccaccgcgccgcgcctgaaatcctgtgggagctgggtgcagatgtgatccccgtcggggtgtcgcccgatgggctcaatatcaatcgcggctgtggctccacccagccggcggcggcggccgagacggtggtggcgcatggtgccgatgtggggatctgccttgacggtgatgccgacagggttgtggtgatcgacgagaccggcaccgtcgccgacggcgatcagctgatggcgcttctggcctcggcatggtctgcggatgggcggttgagcggcggcgcacttgttgcaaccgtcatgtcgaacctgggtctcgagcggttcttgaatgagcgcggcatcggtcttgagcggaccggcgttggggaccgctatgtggtggagcgcatgcggcaggggggctttaacctcggcggtgagcaatccggccatatcgtgatgagcgattatgccaccaccggcgacggtctgatggcggggctgcatttcctcgccgagatggtacggcgcgggcagaaggcctcggaattggcgcgccagtttgagccggttccgcagctgctcaagaatgtgcggttcgaggccgggcaggcaccattggaggcggatcaggtgcaaacggcgattgcagaggctgaaaagcagctcaatggccgcgggcggctgttgatccgaaagtctggcaccgagccgctcatccgcgtgatggccgagagcgaggacccggtgttgctgaaccgtgctgtcgacgatgtggttgcggctgtagaggcggcaacgcagtag

SEQ ID NO: 6236 - protein, 447 aa, Silicibacter sp
MRKLFGTDGVRGKANMHPMTAEMALRIGAAVGRYFRRENDTVHRVVIGKDTRLSGYMFENALTAGLTSTGMNVLLLGPVPTPAVGLMTRSMRADLGVMISASHNPAEDNGIKFFGPDGYKLSDEVELELEALIEAGVEPAQAQNIGRAKRIDDARFRYGERVKSSLPRDMRLDGLKVVIDCANGAAHRAAPEILWELGADVIPVGVSPDGLNINRGCGSTQPAAAAETVVAHGADVGICLDGDADRVVVIDETGTVADGDQLMALLASAWSADGRLSGGALVATVMSNLGLERFLNERGIGLERTGVGDRYVVERMRQGGFNLGGEQSGHIVMSDYATTGDGLMAGLHFLAEMVRRGQKASELARQFEPVPQLLKNVRFEAGQAPLEADQVQTAIAEAEKQLNGRGRLLIRKSGTEPLIRVMAESEDPVLLNRAVDDVVAAVEAATQ

SEQ ID NO: 6237 - DNA, 1341 bp, Solibacter usitatus
  CDS (1)..(1341): transl_table=11
ttggcaaaagacttgttcggaacagatgggattcggggagtcgcagggcaatacccgctggaccgggatacggtctacgcgtttggcgtcgcgcttggcaaggacgcagccctgcatgcggcgaagccggagatcctgatcggcgccgatacacgtgagagcgggacgtggatcgcggaactggtggcgggcggcctggcgagccagggagcgcaggtgcgctacgcgggcgtgatcaccacgccgggtgtggcctacctgacgcgcaccggctctttcgttgccggcgtgatgatttcggcatcgcacaatccctacgacgacaacgggctgaaagtcttcgggcacagcggcttcaaactgccggacgatgaagagctgctgatcgagcaggagatcttccggctgcgtgaagcgccggtcgcgccgcagccgttgagtctaaccgtggaagagccgctggtacggcagtatctcaagtacctgagcggaatttcctcggtgcggctggacggcgtgcgagtggcgatcgattgcggcaatggcgcgtcctatcgcctggcgcccgagttgttccagggtctgggggcggacgtggtgaccatctgctgcgaaccgaacggacgcaacatcaacctgaattgcggcgcgctccatttggaagcgctgcagcaggctgtggtggcgcaccgcgcgcatttcggcgtggcgttcgatggcgacgccgaccgcgctattttcgtttcgtcaagcgggcaggtggtgaacggcgatgcggtcctgctggcctgcgggcgagcgttgaaggccgcgggaaagctggccggcaacacggtggtttccacggtgatgtcgaatctggggctggagcgggccttcgatgcggcgggaattcgcatggtgcggacgcccgtgggcgataaatacgtgctggaggagatggtgcggttgggcgcggcgctgggcggcgaacaatcgggacacgtgatcttccgcgaatactcgaccacgggcgacggcatgctcacggcgcttcgcctgttcgagatcgcgcaacaggcgggcacgggtctggacgaattgacagcggatctgaagatctatccgcagcgcctggtcaatgtgcgagtgcgcgagaaaaagggtctgctggaactgcccgcggtggcgaaggagatccgccgtgtggaagacgccttcggcggcgccggccgtgtgctggtgcgtttttcgggcaccgagcctctcgcacgcgtgatggtggaaggccccaacctagagcaggtggagagctttagcacgagcattgccgacgtgatccggcgcgagatgggggagtag

SEQ ID NO: 6238 - protein, 446 aa, Solibacter usitatus
MAKDLFGTDGIRGVAGQYPLDRDTVYAFGVALGKDAALHAAKPEILIGADTRESGTWIAELVAGGLASQGAQVRYAGVITTPGVAYLTRTGSFVAGVMISASHNPYDDNGLKVFGHSGFKLPDDEELLIEQEIFRLREAPVAPQPLSLTVEEPLVRQYLKYLSGISSVRLDGVRVAIDCGNGASYRLAPELFQGLGADVVTICCEPNGRNINLNCGALHLEALQQAVVAHRAHFGVAFDGDADRAIFVSSSGQVVNGDAVLLACGRALKAAGKLAGNTVVSTVMSNLGLERAFDAAGIRMVRTPVGDKYVLEEMVRLGAALGGEQSGHVIFREYSTTGDGMLTALRLFEIAQQAGTGLDELTADLKIYPQRLVNVRVREKKGLLELPAVAKEIRRVEDAFGGAGRVLVRFSGTEPLARVMVEGPNLEQVESFSTSIADVIRREMGE

SEQ ID NO: 6239 - DNA, 1335 bp, Sphingopyxis alaskensis
  CDS (1)..(1335): transl_table=11
atgcgcagatttttcggaaccgacgggattcgcgggctgacgaacaaggttccgatgaccgccgaggtcgcgatgcgcgtcggcatggcggcgggcgcgcatttcctgcgcggcgaccacaagcaccgcgtcgtgatcggcaaggatacgcgcctgtcgggctatatgctcgaaaatgcgctcgtcgcggggtttaccagcgtcggcatggacgtggtgcaggtcggcccgatgccgaccccggcgattgcgatgctgacgcgctcgatgcgcgccgacctgggcgtgatgatttcggcgagccacaacccttatcaggataatggaatcaagctgttcggccccgacggatacaagctgtccgacgccgatgaggcggccatcgaacggctgctcgtcgaggagccgcggctcgccgatgcgacgcatatcgggcgtgcaaagcggatcgacgacgcgcgcgggcgctatatccacgcggtgaagcagagcctgccccaaatggtgcgcctcgacgggctgcgcatcgtgctcgattgcgcgaacggcgccgcctataacagcgcgccgacggtgttctgggagttgggcgccgatgtggtggcgatcggcgtcgaacccaatggcacgaacatcaacgacaaatgcgggtcgaccgcacccgcattgctccaggaaacggtggtcgcgagcggcgccgatatcggcatcgccctcgatggcgatgccgaccggctgatcgtcgtcgacgaaaagggcagcatcattgacggcgatcagatcatgggcctgatcggcgcgagctgggcacggcagggacgactgaaaggcggcggtgtcgtcgcgacggtgatgtcgaacctggggctcgaacgctttctggaagggcaggggctgcggctcgagcggaccaaggtcggcgaccgccatgtgctcgaacgcatgaaggaaggcggcttcaacgtcggcggcgaacagtcggggcacatgatcctgtcggaccacgcgacgacgggcgacggcacgctcgccgcgctgcaactgctggccgagctggtcgccgccgaacggcccgcgagcgaattgctgcaccagttcgaccccgtgccgcagcttttgaagaatgtccgtttcgcgggcggcaagccgctcgaggacaagcaggtgcttgcggcgatcgccgagggcgaggcggcgctgaacggccgcgggcgcctcgtcatccgcccatcgggcaccgaaccgctgatccgcgtgatggccgagggcgacgatgcgggcgaggtcgagcgtgtggtcgacatgatctgcgacgcggtgcgcgcggccgtctga

SEQ ID NO: 6240 - protein, 444 aa, Sphingopyxis alaskensis
MRRFFGTDGIRGLTNKVPMTAEVAMRVGMAAGAHFLRGDHKHRVVIGKDTRLSGYMLENALVAGFTSVGMDVVQVGPMPTPAIAMLTRSMRADLGVMISASHNPYQDNGIKLFGPDGYKLSDADEAAIERLLVEEPRLADATHIGRAKRIDDARGRYIHAVKQSLPQMVRLDGLRIVLDCANGAAYNSAPTVFWELGADVVAIGVEPNGTNINDKCGSTAPALLQETVVASGADIGIALDGDADRLIVVDEKGSIIDGDQIMGLIGASWARQGRLKGGGVVATVMSNLGLERFLEGQGLRLERTKVGDRHVLERMKEGGFNVGGEQSGHMILSDHATTGDGTLAALQLLAELVAAERPASELLHQFDPVPQLLKNVRFAGGKPLEDKQVLAAIAEGEAALNGRGRLVIRPSGTEPLIRVMAEGDDAGEVERVVDMICDAVRAAV

SEQ ID NO: 6241 - DNA, 1356 bp, Staphylococcus epidermidis
  CDS (1)..(1356): transl_table=11
atgggaaaatattttggtactgatggtgttcgtggtgtcgctaaccaagaactcacacctgaattggcttttaaactaggtagatacggaggatatgttctcgcacataataagggtgaaaagcatcctcgagttttagtaggaagagatacaagagtttcaggagaaatgctagaatctgcattaattgctggtttaatttcaattggcgcagaagtgatgcgcttaggtgttatttcaacaccgggtgtggcttatttgactaaagaaatggaagcagcattaggtgttatgatttctgcgtcacataatccggttgctgataatggaattaaattttttggttcagatggctttaaattgtcagatgatcaagaaaatgaaattgagcaattattagatcaaaccaatcctgatttaccacgaccagtaggagaggatattgtacattattcagattattttgaaggtgcacaaaagtatctaagttatcttaaatcaactgttgatgttaattttgagggtcttaaaattgtattagatggtgcaaacgggtcaacttcttctttagccccattcttgtttggcgatttagaagcggatactgagacaattggatgtaatccagatggttataacattaatgaacaatgtggctctactcatccagaaaaattagctgaagctgtgttagaaactgaaagtgactttggtttagcttttgatggagatggcgatcgaattattgcggtagatgaaaatggacaaattgtagatggagatcaaattatgttcattattggtcaagagatgtataaaaaccaagaactcaatggaaatatgatagtttcgacagtaatgagtaaccttggtttctacaaagctctagaaaaagaaggtattcagtcaaacaaaactaaagttggagatcgctatgttgtcgaggaaatgagaagaggaaattataatcttggtggtgaacaatccggtcatatcgtattaatggattacaatactactggtgatggattattaacgggtgttcagttggcttccgttattaaaatgagtggtaaaactctaagcgagttagcttctcaaatgaaaaagtacccacaatctttaattaatgtgagagtgactgacaaatatcgtgttgaagagaatattcatgttcaagagataatgacgaaagttgaaacagagatgaatggtgaaggaagaattcttgttcgtccttctggaactgaacctttagtacgtgtaatggttgaggctgcaactgacgcggatgctgaaagatatgctcaaagtatcgctgacgttgttgaagacaaaatgggcttagataaataa

SEQ ID NO: 6242 - protein, 451 aa, Staphylococcus epidermidis
MGKYFGTDGVRGVANQELTPELAFKLGRYGGYVLAHNKGEKHPRVLVGRDTRVSGEMLESALIAGLISIGAEVMRLGVISTPGVAYLTKEMEAALGVMISASHNPVADNGIKFFGSDGFKLSDDQENEIEQLLDQTNPDLPRPVGEDIVHYSDYFEGAQKYLSYLKSTVDVNFEGLKIVLDGANGSTSSLAPFLFGDLEADTETIGCNPDGYNINEQCGSTHPEKLAEAVLETESDFGLAFDGDGDRIIAVDENGQIVDGDQIMFIIGQEMYKNQELNGNMIVSTVMSNLGFYKALEKEGIQSNKTKVGDRYVVEEMRRGNYNLGGEQSGHIVLMDYNTTGDGLLTGVQLASVIKMSGKTLSELASQMKKYPQSLINVRVTDKYRVEENIHVQEIMTKVETEMNGEGRILVRPSGTEPLVRVMVEAATDADAERYAQSIADVVEDKMGLDK

SEQ ID NO: 6243 - DNA, 1359 bp, Streptomyces avermitilis
  CDS (1)..(1359): transl_table=11
gtgggacgactcttcggcacggacggcgtgcgcggtgtcgccaacgcggatctgacggctgagctcgcgctcggcctctctgtcgcggcggcacacgtactggccgaggcgggcacgttcgagggccaccggccggtggcggtcgtcgggcgggatccgcgcgcgtccggggagttcctggaggccgccgtggtcgcgggcctggccagcgcgggcgtggacgtcctgcttgtcggtgtgctgcccacccccgcggtggcgcacctcaccggcgcgctgggcgccgacctcggcgtgatgctctccgccagccacaacgccatgccggacaacggcatcaagttcttcgcccgtggtggtcacaagctggccgacgatctcgaggaccggatcgaggccgtctacgaggagcaccgcaccggcgctccctgggaccggcccaccggtgcgggcgtcggccgcgtgacgtcgtacggcgaaggcgccgaccagtacgtcgcccatctgatgagcgtgcttccgaaccggctcgacgggatcaaggtcgtcctcgacgaggcgcacggtgccgccgcccgggtctcgcccgacgcgttcacgcgggccggggccgagatcatcacgatcggtgccgagccggacgggctcaacatcaacgacggctgcggctccacgcacctggcgaagctccgggccgctgtcgtcgagcacggcgccgatctcggtatcgcgcacgacggtgacgccgaccgctgcctcgccgtggaccacactggtgccgaggtggacggcgaccagatcctggccgtactcgcgctggcgatgcgggagcgttccgcactgcgctccgacaccgttgtcgcgacggtcatgtccaacctgggcttcaagctggccatggaacgcgaggggctgtccttcgtgcagaccgcggtcggcgaccgctacgtcctggaggagatgaaggagcacggctacgccctcggcggcgagcagtccgggcacgtcatcatcctggaccacgcgaccaccggtgacggcacgctgaccgggctgctgctggcggcgcgggtcgcgcagacgggccgtacgctccaggacctcgcgtccgtcatggagcggctgccgcaggtgctcgtgaatgttccggacgtcgacagggcgcgggtgaagacctccgccgagctggccaccgcggtggccgaggccgagcgtgaactgggtgccaccgggcgggtgttgctgcgtccgtcggggaccgagccgctggtgcgggtcatggtggaggcggctgacatcgagcaggcgcggtcggtcgcggggcggctcgccgacgcggtgaagtccgcgctcgggtag

SEQ ID NO: 6244 - protein, 452 aa, Streptomyces avermitilis
MGRLFGTDGVRGVANADLTAELALGLSVAAAHVLAEAGTFEGHRPVAVVGRDPRASGEFLEAAVVAGLASAGVDVLLVGVLPTPAVAHLTGALGADLGVMLSASHNAMPDNGIKFFARGGHKLADDLEDRIEAVYEEHRTGAPWDRPTGAGVGRVTSYGEGADQYVAHLMSVLPNRLDGIKVVLDEAHGAAARVSPDAFTRAGAEIITIGAEPDGLNINDGCGSTHLAKLRAAVVEHGADLGIAHDGDADRCLAVDHTGAEVDGDQILAVLALAMRERSALRSDTVVATVMSNLGFKLAMEREGLSFVQTAVGDRYVLEEMKEHGYALGGEQSGHVIILDHATTGDGTLTGLLLAARVAQTGRTLQDLASVMERLPQVLVNVPDVDRARVKTSAELATAVAEAERELGATGRVLLRPSGTEPLVRVMVEAADIEQARSVAGRLADAVKSALG

SEQ ID NO: 6245 - DNA, 1359 bp, Streptomyces coelicolor
  CDS (1)..(1359): transl_table=11
gtgggacgactcttcggcacggacggcgtgcgcggcgtcgccaacgcggatctgacggccgagctggcgctgggcctctccgtcgccgcggcgcacgtactggccgaggcgggcaccttcgccgggcaccgggcgaccgcggtggtcggccgggacccacgtgcctccggggagttcctggaggccgcggtggtcgcgggcctcgccagcgccggtgtggacgtgctgcgggtcggcgtcctgccgacgcccgcggtggcccacctcaccggcgcgctcggcgccgacctcggcgtgatgctgtccgccagccacaacgccatgcccgacaacggcatcaagttcttcgcccgcggcggccacaagctcgccgacgagctggaggaccgcatcgagtccgtctacgccgaccaccgcaccggcgccccctgggaccgcccgaccggctccggcgtcggccgcgtccgggactacgacgaggggctcgaccagtacgtcgcccacctcgtcggtgtcctcccgaaccgtctcgacggactgaagatcgtcctcgacgaggcgcacggcgcggcctcccgggtctcgccggaggcgttcgcgcgggccggtgccgaactggtcaccatcggcgcggtgcccgacggcctcaacatcaacgacggctgcggctccacccacctcgacctgctcaaggccgccgtcgtcgagcacggcgccgacctgggcatcgcccacgacggcgacgcggaccgctgcctggccgtggaccacaccggtgcggaggtcgacggcgaccagatcctcgccgtgctcgcgctcgcgatgcgggagcgggaggcgctgcgctcggacaccgtcgtcgcgaccgtcatgtccaacctgggcttcaagctcgccatggagcgcgagggcatccggttcgtgcagaccggggtcggcgaccggtacgtcctggaggagatgaaggagcacggctacgccctcggcggcgagcagtccggccacgtcatcatcctcgaccacgccaccacgggtgacggcacgctgaccggcctgatgctggcggcgcgggtcgcgcagaccgggcgtacgctgcgggacctcgcgtccgtgatggagcggctgccgcaggtgctggtcaatgtgccggacgtggacaagtcgcgggtgacgagctccgccgagctggcgaccgccgtggccgaggccgagcgggagttggggagcaccgggcgggtgctgctgcgtccctcggggaccgagccgctggtgcgggtgatggtggaggccgcggacatcgagcaggcccggtccgtggcggggcggttggccgattcggtgaagtccgcgctcggttag

SEQ ID NO: 6246 - protein, 452 aa, Streptomyces coelicolor
MGRLFGTDGVRGVANADLTAELALGLSVAAAHVLAEAGTFAGHRATAVVGRDPRASGEFLEAAVVAGLASAGVDVLRVGVLPTPAVAHLTGALGADLGVMLSASHNAMPDNGIKFFARGGHKLADELEDRIESVYADHRTGAPWDRPTGSGVGRVRDYDEGLDQYVAHLVGVLPNRLDGLKIVLDEAHGAASRVSPEAFARAGAELVTIGAVPDGLNINDGCGSTHLDLLKAAVVEHGADLGIAHDGDADRCLAVDHTGAEVDGDQILAVLALAMREREALRSDTVVATVMSNLGFKLAMEREGIRFVQTGVGDRYVLEEMKEHGYALGGEQSGHVIILDHATTGDGTLTGLMLAARVAQTGRTLRDLASVMERLPQVLVNVPDVDKSRVTSSAELATAVAEAERELGSTGRVLLRPSGTEPLVRVMVEAADIEQARSVAGRLADSVKSALG

SEQ ID NO: 6247 - DNA, 1353 bp, Streptococcus gordonii
  CDS (1)..(1353): transl_table=11
atgggaaaatattttggaaccgatggtgttcgcggagaagcaaatgtggaattgacgcctgaattggcctttaaattaggtcgttttggcggttacgttctgagccagcacgaaagtgaagtgcctaaggtcttcgttggacgtgatacacggatttcaggagaaatgttagaaagcgccttgattgctggtcttttatcagttggtattcatgtttataaacttggagttattgcaacaccaggtgttgcttatttggttaagtcagaaaaagcaagcgccggagttatgatttctgccagccacaacccagcacttgataatggtatcaagttctttggtggtgacggctacaagttggatgatgatcgagaactagaaattgaagcactacttgatgcgactgaagatactttgccacgtccaagtgctgagggactcggaactcttgttgactatccagaaggactacgcaagtatcaacaatatctagtttcaactggtttagagttagaaggaatgcatgttgctctagacacagctaatggtgctgcttcaacaagtgcccgtcagatttttgctgatttgggcgctcaattgactgttattggagaaaatccagatggacttaatattaacttgaatgttggttcgactcatcctgaagctttgcaagaggttgtaagagaatcgggcgctgctattggtttagcttttgatggagatagcgatcgtctgattgctgtggatgagaatggtgagctggtagatggtgataagattatgtacatcatcggtaagtatctatctgaaaaaggccagttggctcaaaatactattgttactacggttatgtctaatcttggtttccataaggcattagatcgagaaggaattcaaaaggctgtaacagctgttggagatcgttatgtagtagaagagatgcgccaatctggctataatcttggcggagaacagtctggacatgtgattatcatggactataatacaacaggtgacggccagttaactgctgtacaattaaccaaaatcatgaaagagactggtaaaaagttatcagaactcgcatccgaagtaactatttatcctcagaaattagtcaatattcgagtggagaatagcatgaaggacaaggcgatggaagtccctgctattaaatcaatcatcgaagaaatggaagcaaaaatggcaggaaatggacgaattttagttcgtccaagtggaactgaaccattacttcgcgtaatggcggaagctccaagtcatgaggaagttgatttctatgttgatacgattgcagatgttgttcgtgcggaaattggtattgaataa

SEQ ID NO: 6248 - protein, 450 aa, Streptococcus gordonii
MGKYFGTDGVRGEANVELTPELAFKLGRFGGYVLSQHESEVPKVFVGRDTRISGEMLESALIAGLLSVGIHVYKLGVIATPGVAYLVKSEKASAGVMISASHNPALDNGIKFFGGDGYKLDDDRELEIEALLDATEDTLPRPSAEGLGTLVDYPEGLRKYQQYLVSTGLELEGMHVALDTANGAASTSARQIFADLGAQLTVIGENPDGLNINLNVGSTHPEALQEVVRESGAAIGLAFDGDSDRLIAVDENGELVDGDKIMYIIGKYLSEKGQLAQNTIVTTVMSNLGFHKALDREGIQKAVTAVGDRYVVEEMRQSGYNLGGEQSGHVIIMDYNTTGDGQLTAVQLTKIMKETGKKLSELASEVTIYPQKLVNIRVENSMKDKAMEVPAIKSIIEEMEAKMAGNGRILVRPSGTEPLLRVMAEAPSHEEVDFYVDTIADVVRAEIGIE

SEQ ID NO: 6249 - DNA, 1353 bp, Streptococcus pneumoniae
  CDS (1)..(1353): transl_table=11
atgggtaaatattttgggactgatggagtccgtggagaagctaacctagaactaacaccagaattagcctttaaactaggacgttttggaggctatgttcttagtcaacatgaaacggaagcgccgaaagtctttgtaggacgtgacacacgtatttcaggggaaatgttggaatcggccttggtggcaggtctcctttcagtagggattcacgtatacaaacttggtgtccttgcaacaccagcagtagcttacttggttgaaactgaaggagcaagtgccggtgtcatgatttctgctagccacaacccagcccttgataacggaatcaagttctttggcggtgatggcttcaaactagatgatgaaaaagaagcagaaattgaagccttgctagatgctgaggaagacactcttcctcgtccaagtgcagaaggcttaggaattttggtagattatccagaaggcttgcgtaagtatgaaggataccttgtttcaactggaactcctcttgatggaatgaaggttgccttggatacagctaatggagcagcttctaccagtgcccgtcaaatctttgcagaccttggtgcccaattgacggttatcggggaaacaccagacggtcttaacatcaaccttaatgttggttcaacacatccagaagcccttcaagaagtggtcaaagaaagtgggtcagctattggtttggcctttgatggagacagtgaccgcttgattgctgttgatgagaatggtgacatcgttgatggtgacaagattatgtacatcatcggaaaatacctttctgaaaaaggacaattggctcaaaatacaattgtgacaactgttatgtctaaccttggtttccacaaggccttgaatcgcgaaggtattaacaaggcagttactgcagttggtgaccgctacgttgttgaagaaatgagaaaatcaggctacaaccttggtggtgaacagtctggtcacgttatcttgatggattacaataccacaggtgatggtcaattatcagcagttcaattgactaaaatcatgaaggaaactggtaagagcttatcagagttggcggcagaagtaacgatttatccacaaaaattagttaatatccgagtggaaaacgtcatgaaggaaaaggccatggaagtgccagctatcaaggccatcatcgagaagatggaagaagaaatggcggggaacggccgtatccttgttcgtccaagtggaacagaacccctcttgcgtgttatggcagaagcgcctacaacagaagaagtaaactactatgttgataccatcacagatgtagttcgtgctgaaattgggattgactaa

SEQ ID NO: 6250 - protein, 450 aa, Streptococcus pneumoniae
MGKYFGTDGVRGEANLELTPELAFKLGRFGGYVLSQHETEAPKVFVGRDTRISGEMLESALVAGLLSVGIHVYKLGVLATPAVAYLVETEGASAGVMISASHNPALDNGIKFFGGDGFKLDDEKEAEIEALLDAEEDTLPRPSAEGLGILVDYPEGLRKYEGYLVSTGTPLDGMKVALDTANGAASTSARQIFADLGAQLTVIGETPDGLNINLNVGSTHPEALQEVVKESGSAIGLAFDGDSDRLIAVDENGDIVDGDKIMYIIGKYLSEKGQLAQNTIVTTVMSNLGFHKALNREGINKAVTAVGDRYVVEEMRKSGYNLGGEQSGHVILMDYNTTGDGQLSAVQLTKIMKETGKSLSELAAEVTIYPQKLVNIRVENVMKEKAMEVPAIKAIIEKMEEEMAGNGRILVRPSGTEPLLRVMAEAPTTEEVNYYVDTITDVVRAEIGID

SEQ ID NO: 6251 - DNA, 1344 bp, Symbiobacterium thermophilum
  CDS (1)..(1344): transl_table=11
atgccgaggatgtttggaactgacggtgtgcgtggcgtggccaacacggaggacctctcccccgaactcgcctttgccctggggcgggcggcggcgacgctggcgcgcgagcggtccggcggccgcgtcgtgggggtgatcggccgcgacacccgccgctccggccccatgctggcggcggcgctctccgccgggatctgctccgccggcggcgacgtcgtcgacctcggggtgatcaccacgccgggcgtcgcctacgtcaccacccacctgaaggcggatttcggcgtgatgatctcggcctctcacaacccggctccggacaacggcatcaagttcttctccggcgacggctacaaacttccggacgaggtggaggaccagctggaggcgctggtcaaggccaggcccgacaccatgccgcgccccaccggggccgagctggggagcatccgccagagcccggaggcggtggaggcctatgtggaacacctggtctccacggggagcccgctcagcggcctcagggtggttgtggactgcggccacggcgcggcctaccgactgtcccccgaggtgctccgtcgactgggcgcggaggtgatcgcactcaacaccgcgcctgacggcctcaacatcaacgccggctgtggctccacgcacccggaggccctgcaggaggccgtgcgggcccacggcgcggacgcgggcatcgcgcacgacggcgacgcggaccgctgcatcgccgtcgacgagcggggcgaactggtggacggcgatcagatcatggcgatctgtgccctcgacctgaaagcgcggggccagctgcccaatgacaccctcgtgaccaccgtcatgtccaacatggggctggagatgctgatgcgccggcacgggatccggctggtgcggacgaaggtcggcgaccggtacgtgctggaggagatgctgaagggcggccatggcctgggcggcgagcagtccggccatgtcatcttcggcgcactctccaccacgggtgacgggattctgaccgcggttcagctgctctccatcgtcgcccgggagaagcagccgctgtccaccctggccggccgcatgcagcggcttccccagtggctcgagaacgtgcgcgtggggcgcaaggagggctgggagcagaaccaggccatccaggccgccattgcccgggccgaggcggagatggccggtcaggggcgggtgctcgtgcgggcctcgggcaccgaaccgctgatccgggtgatgctggaaggcacggatatggcgcacatccagcggctggccgcgtccatcgcggaggtgatccgcactgagctccagtaa

SEQ ID NO: 6252 - protein, 447 aa, Symbiobacterium thermophilum
MPRMFGTDGVRGVANTEDLSPELAFALGRAAATLARERSGGRVVGVIGRDTRRSGPMLAAALSAGICSAGGDVVDLGVITTPGVAYVTTHLKADFGVMISASHNPAPDNGIKFFSGDGYKLPDEVEDQLEALVKARPDTMPRPTGAELGSIRQSPEAVEAYVEHLVSTGSPLSGLRVVVDCGHGAAYRLSPEVLRRLGAEVIALNTAPDGLNINAGCGSTHPEALQEAVRAHGADAGIAHDGDADRCIAVDERGELVDGDQIMAICALDLKARGQLPNDTLVTTVMSNMGLEMLMRRHGIRLVRTKVGDRYVLEEMLKGGHGLGGEQSGHVIFGALSTTGDGILTAVQLLSIVAREKQPLSTLAGRMQRLPQWLENVRVGRKEGWEQNQAIQAAIARAEAEMAGQGRVLVRASGTEPLIRVMLEGTDMAHIQRLAASIAEVIRTELQ

SEQ ID NO: 6253 - DNA, 1350 bp, Syntrophus aciditrophicus
  CDS (1)..(1350): transl_table=11
atgggtaaacttttcggaacggatggcgtcagaggcgttgccaatgaatatcccatgacggcggaaatggccttgaacattggaagggcgaccgcgttcatgttcaaacgcgagggccataatcccaaaattcttatcggaaaagatactcggctttccggctacatgcttgaaaatgccctggtttccggcatctgctctatgggtgtcaatgcgattctcgtcggcgtcattccgacgccgggcattgcctatctgaccagcagcatgagggctgatgccgggatcgtcatctccgcatcccacaatccttttcaggacaacggcataaaaatcttttccggtgacggtttcaaacttcctgatgagacggaactggccattgaagatatgattctgaacaataaaatggatcaacttctgcccagggtaagcgaattgggcaaggcctatcgcatggatgacgcccgggggcgttatatcgtgtttctaaagcatacctttccccgggaactttccctggaaggcgtcaaggtcgtcctggactgcgccaatggggcgacttaccgggtggcgccggaaacattctacgaactgggcgcggaagtcacaaccctgttcgacgatcccgatggaagaaatatcaatgtgaattgcggctctcaatacccggaaactctggccgctgaagttttgaaacagggcgctgacgtcggtttcgcttttgacggcgacggcgaccggctgattgccgtcgatgaaaaaggcaacgtcctgacgggagatcaggttattgcgatctgcgccaatgtgatgaaaaaggaagggaagctgaccaaaaatctcgttgtcagaaccgtcatgagcaatatcggcctttccgtcgctctcgaaaagcttgacatcaactccatcatgacaaaggtgggcgaccggtatgttctggaggaaatgcaggccaacggcagttccatcggcggcgaagattccgggcatgtgatctttttacagcatcacacgacaggggacgggattgtcacggcgatccaggttatcgcggcaatgaaaaaagaagggaaacccctgtccgatctggcgaaaatcatggacgttttcccccagaccctcatcaatgtggataccaagtcacgaccggaaatatccacggttccggaacttgttgccgtcatcaaatcggtggaagaaaagttgggaacgagcggccgggtccttgtccggtattcggggacgcagaacatgtgccgcgtcatggtggaaggccccacccaggaagaaaccctcaaatattgcaaacagatcgccgatgtggtgaaggaagagctcggctga

SEQ ID NO: 6254 - protein, 449 aa, Syntrophus aciditrophicus
MGKLFGTDGVRGVANEYPMTAEMALNIGRATAFMFKREGHNPKILIGKDTRLSGYMLENALVSGICSMGVNAILVGVIPTPGIAYLTSSMRADAGIVISASHNPFQDNGIKIFSGDGFKLPDETELAIEDMILNNKMDQLLPRVSELGKAYRMDDARGRYIVFLKHTFPRELSLEGVKVVLDCANGATYRVAPETFYELGAEVTTLFDDPDGRNINVNCGSQYPETLAAEVLKQGADVGFAFDGDGDRLIAVDEKGNVLTGDQVIAICANVMKKEGKLTKNLVVRTVMSNIGLSVALEKLDINSIMTKVGDRYVLEEMQANGSSIGGEDSGHVIFLQHHTTGDGIVTAIQVIAAMKKEGKPLSDLAKIMDVFPQTLINVDTKSRPEISTVPELVAVIKSVEEKLGTSGRVLVRYSGTQNMCRVMVEGPTQEETLKYCKQIADVVKEELG

SEQ ID NO: 6255 - DNA, 1428 bp, Synechococcus sp
  CDS (1)..(1428): transl_table=11
gtgtgtggaatggtctcagcgacacgttgggagacagcgattgaagttactccttggatcgcagcgatcgctgagcaggttccgctgtttggaaccgatggcattcgcggtcgcgtcggtgagcatttgacagcgccactggctcagcaggtcggcttctggactggacaggtgctgcggcaagctgggggcgatcgtgggccagtcgtcgtcggccaagattcgcgtaattccagcaacatgctggcgatggcgctctcttcagggctggccgccgcgggtgtggaagtgctgcacctcggcctgtgtcccacgcccggtgtcgcctacctgacccaccacagtgaagcgatcggcggggtgatgatttccgccagccacaatccacccggcgataacggcatcaaggtgttcggggccgatggcagcaaactcgatcgccagctccaagccgcgatcgaagcgggcctgcgcggtcagcaaaccagcctgccagcgacgacttgggggcaacattactaccagccccaactcgcggatcactaccaagcggcgatcgctcaatccttgggacagcgagccaacctgcaagggctcaagattgtccttgacctcgcttggggggctgccgccctactcgctcctcgactgttccgggaactcggcgctgaggtgatcgccctgcatgacctgccagatggtaatcagatcaacgtcaactgcggctcgactcatctggcacggctacaagccgctgtccttgagcagggcgcagacatgggttttgcctttgatggcgacgccgatcgcgttttggccgtcgatggacggggccgtagcgtcgatggcgaccacatcctcttcctctggggacgggaactggagcagcaacagcagcttccgggtcaggcaattgtgacgacagtgatggctaatctgggctttgagcgagcttggcaagccgtgggtggcgaatttgtccgcaccgctgtcggtgatcagtatgtgcaagcggaaatgcaggctcgcggggcgatgctaggcggcgaacagtccgggcatatcctttgccgtcactacgcattgacgggggatggcactttgacagctgcccatgttgcagccttagtgcaagctagtggagtttctcttgctgacttggttgaccagagtttccgaccctatccgcaactgctgcgcaatgtgcgcgtggaagatcgcgatcgccgttgcaactggcagaactgcgcggctctgacccaagcgatcgcagcggcagagaccgatatgggcgatcgcggccgcgttttggtacgcgcctccggcacggaaccgttgctgcggatcatggtggaagccgaggaagcccagcaggttgaacattggaccacccatctcgtgcaagtggcggaatcacacctgctctag

SEQ ID NO: 6256 - protein, 475 aa, Synechococcus sp
MCGMVSATRWETAIEVTPWIAAIAEQVPLFGTDGIRGRVGEHLTAPLAQQVGFWTGQVLRQAGGDRGPVVVGQDSRNSSNMLAMALSSGLAAAGVEVLHLGLCPTPGVAYLTHHSEAIGGVMISASHNPPGDNGIKVFGADGSKLDRQLQAAIEAGLRGQQTSLPATTWGQHYYQPQLADHYQAAIAQSLGQRANLQGLKIVLDLAWGAAALLAPRLFRELGAEVIALHDLPDGNQINVNCGSTHLARLQAAVLEQGADMGFAFDGDADRVLAVDGRGRSVDGDHILFLWGRELEQQQQLPGQAIVTTVMANLGFERAWQAVGGEFVRTAVGDQYVQAEMQARGAMLGGEQSGHILCRHYALTGDGTLTAAHVAALVQASGVSLADLVDQSFRPYPQLLRNVRVEDRDRRCNWQNCAALTQAIAAAETDMGDRGRVLVRASGTEPLLRIMVEAEEAQQVEHWTTHLVQVAESHLL

SEQ ID NO: 6257 - DNA, 1368 bp, Synechococcus sp
  CDS (1)..(1368): transl_table=11
ttggggcaactcccaaagccatcgaagatcagctttgggaccgatggcttgcgtggtcgggtggacaccatgctcactccggccttggctcttcaggttgggtactggtgtggacgcgtgcttcaagccgaggggcctgtgctgattggcatggattcgcgaagtagcggaagcatgttggtcgcggcactcaccgcaggcctgacggcttcaggcagagaggtttggactttgggactgtgtcccacgcccgctgtgccaggtttgattcgccgctattcagctgccggtggcttgatggtctcggcgagccacaaccctccggaagacaacggcatcaaggtgtttggagccactggcagcaagttgtctcctgaacgtcagcaggcgattgaagctggtctgtgtggtggagatggctctgggatggcgttggcggcatcaggagctgcacgccatcgtcctgaacttcttgacgactaccgcgcgagcttgctgtccagtgttgggcagcatcgactcgatggtgtgcccatcgtgctggatctctgctgggggtcggcaacagcctgtggcgcagaggtgttttctgcccttggcgccgatctcacggtgttgcacggtgatccggacggaacaaggatcaatgtgaattgcggatccacccaccttgaggctttacgccgcgccgtgatcgagaagggcgccgccatgggttttggcttcgatggggatgccgatcggatgttggcggttgatggccaaggacgggtggtggatggcgaccatgtcctctttctctgggggtcggttttgcaagagcagggacagctccctgatcagcgcttggtggccacggtgatgtcaaatttggggtttgagcgggcttggcaggcgcgcggtgggctcctggaccggacaccggtgggagaccagcatgtgcatgccgagatggtccgcacgggggcagctcttggcggcgagcaatcaggtcacatcctctcttccgcccatggtttggctggtgatggtgtcttgaccgctcttcagattgcgagcctctgccatgcacagcagctctccttggccgagtgggtggatcagagctttcaggcctatccccaaaaactggtgaatgtgcgcgtcgagaatcgcgaacgcagaaagggttgggcggactgtgcgcctctctcttctctggttcaagaagcggaggcttcgatggctgaagacggacgtgtgctggtgcgggcgagtgggacagaaccactgctgcgtgtgatggttgaggctgccgatcaagcggtggtcgatcactggacctccagcttggcggcagcagcagagctgcatctcaacgcctcatga

SEQ ID NO: 6258 - protein, 455 aa, Synechococcus sp
MGQLPKPSKISFGTDGLRGRVDTMLTPALALQVGYWCGRVLQAEGPVLIGMDSRSSGSMLVAALTAGLTASGREVWTLGLCPTPAVPGLIRRYSAAGGLMVSASHNPPEDNGIKVFGATGSKLSPERQQAIEAGLCGGDGSGMALAASGAARHRPELLDDYRASLLSSVGQHRLDGVPIVLDLCWGSATACGAEVFSALGADLTVLHGDPDGTRINVNCGSTHLEALRRAVIEKGAAMGFGFDGDADRMLAVDGQGRVVDGDHVLFLWGSVLQEQGQLPDQRLVATVMSNLGFERAWQARGGLLDRTPVGDQHVHAEMVRTGAALGGEQSGHILSSAHGLAGDGVLTALQIASLCHAQQLSLAEWVDQSFQAYPQKLVNVRVENRERRKGWADCAPLSSLVQEAEASMAEDGRVLVRASGTEPLLRVMVEAADQAVVDHWTSSLAAAAELHLNAS

SEQ ID NO: 6259 - DNA, 1395 bp, Synechococcus sp
  CDS (1)..(1395): transl_table=11
atggttcaagaggcgtgttccccgattggccccgctctcggtgatgctgcgccagggtttgggaccgatggaatccgtgggctcgccggcaccgttctgacccccgccctgtgtcttcaggtgggctattgggttggtcgggttctccaggcggaaggccctgttctgatagggatggactcccggaccagcggcagcatggtggttgctgccttgacggctggtttaacagcggccggtcgagatgtgtggacccttggtctttgtccgacgccggcggttccgttgttgatccgccagctgggagtcgccggcggcctgatggtctccgccagccataacccacctgcagacaatggcatcaaagtgtttggtgttgatggcgccaaactcagcgcctcccgtcaggcccaggtggaagcctgtctgaaggggcagacgtctatggctgagcaggggaaattccgctgcggtgtggcgcgccccagcgccgatctcctcgatcgctacagggaggtgttgcaggaatcggtggctgaacgccgactggatggcgttcccatcgttctcgacctctgctggggatccgcgacggcctgtggtgctgatgcttttcgtgccttgggggctgatctcaccgtgctgcatggagaacccgatggctcccgcatcaatgtggcttgcgggtcaacccatctggaaccgctgcagcgggctgtgatcgagcgcggcgcagcgatgggttttgcctttgacggtgatgctgatcggatgctggcagtggatggccgcggccgcatcatcgacggagatcatgtgctcttcctctggggatccgtgttgcaggagcagcaggcgctccctgagcagcgcttggtggccaccgtgatgtcgaacctcggcttcgagagggcctggcagcagcggggcggcaccctcgagcgcacgccggtgggagatcagcatgtccatgccgcgatggtggccagtggcgcggcccttggtggagaacaatccggccacatcctttcggcctcccatggactctgtggcgatggtgtgctgaccgccgtgcagttggccaccctctgctatgcccagggcatcagtctcagcgattggttggaccgcagtttccaggcctacccgcagaaattggtcaatgtgcgggtgatggaccgtgcgcgtcgcaaaaactggagtgcctgcaccgctctcaccgacgccattgcttcagctgagcagtcgatgggcgagaacggtcgcattttggtgcgagccagcggtaccgagcccgtgctccgggtgatggtggaagctgagcagtcggatgctgttgagcatttgacggggcatctggctgccgttgcagaggaacatctcaacgtggcctga

SEQ ID NO: 6260 - protein, 464 aa, Synechococcus sp
MVQEACSPIGPALGDAAPGFGTDGIRGLAGTVLTPALCLQVGYWVGRVLQAEGPVLIGMDSRTSGSMVVAALTAGLTAAGRDVWTLGLCPTPAVPLLIRQLGVAGGLMVSASHNPPADNGIKVFGVDGAKLSASRQAQVEACLKGQTSMAEQGKFRCGVARPSADLLDRYREVLQESVAERRLDGVPIVLDLCWGSATACGADAFRALGADLTVLHGEPDGSRINVACGSTHLEPLQRAVIERGAAMGFAFDGDADRMLAVDGRGRIIDGDHVLFLWGSVLQEQQALPEQRLVATVMSNLGFERAWQQRGGTLERTPVGDQHVHAAMVASGAALGGEQSGHILSASHGLCGDGVLTAVQLATLCYAQGISLSDWLDRSFQAYPQKLVNVRVMDRARRKNWSACTALTDAIASAEQSMGENGRILVRASGTEPVLRVMVEAEQSDAVEHLTGHLAAVAEEHLNVA

SEQ ID NO: 6261 - DNA, 1446 bp, Synechocystis sp
  CDS (1)..(1446): transl_table=11
atggttgcttcccccatccacagtcgtggtttagatctgcctttgccgtcaacgatgggagaattcggcttgagcttgccccgatcgccattgtttggcacggacggtatccggggtaaggctggggaattgttgacggctcctttggctttatccttgggcttttgggcggggcaggtattacgggaacaaactgatactgctggaccagtgattatcggccaggattcccgactttccagtgacatgctagccaacgccatggccgccggtttgaacagtgccggggtagaggtgtggcaactcggactttgtccgactccctgtgtggcctatctcaccagaaaaacagcggcaatcgggggcattatgatttccgctagccataatccgccggaagacaatggcatcaagttttttgatcaccaagggctaaaattacccaaatccctagccacggcgatcgaagcaggactgcggggacaaaatcaaacctccgggctgaatgccagtcaatggggaaggagttatggccagccccatcgtgtccaatattaccaagattttttgctaggtagtttgccccaacccttgaattttcaagggctaaaagtggtgttggatctagcctggggagcttcggtcaatttggcaccccatatttttcgcagtttgggagcggaggtcatagctctgcacgatttggccgatggcagtcaaattaacgttgattgcggctccacccatttacatcgtttgcaaagggctgtgcgggaaaccggggcggatttaggttttgcctttgacggcgatgcagaccgggtgatggcggtggatgcccagggccgcccggtggacggagattacattctctttttatggggcaaaactctccaggagagcaaccatctgcccgataacctaattgtcggcactgtcatggccaacttagcctttgagcgagcttgggaaaaactggggggtaaattaattcgcactgcggtgggggaccaaaacgtccaagcccaaatgtgggaaaccggagccatgctagggggagaacagtcaggacacattatttgccaccaccacagttattccggggatggcctgcaggcggccttgcatttagccaccctagtgcaaaagtccggtttatctttgagcgaactgctgtcggaaagtttccaaccctatccccaaattctccgcaacgtcagggtactagaccgggagcgccgcttacattggcaagaatgcgcccctttgcaacaggcgatcgccacggcggaaaagtccatgggcaccaccggaagaattttagtgcgggcttcgggcacagaaccattaattcgggtcatggtggaggcggcctgtgcggagacggcggcccattggtcggaccaactcaccagcactgtgcaatgccatttgggggatagttaa

SEQ ID NO: 6262 - protein, 481 aa, Synechocystis sp
MVASPIHSRGLDLPLPSTMGEFGLSLPRSPLFGTDGIRGKAGELLTAPLALSLGFWAGQVLREQTDTAGPVIIGQDSRLSSDMLANAMAAGLNSAGVEVWQLGLCPTPCVAYLTRKTAAIGGIMISASHNPPEDNGIKFFDHQGLKLPKSLATAIEAGLRGQNQTSGLNASQWGRSYGQPHRVQYYQDFLLGSLPQPLNFQGLKVVLDLAWGASVNLAPHIFRSLGAEVIALHDLADGSQINVDCGSTHLHRLQRAVRETGADLGFAFDGDADRVMAVDAQGRPVDGDYILFLWGKTLQESNHLPDNLIVGTVMANLAFERAWEKLGGKLIRTAVGDQNVQAQMWETGAMLGGEQSGHIICHHHSYSGDGLQAALHLATLVQKSGLSLSELLSESFQPYPQILRNVRVLDRERRLHWQECAPLQQAIATAEKSMGTTGRILVRASGTEPLIRVMVEAACAETAAHWSDQLTSTVQCHLGDS

SEQ ID NO: 6263 - DNA, 1350 bp, Thermobifida fusca
  CDS (1)..(1350): transl_table=11
gtgacacggctgtttggcaccgacggagtccgcgggcttgcgggccgcgatctcactgctggactaaccctggagctcgccattgcggcggctgaagtcctcccagagcgaggcattcccggaaagcggccccgcgccgtggtcggccgtgatccgcgtgcctcaggcgagttcctggaagcggccgtagtagcgggactcgccagcgccggggtggacgtcatccgcctcggtgtgctgcccacgcctgccgtggcttttctgacaggcgaactggacgcggacttcggggtgatgctctccgccagtcacaatccggctccggacaacggcatcaaattcttcgcccgcggcggccacaaactgtcagacgaggtggaagacgagatcgaacggcggctgggccgtgccgtggcgggggcaaccggccgggacgtcggccgggtcaccgacgatacggacagcgtggaacgctacatcacccacctggtgaactccctgcccaaccgcttggacgggttgaaagtcgttgtggactgcgccaacggtgcggcagcggggatcgccccggaggcgctgcgccgtgccggcgccgacgtgatcgcgatcggcgacaagcccgacgggttcaacatcaacgagggatgcgggtccaccaacctggacgcgctgcgcgcggcggtgctggagcacggcgccgatgcgggcatcgcgcacgacggggacgctgaccgctgccaggcggtggccgctgacggatctgttgtcgacggcgaccagatcatggccgtcttggcgctggaactgtacgaggcgaacgcgctgcacaacaacaccctcgtggtcacggtcatgtcgaacctgggactcaaactcgccatgaaggaagccgggatcaccctggtcgaaacccaggtgggcgaccgctacgtcctcgaagccatgcgggctgggtcgtattcgctgggcggggagcagtccggccacatcatcctgctggaccatgcgacgacgggcgacggcctgctgaccggcatgcacctgctcgccgcggtcaaccggaggggagtggcgctggctgagctcgccaaggtcatgaaccggctgccgcaggtgctggtgaacgtgtccggggtggacaagacccgggttgccacatcggagcggatcgctgcggaagtggctgcggccgaggcggagctcggggacagcggccgcgtcctgctgcggccgagcggcaccgagccgatcgtccgggtgatggtggaggcaacgtcgcaggaccgtgctcaggccatcgctgaccggctggccgacgtagtccgagacgaactgtccatcaacgcgtaa

SEQ ID NO: 6264 - protein, 449 aa, Thermobifida fusca
MTRLFGTDGVRGLAGRDLTAGLTLELAIAAAEVLPERGIPGKRPRAVVGRDPRASGEFLEAAVVAGLASAGVDVIRLGVLPTPAVAFLTGELDADFGVMLSASHNPAPDNGIKFFARGGHKLSDEVEDEIERRLGRAVAGATGRDVGRVTDDTDSVERYITHLVNSLPNRLDGLKVVVDCANGAAAGIAPEALRRAGADVIAIGDKPDGFNINEGCGSTNLDALRAAVLEHGADAGIAHDGDADRCQAVAADGSVVDGDQIMAVLALELYEANALHNNTLVVTVMSNLGLKLAMKEAGITLVETQVGDRYVLEAMRAGSYSLGGEQSGHIILLDHATTGDGLLTGMHLLAAVNRRGVALAELAKVMNRLPQVLVNVSGVDKTRVATSERIAAEVAAAEAELGDSGRVLLRPSGTEPIVRVMVEATSQDRAQAIADRLADVVRDELSINA

SEQ ID NO: 6265 - DNA, 1314 bp, Thermus thermophilus
  CDS (1)..(1314): transl_table=11
atgaggcgctacttcggcaccgacggggtgcggggggaggcagggaagccccctcttaccccggagtttgtcctaaagctcggccaggcggcgggggcctatttccggacccaggaaaaaaggcccgtggtcctcctcgccaaggacacccgggagtcctcggacctcctggaggccgccctggcggcggggcttatgagccagggggtgcgggtggagcacctcggggtcctccccaccccgggggtcgcccacctcaccaaggccctcaaggccacggcgggggcggtgatctcggcgagccacaacccctaccaggacaacggcatcaagttcttcgggcccacgggggagaagctccccgacgaggccgaggaggagattgagcgccttctcctggaagaccaccccacccgggggatcggcaccgtgggggacttccgggaggcggagaggatgtacctggacttcctcctcgcccacgccccggacctcacggggctcaaggtgggcctggacctcgcccacggggccacctaccgcatcgggcccaagctcttccagaaggcgggggccgaggtcatggccttcttcaacaccccggacggccggaacatcaaccggggctgcggctccacccaccccgaggccttgagccgcttcgtggtggagctcgggctggacctgggcctcgcctttgacggggacggggaccgggtgcagttcatagaccgcaaggggcgcctcttccacggggaccacgtcctctacctcgccgccttggcctttggggagaagggcgtggtggggacggtgatgagcaacatggccctggaggtggccctcaaggaaaggggcctcgccttccaccgggcggcggtgggggaccggtacgtcctggagaagctcaaggagacgggcctggccctgggaggggagccctcggggcacgtgatcttcctccgccaccacaccacgggggacggcctcctcaccgccctcctcaccctgaaggccctgaaggccctgggcggggacctcgccgactggtacgaggcgcttcccctctacccccaggtgctcctcaacgtgcgggtttccgacaaggccaaggtgatggcggacccgaggcttggggaggccgtccgcgaggccgaggcccggctaggggggaggggccgggtgaacgtccgcccctcgggcacggagcccgtgatccgggtcatggtggaggcggaggagtgggcggaggaggtggcgcgggagctcgccgagcgcgtccgggccctctcccaagaggcccaggcggtatga

SEQ ID NO: 6266 - protein, 437 aa, Thermus thermophilus
MRRYFGTDGVRGEAGKPPLTPEFVLKLGQAAGAYFRTQEKRPVVLLAKDTRESSDLLEAALAAGLMSQGVRVEHLGVLPTPGVAHLTKALKATAGAVISASHNPYQDNGIKFFGPTGEKLPDEAEEEIERLLLEDHPTRGIGTVGDFREAERMYLDFLLAHAPDLTGLKVGLDLAHGATYRIGPKLFQKAGAEVMAFFNTPDGRNINRGCGSTHPEALSRFVVELGLDLGLAFDGDGDRVQFIDRKGRLFHGDHVLYLAALAFGEKGVVGTVMSNMALEVALKERGLAFHRAAVGDRYVLEKLKETGLALGGEPSGHVIFLRHHTTGDGLLTALLTLKALKALGGDLADWYEALPLYPQVLLNVRVSDKAKVMADPRLGEAVREAEARLGGRGRVNVRPSGTEPVIRVMVEAEEWAEEVARELAERVRALSQEAQAV

SEQ ID NO: 6267 - DNA, 1344 bp, Thermoanaerobacter tengcongensis
  CDS (1)..(1344): transl_table=11
atgggaaggctttttgggactgacggtgtgaggggaatagcgaacaaggaattaactccacaactggcttttgagttggggcgggcaggagcttatgtccttacagagggaagtcacaggccaaaggttgtggtgggaaaggacagcaggatttcaagcgatatgttggaatgtgctcttattgctgggcttacatctcttggagcagaagtggtaagtgtaggaataattcctacgccggcagtagcttatttgactaggctatataaggcagatgctggagttatgatttcagcttctcacaatccgattgagtataatggaataaaattctttgataagtttggctacaaattgcctgataagctggaagacaggatagaggaaattataaatgaaaaaaaagaacttcctgttcctactggcattggaataggcagaagaaaagaaagcttgacttctcacagggattatatagaatttttaaagtctaccattgatacagacttaaaagggcttaaaatagtgattgactgtgcttatggggcaagcagcacagtagctcctattttgtttaaagaattaggagcagaggtaattgcttatgcggcagagcttttaggagaaaaaatcaatgtaggctgtggatccacgcaccctgagaaattgcagcagcttgtagtagaacataaagcggacctggggcttgcttttgatggagatgcggacagattaattgcagttgacgaaaaagggaatatagtagacggagaccatataatggctatatgtgctattgatatgaaaagcaaagggaaattaaaacacaatactgtggtagcgacagtcatgagtaacataggatttgaaattgctttaaaggagcatggaattaagcttataaggacaaaggtaggagatagatatgtattagaggaaatgataaaaggtggatattctattggaggagaacagtcaggacatataattttcatagatgacaatactacaggagatggagagataacagctttaaaactttgttcaataatgaaacatacaggtaaaaaactgtctgaacttgcttcttgcatgactacctatcctcaggtacttgtaaatgccaaagtgaaaaatgagcttaaagaaaaatatctagaagatgaagacataaagagagaaattgaaaagctagaaaaagaaatggaagggaaaggaagagttctcataagaccatctggcacagaacctctcataagagttatggtagagggtgaagattacgctaaaatcagccagatggcaaaagagctggctgatttgatagaaagaaaattgaactga

SEQ ID NO: 6268 - protein, 447 aa, Thermoanaerobacter tengcongensis
MGRLFGTDGVRGIANKELTPQLAFELGRAGAYVLTEGSHRPKVVVGKDSRISSDMLECALIAGLTSLGAEVVSVGIIPTPAVAYLTRLYKADAGVMISASHNPIEYNGIKFFDKFGYKLPDKLEDRIEEIINEKKELPVPTGIGIGRRKESLTSHRDYIEFLKSTIDTDLKGLKIVIDCAYGASSTVAPILFKELGAEVIAYAAELLGEKINVGCGSTHPEKLQQLVVEHKADLGLAFDGDADRLIAVDEKGNIVDGDHIMAICAIDMKSKGKLKHNTVVATVMSNIGFEIALKEHGIKLIRTKVGDRYVLEEMIKGGYSIGGEQSGHIIFIDDNTTGDGEITALKLCSIMKHTGKKLSELASCMTTYPQVLVNAKVKNELKEKYLEDEDIKREIEKLEKEMEGKGRVLIRPSGTEPLIRVMVEGEDYAKISQMAKELADLIERKLN

SEQ ID NO: 6269 - DNA, 1377 bp, Thiobacillus denitrificans
  CDS (1)..(1377): transl_table=11
atgggtcgtaaatacttcggtaccgacggggtccgcggcaaggtcggcgaaacgccgatcacgcccgagttcgtcatgcgtctcggctacgcggccggcaaggtgttggtgtccgaccgcgggagcttgcccgcgaacgagcatccgaccgtgctgatcggcaaggacacgcgcatttccggctacatgctcgaggcggcactcgaagcaggcttcacggcggccggcgtgaacgttctcatgaccggtccgatgccgacccccgccgtcgcctacctgacgcgtgcgctacgcctgcaggctggcgtcgtgatctccgcctcgcacaatcccttcgaggacaacggcatcaagttcttttcggcgagcgggcagaagctccccgacagcgtcgaggaagcgatcgaggctgcgctcgaccagccgctcgcgaccgtcgcggcgcgccagctcgggcgcgcgcggcgaatcgaggatgcggccgcgcgctacatcgaattctgcaagagcacctttcccaaccggctcgacctgcgcggcatgcgcatcgtcgtcgactgcgcgcacggcgcgacctaccacgtcgccccccatgtgctgcacgaactcggcgcggaagtcgtggccattggcaacgagcccaacggcttcaacatcaacgaagcctgcggcgcgacgcatacgccggcgctggccgacgcggttcgcgcgcatcacgccgacatcgggatatcgctcgacggtgacggcgaccgcctgatgatggccgatgcccacggccggatctacgacggcgaccaactcgtttacgtgatcgcgcgccaccgcctcgagacgggctacatgaagggcggcgtggtcggcacgctgatgaccaatctgggtaccgagcatgcgctcgcgcgcattcacgtgcccttcgagcgcgcgaaggtgggcgatcgctacgtgctcaagcgtctccatgccaacggctggttcctcggcggtgagacgtcggggcatatcctctgcctcgacaagcacacgaccggtgacggcatcgtctcgagcctgcaggtgctgcgcgcgctgcgcgagaccggcaaaacgctcgacgccttcaccgccgacctggaaacctatccgcaggtcatgatcaacgtgcccgtcgtcaagggattcaggcttagtgacgcggcggccgtcaccgttgccgttgccgatgcggagtctgcgttgaatggcagcggtcgcatcgtgctgcgtgcgtccggtaccgaaccgctgatccgggtgatggtggagggtcgcgacggcgacctcgtccgccgcaccgccgagatgatcgcggacgcggtacgagcggccgcggcggcgagcgatatcgcggtctga

SEQ ID NO: 6270 - protein, 458 aa, Thiobacillus denitrificans
MGRKYFGTDGVRGKVGETPITPEFVMRLGYAAGKVLVSDRGSLPANEHPTVLIGKDTRISGYMLEAALEAGFTAAGVNVLMTGPMPTPAVAYLTRALRLQAGVVISASHNPFEDNGIKFFSASGQKLPDSVEEAIEAALDQPLATVAARQLGRARRIEDAAARYIEFCKSTFPNRLDLRGMRIVVDCAHGATYHVAPHVLHELGAEVVAIGNEPNGFNINEACGATHTPALADAVRAHHADIGISLDGDGDRLMMADAHGRIYDGDQLVYVIARHRLETGYMKGGVVGTLMTNLGTEHALARIHVPFERAKVGDRYVLKRLHANGWFLGGETSGHILCLDKHTTGDGIVSSLQVLRALRETGKTLDAFTADLETYPQVMINVPVVKGFRLSDAAAVTVAVADAESALNGSGRIVLRASGTEPLIRVMVEGRDGDLVRRTAEMIADAVRAAAAASDIAV

SEQ ID NO: 6271 - DNA, 1470 bp, Trichodesmium erythraeum
  CDS (1)..(1470): transl_table=11
atggttacaacaccatcattcaagccaacttacgaacaaaacacttttaaattatcacctacagcaacaacaacaacgttgccttggaataatacctcactgcccacaacacccctatttgggacagatggcattcggggcaaagcaggagaattactcaccgcccctatggccctacaaataggtttttgggcaggacaagtattgccccaatattgtcaaaatcctggcccgataattatgggtcaagatactagaaactcaggtaatatgctggcaatggctctctcagcaggtttgacagcagcagggttagaagtttggaatttaggtttatgccctaccccttgtgttgcctatatcacaagtatttcagaagcaataggcggagtaatgatttccgctagtcataacccacccgaagataatggaataaaattttttggttccgatggtacaaaactctcttcagaattacagcaaaagatagaatctggaattcgaggtaccgcaaattttcctaccaatcatagtaactggggacagcattaccatagaccagaattagtcaaggagtaccaagcatctctacattctccattaacaccaggatctctccagggaatgaaaatagttctagacttagcttggggagcagcagttcatactgccccagaagtttttcgaggaatgggggcagaaattatttgtttgcatgaccaacccaatggcgatcggatcaacgttaactgtggttctacccatctgtctcacctccaacaagcagtaatagaacataatgctaatctagggtttgcctttgatggagacgcagaccgagtattagcaatagattctcaaggtcgttctattgatggagattatatactctatttctggggtcaaagcttaagtaaagcaaggttactaccaaacaatttgattgtaactacagttatggcaaacttaggttttgaacacgcttggaacaaacagggtggaaaaatattacggacaaaagtaggagaccaatatgttcatgctgaaatgcagcgcaccggatctatgctaggcggagaacaatcaggacatgttctttgtccccactatggcattacaggagatggtctaatgacggccttacatttggcaaccctagtcaaaaattctggaatttctctagcagagttagtagaccaaagctttaagacctatccccaattgctcagaaatgttagagttgaagaccgcgatcgacgggccaactggaaaaactgcgaaccattagtcaaaactatagaagaagcagaaacagccttagcagatttgggacgagtattagtccgagcctctggtacagagccggtaattcgagtcatggtagaagctattaatctagaactagcaaaatcttggacagaaaatatagttttagcagtccagcagcatttattacctactaaagactaa

SEQ ID NO: 6272 - protein, 489 aa, Trichodesmium erythraeum
MVTTPSFKPTYEQNTFKLSPTATTTTLPWNNTSLPTTPLFGTDGIRGKAGELLTAPMALQIGFWAGQVLPQYCQNPGPIIMGQDTRNSGNMLAMALSAGLTAAGLEVWNLGLCPTPCVAYITSISEAIGGVMISASHNPPEDNGIKFFGSDGTKLSSELQQKIESGIRGTANFPTNHSNWGQHYHRPELVKEYQASLHSPLTPGSLQGMKIVLDLAWGAAVHTAPEVFRGMGAEIICLHDQPNGDRINVNCGSTHLSHLQQAVIEHNANLGFAFDGDADRVLAIDSQGRSIDGDYILYFWGQSLSKARLLPNNLIVTTVMANLGFEHAWNKQGGKILRTKVGDQYVHAEMQRTGSMLGGEQSGHVLCPHYGITGDGLMTALHLATLVKNSGISLAELVDQSFKTYPQLLRNVRVEDRDRRANWKNCEPLVKTIEEAETALADLGRVLVRASGTEPVIRVMVEAINLELAKSWTENIVLAVQQHLLPTKD

SEQ ID NO: 6273 - DNA, 1362 bp, Tropheryma whipplei
  CDS (1)..(1362): transl_table=11
ttggccaggctgtttggaacagatggcatacgggcgctggcaaatggtgatttgctcaccccagaactggccatggccgtcgcccgcgccgccgccgtcgtctttacccatggccgcgttgcaaaaagaaggcaggtcttaggcaagcgaccggtagctattgttgcgcgcgatcccaggatatcgggtgattttttggtagcggcaatttccgcgggtcttgccagctctggggtagatgttctcgacgctggggttattccaactccagccgtagcctttttggtaaaaaacgcaaatgctgactttggatttatgatatccgcatctcacaacccgggttacgacaatggtgtaaagatatttgcccatggtggggtgaaactgcccgatgtagttgaagaccgcattgaatatttcctggataaacagaaactgtcaccgattggttcaaaggttggccggataacacgttttgttgatgcagaggatcgataccaaatgcatttactgtcaaccttgttcaccagaatagacggcgtgaaagtagtaatagattgtgccaatggcgcagcgtctggtgtttcaccagatgtatttaagtctgctggtgctgcggtgaaggttatttgcgcagacccgaacggcgttaacataaacgatggtgttggctcggcatacccagaaagacttagggcagaagttattcgtaactccgccactctcggccttgcttttgacggcgatgctgatcgctgcatcgcggttgattcaaacggcaacacggtcgacggggatcagataatggcaattttggccagatcaatgcaacagcgcggcacactacggaataaaaccctcgttacaaccattatgagcaatattggccttgatcgcgccatgaaaaaactcggtatcaaccttaaaagaacgcaggttggcgatagatacgtcattgaggccatgacccaagggggattcaatattggcggggagcaaagcggccatataatcctatctgattattcaaccgccggtgacggcattcttgcgggcctgcatctatgtgcggaaatcattcgaaccggtaaaagcttgacggatctagctagcatcatggagattgtcccgcaggtcacggcaaacatagaaacagatgatccaacaaccctgctgaacaacaaaaaaattcgccatgagatatcacgcattgaaaaatctctaaagggtagagttgtaattcgtccaagtggcacagaacctcttatccgtattatggtcgaggatttaaatccggagaaagcggagcgcgcctgctcgcatttagcagattttttcaaacaggaaatccagaagagctag

SEQ ID NO: 6274 - protein, 453 aa, Tropheryma whipplei
MARLFGTDGIRALANGDLLTPELAMAVARAAAVVFTHGRVAKRRQVLGKRPVAIVARDPRISGDFLVAAISAGLASSGVDVLDAGVIPTPAVAFLVKNANADFGFMISASHNPGYDNGVKIFAHGGVKLPDVVEDRIEYFLDKQKLSPIGSKVGRITRFVDAEDRYQMHLLSTLFTRIDGVKVVIDCANGAASGVSPDVFKSAGAAVKVICADPNGVNINDGVGSAYPERLRAEVIRNSATLGLAFDGDADRCIAVDSNGNTVDGDQIMAILARSMQQRGTLRNKTLVTTIMSNIGLDRAMKKLGINLKRTQVGDRYVIEAMTQGGFNIGGEQSGHIILSDYSTAGDGILAGLHLCAEIIRTGKSLTDLASIMEIVPQVTANIETDDPTTLLNNKKIRHEISRIEKSLKGRVVIRPSGTEPLIRIMVEDLNPEKAERACSHLADFFKQEIQKS

SEQ ID NO: 6275 - DNA, 1341 bp, Vibrio cholerae
  CDS (1)..(1341): transl_table=11
atgtctgataagagacgttattttggcactgatggggttcgtggcaaagttggccagtacccaattactcctgattttgtacttaagcttggctgggcggctggacgtgtactggcaaaacaaggcacgagaaaagtcattattggtaaagatacccgtatttctggctatatgttggagtctgcactggaagctgggcttgcagcggcaggattaaaagcgaccttcaccggaccaatgccaacgccagctgtggcctatcttacccaaacgtttcgtgcagaagcggggattgttatttctgcatcgcacaacccttactacgataacggcattaagttcttctcttatgaaggaaccaaactgccggatgacattgagttagcgattgaagctgagttagataaagacattgaatgtgttgaatcggctgagcttggtaaagcttcacgcatggtggatgcggcggggcgttacatcgaattttgtaaaagcactttcccttcaaaactcagtctatctggtttgaagcttgttgtggattgtgccaatggtgccacataccacattgcgcccaatgttttccgtgagttgggagcggaagtcattgcgatgggcgttgagcctaatggtttgaatatcaatgaccaagtcggtgcaaccgacgttcgcgcactgcaaaaacgcgttgttgaagagcatgctcatcttggccttgctttcgatggtgacggcgaccgcatcatcatggttgatcacctaggtaataaagtcgatggtgaccaaatcgcttacattattgcccgtgatgcactgcgccgtggcgagctcaaaggtggcgttgttgggacattgatgacgaaccttggcatggagaatggacttaaacagttgggcattccatttgtacgcgctgcggtcggtgatcgctatgttatggaaaaacttctagagaaaggctggaagattggtgcggaaaattcaggtcacgtcatcttactcgataaagtgactacgggggatgcgattgtcgctggcctacaagtgctggcttcagtagtgggtagtgaaatgaccctgcatgaattagcgaaaggtatgacgctttacccacaagtgttggagaatgtccgttttgcaggagataacaatccacttgaagcggatgcggtgaaagcggcggtatctgaggttgaagctgagctaggttcgaaaggccgtgtattactgcgcaaatcgggtacagaacctctgatccgtgtgatggtggaaggggaagatgaaaccttagtgaagcaatctgcattaaaaattgctcaagctgtaaaagataactgctaa

SEQ ID NO: 6276 - protein, 446 aa, Vibrio cholerae
MSDKRRYFGTDGVRGKVGQYPITPDFVLKLGWAAGRVLAKQGTRKVIIGKDTRISGYMLESALEAGLAAAGLKATFTGPMPTPAVAYLTQTFRAEAGIVISASHNPYYDNGIKFFSYEGTKLPDDIELAIEAELDKDIECVESAELGKASRMVDAAGRYIEFCKSTFPSKLSLSGLKLVVDCANGATYHIAPNVFRELGAEVIAMGVEPNGLNINDQVGATDVRALQKRVVEEHAHLGLAFDGDGDRIIMVDHLGNKVDGDQIAYIIARDALRRGELKGGVVGTLMTNLGMENGLKQLGIPFVRAAVGDRYVMEKLLEKGWKIGAENSGHVILLDKVTTGDAIVAGLQVLASVVGSEMTLHELAKGMTLYPQVLENVRFAGDNNPLEADAVKAAVSEVEAELGSKGRVLLRKSGTEPLIRVMVEGEDETLVKQSALKIAQAVKDNC

SEQ ID NO: 6277 - DNA, 1341 bp, Vibrio parahaemolyticus
  CDS (1)..(1341): transl_table=11
atgtcgaataaaagacgttactttggtacggacggtgtacgcggtaaagttggacagtacccaatcactccagacttcgtacttaagcttggctgggcagctggtcgtgtactagcaaaacaaggcacaaagaaagttattattggtaaagatactcgtatctctggttacatgcttgaatctgcactagaagcaggtcttgctgccgcaggtctgaaggcaaccttcactggtccaatgccgacaccagctgtcgcttacttaacgcaaactttccgcgcagaagcgggcattgtgatttctgcatcgcataacccatattacgacaacggtattaaattcttctcatctgagggcacaaaattgcctgatgatatcgagcttgctatcgaagctgaattggacaaagacattgaatgtgttgagtcttctgaattgggcaaagcgactcgtttaaatgatgctgcaggtcgttacatcgagttctgtaaaagcacattcccatcgacactaagtctctctaacttaaagatcgtcgttgattgcgctcatggtgctacctaccatattgctccaaatgtcttcaaagaacttggtgcagatgtaatcgcgatgggtgttgagccaaatggtatcaacatcaatgaagaagtcggtgctacagacgttcgcgcgctacaaaaacgcgttgtagaagagcaagctcatcttggtcttgcattcgatggtgacggcgaccgtatcatcatggttgatcatttaggtaataaagtcgatggtgaccaaattgcttacatcatcgcacgtgatgctctgcgtcgtggtgaactaaaaggtggcgtggttggtacattgatgactaacctaggtatggaaaatggcctgaagcaattaggtattccatttgttcgtgcagctgtcggtgaccgctatgtaatggagcaattgctggctaaaggctggaagatcggcgccgaaaactctggtcacgttatcttgctagataaagtaacaacgggagatgcgattgttgctgctctacaagtgcttgcttctgttgttggtagtgacatgtcactgcacgacttgtcgcaaggcatgacgctttacccacaagttttagaaaatgtacgtttcgccggtgaaaataaccctctagaagcgcaagcagtactggctgctgtagaagaagttgaagctgagctaggcgataaaggtcgcgttttactacgtaaatcaggtacagagcctttgattcgcgtaatggtagaaggtgaagatgccgagcttgttcaaagctcagcgcttaagattgcggatgcagtaaaagcaagttgttaa

SEQ ID NO: 6278 - protein, 446 aa, Vibrio parahaemolyticus
MSNKRRYFGTDGVRGKVGQYPITPDFVLKLGWAAGRVLAKQGTKKVIIGKDTRISGYMLESALEAGLAAAGLKATFTGPMPTPAVAYLTQTFRAEAGIVISASHNPYYDNGIKFFSSEGTKLPDDIELAIEAELDKDIECVESSELGKATRLNDAAGRYIEFCKSTFPSTLSLSNLKIVVDCAHGATYHIAPNVFKELGADVIAMGVEPNGININEEVGATDVRALQKRVVEEQAHLGLAFDGDGDRIIMVDHLGNKVDGDQIAYIIARDALRRGELKGGVVGTLMTNLGMENGLKQLGIPFVRAAVGDRYVMEQLLAKGWKIGAENSGHVILLDKVTTGDAIVAALQVLASVVGSDMSLHDLSQGMTLYPQVLENVRFAGENNPLEAQAVLAAVEEVEAELGDKGRVLLRKSGTEPLIRVMVEGEDAELVQSSALKIADAVKASC

SEQ ID NO: 6279 - DNA, 1341 bp, Vibrio vulnificus
  CDS (1)..(1341): transl_table=11
atgtcggataaaagacgttattttggtacagatggtgttcgtgggaaagtaggtcagtatcctattactcccgactttgtactaaaacttggctgggctgcaggtcgtgtattagcgaagcaaggaacgaaaaaagttattatcggcaaagatacgcgtatttcaggctatatgcttgagtctgctttagaggcggggcttgcggctgcgggtttaaaggcgacttttactgggccgatgccaacacctgctgtggcgtacttgacacaaacattccgtgctgaagctggtatcgtgatctctgcttctcacaatccatactatgacaatggcattaaatttttctcttctgaagggacaaaattacccgatgatattgagttagctattgaagctgagttggataaagaaatcgaatgcgtagagtctgcagaattaggtaaagcgacacgtctcaacgacgcggctggtcgttatattgaattttgtaaaagtacgttcccttcagagttgagcctagcaaaacttaaaatcgttgtagattgtgccaatggtgcaacgtatcacattgcgccaaatgtgtttactgaactgggtgccgatgttattgctatgggcgtaacgccaaacggcaccaatattaaccatgaagtaggcgcaaccgatgtacgcgctctacaacaacgtgttgttgaagagcaagcggatttaggattggcgtttgacggtgatggtgaccgaattatcatggtcgatcacttaggtaataaagtcgacggcgaccaaattgcctatattattgcgcgagatgcattgcgtcgtggtgaacttaaagggggcgtagtgggcacccttatgactaaccttggtatggaaaatggcctcaagcaactgggtattccatttgtacgcgctgcggttggcgatcgctatgtgatggaaaaactgttagagaaaggttggaagatcggcgctgaaaactctggacacgtaattctgctggataaagtaactactggcgatgccattgttgccgcattgcaggtgttggcatctgttgtgggcagtgaactatcactaaatgagctttcaaaaggcatgacactttacccacaagtgctcgaaaacgtgcgctttgctggacaaggtaatccactagaagccgaagccgttaaaaaaaccgtggaagacgttgaagccgatttgggcagtaaaggccgagttctgttgcgtaaatcaggcaccgagccattaattcgtgtgatggtagaaggcgaagatggtgaacttgtacaaaacagtgcacttaaaatagcacaagcagtgaaagacaactgctaa

SEQ ID NO: 6280 - protein, 446 aa, Vibrio vulnificus
MSDKRRYFGTDGVRGKVGQYPITPDFVLKLGWAAGRVLAKQGTKKVIIGKDTRISGYMLESALEAGLAAAGLKATFTGPMPTPAVAYLTQTFRAEAGIVISASHNPYYDNGIKFFSSEGTKLPDDIELAIEAELDKEIECVESAELGKATRLNDAAGRYIEFCKSTFPSELSLAKLKIVVDCANGATYHIAPNVFTELGADVIAMGVTPNGTNINHEVGATDVRALQQRVVEEQADLGLAFDGDGDRIIMVDHLGNKVDGDQIAYIIARDALRRGELKGGVVGTLMTNLGMENGLKQLGIPFVRAAVGDRYVMEKLLEKGWKIGAENSGHVILLDKVTTGDAIVAALQVLASVVGSELSLNELSKGMTLYPQVLENVRFAGQGNPLEAEAVKKTVEDVEADLGSKGRVLLRKSGTEPLIRVMVEGEDGELVQNSALKIAQAVKDNC

SEQ ID NO: 6281 - DNA, 1341 bp, Vibrio vulnificus
  CDS (1)..(1341): transl_table=11
atgtcggataaaagacgttattttggtacagatggtgttcgtggaaaagtaggtcagtatcctattactcccgactttgtactaaaacttggctgggctgcaggtcgtgtattagcgaagcaaggaacgaaaaaagttattatcggcaaagatacgcgtatttcaggctatatgcttgagtctgctttagaggcggggcttgcggctgcgggtttaaaggcgacttttactgggccgatgccaacacctgctgtggcgtacttgacacaaacattccgtgctgaagctggtatcgtgatctctgcttctcacaatccatactatgacaatggcattaaatttttctcttctgaagggacaaaattacccgatgatattgagttagctattgaagctgagttggataaagaaatcgaatgcgtagagtctgcagaattaggtaaagcgacacgtctcaacgacgcggctggtcgttatattgaattttgtaaaagtacgttcccttcagagttgagcctagcaaaacttaaaatcgttgtagattgtgccaatggtgcaacgtatcacattgcgccaaatgtgtttactgaactgggtgccgatgttattgctatgggcgtaacaccaaacggtaccaatattaaccatgaagtaggcgcaaccgatgtacgcgctctacaacaacgagttgttgaagagcaagcggatttaggattggcgtttgacggtgatggtgaccgaattatcatggtcgatcacttaggtaataaagtcgacggcgaccaaattgcctatattattgcgcgagatgcattgcgtcgtggtgaacttaaagggggcgtagtaggcacccttatgactaaccttggtatggaaaatggcctcaagcaactgggtattccatttgtacgtgctgcggttggcgatcgctatgtaatggaaaaactgttagagaaaggttggaagatcggcgctgaaaactctggacacgtaattctgctggataaagtaactactggcgatgccattgttgccgcattgcaggtgttggcatctgttgtgggcagtgagctatcactaaatgagctttcaaaaggcatgacactttacccacaagtgctcgaaaacgtgcgctttgctggacaaggtaatccactagaagccgaagccgttaaaaaagccgtggaagaggttgaagccgatttgggcagtaaaggccgagttctgttgcgtaaatcaggcaccgagccattaattcgtgtgatggtagaaggcgaagatggtgaacttgtacaaaacagtgcacttaaaatagcacaagcagtgaaagacaactgctaa

SEQ ID NO: 6282 - protein, 446 aa, Vibrio vulnificus
MSDKRRYFGTDGVRGKVGQYPITPDFVLKLGWAAGRVLAKQGTKKVIIGKDTRISGYMLESALEAGLAAAGLKATFTGPMPTPAVAYLTQTFRAEAGIVISASHNPYYDNGIKFFSSEGTKLPDDIELAIEAELDKEIECVESAELGKATRLNDAAGRYIEFCKSTFPSELSLAKLKIVVDCANGATYHIAPNVFTELGADVIAMGVTPNGTNINHEVGATDVRALQQRVVEEQADLGLAFDGDGDRIIMVDHLGNKVDGDQIAYIIARDALRRGELKGGVVGTLMTNLGMENGLKQLGIPFVRAAVGDRYVMEKLLEKGWKIGAENSGHVILLDKVTTGDAIVAALQVLASVVGSELSLNELSKGMTLYPQVLENVRFAGQGNPLEAEAVKKAVEEVEADLGSKGRVLLRKSGTEPLIRVMVEGEDGELVQNSALKIAQAVKDNC

SEQ ID NO: 6283 - DNA, 1341 bp, Wigglesworthia glossinidia brevipalpis
  CDS (1)..(1341): transl_table=11
atggaaaataataaatattttggaacagatggaataagagggaaagttggtaaaaacccaatcactccagaatttttttttaagttaggttttgtaattggaaatttattatataaagaaaattcttttaataaagtattaataggaaatgacactagacaatctggatttatactagagtctacactagcatatggtctatcatgttctggtctttcgtctttattgattggatctattcctactccagcaatttcttatttaacatcttatttaaaagcagacgcaggtatatcagtttctgcatcacataatttatgttctgataatggaattaaaatattctctgtaaatggaaaaaagttatcagataaattagaaaatgatatagaaatcaaattatctaaattaacaattttaaaaaaaaatatatattgtaaaaataaatatcagaaagtaaatttaataaatcaatacattaaattttgtagatctacagtatcaaataatataaatttaaaagggttaaatattgttgtagattgtgctaatggatctacatatcaaatagcacctgttttgttaaaaaatcttggagcaaatgtttttaaattaggatgtaatccaaacggaaaaaatataaattataaatgtggaacaacaaatatatcacttttaagaaaaaaagttttacaaaataaagctcatttaggaatagcatatgatggagatggagatagaattattatgatagatcatcttggaaatattgttaatggtgatcaaattttatatattatagcttgtgataaattaaaaaataaaaaattaaatggaggtgtagttggaactctaatgagcaatatgggactagaaatagctctaaaaaaattagaggtacctttcatcaggtctagaattggagatagatacgtattaaacgaactagaaaaacaaggatggaaaataggagctgaaaattcaggtcatgtaattttgttagatcatacatctactggagacggaataatagcaggattgcaaattttatcaattatagcaaagaacaatacaacattgaaaaatctttgcaatggaataaatttatttccccaaattttaattaatgttcaaatagataaagaaaataatcctttagaatcaaatatagtaaaaaaaattattgaaatatctaaaaaaaatttagatggtaatggaagaatattattaagaaaatctggaacagaacctttgataagaataatggtagaaggtaaagaagaaaataaaataatcaagctagcttataatatagcaaatgcagtaaagtcagttatataa

SEQ ID NO: 6284 - protein, 446 aa, Wigglesworthia glossinidia brevipalpis
MENNKYFGTDGIRGKVGKNPITPEFFFKLGFVIGNLLYKENSFNKVLIGNDTRQSGFILESTLAYGLSCSGLSSLLIGSIPTPAISYLTSYLKADAGISVSASHNLCSDNGIKIFSVNGKKLSDKLENDIEIKLSKLTILKKNIYCKNKYQKVNLINQYIKFCRSTVSNNINLKGLNIVVDCANGSTYQIAPVLLKNLGANVFKLGCNPNGKNINYKCGTTNISLLRKKVLQNKAHLGIAYDGDGDRIIMIDHLGNIVNGDQILYIIACDKLKNKKLNGGVVGTLMSNMGLEIALKKLEVPFIRSRIGDRYVLNELEKQGWKIGAENSGHVILLDHTSTGDGIIAGLQILSIIAKNNTTLKNLCNGINLFPQILINVQIDKENNPLESNIVKKIIEISKKNLDGNGRILLRKSGTEPLIRIMVEGKEENKIIKLAYNIANAVKSVI

SEQ ID NO: 6285 - DNA, 1341 bp, Wolinella succinogenes
  CDS (1)..(1341): transl_table=11
atgaagctctttggcacggatggcgtgagaggaaaagcgggtgagaagctcaccgcgttctcggcgatgaagctcggtttagcagcgggaatctacttcagaaaacagtcaaaaaccaacaaaattttggtgggcaaagacacgagacgaagtggctatatgattgaaaatgccctagtaagcggtctcacagcggtaggatacaatgtgattcagatcggtccgatgcccacaccggcgattgcttacctcacagaagatatgaggtgtgatgcaggaatcatgatcagcgccagccacaatccctttgatgacaacggaatcaaatttttcaatcgctttggttttaaactcgatgaagaggcggagcgcgagattgaagccatctatgcggatgaggcactgcttgaggcgagtcaaaagagcggcaaagagattggcgcctctaaacgaatcgatgatgtcgtgggacgatacatcgttcacatcaaaaattccttccccaaagagctctctttgcatggagtgcgcatggttcttgacacggccaatggtgcagcctacaaggtcgctccgaccatctttagtgagctgggggcggaggtttttgtgatcaatgacgctcccaatgggcacaacatcaacgaatcttgcggtgcaactcagcccttgatgctctctgaagaggtgaagcgagtgcgagcggatattggcttcgcgcttgatggagatgctgataggcttgtggtggtcgatgaacgcggcgaagtggtggacggggataagctcattggggcgcttgccatgcatcttaaaaattctcacacactagagaaacccttggcggtggccaccgtgatgagcaatctcgcccttgaagagtttttggccaaggccaaaatcaagctcttgcgcgcgggagtgggtgataagtacgtcttggagatgatgcaaaaagagggggcgaattttggtggagagcagagtggacatctgatctttagtgattttgccaagacgggcgatgggctggtctctgctcttcagacgatggcctttgtgcttcgaagcggagagagggcatctagggcactcaatattttcgatctctatcctcaaaagttggtgaatctccctatcaagcagaaaaaagagctcaaagagattgagggatttgaggcgctcatgagcgagatcgaatcgcaaggattcaggcaactcatccgctattcaggcacagagaacaagcttcgaatcttgctagagggtaaagatggtcgagcgctagagaagtggatggagcgatgcgtagagttttttaaagcaacacttggcggatga

SEQ ID NO: 6286 - protein, 446 aa, Wolinella succinogenes
MKLFGTDGVRGKAGEKLTAFSAMKLGLAAGIYFRKQSKTNKILVGKDTRRSGYMIENALVSGLTAVGYNVIQIGPMPTPAIAYLTEDMRCDAGIMISASHNPFDDNGIKFFNRFGFKLDEEAEREIEAIYADEALLEASQKSGKEIGASKRIDDVVGRYIVHIKNSFPKELSLHGVRMVLDTANGAAYKVAPTIFSELGAEVFVINDAPNGHNINESCGATQPLMLSEEVKRVRADIGFALDGDADRLVVVDERGEVVDGDKLIGALAMHLKNSHTLEKPLAVATVMSNLALEEFLAKAKIKLLRAGVGDKYVLEMMQKEGANFGGEQSGHLIFSDFAKTGDGLVSALQTMAFVLRSGERASRALNIFDLYPQKLVNLPIKQKKELKEIEGFEALMSEIESQGFRQLIRYSGTENKLRILLEGKDGRALEKWMERCVEFFKATLGG

SEQ ID NO: 6287 - DNA, 1350 bp, Xanthomonas axonopodis pv
  CDS (1)..(1350): transl_table=11
atgagcgcacgcaagtatttcggcaccgacggcatccgcggtcgggtcgggcagggcgtgatctcggccgacttcgtgctgcgcctgggcaatgcgctcggccgtgtactgacccagggccgcagcaagcggccgctggtgctgatcggcaaggacacccgcatttccggctacatgttcgaagcggcgctggaagctggcctggttgccgccggggccgacgtgcagctgatcgggccgatgccgaccccggccatcgccttcttgaccagcacgctgcgcgcagacgcgggggtggtgatcagcgcctcgcacaatccgcattacgacaacggcatcaagttcttctccgccgaaggcgagaagctcgacgacgccaccgaagcggcgatcgaagcggcgttggacgagccgttccacacggtggaatcggagcggttgggcaaggccatccgcacgcgtgacgccatcggccgctatatcgaattctgcaaggcaagcgtggcgcgtggtttcaccctgcacgggctgaagatggtgctggattgcgcgcatggcgccacctatcacatcgcacccatgctgttccgcgagctgggtgccgaggtggtggtcatcggcgccgcgccggatgggctcaacatcaacgccggcgtgggctcgacccatatcgataatctcgccgccaaggtgcgcgagtgcggtgcgcacctgggtatcgccttcgacggcgacggcgaccgcgtgctgatggccgacgaccagggcaacccggtcgatggcgacgatctgctgtacgtgctcgcgcgctcgtggcaggccagcggccggctgacgggtaccgtggtcggcaccttgatgaccaattacggtctggaacaggcattggccgcgctgcacatcccgttccagcgcgccaaggtcggggaccgctacgtgcatcaggccctggtcgaaggcggcggcacgttgggcggcgaaacgtccggccatctgctgtgcctggaccgtgccagcaccggcgatggcatcgtcagtgcgctgcaggtgctcgaagcgctgggtcgcgataggcagagcctgcgcgacgcgctgacgagcctaagcaaggtgccgcagaagaccgtcaacgtgcgcctggatggtggcgccgccaaggccattgtggaagcggccaacgtgcaacaggcgttgcaacaggcgcaggccgccgtacgaggccgtggccgcgcgttcctgcgcccgtcgggcaccgagccggtggtgcgggtgaccgtggaagccgacgacgccggcctgatgcaggacacgctcgaccggctctcgggtgcagtgcgtgacgcggcgtga

SEQ ID NO: 6288 - protein, 449 aa, Xanthomonas axonopodis pv
MSARKYFGTDGIRGRVGQGVISADFVLRLGNALGRVLTQGRSKRPLVLIGKDTRISGYMFEAALEAGLVAAGADVQLIGPMPTPAIAFLTSTLRADAGVVISASHNPHYDNGIKFFSAEGEKLDDATEAAIEAALDEPFHTVESERLGKAIRTRDAIGRYIEFCKASVARGFTLHGLKMVLDCAHGATYHIAPMLFRELGAEVVVIGAAPDGLNINAGVGSTHIDNLAAKVRECGAHLGIAFDGDGDRVLMADDQGNPVDGDDLLYVLARSWQASGRLTGTVVGTLMTNYGLEQALAALHIPFQRAKVGDRYVHQALVEGGGTLGGETSGHLLCLDRASTGDGIVSALQVLEALGRDRQSLRDALTSLSKVPQKTVNVRLDGGAAKAIVEAANVQQALQQAQAAVRGRGRAFLRPSGTEPVVRVTVEADDAGLMQDTLDRLSGAVRDAA

SEQ ID NO: 6289 - DNA, 1347 bp, Xylella fastidiosa
  CDS (1)..(1347): transl_table=11
gtgagggtgtccaggtattttggtaccgatggcatccgtggccgcgttggccaggggttgatttctgctgattttgtattgcgcctgggtaacgcgcttggtcgagtgcttgctcagggccgtgatacccgtccgatggtgttaattggtaaggacacgcgtatctccggttatatgtttgagtctgcccttgaagcgggtttggtggccgctggcgctgatgtgcagttgatcggtccgatgccaacacctgcgattgctttcctcaccaatacgctacgggctgatgcgggcgtggtgatcagcgcatcccacaatcctcatgatgacaatggcatcaagtttttttccgcgatgggtgaaaagcttgacgatgcgacagaagcggccattgaagcggcgattgaggcgccattcctgaccgttgactctgaatatttggggaaggtcaagcgtacacgtgatgcaattggccgctatatcgaattcagtaaggcaagtgtgccgcgtggttttacgttgcgcgggttgaagttggtattggattgtgcacatggcgccacgtatcacatcgcaccgatgctgtttcgcgaattaggtgcggagttagtggcgattggtgttgatccggatggtttgaatatcaatgccggtgttggctctactcacttggagactctcgctgccacagtgcgtgagagcggtgctgatttgggcattgccttcgatggtgacggtgaccgggtgctgatgacggatgcccaaggccggactgtggatggagacgacctgttgtatgtgctggcgcgtgcttggcgtgccagtggtcgtttaaagggcacggtggttgggacgttgatgagtaactatggtttagagcaggcgttggggacccttgggatcccctttatacgtgcgaaggtgggtgaccgttatgtgcatcaggcattggttgagagtggaggggtgctaggcggtgaggcatccggtcacttgttatgtttggatcgcgcaaccacaggtgatggtatcgtcagtgcattacaggtgttggaagtgttgcgtcatgaggggctgacgttgagtcaggcactgctgggtttacataaggtgccgcagaagacggtcaatgtgtgttggtctggtccagccagggctgcagtcgagatgccggaagtacgtcaagcattggttgaagcgcaagcggcggtgcagggccggggacgggtgtttttgcgtccttccggcaccgagccggtggtgcgtatcactgtcgaagccgatgacgtcgtactcatgcagcagacgcttgataggcttgccgatgtggtgcgtgacgcggcgtga

SEQ ID NO: 6290 - protein, 448 aa, Xylella fastidiosa
MRVSRYFGTDGIRGRVGQGLISADFVLRLGNALGRVLAQGRDTRPMVLIGKDTRISGYMFESALEAGLVAAGADVQLIGPMPTPAIAFLTNTLRADAGVVISASHNPHDDNGIKFFSAMGEKLDDATEAAIEAAIEAPFLTVDSEYLGKVKRTRDAIGRYIEFSKASVPRGFTLRGLKLVLDCAHGATYHIAPMLFRELGAELVAIGVDPDGLNINAGVGSTHLETLAATVRESGADLGIAFDGDGDRVLMTDAQGRTVDGDDLLYVLARAWRASGRLKGTVVGTLMSNYGLEQALGTLGIPFIRAKVGDRYVHQALVESGGVLGGEASGHLLCLDRATTGDGIVSALQVLEVLRHEGLTLSQALLGLHKVPQKTVNVCWSGPARAAVEMPEVRQALVEAQAAVQGRGRVFLRPSGTEPVVRITVEADDVVLMQQTLDRLADVVRDAA

SEQ ID NO: 6291 - DNA, 1347 bp, Xylella fastidiosa
  CDS (1)..(1347): transl_table=11
atgagggtgtccaggtattttggtaccgatggcatccgtggccgcgttggccaggggttgatttctgctgattttgtattgcgcctgggtaacgcgcttggccgagtgcttgctcagggccgtgatacccgtccgatggtgttaattggtaaggacacgcgtatctccggttatatgtttgagtctgctcttgaggcaggtttggtggccgctggcgctgatgtgcagttgatcggcccgatgccaacacctgcgattgctttcttgaccaatacgttgcgggctgatgctggtgtggtgatcagcgcatcccacaatcctcatgatgacaatggcatcaagtttttttccgcgatgggtgaaaagctcgacgatgcgacagaagcggcgattgaagcggcgattgaggcgccattcctgaccgttgactctgaatatttggggaaggtcaagcgtacacgtgatgcaattggccgctatatcgaattcagtaaggcaagtgtgccgcgtggttttacgctgcgcgggttgaagttggtattggattgtgcgcatggcgccacgtatcacatcgcaccgatgctgtttcgcgaattaggtgcggagttagtgacgattggtgtcgatccggatggtttgaatatcaatgccggtgttggctctactcacttggagactctcgctgccacagtgcgtgagagcggtgctgatttgggcattgccttcgatggtgacggtgacagggtgctgatgacggatgcccaaggccggactgtggatggagacgacctgttgtatgtgctggcgcgtgcttggcgggctagtggtcgtttaaagggcacagtggttgggacgttgatgagtaactatggtttagagcaggcgttggggacccttgggatcccctttatacgtgcgagggtgggtgaccgttatgtgcatcaggcattggttgagagtggaggggtgctaggcggtgaggcatccggtcacttgttatgtttggatcgcgcaaccacgggtgatggtatcgtcagtgcattacaggtgttggaagtgttgcgtcatgaggggctgacgttgagtcaggcactgttgggtttacataaggtgccgcagaagacggtcaatgtgtgttggtctggtccagccagggctgcagtcgagatgccggaagtacgtcaagcattggttgaagcgcaagcggcggtgcagggtcggggacgggtgtttttgcgcccttccggcaccgagccggtggtgcgtatcactgtcgaagccgatgacgttgtactcatgcagcagacgcttgataggcttgccgatgtggtccgtgacgcggcgtga

SEQ ID NO: 6292 - protein, 448 aa, Xylella fastidiosa
MRVSRYFGTDGIRGRVGQGLISADFVLRLGNALGRVLAQGRDTRPMVLIGKDTRISGYMFESALEAGLVAAGADVQLIGPMPTPAIAFLTNTLRADAGVVISASHNPHDDNGIKFFSAMGEKLDDATEAAIEAAIEAPFLTVDSEYLGKVKRTRDAIGRYIEFSKASVPRGFTLRGLKLVLDCAHGATYHIAPMLFRELGAELVTIGVDPDGLNINAGVGSTHLETLAATVRESGADLGIAFDGDGDRVLMTDAQGRTVDGDDLLYVLARAWRASGRLKGTVVGTLMSNYGLEQALGTLGIPFIRARVGDRYVHQALVESGGVLGGEASGHLLCLDRATTGDGIVSALQVLEVLRHEGLTLSQALLGLHKVPQKTVNVCWSGPARAAVEMPEVRQALVEAQAAVQGRGRVFLRPSGTEPVVRITVEADDVVLMQQTLDRLADVVRDAA

SEQ ID NO: 6293 - DNA, 1338 bp, Zymomonas mobilis
  CDS (1)..(1338): transl_table=11
atgtcacggcaatattttggaacggatggtatccgtggttgcacgaacaaggatccgatgacagccgatgttgcgatgagagtaggacaggccgccggtgcctattttaaacgggggctgcatcgtcatcgtgtcctgattgggaaagatacccgattatccggctatatggtagaatccgccttgatggcgggttttaccagtgttgggatggatgttgttctggtaggccctctgccaaccccaggggtggctcttttaacccgatcaatgcgggctgatctgggtgttatgatttctgccagccacaatcctttttccgataacggcatcaaactttttggccccaatggctataaattatcggaagaggaagaaaaagcgatcgaagaggcgattgaccagccgcctctattggcagcccctgccgatattgggcgggcgcggcgtattgatgatgcgcaggggcgctatatccatgcggtgaaatcgagttttcctgaatctttacggttggataaattgcgtttggttctggattgcgccaatggcgcagcctatcaggttgcccccgccgttctatgggaattaggggctgaggtgattactttgggcgttgcgcctaatggtcttaatatcaatgaccattgcggttcgactgatccttcggctttgcaaaagaaagtgctggaaacgcgcgcggatttaggcattgcccttgatggcgacgctgatcgtgtcatcatcgtcgatgaaaaaggcgagattgtcgatggcgatcagatcatggctttgatcgcaacctctgcccaaaaacggaatttgttaaaagggaatacgacggttgcgaccgttatgtctaatttgggactggaacgctatttatccaaattgggtattcagcttttacgcacccaagtaggcgatcgccatgtcgtcgaagcaatgcgggcagggggttatactgtcggcggtgagcaatccggtcatatcattctgtcttatcacacaacgacaggggatgggttggttgcggctttgcaggttttggctgatttggttcaaagcgataaaaaggccagcgaattgctgcatgtttttgatccgttcccccagcttttgaaaaatgttcgttatagcagtggacagcctcttgaggatgaatctgtctgtgaagcgatatccgaagcagaagaaagcctgaaaggcaagggacggttgctgatccgtaaatcgggaaccgagcctttaatccgcgtcatggcggaagccgaagaccctgatctggtgcatcagatcgttgaccatatatgtgagaccgttcgtcgtgcagcctaa

SEQ ID NO: 6294 - protein, 445 aa, Zymomonas mobilis
MSRQYFGTDGIRGCTNKDPMTADVAMRVGQAAGAYFKRGLHRHRVLIGKDTRLSGYMVESALMAGFTSVGMDVVLVGPLPTPGVALLTRSMRADLGVMISASHNPFSDNGIKLFGPNGYKLSEEEEKAIEEAIDQPPLLAAPADIGRARRIDDAQGRYIHAVKSSFPESLRLDKLRLVLDCANGAAYQVAPAVLWELGAEVITLGVAPNGLNINDHCGSTDPSALQKKVLETRADLGIALDGDADRVIIVDEKGEIVDGDQIMALIATSAQKRNLLKGNTTVATVMSNLGLERYLSKLGIQLLRTQVGDRHVVEAMRAGGYTVGGEQSGHIILSYHTTTGDGLVAALQVLADLVQSDKKASELLHVFDPFPQLLKNVRYSSGQPLEDESVCEAISEAEESLKGKGRLLIRKSGTEPLIRVMAEAEDPDLVHQIVDHICETVRRAA

SEQ ID NO: 6295 - DNA, 1797 bp, Oryza sativa
  CDS (1)..(1797)
atggctgctactatccccgcttctccggccactctgcagccatgcaagaaaaacgtgagcggcagcatgctcatccggtcgcctccgcgcccttggaggaggaggctcccccagcacgttgtaatagttgatgcgagctcatcgtctcgtggcccgaaggcagcgacgggtggccggctcgagacgtcgactgacgctgcagcggtggccggggaggatggagacgtgatccggaggctgcagaacggaccggacgtgcgtggcgttgcgctggaaggggagaacggccgggccgtggacctcacgccgctggcggtcgaggtgatcgccgagagcttcggggagtggctgcgggaggagctccagcagctggagagcgggagggacggcggcgaggtgcgggtgtccgtcggaagggacccccgcctgtctggcgcgcggctcggcgcagcactgttcgcggggctggcgagggcagggtgttccgtgttcgacgtggggctcgccaccacgccggcttgcttcatgagcaccaagctcccacggttcagctatgacgcctccatcatgatgactgcatcacatctcccatacactcgcaacggcctcaagttcttcatgaagcgcggtggtctcacgtccggcgaggtggaaggggtctgcgaccgtgcggcgcggaagtacgtggccaggaagatgggccttggcggcgggcgaggcatgccgccggtggtgatgcgcgtcgacttgatgagcgcctatgcgcagcacctccgcaacataatcaaggagcgtgttgcccacccgacacactacgacacccccctaaagggcttcaaggtgatcgtgaatgccggcaacggctgcggagggttcttcacgtgggacgtcctggagaagctgggagccgacacgacggggagcctccacctggagcccgacggcaagttccctcaccacatgcccaacccggaggacacgaccgcgatgtccctcacgcgcgatgcggtcctggaccacggcgcggacctcggcgtggtgttcgacaccgacgtggaccgcagcggcgtggtggacgccacgggcgcggccatcaacggcgatcggctcatcgcgctcatgtccgccatcgtgctggacgagcaccccggcacgacggtggtcacggacgcgcggaccagcgacgggctcacccgcttcatccaggccaggggcggccaccactgcctctaccgcgtcggctaccgaaacgtcattgacaagggcgtgcagctcaacgccgacggcgtcgagacgcacctcatgatggagaccaccggccacggcgcgctcaaggagaacaactttctcgacgacggtgcgtacatggtggtgaagattattatcgagatggtcaggatgagactcgtgggattggagggaagcgtaggaacactcatcatggaccttgaggagccggctgagtccaagctgatgaggatgaacattctgggagaagccaagtatgcaaaacaaaggggcactcaagcagtcgagacttttaggaaccatatccaggaagggaaactaaatggttgggttctcgatgactgtggggattgctcggttagccaaggatgcctcgtggacacgaatgatgatccttttgatgttgatgcgtacatgtacaggtatgcgagtgcttgcattgttgcacatctgaatgattatattctatttctttttcctatattaactttatttaagcttctttggttcctttttattacgggaagctttcaattgattggtaaatag

SEQ ID NO: 6296 - protein, 598 aa, Oryza sativa
MAATIPASPATLQPCKKNVSGSMLIRSPPRPWRRRLPQHVVIVDASSSSRGPKAATGGRLETSTDAAAVAGEDGDVIRRLQNGPDVRGVALEGENGRAVDLTPLAVEVIAESFGEWLREELQQLESGRDGGEVRVSVGRDPRLSGARLGAALFAGLARAGCSVFDVGLATTPACFMSTKLPRFSYDASIMMTASHLPYTRNGLKFFMKRGGLTSGEVEGVCDRAARKYVARKMGLGGGRGMPPVVMRVDLMSAYAQHLRNIIKERVAHPTHYDTPLKGFKVIVNAGNGCGGFFTWDVLEKLGADTTGSLHLEPDGKFPHHMPNPEDTTAMSLTRDAVLDHGADLGVVFDTDVDRSGVVDATGAAINGDRLIALMSAIVLDEHPGTTVVTDARTSDGLTRFIQARGGHHCLYRVGYRNVIDKGVQLNADGVETHLMMETTGHGALKENNFLDDGAYMVVKIIIEMVRMRLVGLEGSVGTLIMDLEEPAESKLMRMNILGEAKYAKQRGTQAVETFRNHIQEGKLNGWVLDDCGDCSVSQGCLVDTNDDPFDVDAYMYRYASACIVAHLNDYILFLFPILTLFKLLWFLFITGSFQLIGK

SEQ ID NO: 6297 - DNA, 1605 bp, Oryza sativa
  CDS (1)..(1605)
atggctgctactatccccgcttctccggccactctgcagccatgcaagaaaaacgtgagcggcagcatgctcatccggtcgcctccgcgcccttggaggaggaggctcccccagcacgttgtaatagttgatgcgagctcatcgtctcgtggcccgaaggcagcgacgggtggccggctcgagacgtcgactgacgctgcagcggtggccggggaggatggagacgtgatccggaggctgcagaacggaccggacgtgcgtggcgttgcgctggaaggggagaacggccgggccgtggacctcacgccgctggcggtcgaggtgatcgccgagagcttcggggagtggctgcgggaggagctccagcagctggagagcgggagggacggcggcgaggtgcgggtgtccgtcggaagggacccccgcctgtctggcgcgcggctcggcgcagcactgttcgcggggctggcgagggcagggtgttccgtgttcgacgtggggctcgccaccacgccggcttgcttcatgagcaccaagctcccacggttcagctatgacgcctccatcatgatgactgcatcacatctcccatacactcgcaacggcctcaagttcttcatgaagcgcggtggtctcacgtccggcgaggtggaaggggtctgcgaccgtgcggcgcggaagtacgtggccaggaagatgggccttggcggcgggcgaggcatgccgccggtggtgatgcgcgtcgacttgatgagcgcctatgcgcagcacctccgcaacataatcaaggagcgtgttgcccacccgacacactacgacacccccctaaagggcttcaaggtgatcgtgaatgccggcaacggctgcggagggttcttcacgtgggacgtcctggagaagctgggagccgacacgacggggagcctccacctggagcccgacggcaagttccctcaccacatgcccaacccggaggacacgaccgcgatgtccctcacgcgcgatgcggtcctggaccacggcgcggacctcggcgtggtgttcgacaccgacgtggaccgcagcggcgtggtggacgccacgggcgcggccatcaacggcgatcggctcatcgcgctcatgtccgccatcgtgctggacgagcaccccggcacgacggtggtcacggacgcgcggaccagcgacgggctcacccgcttcatccaggccaggggcggccaccactgcctctaccgcgtcggctaccgaaacgtcattgacaagggcgtgcagctcaacgccgacggcgtcgagacgcacctcatgatggagaccaccggccacggcgcgctcaaggagaacaactttctcgacgacggtgcgtacatggtggtgaagattattatcgagatggtcaggatgagactcgtgggattggagggaagcgtaggaacactcatcatggaccttgaggagccggctgagtccaagctgatgaggatgaacattctgggagaagccaagtatgcaaaacaaaggggcactcaagcagtcgagacttttaggaaccatatccaggtgcaactacatactttattcgcaattctttctctctcttttttttga

SEQ ID NO: 6298 - protein, 534 aa, Oryza sativa
MAATIPASPATLQPCKKNVSGSMLIRSPPRPWRRRLPQHVVIVDASSSSRGPKAATGGRLETSTDAAAVAGEDGDVIRRLQNGPDVRGVALEGENGRAVDLTPLAVEVIAESFGEWLREELQQLESGRDGGEVRVSVGRDPRLSGARLGAALFAGLARAGCSVFDVGLATTPACFMSTKLPRFSYDASIMMTASHLPYTRNGLKFFMKRGGLTSGEVEGVCDRAARKYVARKMGLGGGRGMPPVVMRVDLMSAYAQHLRNIIKERVAHPTHYDTPLKGFKVIVNAGNGCGGFFTWDVLEKLGADTTGSLHLEPDGKFPHHMPNPEDTTAMSLTRDAVLDHGADLGVVFDTDVDRSGVVDATGAAINGDRLIALMSAIVLDEHPGTTVVTDARTSDGLTRFIQARGGHHCLYRVGYRNVIDKGVQLNADGVETHLMMETTGHGALKENNFLDDGAYMVVKIIIEMVRMRLVGLEGSVGTLIMDLEEPAESKLMRMNILGEAKYAKQRGTQAVETFRNHIQVQLHTLFAILSLSFF

SEQ ID NO: 6299 - DNA, 1488 bp, Oryza sativa
  CDS (1)..(1488)
atggctgctactatccccgcttctccggccactctgcagccatgcaagaaaaacgtgagcggcagcatgctcatccggtcgcctccgcgcccttggaggaggaggctcccccagcacgttgtaatagttgatgcgagctcatcgtctcgtggcccgaaggcagcgacgggtggccggctcgagacgtcgactgacgctgcagcggtggccggggaggatggagacgtgatccggaggctgcagaacggaccggacgtgcgtggcgttgcgctggaaggggagaacggccgggccgtggacctcacgccgctggcggtcgaggtgatcgccgagagcttcggggagtggctgcgggaggagctccagcagctggagagcgggagggacggcggcgaggtgcgggtgtccgtcggaagggacccccgcctgtctggcgcgcggctcggcgcagcactgttcgcggggctggcgagggcagggtgttccgtgttcgacgtggggctcgccaccacgccggcttgcttcatgagcaccaagctcccacggttcagctatgacgcctccatcatgatgactgcatcacatctcccatacactcgcaacggcctcaagttcttcatgaagcgcggtggtctcacgtccggcgaggtggaaggggtctgcgaccgtgcggcgcggaagtacgtggccaggaagatgggccttggcggcgggcgaggcatgccgccggtggtgatgcgcgtcgacttgatgagcgcctatgcgcagcacctccgcaacataatcaaggagcgtgttgcccacccgacacactacgacacccccctaaagggcttcaaggtgatcgtgaatgccggcaacggctgcggagggttcttcacgtgggacgtcctggagaagctgggagccgacacgacggggagcctccacctggagcccgacggcaagttccctcaccacatgcccaacccggaggacacgaccgcgatgtccctcacgcgcgatgcggtcctggaccacggcgcggacctcggcgtggtgttcgacaccgacgtggaccgcagcggcgtggtggacgccacgggcgcggccatcaacggcgatcggctcatcgcgctcatgtccgccatcgtgctggacgagcaccccggcacgacggtggtcacggacgcgcggaccagcgacgggctcacccgcttcatccaggccaggggcggccaccactgcctctaccgcgtcggctaccgaaacgtcattgacaagggcgtgcagctcaacgccgacggcgtcgagacgcacctcatgatggagaccaccggccacggcgcgctcaaggagaacaactttctcgacgacggtacgcctagctacgtccatatccacacatacatacgtcatctgcttggagtcttaatagcatatataacgtcgaatttaacaagatttacaaatgttgatctcttgtactacatcctatatatatgctaa

SEQ ID NO: 6300 - protein, 495 aa, Oryza sativa
MAATIPASPATLQPCKKNVSGSMLIRSPPRPWRRRLPQHVVIVDASSSSRGPKAATGGRLETSTDAAAVAGEDGDVIRRLQNGPDVRGVALEGENGRAVDLTPLAVEVIAESFGEWLREELQQLESGRDGGEVRVSVGRDPRLSGARLGAALFAGLARAGCSVFDVGLATTPACFMSTKLPRFSYDASIMMTASHLPYTRNGLKFFMKRGGLTSGEVEGVCDRAARKYVARKMGLGGGRGMPPVVMRVDLMSAYAQHLRNIIKERVAHPTHYDTPLKGFKVIVNAGNGCGGFFTWDVLEKLGADTTGSLHLEPDGKFPHHMPNPEDTTAMSLTRDAVLDHGADLGVVFDTDVDRSGVVDATGAAINGDRLIALMSAIVLDEHPGTTVVTDARTSDGLTRFIQARGGHHCLYRVGYRNVIDKGVQLNADGVETHLMMETTGHGALKENNFLDDGTPSYVHIHTYIRHLLGVLIAYITSNLTRFTNVDLLYYILYIC

SEQ ID NO: 6301 - DNA, 20 bp, Artificial sequence
  primer
atgagcaaaaaatatttcgg

SEQ ID NO: 6302 - DNA, 21 bp, Artificial sequence
  primer
tcaagcacatacatccgaaac

SEQ ID NO: 6303 - protein, 507 aa, Artificial sequence
  consensus sequence
  Variant (6)..(6): Xaa in position 6 is any amino acid
  Variant (7)..(17): Xaa in position 7 to 17 is any or no amino acid
  Variant (20)..(25): Xaa in position 20 to 25 is any amino acid
  Variant (26)..(32): Xaa in position 26 to 32 is any or no amino acid
  Variant (34)..(39): Xaa in position 34 to 39 is any amino acid
  Variant (40)..(40): Xaa in position 40 is any or no amino acid
  Variant (42)..(53): Xaa in position 42 to 53 is any amino acid
  Variant (54)..(69): Xaa in position 54 to 69 is any or no amino acid
  Variant (71)..(71): Xaa in position 71 is any amino acid
  Variant (75)..(75): Xaa in position 75 is any amino acid
  Variant (78)..(78): Xaa in position 78 is any amino acid
  Variant (80)..(82): Xaa in position 80 to 82 is any amino acid
  Variant (84)..(85): Xaa in position 84 to 85 is any amino acid
  Variant (88)..(91): Xaa in position 88 to 91 is any amino acid
  Variant (93)..(98): Xaa in position 93 to 98 is any amino acid
  Variant (100)..(101): Xaa in position 100 to 101 is any amino acid
  Variant (105)..(105): Xaa in position 105 is any amino acid
  Variant (106)..(106): Xaa in position 106 is any or no amino acid
  Variant (108)..(108): Xaa in position 108 is any amino acid
  Variant (110)..(112): Xaa in position 110 to 112 is any amino acid
  Variant (113)..(116): Xaa in position 113 to 116 is any or no amino acid
  Variant (118)..(119): Xaa in position 118 to 119 is any amino acid
  Variant (121)..(122): Xaa in position 121 to 122 is any amino acid
  Variant (130)..(131): Xaa in position 130 to 131 is any amino acid
  Variant (137)..(137): Xaa in position 137 is any amino acid
  Variant (139)..(140): Xaa in position 139 to 140 is any amino acid
  Variant (141)..(141): Xaa in position 141 is any or no amino acid
  Variant (143)..(143): Xaa in position 143 is any amino acid
  Variant (146)..(146): Xaa in position 146 is any amino acid
  Variant (148)..(149): Xaa in position 148 to 149 is any amino acid
  Variant (151)..(152): Xaa in position 151 to 152 is any amino acid
  Variant (155)..(166): Xaa in position 155 to 166 is any amino acid
  Variant (167)..(179): Xaa in position 167 to 179 is any or no amino acid
  Variant (181)..(190): Xaa in position 181 to 190 is any amino acid
  Variant (191)..(207): Xaa in position 191 to 207 is any or no amino acid
  Variant (209)..(219): Xaa in position 209 to 219 is any amino acid
  Variant (220)..(231): Xaa in position 220 to 231 is any or no amino acid
  Variant (233)..(234): Xaa in position 233 to 234 is any amino acid
  Variant (235)..(235): Xaa in position 235 is any or no amino acid
  Variant (237)..(237): Xaa in position 237 is any amino acid
  Variant (239)..(239): Xaa in position 239 is any amino acid
  Variant (241)..(241): Xaa in position 241 is any amino acid
  Variant (244)..(247): Xaa in position 244 to 247 is any amino acid
  Variant (250)..(252): Xaa in position 250 to 252 is any amino acid
  Variant (253)..(254): Xaa in position 253 to 254 is any or no amino acid
  Variant (258)..(258): Xaa in position 258 is any amino acid
  Variant (260)..(265): Xaa in position 260 to 265 is any amino acid
  Variant (266)..(266): Xaa in position 266 is any or no amino acid
  Variant (268)..(268): Xaa in position 268 is any amino acid
  Variant (270)..(270): Xaa in position 270 is any amino acid
  Variant (272)..(272): Xaa in position 272 is any amino acid
  Variant (273)..(274): Xaa in position 273 to 274 is any or no amino acid
  Variant (277)..(279): Xaa in position 277 to 279 is any amino acid
  Variant (281)..(281): Xaa in position 281 is any amino acid
  Variant (283)..(286): Xaa in position 283 to 286 is any amino acid
  Variant (288)..(288): Xaa in position 288 is any amino acid
  Variant (289)..(290): Xaa in position 289 to 290 is any or no amino acid
  Variant (292)..(294): Xaa in position 292 to 294 is any amino acid
  Variant (295)..(295): Xaa in position 295 is any or no amino acid
  Variant (298)..(298): Xaa in position 298 is any amino acid
  Variant (300)..(300): Xaa in position 300 is any amino acid
  Variant (301)..(302): Xaa in position 301 to 302 is any or no amino acid
  Variant (304)..(304): Xaa in position 304 is any amino acid
  Variant (308)..(308): Xaa in position 308 is any amino acid
  Variant (311)..(313): Xaa in position 311 to 313 is any amino acid
  Variant (316)..(317): Xaa in position 316 to 317 is any amino acid
  Variant (319)..(321): Xaa in position 319 to 321 is any amino acid
  Variant (325)..(339): Xaa in position 325 to 339 is any amino acid
  Variant (340)..(345): Xaa in position 340 to 345 is any or no amino acid
  Variant (347)..(347): Xaa in position 347 is any amino acid
  Variant (349)..(349): Xaa in position 349 is any amino acid
  Variant (351)..(351): Xaa in position 351 is any amino acid
  Variant (353)..(366): Xaa in position 353 to 366 is any amino acid
  Variant (367)..(370): Xaa in position 367 to 370 is any or no amino acid
  Variant (377)..(386): Xaa in position 377 to 386 is any amino acid
  Variant (387)..(392): Xaa in position 387 to 392 is any or no amino acid
  Variant (396)..(396): Xaa in position 396 is any amino acid
  Variant (400)..(407): Xaa in position 400 to 407 is any amino acid
  Variant (408)..(408): Xaa in position 408 is any or no amino acid
  Variant (413)..(416): Xaa in position 413 to 416 is any amino acid
  Variant (418)..(426): Xaa in position 418 to 426 is any amino acid
  Variant (427)..(429): Xaa in position 427 to 429 is any or no amino acid
  Variant (431)..(437): Xaa in position 431 to 437 is any amino acid
  Variant (438)..(441): Xaa in position 438 to 441 is any or no amino acid
  Variant (444)..(444): Xaa in position 444 is any amino acid
  Variant (446)..(446): Xaa in position 446 is any amino acid
  Variant (449)..(453): Xaa in position 449 to 453 is any amino acid
  Variant (454)..(488): Xaa in position 454 to 488 is any or no amino acid
  Variant (491)..(491): Xaa in position 491 is any amino acid
  Variant (493)..(493): Xaa in position 493 is any amino acid
  Variant (495)..(495): Xaa in position 495 is any amino acid
  Variant (501)..(502): Xaa in position 501 to 502 is any amino acid
  Variant (506)..(506): Xaa in position 506 is any amino acid
FGTDGXXXXXXXXXXXXRGXXXXXXXXXXXXXTXXXXXXXGXXXXXXXXXXXXXXXXXXXXXXXXXXXXGXDTRXSGXMXXXAXXAGXXXXGXXXXXXGXXPTPXXAXLXXXXXXXAXXGXXISASHNPXXDNGIKXFXXXGXKLXDXXEXXIEXXXXXXXXXXXXXXXXXXXXXXXXXGXXXXXXXXXXXXXXXXXXXXXXXXXXXYXXXXXXXXXXXXXXXXXXXXXXXGXXXVXDXAXGAXXXXAPXXXXXLGAXVXXXXXXXPXGXNXXXINXXXGXTXXXXLXXXVXXXXADXGXXXAXDGDXDRXXXVDXXGXXXDGDXXXXXXXXXXXXXXXXXXXXXVXTXMXNXXXXXXXXXXXXXXXXXXVGDRYVXXXXXXXXXXXXXXXXGGEXSGHXXXXXXXXXTGDGXXXXLXXXXXXXXXXXXLXXXXXXXXXXXPQXLXNVXXXXXXXXXXXXXXXXXXXXXXXXXXXXXXXXXXXXXXXXGRXLXRXSGTEPXXRVMXE

SEQ ID NO: 6304 - protein, 21 aa, Artificial sequence
  protein pattern
  Variant (2)..(2): Xaa in position 2 is Ala, Ile, Leu or Val
  Variant (3)..(3): Xaa in position 3 is any amino acid
  Variant (4)..(4): Xaa in position 4 is Ile, Leu or Val
  Variant (5)..(5): Xaa in position 5 is Ser or Thr
  Variant (6)..(6): Xaa in position 6 is Ala or Gly
  Variant (11)..(12): Xaa in position 11 to 12 is any amino acid
  Variant (16)..(17): Xaa in position 16 to 17 is any or no amino acid
  Variant (19)..(20): Xaa in position 19 to 20 is any or no amino acid
GXXXXXSHNPXXDNGXXIXXF

SEQ ID NO: 6305 - protein, 26 aa, Artificial sequence
  protein pattern
  Variant (2)..(2): Xaa in position 2 is Phe, Ile, Leu or Val
  Variant (4)..(4): Xaa in position 4 is any amino acid
  Variant (8)..(8): Xaa in position 8 is Ala or Gly
  Variant (11)..(14): Xaa in position 11 to 14 is any amino acid
  Variant (16)..(17): Xaa in position 16 to 17 is any amino acid
  Variant (19)..(22): Xaa in position 19 to 22 is any amino acid
  Variant (25)..(25): Xaa in position 25 is any amino acid
  Variant (26)..(26): Xaa in position 26 is Ile, Leu, Met or Val
GXAXDGDXDRXXXXDXXGXXXXGDXX

SEQ ID NO: 6306 - protein, 18 aa, Artificial sequence
  protein pattern
  Variant (2)..(2): Xaa in position 2 is Ile, Leu or Val
  Variant (3)..(3): Xaa in position 3 is any amino acid
  Variant (4)..(4): Xaa in position 4 is Ile, Leu or Val
  Variant (6)..(6): Xaa in position 6 is any amino acid
  Variant (11)..(11): Xaa in position 11 is Glu, Asn, Pro, Gln, Ser or Thr
  Variant (12)..(13): Xaa in position 12 to 13 is any amino acid
  Variant (16)..(16): Xaa in position 16 is Leu or Met
  Variant (17)..(17): Xaa in position 17 is any amino acid
RXXXRXSGTEXXXRVXXE

SEQ ID NO: 6307 - protein, 12 aa, Artificial sequence
  protein pattern
  Variant (2)..(2): Xaa in position 2 is Asp, Asn or Thr
  Variant (4)..(4): Xaa in position 4 is any amino acid
  Variant (8)..(10): Xaa in position 8 to 10 is any amino acid
  Variant (12)..(12): Xaa in position 12 is Ala or Ser
PXGXNINXXXGX

SEQ ID NO: 6308 - protein, 11 aa, Artificial sequence
  protein pattern
  Variant (6)..(6): Xaa in position 6 is Ile or Val
  Variant (9)..(9): Xaa in position 9 is any amino acid
  Variant (10)..(10): Xaa in position 10 is Ala or Val
  Variant (11)..(11): Xaa in position 11 is Gly or Asn
FGTDGXRGXXX

SEQ ID NO: 6309 - protein, 29 aa, Artificial sequence
  protein pattern
  Variant (2)..(4): Xaa in position 2 to 4 is any or no amino acid
  Variant (8)..(8): Xaa in position 8 is His or Tyr
  Variant (10)..(10): Xaa in position 10 is any amino acid
  Variant (11)..(11): Xaa in position 11 is Ala, Asp, Glu or Gln
  Variant (12)..(12): Xaa in position 12 is any amino acid
  Variant (13)..(13): Xaa in position 13 is Leu or Met
  Variant (14)..(20): Xaa in position 14 to 20 is any amino acid
  Variant (22)..(22): Xaa in position 22 is Ala or Gly
  Variant (24)..(24): Xaa in position 24 is any amino acid
  Variant (28)..(28): Xaa in position 28 is Ile, Leu, Met or Val
  Variant (29)..(29): Xaa in position 29 is Ile, Leu or Val
VXXXGDRXVXXXXXXXXXXXGXEXSGHXX

SEQ ID NO: 6310 - DNA, 2211 bp, Azotobacter vinelandii
  CDS (1)..(2211): transl_table=11
atgagcctcattcgccgctgcttgcagcaccctctgtcctccctcgccgccctgatcggcttgctgctcgccgttcccctgggcctgcgcctggccctgggctggtccgacccgctcggctatctgtcggacctgggcattgccggcctgctggtcgtgcttctacagcgccgtccatggtggctggcgttgccggtgctgtcggtgtggtgcctgatgaccctggcctcggtcgagctggtcagtgcggtcggcaggctgccgagcatggcggacgtccattacctgctcgacttgcagttcctggaaaactccactggcggcggtttcgcccagccctggctggccgccgccctggcgtccggcctggcgttctggctgatcgcccgctgggccggccgttcgaaacccgccgcaggcttgccccggcacgcctggacggttccggcgctgctcctgctggtccacggcggcgtgcaataccggtatcccagcgaggaggacccgtggcggctgttcaacctgccgcaccaactgctggtggcgggcatcggggagggacaggcccgtctggaggaatggctggaaggcgacggcgccgacactccaccgcggatggcgggcctcacccggctcgacctggatggacggaaactgctgccggagcccggacgcgcacgcaatgtgctgctggtcgtgctcgaaggcattccgggcgcctatgtgggggtgaaccggcatgccctgcacagtagctaccgggaaaacccgatgccgcacctgagcgcatgggccgagcgcggcatgaacacgcccgactacgtgctgcacacccatcagaccattcgcggcctgtattcgatgctctgcggcgactacgacaagctcgacaacggcacgcccaagggggtcgagatgctggctctgacccggcgtaaccaggactgcctgccggcccgcctgcgcaagaacgggttcgccacgcactacctgcagggcgcaggcctcaggttcatggccaaggaccggatcatgccgcacatcggcttcgacaccaccctgggccgggagtggttcgccaggccgccgtacctggatttcccctggggccaggacgacaaggcgttcttcgaaggcgcactggactatgtcggacaactgcggcggcaggagcggccctggatgctcacgctgctgaccgtcggtactcaccagccctattcggcccccgaggaatacctgcagcgccatgactcgcccaagcgggcggcggtgggctatctggacgacgcgctcgggcagttcctgaccgaactggagcggcggggcgtgctgcgggataccctggtcatcgtcacttcggacgaatcccatggtatcgacggcgtgcgcctggcctcgtcctggggcttcgccctggtgctggcgccggagcgggagcgtttgcccagggtgaagtccggggtctacgggcacgtcgatctgagcgcctcggtactcgactacttcgctttcccggtgcccgccagcctgagcggccgttcgctgttccgcgactacgagacgggccgggagattatgtcgttcaccaacggcaagctgcgctatcacgatggccggggaaccctgaccgaatgcgatttccagcagcgctgccggtattacgcgagcgaaggtttcatcgccgagcgagcgacctttctcggccagtatggcggcaagcgtgcgcgacagataatgtcgagggccgccgcgctggacagcgccctgctgcgtaccgcgtcgaaccgacgctatcagttcggaagtccggcgagaatcccgctgcgggcgcaagtcgaggacgactgggccgacaacctcatcggcgcccagtatctggagatgcccaagggatcgcacacccgcgtgcgcctgaccgtccgcgccgtggagccgcgacagaacgcctacattctgctcaaggccaaggagttcgagcaggacgtgcccctgggcctgccgacggaaatgctggtcacgcccgaacagccgctggagatggatttcggtttcgacaatccggagtcgcgcaaggcgttctcctttcacctgctcggctatgggccgggcgccatcgagataagcgacttcagcgtgatcaccgagttgccgggacaggcggaatcgctggacgaagtcgcggacgacgacgatgcccggtcgagctga

SEQ ID NO: 6311 - protein, 736 aa, Azotobacter vinelandii
MSLIRRCLQHPLSSLAALIGLLLAVPLGLRLALGWSDPLGYLSDLGIAGLLVVLLQRRPWWLALPVLSVWCLMTLASVELVSAVGRLPSMADVHYLLDLQFLENSTGGGFAQPWLAAALASGLAFWLIARWAGRSKPAAGLPRHAWTVPALLLLVHGGVQYRYPSEEDPWRLFNLPHQLLVAGIGEGQARLEEWLEGDGADTPPRMAGLTRLDLDGRKLLPEPGRARNVLLVVLEGIPGAYVGVNRHALHSSYRENPMPHLSAWAERGMNTPDYVLHTHQTIRGLYSMLCGDYDKLDNGTPKGVEMLALTRRNQDCLPARLRKNGFATHYLQGAGLRFMAKDRIMPHIGFDTTLGREWFARPPYLDFPWGQDDKAFFEGALDYVGQLRRQERPWMLTLLTVGTHQPYSAPEEYLQRHDSPKRAAVGYLDDALGQFLTELERRGVLRDTLVIVTSDESHGIDGVRLASSWGFALVLAPERERLPRVKSGVYGHVDLSASVLDYFAFPVPASLSGRSLFRDYETGREIMSFTNGKLRYHDGRGTLTECDFQQRCRYYASEGFIAERATFLGQYGGKRARQIMSRAAALDSALLRTASNRRYQFGSPARIPLRAQVEDDWADNLIGAQYLEMPKGSHTRVRLTVRAVEPRQNAYILLKAKEFEQDVPLGLPTEMLVTPEQPLEMDFGFDNPESRKAFSFHLLGYGPGAIEISDFSVITELPGQAESLDEVADDDDARSS

SEQ ID NO: 6312 - DNA, 2325 bp, Pseudomonas aeruginosa PAO1
  CDS (1)..(2325): transl_table=11
gtgcgtccactcagccgttggctctcatcttgcggctcgcttctggcgctggccgcgctgttcctggtcgttcccctcgccggccgctactggctcggctggtcgacgccgttcggctatctctcggacctggccctcggcagcctgctggtgctgctcctgcatcgacgctccctgtggttcgcgctcccggtcatgctgctctggtgcctgttcctgatcggcaatgccgaactggtcgcagcggtcgggcgcatgccggaaccttccgacctcaagtacctgctggatccgcagttcgtcagcagctccacccagggcggcggcctcgcccacctgccactggcgctcggcctcggtggcgcgacattgctttgcgtgctgctctggcgtcgccgcggtccgcgcctgccgcgctatgcctacgcgctgccggcggcgttcctggcggcgcatgtcggcctgcaatacctgcgtccgagcgatgccgaccaatggcagcagtacaacctgccgcacaagctgctggccagcgcgctcagcagtggccaactggcggtcgaagactggctcgccgacgaccgtccggacaccccgccggacgtcgccgggctcaaccagctcgacctttccggaacgccgctgctggccggcggagggcgcgcgcgcaacgtcctgatcgtggccatggagggaatccccggcgcgtatatcgccgccaaccgcgccgccatcaacagcagctaccacgaagcgccgatgcccaggctgagtggctgggccgaacgggcgatgaccaccccggactacgtgctgcacagccaccagaccatccgcggcctctacgccatgctctgcggcgactacagcaagctcgactcgggcacgccgaagggcgtcgagctgctgaacaacccggcccgggccagggagtgcttgcccgcccagctgcgccagcacggtttcagcacgcacttcctgcagggtgccggcctgcgcttcatggccaaggacaaggtcatgccgcagatgggcttcgacaagaccctcgggcgcgactggttccgcaacacgtcctacctggagtttccctggggcatggacgacaaggccttcttcgagggcgccgcgacctacgtgaagcagctgcgccagcagaagaaaccctggatgctgaccctgctcaccgtcggcacccaccagccctactcggcgcctgccgactacctggcccgctacccgagcgccaagcaggccgcggtggcctatctcgacgacgcgatcgacgccttcctcgccgacctggagaaacagggcgtgttgcgcgacaccctggtggtgctcacttccgacgaatcccacggtgtcgaccaggtgcgcctcgcctcggcctggggcttcaacctggtactggcaccggaacaggcggcgctgccgccgatcaagagcggcgtctacggccacgtcgacctcgccgcgtccgtcctcgactatttcggctaccgcgtgccggcggggatttccgggcgctcgctgttccgcgactacgccagcggccgcgaaatgatgtcctacaccaacggcatgctgcgtcaccacgacggcaaggacaccttcgtcgaatgcgatttccagcaggtctgccggcgctaccgcagcgagggcttcatcgccgacgaagccgagttcctcggtcgcttcagcggtcgccaggcacgcctggtcagccagcgcgccgccgtcctcgaccactccgtgcaacaggccggccagttgggccaggagttccagttcgccacccacgaacgcatccgcctgaagccggaaacccacaacgactggaccgacaacctgatcggcgcgcaatacctggagatgccgaagaacagcaggaccacggtcaccctgaagatccgcgccttgcagatggaccgcaacggcgcccgggtgacgctgaagaccaaggagttcgaacgcgacgttcccataccggtaccggacatcccgcgcctgctcaaaggcaagccgctggacatgagcttcaccttcgacaacccggaagcgcgcaaggccttctccttccacttgctcgccgagggccgcgggatcatcgagatcagcgacttccacgtggtcacggcggccaacccggaacccgtggaaagccgcagccaggtcgccgaagcggcgaaggaacagccgctgctgagcaccctgaaaagcctgttcgccaaccgccccgaaaccgaggaagcggaacgcgcggacgcccctcgggagcgcaccgtcatccccgagcagaaggccctgatcctttcgcactga

SEQ ID NO: 6313 - protein, 774 aa, Pseudomonas aeruginosa PAO1
MRPLSRWLSSCGSLLALAALFLVVPLAGRYWLGWSTPFGYLSDLALGSLLVLLLHRRSLWFALPVMLLWCLFLIGNAELVAAVGRMPEPSDLKYLLDPQFVSSSTQGGGLAHLPLALGLGGATLLCVLLWRRRGPRLPRYAYALPAAFLAAHVGLQYLRPSDADQWQQYNLPHKLLASALSSGQLAVEDWLADDRPDTPPDVAGLNQLDLSGTPLLAGGGRARNVLIVAMEGIPGAYIAANRAAINSSYHEAPMPRLSGWAERAMTTPDYVLHSHQTIRGLYAMLCGDYSKLDSGTPKGVELLNNPARARECLPAQLRQHGFSTHFLQGAGLRFMAKDKVMPQMGFDKTLGRDWFRNTSYLEFPWGMDDKAFFEGAATYVKQLRQQKKPWMLTLLTVGTHQPYSAPADYLARYPSAKQAAVAYLDDAIDAFLADLEKQGVLRDTLVVLTSDESHGVDQVRLASAWGFNLVLAPEQAALPPIKSGVYGHVDLAASVLDYFGYRVPAGISGRSLFRDYASGREMMSYTNGMLRHHDGKDTFVECDFQQVCRRYRSEGFIADEAEFLGRFSGRQARLVSQRAAVLDHSVQQAGQLGQEFQFATHERIRLKPETHNDWTDNLIGAQYLEMPKNSRTTVTLKIRALQMDRNGARVTLKTKEFERDVPIPVPDIPRLLKGKPLDMSFTFDNPEARKAFSFHLLAEGRGIIEISDFHVVTAANPEPVESRSQVAEAAKEQPLLSTLKSLFANRPETEEAERADAPRERTVIPEQKALILSH

SEQ ID NO: 6314 - DNA, 2202 bp, Pseudomonas putida KT2440
  CDS (1)..(2202): transl_table=11
gtgaagaacctgtccgaccacccaagcacccggcttgccactttggcggctctggtgctggtgatcccactgggtacgcgcgccatgctgggttggtccaacccgttcggttacctgtccgatctcgccctcggcagcctgttgatagtgctgctacaccgcaggccgtggtggctggcgctgcccgtgctgctggcctgggcggcgctgtgggtggcctcggccgaactggtaagcgcagtgggccgactgcccaccagcgccgaccttaactacctgaccgacccgcaattcatggagaattcgaccggtggcggcctggcccatgcctggctgccctgggccctgggtggcggcctgctggcctggctggcctttgcgtggcgcagccgtgctcggcgtagccagccactgccgcgcaaagcctgggccatacccgtactgctgttcggcgcgcattggggcagccagcagttgctaccttccgatgccgaccagtggcggcaatacaacctcccccaccagttgatgtctgccggggtcggtaacctgcaacgccaggtcgaaggctggatgggccacacgcaaaccttcaccccgctggccagcagcggcctgactcaatccgacctgcatgggcaaaggctgcttgccggcccgggaagcgcccgcaacttgctggtgattaccctggaaggcatcccgggcgcctacctgcggcctaaccgccaggcgctgaacagccatttcaacgaagacttgatgcccaagctcagcaaatgggccgagcgcggcatgaacaccccagactacgtgctgcacacccaccagaccatccgtggcctgtatgcgatgctgtgcggcgattacgacaagctggccaacggcacgcccaagggcgtggaactgctgacccagaaccaacgcaaccaggcctgtctgccggcacaattacgccaggccggtttcaccacccactacctgcaaggcgcaggcctgcgcttcatggccaaggaccgcatcatgccgcacatcggtttcgatgcggtgcatggccaggagtggttcagcaacaagaactacctgcacttcccatggggcaaggatgaccgcgctttcttcgaaggcgccctgggctatgtgggccagttgcagaagcaggacaagccatggatgctgacgctgctcaccgtgggcacccaccagccctattcggcgccggccgagtacctcgagcgcttcgacacaccgaaacaggcagccgtcgcctacctggatgacgcagtcggggcatttcttgacaatctcgagcgccagggcgtcctcaaggacacactggtggtggtgacttccgacgagtctcacggcatcgatggcgtgcgcctggcctcgtcctggggcttcaaccttacattggcgccggagcaggcccaactgccaaccatcaagcgcggcacttacggccatatcgacctggccacctcgctgctcgactacttcgcactgcccattcccgtcgcgcttggcggtcgctcgctgtaccgcgactacgacagcggccgcgagatgatctcctacaccaacggcatgctgcgctaccacaacggccagggcctgttcaccgaatgtgacttccaacagcgctgccggcgttatgccagtgagggcttcatcgccgaccaggcccgctaccttgggccggccgacagcctgctgggccaacagatcggtgccttggccgtggtactcgaccaatccttgctgcaaaccccgctcaacctgcgctaccagttcggcggcccttcgccgatcaagttgcgcaagcgcattgacgatgactgggccgacaacctcattggcgcccagtatctggaaatgcccggaggctcgcacacccgcgtgcgggtcaaggtccgctcgctggaccccaaacgtgcggcctacatccggctcaaggccaagcagttggaacaggacgtgccgctgggcctgccagaagaggtaaaggtcaccaccgacgcgccactggagatggagttcagcttcgacaacccgaccgagcgcaaggcgttttccttccacttgctgggctatggcggcggcaaggtagaagtcagcgactttagcgtgatcaccgccctgcctggtgaggatgacggcgccgatgaacgggccgaggggcatatcgcccaatcgggctga

SEQ ID NO: 6315 - protein, 733 aa, Pseudomonas putida KT2440
MKNLSDHPSTRLATLAALVLVIPLGTRAMLGWSNPFGYLSDLALGSLLIVLLHRRPWWLALPVLLAWAALWVASAELVSAVGRLPTSADLNYLTDPQFMENSTGGGLAHAWLPWALGGGLLAWLAFAWRSRARRSQPLPRKAWAIPVLLFGAHWGSQQLLPSDADQWRQYNLPHQLMSAGVGNLQRQVEGWMGHTQTFTPLASSGLTQSDLHGQRLLAGPGSARNLLVITLEGIPGAYLRPNRQALNSHFNEDLMPKLSKWAERGMNTPDYVLHTHQTIRGLYAMLCGDYDKLANGTPKGVELLTQNQRNQACLPAQLRQAGFTTHYLQGAGLRFMAKDRIMPHIGFDAVHGQEWFSNKNYLHFPWGKDDRAFFEGALGYVGQLQKQDKPWMLTLLTVGTHQPYSAPAEYLERFDTPKQAAVAYLDDAVGAFLDNLERQGVLKDTLVVVTSDESHGIDGVRLASSWGFNLTLAPEQAQLPTIKRGTYGHIDLATSLLDYFALPIPVALGGRSLYRDYDSGREMISYTNGMLRYHNGQGLFTECDFQQRCRRYASEGFIADQARYLGPADSLLGQQIGALAVVLDQSLLQTPLNLRYQFGGPSPIKLRKRIDDDWADNLIGAQYLEMPGGSHTRVRVKVRSLDPKRAAYIRLKAKQLEQDVPLGLPEEVKVTTDAPLEMEFSFDNPTERKAFSFHLLGYGGGKVEVSDFSVITALPGEDDGADERAEGHIAQSG

SEQ ID NO: 6316 - DNA, 2202 bp, Pseudomonas putida GB-1
  CDS (1)..(2202): transl_table=11
gtgaagaacctgtccgaccacccacgcacccggcttgccgctttggcagccttggtgttggtgatcccactgggtacgcgcgccatgctgggttggtccaacccgctcggttacctgtccgacctcgccctcggcagcctgctggtgctattgctgcaccgccggccgtggtggctggcactgcccgtgctgctggcctgggcggccctgtgggtagcctcggccgaactcgtaagcgcggtgggccggttgcccaccagcgccgacctgacctacctgctcgacccgcagttcatggagaactccaccggtggcggcctggcccatgcctggctgccttgggtgctgggcagtgctctgctggcctggctggcctgtgcctggcgcagccgcgcgcagcgtagccagccactgccgcgcaaggcctgggccatccccgtactgctgtttggcgcccactggggcagccagcaactggtgccttccgatgccgaccagtggcggcaatacaacctcacccaccagctgatgtctgccggggctggcaacctgcaacgccaggtcgaaggctggcttggccgtacgcaacccttcaccccgctggccagcagcggcttgacccaatccgacctgcatgggcaaaggctgtttaccggcccgggaactgcccgcaacctgctggtcatcaccatggaaggcatccccggcgcttacctgcggcccaaccgccaggcgctgaacagtcgtttcgacgaagacctgatgcccaagctcagcaagtgggccgagcgcggcatgaacaccccggactacgtgctgcacacccaccagaccatccgcggcctgtacgcgatgctgtgcggcgactacgacaagctggccaatggcacgcccaagggcgtggagctgctgacccagaacgagcgcaaccaggcttgcctgccagcacagttgcgccaggccggtttcactacccactacctgcaaggcgcgggcctgcgcttcatggccaaggaccgcatcatgccgcacatcggtttcgattcggtgcatggcttggagtggttccgcaacaagaactacctggacttcccatggggcaaggatgaccgcgccttcttcgagggtgccctgggctacgtcggccagttgcagaagcaggacaagccatggatgctgaccctgctcaccgtgggcacccaccagccctactcggcgccggccgaatacctcgagcgctacgacacgccgaaacaggcagcggtcgcctacctggacgacgccgtcggggcatttctcgacaacctcgaacgccagggcgtactcaaggacacgctggtggtgctgacgtccgacgagtcccatggcatcgatggcgtgcgcctggcttcgtcctggggcttcaaccttaccctggcgccggagcaggcccagctaccgaccatcaagcgcggcacctacggccacatcgacctggccacctcgttgctcgactacttcgcactgcccattcctgtcgcgcttggcggtcgctcgctgtaccgtgactacgacaccggccgcgagatgatctcctacaccaacggcatgctgcgctaccacaacggccagggcgtgttcaccgaatgtgacttccagcagcgctgccggcgttatgccagcgagggcttcatcgccgaccaggcccgctatcttgggccaggcgacagcctgctgggccagcagatcggcgccctggccggggtgctcgaccaatccctgctgcaaaccccgctcaacctgcgctaccaattcggcggcccttcgccgatcaagttgcgcaagcgcatccacgatgactgggccgacaacctgattggcgcacagtacctggaaatgccggaaggctcgcacacccgtgtgcgggtcaaggtacgctcgctggaccctaaacgtgcggcctatatccagctcaaggccaagcagttggagcaggacgtacccttgggcctgccacaagaggtaaaggtcaccgccgacgagccgctggagatggagttcagcttcgacaacccgaccgagcgcaaggcgttttccttccatttgctgggctatggcggcggcaaggtggaagtcagcgatttcagcgtgatcaccgccctgcctggcgaggatgacggcgccgatgagcttgccgaggggcatatcgcccactcgggctga

SEQ ID NO: 6317 - protein, 733 aa, Pseudomonas putida GB-1
MKNLSDHPRTRLAALAALVLVIPLGTRAMLGWSNPLGYLSDLALGSLLVLLLHRRPWWLALPVLLAWAALWVASAELVSAVGRLPTSADLTYLLDPQFMENSTGGGLAHAWLPWVLGSALLAWLACAWRSRAQRSQPLPRKAWAIPVLLFGAHWGSQQLVPSDADQWRQYNLTHQLMSAGAGNLQRQVEGWLGRTQPFTPLASSGLTQSDLHGQRLFTGPGTARNLLVITMEGIPGAYLRPNRQALNSRFDEDLMPKLSKWAERGMNTPDYVLHTHQTIRGLYAMLCGDYDKLANGTPKGVELLTQNERNQACLPAQLRQAGFTTHYLQGAGLRFMAKDRIMPHIGFDSVHGLEWFRNKNYLDFPWGKDDRAFFEGALGYVGQLQKQDKPWMLTLLTVGTHQPYSAPAEYLERYDTPKQAAVAYLDDAVGAFLDNLERQGVLKDTLVVLTSDESHGIDGVRLASSWGFNLTLAPEQAQLPTIKRGTYGHIDLATSLLDYFALPIPVALGGRSLYRDYDTGREMISYTNGMLRYHNGQGVFTECDFQQRCRRYASEGFIADQARYLGPGDSLLGQQIGALAGVLDQSLLQTPLNLRYQFGGPSPIKLRKRIHDDWADNLIGAQYLEMPEGSHTRVRVKVRSLDPKRAAYIQLKAKQLEQDVPLGLPQEVKVTADEPLEMEFSFDNPTERKAFSFHLLGYGGGKVEVSDFSVITALPGEDDGADELAEGHIAHSG

SEQ ID NO: 6318 - DNA, 2208 bp, Pseudomonas fluorescens Pf-5
  CDS (1)..(2208): transl_table=11
gtgaagttgatccgtcgttgcctaaaacaccctcttgcacccctgtgcgccctgttcggcctgctgttgctgctgcccatgggcgcgcgcctggccctgggctggtccaacccgctgggctatctgtcggacctggccagcgccagcctgctgaccgtactcctgtaccgccggccctggtggctggcgctgccggtgctgctggtctgggccctgctgaccctggtcagcgccgagctggtaagcgccgtggggcgcatgcccaacctcgccgacctgcactacctggtggatccgcagtttgtcggcaactccaccggcggcggcctgacccacccggacctgggcctggcgctgttgctggggctggtgctgtggctggtggtccagcgcgcccaccgcggggtgcgccccccggcactgccgcgccatagctggagcctgccggtgctgttgctggtggctcacggcggcatccagtacctcaagcccagcgaagccgaccagtggcaactgttcaacctgccccaccaggccctggccactgccaccggccaggcgcagatgcaggtggaggactggctgcaaggcgacgtcgccgatgccccaccgcccatggccgggctcacccgcctggacctggaaggccagccgctgctgcccagcgcaggccgcgcgcgtaacgtgctgctgatcaccctcgaaggtattcccggtgcctatatccgcaccaaccgcgaagccctgaacagccgctaccaggaagacctgatgcccaagctcagcgcctgggccgagcgcggcatgaacaccccggactacgtgctgcacagccaccagaccatccgcggcctgtacgccatgctctgcggcgactacgacaagctcgacaacggcacccccaagggcgtcgagatgctcacccagagccagcgcaaccaggcctgcctgccggcgcagatgcacaagttcggtttcaacacccactacctgcagggcgccggcctgcgcttcatggccaaggacaagatcatgccgcacatcggcttcgattcgacccatggcctggagtggttcaagaacaacaactacctggagttcccctggggcaaggacgacaaggccttcttcgaaggcgccctgggctacgtcgaccagctgaagaagaacaagaagccgtggatgctcaccctgctgaccgtcggcacccaccagccctactcggcgcccgaggactacctggaacgctatgagacgccgaagcaggccgccgtgggctacctggacgacgccatcgaccagttcctcacgggcctggagcgcaagggcgtgctcaaggacaccctggtgatcattacctccgatgagtcccacggcatcgacggcgtgcgcctggcttcgtcctggggcttcaacctgatgctcgccccggaccaggacctgctgccccatctcaagtccggcacctacggccacgtcgacctcagcgcctcggtgctggactacttcggcctgccggtgcctgccagcctcagcggccgctcgctgttgcgcgactatgcccagggccgggaaatcatgtcctacaccaacggcaagctgcgctaccacgatggccagggcaccttcaccgagtgcgacttccaacagcgctgccgctactacgccagccccggtttcatcgccgacagcgccagcctgcaaggccagtacggcggcctgcgggcccggcagatcagcgcgcgtgcggcgaacctggaccgcagcctgctgcagtcgccgctgaaccagcactaccagttcggcagcccggcgatcatcccgctgcaggcgcagatcaaggacgactgggccgacaacctgatcggcgcccagtacctggaaatgcccaagggctcccagacccgggtgcgcttcaccgtgcgctccgccgacccgcagcaaaacgcctacatcctgctcaagggcaaggagctggaacaggacgtgcccctgggcctgccggaagaaatgctggtcacacccgaccagccgttgcagatggacttcagcttcgacaacccggaaacccgcaaggccttctccttccacctgctgggctatggcctgggggcagtggaagtcagcgacttcagcgtgatcaccgagttgccggggcagaccgaaagcgacgaccccgaagaagacagcaacgcccactccagctga

SEQ ID NO: 6319 - protein, 735 aa, Pseudomonas fluorescens Pf-5
MKLIRRCLKHPLAPLCALFGLLLLLPMGARLALGWSNPLGYLSDLASASLLTVLLYRRPWWLALPVLLVWALLTLVSAELVSAVGRMPNLADLHYLVDPQFVGNSTGGGLTHPDLGLALLLGLVLWLVVQRAHRGVRPPALPRHSWSLPVLLLVAHGGIQYLKPSEADQWQLFNLPHQALATATGQAQMQVEDWLQGDVADAPPPMAGLTRLDLEGQPLLPSAGRARNVLLITLEGIPGAYIRTNREALNSRYQEDLMPKLSAWAERGMNTPDYVLHSHQTIRGLYAMLCGDYDKLDNGTPKGVEMLTQSQRNQACLPAQMHKFGFNTHYLQGAGLRFMAKDKIMPHIGFDSTHGLEWFKNNNYLEFPWGKDDKAFFEGALGYVDQLKKNKKPWMLTLLTVGTHQPYSAPEDYLERYETPKQAAVGYLDDAIDQFLTGLERKGVLKDTLVIITSDESHGIDGVRLASSWGFNLMLAPDQDLLPHLKSGTYGHVDLSASVLDYFGLPVPASLSGRSLLRDYAQGREIMSYTNGKLRYHDGQGTFTECDFQQRCRYYASPGFIADSASLQGQYGGLRARQISARAANLDRSLLQSPLNQHYQFGSPAIIPLQAQIKDDWADNLIGAQYLEMPKGSQTRVRFTVRSADPQQNAYILLKGKELEQDVPLGLPEEMLVTPDQPLQMDFSFDNPETRKAFSFHLLGYGLGAVEVSDFSVITELPGQTESDDPEEDSNAHSS

SEQ ID NO: 6320 - DNA, 2211 bp, Pseudomonas fluorescens PfO-1
  CDS (1)..(2211): transl_table=11
gtgagcgctctttttcaacggctgcggcgcctggatgcccgccttctttctctggttttcctggtactgatcgtgccggtgtgccttcgcgcggcgctcggctggtcgagcctgttcggctacctttcggatctggccatcggcagtctgctgttggttttgttgcatcgccgtccctggtggctggcgctgccggtgctgctgttctggggattgctggcggtggcgaccgctgaactggtcagcgcagtcggtcgcctgccgaccgtggcggatctgcattacctgatcgacccgcagttcgtggaaaactccaccggcggcggattcgcccatcccggtgtggcggttacgctgctggtggctctggccttttggttgctgagtcattggactcgacgcggaagaaccgcccccgctctgccccgcacagcctgggcgacgccggtgctgcttttctgcgcgtactggggcgcgcagcacctgaacccgagcgatgccgacccatggcgtctgtacaacctgccgcaccaactgctcgccgcgcaggtcgccgacgtgcagatgcaggccgaagaatggctggacggcgacactcaggttgctcccccaccgatggccggcctcaccgatgtcgatctgaacggtcatccgctgctggcggccaagggccaagcgcgcaatgtgctgatcgtcgcgctcgaaggcattcccggcgcctacatcggcgccaatcgccaggccatcggcagccattatcaggaagacctgatgcccaacctcagccgctgggccgagcgcggcatgaacaccccggattacgtgctgcacacccaccagaccattcgcggtctgtacgccatgctctgcggcgattacgacaaactcgacaacggcacgcccaaaggcgtggaaatgctgacccagcacgagcgcaatcaagcctgtctgccggctcagttgcgtcagcacggttttgccactcactacctgcaaggcgcagggctgcggttcatggccaaagacaagatcatgccgcacatcgggttcgacgcgacccatggcctggagtggttcaccaacgccaactacctggaattcccgtggggcaaggatgacaaggcgttcttcgaaggcgcgctgaaatacgtcggcgacctgaaaaagcagaaacaaccgtggatgctcacgctgctgaccgtcggcacccaccagccctactccgcgccggaggaatacctgcaacgctacgacacacccaagcaagccgccgtcggttatctggacgatgcactggaacagtttctcagtggcctcgaacgccagggcgtgctgaaagacacgctggtggtcatcacctcggacgagtcccacggcatcgacggcgtccgtctcgcgtcgtcctggggcttcaacctgaccctcgcgccggaacaggcgcaactgccgcgcctgaacgccggggtctacggtcacgtcgacctgagtgcgtcgattctggattacttcgactttccggtgccttccgccctcagcggtcgctcactgtttcgcgattacgattcgggccgcgaaatcatgtcgttcaccaacggcaagctgcgttatcacgacggtcgcggcctgctgaccgaatgcgacatgccgcgtcgttgccgcaattacgccagtgaaggattcatcgccgaaagcgccacgttcaagggcaacgccagcggccagaatgcccgggacatcgccgcccgcgcctcggccctggacctgtcgctgctgcgcaccccgctcaaccagcgctatcagttcggcagcgccaacgtcatcccgctgcaagcgcagatcaaggacgactgggccgacaacctgatcggcgcgcaatacctggaaatgcccaagggctcccacacccgcgtgcgcctgaccgtgcgctcggtcgatccgcagcaggcggcgtacattcagctcaaagccaaggagttcgaacaggacgtgcaactgggcctgccgaccgagatggtcgccacagcggatcagccgctggagatggatttcagcttcgacaacccgcaaccacgcaaggcgttttcgtttcacttgttgggatatgggctgggcgcggtggaagtcagtgacttcagcgtgatcaccgaactgccggggcaggaagatatgctggatgaaacgccggctgacgagacggcgcaatccagttga

SEQ ID NO: 6321 - protein, 736 aa, Pseudomonas fluorescens PfO-1
MSALFQRLRRLDARLLSLVFLVLIVPVCLRAALGWSSLFGYLSDLAIGSLLLVLLHRRPWWLALPVLLFWGLLAVATAELVSAVGRLPTVADLHYLIDPQFVENSTGGGFAHPGVAVTLLVALAFWLLSHWTRRGRTAPALPRTAWATPVLLFCAYWGAQHLNPSDADPWRLYNLPHQLLAAQVADVQMQAEEWLDGDTQVAPPPMAGLTDVDLNGHPLLAAKGQARNVLIVALEGIPGAYIGANRQAIGSHYQEDLMPNLSRWAERGMNTPDYVLHTHQTIRGLYAMLCGDYDKLDNGTPKGVEMLTQHERNQACLPAQLRQHGFATHYLQGAGLRFMAKDKIMPHIGFDATHGLEWFTNANYLEFPWGKDDKAFFEGALKYVGDLKKQKQPWMLTLLTVGTHQPYSAPEEYLQRYDTPKQAAVGYLDDALEQFLSGLERQGVLKDTLVVITSDESHGIDGVRLASSWGFNLTLAPEQAQLPRLNAGVYGHVDLSASILDYFDFPVPSALSGRSLFRDYDSGREIMSFTNGKLRYHDGRGLLTECDMPRRCRNYASEGFIAESATFKGNASGQNARDIAARASALDLSLLRTPLNQRYQFGSANVIPLQAQIKDDWADNLIGAQYLEMPKGSHTRVRLTVRSVDPQQAAYIQLKAKEFEQDVQLGLPTEMVATADQPLEMDFSFDNPQPRKAFSFHLLGYGLGAVEVSDFSVITELPGQEDMLDETPADETAQSS

SEQ ID NO: 6322 - DNA, 2325 bp, Pseudomonas aeruginosa UCBPP-PA14
  CDS (1)..(2325): transl_table=11
gtgcgtccactcagccgttggctctcatcttgcggctcgcttctggcgctggccgcgctgttcctggtcgttcccctcgccggccgctactggctcggctggtcgacgccgttcggctatctctcggacctggccctcggcagcctgctggtgctgctcctgcatcgacgctccctgtggttcgcgctcccggtcatgctgctctggtgcctgttcctgatcggcaatgccgaactggtcggcgcggtcgggcgcatgccggagccttccgacctcaagtacctgctggatccgcagttcgtcagcagctccacccagggcggcggcctcgcccacctgccactggcgctcggcctcggcggcgcgacattgctttgcgtgctgctctggcgccgccgcggtccgcgcctgccgcgctatgcctacgcgctgccggcggcgttcctggcggcgcatgtcggcctgcaatacctgcgtccgagcgatgccgaccagtggcagcagtacaacctgccgcacaaactgctggccagcgcgctcagcagtggccaactggcggtcgaagactggctcgccggcgaccgtccggacaccccgccggacgtcgccgggctcaaccagctcgacctttccggaacgccgctgctggccggcggagggcgcgcgcgcaacgtcctgatcgtggccatggagggaatccccggcgcgtatatcgccgccaaccgcgccgccatcaacagcagctaccacgaagcgccgatgcccaggctgagtggctgggccgaacgggcgatgaccaccccggactacgtgctgcacagccaccagaccatccgcggcctctacgccatgctctgcggcgactacagcaagctcgactcgggcacgccgaagggcgtcgagctgctcaacaacccggcccgggccagggagtgcctgcccgcccagctgcgccagcacggtttcagcacgcacttcctgcagggtgccggcctgcgcttcatggccaaggacaaggtcatgccgcagatgggcttcgacaagaccctcgggcgcgactggttccgcaacaagtcctacctggagtttccctggggcatggacgacaaggccttcttcgagggcgccgcgacctacgtgaagcagctgcgccagcagaagaaaccctggatgctgaccctgctcaccgtcggcacccaccagccctactcggcgcctgccgactacctggcccgctacccgaacgccaagcaggccgcggtggcctatctcgacgacgcgatcggcgccttcctcgccgacctggagaaacagggcgtgttgcgcgacaccctggtggtgctcacttccgacgagtcccacggtgtcgaccaggtgcgcctcgcctcggcctggggcttcaacctggtgctggcaccggaacaggcggcgctgccgccgatcaagagcggcgtctacggccacgtcgacctcgccgcgtccgtcctcgactatttcggctaccgcgtgccggcggggatttccgggcgctcgctgttccgcgactacgccagcggtcgcgaaatgatgtcctacaccaacggcatgctgcgccaccacgacggcaaggccaccttcgtcgagtgcgatttccagcaggtctgccggcgctaccgcagcgagggcttcatcgccgacgaagccgagttcctcggtcgctttagcggacgccaggcacgcctggtcagccagcgcgccgccgtcctcgaccactccgtgcaacaggccggccagttgggccaggagttccagttcgccacccacgaacgcatccgcctgaagccggaaacccacaacgactggaccgacaacctgatcggcgcgcaatacctggagatgccgaagaacagcaggaccacggtcaccctgaagatccgcgccttgcagatggaccgcaacggcgcccgggtgacgctgaagaccaaggagttcgaacgcgacgttcccataccggtaccggacatcccgcgcctgctcaaaggcaagccgctggacatgagcttcaccttcgacaacccggaagcgcgcaaggccttctccttccacttgctcgccgagggccgcgggatcatcgagatcagcgacttccacgtggtcacggcggccaacccggaacccgtggaaagccgcagccaggtcgccgaagcggcgaaggaacagccgctgctgagcaccctgaaaagcctgttcgccaaccgccccgaaaccgaggaagcggaacgcgcggacgcccctcgggagcgcaccgtcatccccgagcagaaggccctgatcctttcgcactga

SEQ ID NO: 6323 - protein, 774 aa, Pseudomonas aeruginosa UCBPP-PA14
MRPLSRWLSSCGSLLALAALFLVVPLAGRYWLGWSTPFGYLSDLALGSLLVLLLHRRSLWFALPVMLLWCLFLIGNAELVGAVGRMPEPSDLKYLLDPQFVSSSTQGGGLAHLPLALGLGGATLLCVLLWRRRGPRLPRYAYALPAAFLAAHVGLQYLRPSDADQWQQYNLPHKLLASALSSGQLAVEDWLAGDRPDTPPDVAGLNQLDLSGTPLLAGGGRARNVLIVAMEGIPGAYIAANRAAINSSYHEAPMPRLSGWAERAMTTPDYVLHSHQTIRGLYAMLCGDYSKLDSGTPKGVELLNNPARARECLPAQLRQHGFSTHFLQGAGLRFMAKDKVMPQMGFDKTLGRDWFRNKSYLEFPWGMDDKAFFEGAATYVKQLRQQKKPWMLTLLTVGTHQPYSAPADYLARYPNAKQAAVAYLDDAIGAFLADLEKQGVLRDTLVVLTSDESHGVDQVRLASAWGFNLVLAPEQAALPPIKSGVYGHVDLAASVLDYFGYRVPAGISGRSLFRDYASGREMMSYTNGMLRHHDGKATFVECDFQQVCRRYRSEGFIADEAEFLGRFSGRQARLVSQRAAVLDHSVQQAGQLGQEFQFATHERIRLKPETHNDWTDNLIGAQYLEMPKNSRTTVTLKIRALQMDRNGARVTLKTKEFERDVPIPVPDIPRLLKGKPLDMSFTFDNPEARKAFSFHLLAEGRGIIEISDFHVVTAANPEPVESRSQVAEAAKEQPLLSTLKSLFANRPETEEAERADAPRERTVIPEQKALILSH

SEQ ID NO: 6324 - DNA, 20 bp, Artificial sequence
  primer
atgagcctcattcgccgctg

SEQ ID NO: 6325 - DNA, 21 bp, Artificial sequence
  primer
tcagctcgaccgggcatcgtc

SEQ ID NO: 6326 - protein, 708 aa, Artificial sequence
  consensus sequence
  Variant (2)..(3): Xaa in position 2 to 3 is any amino acid
  Variant (5)..(6): Xaa in position 5 to 6 is any amino acid
  Variant (8)..(8): Xaa in position 8 is any amino acid
  Variant (10)..(11): Xaa in position 10 to 11 is any amino acid
  Variant (13)..(15): Xaa in position 13 to 15 is any amino acid
  Variant (17)..(18): Xaa in position 17 to 18 is any amino acid
  Variant (23)..(23): Xaa in position 23 is any amino acid
  Variant (25)..(25): Xaa in position 25 is any amino acid
  Variant (33)..(34): Xaa in position 33 to 34 is any amino acid
  Variant (38)..(39): Xaa in position 38 to 39 is any amino acid
  Variant (42)..(42): Xaa in position 42 is any amino acid
  Variant (45)..(46): Xaa in position 45 to 46 is any amino acid
  Variant (48)..(48): Xaa in position 48 is any amino acid
  Variant (53)..(53): Xaa in position 53 is any amino acid
  Variant (55)..(55): Xaa in position 55 is any amino acid
  Variant (57)..(63): Xaa in position 57 to 63 is any amino acid
  Variant (68)..(68): Xaa in position 68 is any amino acid
  Variant (73)..(73): Xaa in position 73 is any amino acid
  Variant (75)..(77): Xaa in position 75 to 77 is any amino acid
  Variant (80)..(80): Xaa in position 80 is any amino acid
  Variant (83)..(83): Xaa in position 83 is any amino acid
  Variant (88)..(90): Xaa in position 88 to 90 is any amino acid
  Variant (93)..(93): Xaa in position 93 is any amino acid
  Variant (97)..(97): Xaa in position 97 is any amino acid
  Variant (100)..(101): Xaa in position 100 to 101 is any amino acid
  Variant (103)..(105): Xaa in position 103 to 105 is any amino acid
  Variant (107)..(116): Xaa in position 107 to 116 is any amino acid
  Variant (117)..(117): Xaa in position 117 is any or no amino acid
  Variant (119)..(120): Xaa in position 119 to 120 is any amino acid
  Variant (122)..(124): Xaa in position 122 to 124 is any amino acid
  Variant (125)..(127): Xaa in position 125 to 127 is any or no amino acid
  Variant (131)..(131): Xaa in position 131 is any amino acid
  Variant (133)..(135): Xaa in position 133 to 135 is any amino acid
  Variant (137)..(141): Xaa in position 137 to 141 is any amino acid
  Variant (144)..(144): Xaa in position 144 is any amino acid
  Variant (146)..(146): Xaa in position 146 is any amino acid
  Variant (148)..(148): Xaa in position 148 is any amino acid
  Variant (150)..(150): Xaa in position 150 is any amino acid
  Variant (153)..(153): Xaa in position 153 is any amino acid
  Variant (156)..(156): Xaa in position 156 is any amino acid
  Variant (158)..(160): Xaa in position 158 to 160 is any amino acid
  Variant (165)..(165): Xaa in position 165 is any amino acid
  Variant (167)..(174): Xaa in position 167 to 174 is any amino acid
  Variant (176)..(178): Xaa in position 176 to 178 is any amino acid
  Variant (180)..(180): Xaa in position 180 is any amino acid
  Variant (183)..(189): Xaa in position 183 to 189 is any amino acid
  Variant (191)..(194): Xaa in position 191 to 194 is any amino acid
  Variant (197)..(199): Xaa in position 197 to 199 is any amino acid
  Variant (202)..(202): Xaa in position 202 is any amino acid
  Variant (204)..(205): Xaa in position 204 to 205 is any amino acid
  Variant (208)..(210): Xaa in position 208 to 210 is any amino acid
  Variant (212)..(212): Xaa in position 212 is any amino acid
  Variant (216)..(216): Xaa in position 216 is any amino acid
  Variant (218)..(221): Xaa in position 218 to 221 is any amino acid
  Variant (229)..(231): Xaa in position 229 to 231 is any amino acid
  Variant (234)..(234): Xaa in position 234 is any amino acid
  Variant (236)..(237): Xaa in position 236 to 237 is any amino acid
  Variant (239)..(241): Xaa in position 239 to 241 is any amino acid
  Variant (243)..(244): Xaa in position 243 to 244 is any amino acid
  Variant (247)..(247): Xaa in position 247 is any amino acid
  Variant (250)..(250): Xaa in position 250 is any amino acid
  Variant (255)..(255): Xaa in position 255 is any amino acid
  Variant (257)..(257): Xaa in position 257 is any amino acid
  Variant (265)..(265): Xaa in position 265 is any amino acid
  Variant (281)..(281): Xaa in position 281 is any amino acid
  Variant (284)..(285): Xaa in position 284 to 285 is any amino acid
  Variant (293)..(293): Xaa in position 293 is any amino acid
  Variant (295)..(298): Xaa in position 295 to 298 is any amino acid
  Variant (300)..(302): Xaa in position 300 to 302 is any amino acid
  Variant (310)..(311): Xaa in position 310 to 311 is any amino acid
  Variant (314)..(314): Xaa in position 314 is any amino acid
  Variant (317)..(317): Xaa in position 317 is any amino acid
  Variant (330)..(331): Xaa in position 330 to 331 is any amino acid
  Variant (334)..(335): Xaa in position 334 to 335 is any amino acid
  Variant (339)..(341): Xaa in position 339 to 341 is any amino acid
  Variant (343)..(344): Xaa in position 343 to 344 is any amino acid
  Variant (347)..(347): Xaa in position 347 is any amino acid
  Variant (349)..(350): Xaa in position 349 to 350 is any amino acid
  Variant (353)..(353): Xaa in position 353 is any amino acid
  Variant (358)..(358): Xaa in position 358 is any amino acid
  Variant (361)..(361): Xaa in position 361 is any amino acid
  Variant (368)..(369): Xaa in position 368 to 369 is any amino acid
  Variant (372)..(372): Xaa in position 372 is any amino acid
  Variant (375)..(376): Xaa in position 375 to 376 is any amino acid
  Variant (378)..(379): Xaa in position 378 to 379 is any amino acid
  Variant (398)..(399): Xaa in position 398 to 399 is any amino acid
  Variant (402)..(402): Xaa in position 402 is any amino acid
  Variant (404)..(407): Xaa in position 404 to 407 is any amino acid
  Variant (413)..(413): Xaa in position 413 is any amino acid
  Variant (419)..(421): Xaa in position 419 to 421 is any amino acid
  Variant (424)..(425): Xaa in position 424 to 425 is any amino acid
  Variant (428)..(429): Xaa in position 428 to 429 is any amino acid
  Variant (433)..(433): Xaa in position 433 is any amino acid
  Variant (438)..(439): Xaa in position 438 to 439 is any amino acid
  Variant (447)..(447): Xaa in position 447 is any amino acid
  Variant (449)..(449): Xaa in position 449 is any amino acid
  Variant (455)..(455): Xaa in position 455 is any amino acid
  Variant (461)..(461): Xaa in position 461 is any amino acid
  Variant (467)..(468): Xaa in position 467 to 468 is any amino acid
  Variant (471)..(472): Xaa in position 471 to 472 is any amino acid
  Variant (474)..(474): Xaa in position 474 is any amino acid
  Variant (476)..(476): Xaa in position 476 is any amino acid
  Variant (480)..(480): Xaa in position 480 is any amino acid
  Variant (483)..(484): Xaa in position 483 to 484 is any amino acid
  Variant (486)..(486): Xaa in position 486 is any amino acid
  Variant (491)..(494): Xaa in position 491 to 494 is any amino acid
  Variant (496)..(499): Xaa in position 496 to 499 is any amino acid
  Variant (504)..(504): Xaa in position 504 is any amino acid
  Variant (508)..(509): Xaa in position 508 to 509 is any amino acid
  Variant (513)..(514): Xaa in position 513 to 514 is any amino acid
  Variant (516)..(516): Xaa in position 516 is any amino acid
  Variant (520)..(520): Xaa in position 520 is any amino acid
  Variant (523)..(523): Xaa in position 523 is any amino acid
  Variant (525)..(525): Xaa in position 525 is any amino acid
  Variant (527)..(531): Xaa in position 527 to 531 is any amino acid
  Variant (538)..(538): Xaa in position 538 is any amino acid
  Variant (541)..(541): Xaa in position 541 is any amino acid
  Variant (543)..(543): Xaa in position 543 is any amino acid
  Variant (550)..(551): Xaa in position 550 to 551 is any amino acid
  Variant (553)..(555): Xaa in position 553 to 555 is any amino acid
  Variant (557)..(569): Xaa in position 557 to 569 is any amino acid
  Variant (571)..(572): Xaa in position 571 to 572 is any amino acid
  Variant (575)..(575): Xaa in position 575 is any amino acid
  Variant (577)..(581): Xaa in position 577 to 581 is any amino acid
  Variant (582)..(582): Xaa in position 582 is any or no amino acid
  Variant (584)..(587): Xaa in position 584 to 587 is any amino acid
  Variant (590)..(594): Xaa in position 590 to 594 is any amino acid
  Variant (596)..(596): Xaa in position 596 is any amino acid
  Variant (598)..(603): Xaa in position 598 to 603 is any amino acid
  Variant (606)..(606): Xaa in position 606 is any amino acid
  Variant (619)..(620): Xaa in position 619 to 620 is any amino acid
  Variant (622)..(622): Xaa in position 622 is any amino acid
  Variant (624)..(624): Xaa in position 624 is any amino acid
  Variant (626)..(629): Xaa in position 626 to 629 is any amino acid
  Variant (631)..(637): Xaa in position 631 to 637 is any amino acid
  Variant (638)..(638): Xaa in position 638 is any or no amino acid
  Variant (640)..(642): Xaa in position 640 to 642 is any amino acid
  Variant (645)..(645): Xaa in position 645 is any amino acid
  Variant (647)..(648): Xaa in position 647 to 648 is any amino acid
  Variant (650)..(650): Xaa in position 650 is any amino acid
  Variant (654)..(656): Xaa in position 654 to 656 is any amino acid
  Variant (658)..(666): Xaa in position 658 to 666 is any amino acid
  Variant (669)..(669): Xaa in position 669 is any amino acid
  Variant (671)..(671): Xaa in position 671 is any amino acid
  Variant (673)..(673): Xaa in position 673 is any amino acid
  Variant (678)..(679): Xaa in position 678 to 679 is any amino acid
  Variant (689)..(690): Xaa in position 689 to 690 is any amino acid
  Variant (692)..(692): Xaa in position 692 is any amino acid
  Variant (694)..(695): Xaa in position 694 to 695 is any amino acid
  Variant (697)..(697): Xaa in position 697 is any amino acid
  Variant (701)..(701): Xaa in position 701 is any amino acid
  Variant (703)..(703): Xaa in position 703 is any amino acid
  Variant (705)..(706): Xaa in position 705 to 706 is any amino acid
  Variant (707)..(707): Xaa in position 707 is any or no amino acid
LXXLXXLXLXXPXXXRXXLGWSXPXGYLSDLAXXSLLXXLLXRRXXWXALPVXLXWXXXXXXXAELVXAVGRXPXXXDLXYLXDPQFXXXSTXGGGXAHXXLXXXLXXXXXXXXXXXWXXRXXXXXXLPRXAXXXPXXXXXAHXGXQXLXPSXADXWXXXNLPHXLXXXXXXXXQXXXEXWLXXXXXXXPXXXXGLXXXDLXGXXLLXXXGXARNXLXXXXEGIPGAYXXXNRXAXXSXXXEXXMPXLSXWAERXMXTPDYVLHXHQTIRGLYAMLCGDYXKLXXGTPKGVEXLXXXXRXXXCLPAQLRXXGFXTHXLQGAGLRFMAKDXXMPXXGFDXXXGXXWFXNXXYLXFPWGXDDXAFFEGAXXYVXQLXXQXXPWMLTLLTVGTHQPYSAPXXYLXRXXXXKQAAVXYLDDAXXXFLXXLEXXGVLXDTLVXXTSDESHGXDXVRLASXWGFNLXLAPEQXXLPXXKXGXYGHXDLXXSXLDYFXXXXPXXXXGRSLXRDYXXGREXXSXTNGXLRXHXGXXXXXECDFQQXCRXYXSEGFIAXXAXXXGXXXXXXXXXXXXXAXXLDXSXXXXXXLXXXXQFXXXXXIXLXXXXXXDWXDNLIGAQYLEMPXXSXTXVXXXXRXXXXXXXXAXXXLKXKXXEXDVPXXXPXXXXXXXXXPLXMXFXFDNPXXRKAFSFHLLXXGXGXXEXSDFXVXTXXXP

SEQ ID NO: 6327 - protein, 62 aa, Artificial sequence
  protein pattern
  Variant (2)..(3): Xaa in position 2 to 3 is any or no amino acid
  Variant (5)..(6): Xaa in position 5 to 6 is any amino acid
  Variant (7)..(8): Xaa in position 7 to 8 is any or no amino acid
  Variant (10)..(10): Xaa in position 10 is Ala or Val
  Variant (11)..(11): Xaa in position 11 is Ala, Gly or Ser
  Variant (12)..(12): Xaa in position 12 is Ile or Leu
  Variant (13)..(13): Xaa in position 13 is Gly or Ser
  Variant (18)..(18): Xaa in position 18 is any amino acid
  Variant (22)..(22): Xaa in position 22 is Ala, Asp or Glu
  Variant (23)..(23): Xaa in position 23 is Gln, Ser or Thr
  Variant (27)..(28): Xaa in position 27 to 28 is Ile or Met
  Variant (30)..(30): Xaa in position 30 is Phe or Tyr
  Variant (34)..(34): Xaa in position 34 is any amino acid
  Variant (37)..(37): Xaa in position 37 is His or Tyr
  Variant (39)..(39): Xaa in position 39 is Asp or Asn
  Variant (41)..(41): Xaa in position 41 is any amino acid
  Variant (42)..(42): Xaa in position 42 is Ala, Asp or Gly
  Variant (43)..(43): Xaa in position 43 is any amino acid
  Variant (44)..(44): Xaa in position 44 is Phe or Leu
  Variant (45)..(45): Xaa in position 45 is Thr or Val
  Variant (52)..(52): Xaa in position 52 is any amino acid
  Variant (55)..(55): Xaa in position 55 is any amino acid
  Variant (57)..(57): Xaa in position 57 is any amino acid
  Variant (59)..(59): Xaa in position 59 is Glu or Pro
YXXFXXXXPXXXXGRSLXRDYXXGREXXSXTNGXLRXHXGXXXXXECDFQQXCRXYXSXGFI

SEQ ID NO: 6328 - protein, 59 aa, Artificial sequence
  protein pattern
  Variant (2)..(2): Xaa in position 2 is Glu or Gln
  Variant (3)..(3): Xaa in position 3 is Phe or Leu
  Variant (5)..(5): Xaa in position 5 is Gln or Arg
  Variant (9)..(9): Xaa in position 9 is Ile or Leu
  Variant (10)..(10): Xaa in position 10 is Gly or Pro
  Variant (11)..(11): Xaa in position 11 is Leu or Val
  Variant (13)..(13): Xaa in position 13 is Asp, Glu, Gln or Thr
  Variant (14)..(16): Xaa in position 14 to 16 is any amino acid
  Variant (17)..(17): Xaa in position 17 is Leu or Val
  Variant (18)..(19): Xaa in position 18 to 19 is any amino acid
  Variant (20)..(20): Xaa in position 20 is Asp, Glu or Gly
  Variant (21)..(21): Xaa in position 21 is any amino acid
  Variant (24)..(24): Xaa in position 24 is Asp, Glu or Gln
  Variant (26)..(26): Xaa in position 26 is Asp, Glu or Ser
  Variant (28)..(28): Xaa in position 28 is Gly, Ser or Thr
  Variant (33)..(33): Xaa in position 33 is any or no amino acid
  Variant (35)..(35): Xaa in position 35 is any or no amino acid
  Variant (45)..(45): Xaa in position 45 is Ala or Gly
  Variant (46)..(46): Xaa in position 46 is any amino acid
  Variant (48)..(48): Xaa in position 48 is any amino acid
  Variant (50)..(50): Xaa in position 50 is any amino acid
  Variant (51)..(51): Xaa in position 51 is Ile or Val
  Variant (53)..(53): Xaa in position 53 is Ile or Val
  Variant (57)..(57): Xaa in position 57 is any amino acid
  Variant (59)..(59): Xaa in position 59 is Ile or Val
KXXEXDVPXXXPXXXXXXXXXPLXMXFXFDNPXEXRKAFSFHLLXXGXGXXEXSDFXVX

SEQ ID NO: 6329 - protein, 27 aa, Artificial sequence
  protein pattern
  Variant (2)..(3): Xaa in position 2 to 3 is any amino acid
  Variant (6)..(6): Xaa in position 6 is any amino acid
  Variant (7)..(8): Xaa in position 7 to 8 is any or no amino acid
  Variant (10)..(10): Xaa in position 10 is Gln, Arg or Ser
  Variant (14)..(14): Xaa in position 14 is Leu or Val
  Variant (16)..(16): Xaa in position 16 is Ile, Leu or Val
  Variant (17)..(17): Xaa in position 17 is Ile or Val
  Variant (18)..(18): Xaa in position 18 is Ala, Thr or Val
  Variant (19)..(19): Xaa in position 19 is Leu or Met
  Variant (27)..(27): Xaa in position 27 is Ile, Leu or Val
GXXLLXXXGXARNXLXXXXEGIPGAYX

SEQ ID NO: 6330 - protein, 30 aa, Artificial sequence
  protein pattern
  Variant (2)..(2): Xaa in position 2 is Phe, Leu or Val
  Variant (4)..(4): Xaa in position 4 is any or no amino acid
  Variant (6)..(6): Xaa in position 6 is any or no amino acid
  Variant (8)..(8): Xaa in position 8 is Leu or Val
  Variant (9)..(9): Xaa in position 9 is Ala, Cys or Gly
  Variant (10)..(10): Xaa in position 10 is any amino acid
  Variant (12)..(13): Xaa in position 12 to 13 is any amino acid
  Variant (18)..(18): Xaa in position 18 is Asp, Asn, Ser or Thr
  Variant (19)..(19): Xaa in position 19 is Leu or Pro
  Variant (20)..(20): Xaa in position 20 is Phe or Leu
  Variant (27)..(28): Xaa in position 27 to 28 is any amino acid
  Variant (29)..(29): Xaa in position 29 is any or no amino acid
LXLXVXPXXXRXXLGWSXXXGYLSDLXXXG

SEQ ID NO: 6331 - protein, 14 aa, Artificial sequence
  protein pattern
  Variant (3)..(4): Xaa in position 3 to 4 is any amino acid
  Variant (5)..(5): Xaa in position 5 is Asn or Gln
  Variant (6)..(6): Xaa in position 6 is Asp, Glu or Lys
  Variant (7)..(7): Xaa in position 7 is Lys or Arg
QLXXXXXPWMLTLL

SEQ ID NO: 6332 - DNA, 1641 bp, Escherichia coli
  CDS (1)..(1641): transl_table=11
atggaatctaataatggggaagccaaaatccagaaagtgaagaactggtctcccgtgtggatatttcctatcgtcacggcgctcattggggcctgggttcttttttatcattacagccatcagggaccggaagtgaccctgatcaccgcgaatgcggaaggaattgaaggtggcaaaaccaccattaaaagccgtagcgttgacgtcggcgtggttgaaagcgccacactggctgatgatttgacgcacgttgaaatcaaagcgcggctgaattccggtatggaaaaattgctgcataaagacaccgtcttttgggtggtgaaaccgcagattggtcgcgaagggattagcggcctgggaacgctgctgtctggagtttatatcgaactgcagccaggcgcgaaaggcagcaaaatggataaatacgatttgctggactcgccaccgttggccccgcctgatgcgaaaggtatccgtgtgattctcgatagcaaaaaagccgggcagctctcgccaggagatccggtgctgttccgtggctatcgggtaggttcggttgaaaccagcaccttcgatacacaaaaacgcaatatcagctatcaactgttcatcaatgcaccttatgaccgactggtgaccaacaatgttcgcttctggaaagatagtggcattgcggttgatctgacgtcagcagggatgcgtgtggagatgggctcattgacaacgctgctgagtggcggtgtcagctttgatgtgccggaaggtctggatttagggcagccagtggcaccgaaaacagctttcgttttgtatgatgatcagaagagcattcaggattcgttgtacaccgatcacattgattatctgatgttctttaaagattcggtacgcggtctgcaaccgggagctccggtagagttccggggtattcgcctgggtaccgtaagcaaagtgccattctttgcgccgaatatgcgtcagacatttaacgatgattaccgtattccggtactgattcgtatcgagccagagcggctgaaaatgcagcttggcgaaaatgcggatgttgttgagcaccttggcgaattgttgaaacgtggtttacgcggatcgctgaaaaccggaaacctggtcactggtgcactgtatgttgatctcgatttctatccaaatacgcctgcaataaccggtattcgtgaatttaatggttatcagattatcccgaccgttagcggcggcctggcgcaaatccagcaacgactgatggaagcgttggataagatcaacaaactgccattgaatccgatgattgaacaggcaaccagtacgctttctgaaagtcagcgcacaatgaaaaacctgcaaacgacgctggatagcatgaacaagatcctcgctagccagtcgatgcagcagttgccgacggatatgcagtcaacgttgcgtgaattgaatcgcagcatgcagggcttccagcctggctccgcagcctacaacaagatggtggcggatatgcagcgccttgatcaggtgttgcgagaactgcaaccggtgctgaaaacgctcaatgagaagagtaacgcgctggtatttgaagcgaaggacaaaaaagatccagagccgaagagggcgaaacaataa

SEQ ID NO: 6333 - protein, 546 aa, Escherichia coli
MESNNGEAKIQKVKNWSPVWIFPIVTALIGAWVLFYHYSHQGPEVTLITANAEGIEGGKTTIKSRSVDVGVVESATLADDLTHVEIKARLNSGMEKLLHKDTVFWVVKPQIGREGISGLGTLLSGVYIELQPGAKGSKMDKYDLLDSPPLAPPDAKGIRVILDSKKAGQLSPGDPVLFRGYRVGSVETSTFDTQKRNISYQLFINAPYDRLVTNNVRFWKDSGIAVDLTSAGMRVEMGSLTTLLSGGVSFDVPEGLDLGQPVAPKTAFVLYDDQKSIQDSLYTDHIDYLMFFKDSVRGLQPGAPVEFRGIRLGTVSKVPFFAPNMRQTFNDDYRIPVLIRIEPERLKMQLGENADVVEHLGELLKRGLRGSLKTGNLVTGALYVDLDFYPNTPAITGIREFNGYQIIPTVSGGLAQIQQRLMEALDKINKLPLNPMIEQATSTLSESQRTMKNLQTTLDSMNKILASQSMQQLPTDMQSTLRELNRSMQGFQPGSAAYNKMVADMQRLDQVLRELQPVLKTLNEKSNALVFEAKDKKDPEPKRAKQ

SEQ ID NO: 6334 - DNA, 1662 bp, Neisseria meningitidis MC58
  CDS (1)..(1662): transl_table=11
atgactgacaacagccctcctccaaacggacacgcccaagcacgcgtccgcaaaaacaacaccttcctctctgccgtctggctggttccgctgatcgcgctgattgccggcggctggctttgggttaaggaaatccgcaacagggggcctgtggttacgctcttgatggacagcgcggaaggcattgaggtcaacaatacggtcatcaaagtattgagcatcgatgtcggacgcgttacccgaatcaaactgcgcgacgaccaaaaaggcgtggaagtaaccgcccaactcaatgcggacgtatccggcctcatccgcagcgatacccagttttgggtggtcaagccgcgtatcgaccaaagcggcgtaaccggtttgggtacgctgctttcgggttcgtacatcgcctttacacccggcaaaagcgacgaggcaaaagacgtgttccaagtgcaggacattccgcccgttaccgccatcgggcaaagcgggctgcgcttgaatttgattggtaaaaacgaccgcatcctcaacgtcaacagccctgttttgtatgaaaattttatggtcgggcaagtcgaaagcgcgcatttcgacccgtccgaccaaagcgtgcattacaccatcttcatccaaagccccaacgacaaactgattcattccgccagccgtttttggctggaaagcggcatcaatatcgaaaccacaggcagcggcatcaaactcaattccgcccctctgcctgccctgctgtcgggcgcgatttcatttgattcgccgaaaaccaaaaacagtaaaaacgtcaaaagcgaagacagcttcacgctttacgacagccgcagcgaagtcgccaacctgcctgacgaccgctcgctgtactacaccgcgtttttcaaacaatccgtgcgcggcctgaccgtcggttcgcccgtcgagtacaaagggctgaatgtcggcgtggtttccgacgttccttatttcgaccgcaacgacagcctgcacctgtttgaaaacggctggatacccgtacgcatccgcattgaaccttcccgtttggaaatcaatgccgacgaacaaagcaaagaacattggaaacaacaatttcagacggccttaaacaaaggcctgaccgccaccatctccagcaacaacctgctgaccggaagcaaaatgattgagttgaacgatcagccttccgcatcacctaagctgcgaccgcataccgtttatgcaggcgataccgttatcgcgacccagggcggcggtttggacgatttgcaggtcaaattggcggatttgctggacaagttcgacaaactgcctttagataagacggttgccgaattgaacggttcgcttgccgagctcaaatccacactcaaatctgccaatgccgccctaagctccatcgacaaactggtcggcaaaccgcagacacaaaacattccgaacgaactgaaccaaaccctgaaagagttgcgcacaaccctgcaaggcgtatcgccgcaatcgcctatctacggcgacgtacaaaatacgctgcaaagtttggacaaaactttaaaagacgttcaacccgtgattaatactttgaaagaaaaacccaacgcgctgattttcaacagcagcagcaaagaccctatcccgaaaggaagccgataa

SEQ ID NO: 6335 - protein, 553 aa, Neisseria meningitidis MC58
MTDNSPPPNGHAQARVRKNNTFLSAVWLVPLIALIAGGWLWVKEIRNRGPVVTLLMDSAEGIEVNNTVIKVLSIDVGRVTRIKLRDDQKGVEVTAQLNADVSGLIRSDTQFWVVKPRIDQSGVTGLGTLLSGSYIAFTPGKSDEAKDVFQVQDIPPVTAIGQSGLRLNLIGKNDRILNVNSPVLYENFMVGQVESAHFDPSDQSVHYTIFIQSPNDKLIHSASRFWLESGINIETTGSGIKLNSAPLPALLSGAISFDSPKTKNSKNVKSEDSFTLYDSRSEVANLPDDRSLYYTAFFKQSVRGLTVGSPVEYKGLNVGVVSDVPYFDRNDSLHLFENGWIPVRIRIEPSRLEINADEQSKEHWKQQFQTALNKGLTATISSNNLLTGSKMIELNDQPSASPKLRPHTVYAGDTVIATQGGGLDDLQVKLADLLDKFDKLPLDKTVAELNGSLAELKSTLKSANAALSSIDKLVGKPQTQNIPNELNQTLKELRTTLQGVSPQSPIYGDVQNTLQSLDKTLKDVQPVINTLKEKPNALIFNSSSKDPIPKGSR

SEQ ID NO: 6336 - DNA, 1641 bp, Salmonella typhimurium LT2
  CDS (1)..(1641): transl_table=11
atggaacctaaaaaaggggaagccaaagtacaaaaggtgaaaaattggtcgcctgtctggatattcccgattgttactgcgcttatcggagcctggattctgttttatcactacagccaccagggaccggaagttaccttaatcaccaccaatgcggaaggcattgaaggcggaaaaacgacgatcaaaagtcgcagcgtggatgtcggcgtggttgaaagcgcgacgctgactgacgatctgacccacgtacaaatcaaagcgcggctccattccggtatggaaaagttgctgcataaagactcggtattttgggtggtaaaaccgcaggtggggcgtgaaggcatcagcgggcttgggacgctgctatcaggcgcgtatattgaactacaaccaggaagtaagggcagtcagccggaaagctatcagcttcttgactcaccgccgttggcgccgcccgatgccaaaggtattcgtgtgattctggacagcaaaaaggccggtcagctcagtcctggcgatcccgttctgttccggggttatcgggtaggatccgttgaaaccagctctttcgatccgcaaaaacggacaatgagttatcagttgttcattaaggcgccaaacgatcgattggtcaccagtaatgtccgattctggaaagatagcggtatcgctgtggatctgacatcggcgggaatgcgcgtggaaatgggatcgttgacgacgttgtttggcggcggcgtgagttttgatgtgccggaaggacttgagcaggggcaacccgtcgccgaaaaaacggcgtttaatctctacgacgatcaaaaaagtattcaggattcgctgtacaccgatcatatcgattacctgatgttctttaaagattcggtgcgcggattacaacccggcgcgccgctggagttccgcggtattcgtctggggacggtaagcaaagtgcctttctttgcgtctaaaatgcgccaggtatttaacgacgattaccgtattcctgtgctggtgcgcattgaaccggagcgtctgaaagcgcaattgggagaaaatgcggatgttggcgcgcatttgacggaactgcttaagcgcggtttacgcgcttcgcttaaaaccggtaacctggtgaccggggcgctgtatgtcgatctggacttttatcctaaggagccgccgattaccgggctacgcgaatttgatggttatgaaattattcccaccgtcagcagcggtctggcgcaaattcaacagcgactggtggaaacgttggataagatcaacaacctgccgttgaatccgatgattgaacaagcgaccaatacgctgtctgaaagccagcgtactatgcgtcggctgcaaaccacgctggataatatgaacaagattacctccagtcagtcgatgcagcagcttccggcggatatgcaaacgacgttacgcgaacttaaccgcagtatgcaaggcttccagcctggatcggcggcgtataacaaaatggtggcggatatgcagcgtctcgatcaggtgcttcgtgagttacaaccggtgttgaaaactctgaacgagaagagcaacgcgctggtatttgaagcgaaggataaaaaagatcctgagcctaagagggcgaaacaatga

SEQ ID NO: 6337 - protein, 546 aa, Salmonella typhimurium LT2
MEPKKGEAKVQKVKNWSPVWIFPIVTALIGAWILFYHYSHQGPEVTLITTNAEGIEGGKTTIKSRSVDVGVVESATLTDDLTHVQIKARLHSGMEKLLHKDSVFWVVKPQVGREGISGLGTLLSGAYIELQPGSKGSQPESYQLLDSPPLAPPDAKGIRVILDSKKAGQLSPGDPVLFRGYRVGSVETSSFDPQKRTMSYQLFIKAPNDRLVTSNVRFWKDSGIAVDLTSAGMRVEMGSLTTLFGGGVSFDVPEGLEQGQPVAEKTAFNLYDDQKSIQDSLYTDHIDYLMFFKDSVRGLQPGAPLEFRGIRLGTVSKVPFFASKMRQVFNDDYRIPVLVRIEPERLKAQLGENADVGAHLTELLKRGLRASLKTGNLVTGALYVDLDFYPKEPPITGLREFDGYEIIPTVSSGLAQIQQRLVETLDKINNLPLNPMIEQATNTLSESQRTMRRLQTTLDNMNKITSSQSMQQLPADMQTTLRELNRSMQGFQPGSAAYNKMVADMQRLDQVLRELQPVLKTLNEKSNALVFEAKDKKDPEPKRAKQ

SEQ ID NO: 6338 - DNA, 1701 bp, Escherichia coli CFT073
  CDS (1)..(1701): transl_table=11
ttgacccgcgtttgtcgtgggatcgtcaacctgaatcagagcatgaggagtcctgacagtatggaatctaataatggggaagccaaaatccagaaagtgaagaactggtctcccgtgtggatatttcctatcgtcacggcgctcattggggcctgggttcttttttatcattacagccatcagggaccggaagtgaccctgatcaccgcgaatgcggaaggaattgaaggtggcaaaaccaccattaaaagccgtagcgttgacgtcggcgtggttgaaagcgccacactggctgatgatttgacgcacgttgaaatcaaagcgcggctgaattccggtatggaaaagttgctgcataaagataccgtcttttgggtggtgaaaccgcagattggtcgagaagggattagcggcctgggaacactgctgtctggggtttatatcgaactgcagccaggcgcgaaaggcagcaaaatggataaatacgatttgctggactcgccaccgttggccccacctgatgcgaaaggtatccgtgtgcttctcgatagcaaaaaagccgggcagctctcgccaggagatccggtgctgttccgtggctatcgggtaggttcggttgaaaccagcactttcgatacgcaaaaacgcaatatcagttatcaactgttcatcaatgcaccttatgaccgactggtgaccagcaatgttcgtttctggaaagatagtggcattgcggttgatctgacgtcagcgggaatgcgtgtggagatgggctcattgacaacgctgcttagtggcggtgtcagctttgatgtgccggaaggtctggatttagggcagccagtggcaccgaaaacagctttcgttttgtatgatgatcagaagagcattcaggattcgttgtacaccgatcacattgattatctgatgttctttaaagattcggtacgcggtctgcaaccgggagctccggtagaattccggggtattcgcctgggtaccgtaagcaaagtgccattctttgcgccgaatatgcgtcagacatttaacgatgattaccgtattccggtactgattcgtatcgagccagagcggctgaaaatgcagcttggcgaaaatgcggatgttgttgagcaccttggcgaattgttgaaacgtggtttacgcggatcgctgaaaaccggaaacctggtcactggcgcactgtatgttgatctcgatttctatccaaatacgcctgcaataaccggtattcgtgaatttaatggttatcagattatcccgaccgttagcggcggtctggcgcaaatccagcaacgactgatggaagcgttggataagatcaacaaactgccattgaatccgatgattgaacaggcaaccagtacgctttctgaaagtcagcgcacaatgaaaaacctgcaaacgacgctggatagcatgaacaagatccttgccagccagtcgatgcagcagttaccgacggatatgcagtcaacgttgcgtgaattgaatcgcagcatgcagggcttccagcctggttccgcagcctacaacaagatggtggcggatatgcagcgccttgatcaggtgttgcgagaactgcaaccggtgctgaaaacgctcaacgagaagagtaacgcgctggtatttgaagcgaagggcaaaaaagatccagagccgaagagggcgaaacaatga

SEQ ID NO: 6339 - protein, 566 aa, Escherichia coli CFT073
MTRVCRGIVNLNQSMRSPDSMESNNGEAKIQKVKNWSPVWIFPIVTALIGAWVLFYHYSHQGPEVTLITANAEGIEGGKTTIKSRSVDVGVVESATLADDLTHVEIKARLNSGMEKLLHKDTVFWVVKPQIGREGISGLGTLLSGVYIELQPGAKGSKMDKYDLLDSPPLAPPDAKGIRVLLDSKKAGQLSPGDPVLFRGYRVGSVETSTFDTQKRNISYQLFINAPYDRLVTSNVRFWKDSGIAVDLTSAGMRVEMGSLTTLLSGGVSFDVPEGLDLGQPVAPKTAFVLYDDQKSIQDSLYTDHIDYLMFFKDSVRGLQPGAPVEFRGIRLGTVSKVPFFAPNMRQTFNDDYRIPVLIRIEPERLKMQLGENADVVEHLGELLKRGLRGSLKTGNLVTGALYVDLDFYPNTPAITGIREFNGYQIIPTVSGGLAQIQQRLMEALDKINKLPLNPMIEQATSTLSESQRTMKNLQTTLDSMNKILASQSMQQLPTDMQSTLRELNRSMQGFQPGSAAYNKMVADMQRLDQVLRELQPVLKTLNEKSNALVFEAKGKKDPEPKRAKQ

SEQ ID NO: 6340 - DNA, 1680 bp, Pseudomonas syringae pv. tomato str. DC3000
  CDS (1)..(1680): transl_table=11
atgtctgacaataccctccccccgtctgcttcagtgccacggcctgaagtcaaacgtcgtcgcctgagcgtctcgctgatctggctggtgccgatcattgcagcgatcattggtgcatccatggcgtttcacgactggatgaacatcgggccgaagatcaccgtgagctttttgaccgccgaaggcctggaagccaacaagacgcaggtcaaatacaagaacgtggtcatcggcatggttaccgagatcagcctcagcgacgaccgcacccatgtgctggccaacatcgaactcaataccagcgcatcgcctttcacgcggatcgacagccagttctgggttgtacgtccgcgcattggtgcccacggcgtatcgggggtcgataccctgctgtcaggcgctttcattggcgcagacgcaggtagctcggacgaaaccaagaccagcttcactggcctggaaaccccgccaccagtgaccttcggagaaaaaggcaagcgtttcaccctgcacaccgacgacctcggctcgctggacatcggctcacccatctactatcgccgtatccaggttggccaggtggttgcctatgacctgtccaaggacggccgtggcgtcgacatccagatcttcatcaatgcgccgaacgatcagtacatcaccaccgacacgcgtttctggaatgccagtggcgtagacatcacggttggcgcctcgggggtgaaggtcaatactcagtccctgacctcgatcctctccggcggcatcgccttccgcgagcccaactggagccccgacagcaagccggctgacgagaatgccgaattcaagatttttgaagaccagaccacagcgctggcaccacccgatggcgagccgcgttacatccgcatgcgtttcaaccagtcgcttcgcgggctggcggtgaacgcgtcggtggatttcctgggcgttaccatcggcaaggtggtgtcggtcgacctggattacgacccggccaccaagaccttccccggcattgtcggtgcagtgatctaccccaagcgtctgggtgctgccgagtccaagttgaaggaactgggtggcgcaggggatgaagaagaacagtccgccagagtgttgggggcgttcgtcgccaacggccttcgtgcccaggtacgcaatggcaacctgttgaccggccagctgtacatcgccatggagttcgatccgaaggcgccgaaagtgtcgttcaacgccaaggcccgcccgctggaaattccgacggtgccgggcagcttcgacaaactgcaagagcaactgcaggcgttcgtcgagaagctcagtaaactgccaatcgaccaactggcgggcaatctcaacggtaccctgagcgagctgcagaagacgctcaagcaggtcaacggcagcgtgctgccgcaaatgcgtggcaccttgcagcaagccgagaaaaccctgggcaccgccaacgactcattcgctgaagactcgccggcgcgtcagcagttgggccaggcgctggatgaggtgcaacgcaccgcccgttcggtccgggtactcaccgacttcctcagccgccaccccgagtcgctgattcgcggccgcaccggcgacgccgcgccacgttcattcaacgccccgtcctcgtcccgagccattgatccggagccaaaacaatga

SEQ ID NO: 6341 - protein, 559 aa, Pseudomonas syringae pv. tomato str. DC3000
MSDNTLPPSASVPRPEVKRRRLSVSLIWLVPIIAAIIGASMAFHDWMNIGPKITVSFLTAEGLEANKTQVKYKNVVIGMVTEISLSDDRTHVLANIELNTSASPFTRIDSQFWVVRPRIGAHGVSGVDTLLSGAFIGADAGSSDETKTSFTGLETPPPVTFGEKGKRFTLHTDDLGSLDIGSPIYYRRIQVGQVVAYDLSKDGRGVDIQIFINAPNDQYITTDTRFWNASGVDITVGASGVKVNTQSLTSILSGGIAFREPNWSPDSKPADENAEFKIFEDQTTALAPPDGEPRYIRMRFNQSLRGLAVNASVDFLGVTIGKVVSVDLDYDPATKTFPGIVGAVIYPKRLGAAESKLKELGGAGDEEEQSARVLGAFVANGLRAQVRNGNLLTGQLYIAMEFDPKAPKVSFNAKARPLEIPTVPGSFDKLQEQLQAFVEKLSKLPIDQLAGNLNGTLSELQKTLKQVNGSVLPQMRGTLQQAEKTLGTANDSFAEDSPARQQLGQALDEVQRTARSVRVLTDFLSRHPESLIRGRTGDAAPRSFNAPSSSRAIDPEPKQ

SEQ ID NO: 6342 - DNA, 1647 bp, Vibrio parahaemolyticus RIMD 2210633
  CDS (1)..(1647): transl_table=11
atgagtgatgagaacaacgcaaccgctcaaataaaaccgcaaaagcagatttctgctatttggattgttccgatccttgcgctagccatgggagcgtggatgctgttccaatacatcaacagtactggcccacaaattactttacagctgccaactgcggatgggattgaagtcggcaagacagaaatccgcgcactgaatgtaaaagtgggactgatcactgaagtcacactcagtgagaactacgatcacatcatcgccaaagcgcagatgaataaagacgcggagcgcatgctgcgagatgacaccatgttttgggtggtgaagccgcgcattggccgtgatggcgtatctggtttggaaacccttctctccggtgcttacattcaattgcaaccgggcagttctgaagtagaaaaagatcatttcgcagttctggatgtgccacctgtcgcttcgcctgacgcagaaggtctgcgcattgtcttgactcaccgtgaagcaggtaagcttggtgtgggtgacccggttatttataaaggctttacggttgggcgagtagagaaaaccagctttgacgtagatacgcgccgtgctctttaccaacttttcatctttaagccttatgacagtttagtgcgcactcgcaccaaattctggctcaattcaggcctcgatttacagttgaatgcggaaggatttgaagtgaaatttggctcgcttgaaagccttcttactggtggcgtcacctttgatagcattcctggaatggagtcaggcgaagctcttaccaaagacatgacgaacttccgtttgtacgatgatgttaaacaagtacgcgaaggcatgtacgacgaatacatcgaattcgtaatgctattcgaagagtccgttcgtggcctaaaacgcaaagctccggttgaataccgaggcctacgcattggtacagtaatgagagtgcctatgcgtcttccaactccagaagagcatttctcggcgaagagaattccggtgttagtccgtattgagcttggccgtgtatacggtgatgttgagtcccactcgatggaaatgttcaaagagaaactaaaagacgagtttgcaaaaggacttcgcggcacactaaaaaccgggaatttgttgactggtgcactgtacattgatgcggatttttatccagacgatacgccatatgaagcaaacacgtatgaagggctagacgtcttccctacaatgcgaggtggctttgcacaggttcagcgccaagtaaatgacttcttaaacaagcttaataacttgccaatggaagatacattaacctctctgaacgcaacgttgaaaacgtctgagcgcaccttggcgtccgcagaaaaagtggcgaatagcatagataagctcttaagccaaaaagacacacaagagatccctgcagatattcgccaaagcttgcagcaactgcaaaaaacgctggatggatatggccctaactcgacaatgtacagtgagatggaatcgacattgaaagagctagagaaggtgatgacggaattcaaacctgttttaaaacagctaaatgaaaaaccaaactcattagtatttggagaagatgaagtgaaggatccaattcctgttagagggcaacaataa

SEQ ID NO: 6343 - protein, 548 aa, Vibrio parahaemolyticus RIMD 2210633
MSDENNATAQIKPQKQISAIWIVPILALAMGAWMLFQYINSTGPQITLQLPTADGIEVGKTEIRALNVKVGLITEVTLSENYDHIIAKAQMNKDAERMLRDDTMFWVVKPRIGRDGVSGLETLLSGAYIQLQPGSSEVEKDHFAVLDVPPVASPDAEGLRIVLTHREAGKLGVGDPVIYKGFTVGRVEKTSFDVDTRRALYQLFIFKPYDSLVRTRTKFWLNSGLDLQLNAEGFEVKFGSLESLLTGGVTFDSIPGMESGEALTKDMTNFRLYDDVKQVREGMYDEYIEFVMLFEESVRGLKRKAPVEYRGLRIGTVMRVPMRLPTPEEHFSAKRIPVLVRIELGRVYGDVESHSMEMFKEKLKDEFAKGLRGTLKTGNLLTGALYIDADFYPDDTPYEANTYEGLDVFPTMRGGFAQVQRQVNDFLNKLNNLPMEDTLTSLNATLKTSERTLASAEKVANSIDKLLSQKDTQEIPADIRQSLQQLQKTLDGYGPNSTMYSEMESTLKELEKVMTEFKPVLKQLNEKPNSLVFGEDEVKDPIPVRGQQ

SEQ ID NO: 6344 - DNA, 1674 bp, Bordetella pertussis Tohama I
  CDS (1)..(1674): transl_table=11
atggccgagtcgacgcctccaccgcaggaaccgggtacgccgatagcggctccccagatcgcccgcaagcagaaatcgcgcatttcctggatctggctggtgccgatcgtggcggcattggccggcctgtcgctggtggtgcgcaccatcatgcaggccgggcccgagatcaccatcctgttcgacaccgccgagggcctggaagtgggcaagacgcaggtgcgctacaaggatgtcaacatcggcgtggtgcagggcatccacttcaacgaggaccgcagcaaggtcgtggtcgaggcggagctggccaaggaggtctccaacctggcgcgcgacggcacccagttctgggtggtgcgcccgcgcctgggcatcagcggcgtatccggcctgggcacgctgttgtcgggcgcctatatcggcgtcgatgcgccgccggacaaggagggcggcaccgaccgcgcttccaagttcgaattcgtcggcctggaattgccgcccgccgtcacgcacgaccgggccggcaagcgcttcatgctgagcgccaccgacctgggctcgctggacatcggttcacccgtgtatttccgccgcattcccgtcggccgggtcatcggctacaagctggacgacagcgggcgggtggtcaatgtcgaggtcttcgtcgatgcacccaacgatcgtttcgtcaccgactccacgcggttctggaatgccagcggggtggacgtggccgtcaatgccagcggcctgaaggtgcgcacccaatcgctggtgtcgctggcggtgggcggcgtggcgttcgaatcggtgtcggcgcgccagggcgaaccggtcaaggccgacacgcgcttcgagctgtatgagagcgagacggccgccaaggccaaccccgatgaccagccattcccgatccgcatgcgcttcgaccagtcgatccgcggtctgacggtcggctcgcccatcgacttccagggcattacgctgggcgaagtcacgcgcatcgccatcgatttcgacaacgccaagaagcgcttcttcgcggtggtcgacgccaccgtgtaccccgagcgcatcggccgggtgttcgacgagatccgcgcgcgcaccgaggccagcagcggttcgcacgccgccggccagctgctgtcgatcatgatcaagtatggcttgcgggcgcaattgcgcacggccaacctgctcaccggccagctctacatcgtgctcgacaccttcccggaggcgccgccggtggcgttcgtgcccggcgacgatccggtcatcattccgacgatcccggggcagctggaccagctgcaggcccagatcagcagcatcgtgaccaagatcgagaagatcccgttcgaccagatcggcaccgacctgcgcgccacgctggcgtcgaccgccaagctgatgaaccggctcgacaaggatctggcgcccgaggcccgcgcggtgctgagccaggctcgccagtcgctggtcgacatcaacaacatgctggcccccgattcgggcctgccggccaacaccgagcgcgccatgcaggaaatgtcgcgcgccgcgcgctcgctgcgcaacctggccgattatctgcagaccaacccggaggcgttgttgaaagggcggggcgccgacccgatccccggcgccggccccgtcaggaactga

SEQ ID NO: 6345 - protein, 557 aa, Bordetella pertussis Tohama I
MAESTPPPQEPGTPIAAPQIARKQKSRISWIWLVPIVAALAGLSLVVRTIMQAGPEITILFDTAEGLEVGKTQVRYKDVNIGVVQGIHFNEDRSKVVVEAELAKEVSNLARDGTQFWVVRPRLGISGVSGLGTLLSGAYIGVDAPPDKEGGTDRASKFEFVGLELPPAVTHDRAGKRFMLSATDLGSLDIGSPVYFRRIPVGRVIGYKLDDSGRVVNVEVFVDAPNDRFVTDSTRFWNASGVDVAVNASGLKVRTQSLVSLAVGGVAFESVSARQGEPVKADTRFELYESETAAKANPDDQPFPIRMRFDQSIRGLTVGSPIDFQGITLGEVTRIAIDFDNAKKRFFAVVDATVYPERIGRVFDEIRARTEASSGSHAAGQLLSIMIKYGLRAQLRTANLLTGQLYIVLDTFPEAPPVAFVPGDDPVIIPTIPGQLDQLQAQISSIVTKIEKIPFDQIGTDLRATLASTAKLMNRLDKDLAPEARAVLSQARQSLVDINNMLAPDSGLPANTERAMQEMSRAARSLRNLADYLQTNPEALLKGRGADPIPGAGPVRN

SEQ ID NO: 6346 - DNA, 1674 bp, Bordetella parapertussis 12822
  CDS (1)..(1674): transl_table=11
atggccgagtcgacgcctccaccgcaggaaccgggcacgccgatagcggccccccagatcgcccgcaagcagaaatcgcgcatttcctggatctggctggtgccgatcgtggcggcattggccggcctgtcgctggtggtgcgcaccatcatgcaggccgggcccgagatcaccatcctgttcgacaccgccgagggcctggaagtgggcaagacgcaggtgcgctacaaggatgtcaacatcggcgtggtgcagggcatccacttcaacaaggaccgcagcaaggtcgtggtcgaggcggagcttgccaaggaggtctccaacctggcgcgcgacggcacccagttctgggtggtgcgcccgcgcctgggcatcagcggcgtatccggcctgggcacgctgttgtcgggcgcctatatcggcgtcgatgcgccgccggacaaggagggcggcaccgaccgcgcgcccaagttcgaattcgtcggcctggaagtgccgcccgccgtcacgcacgaccgggccggcaagcgcttcatgctgagcgccaccgacctgggctcgctggacatcggttcacccgtgtatttccgccgcattcccgtcggccgggtcatcggctacaagctggacgacagcgggcgggtggtcaatgtcgaggtcttcgtcgatgcgcccaacgatcgtttcgtcaccgactccacgcggttctggaatgccagcggggtggacgtggccgtcaatgccagcggcctgaaggtgcgcacccaatcgctggtgtcgctggcggtgggcggcgtggcgttcgaatccgtgtcggcgcgccagggcgaaccggtcaaggctgacacgcgctttgagctgtatgagagcgagacggcggccaaggccaaccccgatggccagccattcccgatccgcatgcgcttcgaccagtcgatccgcggcctgacggtcggttcgcccatcgatttccagggcattacgctgggcgaagtcacgcgcatcgccatcgatttcgacaacgccaagaagcgcttcttcgcggtggtcgacgccaccgtgtaccccgagcgcatcggccgggtgttcgacgagatccgcgcgcgcaccgaagccagcagcggatcgcacgccgccggccagctgctgtcgatcatgatcaagtatggcctgcgggcgcaattgcgcacggccaacctgcttaccggccagctctacatcgtgctcgacaccttcccggaggcgccgccggtggcgttcgtgcccggcgacgatccggtcatcattccgacgatcccggggcagctggaccagctgcaggcccagatcagcagcatcgtgaccaagatcgagaagatcccgttcgatcagatcggcaccgacctgcgcgccacgctggcgtcgaccgccaagctgatgaaccggctcgacaaggatctggcgcccgaggcccgcgcggtgctgcgccaggctcgccaatcgctggtcgacatcaacaacatgctggcccccgattcgggcctgccggccaataccgagcgcgccatgcaggaaatgtcgcgcgccgcgcgctcgctgcgcaacctggccgattatctgcagaccaacccggaggcgttgttgaaagggcggggcgccgacccgatccccggcgccggccccgtcaggaactga

SEQ ID NO: 6347 - protein, 557 aa, Bordetella parapertussis 12822
MAESTPPPQEPGTPIAAPQIARKQKSRISWIWLVPIVAALAGLSLVVRTIMQAGPEITILFDTAEGLEVGKTQVRYKDVNIGVVQGIHFNKDRSKVVVEAELAKEVSNLARDGTQFWVVRPRLGISGVSGLGTLLSGAYIGVDAPPDKEGGTDRAPKFEFVGLEVPPAVTHDRAGKRFMLSATDLGSLDIGSPVYFRRIPVGRVIGYKLDDSGRVVNVEVFVDAPNDRFVTDSTRFWNASGVDVAVNASGLKVRTQSLVSLAVGGVAFESVSARQGEPVKADTRFELYESETAAKANPDGQPFPIRMRFDQSIRGLTVGSPIDFQGITLGEVTRIAIDFDNAKKRFFAVVDATVYPERIGRVFDEIRARTEASSGSHAAGQLLSIMIKYGLRAQLRTANLLTGQLYIVLDTFPEAPPVAFVPGDDPVIIPTIPGQLDQLQAQISSIVTKIEKIPFDQIGTDLRATLASTAKLMNRLDKDLAPEARAVLRQARQSLVDINNMLAPDSGLPANTERAMQEMSRAARSLRNLADYLQTNPEALLKGRGADPIPGAGPVRN

SEQ ID NO: 6348 - DNA, 1674 bp, Bordetella bronchiseptica RB50
  CDS (1)..(1674): transl_table=11
atggccgagtcgacgcctccaccgcaggaaccgggcacgccgatagcggccccccagatcgcccgcaagcagaaatcgcgcatttcctggatctggctggtgccgatcgtggcggcattggccggcctgtcgctggtggtgcgcaccatcatgcaggccgggcccgagatcaccatcctgttcgacaccgccgagggcctggaagtgggcaagacgcaggtgcgctacaaggatgtcaacatcggcgtggtgcagggcatccacttcaacaaggaccgcagcaaggtcgtggtcgaggcggagctggccaaggaggtctccaacctggcgcgcgacggcacccagttctgggtggtgcgcccgcgcctgggcatcagcggcgtgtccggcctgggcacgctgttgtcgggcgcctatatcggcgtcgatgcgccgccggacaaggagggcggcaccgaccgcgcgtccaagttcgaattcgtcggcctggaagtgccgcccgccgtcacgcacgaccgggccggcaagcgcttcatgctgagcgccaccgacctgggctcgctggacatcggttcacccgtgtatttccgccgcattcccgtcggccgggtcatcggctacaagctggacgacagcgggcgggtggtcaacgtcgaggtcttcgtcgatgcgcccaacgatcgtttcgtcaccgactccacgcggttctggaatgccagcggggtggacgtggccgtcaatgccagcggtctgaaggtgcgcacccaatcgctggtgtcgctggcggtgggcggcgtggcgttcgagtccgtgtcggcgcgccagggcgaaccggtcaaggccgacacgcgcttcgagctgtatgagagcgagacggcggccaaggccaaccccgatggccagccattcccgatccgcatgcgcttcgaccagtcgatccgcggcctgacggtcggttcgcccatcgatttccagggcattacgctgggcgaagtcacgcgcattgccatcgatttcgacaacgccaagaagcgcttcttcgcggtggtcgacgccaccgtgtaccccgagcgcatcggccgggtgttcgacgagatccgcgcgcgcaccgaagccagcagcggatcgcacgccgccggccagctgctgtcgatcatggtcaagtatggcctgcgggcgcaattgcgcacggccaacctgctcaccggccagctctacatcgtgctcgacaccttcccggaggcgccgccggtggcgttcgtgcccggcgacgatccggtcatcattccgacgatcccggggcagctggaccagctgcaggcccagatcagcagcatcgtgaccaagatcgagaagatcccgttcgatcagatcggcaccgacctgcgcgccacgctggcgtcgaccgccaagctgatgaaccggctcgacaaggatctggcgcccgaggcccgcgcggtgctgcgccaggctcgccaatcgctggtcgacatcaacaacatgctggcccccgattcgggcctgccggccaataccgagcgcgccatgcaggaaatgtcgcgcgccgcgcgctcgctgcgcaacctggccgattatctgcagaccaacccggaggcgttgttgaaagggcggggcgccgacccgatccccggcgccggccccgtcaggaactga

SEQ ID NO: 6349 - protein, 557 aa, Bordetella bronchiseptica RB50
MAESTPPPQEPGTPIAAPQIARKQKSRISWIWLVPIVAALAGLSLVVRTIMQAGPEITILFDTAEGLEVGKTQVRYKDVNIGVVQGIHFNKDRSKVVVEAELAKEVSNLARDGTQFWVVRPRLGISGVSGLGTLLSGAYIGVDAPPDKEGGTDRASKFEFVGLEVPPAVTHDRAGKRFMLSATDLGSLDIGSPVYFRRIPVGRVIGYKLDDSGRVVNVEVFVDAPNDRFVTDSTRFWNASGVDVAVNASGLKVRTQSLVSLAVGGVAFESVSARQGEPVKADTRFELYESETAAKANPDGQPFPIRMRFDQSIRGLTVGSPIDFQGITLGEVTRIAIDFDNAKKRFFAVVDATVYPERIGRVFDEIRARTEASSGSHAAGQLLSIMVKYGLRAQLRTANLLTGQLYIVLDTFPEAPPVAFVPGDDPVIIPTIPGQLDQLQAQISSIVTKIEKIPFDQIGTDLRATLASTAKLMNRLDKDLAPEARAVLRQARQSLVDINNMLAPDSGLPANTERAMQEMSRAARSLRNLADYLQTNPEALLKGRGADPIPGAGPVRN

SEQ ID NO: 6350 - DNA, 1620 bp, Chromobacterium violaceum ATCC 12472
  CDS (1)..(1620): transl_table=11
atgagcagtgacaatccacaaaaaccggagcaggacgatctgccgcaggcggtgccggtgcgccgccgtcgctgggcgccgtcgctggtctggctgatcccggtggtggcggcgctgataggcggctggctggcggtgcacgccgtgctgtcgcgcggccccaccatcaccatctccttccagaacgccgaggggatagaggccggcaagacccggatcaagtacaaggacgtggaaatcggcgaggtgacctcggtcaagctcagccccaaccggcaggccatcgtcgccaccgcgcaactgagcaaggaggcggccgactacctggcggaggacagccgcttctgggtggtgcggccgcgcgtgtccggcggcggcgtgtccggcctgggcacggtgctgtccggttcctacatcggcatggacatcggcaagagcgaggcgcgcaagaccgactttgtcggcctggaaaccccgcccatcatcaacgccgacctgcccggccagaccttcacgctgcgcgcagacaacctgggctcgctgaacaccggctcgccggtgtatttccgccgggtgccggtggggcaggtggtcggctacgagctggactccaagggcggctacgtcaaggtcgccgtcttcatcaacgcgccgtacgaccgtttcgtgtccgccaacagccgcttctggcacgccagcggagtcgacgtgtcgctgagcgccaacggcctcaacgtcagcacccagtcgctggcggcgatcgcgctgggcggcatcgctttcgagacgccgctggccgacaacgccggcatcccgctgtccgaccgcaacttcatcctgcacgacagccgcgacagggcgctgcagaacccggaccgcgagatgcagccgttccgcctgcgtttccgccagtcgctgcgcggcctgagcgtcggcgcgccggtggacttccgcggcatcaccataggcgaggtgacggcgataggcgtgcagtacgtgccggaacgcaaagatttcgacatgacggtggacatccgcacctatcccagccggctggacagcctgtcgcgcggcggccgcatcagcggcaagctgtcgccgcaggcgctggtggccaacggcatgcgcgcccagctgcgctccggcaatctgatcaccggccagctctacgtggcgctggacttcttccgcgacgcgccgccggccaagctggtcgtgcgcaacggcctgcccgagctgccgaccatttcgggcgacctggaggagctgcagcgggtgctgcagcgcatcgtcaagaaactggacgcggtgccgttcgacagcataggcaaggaggccgacgcctcgctgaaatcgctgcaccagacgctggacagcgtgaagaagctgtccgacggcctgaacggcgacgcggtgccccagacgctgaagacgctggagcagctgcagcagacgctggaggccacccgccaggccatgcgcgccgattcgccgctgcagcaggacgtgcgcgccgccgcgcaggaagtgaaggagaccgcgcgcagcttccgcgcgctggccgattacctggaccgccatcccgaggcgctggtgcgcggcaaggaggctcaaccatga

SEQ ID NO: 6351 - protein, 539 aa, Chromobacterium violaceum ATCC 12472
MSSDNPQKPEQDDLPQAVPVRRRRWAPSLVWLIPVVAALIGGWLAVHAVLSRGPTITISFQNAEGIEAGKTRIKYKDVEIGEVTSVKLSPNRQAIVATAQLSKEAADYLAEDSRFWVVRPRVSGGGVSGLGTVLSGSYIGMDIGKSEARKTDFVGLETPPIINADLPGQTFTLRADNLGSLNTGSPVYFRRVPVGQVVGYELDSKGGYVKVAVFINAPYDRFVSANSRFWHASGVDVSLSANGLNVSTQSLAAIALGGIAFETPLADNAGIPLSDRNFILHDSRDRALQNPDREMQPFRLRFRQSLRGLSVGAPVDFRGITIGEVTAIGVQYVPERKDFDMTVDIRTYPSRLDSLSRGGRISGKLSPQALVANGMRAQLRSGNLITGQLYVALDFFRDAPPAKLVVRNGLPELPTISGDLEELQRVLQRIVKKLDAVPFDSIGKEADASLKSLHQTLDSVKKLSDGLNGDAVPQTLKTLEQLQQTLEATRQAMRADSPLQQDVRAAAQEVKETARSFRALADYLDRHPEALVRGKEAQP

SEQ ID NO: 6352 - DNA, 1650 bp, Photorhabdus luminescens subsp. laumondii TTO1
  CDS (1)..(1650): transl_table=11
gtgacggataaagttgaagaccagagtcaggctaaaatcgataaaattaaaagttggtcgccagtttggattgtaccaattgtgacagtgcttattggtgcttggatattgttttaccatttcaaccaccaagggccggaagtgatgttgattacctccaacgcggagggtattgaagctggaaaaactaaaattaaaagccgtagtgtggatgtcggcgtagttgagagggtcatgctgagtgataatcttagtcaagttattattaaagctcggctgaatgatggcatggaaaacctattgcgtagtgacagcgctttctgggtagtgaaaccgcagattggccgtgatggagtatctggtcttggtacccttctgtctggggcttttattgagcttcaaccgggaacaaatggtgatgaagaagataaatttaatttgttggactcaccaccattggcttcacctgatgcaaaaggtatccgcgtcatcctaatcagtgataaagcgggccagctcaatccgggtgatccggtgttgtttcgtggttatcgggttggttctgttgaaaccagcgagtttgaaccgaaatctcatctgatgagatatcagctatttattaatgcaccttatgatggtttgttgacaagcaatgtccgcttttggaaagagagtggtattacctttgatatgtcttctcagggggtacgtgttgaaatggcttcgttatcaacgctgtttggtggtggtgtcagttttgatgtgcctaagggttgggaattgggagagccaattaaagaaaaagctatttataaactttttgacaaccaaagaagcattcaggattctttatataccgaacataaagattatctgttgcttttctctgattccgttcgagggctacagccgggtgcgccagtagagttccgtggtatccgtatggggactgtggcaaaagtaccattctattcagagggaatgagacagcggttagataacgattttcgtattccagtacttatctcgattgaaccggagcgctttgagaaggagttgggagaagggtttgatgttgagaaagagctgaatagcataactaaacgcggtctgcgggcgtccctcaagtcaggtaatttgctgacaggggcactgtttattgatttggatttctatccaaatgaaaaagggtgggccggtccgtatgaaattgcaggttatccgctattaccgacaatcagtggtggccttgctcaaattcaacataaggttattgcagcgttagacaaaattaataatatgccggttgagccaatgtttaatcaggctattcgcactttggaagagagccagaaagcgatcagaaaagcacaacagacccttgatgaattgaataaggtgctggcgaatcctgaaaccaaagatctgccaaaagatatacagaaaacattgcaggagtttagccgcagtatgcaaggttttcagcctggctcaccggcttataataagatgttggataatatgcagcgattagatcaagtattgagtgaactgcgacctgttctgaggacgttgaataataagagcaatgcgttagtttttgagtctaagccaattgaagatccagaaccgaaaaaggctaaaaaatga

SEQ ID NO: 6353 - protein, 549 aa, Photorhabdus luminescens subsp. laumondii TTO1
MTDKVEDQSQAKIDKIKSWSPVWIVPIVTVLIGAWILFYHFNHQGPEVMLITSNAEGIEAGKTKIKSRSVDVGVVERVMLSDNLSQVIIKARLNDGMENLLRSDSAFWVVKPQIGRDGVSGLGTLLSGAFIELQPGTNGDEEDKFNLLDSPPLASPDAKGIRVILISDKAGQLNPGDPVLFRGYRVGSVETSEFEPKSHLMRYQLFINAPYDGLLTSNVRFWKESGITFDMSSQGVRVEMASLSTLFGGGVSFDVPKGWELGEPIKEKAIYKLFDNQRSIQDSLYTEHKDYLLLFSDSVRGLQPGAPVEFRGIRMGTVAKVPFYSEGMRQRLDNDFRIPVLISIEPERFEKELGEGFDVEKELNSITKRGLRASLKSGNLLTGALFIDLDFYPNEKGWAGPYEIAGYPLLPTISGGLAQIQHKVIAALDKINNMPVEPMFNQAIRTLEESQKAIRKAQQTLDELNKVLANPETKDLPKDIQKTLQEFSRSMQGFQPGSPAYNKMLDNMQRLDQVLSELRPVLRTLNNKSNALVFESKPIEDPEPKKAKK

SEQ ID NO: 6354 - DNA, 1620 bp, Burkholderia vietnamiensis G4
  CDS (1)..(1620): transl_table=11
atgaatagtccgcaaggcccgcagcacgacgcgccccggccgcccgacccggcaatctcgacgaaaggcggctggctgccgtcgctcgtctggctcgtgccgctgctcgccgcgctgatcggtatcggcctcgtgatcaagtccgtgcgcgagcgcggcccggaaatcacgatcagcttccacagcgcggaagggctcgagccgggcaagacgcaggtcaagtacaaggacgtcgagatcggcacggtcaagacgatcacgctgtcgaaagacctcacgcgcgtgctcgtccaggtgcagttgaagaaggaggccgaggacttcgcgatcaagggctcgcgcttctggatcgtgcggccgcgcgtcggcacgaccggcgtgtcggggctcggcacgctgctgtccggcgcatacatcggcgtcgacgccgggcgcggcccggacgcgcagagcgacttcatcggcctcgagtcgccgcccgccgtgacgcgcgaccagaaaggcacgcagtacgtgctgcgcggcgattcgctcggctcggtcgacatcggctcgccggtctattaccgtcgcgtgcaggtcggccaggtggtcggcttctcgctcgacaaggacggcacgggcgtcaccttcaacgtgttcgtcaatgcgccgtacgaccagtacgtcggcatgaattcgcgctggtggcaggcgagcggcgtcgacctgcggctcgattcgagcggcctgaagctgaacacgcaatcgctcgcgacggtgatcctcggcggcatcgcattccagacgccgccgaaccagcgcaccggcgcgaccgcgccgaacaacacgacgttccgcctcggctccgacgaaggcgacgcgatgcgcgatccggacggcgagccgctgcaggtcgtgatgaacttcaaccagtcgctgcgcgggctcgcggtgggcgcgccggtcgacttccgcggcatcgtgctcggcgaagtgacgaacatcggcatcgacttcgatccgaagaccaagaacttcctgatgccggtcacgatgaacgtgtatccggagcggctcggcccgcgcttccgcgaaacgatcggcaacaagggcgagtcggcccgtcgcgagatcgtcgagcgcctcgtcaggcacgggctgcgcggccagctgcgcaccggcaatctgctgacgagccagctgtacgtcgcgctcgacttcttcccgaaggcggcggccgtgaagatggacacgacgcgccagccgctcgagctgccgaccgtgcccaacacgctcgacgagctgcagctgcaggtcgccgacatcgcgaagaagctcgacaaggtgccgttcgaccagatcggcgcgaacctgaacagcgcgctcacgaacgccgacaagctgttcaagcagctcgacacgcaggtcgcaccggaagcgcgcgacacgttgtcggccgccaagcagaccttctcgaccgccgaggcgacgctgcagcaggattcgccgctgcagtccgacgtgcgcggcgcgctgaaggagctcacgcgcacgctgcaatcgctgaacgcgctcgccgactatctcgagcgccatcccgaatcgctgctcaagggcaagccaggagatcaaccatga

SEQ ID NO: 6355 - protein, 539 aa, Burkholderia vietnamiensis G4
MNSPQGPQHDAPRPPDPAISTKGGWLPSLVWLVPLLAALIGIGLVIKSVRERGPEITISFHSAEGLEPGKTQVKYKDVEIGTVKTITLSKDLTRVLVQVQLKKEAEDFAIKGSRFWIVRPRVGTTGVSGLGTLLSGAYIGVDAGRGPDAQSDFIGLESPPAVTRDQKGTQYVLRGDSLGSVDIGSPVYYRRVQVGQVVGFSLDKDGTGVTFNVFVNAPYDQYVGMNSRWWQASGVDLRLDSSGLKLNTQSLATVILGGIAFQTPPNQRTGATAPNNTTFRLGSDEGDAMRDPDGEPLQVVMNFNQSLRGLAVGAPVDFRGIVLGEVTNIGIDFDPKTKNFLMPVTMNVYPERLGPRFRETIGNKGESARREIVERLVRHGLRGQLRTGNLLTSQLYVALDFFPKAAAVKMDTTRQPLELPTVPNTLDELQLQVADIAKKLDKVPFDQIGANLNSALTNADKLFKQLDTQVAPEARDTLSAAKQTFSTAEATLQQDSPLQSDVRGALKELTRTLQSLNALADYLERHPESLLKGKPGDQP

SEQ ID NO: 6356 - DNA, 1620 bp, Dichelobacter nodosus VCS1703A
  CDS (1)..(1620): transl_table=11
atgaacactccaatcgttaaaaaaaaccgtttttcactgctttggctttttccgttattcgcgctggcggtaggactttatctcgcctacgaccgtttaagcgatattggccccgtaattcgtttaaaacgaacatctgccgaaggtttaatcgaaaataaaaccaaaatccgctataaatacctcgatattggaacgattaccgaaatatcattatccgccgaccgccaacacgtcatcgccaccgcgcaaatgacggcaaacgcagcagaattgttaaatgaagacagtcaattttggttggttgaaccgcaagtttccgccgccggtattacgggtttaaatacgttggtttccggcagttatattgaaataaatccggggattagcgatgaaaaatcgcgcttttttgaaatgttgccggcgccgccgttattgaataccgatgaatccggtttacgcattactttatccgcagaaagcagcaaaggattaaatattggttcgcctttatattatcgcggcgtgaaaatcgggcaaattgaacaaattcatttcggcgaccaattcagccggatttatatcaccgcttttgtgcgcacgccgtacgacgcgttaattcataacgatactaaattttggaatgccagcggttttgaattgagttttaccgctgccggcgcgcaatttagtatgtattcaatggaaactttggctttgggcggcattgttttatcaacgcccgatgcaacgttacaaaatcatcaatcatttgataaaaataaagtttttaatctctatccttccgaaaaagccagtctagaatccgatcatttcgcgcgcacatattttgtgctttattttgaagacagcgtccacggtttattgccgcacgcaccggtggaatttaacggcatgacgattggtgaagtttctgaaattcgtttgctttatgatcaggaacgcaaaaaaatcgtcacgccggtggtaattgctttggaatggtcgcgcatcgatcgcgccgccgccgatcaagaaatgataaaaacgttagtggcgcagggattgcgcgcatctttaaaaacgggcaattttttaaccggcaaaaaaatgattcatttagcgctttatcccgacaatatcggcgaattgacgcccgatcgttatagtcgtcatctaactttgcccgttcataacggtggcattcacaaaattcccgaacaaataagcgatattgttgccgcggtgaatcatattccatttacggcaattggcgctaaaacggaatcgttattaacgcatgtcgatcacgccgcggaatcagctgccggtatgcttgcccataaagaaatgcaacagctcggaaaaacgctgcaaacaacgttacaaagcgtaacagcaacgagcaaacaagcgcaaaacagtatggtgaatttaaatgaacaaatgcggaatttgagccggcaattggaggcgactttgtatggtttgagccctgaatcttctttgtattacagcacgcagcaaacggtgcaacagatgcaaattttaatgcgcaccatcgatggtgtcatgcaaaaaatcaaagaaaaacccaacgcgcttttgatgggtgaataa

SEQ ID NO: 6357 - protein, 539 aa, Dichelobacter nodosus VCS1703A
MNTPIVKKNRFSLLWLFPLFALAVGLYLAYDRLSDIGPVIRLKRTSAEGLIENKTKIRYKYLDIGTITEISLSADRQHVIATAQMTANAAELLNEDSQFWLVEPQVSAAGITGLNTLVSGSYIEINPGISDEKSRFFEMLPAPPLLNTDESGLRITLSAESSKGLNIGSPLYYRGVKIGQIEQIHFGDQFSRIYITAFVRTPYDALIHNDTKFWNASGFELSFTAAGAQFSMYSMETLALGGIVLSTPDATLQNHQSFDKNKVFNLYPSEKASLESDHFARTYFVLYFEDSVHGLLPHAPVEFNGMTIGEVSEIRLLYDQERKKIVTPVVIALEWSRIDRAAADQEMIKTLVAQGLRASLKTGNFLTGKKMIHLALYPDNIGELTPDRYSRHLTLPVHNGGIHKIPEQISDIVAAVNHIPFTAIGAKTESLLTHVDHAAESAAGMLAHKEMQQLGKTLQTTLQSVTATSKQAQNSMVNLNEQMRNLSRQLEATLYGLSPESSLYYSTQQTVQQMQILMRTIDGVMQKIKEKPNALLMGE

SEQ ID NO: 6358 - DNA, 1638 bp, Klebsiella pneumoniae subsp. pneumoniae MGH 78578
  CDS (1)..(1638): transl_table=11
atggaaaataagagcggagaagcgaaagtgcagaaggtgaagaactggtcaccggtgtggatcttccctatcgtcactgcgctgatcggggcatggatcctgttttatcattacagccatcaggggcctgaggtcacgctgatcaccaccaatgcggaagggattgaagggggaaaaacccgcatcaagagccgcagcgtagacgttggggtggtggagagcgcgacgctgaccgacgatctcacccacgtggaaatcaaagcccgcctcaattccgggatgcagaagctgctgcacaacgattccgtcttctgggtggtaaagccgcaggttgggcgcgaggggatcagcggtcttgggacattgttgtccggggcctatattgaactgcagccgggaacgaaaggttcggtgccagcgcagtatccgctactggattctccgccgctggcctcgccggatgccaaggggatccgtattctgctggaaagcagcaaggcgggccagctgtcgccgggcgatccggtgttgttccgcggctatcgcgtggggtcagtggaaaccagcaccttcgacacgcagaaacgtcgtataacttaccagctgttcatcaatgcgccgaacgatcgcctggtgaccaccaacgttcgtttctggaaggacagcgggatcgctgtagatttgacctcggcggggatgcgcgtcgagatgggctcgctgtcgacgctgtttggcggcggggtgagcttcgatattcctgaaggactggacctcggcgagccggtggcgaataaaacggaataccatctgtttgacgatcagaagagcatccaggattcagtctttaccgagcatatcgattacgtcatgttcttcaaagactcggttcgcggcctgcagccgggcgcgccggtggagttccgcggtatccgtctgggcaccgtcggcaaagtgccgttctttattccggggctgaagcagcgtttgaacgatgactatcgtattccagtggaagtgcgggttgaaccgcaacggctgattaatcagcttggcggcgatccgaatattcgcgcccacattgacgatctgatcaaccgcggactgcgcggctcgctgaaaactggtaacctggtgaccggcgcgctgtatatcgatctcgacttctatccgaaggcgcccccgcgcgggaaaatacaggagtttaacggctatccgattatcccgaccatcagcggtggactggcacagatccagcagcgtctgatggatgcgctggataagattaataacctgccgattaatccgctgctggagcaggcgaccagcaccctggcgcagagcgagaagacgatgcagcacgtgcagaccacgctggataatctgaataagatcacctccagccagtcaatgcagcagctgcccgccgatatgcagacgacgctgcgtgagctgaaccgtagcatgcagggcttccagccgggctctgcggcctacaataagatggtggccgatatgcagcgtctggatcaggtgctgcgtgagctgcagccggttctgaaaacgctaaatgataagagcaatgcgctggtatttgaggcgaaggataaaaaagatccacagccgaagggagcgaaataa

SEQ ID NO: 6359 - protein, 545 aa, Klebsiella pneumoniae subsp. pneumoniae MGH 78578
MENKSGEAKVQKVKNWSPVWIFPIVTALIGAWILFYHYSHQGPEVTLITTNAEGIEGGKTRIKSRSVDVGVVESATLTDDLTHVEIKARLNSGMQKLLHNDSVFWVVKPQVGREGISGLGTLLSGAYIELQPGTKGSVPAQYPLLDSPPLASPDAKGIRILLESSKAGQLSPGDPVLFRGYRVGSVETSTFDTQKRRITYQLFINAPNDRLVTTNVRFWKDSGIAVDLTSAGMRVEMGSLSTLFGGGVSFDIPEGLDLGEPVANKTEYHLFDDQKSIQDSVFTEHIDYVMFFKDSVRGLQPGAPVEFRGIRLGTVGKVPFFIPGLKQRLNDDYRIPVEVRVEPQRLINQLGGDPNIRAHIDDLINRGLRGSLKTGNLVTGALYIDLDFYPKAPPRGKIQEFNGYPIIPTISGGLAQIQQRLMDALDKINNLPINPLLEQATSTLAQSEKTMQHVQTTLDNLNKITSSQSMQQLPADMQTTLRELNRSMQGFQPGSAAYNKMVADMQRLDQVLRELQPVLKTLNDKSNALVFEAKDKKDPQPKGAK

SEQ ID NO: 6360 - DNA, 1659 bp, Salmonella enterica subsp. arizonae serovar 62:z4,z23:--
  CDS (1)..(1659): transl_table=11
atgaggagtcctgatagcatggaatctaaaaaaggggaagccaaagtacaaaaggtgaaaaattggtcgcctgtctggatattcccgatcattactgcgcttatcggagcctggattctgttttatcactatagccaccaggggccggaagtcaccttaatcaccaccaatgcagaaggcattgaaggcggaaaaacgaccatcaaaagccgcagtgtggatgtcggcgtggttgaaagcgcgacgctgaccgacgatctgacccatgtacaaatcaaagcgcgacttcattccggtatggaaaagttgctacataaagactcggtattttgggttgtaaaaccgcaggtggggcgtgaaggcataagcgggcttgggacgttgttgtcaggcgcgtatattgaactgcaacctgggaacaagggcagccagccggaaagctatcagcttctcgattcaccgccattggcgccgcctgatgcgaaaggaattcgtgtgattctggacagcaaaaaggccggtcagctaagtcccggcgatccggtcttgttccgtggatatcgcgtaggttccgtagaaaccagtatgttcgatccacagaaacgttccatcagttatcagcttttcatcaatgcgccgaacgaccgcctggtgaccagtaacgtccgtttctggaaggacagcggtattgcggtggatctgacttctgctggtatgagagttgaaatgggctcgctgagcactttgtttggcggcggcgttagttttgatgttccggaggggcttgaacagggacaaccggttgcggaaaaaaccgctttcagcctgtatgacgatcagaaaagcattcaggattcactctataccgatcacatcgattaccttatgttcttcaaagattcgattcgtggactccagccgggagcgccggtcgaattccgcgggatccgtttagggacagtcggaaaggtgcctttttttgcgccaggtatgcgacaagcgtttaatgacgattatcgtattccggtgttggttcgtattgaaccggaacgtctgaaagcgcagcttggagagaataccgacgttggagctcatctggccgatctgcttaatcgcgggttaagggcgtcgctgaaaaccggtaacctggtgacgggcgcgctatatgtggatctggatttctatcctaaagaaccgcccttgaaaggcattcgcgagtttggtggttaccagattattccaacagtcagtggtggcctggcgcaaattcagcagcgactgatggaagctctggataagatcaataacctgcctttgaatccaatgattgaacaggcgactaacaccttgacggaaagccagcggacgatgaagcatctgcaaaccacactggataatatggacaagattacctccagtcagtcgatgcagcagcttccggcggatatgcaaacgacgttacgcgaacttaatcgcagtatgcaaggcttccagcctggatcagcggcgtataacaaaatggtggcggacatgcagcgtcttgatcaggtgcttcgcgagttacaacccgtgttgaagacgctgaacgagaagagcaacgcgctggtatttgaagcgaaggataaaaaagatcccgagcctaagagggcgaaacaatga

SEQ ID NO: 6361 - protein, 552 aa, Salmonella enterica subsp. arizonae serovar 62:z4,z23:--
MRSPDSMESKKGEAKVQKVKNWSPVWIFPIITALIGAWILFYHYSHQGPEVTLITTNAEGIEGGKTTIKSRSVDVGVVESATLTDDLTHVQIKARLHSGMEKLLHKDSVFWVVKPQVGREGISGLGTLLSGAYIELQPGNKGSQPESYQLLDSPPLAPPDAKGIRVILDSKKAGQLSPGDPVLFRGYRVGSVETSMFDPQKRSISYQLFINAPNDRLVTSNVRFWKDSGIAVDLTSAGMRVEMGSLSTLFGGGVSFDVPEGLEQGQPVAEKTAFSLYDDQKSIQDSLYTDHIDYLMFFKDSIRGLQPGAPVEFRGIRLGTVGKVPFFAPGMRQAFNDDYRIPVLVRIEPERLKAQLGENTDVGAHLADLLNRGLRASLKTGNLVTGALYVDLDFYPKEPPLKGIREFGGYQIIPTVSGGLAQIQQRLMEALDKINNLPLNPMIEQATNTLTESQRTMKHLQTTLDNMDKITSSQSMQQLPADMQTTLRELNRSMQGFQPGSAAYNKMVADMQRLDQVLRELQPVLKTLNEKSNALVFEAKDKKDPEPKRAKQ

SEQ ID NO: 6362 - DNA, 1641 bp, Pseudomonas putida GB-1
  CDS (1)..(1641): transl_table=11
atggggcaacagactgacaagcgcgacggtacaggtcaggttgacgtgcgcacacggcgctggggggtgtcgctggtctggatcgtgccgattctggctatcctgatcggcgcatcgctagtggtacgcaactggatgcagcaagggccggtgatcaccatttccttccacagcggggaggggttggtggcgcacaagacccaggtgaaataccgcagcgtggtgattggcgaagtgaccacggtggacctggccgaggacaagaagagcgtggtggccaacgtgcagctgtccaacgatgcccgctcttttgccacccagggcgcgcgcttctgggtggtgcgaccgcgcatcggcgtaggcggggtttccggggtggacacgctgctttcgggcagtttcatcggggctgattccggtgagtcgaaagtgccggaaaagtccttcgtcgggctggagctgccgccgccgatcacctatgacgaaaagggcaagcgttttgtccttaccgccagcgatctgggctcgctggatgtcggctcatcgatctactaccgcaagatcccggtcggtgaagtggtctcttttgcgctgcaggacgatggcaagggcgtggagattggcgtgttcgtgcaagccccctacgacagcttcgtcaccgccgacacgcgcttctggaatgccagtggtgtcgatatgcagattggcgccaacgggctgaaggtcgataccgagtcgttatcatcgatcctggtgggggggctggcctttggttcgcccgatttcgccccgcaagccgagccagctgccgaccaggcccgcttccagctatttgccgaccgcgacttggcgctggcccctccccacggccaggcgcagtacctgcaactgcgcttcgaccaggccatgcgcggcttgtcggtgggtgcgccggtggagttcaagggtgtggagtttgggcgtgttacctctattcagctcgattacgacgccgccaggcagaccttcccggtagtggtggatgcagtaatctacccgcagcgcctggggccggtgcaccgcaagatgctggcggtgttcaagcacaccgaaggcgacatggatggtgcgcgggagctgatcggcacgtttgtcgagcatggcctgcgggcccaggcgcgcagcggcaacctgatcaccgggcagatgttcatttccctggatttctaccccgatgcccccaaagtcgccttcgacatggccgccaaccccatcatcatccccacgttgccgggtagcctggagcagttgcaggagcagctgcagcgggtcgtggaacgcattgccaagctgccgctggaaagcatcgccggcaacctcgacggcagcctgcgtgagctgcgcgccagcctcaagcaattcaatggccagacactgccggatgtaaaagtggcgctggacgaagtgcacaagaccctgcgcaccgccaactcggccatttccgaggactcgccgcagcgcgagcgaatgggcgaaacactggatgagctggaacgcatgtcacgttcgctgcgtgaccttgccgattacctgggccgccaccccgagtcactgattcgtggccggccgaaagcggccgggcccgcagaccttgagccctga

SEQ ID NO: 6363 - protein, 546 aa, Pseudomonas putida GB-1
MGQQTDKRDGTGQVDVRTRRWGVSLVWIVPILAILIGASLVVRNWMQQGPVITISFHSGEGLVAHKTQVKYRSVVIGEVTTVDLAEDKKSVVANVQLSNDARSFATQGARFWVVRPRIGVGGVSGVDTLLSGSFIGADSGESKVPEKSFVGLELPPPITYDEKGKRFVLTASDLGSLDVGSSIYYRKIPVGEVVSFALQDDGKGVEIGVFVQAPYDSFVTADTRFWNASGVDMQIGANGLKVDTESLSSILVGGLAFGSPDFAPQAEPAADQARFQLFADRDLALAPPHGQAQYLQLRFDQAMRGLSVGAPVEFKGVEFGRVTSIQLDYDAARQTFPVVVDAVIYPQRLGPVHRKMLAVFKHTEGDMDGARELIGTFVEHGLRAQARSGNLITGQMFISLDFYPDAPKVAFDMAANPIIIPTLPGSLEQLQEQLQRVVERIAKLPLESIAGNLDGSLRELRASLKQFNGQTLPDVKVALDEVHKTLRTANSAISEDSPQRERMGETLDELERMSRSLRDLADYLGRHPESLIRGRPKAAGPADLEP

SEQ ID NO: 6364 - DNA, 1632 bp, Desulfovibrio vulgaris subsp. vulgaris str. Hildenborough
  CDS (1)..(1632): transl_table=11
atgaccgataacgactcgacagagcagtacgcgactccggctaccgtcaaaagcaagaacaggctgtccacggtctggatcatacccattgtggccctgatcatcggcggatggctcgccatcaaggcctactctgagaagggccctgtcatcagcatttcatttgccacggccgaagggcttgaggcaggcaagaccaagatcagattcaaggatgtcgaggtaggacaggtcaacgagatacgccttggcgacgacctcaagcatgtcgtcgtaacggctgaactctcgaaggacctttccagattcctgaacgacaagacacggttctgggtctcgcgggcacaaatccggggcggcacggcttccggactcgacacgttgctctcgggtgcctacatcggcgtagaccccggtcttggcggaaatcagacacacgacttcgtgggactcgaggtcccccccatcgtcaccaccgaccagcccggtcgccatttcaagctccgttcccagcaacgggggtctttgagcatcggcatgcccgtgtactatcgccagattcaggtcgggcaggtggtcagctacgggtttgacgacgatggcaactccgtcgcggtccagatattcatcgaagccccgcatcacaccaagatcacagagaacacacgattctggaatgccagcggccttgacatgtccctcaccgctcaagggctcaagatagacacccagtcgcttacctccatcgtctccggcgggctggctttcgatgtccccgagggtactccccccggcaaggaggctgacgagaacaccgtcttcgacctgtaccccgaccatgacagcatcaatcggcagacctactcattccgcaaggactggctcatctatttcgaccagtccgtccgggggctcagcgtcggcgcacctgtcgaactctatggcatcaagattggcgaggtgagaaagatcgacctcatctacgacatggtccgcaaggacatccgcgtcccggtcatcgtctccatcgaacccgagcgcatctcggacatgctgaaggccgtacccaatccggaatccacgaagggagagcctatcctcaaatggttcgtggaagaccgcaatatgagggcgcaactcaagaccggcaacctgctgaccggacagcttctggtcgacttcggattccacccgcgtgaacccaaggtcaaactggcctttgaaaacggttacgcggtcgtcccgagcataccgggctctctcgagcagattcaggacagtatcgcgcacatcacgcgcaacctcgaaaaggtgccgttcgacaagataggaacgcgtattgacactctgctcaaagagaccaccgttgtcgtcaaggagagcggacgttttgccaaccgcctcaacaacgagacaacaccgcttctgcaaagcaacctcatcgcacttcagaagacgctcgaggacctgcagggaaccctcggcaagaattcagccttcaattacaacacgcagaagactcttgaagagttgacgcagaccttgagggccttgcgcgagttgaccactgccatcgaccgtcatccacagtcgctcctgttcgggaaaggagagccccacaatgagaaatag

SEQ ID NO: 6365 - protein, 543 aa, Desulfovibrio vulgaris subsp. vulgaris str. Hildenborough
MTDNDSTEQYATPATVKSKNRLSTVWIIPIVALIIGGWLAIKAYSEKGPVISISFATAEGLEAGKTKIRFKDVEVGQVNEIRLGDDLKHVVVTAELSKDLSRFLNDKTRFWVSRAQIRGGTASGLDTLLSGAYIGVDPGLGGNQTHDFVGLEVPPIVTTDQPGRHFKLRSQQRGSLSIGMPVYYRQIQVGQVVSYGFDDDGNSVAVQIFIEAPHHTKITENTRFWNASGLDMSLTAQGLKIDTQSLTSIVSGGLAFDVPEGTPPGKEADENTVFDLYPDHDSINRQTYSFRKDWLIYFDQSVRGLSVGAPVELYGIKIGEVRKIDLIYDMVRKDIRVPVIVSIEPERISDMLKAVPNPESTKGEPILKWFVEDRNMRAQLKTGNLLTGQLLVDFGFHPREPKVKLAFENGYAVVPSIPGSLEQIQDSIAHITRNLEKVPFDKIGTRIDTLLKETTVVVKESGRFANRLNNETTPLLQSNLIALQKTLEDLQGTLGKNSAFNYNTQKTLEELTQTLRALRELTTAIDRHPQSLLFGKGEPHNEK

SEQ ID NO: 6366 - DNA, 1674 bp, Acinetobacter sp. ADP1
  CDS (1)..(1674): transl_table=11
ctgaccaataaaagaatgataagcatgtctgaacatacgccgaatactgaactcgcggttactgatgaaaaccagaaacagcaaggattgccagagccccaaaagaagaaggggcgttggcgacctgcgttgatctggctagtaccactggtcgctttgctcattgcgctttctttggctgtaaaagcaattattgatactggtccaaaaattgatgtgtcttttcgcacagcagaaggattggtcgctggtaaaaccacagttcgttataaacaggtcgatattggtctggttcgtcagattgatttggcagaagatggctcacatgtgattgccaaaattgaactacgtaaggacgcgagtaaatttgcatcgaaagattcacggttctgggtagttcgaccacgcattggaaccagcggtgtatcgggtattgataccttgctttctggtgcatatatcgaggtagatggtggtcggtctaaagagaagaaggatgaatttacgggacttgaggttccacctgtggtttcatcagatgttcctggaaaagtttttttcttaaaagcagatgatttgggttcgctggatgtcggttccccaatttattatcgacgaattaatgtggggcagattacagcttataatttgtctaaagatggaaaaagtgtcgagttacaaacatttgttcgttcaccttatgacaagtttgtaaccaccgatgcacggttctggcaagcaagtggcgtagatgtgacattaaatgcatctggatttaatctggatacgcaatcacttgcgagtattgttgcgggcgggatcgcatttggctatccagaatcatcaaatgcaggtgtggcaaacaatcatagtcatttcaatttgtttgattcgcgcagtgatgccatgaaagagcctgatggtcggccacgacacattattatgtatttcaatcattctttacgcggtttatcggcaggtgcaccaattgattttatgggcattgaaattggaaatgtaaaatccatcaatgttgaatttaatgcgcaatatacgcagcttcgtatgcgtgtagaggcagtgatctatccttcacgccttgcacatggtaaagagcttgatccaaatggtgaaattttcagatcgtttattcagcaaggctggcgtgcacaaatgcgaacaggtaatctgctgacgggtcaaaattacattgcactggataaattccctaaagccaaaccagctagtctgatcatgcatgcagatggtgcggctgaagtaccgacgacaccgactgaactcagtggtttacaggcacaggtatcacaaattgcagataagctaaccaagttcccattggttgaaattggtcaggatgtacgcaagacactcaataatatgaacacaacgattgagtcgacggataagctggtcaaacaacttgatggtaaagttgcgccaggtttccaagccacactggatgatgtccgacgtaccatgcagtctagccagtcgattctgtcaagtgatgccccgatgcaacaagatgtacgccgtgcattacaacaaatgacacgtgctgcggcttcgttacaattgatggctgattatattgaacaacacccagaatctctgattcgtggaaaaaccccagaggctgaccgtgataaataa

SEQ ID NO: 6367 - protein, 557 aa, Acinetobacter sp. ADP1
MTNKRMISMSEHTPNTELAVTDENQKQQGLPEPQKKKGRWRPALIWLVPLVALLIALSLAVKAIIDTGPKIDVSFRTAEGLVAGKTTVRYKQVDIGLVRQIDLAEDGSHVIAKIELRKDASKFASKDSRFWVVRPRIGTSGVSGIDTLLSGAYIEVDGGRSKEKKDEFTGLEVPPVVSSDVPGKVFFLKADDLGSLDVGSPIYYRRINVGQITAYNLSKDGKSVELQTFVRSPYDKFVTTDARFWQASGVDVTLNASGFNLDTQSLASIVAGGIAFGYPESSNAGVANNHSHFNLFDSRSDAMKEPDGRPRHIIMYFNHSLRGLSAGAPIDFMGIEIGNVKSINVEFNAQYTQLRMRVEAVIYPSRLAHGKELDPNGEIFRSFIQQGWRAQMRTGNLLTGQNYIALDKFPKAKPASLIMHADGAAEVPTTPTELSGLQAQVSQIADKLTKFPLVEIGQDVRKTLNNMNTTIESTDKLVKQLDGKVAPGFQATLDDVRRTMQSSQSILSSDAPMQQDVRRALQQMTRAAASLQLMADYIEQHPESLIRGKTPEADRDK

SEQ ID NO: 6368 - DNA, 1641 bp, Pectobacterium atrosepticum SCRI1043
  CDS (1)..(1641): transl_table=11
ttggcgaaagataatcatgccgttgcggatgtagaaacgattaaacgctggtcgccggtctggattgtgccgattgtcacggtgctgatcggtgcctggatactgttttaccattttagtcatcaagggccacaaattacgctgattaccagcaacgccgaaggcattgaagcaggaaaaaccgcaatcaaaagccgtagcgttgatgttggggtggtagaaagcgtggtgctgagtgatgacctccatcgcgtggaaatcaaagcgcgcctgcatgacggtatggataaactgctaaagcaggattccgctttctgggtggtgaagccgcagattggacgagaaggcgtttccggtctaggtacgctgttatccggtgcctatatcgaactgcaacccggcgcgaataaggacgataagcgcgagtttacgctgctggacgcgccgccgctggcctcaccggatgcgaaaggcatcagggtgatactcgacagcgatcaatccgggcagttgaatgccggtgaccccgtcctgttccgcggttatcgggtggggtcggtggaaaccagtgagttcgatccgaaagcgcgcaagatgcgctatcagctgtttatctcggcgccgtatgacgggttggttaccagcaacgtccgtttctggaaagacagcggcgtcgcattcgatatgtcggcacaaggcatgcgtgtcgaaatgggctcgctgactacgctgttcagcggtggcgtaagctttgatatcccggctggatgggaactgggcgatgcagccaaggcaatggcacagtatcggctctttgatagccagcgcagtattcaggactcgctgtacaccgaatataaagagtatttgctgttctttagcgaatcgatccgtggtttacaggctggggcaccggttgaattccgcggtattcgattgggcacggttgccgaagcgccatttttcccgaaaaatatgaagcaggaactggatggtgattatcgcattccggtgctgattcgtattgaacccgatcggttcgagaagaaaattggcggctcgttcgactttgagcagcatctgaagcaggctcaatcgttggggctacgggcctcgatgaagtcggctaacctcctgacaggcgcgctctatatcgatttagatttttatccaaaagaaaaagtggataaggcgctgttcgtgatggatggctacccggttctgcccaccattgatggtggcctgtcacagattcagcagaagctgatggcggtgctggataaggtgaatagcctaccgctgaatccgatggttaatgaagcaacgaagacgctgacggaaagtcaggcgacgctgcgcgaaatgcaaaaaaccttggcgacgttgaacaaattgacgtccagcaaagcgatgcaagatctgccggaagatatgcaaaaaacgctgcttgagctgaatcggagtatgaaaggcttccagcctggttcaccagcgtataataagatggtggcggatatgcagcggttagatcaggttttacgggaactacagcctgtgctgcgtaccctgaatgagaaaagcaacgcgttggtgtttgaggcctctggtagtcaagatcctcagcctaagagggcaaaataa

SEQ ID NO: 6369 - protein, 546 aa, Pectobacterium atrosepticum SCRI1043
MAKDNHAVADVETIKRWSPVWIVPIVTVLIGAWILFYHFSHQGPQITLITSNAEGIEAGKTAIKSRSVDVGVVESVVLSDDLHRVEIKARLHDGMDKLLKQDSAFWVVKPQIGREGVSGLGTLLSGAYIELQPGANKDDKREFTLLDAPPLASPDAKGIRVILDSDQSGQLNAGDPVLFRGYRVGSVETSEFDPKARKMRYQLFISAPYDGLVTSNVRFWKDSGVAFDMSAQGMRVEMGSLTTLFSGGVSFDIPAGWELGDAAKAMAQYRLFDSQRSIQDSLYTEYKEYLLFFSESIRGLQAGAPVEFRGIRLGTVAEAPFFPKNMKQELDGDYRIPVLIRIEPDRFEKKIGGSFDFEQHLKQAQSLGLRASMKSANLLTGALYIDLDFYPKEKVDKALFVMDGYPVLPTIDGGLSQIQQKLMAVLDKVNSLPLNPMVNEATKTLTESQATLREMQKTLATLNKLTSSKAMQDLPEDMQKTLLELNRSMKGFQPGSPAYNKMVADMQRLDQVLRELQPVLRTLNEKSNALVFEASGSQDPQPKRAK

SEQ ID NO: 6370 - DNA, 1626 bp, Yersinia pseudotuberculosis IP 32953
  CDS (1)..(1626): transl_table=11
gtggcggaaattgaaaaaatcaagcgatggtcaccggtatggatcatcccgatcgtcactgcgctgatcggcgcatggatactgttttatcatttcagtaatcaagggccacaggtcgttttgaccactctaaatgctgaaggtattgaggcggggaaaaccaagataaagagccgtagcgtggatgttggtatggttgaaaaggtcacgttgagtgaagatcttaaccatgtgatcatacaggcccggttaaattctggcatgaataccctgttacacggtgatacagttttctgggtggtaaaaccgcagattggccgtgaagggatctctggtttagggactctactctccggtgcgtatattgagctgcaaccgggcagtaacggtaaggcactaaatgaattccgtttattggattccccaccgcttgcctcaccagatgcgaaaggtttacggattatgctggatagtgatcaagcggggcagttgaatgccggtgatccggtactgttccgcggttatcgcgtaggttccgtagaaaccagtacgtttgatcctcaatcccgtttgatgcgttaccagctatttattggcgcgccttatgacagcctggtgaccagtaacgtccgtttctggaaagacagtggtgttgctgtggatctgtcttcacaaggcatgcgtgtggagatggcatcgttggcgacattattcagcggtggagtcagttttgatgtacccgatggtttagaacaaggtaagcccgtcacgcaggataaagcggagtttaagctgtttgatgaccgtagcagcattcagaactctttatacattgaacatgaaaacttcttattgttcttctctgattctgtccgtgggctacagtctggcgcaccggtagaattccgcgggatccgtgttggtacggtcggagatgttcccttcttcgctgaggggatgaagcagcaagtcgataatgatttccgtattccagtattaattcgcattgagccgggccgtttccgtgatgatttaggtccagataccaattttgaacaggtactgaaaaccgccaaagagcgtggtttacgtgcatcattgaagtctggcaacttactgactggtgcactgttcgtcgatctggatttttatcccgatgcgaaaccgtggaaagggccgcaagaaattgctggttatcctttgttgccgacaatcagtggtggtttggctcaaatccaacagaaagtcatgcaaacactggataagattaataatctgccactgaatccaatggtgaatgaagtcacgaaggcattggctgaaagccagaagacaatgcgtgaaacccagaaagttctagcttcacttaatacaatcacgtccagtcagtcgatgcaggagctaccaaaagatctgcaaaaaacactgaatgaactgaatcgtagtatgaaaggcttccaacctggttcaccggcctacaataaaatggtgggtgacatgcagcggttagatcaggtcttgcgtgaattacaaccggtattgcgaacactgaatgagaagagcaatgcgctagtatttgaagcagcaggaagtcaggatcctcagcctaagaaggccaaaaaatga

SEQ ID NO: 6371 - protein, 541 aa, Yersinia pseudotuberculosis IP 32953
MAEIEKIKRWSPVWIIPIVTALIGAWILFYHFSNQGPQVVLTTLNAEGIEAGKTKIKSRSVDVGMVEKVTLSEDLNHVIIQARLNSGMNTLLHGDTVFWVVKPQIGREGISGLGTLLSGAYIELQPGSNGKALNEFRLLDSPPLASPDAKGLRIMLDSDQAGQLNAGDPVLFRGYRVGSVETSTFDPQSRLMRYQLFIGAPYDSLVTSNVRFWKDSGVAVDLSSQGMRVEMASLATLFSGGVSFDVPDGLEQGKPVTQDKAEFKLFDDRSSIQNSLYIEHENFLLFFSDSVRGLQSGAPVEFRGIRVGTVGDVPFFAEGMKQQVDNDFRIPVLIRIEPGRFRDDLGPDTNFEQVLKTAKERGLRASLKSGNLLTGALFVDLDFYPDAKPWKGPQEIAGYPLLPTISGGLAQIQQKVMQTLDKINNLPLNPMVNEVTKALAESQKTMRETQKVLASLNTITSSQSMQELPKDLQKTLNELNRSMKGFQPGSPAYNKMVGDMQRLDQVLRELQPVLRTLNEKSNALVFEAAGSQDPQPKKAKK

SEQ ID NO: 6372 - DNA, 1662 bp, Burkholderia mallei ATCC 23344
  CDS (1)..(1662): transl_table=11
atgctcatgaatagaccgcaaggcccgcaacacgacccgaacgcggcccctcccaccccgcccggcggcgagccgcccgtactgcccgagcccgtgatcacgcggcgctccgggtggctgccgtcgctcgtgtggctcgtgccgctcgtcgccgcgctgatcggcatcgggctcgtcgtcaaatcggtgctcgaacgcgggcccgagatcacgatcagcttcaagagcgccgagggcctcgagcccggcaagacgcaggtcaagtacaaggacgtcgagatcgggatggtcgagacgatcaagctgtcgaaggatctgtcgcacgtgctcgtcgaagtgcaactgaagaaggaggccgaggacttcgcggtgaaaggcacgcgcttctgggtcgtgcggccgcggatcggcgcgacgggcgtgtccgggctcggcacgctgctgtccggcgcgtacatcggcgtcgacgcgggctgctcggacgagaccgagaagtcgttcaccgggctcgagacgccgcccgccgtcacgggcgaccagaagggcacgcaatacgtgctgcgcggcgattcgctcggctcgatcgacatcggctcgccggtgtactaccggcgcgtgcaggtgggccaggtcgtcggcttctcgctcgacaaggacggcacgggcgtcacgttccgcgtgttcgtcaatgcgccttacgaccagtacgtcggcctgaactcgcgctggtggcaggcgagcggcgtcgatctgcggctcgattcgagcggcttcaagctgaacacgcagtcgctcgcgacggtgatcctcggcggcattgcgttccagtcgccgccgaatcaggcggccggcccgcccgcgccgaacaacatgacgttccgcctgggcgccgacgaaggcgacgcgatgcgcgagccggacggcgagccggtgcaggtcgtgatgaacttcaaccagtcgctgcgcgggctgtcggtcggcgcgcccgtcgatttccgcggcatcgtgctcggccaggtgacgaacatcggcatcgatttcgatccgaagacgaagaatttcacgatgccggtgacgatgaacgtctaccccgaccggctcggccgcaagttccgcgaggcatcgcaggataagggctacgcggcgcggcgcgaggtgctgtcgcggctcgtccagcacgggctgcgcggccagttgcgcacgggcaacctgctgacgagccagttgtacgtcgcactcgacttcttcccgaaggcgccgcccgtgaagatcgatctcgcccgcgagccggtcgaactgccgaccgtgccgaacacgctcgacgagctgcagttgcaggtggccgacatcgcgaagaagctcgacaaggtgccgttcgaccagatcggcgcgaacctgaacagcgcgctcgcgaacgcggacaagctgttcaagcggctcgacaccgagatcgcgcccgaggcgcgcgacacgctgtccgccgcgaagcagacgttcacgaccgcggaggcgaccttgcagcaggattcgccgctgcaatcggacgtgcgcggcgcgctcaaggagctcacgcgcacgctgcaatcgctgaacgcgctcgccgactacctcgagcggcatcccgaatcgctgctgaaaggcaaaccaggagatcagaaatga

SEQ ID NO: 6373 - protein, 553 aa, Burkholderia mallei ATCC 23344
MLMNRPQGPQHDPNAAPPTPPGGEPPVLPEPVITRRSGWLPSLVWLVPLVAALIGIGLVVKSVLERGPEITISFKSAEGLEPGKTQVKYKDVEIGMVETIKLSKDLSHVLVEVQLKKEAEDFAVKGTRFWVVRPRIGATGVSGLGTLLSGAYIGVDAGCSDETEKSFTGLETPPAVTGDQKGTQYVLRGDSLGSIDIGSPVYYRRVQVGQVVGFSLDKDGTGVTFRVFVNAPYDQYVGLNSRWWQASGVDLRLDSSGFKLNTQSLATVILGGIAFQSPPNQAAGPPAPNNMTFRLGADEGDAMREPDGEPVQVVMNFNQSLRGLSVGAPVDFRGIVLGQVTNIGIDFDPKTKNFTMPVTMNVYPDRLGRKFREASQDKGYAARREVLSRLVQHGLRGQLRTGNLLTSQLYVALDFFPKAPPVKIDLAREPVELPTVPNTLDELQLQVADIAKKLDKVPFDQIGANLNSALANADKLFKRLDTEIAPEARDTLSAAKQTFTTAEATLQQDSPLQSDVRGALKELTRTLQSLNALADYLERHPESLLKGKPGDQK

SEQ ID NO: 6374 - DNA, 1662 bp, Burkholderia pseudomallei K96243
  CDS (1)..(1662): transl_table=11
atgctcatgaatagaccgcaaggcccgcaacacgacccgaacgcggcccctcccaccccgcccggcggcgagccgcccgtactgcccgagcccgtgatcacgcggcgctccgggtggctgccgtcgctcgtgtggctcgtgccgctcgtcgccgcgctgatcggcatcgggctcgtcgtcaaatcggtgctcgaacgcgggcccgagatcacgatcagcttcaagagcgccgagggcctcgagcccggcaagacgcaggtcaagtacaaggacgtcgagatcgggatggtcgagacgatcaagctgtcgaaggatctgtcgcacgtgctcgtcgaagtgcaactgaagaaggaggccgaggacttcgcggtgaaaggcacgcgcttctgggtcgtgcggccgcggatcggcgcgacgggcgtgtccgggctcggcacgctgctgtccggcgcgtacatcggcgtcgacgcgggccgctcggacgagaccgagaagtcgttcaccgggctcgagacgccgcccgccgtcacgggcgaccagaagggcacgcaatacgtgctgcgcggcgattcgctcggctcgatcgacatcggctcgccggtgtactaccggcgcgtgcaggtgggccaggtcgtcggcttctcgctcgacaaggacggcacgggcgtcacgttccgcgtgttcgtcaatgcgccttacgaccaatacgtcggcctgaactcgcgctggtggcaggcgagcggcgtcgatctgcggctcgattcgagcggcttcaagctgaacacgcagtcgctcgcgacggtgatcctcggcggcatcgcgttccagtcgccgccgaatcaggcggccggcccgcccgcgccgaacaacatgacgttccgcctgggcgccgacgaaggcgacgcgatgcgcgagccggacggcgagccggtgcaggtcgtaatgaacttcaaccagtcgctgcgcgggctgtcggtcggcgcgcccgtcgatttccgcggcatcgtgctcggccaggtgacgaacatcggcatcgatttcgatccgaagacgaagaatttcacgatgccggtgacgatgaacgtctaccccgaccggctcggccgcaagttccgcgaggcatcgcaggacaagggctacgcggcgcggcgcgaggtgctgtcgcggctcgtccagcacgggctgcgcggccagttacgcacgggcaacctgctgacgagccagttgtacgtcgcactcgacttcttcccgaaggcgccgcccgtgaagatcgatctcgcccgcgagccggtcgaactgccgaccgtgccgaacacgctcgacgagctgcagctgcaggtggccgacatcgcgaagaagctcgacaaggtgccgttcgaccagatcggcgcgaacctgaacagcgcgctcgcgaacgcggacaagctgttcaagcggctcgacaccgagatcgcgcccgaggcgcgcgacacgctgtccgccgcgaagcagacgttcacgaccgcggaggcgaccttgcagcaggattcgccgctgcaatcggacgtgcgcggcgcgctcaaggagctcacgcgcacgctgcaatcgctgaacgcgctcgccgactacctcgagcggcatcccgaatcgctgctgaaaggcaaaccaggagatcagaaatga

SEQ ID NO: 6375 - protein, 553 aa, Burkholderia pseudomallei K96243
MLMNRPQGPQHDPNAAPPTPPGGEPPVLPEPVITRRSGWLPSLVWLVPLVAALIGIGLVVKSVLERGPEITISFKSAEGLEPGKTQVKYKDVEIGMVETIKLSKDLSHVLVEVQLKKEAEDFAVKGTRFWVVRPRIGATGVSGLGTLLSGAYIGVDAGRSDETEKSFTGLETPPAVTGDQKGTQYVLRGDSLGSIDIGSPVYYRRVQVGQVVGFSLDKDGTGVTFRVFVNAPYDQYVGLNSRWWQASGVDLRLDSSGFKLNTQSLATVILGGIAFQSPPNQAAGPPAPNNMTFRLGADEGDAMREPDGEPVQVVMNFNQSLRGLSVGAPVDFRGIVLGQVTNIGIDFDPKTKNFTMPVTMNVYPDRLGRKFREASQDKGYAARREVLSRLVQHGLRGQLRTGNLLTSQLYVALDFFPKAPPVKIDLAREPVELPTVPNTLDELQLQVADIAKKLDKVPFDQIGANLNSALANADKLFKRLDTEIAPEARDTLSAAKQTFTTAEATLQQDSPLQSDVRGALKELTRTLQSLNALADYLERHPESLLKGKPGDQK

SEQ ID NO: 6376 - DNA, 1719 bp, Methylococcus capsulatus str. Bath
  CDS (1)..(1719): transl_table=11
atgaacgaatccccaaaggaaggcgccggcggcgcgccggactacgatgtctgggaggcggaggtcaaatcctcccgcggcctgccgctggtctggctgattccgctggtagcattgggtatcggtatctggctggcctataggacgctgagcgaggagggacccaccatcacgttgctgttcaaggaggcgccagggctcgaggcggggaaaagcaagatcaagttcaaagacgtggagatcggcaccgtcgagtcggtggtgctgaacgaggacctgacgggggtcgtcgtcaccgccaagatggagaaacacgtcgccacccacctcggtgaaaacaccgccttctgggtggtgaagccggaattggggctgggcggcgtctccggcctggacacgctgatggcaggaaactacatcgccgtcgagttcggtggcggcaaggtcgtccgcagattcgtcggactcgagcgtccgccccggatcaaggcggacaccccgggtcgctcgtttttcctctcggcggacaatgcggggccgctgaaatacggcaccccggtctatttccgtgacatcgaggtcgggcaggtggtgaacgtcgggctggccgaggacaaccggagtgtccaggtcgaaatcttcatcgacgcgccttatcaccgcctcgtacacaacagtacccgcttctggcaggtcagcgggatcgatctgtccctcagtgcccagggcgtcaatctcaaggtcggttcgatcatgtccctgctccagggtggcatcacgttcgaaacgccgacactcaacgatcccaaggtgcagtccagcgagcccaatacccgtttcaggctgcacaaggatttcgccagcatcgccgaagggacctatacgctgcgccagccttatctgctgttcttcgacgactccgtgcgggggttgaacgtgggtgcgccggtcgaactcaagggcatccgggtcggcacggtgaccgagttgaagctcgcgctggatttcggcgcgcataagatccggattcccgtggtcatcgaaatcgaccccgagcggctcattccctatggcgcggaggaaatcatcgagcgggcgaagaaggaatataaggcggcgatggaggccggccgccgccccttcatggaaaaactggtggagcgtggtctccgtgcccggctcaggaccggcaacctcctgaccgggcagctttacgtcgacctcgacttctatccggaaagcccgccgaaaagtctggattacagtggccagtaccccgagctgccgactctgccctcggtggcggacgaactgcagcgcaacgtcaccgagatcattgcgaacctcaagaagatacccctggacaagatcggccaggagctgctcggcaccgtgcaaggcagcaatcgcctgctcaattcgccggaactcaagggggccgtcggttccctgaaccttgccctgaaggacctgcgccatctggcccagactgcggaccgggaaatggtgaccctcacctcggcggcggaaaagagcctcagctccaccgccagggtgctggagcagctcgaaccgggctcggcgatggcggtggacatcagcaacgcgctggaagaactcgccgcctccgcccgttccatccgcgccctgaccgactatctcgaacgccatccggaagccctgctgcacggcaagggtggatcgggaggcaagccatga

SEQ ID NO: 6377 - protein, 572 aa, Methylococcus capsulatus str. Bath
MNESPKEGAGGAPDYDVWEAEVKSSRGLPLVWLIPLVALGIGIWLAYRTLSEEGPTITLLFKEAPGLEAGKSKIKFKDVEIGTVESVVLNEDLTGVVVTAKMEKHVATHLGENTAFWVVKPELGLGGVSGLDTLMAGNYIAVEFGGGKVVRRFVGLERPPRIKADTPGRSFFLSADNAGPLKYGTPVYFRDIEVGQVVNVGLAEDNRSVQVEIFIDAPYHRLVHNSTRFWQVSGIDLSLSAQGVNLKVGSIMSLLQGGITFETPTLNDPKVQSSEPNTRFRLHKDFASIAEGTYTLRQPYLLFFDDSVRGLNVGAPVELKGIRVGTVTELKLALDFGAHKIRIPVVIEIDPERLIPYGAEEIIERAKKEYKAAMEAGRRPFMEKLVERGLRARLRTGNLLTGQLYVDLDFYPESPPKSLDYSGQYPELPTLPSVADELQRNVTEIIANLKKIPLDKIGQELLGTVQGSNRLLNSPELKGAVGSLNLALKDLRHLAQTADREMVTLTSAAEKSLSSTARVLEQLEPGSAMAVDISNALEELAASARSIRALTDYLERHPEALLHGKGGSGGKP

SEQ ID NO: 6378 - DNA, 1662 bp, Neisseria gonorrhoeae FA 1090
  CDS (1)..(1662): transl_table=11
atgactgacaacagccctcctccaaacggacacgctcaagcacgcgtccgcaaaaacaacaccttcctctccgccgtctggctggtcccgctgatcgcgctgattgccggcggctggctttgggttaaggaaatccgcaacagggggcctgtggttacgctcttgatggacagcgcggaaggcatcgaagtcaacaatacggtcattaaggtattgagcatcgatgtcggacgcgttacccgaatcaaactgcgcgacgaccaaaaaggcgtggaagttactgcccaactcaatgcggacgtatccggcctcatccgcagcgatacccagttttgggtggtcaagccgcgtatcgaccaaagcggcgtaaccggtttgggtacgctgctttcgggttcgtacatcgcttttacacccggcaaaagcggcgaggcaaaagacgtgttccaagtgcaggacattccgcccgttaccgccatcgggcaaagcgggctgcgcttgaatttgattggtaaaaacgaccgcatcctcaacgtcaacagccctgttttgtatgaaaactttatggtcgggcaaatcgaaagcgcgcatttcgacccgtccgaccaaagcgtgcattacaccatcttcatccaaagccccaacgacaaactgattcattccgccagccgtttttggctggaaagcggcatcaatatcgaaaccacaggcagcggcatcaaactcaattccgcccctctgcctgccctgctgtcaggcgcgatttcatttgattcgccgaaaaccaaaaacagtaaaaacgtcaaaagcgaggacagcttcacgctttacgacagccgcagcgaaatcgccaacctgcctgacgaccgctcgctgtactacaccgcgtttttcaaacaatccgtgcgcggactgaccgtcggttcgcctgtcgaatacaaagggctgaatgtcggcatggtttccgatgtcccttattttgaccgcaatgacagcctgcacctgtttgaaaacggctggattcccgtacgcatccgcatcgagccttcccgtttggaaatcaatgccgacgagcaaagcaaagagcattggaaacaacaattccagacggccttaaacaaaggcctgaccgccaccatctccagcaacaacctgctgaccggcggcaaaatgattgagttgaacgatcagccttccgcctcgcccaagctgcgaccgcataccgtttatgcaggcgataccgtcatcgccacacggggcggcggtttggatgacttgcaggtcaaattggcggatttgctggacaaattcaacaatctgccattggataaaaccgttgccgaattgaacggctcgctcgccgaactcaagtccgcactcaaatccgccaatgccgccctaagctccattgacaaactggtcggcaatccgcagacgcaaaacatcccgaacgaactgaaccaaactctgaaagagttgcgcataaccctgcaaggcgtatcgcctcaatcgcctatctacggagacgtacaaaatacgctgcaaagtttggacaaaaccttaaaagacgttcaacccgtcattaacactttgaaagaaaaacccaacgcactgattttcaacaacagcagcaaagaccctatcccgaaaggaagccgataa

SEQ ID NO: 6379 - protein, 553 aa, Neisseria gonorrhoeae FA 1090
MTDNSPPPNGHAQARVRKNNTFLSAVWLVPLIALIAGGWLWVKEIRNRGPVVTLLMDSAEGIEVNNTVIKVLSIDVGRVTRIKLRDDQKGVEVTAQLNADVSGLIRSDTQFWVVKPRIDQSGVTGLGTLLSGSYIAFTPGKSGEAKDVFQVQDIPPVTAIGQSGLRLNLIGKNDRILNVNSPVLYENFMVGQIESAHFDPSDQSVHYTIFIQSPNDKLIHSASRFWLESGINIETTGSGIKLNSAPLPALLSGAISFDSPKTKNSKNVKSEDSFTLYDSRSEIANLPDDRSLYYTAFFKQSVRGLTVGSPVEYKGLNVGMVSDVPYFDRNDSLHLFENGWIPVRIRIEPSRLEINADEQSKEHWKQQFQTALNKGLTATISSNNLLTGGKMIELNDQPSASPKLRPHTVYAGDTVIATRGGGLDDLQVKLADLLDKFNNLPLDKTVAELNGSLAELKSALKSANAALSSIDKLVGNPQTQNIPNELNQTLKELRITLQGVSPQSPIYGDVQNTLQSLDKTLKDVQPVINTLKEKPNALIFNNSSKDPIPKGSR

SEQ ID NO: 6380 - DNA, 1680 bp, Pseudomonas syringae pv. syringae B728a
  CDS (1)..(1680): transl_table=11
atgtctgacagtaccctccccccgcctgcttcagtgccacgccctgaagtcaaacgtcgtcgcctgcgtgtctcgctgatctggctggtgccgatcgttgccgcgatcattggcatatccatggccttgcatgactggatgaacatcggtcccagaatcacggtcagcttcctgacagccgaaggtctggaagccaacaagactcaggtcaaatacaagaacgtggtcatcggcatggtcacggatatcagcctcagtgaggaccgcacccatgtgctggccaacatcgagctgaacaccagcgccgcaccgtttacacgggtcgacagccagttctgggtggtgcgcccacgcatcggcgcacacggggtttcgggtgtagacacgctgctttcgggcgccttcatcggcgccgacgcaggcagcgccgaggaaaccaagagcagcttcaccggcctggaaacgccgccgccggtgaccttcggtgaaaaaggcaagcgcttcaccctgcacaccgacgatctgggctcgctggacatcggctcaccgatctacttccgacgcattcaggtcggtcaggtagtggcctacgacctgtccaaggacggccgcggcgtcgacatccagattttcatcaacgcaccgaacgatcagtacatcaccactgacacacgcttctggaacgccagcggtgtcgacatcaccgtcggcgcctcaggcgtcaaggtcaatacgcagtcgctgacctcgatcatttccggcgggatcgcctttcgcgagccgaactggagcccggactcgaagccggcggacgagaacgcagaattcaagatattcgatgaccagaccgcggcgatggcaccacccgatggtgagccacgctacatccgcatgcgtttcaatcaatcgcttcgcgggctgacggtcaatgcggcagttgacttcctcggggtcaatatcggcaaggtggtatcggtggacctggattacgatccggccaccaagaccttccccggtatcgttggcgcagtgatctatcccaagcgcctgggggcggccgagtccaagctcaaggaactcggcggctcgggtgatgaagaagaacagtctgcccgcgtactgggtgctttcgtggccaatggtctgcgtgcccaggtgcgtaacggcaacctgctgactggccagctgtacatcgccatggagttcgatccaaaggcgccgaaggtggcgttcaacgccaaggcccgaccgctggagattccgaccgtaccgggcagcttcgacaagctgcaggagcaactgcaggcattcgtcgagaaactcagcaacttgccgatcgaccagctggcgggcaacctcaacggcaccctcagcgagttgcagaaaaccctcaaacaggtcaacagcagcgtgttgccgcaaatgcgcggcaccttgcagcaggccgagaaaaccctggggactgccaacgactcgttcgccgaagattcgccagcgcgtcagcaactgggccaggccatggatgaagtgcaacgtaccgcgcgttcggtgcgggtcctcaccgacttcctcagccgccatccggaatcgctgattcgcggccgtacgggcgacgcagcgcctcgttcgttcaacgccccgtcctcgtcccgagccattgatccggagccaaaacaatga

SEQ ID NO: 6381 - protein, 559 aa, Pseudomonas syringae pv. syringae B728a
MSDSTLPPPASVPRPEVKRRRLRVSLIWLVPIVAAIIGISMALHDWMNIGPRITVSFLTAEGLEANKTQVKYKNVVIGMVTDISLSEDRTHVLANIELNTSAAPFTRVDSQFWVVRPRIGAHGVSGVDTLLSGAFIGADAGSAEETKSSFTGLETPPPVTFGEKGKRFTLHTDDLGSLDIGSPIYFRRIQVGQVVAYDLSKDGRGVDIQIFINAPNDQYITTDTRFWNASGVDITVGASGVKVNTQSLTSIISGGIAFREPNWSPDSKPADENAEFKIFDDQTAAMAPPDGEPRYIRMRFNQSLRGLTVNAAVDFLGVNIGKVVSVDLDYDPATKTFPGIVGAVIYPKRLGAAESKLKELGGSGDEEEQSARVLGAFVANGLRAQVRNGNLLTGQLYIAMEFDPKAPKVAFNAKARPLEIPTVPGSFDKLQEQLQAFVEKLSNLPIDQLAGNLNGTLSELQKTLKQVNSSVLPQMRGTLQQAEKTLGTANDSFAEDSPARQQLGQAMDEVQRTARSVRVLTDFLSRHPESLIRGRTGDAAPRSFNAPSSSRAIDPEPKQ

SEQ ID NO: 6382 - DNA, 1743 bp, Colwellia psychrerythraea 34H
  CDS (1)..(1743): transl_table=11
atgaccaataacgaatataccgatatatctaataaagagactgatgtaagcccagcaaatattgaacaattaaagtcggtatctatgatttggtttgtaccctttgttgctttgttaattggcgcttggatgatttattatcagttgagtaatgaaggtccagtaatcaccatcgcgttcgattctgctgaaggtatggagataggtaagactaaaataaaatcctataatgtcgacattggtgaagtatctaatatcgtacttaacgaaaatgctgatggcgttattgtaacggcaagaatgacaaaaaacgcagaaaagttacttaataaaaatagtgatttttggctagtatcaccagaaatatcacataccggaatttctggtttaagtactttgatatcaggcgtgtatattgaattttatccctcttctattcatgaagaagaagtagatgagttaacatcagagtttattgcgctaaaagatccaccagtaactcctcccggagcacctggtttacatttaacgttaaacagtaacgaccagtttgcttactcaaaaggtgacccaatcatatataaaggcttaacggttggtcagtttgagcacattcactttaactttgaagaacgtgtagtttattacaatgcttttattaaagcgccgtatcatcaattagtcaccaccaacactaagttttgggatgttagtggtttacggatggatttaacggccgatggtttatcaatacaaaccggtaacatagaaaccatgctaactaatggggttacttttgatgtacccaaaggcatggaaaatggcgaagaaattaccgaacgatcgtactttgatatctatgcaaattataaggaggctgacgatgaacgttataaatactctgttgaatacattgttttggtcagtaataccattcgcggtttgagtgttggcgcccctgttgaatatcgaggagtattaatagggcatgttaaatctattaacctactagcacaaagaaatagcgatagacctcaaatttttgatgaagacataaaaataccaattttaataagtttacaacccggaagagttggcttacccgataatgaaatgggtgtaagccttatgaaacagcagcatcagttatggattaaagacggtttaagagcgagtttaaaaacgggtagtttactgacaggtagtttgtttattgattttcagcactattctgatttgaataatgaggaggaaaatacacaaagaactgattttgaaaatagccaatatggtgaatatacgatcatccctagtgttgatgatgagttttcacaaattaccgcgaaggcaagccagttcatcgataatcttaatgctctaccattagagaaaatttctggtaatactaacgaacttattactgaattcacccaaacagcaaaatcatttcaaagtgttagtgataatttatcaggcgtacttgatggtgtgaatcagcagcaattgactcaggaattgaaaacgaccctgcaaagctatacaaaattaagtaaagatctctctgctggttctaaagggtatgaagatcttcgtcaaacattatcggcattaactaaggtcatgaacgaattacagccacttcttaatcaattaaaacaccaacctaacggcttaatatttgaatcaggtaaagttgatgcgattgaacctaaaaaatatacccctaataagaaggcagaatga

SEQ ID NO: 6383 - protein, 580 aa, Colwellia psychrerythraea 34H
MTNNEYTDISNKETDVSPANIEQLKSVSMIWFVPFVALLIGAWMIYYQLSNEGPVITIAFDSAEGMEIGKTKIKSYNVDIGEVSNIVLNENADGVIVTARMTKNAEKLLNKNSDFWLVSPEISHTGISGLSTLISGVYIEFYPSSIHEEEVDELTSEFIALKDPPVTPPGAPGLHLTLNSNDQFAYSKGDPIIYKGLTVGQFEHIHFNFEERVVYYNAFIKAPYHQLVTTNTKFWDVSGLRMDLTADGLSIQTGNIETMLTNGVTFDVPKGMENGEEITERSYFDIYANYKEADDERYKYSVEYIVLVSNTIRGLSVGAPVEYRGVLIGHVKSINLLAQRNSDRPQIFDEDIKIPILISLQPGRVGLPDNEMGVSLMKQQHQLWIKDGLRASLKTGSLLTGSLFIDFQHYSDLNNEEENTQRTDFENSQYGEYTIIPSVDDEFSQITAKASQFIDNLNALPLEKISGNTNELITEFTQTAKSFQSVSDNLSGVLDGVNQQQLTQELKTTLQSYTKLSKDLSAGSKGYEDLRQTLSALTKVMNELQPLLNQLKHQPNGLIFESGKVDAIEPKKYTPNKKAE

SEQ ID NO: 6384 - DNA, 1641 bp, Ralstonia eutropha JMP134
  CDS (1)..(1641): transl_table=11
atgcccgagactgaaaaccttccgcccacaccaccgggacagccgggcctgccgcaacccgaacgccgccggcgggcgcgctggctgccgtcgctggtctggctgatcccgatcgtcgcggccgtggtcggcatttcgctgctggtccacaccctgacctcgcgcgggcccgagatcaccgtgaccttccgctcggccgaggggctcacgccaggcaagaccgcggtgcgctacaaggacgtggatatcgggctggtgaaatcggtgcggcttgcgtccgaccgctcgcacgtgctggccaacatcgacctgaccaaggatgccgagaacttcgccgtggctgacacgcgcttctgggtcgtgcgtccgcgcttcgccgccagcggcgtatccgggctggaaacgctgctgtcgggcgcctacatcggcgtagacgcgggcaagtccaccgaaagccggcgcgaattcaagggcctggaggcgccgccggtggtgacgtcggactcgtccggcaagcagttcgtgctgcgcgcctcggacctgggctcgctagatatcggctcaccggtctattaccggcgcgtgcaggtcggccaagtggtggcgttccagctcgacccgaacgggcgcgacatcacgctgcgcgtgttcgtcaacaaaccctatgaccggcttgtgaatgccgatacgcgcttctggcatgcgagcggcgtcgatctcaagctcgatgcgtcgggcctcaaactgtcgacgcagtcgctcgtgaccgtgctgctgggcggcgtcgccttccaggcgcccgaaggcaccagtgcgacggatggcgccgccgagaacacgcagttcctgctcgcggccgaccaggccgaggccatgaaggaacccgaggaactggccccgacgctggctgtgctcaacttcgaccagtccgtgcgcgggctttcgccgggcgcgccggtggatttccgaggtgtgatcgtgggccaggtgcgatccatcggcattgaattccagcgcgacaagaaggcgttccgcatgccggtggtggtggagctgtacccgtcgcgcatgggcttccgcgaacgcgacgtccaggacaccaaccgccgccacgagatcatcgcgggcctgctcaagcgtggcatgcgcgcgcagcttcgtaccggcaacctgctgacgggccagctgtatgtggcgctcgacttcttcccgaaggcgccgccggccaatgtcgacctgaatgcaccgatccccgagttcgccaccacgccgggcacgttcgatcagttgcaggcgcaggtcggcgacatcgtcaaccgcatcgacaaggtgccgttcgaccagatcggacaggatttgcgcaagtccgtggccgcgctcaacaccacgctcgcgagtgccgacgaactcgtgaagcagcttaatggcgatgtcgcgccacaggtgctggccgcgctgcaggacgcgcgcaagacgctgtccactgccaacggcacgctgtcgtccgaggcgccgctgcagcaggacgcgcgccgcatggtgcaggaattgacccgcacggcgacatcgttgcgcaacctgaccgactatctcgaacgccatcccgaagcgctgctgcgcggcaagccggagaaggaatga

SEQ ID NO: 6385 - protein, 546 aa, Ralstonia eutropha JMP134
MPETENLPPTPPGQPGLPQPERRRRARWLPSLVWLIPIVAAVVGISLLVHTLTSRGPEITVTFRSAEGLTPGKTAVRYKDVDIGLVKSVRLASDRSHVLANIDLTKDAENFAVADTRFWVVRPRFAASGVSGLETLLSGAYIGVDAGKSTESRREFKGLEAPPVVTSDSSGKQFVLRASDLGSLDIGSPVYYRRVQVGQVVAFQLDPNGRDITLRVFVNKPYDRLVNADTRFWHASGVDLKLDASGLKLSTQSLVTVLLGGVAFQAPEGTSATDGAAENTQFLLAADQAEAMKEPEELAPTLAVLNFDQSVRGLSPGAPVDFRGVIVGQVRSIGIEFQRDKKAFRMPVVVELYPSRMGFRERDVQDTNRRHEIIAGLLKRGMRAQLRTGNLLTGQLYVALDFFPKAPPANVDLNAPIPEFATTPGTFDQLQAQVGDIVNRIDKVPFDQIGQDLRKSVAALNTTLASADELVKQLNGDVAPQVLAALQDARKTLSTANGTLSSEAPLQQDARRMVQELTRTATSLRNLTDYLERHPEALLRGKPEKE

SEQ ID NO: 6386 - DNA, 1656 bp, Pseudomonas fluorescens PfO-1
  CDS (1)..(1656): transl_table=11
atggagtcgtcagccgccgatcaaccgcgagcgcccggccaggcgccggtcaagacccggcgtttcagcatttcgctggtgtggatcgtgccgatcgtcgcggtgctggtgggcctctcgctggtggtgcacaacctgatgcaggaaggcccgaccatcaccgtcaccttcaagaccggcagcggcctgaccgccaacaagaccgaagtcaaataccgcaacgtggtgatcggccaggtcacggatgtcgaactgagcgacgaccagaaaagcgtcaaggccacgatcaaactggccaagcaggccgaaaccttcacccgtgaagactcgcagttctgggtcgtacgcccgcgcatcggtgcgggcggcgtctcgggcatcgacacgctgctgtccggtgactacataggggccgacatcggccagtccaattcgcgcgccaaacacttcaaaggcctggagaacccgccgccgatcacctacggcgaaccgggcaaacgcttcaacctgcacgcttcggatctcggctcgctggacatcggctcgccagtctattaccgcaagatcccggtcggccaagtcgtggcctatgcgctggacgccgatggcaaaggagtgaacatcgaggtgttcatccatgcgccgaacgacgcctacgtcacggaaaacacccggttctggaacgccagcgggattgatgtcaacgtcggtgccaacggttttgcggtgaaaaccgaatcgttgtcgaccttgctggtgggcggcatcgccttccgagcgccggagtacagccccaacgacgttgccgctgccgaagaaagaacctacgacctgtttgaagaccagcaaaccgccctcgccccgcccaacggcaaagcgcagtacctgaccctgcgtttcgatcaggccctgcgtgggctgaaagtcgatgcgccggtggaattcctcggcatcgagatcggccgggtggtgagcgtcaacctggacttcgacgcgaaaaagcgcagcttcccgctcaacgtcggcatcgtgatttacccgcagcgcctcggccaggcccacatcaagatgctcaaggtactcgaccacaatccggacgatgaagccgctgccgtgcgcctgatcggcacctttatcgacaacggtctgcgtgcccaggcccgcagcggcaacctgctgaccggccagctgtacatcgcgctggatttcttccccaaggccgaaaaagtcgcgtttgaccccaccgctcgcccgatcagcgttccgacagtccccggcagcctcgaacagttgcaggaaaaactcgaagcgatgatcgacaagctcaacaagttgccggtggagcggattgccggcaacctcgacagcaacctcgtggaattgcgcaaaggcctgacccagttcaacgccaagaccctgcccggcgtgcagactaccctcgccgacgtgagcaagaccctgcagtcggccagttcgactctggccgaagattcgccgcaacgcgaacaattgactcagaccctcgacgagctcgggcgcatgtcccgttcgctgcgtgagctgtccgattatctgggccgtcatccggaatcgttgattcgcggccgccccgacaacgccgcgccgctggacctcaaagggccgccgcgcaactga

SEQ ID NO: 6387 - protein, 551 aa, Pseudomonas fluorescens PfO-1
MESSAADQPRAPGQAPVKTRRFSISLVWIVPIVAVLVGLSLVVHNLMQEGPTITVTFKTGSGLTANKTEVKYRNVVIGQVTDVELSDDQKSVKATIKLAKQAETFTREDSQFWVVRPRIGAGGVSGIDTLLSGDYIGADIGQSNSRAKHFKGLENPPPITYGEPGKRFNLHASDLGSLDIGSPVYYRKIPVGQVVAYALDADGKGVNIEVFIHAPNDAYVTENTRFWNASGIDVNVGANGFAVKTESLSTLLVGGIAFRAPEYSPNDVAAAEERTYDLFEDQQTALAPPNGKAQYLTLRFDQALRGLKVDAPVEFLGIEIGRVVSVNLDFDAKKRSFPLNVGIVIYPQRLGQAHIKMLKVLDHNPDDEAAAVRLIGTFIDNGLRAQARSGNLLTGQLYIALDFFPKAEKVAFDPTARPISVPTVPGSLEQLQEKLEAMIDKLNKLPVERIAGNLDSNLVELRKGLTQFNAKTLPGVQTTLADVSKTLQSASSTLAEDSPQREQLTQTLDELGRMSRSLRELSDYLGRHPESLIRGRPDNAAPLDLKGPPRN

SEQ ID NO: 6388 - DNA, 1671 bp, Burkholderia sp. 383
  CDS (1)..(1671): transl_table=11
atgaatcctgcatccggcccgcaaggcctcgaaccccacgacccgcccgtgacacgcaaccgcgcgcggctttcgctcgtctggctcgtgccgctcgtcgcggcattgatcggcctgtcgatggtgatccacgcgtggttgtccgtcggaccggaaatcacgatcacgttcaacaccgcgcaaggcctcgaagccggcaagacgccggtcaagtacaaggacgtcgtgatcggcaccgtgaccgccatctcgctcagcgacgacagttcacacgtggtcgccacggtgtcgttcgtgaagaatgcgcgcaacctgattcgcgacgacacgcgcttctgggtcgtgcgaccccgcgtcggcatgagcggcgtttcgggcatcgatacgctgttctccggcgcgtacatcggcatggacacgggccgctcggaaaattcgcggaaggcctacaccgggctcgaaacgccgccgaccgtcatcaacggcacgccggggacgagcttcgcgctgcgcgccaccgatctcggctcgctcgatatcggttcgccggtctattaccgccatctgatggtgggccacgtcgcgtcgtacaagctcgacatgcagagccgcgacatgaacctgcaggtgttcatcgatgcgccgtacgatcgcctggtgaccaccgatacgcgcttctggaatgcgagcggcatggatctgtcgctcgacgcgaacggcctgaagctgaagacccagtcggtcgcgacgatcgtgggcggcggcatcgcgttcgcgacaccggaagacagcgatgcggcggccgcccgtgcaggccgcctgtttacgctcgccgacaacgaaactgccgcgatggccgtgccggacgggccgtcccagctcatccggctgcgcttcgaacagccgttgcgcgggctcgcggtcggcgcgcccgtggaattttccggcatcgacatgggcaaggtcgtctcgacccagctcgacttcgaccggaccacccggcgcttccagtccatcgtcatggtgaaggtctatccgtatcggctcggccccgtcatcgagaagctgcagaagaccgaaggcaacggcaatccgcgcgcggcccagtttctcgcgggcctggtcgagcatgggctccgtgcgcaggcgcgtaccggcaacctgctgacggagcagctctacatctcgttcgatttcgtgaaaaacgcgccgaaggtgccgttcgatgcgaacgccacgccgctgaccttgcccaccgtgccgagtacgttcgacaagctgccggagcagctcgccgacatcgtcgacaagatcaacaagatgccgctggattcgatcggcaagcatgtcgattcgagcctgacgaacctggacgcgacgctcaagcaggtcaacggccagttgctgccgtcgacgacgcgcatgctcgaccaggcgaaccagacgttcggcacgttgcgccagggcatcgccgacgacggcccgcttcaggaaaacctgacgaacacgctgaccgaagtccagcgtaccgcccgctcgttgcgcacgctcaccgacatgctgggccgccgtcccgaatcgctgctccggggaaccggggccgatcacgcgccgagcgcgcctgtcgccccttcaacctcgcctgtccagcaggagccacgacaaccatga

SEQ ID NO: 6389 - protein, 556 aa, Burkholderia sp. 383
MNPASGPQGLEPHDPPVTRNRARLSLVWLVPLVAALIGLSMVIHAWLSVGPEITITFNTAQGLEAGKTPVKYKDVVIGTVTAISLSDDSSHVVATVSFVKNARNLIRDDTRFWVVRPRVGMSGVSGIDTLFSGAYIGMDTGRSENSRKAYTGLETPPTVINGTPGTSFALRATDLGSLDIGSPVYYRHLMVGHVASYKLDMQSRDMNLQVFIDAPYDRLVTTDTRFWNASGMDLSLDANGLKLKTQSVATIVGGGIAFATPEDSDAAAARAGRLFTLADNETAAMAVPDGPSQLIRLRFEQPLRGLAVGAPVEFSGIDMGKVVSTQLDFDRTTRRFQSIVMVKVYPYRLGPVIEKLQKTEGNGNPRAAQFLAGLVEHGLRAQARTGNLLTEQLYISFDFVKNAPKVPFDANATPLTLPTVPSTFDKLPEQLADIVDKINKMPLDSIGKHVDSSLTNLDATLKQVNGQLLPSTTRMLDQANQTFGTLRQGIADDGPLQENLTNTLTEVQRTARSLRTLTDMLGRRPESLLRGTGADHAPSAPVAPSTSPVQQEPRQP

SEQ ID NO: 6390 - DNA, 1620 bp, Burkholderia sp. 383
  CDS (1)..(1620): transl_table=11
atgaatagtccacaaggcccgcagcacgacgcgccccggccgcccgatccgacgatctcgacgaaaagcggctggctgccgtcgctcgtctggctcgtgccgttgatcgccgcgctgatcggcatcggcctcgtgatcaagtccgtgcgcgagcgcggccccgaaatcacgatcagcttccacagcgccgaagggctcgagcccggcaagacccaggtcaagtacaaggacgtcgagatcggcatggtcaagacgatcaagctgtcgaaagacctgtcgcgcgtgctcgtccaggtgcagctcaagaaggaagcggaggacttcgcggtcaagggctcgcgcttctggatcgtgcggccgcgcgtcggcgcgaccggcgtgtcggggctcggcacgctgctgtccggtgcgtacatcggcgtcgacgccgggcgctcggacgatacgctgaccgacttcacgggcctcgagacgccgcccgccgtcacgggcgaccagaaaggcacgcaatacgtgctgcgcggcgattcgctcggttcggtcgacatcggctcgcccgtctactaccgtcgcgtgcaggtcggccaggtggtcggcttctcgctcgacaaggacggcacgggcgtcacgttcaacgtgttcgtcaatgcgccgtacgaccagtacgtcggcgtgaactcgcgctggtggcaggcaagcggcgtcgacctgcggctcgactccagcggcctgaagctgaacacgcagtcgctcgcgacggtgatcctcggcggcatcgcgttccagacgccgcccaaccagggctccggcacgacggcgccgaacaacacgacgttccgcctcgcgtccgacgaaggcgacgcgatgcgcgacccggacggccagccgctgcaggtcgtgatgaacttcaaccagtcgctgcgcgggctcgccgtcggcgcgacggtcgacttccgcggcatcgtgctcggcgaagtgacgaacatcggcatcgacttcgatccgaagacgaagaacttcctgatgccggtgacgatgaacgtgtatccggagcgcctcggccgccgcttccgcgaaacgatcgagagcaagggcgaaccggcccgccgcgagatcgtcgagcggctcgtccagcacgggctgcgcggccagctgcgcaccggcaacctgctgacgagccagttgtacgtcgcgctcgacttcttcccgaaggcgccggccgtgaagatcgacacggcgcgccagccgctcgagctgccgaccgtgccgaacacgctcgacgagcttcagttgcaagtcgccgacatcgcgaagaagctcgacaaggtgccgttcgaccagatcggcgcgaacctgaacagcgcactgtcgaacgccgacaagctgttcaagcagctcgacacgcaggtcgcgccggaagcgcgcgacacgctgtcggccgcgaagcagaccttctcgaccgccgaagcgacgctgcagcaggattcgccgctgcagtccgacgtgcgcggcgcgctgaaggagctcacgcgcacgctgcagtcgctgaacgcgctcgccgactacctcgagcgtcaccccgaatcgctgctcaagggcaagccaggagatcaacaatga

SEQ ID NO: 6391 - protein, 539 aa, Burkholderia sp. 383
MNSPQGPQHDAPRPPDPTISTKSGWLPSLVWLVPLIAALIGIGLVIKSVRERGPEITISFHSAEGLEPGKTQVKYKDVEIGMVKTIKLSKDLSRVLVQVQLKKEAEDFAVKGSRFWIVRPRVGATGVSGLGTLLSGAYIGVDAGRSDDTLTDFTGLETPPAVTGDQKGTQYVLRGDSLGSVDIGSPVYYRRVQVGQVVGFSLDKDGTGVTFNVFVNAPYDQYVGVNSRWWQASGVDLRLDSSGLKLNTQSLATVILGGIAFQTPPNQGSGTTAPNNTTFRLASDEGDAMRDPDGQPLQVVMNFNQSLRGLAVGATVDFRGIVLGEVTNIGIDFDPKTKNFLMPVTMNVYPERLGRRFRETIESKGEPARREIVERLVQHGLRGQLRTGNLLTSQLYVALDFFPKAPAVKIDTARQPLELPTVPNTLDELQLQVADIAKKLDKVPFDQIGANLNSALSNADKLFKQLDTQVAPEARDTLSAAKQTFSTAEATLQQDSPLQSDVRGALKELTRTLQSLNALADYLERHPESLLKGKPGDQQ

SEQ ID NO: 6392 - DNA, 1656 bp, Burkholderia thailandensis E264
  CDS (1)..(1656): transl_table=11
atgaatagaccgcaaggcccgcaacacgacccgaacgcggcccctcccaccccgcccggcggcgagccgccggtacttcccgagcccgtgatcacgcggcgctccggctggctgccgtcgctcgtgtggctcgtgccgctcgtcgccgcgctgatcggcatcgggctcgtcgtcaaatcggtgctcgagcgcgggccggaggtcacgatcagcttcaagagcgccgagggcctcgagcccggcaagacgcaggtcaagtacaaggacgtcgagatcggaatggtcaagacgatcaagctgtcgaaggatctgtcgcacgtgctcgtcgaggttcagttgaagaaggaagccgagaacttcgccgtgaagggcacgcgcttctgggtcgtgcgcccgcgcatcggcgcgacgggcgtgtcggggctcggcacgctgctgtcgggcgcgtacatcggcgtcgacgcgggccgctcggaagagaccgagaaatctttcaccgggctcgaaacgccgcccgccgtcacgggcgaccagaagggcacgcagtacgtgctgcgcggcgattcgctcggctcgatcgacatcggctcgccggtctactaccggcgcgtgcaggtgggccaggtcgtcggcttttcgctcgacaaggacggcacgggcgtcacgttccgcgtgttcgtcaacgcgccttacgatcaatacgtcggcctgaactcgcgctggtggcaggcgagcggcgtcgatctgcggctcgattcgagcggcttcaagctgaacacgcagtcgctcgcgacggtgatcctcggcggcatcgcgttccagtcgccgccgaaccagacagccggctcgcccgcgccgaacaacatgacgttccgcctgggcgccgacgaaggcgacgcgatgcgcgagccggacggcgagccggtgcaggtcgtgatgaacttcaatcagtcgctgcgcgggctgtcggtgggcgcgcccgtcgacttccgcggcatcgtgctcggccaggtgacgaacatcggcatcgatttcgatccgaagacgaagaacttcacgatgccggtgacgatgaacgtctaccccgaccggctcggccggaagttccgcgaggcggcgcaggacaagggctacgcggcgcggcgcgagatgctgtcgcggctcgtccagcacgggctgcgcggccagctgcgcacgggcaacctgctgacgagccagctgtacgtcgcgctcgacttcttcccgaaggccgcgcccgcgaagatcgatctcgcccgcgagccggtcgagctgccgaccgtgccgaacacgctcgacgaactgcagctgcaggtcgccgacatcgcgaagaagctcgacaaggtgccgttcgaccagatcggcacgaacctgaacagcgcgcttgcgaacgcggacaagctgttcaagcggctcgacacggaagtcgcgcccgaggcgcgcgacacgctgtccgcggcgaagcagacgttcacgaccgcggaagcgacgctgcagcaggattcgccgctgcaatcggacgtgcgcggcgcgctgaaggagctcacgcgcacgctgcagtcgctcaacgcgctcgccgactacctcgaacggcatcccgaatcgctgctgaaaggcaaaccaggagatcagaaatga

SEQ ID NO: 6393 - protein, 551 aa, Burkholderia thailandensis E264
MNRPQGPQHDPNAAPPTPPGGEPPVLPEPVITRRSGWLPSLVWLVPLVAALIGIGLVVKSVLERGPEVTISFKSAEGLEPGKTQVKYKDVEIGMVKTIKLSKDLSHVLVEVQLKKEAENFAVKGTRFWVVRPRIGATGVSGLGTLLSGAYIGVDAGRSEETEKSFTGLETPPAVTGDQKGTQYVLRGDSLGSIDIGSPVYYRRVQVGQVVGFSLDKDGTGVTFRVFVNAPYDQYVGLNSRWWQASGVDLRLDSSGFKLNTQSLATVILGGIAFQSPPNQTAGSPAPNNMTFRLGADEGDAMREPDGEPVQVVMNFNQSLRGLSVGAPVDFRGIVLGQVTNIGIDFDPKTKNFTMPVTMNVYPDRLGRKFREAAQDKGYAARREMLSRLVQHGLRGQLRTGNLLTSQLYVALDFFPKAAPAKIDLAREPVELPTVPNTLDELQLQVADIAKKLDKVPFDQIGTNLNSALANADKLFKRLDTEVAPEARDTLSAAKQTFTTAEATLQQDSPLQSDVRGALKELTRTLQSLNALADYLERHPESLLKGKPGDQK

SEQ ID NO: 6394 - DNA, 1614 bp, Saccharophagus degradans 2-40
  CDS (1)..(1614): transl_table=11
atgagaattaaccgcgcaactgttcagcgaatcagttcaatctcgccaatatggatagtgcccgctgtggccttagcgattgcattgtggttagccgtgcaagcgcgcatggaaaaaggcgcaaccatcgaaatagagtttgctaacgcgaccgatattattcccggccaaacccaaatacgtttaaaagatgtacgagtaggcttagtaaaagacgtgaagctcacgcgcgacttgaagtcggtacgggttattgccgagttagatcgcgaagtgtcgcaaaacctcagcaaaaattcgcgcttttgggtagttaccccacgcattagtgccactggagtgtctaacttgggtacattaatttccggtgtgtatattgtgatggaccccggtgagccgggtgaatttgaaaccaaatttaaaggcctaaaagaaccgccggtttaccaatctgatgagcctggcatgcagtatgtcatgcaggctgaagagctagggtctatcgacattggttcaccgctttactaccgccaaattcgagtgggcgaagttacatcttataagttggcggaagataacaaccatgtagatatcaacgtatttattcgcgcgccttacaataaattggtgcaaacccgcagccggttttggaatgtgagcggctttggtttatctatgggggccgacggcataaaagcgcatatggcttcgctagcctcgttaataagtggcggtatagcgttcgataatgccgcaggcttcgaaaacgcaacccttgccgatgaagggcgacggttttttctctacccagatcgggagtcggtacaagaagggcgctttaatattaaatactactacctgttgcgttttagcgattcagtgcgcgggttaacagtgggtgcgccggtagaatttaggggaattcatatcggtgaagtggtcgatgtatcgctagatactgcagacaatatagaaaaaagcttgctggtgtatattgctatggagcctcagcgtttagagccaaacaccaacccaacccgcgaagaagttgatgcgcgtatggaatcgttagtggcgcaggggttgcgcgcaaaaatgaaaaccgccagcatgctaaccggttcgcgctatatcgatttggtgtttgaaaacgatgctaacgacggccatgttgcatttgtgcgtgcagagaattactcagaaataccaaccgctaatggcacaattgatgacctaacccgtgaagtggcgggtatagtgggcaaaataaataacattccctttgagcaaataggctcagatttatctgccagtatgtcgagtttaaaaaccatattgggcgatttagagcgcaaccaaacagccgataaaatggatgcggctgtggcgaaccttgataaaaccttagaaaacgccaagcaggcacttggtcagttagacagcgtactgcaaagtgttgatcatgctattgcccccgactctgaactaaaatatgaattaaccgaaatgttaaaagctgtgagcgaagcggcgggctcggtggaattatttgttaacgagctcaaccgaaaccccaatgcgttaatttctggtgtagataaagatgatgaataa

SEQ ID NO: 6395 - protein, 537 aa, Saccharophagus degradans 2-40
MRINRATVQRISSISPIWIVPAVALAIALWLAVQARMEKGATIEIEFANATDIIPGQTQIRLKDVRVGLVKDVKLTRDLKSVRVIAELDREVSQNLSKNSRFWVVTPRISATGVSNLGTLISGVYIVMDPGEPGEFETKFKGLKEPPVYQSDEPGMQYVMQAEELGSIDIGSPLYYRQIRVGEVTSYKLAEDNNHVDINVFIRAPYNKLVQTRSRFWNVSGFGLSMGADGIKAHMASLASLISGGIAFDNAAGFENATLADEGRRFFLYPDRESVQEGRFNIKYYYLLRFSDSVRGLTVGAPVEFRGIHIGEVVDVSLDTADNIEKSLLVYIAMEPQRLEPNTNPTREEVDARMESLVAQGLRAKMKTASMLTGSRYIDLVFENDANDGHVAFVRAENYSEIPTANGTIDDLTREVAGIVGKINNIPFEQIGSDLSASMSSLKTILGDLERNQTADKMDAAVANLDKTLENAKQALGQLDSVLQSVDHAIAPDSELKYELTEMLKAVSEAAGSVELFVNELNRNPNALISGVDKDDE

SEQ ID NO: 6396 - DNA, 1659 bp, Burkholderia xenovorans LB400
  CDS (1)..(1659): transl_table=11
atgactagcccgcaagaaccgacgcccgcccccgatgcgccgcgcaacgattcgaacggaccgaagctgccgccccaactccccgaccctgacattgaaccgcgcagccgctggctgccttcgctcgtctgggtgattccgctgattgccgcgctgatcggcatcgcgctcgtaatcaaatcggtcaccgcgagaggcccgaccattacgatcagtttcgtcagcgccgaaggcctcgaacccggcaagaccaaggtgaagtacaaggacgtcgacgtcggcgccgtgaagaccatcacgctgtcgaaagatctgtcgcacgtgctggtgcaggtccagctgaccaaggaaggcgaagacttcgcggtcaaggattcgcgtttctgggtggtgcggccgcgtgtcggcgcgagcggcgtgtcgggtctcaccacgctgctctcgggcgcctacatcggcgcggacgccggccattcgccggataccgagaagaacttcgtcggcctggaaaccccgccgccgattaccggcgaccagaagggccaccagttcatcctgcatggcgactcgctcggctcgatcgacatcggctcgccgatcttttaccggcgcgtgcaggtcggccaggtagtcggcttctcgctcgacaaggacggcaccggcgtgaccatgcaggtcttcgtgtccgcgccgttcgaccagtatgtcggcaccaattcgcgctggtggcatgcgagcggcgtcgatctgcggctcgattccagcggcttcaagctgaacacccagtcgcttgcaacggtgatcgtgggcgggctgtcgttccagtcgccgccgggtcagggcgtaggcgcgcaggcgccgaacaacatgaccttccgcctcggttcggatgaagccgatgcgatgcgcgaaccggacggcgtgccgctgcgcgtggtgatgaacttcaaccagtcgctgcgcggcctgtcgatcggcgcgccggtcgatttccgcggcatcgtgctgggccaggtgaccaacatcggcatcgactacgatccgaagacgcgcagcttcaccatgccggtgacgatgaacctctatccggaccggcttggcagacgcttccgcgagaccgcgccggcaccgggcagcctggcgggtcaaaccatgctgcaacagctcgtcaaacatggtctgcgcggccagttgcgcaccggcaatctgattacgagccagttgtacgtggcggtggacatcttcccgaaggcgccgccggcaaccgtcgacgtggcgagcgatccgctcgaactgccgaccattccgaacacgctcgacgagttgcagctccaggtcgccgacattgcgaagaagctcgacgcagtgccgttcgaccagatcggcaacaacctgaacagcgcgctgaagaacgccgatcagctcttcacgcgactcgacaaggaagtggtgccgcaggcgcgcgacacgctcgcggcggcgaagcagaccttcggttcggccgaggcgaccttgcagcaggattcgccgttgcagtccgatgttcatcaggcgttgcaggaattgacgcgcacgttgcagtcgctcaatgcgctgtcggattatctggagcgccatcccgaatcgctgttgcgcggtaaatcaggagataaaccatga

SEQ ID NO: 6397 - protein, 552 aa, Burkholderia xenovorans LB400
MTSPQEPTPAPDAPRNDSNGPKLPPQLPDPDIEPRSRWLPSLVWVIPLIAALIGIALVIKSVTARGPTITISFVSAEGLEPGKTKVKYKDVDVGAVKTITLSKDLSHVLVQVQLTKEGEDFAVKDSRFWVVRPRVGASGVSGLTTLLSGAYIGADAGHSPDTEKNFVGLETPPPITGDQKGHQFILHGDSLGSIDIGSPIFYRRVQVGQVVGFSLDKDGTGVTMQVFVSAPFDQYVGTNSRWWHASGVDLRLDSSGFKLNTQSLATVIVGGLSFQSPPGQGVGAQAPNNMTFRLGSDEADAMREPDGVPLRVVMNFNQSLRGLSIGAPVDFRGIVLGQVTNIGIDYDPKTRSFTMPVTMNLYPDRLGRRFRETAPAPGSLAGQTMLQQLVKHGLRGQLRTGNLITSQLYVAVDIFPKAPPATVDVASDPLELPTIPNTLDELQLQVADIAKKLDAVPFDQIGNNLNSALKNADQLFTRLDKEVVPQARDTLAAAKQTFGSAEATLQQDSPLQSDVHQALQELTRTLQSLNALSDYLERHPESLLRGKSGDKP

SEQ ID NO: 6398 - DNA, 1620 bp, Burkholderia xenovorans LB400
  CDS (1)..(1620): transl_table=11
atgagtagtccgcaaggtcccggcttaccgcctgatctgcctgatcctgacattgcgccgcggcgcagctggctgccctcgcttgtctggttagtgccgctgatcgcggcgttgatcggtatcgcgcttgtcgtcaaggccgtcacggaacgtggtccggcgatcacgatcatcttcgacaatgccgaaggcctcgaacccggcaagacccaggtcaagtacaaggatgtcgaaatcggttcggtgaaggcgatcacgctgtcgaaggatcagacgcatgtggaaatcgccgtgcaactcaccaagcaggcggaaaacttcgcagtcaaggacacccgtttctgggtggttcgtccccgcgtgggcgcctccggtgtgtcgggtatcggcaccctgctctcgggtgcatatatcggcgtggatgccggccgctcaaaagagccacgaaccgagttcgccggactcgagacgccgcctcccatcacagcggaccagaaaggccatcgcttcatcctgcatggcgattcgctcggctcgatcgacatcggctcaccgatcttttaccggcgcatgcaggtgggccaggtctacggcattgccctcgacaaggacggcactggtgtaaccatgcaggtcttcgtcgccgcgccgtacgaccagtacgtcggcaccaattcgcgctggtggcatgcaagcggtgtcaatgtgcggctcgactcggccggcttcgtcgtcaacacgcagtcgctcgcggccattctcgtcggcggtctcgcattccagactccgccgggacagcagatgggtgcgcaggcggcggagaaaaccgacttccgcctcgcctccgacgagacagacgccatgcgcgcgccggacggcgtacccgtgcgcgccgtgatgaacttcaaccagtcgttgcgagggctttcggtaggcgcggtggtcgacttccgcggcatcgtgctgggacaggtgacggacattggtgtcgaatacgatccgcagacgcaaagcttcacgatgccggtcacgctcgacctgtacccggaccggctcagacggcgcgcccgtagcgcgacgatgccgcaggcccgtacgtcagccagccacgaactgctgcggcatctcgtcgaacgcggactgcgtggccagttgcgcaccggcaatctgctaacaggccagttgtacatcgcgttggacattttcccgaaggctgcgcccgtcaagttcgacgtcgacgccgagccgatcgaactgccgaccattccgaatacgctcgacgcgctacaggtacaggtcgccgacatcgcgagaaagctcgaccgggtgccattcgatcagatcggctcgaatctgaacacgtcgctgaagaacgccgacgcgctgttcaatcggctgaacaacgaggtcgtgccgcaggcgcgcgacacgctcgcggccgcaaggcagactttcggctcggccgaagcggctttgcagcgggattcgccgttgcagtcggatgtgcatcaagcgctgcaggaattgacccgcacgctgcaatcgctgaacgcgctggcggactatctggagcgtcatccggagtcgctcgtgcgcggcaaacccggagacaagccatga

SEQ ID NO: 6399 - protein, 539 aa, Burkholderia xenovorans LB400
MSSPQGPGLPPDLPDPDIAPRRSWLPSLVWLVPLIAALIGIALVVKAVTERGPAITIIFDNAEGLEPGKTQVKYKDVEIGSVKAITLSKDQTHVEIAVQLTKQAENFAVKDTRFWVVRPRVGASGVSGIGTLLSGAYIGVDAGRSKEPRTEFAGLETPPPITADQKGHRFILHGDSLGSIDIGSPIFYRRMQVGQVYGIALDKDGTGVTMQVFVAAPYDQYVGTNSRWWHASGVNVRLDSAGFVVNTQSLAAILVGGLAFQTPPGQQMGAQAAEKTDFRLASDETDAMRAPDGVPVRAVMNFNQSLRGLSVGAVVDFRGIVLGQVTDIGVEYDPQTQSFTMPVTLDLYPDRLRRRARSATMPQARTSASHELLRHLVERGLRGQLRTGNLLTGQLYIALDIFPKAAPVKFDVDAEPIELPTIPNTLDALQVQVADIARKLDRVPFDQIGSNLNTSLKNADALFNRLNNEVVPQARDTLAAARQTFGSAEAALQRDSPLQSDVHQALQELTRTLQSLNALADYLERHPESLVRGKPGDKP

SEQ ID NO: 6400 - DNA, 1641 bp, Ralstonia metallidurans CH34
  CDS (1)..(1641): transl_table=11
atgcccgatcacgatagtccctccccgccgccgacctccggtggcgtgccccagcccgcgcgcaagcgtcgcgcccgctggctgccatcgctggtgtggctgatcccgattgtcgccgccgtggtcggcgtctcgctgctgatcaacacgctcgcctcacgcgggccagagatcaacgtcaccttccgctccgccgacgggctgacaccgggcaagaccgccgtgcgctacaaggacgtcgacatcggcctggtcaagtcagtgcggctcgcgtccgatcgctcgcacgtgatcgcgtcgatcgagctgacaaaggacgccgagagcttcgccgtcaaggacacgcgtttctgggtggtgcgcccgcgctttgcgatcagtggcgtatccggcctggaaacgctgctctcgggcgcctacatcggcgtggatgccggcaagtcacgggaaagcacgcgcaacttcatcggtctcgaagtgccacccgtggtcaccgccgacgcgtccggccgccagttcgtgctgcgcgcccaggacttgggctcgctcgatatcggctcgccggtctactatcgccgcgtgcaggtaggccaggtggtggcgtaccagctcgacccgaacgggcgtgacatctcgctgcgcgtgttcgtcaacaagccgtacgacaagctcgtcaatggcgacacccgcttctggcacgccagcggcgtcgacctcaaactcgatgcgaacggcctgaagctttccacgcaatcgctggtcacggtgctgttgggcggcgtggccttccaggcgccggacaactccaccgcaacgcaaccggcgtccgagaatacgcaattcctgctggcatcggaccagtcagaggcgatgaaggagcctgaagaactggcgccagcgctggcagtgctgaacttcgaccagtcggtgcgcggcctgtcgccgggcgcgccggtcgacttccgcggtgtgatcgtgggccaggtgcgctcgatcggcatcgaataccagcgcgacaaaaaggcattccgaatgcccgtagtggtggagttctacccgtcgcgcatgggattccgggagcgcgatgtgtccgacgaggccaagaagcgcagcatcgtgcagggcctggtcaagcgcggcatgcgcgcgcaactgcgcactggcaacctgctgaccggtcagctctacgtggcgctcgacttcttcccgaaggcgccaccgccgaaggacctcgacctcaacgcgacaatgccggaactgccgaccacgccgggtaccttcgatgagttgcaggccaagctcggcgacatcgtcaacaagatcgacaaggtgccgttcgatcagatcggccaggatctgcgtaccagcgtggtgtcgatgaacaagatgctcgataacgccgacaagctcgtgacccaactgcacggcgatgtagcgccccaggtactcgccgcgctgcaggatgcacgacgtacgctgaacgccgccaatggcacgcttgcatcggacgcgccgctgcagcaggatacgcgccgcatgatgcaggaactgacgcgcacggccgtgtccctgcgtgcgctgaccgactatctcgagcgccatcccgaggcgctgttgcgtgggaagacggagaaggaatga

SEQ ID NO: 6401 - protein, 546 aa, Ralstonia metallidurans CH34
MPDHDSPSPPPTSGGVPQPARKRRARWLPSLVWLIPIVAAVVGVSLLINTLASRGPEINVTFRSADGLTPGKTAVRYKDVDIGLVKSVRLASDRSHVIASIELTKDAESFAVKDTRFWVVRPRFAISGVSGLETLLSGAYIGVDAGKSRESTRNFIGLEVPPVVTADASGRQFVLRAQDLGSLDIGSPVYYRRVQVGQVVAYQLDPNGRDISLRVFVNKPYDKLVNGDTRFWHASGVDLKLDANGLKLSTQSLVTVLLGGVAFQAPDNSTATQPASENTQFLLASDQSEAMKEPEELAPALAVLNFDQSVRGLSPGAPVDFRGVIVGQVRSIGIEYQRDKKAFRMPVVVEFYPSRMGFRERDVSDEAKKRSIVQGLVKRGMRAQLRTGNLLTGQLYVALDFFPKAPPPKDLDLNATMPELPTTPGTFDELQAKLGDIVNKIDKVPFDQIGQDLRTSVVSMNKMLDNADKLVTQLHGDVAPQVLAALQDARRTLNAANGTLASDAPLQQDTRRMMQELTRTAVSLRALTDYLERHPEALLRGKTEKE

SEQ ID NO: 6402 - DNA, 1653 bp, Ralstonia metallidurans CH34
  CDS (1)..(1653): transl_table=11
atgaagcggagcatcaaccatgaccagtccaggccaggaccccgataccccggacttccccgaggccgtcgccaagtcgccaagtcgccatcgcgctcgcgctggcgcctgcagctcatatggctcgtgccgatcatcgccgtgctgatcggcggctggctcgcggtgaaggccgtgatcgaacagggaccgacgatcaccgtcagcttcaagaccggcgagggcctggaggccggcaagaccaagatcaagttcaaggacgtcgacatcggcttggtcaagtcggtggcgctttcccccgatagcaagcgcgtggtggtgaccgccgagatcgccaaggacgccggacgcctgcttgtcgacaacacgcgtttctgggtggtgcggccgcgcatctcgggcgggtccgtttccggcctcggcacactgctgtccggttcgtacatcgccaccgatgccggcacggcgacggcgacgcgccacgactttgtcgggctcgagacgccgcccgcattcaccagcgacgtgccgggccgcgagttcacgctaaagagcgaggacgtgggctcgctcgatgtcggctccccggtctacttccgccgccttcaggtgggacagatcaccgcgttcgacctcgactccgacgggcgtggcgtcacgctcaaggtgttcgtgaatgccccgtacgaccggttcgtgcagcagggcacacgcttctggcacgccagcggcgttgacgtgtcgctcgatacgggtggcttgcgcgtgaacacccagtccgtggtgtcgatcctgatcgggggcatcggcttcgagaccccgtacgaatcgcaggaccaacccgttgcagcggcaggatcgaccttcgcactgttccatgaccgtgtcaccgcactcaagcgccaggacagcgtcgtacatcactacgtggtcaatttcacggacacggtgcgcggactggccgttggcgctccgatcgagttccggggcatcgtgatcggcgaggtcaccggcatctacacacgctacgatccggttacgcgcaaattcagcatcccggtggaaataaacttctacccaggacggttcacgtcgcgttaccgcaccggtgcgggcgcgggcccggtgaccgaaacgccccgcgagcttggcgacttcctggtctcccaagggctccgaatgcagttgcggaacggtaaccttctgaccgggcagctttatatcgcgctggatttcttccccaacgcacccaaggccaagatcaactggaacgaaaacccgccggagtttccgtccatccagggcgatctgcagtcgctgcagcagtccctgacacgtgttgtcgcgcaactgaacagcgtgccctttgcgcagatcggtcagaacaccaaggacatgcttcgcaacgcgacctcgctattgacgcggctggactcggagctcgtgccgcaagcacgcgacacgctggcatcggcgcgctccacgctcgactccgccaacaccgcgctcggccccgactcggcgctgcagcagaacacggcggacgccatgaaggaactcgcccgtacggccgccgcgctccgctcgcttgccgactatctggagcagcaccccgaagcgctgatacgcggcaaagcggaggacaagccatga

SEQ ID NO: 6403 - protein, 550 aa, Ralstonia metallidurans CH34
MKRSINHDQSRPGPRYPGLPRGRRQVAKSPSRSRWRLQLIWLVPIIAVLIGGWLAVKAVIEQGPTITVSFKTGEGLEAGKTKIKFKDVDIGLVKSVALSPDSKRVVVTAEIAKDAGRLLVDNTRFWVVRPRISGGSVSGLGTLLSGSYIATDAGTATATRHDFVGLETPPAFTSDVPGREFTLKSEDVGSLDVGSPVYFRRLQVGQITAFDLDSDGRGVTLKVFVNAPYDRFVQQGTRFWHASGVDVSLDTGGLRVNTQSVVSILIGGIGFETPYESQDQPVAAAGSTFALFHDRVTALKRQDSVVHHYVVNFTDTVRGLAVGAPIEFRGIVIGEVTGIYTRYDPVTRKFSIPVEINFYPGRFTSRYRTGAGAGPVTETPRELGDFLVSQGLRMQLRNGNLLTGQLYIALDFFPNAPKAKINWNENPPEFPSIQGDLQSLQQSLTRVVAQLNSVPFAQIGQNTKDMLRNATSLLTRLDSELVPQARDTLASARSTLDSANTALGPDSALQQNTADAMKELARTAAALRSLADYLEQHPEALIRGKAEDKP

SEQ ID NO: 6404 - DNA, 1665 bp, Shewanella sp. MR-4
  CDS (1)..(1665): transl_table=11
atgagtaataacatgataaataatgaagatatccgagctaaagagtcaaaagttcggcaactttcccccgtatggtttatccctctcatcgcggccatgattggctgctggatgttatatagctatttcagccagttggggacagaaatccaactgcatttaaagaccgctgagggcattgaagttggtaaaacctttttaaaatctcgcaatgtgaatgtgggagtgatcgaaaccattaaattaagcgatgactacagcgccattgtggcgaccgcacggatttcaaatgatgccaaacgcatgttaaagcaagatgcgcgtttttgggtggttaaaccacggattggcatgggcggcgtttcggggctagatactctgctctcgggcgcgtatatcgaactggagccgggtaaatctgacacgccccagtatgagtttaccgtgctggataatccccccgtcgcctcggtcgatgagcagggaatacggatcatgcttaatagccctcaagccggcaaactcagtgtgggcgatcctgtgctttacgaaggttttcgggttggccgagtggaaaacacggggtttaataccgagcgtcgtgaggcgttttaccaattgtttattaataaaccctacgatgagttagtgcgcgataacagccagttctggctgacttcgggcattaatatgcaactctcggcaaaaggattaaatctgcaagtgggttcactcgaaaccttgcttactggtggcgtcagttttggttttcccgaaggtcgactcgcaggggcaaaaattacagaggatgggagtgagtttagattgtatgactcccaagagcttgctagcgagagtatgtacgataagtatttagagtttgtgatgttgttcgatgagtctattcgcggattgcacgacggggcgagtgtggagttccgtggtatcactatcggcgaggtgctgaaatcgccactcacgctacagcaactcgatccccattttggccgttttagccatggcaccattcctgtgctggtcaaaattgatctggcacgtgtcttcgagcacgcagaacaggttgggctggataatctacgcactgaaatcgagcgtgagttgcaatcgggcctgcgggcgagtctgaaaacgggcaatttattgacaggggccttatttatcgatttggatttatattcagacgctaagccctatcaaaatgccaactttatgggatatcccatttttccgacaaaacgtgctggagtggccgagatccaaaaacaagtagggcaacttatcactaaactcaataacttaccgttagaaaaaacctttactgaggtgaatgccacattacagaataccgccagcgccctgtcacaatggagcaaggttggtgccagcttggaccaagtgctgcaacagcaggaggtgttatcgctgcccgccgacatgcaacaaaccttgcaaaccgtgagttcagtagcgaagggatatggacctgagtcgagcgtttatgtcgaacttcagaccagtctgcagcaactgcaaaccttgatgaaagaattagcgcccttgtcgcgccagctgaatcaaaagcctaacgcacttattttaggggcagatctgcctgctgacccaatcccagttaaaggtaactaa

SEQ ID NO: 6405 - protein, 554 aa, Shewanella sp. MR-4
MSNNMINNEDIRAKESKVRQLSPVWFIPLIAAMIGCWMLYSYFSQLGTEIQLHLKTAEGIEVGKTFLKSRNVNVGVIETIKLSDDYSAIVATARISNDAKRMLKQDARFWVVKPRIGMGGVSGLDTLLSGAYIELEPGKSDTPQYEFTVLDNPPVASVDEQGIRIMLNSPQAGKLSVGDPVLYEGFRVGRVENTGFNTERREAFYQLFINKPYDELVRDNSQFWLTSGINMQLSAKGLNLQVGSLETLLTGGVSFGFPEGRLAGAKITEDGSEFRLYDSQELASESMYDKYLEFVMLFDESIRGLHDGASVEFRGITIGEVLKSPLTLQQLDPHFGRFSHGTIPVLVKIDLARVFEHAEQVGLDNLRTEIERELQSGLRASLKTGNLLTGALFIDLDLYSDAKPYQNANFMGYPIFPTKRAGVAEIQKQVGQLITKLNNLPLEKTFTEVNATLQNTASALSQWSKVGASLDQVLQQQEVLSLPADMQQTLQTVSSVAKGYGPESSVYVELQTSLQQLQTLMKELAPLSRQLNQKPNALILGADLPADPIPVKGN

SEQ ID NO: 6406 - DNA, 1665 bp, Shewanella sp. MR-7
  CDS (1)..(1665): transl_table=11
atgagtaataacatgacaaataatgaagatatccgagctaaagagtcaaaagttcggcaactttcccccgtatggtttatccctctcatcgcggccatgattggctgctggatgttatatagctatttcagccagttggggactgaaatccaactgcatttaaagaccgctgagggcatcgaagttggtaaaacctttttaaaatctcgcaatgtgaatgtgggagtgatcgaaaccattaaattaagcgatgactacagcgccattgtggcgaccgcacggatttcaaatgatgccaaacgcatgttaaagcaagatgcgcgtttttgggtggttaaaccacggattggcatgggcggcgtttcggggctagatactctgctctcgggcgcgtatatcgaactggagccgggtaaatctgacacgccccagtatgagtttaccgtgctggataatccccccgtcgcctcggtcgatgagcagggaatacggatcatgcttaatagccctcaagccggcaaactcagcgtgggcgatcctgtgctttacgaaggttttcgggttggccgagtggaaaacacagggtttaataccgagcgtcgtgaggcgttttaccaattgtttattaataaaccctacgatgagttagtgcgcgataacagccagttctggctgacttcgggcattaatatgcaactctcggcaaaaggattaaatctgcaagtgggttcactcgaaaccttgcttactggcggcgtcagtttcggttttcccgaaggtcgactcgcaggggcaaaaatgacagaggatgggagtgagtttagattgtatgactcccaagagcttgctcgcgagagtatgtacgataagtatctagagtttgtgatgttgttcgatgagtctattcgcggattgcacgacggggcgagtgtggagttccgtggtatcactatcggcgaggtgctgaaatcgccactcacgctacagcaactcgatccccattttggccgttttagccatggcaccattccagtactggtcaaaattgatctggcacgtgtcttcgagcacgcagaacaggttgggctggataatctgcgcactgaaatcgagcgtgagttgcaatcgggcctgcgggcgagtctgaaaacgggcaatttattgacaggggctttatttatcgatttggatttatattcagacgctaagccctatcaaaatgccaactttatgggatatcccatttttccgacaaaacgtgctggagtggccgagatccaaaaacaagtcgggcaacttatcactaaactcaataacttaccgttagaaaaaacctttactgaggtgaatgccacattacagaataccgccagcgccctgtcacaatggagcaaggttggtgccagcttggaccaagtgctgcaacagcaggaggtgttatcgctgcccgccgacatgcaacaaaccttgcaaaccgtgagttcagtagcgaagggatatggacctgagtcgagcgtttatgtcgaacttcagaccagtctgcagcaactgcaaaccttgatgaaagaattagcgcccttgtcgcgccagctgaatcaaaagcctaacgcacttattttagggacagatctgcctgctgacccaatcccagttaaaggtaactaa

SEQ ID NO: 6407 - protein, 554 aa, Shewanella sp. MR-7
MSNNMTNNEDIRAKESKVRQLSPVWFIPLIAAMIGCWMLYSYFSQLGTEIQLHLKTAEGIEVGKTFLKSRNVNVGVIETIKLSDDYSAIVATARISNDAKRMLKQDARFWVVKPRIGMGGVSGLDTLLSGAYIELEPGKSDTPQYEFTVLDNPPVASVDEQGIRIMLNSPQAGKLSVGDPVLYEGFRVGRVENTGFNTERREAFYQLFINKPYDELVRDNSQFWLTSGINMQLSAKGLNLQVGSLETLLTGGVSFGFPEGRLAGAKMTEDGSEFRLYDSQELARESMYDKYLEFVMLFDESIRGLHDGASVEFRGITIGEVLKSPLTLQQLDPHFGRFSHGTIPVLVKIDLARVFEHAEQVGLDNLRTEIERELQSGLRASLKTGNLLTGALFIDLDLYSDAKPYQNANFMGYPIFPTKRAGVAEIQKQVGQLITKLNNLPLEKTFTEVNATLQNTASALSQWSKVGASLDQVLQQQEVLSLPADMQQTLQTVSSVAKGYGPESSVYVELQTSLQQLQTLMKELAPLSRQLNQKPNALILGTDLPADPIPVKGN

SEQ ID NO: 6408 - DNA, 1680 bp, Magnetococcus sp. MC-1
  CDS (1)..(1680): transl_table=11
gtgaatggtgcgcttgatgaactgcccagcccccttgcccaccctaagaagagtgaacggcatggtgcgcgttggatttggttaattcctattttggcgacggcatatgtggtgtggttggcggtggcgcatgtgcaggccatggggccggagattaccattacctttgccaacgcggacgccattcaaccgggcaagacgcgggttaagtataagtcggtggatgtgggcatggtgacgggcatgcagttaagtgatgatctgacgcaggttgaggtaagggtgcgtatggatcggctgatggccaaacatctttcggccagcacacggttttgggtggtgcatcctcggttatccatgcgtgaggtgagtggtttagagacgattgtttctggggtttatattgccatggacccggtttcgacggggcagcaatttgatagttttcagggtttggaggccccgccctttttaaggacggacgagagtggcaagcgttttttattgagtacggccaatttgggttccatgcgcagtggtacgccgattctttaccgtggcatacaggttggcaaggtattggggcatgatttagacagcgctaataaccgggtattgctgcatgtttttattaaatcgccctattttgacaaaatacgcagcaatacgcgcttttggaacgccagcggattggatctctcggttaatgcggatggatttcaattaaacacggaatcggttgagaccttattgacggggggcattgcgtttgatacgccggattcgttggatagtaagggggatttgcagcagggacatattttccctttgtatcccagtcgggaggcggtggaggagcgcatttatgagcggaaggtgcgatttgtactcttttttgaggagtcggtccggggtttaaggattggcgcaccggtggaggtgaggggcatacgggttggtcgggttttggatgtgcagatgcgttttgatccgcaggttggtcgttatcccattgtggtcttggtcgaggttgagccggagcggattataggggatgcgaatgcgcctagggatgacaagcagttattggcggcgatggtggcgcagggtttacgggcgcggttaaagacgggcagtttgatcacggggcagttattggtggatttggattggtatccgggtgaggcggtgcatttggcgggtttggcgtcggattatgtggagttaccgactttaccgacggagattgcggagatgaccaatgccataaagaatgtattggttacgttacagaagctaccgttggagtctattggcaaggagttgcaggagacattggcggggttgaacaggcaggttaacagtcatgcggttgaggatgcgattgcggcggtatcggcgacgatgggtcatttaaatgagctttcggcacaggttagccgggaggtgcccatggcgacgcagggggttaatcgttctttaaaggcgttggaggcgatgctgttgcagaccaagcggacgttatcggtggtggagtcggtggtggcaccggatgcgccgttgcatgatcatgcggtggcgacgatgaagagtttatcggcggcggcggagtcgttgagcagtttggcgacggcgttggagaaggatccacaatccttattgtttggtaagaacaagtag

SEQ ID NO: 6409 - protein, 559 aa, Magnetococcus sp. MC-1
MNGALDELPSPLAHPKKSERHGARWIWLIPILATAYVVWLAVAHVQAMGPEITITFANADAIQPGKTRVKYKSVDVGMVTGMQLSDDLTQVEVRVRMDRLMAKHLSASTRFWVVHPRLSMREVSGLETIVSGVYIAMDPVSTGQQFDSFQGLEAPPFLRTDESGKRFLLSTANLGSMRSGTPILYRGIQVGKVLGHDLDSANNRVLLHVFIKSPYFDKIRSNTRFWNASGLDLSVNADGFQLNTESVETLLTGGIAFDTPDSLDSKGDLQQGHIFPLYPSREAVEERIYERKVRFVLFFEESVRGLRIGAPVEVRGIRVGRVLDVQMRFDPQVGRYPIVVLVEVEPERIIGDANAPRDDKQLLAAMVAQGLRARLKTGSLITGQLLVDLDWYPGEAVHLAGLASDYVELPTLPTEIAEMTNAIKNVLVTLQKLPLESIGKELQETLAGLNRQVNSHAVEDAIAAVSATMGHLNELSAQVSREVPMATQGVNRSLKALEAMLLQTKRTLSVVESVVAPDAPLHDHAVATMKSLSAAAESLSSLATALEKDPQSLLFGKNK

SEQ ID NO: 6410 - DNA, 1665 bp, Shewanella sp. ANA-3
  CDS (1)..(1665): transl_table=11
atgagtagtaacatgataaataatgaaaatatccgagcgaaagagtctaaggttagacagctttcgcccgtgtggttgatccctatgatcgccgtcctgattggctgctggatgttgtatagctatttcagccaattagggaccgaaatccagctgcatttaaaaaccgccgagggcatagaagtcggtaaaacctttttaaaatcccgcaatgtgaatgtaggggtgatagaaagcattaaattaagcgatgactacagcgccatagtggcgacggcgcggatctcaaacgatgccaaacgtatgctaaagcaagatgcacgcttttgggtggtgaaaccgcggattggtatggaaggggtctcgggattagataccttgctctcaggcgcttatatcgaactagagccggggaaatcatcgacgccccagtatgaatttactgtgctggacaatccgccagtggcatcggccgacgaggaggggatgcggatcaccctgactagcccgcaggccggtaagttaagtgtgggcgatcctgtgctgtatgaaggttttagagtcggtcgagtggaaaccttaggctttaacaccgagcggcgcgaagccttttaccagctgtttatcaataaaccctacgatgaactcgttcgggataacagccagttttggttgacctctggcattaacatgcaactctcggccaaagggttaaatctgcaggtggggtcgctcgaaaccttgctctctggcggtgtgagtttctgtttgcctgaagggcgtctcgctggggcaaaaatcacagaggatggccatgattttaggttgtatgactcgcaggagcttgcgagccaaagcgtatacgacaagtacttagaattcgtgatgttattcgatgagtctattcgtggattacatgacggtgcgacggtggagttccgtggcatcaccataggcgaagtggtgaaatcaccgctcactttgcagcaactcgatccgcattttggtcgctttagccatggcacgattcccgtattggtcaaaatcgaactagcgcgggtgtttgagcatgccgaacaggtaggcttggacaatttacgcgctgaaatcgagcgagagttgcactcgggtctgcgggcgagcctgaaaaccggcaatttactcacgggtgccttgtttatcgatctggatttatacgccgatgctaagccctatcaaaccgccgattttatgggctatccggtattcccgacgcagcgcgcgggtgtggctgagatccaaaagcaagttgggcagcttatcagcaagctcaataatttaccgctggaaaaaaccttctcagaggtcaataccacgctacaaaataccgccagtgcattggcgcagtgggataaggtgggcgcgagtttagaccaagtgttacagcagcaagaaatgatgtcgctgcccgcagaaatacaacaaactttgaaagccgtaagcttgacggcgaagggatatgggccagagtcgagcgtttatgccgaacttcagaccagtctgcagcaactgcaaaccttaatgaaagagttagcgcccttgtcgcgtcagctgaatcaaaagcctaacgcacttattttaggggcagatctgcccgcagaccccatcccagttaaaggtaactaa

SEQ ID NO: 6411 - protein, 554 aa, Shewanella sp. ANA-3
MSSNMINNENIRAKESKVRQLSPVWLIPMIAVLIGCWMLYSYFSQLGTEIQLHLKTAEGIEVGKTFLKSRNVNVGVIESIKLSDDYSAIVATARISNDAKRMLKQDARFWVVKPRIGMEGVSGLDTLLSGAYIELEPGKSSTPQYEFTVLDNPPVASADEEGMRITLTSPQAGKLSVGDPVLYEGFRVGRVETLGFNTERREAFYQLFINKPYDELVRDNSQFWLTSGINMQLSAKGLNLQVGSLETLLSGGVSFCLPEGRLAGAKITEDGHDFRLYDSQELASQSVYDKYLEFVMLFDESIRGLHDGATVEFRGITIGEVVKSPLTLQQLDPHFGRFSHGTIPVLVKIELARVFEHAEQVGLDNLRAEIERELHSGLRASLKTGNLLTGALFIDLDLYADAKPYQTADFMGYPVFPTQRAGVAEIQKQVGQLISKLNNLPLEKTFSEVNTTLQNTASALAQWDKVGASLDQVLQQQEMMSLPAEIQQTLKAVSLTAKGYGPESSVYAELQTSLQQLQTLMKELAPLSRQLNQKPNALILGADLPADPIPVKGN

SEQ ID NO: 6412 - DNA, 1641 bp, Neisseria meningitidis FAM18
  CDS (1)..(1641): transl_table=11
atgactgacaacagccctcctccaaacggacacgcccaagcacacgtccgcaaaaacaacaccttcctctctgccgtctggctggttccgctgatcgcgctgattgccggcggctggctgtggattaaggaaatccgcaacagggggcctgtggttacgctcttgatggacagcgcggaaggcattgaggtcaacaatacggtcatcaaagtattgagcatcgatgtcggacgcgttacccgaatcaaactgcgcgacgaccaaaaaggcgtggaagtaaccgcccaactcaatgcggacgtatccggcctcatccgcagcgatacccagttttgggtggtcaagccgcgtatcgaccaaagcggcgtaaccggtttgggtacgctgctttcgggttcgtacatcgcttttacacccggcaaaagcgacgaggcaaaagacgtgttccaagtgcaggacattccgcccgttaccgccatcgggcaaagcgggctgcgcttgaatttgattggtaaaaacgaccgcatcctcaacgtcaacagccctgttttgtatgaaaactttatggtcgggcaagtcgaaagcgcgcatttcgacccgtccgaccaaagcgtgcattacaccatcttcatccaaagccccaacgacaaactgattcattccgccagccgtttttggctggaaagcggcatcaatatcgaaaccacaggcagcggcatcaaactcaattccgcccctctgcctgccctgctgtcgggcgcgatttcatttgattcgccgaaaaccaaaaacagtaaaaacgtcaaaagcgaagacagcttcacgctttacgacagccgcagcgaagtcgccaacctgcctgacgaccgctcgctgtactacaccgcgtttttcaaacaatccgtgcgcggcctgaccgtcggttcgcccgtcgagtacaaagggctgaatgtcggcgtggtttccgatgtcccttattttgaccgcaacgacagcctgcatttatttgaaaacggctggattcccgtacgcatccgcatcgagccttcccgtttggaaatcaatgccgacgaacaaagcaaagagcattggaaacaacaatttcagacggctttaaacaaaggcctgaccgccaccatctccagcaacaacctgctgaccggcagcaaaatgattgagttgaacgatcagccttcgtcttcgcccaagctgcgaccgcataccgtttatgcagacgataccgtcatcgctacacaaggcggcggtttggacgacttacaggtcaaattggcggatttgctggacaaattcggcaaactgcctttagacaaaaccgtttcaggtttaaacgcttcgctcgccgaactcaaatccacgctgaaatccattaacacgctaagcaataatccgcaaacgcaaaacattccgaacgagttgaaccaaaccctgaaagagttgcgcacaaccctgcaaggcgtatcgccgcaatcgcctatctacggcgacgtacaaaatacgctgcaaagtttggacaaaaccttaaaagacgttcaacccgtcattaacactttgaaagaaaaacccaacgcgctgattttcaacagcagcagcaaagaccctatcccgaaaggaagccgataa

SEQ ID NO: 6413 - protein, 546 aa, Neisseria meningitidis FAM18
MTDNSPPPNGHAQAHVRKNNTFLSAVWLVPLIALIAGGWLWIKEIRNRGPVVTLLMDSAEGIEVNNTVIKVLSIDVGRVTRIKLRDDQKGVEVTAQLNADVSGLIRSDTQFWVVKPRIDQSGVTGLGTLLSGSYIAFTPGKSDEAKDVFQVQDIPPVTAIGQSGLRLNLIGKNDRILNVNSPVLYENFMVGQVESAHFDPSDQSVHYTIFIQSPNDKLIHSASRFWLESGINIETTGSGIKLNSAPLPALLSGAISFDSPKTKNSKNVKSEDSFTLYDSRSEVANLPDDRSLYYTAFFKQSVRGLTVGSPVEYKGLNVGVVSDVPYFDRNDSLHLFENGWIPVRIRIEPSRLEINADEQSKEHWKQQFQTALNKGLTATISSNNLLTGSKMIELNDQPSSSPKLRPHTVYADDTVIATQGGGLDDLQVKLADLLDKFGKLPLDKTVSGLNASLAELKSTLKSINTLSNNPQTQNIPNELNQTLKELRTTLQGVSPQSPIYGDVQNTLQSLDKTLKDVQPVINTLKEKPNALIFNSSSKDPIPKGSR

SEQ ID NO: 6414 - DNA, 1665 bp, Pseudoalteromonas tunicata D2
  CDS (1)..(1665): transl_table=11
atgtcttcacccgctgaaataaaacaaaaaaataaactttctctgatttggtttttaccaattatgtctttgctagttgcttgctggatgctgtacaaatatcagatggaacaaggtgaagtgatttatatcaaaatgccctctgctgaaggaattattaatggtaaaaccgagattaaagtacgcagtgtcaaaattggaattatcagccatacacgcctctcggacgatcaaaaaagcgtcattgctcgagctgaaatcgacaaccattatgtgcatctattaacgcaagatgcaaaattatgggtggtaaaaccacggattgacgaaacagggatcaccggtatgactaccttgttatctggtgtgtatattgagtttttaccaggtacggataaagataccattcaccaatttcagttattaaccgatccaccacttattcctaatgatatcgaagggggccgagtaaaattattaagccgtgatgccgaagtaattgatgttggcacaggggtattttataaaggttttaaagtcgggcaagttgaaaccgcgacttttgattggcaagagcaaactatgcgttatggcttatttattcaagcgccttatcaaaatcttattaccttaaacagcgtcttttgggttcattcaggcattgaagttgacctcaatgcagatggcattagtatcaaaaccggctcgcttagcaaaatactcaaaggcggcatttcgtttacggtgccagagcgggaaaaacctggcgaaattgcccaagatggccatattttttcattaagtgatgattacaaaaccgcacttgagcaacgctattacgaacatgattattacgtcattgagtttgaacaatcaattcgcggattacgagtcggtgcgcctgtcgagtatcggggcactcgagtcggtaccgtggtcgaagcacccgctattttagtggtcgacggaaaaccggcccattttatgtctgacaatactgcagtgccggtgatgataaaaatagaataccgccgtttataccatgaagcgaaagtcgccaaagaattttggcaaagtaatagtcaaaaatggattgataacggcctaagagcgtcacttaaacctggaaatttactcacaggtgctgtctacgttgatttagacttttacccagacgcagaacaaaagcaaccaaaaatgctcgccaattatcgggtctttccaagtatctcaagcgggttttcggtgctcaccaatcaactgtcagaagtcatggctaaaataaacaaacttgatgtcgaaaaaaccttggtacaattaaatagcacagtcgccgagtatgaaaaactcgccgccgatttacgtgtatttgtaaatcaaagcaaaacccagcaaattccagccgagttgtcgcaaagtttagataaaattacctcatcaatgagtcagtttgaccgaacaatgaaacaatttgctaaaaccatggccgattaccaacagggttcgccggtttaccacgatatgaaccgcgcggtagaagaaatgaaaaaactggcagaacaacttcaaccgcttggaaaatcactaaacgagcagcctaatatgctgatttttgataaaaaaacaattgaagatttacaacctcggagcaaacaaaatgattaa

SEQ ID NO: 6415 - protein, 554 aa, Pseudoalteromonas tunicata D2
MSSPAEIKQKNKLSLIWFLPIMSLLVACWMLYKYQMEQGEVIYIKMPSAEGIINGKTEIKVRSVKIGIISHTRLSDDQKSVIARAEIDNHYVHLLTQDAKLWVVKPRIDETGITGMTTLLSGVYIEFLPGTDKDTIHQFQLLTDPPLIPNDIEGGRVKLLSRDAEVIDVGTGVFYKGFKVGQVETATFDWQEQTMRYGLFIQAPYQNLITLNSVFWVHSGIEVDLNADGISIKTGSLSKILKGGISFTVPEREKPGEIAQDGHIFSLSDDYKTALEQRYYEHDYYVIEFEQSIRGLRVGAPVEYRGTRVGTVVEAPAILVVDGKPAHFMSDNTAVPVMIKIEYRRLYHEAKVAKEFWQSNSQKWIDNGLRASLKPGNLLTGAVYVDLDFYPDAEQKQPKMLANYRVFPSISSGFSVLTNQLSEVMAKINKLDVEKTLVQLNSTVAEYEKLAADLRVFVNQSKTQQIPAELSQSLDKITSSMSQFDRTMKQFAKTMADYQQGSPVYHDMNRAVEEMKKLAEQLQPLGKSLNEQPNMLIFDKKTIEDLQPRSKQND

SEQ ID NO: 6416 - DNA, 1644 bp, Photobacterium sp. SKA34
  CDS (1)..(1644): transl_table=11
atgagttataaccagccatatcaggctaaagtacaaaaccttaagcaagtatctgcaatctggattattcccgttgtagctcttgctattggtatttggatgtttgttcaatatcttaatagcaaagggcctgaaataacgatccgccttcctaatgcttcaggcattgaagtgggtaaaaccgcgattaaatctctaaatgtgaaggttggtgtagtaaccaaagtacagctcagtgaggactatagctatattacggttaccgctcagatggataatgatactgagcgcatgttaaaaaatgataccaagttctgggtcgttaaacctcgtattgggaaagaaggtgtatctggtttagatacgcttctttctggggcctatatagaaatgcaacccggtcaaggtaaagataataaatatcaatttaaagcgctggaagtaccgccagttgcccctgctgatgctcaaggcttacgtgttgtgttaacaagtcatcaagctggtaaattaagtgttggtgatcctgtgctatatgacggttttacggttggtcgcgtagaaaaaacaaactttgatatcaatagtaaattggcaaattatcaattatttattttcgaaccttataatcgattagtacgcactactagtaattttattatgcagtccggcatgaatgtacaaatgagtgcagaaggttttaacgtcaagattggatcattggaatcgttaattacaggtggcgtaactttccaaaccccctctgatgagcaaggtgtcgttcaaaataagcaattaacacattatcgactgtataatagtgagaaagattatcgtcaaaaaatgtacgataagagtcttaaattcgtaatgttgtttaaagaatctattcgtgggttaaaagccggtgcacccattgaatatcgcggtattcaaataggtacagtaaaaaaagtaccacttcgtttaccaacgagtgaagaaggatttaccagcgaacagatccctgttctagtgcgtattgatctggggcgtgtttacaatcatagcaatgaaggaacgctagctggtcttcgtgcgaattttgaaaaagaatttcaaaaaggactccgagcaacattaaagcctggtagcttattaacaggagccttatacatcggaaccgatgtatataaagatgagaaacctgaaaaagcaatgaagtatgatggatatgatgtgttcccgactaaaacgggcgatcttgctgaagtacaaaagcaattaactagcatgctgacgaagtttaataaattgccgattgaagatacattgaactcaatgacagcgactctaaaggcatctgagaaaacaatgaattcagcagctaaggtaacaaaggatctggatcgaattctcaagcaaaaagatactcagacattgccatctgatatcaaagcgagtttaaaagaaatccaagcaacacttaatgggtttagcccaaactcagcaccatatcaaagcttacagagttcgcttgagcagtttgaacaagtgatgacggaattaaaaccagttcttcgtcaattaaatgagaagccaaattcattagtgtttggtgatgagaaagcgaaagatcctattccactgggaggccgtaaataa

SEQ ID NO: 6417 - protein, 547 aa, Photobacterium sp. SKA34
MSYNQPYQAKVQNLKQVSAIWIIPVVALAIGIWMFVQYLNSKGPEITIRLPNASGIEVGKTAIKSLNVKVGVVTKVQLSEDYSYITVTAQMDNDTERMLKNDTKFWVVKPRIGKEGVSGLDTLLSGAYIEMQPGQGKDNKYQFKALEVPPVAPADAQGLRVVLTSHQAGKLSVGDPVLYDGFTVGRVEKTNFDINSKLANYQLFIFEPYNRLVRTTSNFIMQSGMNVQMSAEGFNVKIGSLESLITGGVTFQTPSDEQGVVQNKQLTHYRLYNSEKDYRQKMYDKSLKFVMLFKESIRGLKAGAPIEYRGIQIGTVKKVPLRLPTSEEGFTSEQIPVLVRIDLGRVYNHSNEGTLAGLRANFEKEFQKGLRATLKPGSLLTGALYIGTDVYKDEKPEKAMKYDGYDVFPTKTGDLAEVQKQLTSMLTKFNKLPIEDTLNSMTATLKASEKTMNSAAKVTKDLDRILKQKDTQTLPSDIKASLKEIQATLNGFSPNSAPYQSLQSSLEQFEQVMTELKPVLRQLNEKPNSLVFGDEKAKDPIPLGGRK

SEQ ID NO: 6418 - DNA, 1653 bp, Neptuniibacter caesariensis
  CDS (1)..(1653): transl_table=11
atgaaaagcatagagaaacccatggataaccaacccattattaccagtaaacgctcagtatcttcaatttggttactccccttgattgctctgtgcattggcggctggatggtctatcaggattgggctaatcgcggtcaactggtcactattagctttattaccgccgatggcatcgaagagggtaaaaccccgataaaagttaaaagcgttcaggtaggtaaagttgaatcggtaagactcaattttgacgataataacgtactggtaaaagtccgtattgaacctgaagcagagcagctactacgagaaaacaccaagttctgggttgttcggcccagagtaggaaccgaaggcatcagtggtctcggcacactgctttctggtgcctacatagagatgagccccggagataaaggggtagagcccaaacgctatcaaggccttgaagagcccccggtaacctcagattcagaaccgggcctgcgcctgcaactcaccagtgataatgctcactctcttagcgttggcgaaaccgtcctgtatcggggctttccagttgggcgtatagaacaagtagaatttgaccctaaagccagagaagcccggtacggtttattcatcaaagcaccctatgatcagttagtcacaacaaacagccgtttctggaacatgagtggtgtacagcttaacctatcagccgatggtgtaaatgttcagacaggctcactggacacgctgctatccggtggtgttacctttgatgttttatcgggagagaacccaggtaaaaaatcgcaagatggtgacagcttccgtctctattcagacttctcgagtgttacggagcaaccttacgcgtattataacgaatacctattgctatttgatcagtcggtgagaggacttgttgccggggcgccagttgaattcagaggagtaagaattggtacggtagagaaaatatctttccagatcggcgagctcaccggtgaaagtgatccgcgtatcccggttatcatcagacttgagcctggccgtctgggctttgatgatgcagagaatgtgttaacgggcgcccatgaaaagctccgctactgggtacaacaaggcatgcgcgctagtcttaaatcgggcaacctgctgacaggaagcctgtttgttgacttcgacctctaccctgatgctgacaaagccaatgtcatcgaatttgaaggctatcctgttatacccacaatatcgggcggcttactgcaattagaaaacaaactgattgcagtcttgaacaaaatagaacaacttcaggtggagcccgttattgctcagttggatagcaccctgagcagttcagaacaagcgattcaacagcttgaagcaacccttgagcagatcgaaaagctgacccgtagcaaggatacccgcgcactacctgaagagctcaaatcgaccttaaaagaactacaaaccatggcgcagggcttttcgccggatagtcgcctctatcaggagatgaatcgctctctggatacgctacagcaaacccttaagcagctacaaccgatcctgaaaacactggatgaaaagccgaacgccctgatcttcgacgcaccgaaaagtagtgatccaattcctggaggagataccaatgaataa

SEQ ID NO: 6419 - protein, 550 aa, Neptuniibacter caesariensis
MKSIEKPMDNQPIITSKRSVSSIWLLPLIALCIGGWMVYQDWANRGQLVTISFITADGIEEGKTPIKVKSVQVGKVESVRLNFDDNNVLVKVRIEPEAEQLLRENTKFWVVRPRVGTEGISGLGTLLSGAYIEMSPGDKGVEPKRYQGLEEPPVTSDSEPGLRLQLTSDNAHSLSVGETVLYRGFPVGRIEQVEFDPKAREARYGLFIKAPYDQLVTTNSRFWNMSGVQLNLSADGVNVQTGSLDTLLSGGVTFDVLSGENPGKKSQDGDSFRLYSDFSSVTEQPYAYYNEYLLLFDQSVRGLVAGAPVEFRGVRIGTVEKISFQIGELTGESDPRIPVIIRLEPGRLGFDDAENVLTGAHEKLRYWVQQGMRASLKSGNLLTGSLFVDFDLYPDADKANVIEFEGYPVIPTISGGLLQLENKLIAVLNKIEQLQVEPVIAQLDSTLSSSEQAIQQLEATLEQIEKLTRSKDTRALPEELKSTLKELQTMAQGFSPDSRLYQEMNRSLDTLQQTLKQLQPILKTLDEKPNALIFDAPKSSDPIPGGDTNE

SEQ ID NO: 6420 - DNA, 1647 bp, Vibrio sp. Ex25
  CDS (1)..(1647): transl_table=11
atgagtgatgagaacaacgtaaccgctcaaataaaaccgcaaaagcagatttctgcgatctggattgtcccgatccttgcgctagccatgggagcgtggatgctgttccaatacatcaacagtacaggcccacaaattactctccaactgccaaccgcagatgggattgaggttggtaaaaccgaaatccgagcactgaatgttaaagtcggtctgattaccgaagtcactctcagtgaaaactacgatcacatcatcgctaaggcacaaatgaacaaggatgcagaacgcatgctgcgtgacgataccatgttctgggtggtgaagcctcgtattggccgtgatggtgtttcaggtttagagaccttgctgtctggcgcttatatccaacttcagccgggtaaatctaaagtagaaaaggatcactttacggtattagatgtgccaccagtcgcttctcctgatgcagaaggcctacgtcttgtattaacacaccgcgaagctggcaaactaggtgttggtgacccggttatttataaaggctttactgttggtcgtgtagagaaaaccagctttgatgttgatactcgcaaagcgctgtatcaactctttattttcaaaccttatgacagcttagtgcgcactcgtactaagttttggctgaattctggtgttgatttacagctcaatgccgaagggtttgaagttaagtttggctcgctagagagcatgctaacgggtggcgttaccttcgataccgttccaggtcttgagtccggcgaactactcacagaagacatggttaacttccgcttgtacgatgatattaagcagctgagagaaggcatgtacgatgactacattgagttcgtcatgttatttgatgaatcggtacgtggcttaaaagcgaatgcgcctgttgagtaccgcggtcttcgtatcggtaccgtgacgagagtaccgatgcgtttaccaacaccagaagaaaacttctctgcgaaaaaaattccagttttggtgcgcgttgagctcggtcgagtgtacggagatttagaatcccaatctttatcaatgttcaaagaaaagttgaaggaagagtttgctcgcggtctccgtggcaccttaaagactggtaacttgttaactggcgcgctttatattgatgcagacttttaccctaatgatgatcagtacgttccaagtgaatttgaaggtttagatgttttcccaaccatgcgtggtggttttgcccaagtccagcgccaagtcaatgacttcctaaataagattaatagcttaccaatggaagaaacgcttaactctctcaattcaacgttaaaaacgtcggaaaagacgttggcgtcagcagaacgtgtcgcggacagtattgataaacttttaaatcaaaaagagactcaagagatcccaacagatattcgccaaagcttgcagcagctgcaaaaaacactcgatggttatggaccaaactcaaccatgtacaatgaaatggaagccacgctcaaagaactagaaagcgtgatgacagagtttaaacccgtacttaaacagctaaacgaaaagccaaactctctcgtgtttggagaagatgaaatcagtgacccaatcccagttaaaggccaaaactaa

SEQ ID NO: 6421 - protein, 548 aa, Vibrio sp. Ex25
MSDENNVTAQIKPQKQISAIWIVPILALAMGAWMLFQYINSTGPQITLQLPTADGIEVGKTEIRALNVKVGLITEVTLSENYDHIIAKAQMNKDAERMLRDDTMFWVVKPRIGRDGVSGLETLLSGAYIQLQPGKSKVEKDHFTVLDVPPVASPDAEGLRLVLTHREAGKLGVGDPVIYKGFTVGRVEKTSFDVDTRKALYQLFIFKPYDSLVRTRTKFWLNSGVDLQLNAEGFEVKFGSLESMLTGGVTFDTVPGLESGELLTEDMVNFRLYDDIKQLREGMYDDYIEFVMLFDESVRGLKANAPVEYRGLRIGTVTRVPMRLPTPEENFSAKKIPVLVRVELGRVYGDLESQSLSMFKEKLKEEFARGLRGTLKTGNLLTGALYIDADFYPNDDQYVPSEFEGLDVFPTMRGGFAQVQRQVNDFLNKINSLPMEETLNSLNSTLKTSEKTLASAERVADSIDKLLNQKETQEIPTDIRQSLQQLQKTLDGYGPNSTMYNEMEATLKELESVMTEFKPVLKQLNEKPNSLVFGEDEISDPIPVKGQN

SEQ ID NO: 6422 - DNA, 1656 bp, Alteromonadales bacterium TW-7
  CDS (1)..(1656): transl_table=11
atgaccgaaactgcccaagtaacagatgaaccaagaatctctgctatctggattattccagccatagcgctttttgtcggcgtgtggatgctttatcaatatcaagcaaataaaggccccactatatatattgagatgccgcaagccgagggcattattgcaggtaaaacagaaataaaagtgcgcagtgtaaaaatagggcaaatagacagcgttcgtttatccgactcccaagacagtgtgattgcacgggctcaaatagataaaagctatgaagacttacttaccgacgacgcaaaaatatgggtggtaaaaccacgtatagatgaaaccggcataagtggaatgagtactttactctctggggtatatttagaatttgcaccgggcgaaagtaatacacttaaagaaaatttcaccctgcaagaagaacctgcattaataggcaaagacgtgcaaggtggtcgctttaaactacttagttataacgcagaagtacttgatgttagtaccggaatattttttaagaattataaaattggccaaatagaaaccgccacatttgattgggaaaaccaagcaatgaagtacggtatatttataaaagcgccttaccaaaacttaattaccaacaactcaattttttgggtcaacgctggtatagaaattgatttatctgctgatggcataaatattaatacaggctctttgagtaagcttttaaaaggcggaatttcagttggcttacccgataaccaaacaccaggggaaatagctaacgatggtcacaatttctcacttagccaaagctataaagaagcactagaagaacgcttttacgactttgactattacataatagattttgaacaatcaattagaggcctcagacccggtgcccctgttgaatatcgtggtattcgcattggtacagtagttgaagcgcctgcaaacataattgttaatggtaaacctgctcactttaaaagtgcaaacacatcagtacctgttcttataaaaatagagtacgggcgtatttatcaccacagcgcaacagctaaagacttttggaaagaaagcttaaaaggctggatagaaattggcatgcgcgcctctttaaagcccggaaatcttttaactggtgcagtttatgttgattttgatatgtaccccgatgcgccagaagcggagtttgaaaaactgggacagtataccgtttttcctagtatatcgagcggaattaccgtacttgccgatcaggtttctgatgtattaaacaaggttaataatttaaaagttgaagaaagcttagcccaaatacaagttgcctttgccgactatcagtctcttgcaaatgaaatgcgcacactattaaatgaaaaagatactcaaaatttacccggtgatataaatcgtaactttgcaaaaatgaccaaaagcatggagcaatttgaagtgaccatgcgacaatttgataaaacaatggcgagttatcaggctgggtctgaatttcatcatcaattacaacaaacactgcgtgaatttaagcgcttaagtgaagaaatacaacctttgacacgcggcttaaatgagcaaccaaacatgctaatttttgacaaatcactgcccgcagatccaataccaaggaagcaataa

SEQ ID NO: 6423 - protein, 551 aa, Alteromonadales bacterium TW-7
MTETAQVTDEPRISAIWIIPAIALFVGVWMLYQYQANKGPTIYIEMPQAEGIIAGKTEIKVRSVKIGQIDSVRLSDSQDSVIARAQIDKSYEDLLTDDAKIWVVKPRIDETGISGMSTLLSGVYLEFAPGESNTLKENFTLQEEPALIGKDVQGGRFKLLSYNAEVLDVSTGIFFKNYKIGQIETATFDWENQAMKYGIFIKAPYQNLITNNSIFWVNAGIEIDLSADGININTGSLSKLLKGGISVGLPDNQTPGEIANDGHNFSLSQSYKEALEERFYDFDYYIIDFEQSIRGLRPGAPVEYRGIRIGTVVEAPANIIVNGKPAHFKSANTSVPVLIKIEYGRIYHHSATAKDFWKESLKGWIEIGMRASLKPGNLLTGAVYVDFDMYPDAPEAEFEKLGQYTVFPSISSGITVLADQVSDVLNKVNNLKVEESLAQIQVAFADYQSLANEMRTLLNEKDTQNLPGDINRNFAKMTKSMEQFEVTMRQFDKTMASYQAGSEFHHQLQQTLREFKRLSEEIQPLTRGLNEQPNMLIFDKSLPADPIPRKQ

SEQ ID NO: 6424 - DNA, 1662 bp, Verrucomicrobium spinosum DSM 4136
  CDS (1)..(1662): transl_table=11
atgagtgaaaccgcccccaacgaagaaaaaggaaactccacccctccgccagagccaaaggccgtggtgcgccgcaaccggcgctggagcaccgtctgggtggtgccgctcgtagcgctggtgctggctggctggctggtgtggcagcattattcggaaaagggcgtgctcgtgcacgtccgcttcgagacggcggagagcattgtgagcggcaagacggagatccgctgccgctcggtgcgcatcggcgtggtggaatctgtggatctctcacccgacctccagtccgtagtggtggacatccgggtaaatccggaaaatgagcaactgcttcgagatggagcacgcttctgggtggtgcggccccgtgtctccccctcggatgtgtccggactgggcaccttgatcactggttcttacatcgaactggacccgggggatggcacccgcatggtgcaccatttcaccggtctggagcagcccccggtcaccaagagcagcgtgcccgggttgcgcctcaccctcgtggcggacaatcccggatccctggtggcaggctcccccatctatttccgcggcttcgaagtggggcgcatcgagcggcggagttttgacatcaatgtgcgccggaccattctggatgtcttcatccgtgagcagtacgccagcctggtccatgagaacaccgccttttggaacaccagcggcatcgatgtgagcgctggtgccgaggggttccgtgtccgcaccccttccctccaggccatgatggcgggcggagccagttttgccgtgcctgagggcaagtcccccggcaagcaggctaccaacggcacgagctaccggctctacccggacgaggagtccacacgacagcaggacttcaaccccgaccgcaaatgcctggtcttctttgaccagtccatccgcggtctcaagaagggcgcaccggtcgagtttcgcggcatcccatttggccgggtggtcgagatctccctcagacacggcaccgccgatgacaagcgcattcccgtggtgatcgaagtggatcccggcatcctcctccagaacgaatcggatgcgcgggctgaccgcgatgccctgttcgccaaggcggtgcgagagggcctgcgcgcccgccttggcaccggctccctgctcactggcgccctgtttgtggatgtggacttcatccctgatgcgcctccggcagaactcacgcgcatgggtgaatatcaggtgctgcccagccattcctccgggctcgtgcagctcgaagaaaaggtcaatgccatcctcgccaagatcaacgccctgcccatcgaggacacgctgcagaagttcggcaccacagcggatgaagtcaccaagaccgtggccgaaacccgggccgtggtggatgaggccaaaaaactgctcgcagcccacgcaacccagaacatgaccgccgaggtgaatgccacgctgaaggaactgcggtcctccgtggaaagcctcggccccgccggcaatgtccagggtgacctccgccgcacgctggacgaattgcgagccgcgttgagagccttcaagaccctttccgacacggtcgaggaaaaaccgaattcgttgatctttggccgggagaagggtgcggatccggtgccgcgggcgaggaagtga

SEQ ID NO: 6425 - protein, 553 aa, Verrucomicrobium spinosum DSM 4136
MSETAPNEEKGNSTPPPEPKAVVRRNRRWSTVWVVPLVALVLAGWLVWQHYSEKGVLVHVRFETAESIVSGKTEIRCRSVRIGVVESVDLSPDLQSVVVDIRVNPENEQLLRDGARFWVVRPRVSPSDVSGLGTLITGSYIELDPGDGTRMVHHFTGLEQPPVTKSSVPGLRLTLVADNPGSLVAGSPIYFRGFEVGRIERRSFDINVRRTILDVFIREQYASLVHENTAFWNTSGIDVSAGAEGFRVRTPSLQAMMAGGASFAVPEGKSPGKQATNGTSYRLYPDEESTRQQDFNPDRKCLVFFDQSIRGLKKGAPVEFRGIPFGRVVEISLRHGTADDKRIPVVIEVDPGILLQNESDARADRDALFAKAVREGLRARLGTGSLLTGALFVDVDFIPDAPPAELTRMGEYQVLPSHSSGLVQLEEKVNAILAKINALPIEDTLQKFGTTADEVTKTVAETRAVVDEAKKLLAAHATQNMTAEVNATLKELRSSVESLGPAGNVQGDLRRTLDELRAALRAFKTLSDTVEEKPNSLIFGREKGADPVPRARK

SEQ ID NO: 6426 - DNA, 24 bp, Artificial sequence
  primer
atggaatctaataatggggaagcc

SEQ ID NO: 6427 - DNA, 24 bp, Artificial sequence
  primer
ttattgtttcgccctcttcggctc

SEQ ID NO: 6428 - protein, 567 aa, Artificial sequence
  consensus sequence
  Variant (2)..(3): Xaa in position 2 to 3 is any amino acid
  Variant (5)..(6): Xaa in position 5 to 6 is any amino acid
  Variant (8)..(9): Xaa in position 8 to 9 is any amino acid
  Variant (11)..(13): Xaa in position 11 to 13 is any amino acid
  Variant (15)..(25): Xaa in position 15 to 25 is any amino acid
  Variant (28)..(35): Xaa in position 28 to 35 is any amino acid
  Variant (37)..(37): Xaa in position 37 is any amino acid
  Variant (39)..(41): Xaa in position 39 to 41 is any amino acid
  Variant (45)..(50): Xaa in position 45 to 50 is any amino acid
  Variant (52)..(53): Xaa in position 52 to 53 is any amino acid
  Variant (55)..(55): Xaa in position 55 is any amino acid
  Variant (57)..(60): Xaa in position 57 to 60 is any amino acid
  Variant (62)..(63): Xaa in position 62 to 63 is any amino acid
  Variant (65)..(67): Xaa in position 65 to 67 is any amino acid
  Variant (69)..(87): Xaa in position 69 to 87 is any amino acid
  Variant (92)..(92): Xaa in position 92 is any amino acid
  Variant (94)..(98): Xaa in position 94 to 98 is any amino acid
  Variant (100)..(100): Xaa in position 100 is any amino acid
  Variant (104)..(104): Xaa in position 104 is any amino acid
  Variant (110)..(110): Xaa in position 110 is any amino acid
  Variant (113)..(124): Xaa in position 113 to 124 is any amino acid
  Variant (125)..(131): Xaa in position 125 to 131 is any or no amino acid
  Variant (133)..(134): Xaa in position 133 to 134 is any amino acid
  Variant (136)..(137): Xaa in position 136 to 137 is any amino acid
  Variant (140)..(146): Xaa in position 140 to 146 is any amino acid
  Variant (148)..(151): Xaa in position 148 to 151 is any amino acid
  Variant (153)..(157): Xaa in position 153 to 157 is any amino acid
  Variant (159)..(162): Xaa in position 159 to 162 is any amino acid
  Variant (164)..(164): Xaa in position 164 is any amino acid
  Variant (166)..(172): Xaa in position 166 to 172 is any amino acid
  Variant (175)..(175): Xaa in position 175 is any amino acid
  Variant (177)..(192): Xaa in position 177 to 192 is any amino acid
  Variant (194)..(196): Xaa in position 194 to 196 is any amino acid
  Variant (198)..(198): Xaa in position 198 is any amino acid
  Variant (200)..(207): Xaa in position 200 to 207 is any amino acid
  Variant (210)..(211): Xaa in position 210 to 211 is any amino acid
  Variant (214)..(221): Xaa in position 214 to 221 is any amino acid
  Variant (223)..(228): Xaa in position 223 to 228 is any amino acid
  Variant (231)..(235): Xaa in position 231 to 235 is any amino acid
  Variant (238)..(239): Xaa in position 238 to 239 is any amino acid
  Variant (241)..(242): Xaa in position 241 to 242 is any amino acid
  Variant (244)..(280): Xaa in position 244 to 280 is any amino acid
  Variant (281)..(282): Xaa in position 281 to 282 is any or no amino acid
  Variant (284)..(285): Xaa in position 284 to 285 is any amino acid
  Variant (287)..(287): Xaa in position 287 is any amino acid
  Variant (291)..(292): Xaa in position 291 to 292 is any amino acid
  Variant (297)..(299): Xaa in position 297 to 299 is any amino acid
  Variant (301)..(303): Xaa in position 301 to 303 is any amino acid
  Variant (305)..(305): Xaa in position 305 is any amino acid
  Variant (307)..(322): Xaa in position 307 to 322 is any amino acid
  Variant (323)..(330): Xaa in position 323 to 330 is any or no amino acid
  Variant (332)..(336): Xaa in position 332 to 336 is any amino acid
  Variant (338)..(338): Xaa in position 338 is any amino acid
  Variant (340)..(356): Xaa in position 340 to 356 is any amino acid
  Variant (357)..(374): Xaa in position 357 to 374 is any or no amino acid
  Variant (378)..(382): Xaa in position 378 to 382 is any amino acid
  Variant (389)..(389): Xaa in position 389 is any amino acid
  Variant (391)..(394): Xaa in position 391 to 394 is any amino acid
  Variant (396)..(397): Xaa in position 396 to 397 is any amino acid
  Variant (399)..(414): Xaa in position 399 to 414 is any amino acid
  Variant (415)..(423): Xaa in position 415 to 423 is any or no amino acid
  Variant (426)..(433): Xaa in position 426 to 433 is any amino acid
  Variant (435)..(442): Xaa in position 435 to 442 is any amino acid
  Variant (444)..(447): Xaa in position 444 to 447 is any amino acid
  Variant (449)..(499): Xaa in position 449 to 499 is any amino acid
  Variant (500)..(532): Xaa in position 500 to 532 is any or no amino acid
  Variant (534)..(559): Xaa in position 534 to 559 is any amino acid
  Variant (561)..(563): Xaa in position 561 to 563 is any amino acid
  Variant (565)..(566): Xaa in position 565 to 566 is any amino acid
SXXWXXPXXAXXXGXXXXXXXXXXXGPXXXXXXXXAXGXXXGKTXXXXXXVXXGXVXXXXLXXDXXXVXXXXXXXXXXXXXXXXXXXFWVVXPXXXXXGXSGLXTLLSGXYIXXXXXXXXXXXXXXXXXXXFXXLXXPPXXXXXXXGXXXXLXXXXXGXXXXGXPXXXXXXXVGXVXXXXXXXXXXXXXXXXFXXXPXDXXXXXXXXFWXXSGXXXXXXXXGXXXXXXSLXXXXXGGXXFXXPXXXXXXXXXXXXXXXXXXXXXXXXXXXXXXXXXXXXXXXFXXSXRGLXXGAPVXXXGXXXGXVXXXXXXXXXXXXXXXXXXXXXXXXVXXXXXPXRXXXXXXXXXXXXXXXXXXXXXXXXXXXXXXXXXXXGLRXXXXXGNLLTGXLXXXXDXXPXXXXXXXXXXXXXXXXXXXXXXXXXPTXXXXXXXXQXXXXXXXXKXXXXPXXXXXXXXXXXXXXXXXXXXXXXXXXXXXXXXXXXXXXXXXXXXXXXXXXXXXXXXXXXXXXXXXXXXXXXXXXXXXXXXXXXXSXXXXXXXXXXXXXXXXXXXXXXXXXXLXXXPXXL

SEQ ID NO: 6429 - protein, 60 aa, Artificial sequence
  protein pattern
  Variant (2)..(2): Xaa in position 2 is any amino acid
  Variant (3)..(3): Xaa in position 3 is Ile or Val
  Variant (4)..(7): Xaa in position 4 to 7 is any amino acid
  Variant (8)..(8): Xaa in position 8 is Phe or Leu
  Variant (9)..(10): Xaa in position 9 to 10 is any amino acid
  Variant (12)..(14): Xaa in position 12 to 14 is any amino acid
  Variant (15)..(15): Xaa in position 15 is any or no amino acid
  Variant (17)..(34): Xaa in position 17 to 34 is any amino acid
  Variant (35)..(35): Xaa in position 35 is any or no amino acid
  Variant (38)..(38): Xaa in position 38 is Ile, Leu or Val
  Variant (40)..(40): Xaa in position 40 is any amino acid
  Variant (42)..(42): Xaa in position 42 is Glu, Gln or Arg
  Variant (43)..(43): Xaa in position 43 is Phe, Ile, Leu or Val
  Variant (44)..(44): Xaa in position 44 is Ala, Asp, Gly or Ser
  Variant (45)..(46): Xaa in position 45 to 46 is any amino acid
  Variant (47)..(47): Xaa in position 47 is Asp, Glu, Gly or Ser
  Variant (48)..(48): Xaa in position 48 is Ile or Val
  Variant (49)..(49): Xaa in position 49 is Ser or Thr
  Variant (50)..(50): Xaa in position 50 is Gly or Asn
  Variant (51)..(51): Xaa in position 51 is Ile, Leu or Val
  Variant (52)..(52): Xaa in position 52 is Asp, Glu, Gly, Asn or Thr
  Variant (54)..(54): Xaa in position 54 is Ile or Leu
  Variant (55)..(55): Xaa in position 55 is Phe, Ile, Leu, Met or Val
  Variant (56)..(56): Xaa in position 56 is Ala, Ser or Thr
  Variant (58)..(58): Xaa in position 58 is Ala, Asp, Asn, Ser or Val
  Variant (59)..(59): Xaa in position 59 is Phe or Tyr
GXXXXXXXXXDXXXXVXXXXXXXXXXXXXXXXXXXFWXVXPXXXXXXXXXXXTXXXGXXI

SEQ ID NO: 6430 - protein, 21 aa, Artificial sequence
  protein pattern
  Variant (2)..(5): Xaa in position 2 to 5 is any amino acid
  Variant (6)..(6): Xaa in position 6 is Asn, Pro, Ser or Thr
  Variant (7)..(7): Xaa in position 7 is Ala or Gly
  Variant (8)..(8): Xaa in position 8 is Asn or Ser
  Variant (10)..(10): Xaa in position 10 is Ile, Leu or Val
  Variant (12)..(12): Xaa in position 12 is Glu, Gly or Ser
  Variant (13)..(13): Xaa in position 13 is Ala, Gln or Ser
  Variant (15)..(16): Xaa in position 15 to 16 is any amino acid
  Variant (17)..(20): Xaa in position 17 to 20 is any or no amino acid
RXXXXXXXLXTXXLXXXXXXD

SEQ ID NO: 6431 - protein, 26 aa, Artificial sequence
  protein pattern
  Variant (2)..(3): Xaa in position 2 to 3 is any or no amino acid
  Variant (5)..(5): Xaa in position 5 is any amino acid
  Variant (6)..(7): Xaa in position 6 to 7 is any or no amino acid
  Variant (11)..(12): Xaa in position 11 to 12 is any amino acid
  Variant (13)..(13): Xaa in position 13 is Gly or Asn
  Variant (14)..(14): Xaa in position 14 is Ala or Ser
  Variant (15)..(15): Xaa in position 15 is Pro, Ser or Thr
  Variant (16)..(16): Xaa in position 16 is Ile, Leu or Val
  Variant (17)..(17): Xaa in position 17 is Asp or Glu
  Variant (18)..(19): Xaa in position 18 to 19 is any amino acid
  Variant (21)..(22): Xaa in position 21 to 22 is any amino acid
  Variant (23)..(23): Xaa in position 23 is Phe, Ile, Leu, Met or Val
  Variant (25)..(25): Xaa in position 25 is any amino acid
FXXSXXXRGLXXXXXXXXXGXXXGXV

SEQ ID NO: 6432 - protein, 28 aa, Artificial sequence
  protein pattern
  Variant (2)..(2): Xaa in position 2 is Ile or Val
  Variant (3)..(4): Xaa in position 3 to 4 is any amino acid
  Variant (6)..(6): Xaa in position 6 is any amino acid
  Variant (8)..(9): Xaa in position 8 to 9 is any amino acid
  Variant (10)..(10): Xaa in position 10 is Ile, Leu or Val
  Variant (11)..(13): Xaa in position 11 to 13 is any amino acid
  Variant (14)..(14): Xaa in position 14 is Ala, Ser, Thr or Val
  Variant (15)..(15): Xaa in position 15 is any amino acid
  Variant (16)..(16): Xaa in position 16 is Phe or Trp
  Variant (18)..(19): Xaa in position 18 to 19 is any amino acid
  Variant (22)..(22): Xaa in position 22 is Phe, Ile, Leu, Met or Val
  Variant (23)..(23): Xaa in position 23 is Ala, Asp, Glu, Asn, Gln or Thr
  Variant (24)..(24): Xaa in position 24 is Phe, Ile, Leu, Met or Val
  Variant (25)..(26): Xaa in position 25 to 26 is any amino acid
  Variant (27)..(27): Xaa in position 27 is Asp, Gly, Asn, Ser or Thr
  Variant (28)..(28): Xaa in position 28 is Ala, Gly, Ser or Thr
FXXXPXDXXXXXXXXXWXXSGXXXXXXX

SEQ ID NO: 6433 - protein, 43 aa, Artificial sequence
  protein pattern
  Variant (2)..(3): Xaa in position 2 to 3 is any amino acid
  Variant (4)..(4): Xaa in position 4 is any or no amino acid
  Variant (7)..(10): Xaa in position 7 to 10 is any amino acid
  Variant (11)..(11): Xaa in position 11 is Asp, Gly or Ser
  Variant (12)..(13): Xaa in position 12 to 13 is any amino acid
  Variant (15)..(18): Xaa in position 15 to 18 is any amino acid
  Variant (20)..(24): Xaa in position 20 to 24 is any amino acid
  Variant (26)..(26): Xaa in position 26 is any amino acid
  Variant (27)..(27): Xaa in position 27 is Ile, Leu, Met or Val
  Variant (28)..(29): Xaa in position 28 to 29 is any amino acid
  Variant (31)..(31): Xaa in position 31 is any amino acid
  Variant (32)..(32): Xaa in position 32 is Pro or Ser
  Variant (33)..(33): Xaa in position 33 is Ile or Val
  Variant (34)..(34): Xaa in position 34 is any amino acid
  Variant (35)..(35): Xaa in position 35 is Phe or Tyr
  Variant (36)..(36): Xaa in position 36 is Asp, Glu, Lys or Arg
  Variant (37)..(39): Xaa in position 37 to 39 is any amino acid
  Variant (42)..(42): Xaa in position 42 is any amino acid
  Variant (43)..(43): Xaa in position 43 is Ile or Val
LXXXPPXXXXXXXGXXXXLXXXXXGXXXXGXXXXXXXXXVGXX

SEQ ID NO: 6434 - protein, 26 aa, Artificial sequence
  protein pattern
  Variant (3)..(3): Xaa in position 3 is any amino acid
  Variant (4)..(4): Xaa in position 4 is Ile or Val
  Variant (5)..(5): Xaa in position 5 is any amino acid
  Variant (6)..(6): Xaa in position 6 is Ile, Leu or Val
  Variant (7)..(9): Xaa in position 7 to 9 is any amino acid
  Variant (10)..(10): Xaa in position 10 is Asn, Gln, Ser or Thr
  Variant (11)..(11): Xaa in position 11 is Ala or Gly
  Variant (12)..(12): Xaa in position 12 is Asp, Glu, Gln or Ser
  Variant (14)..(14): Xaa in position 14 is Ile, Leu or Met
  Variant (15)..(18): Xaa in position 15 to 18 is any amino acid
  Variant (20)..(20): Xaa in position 20 is any amino acid
  Variant (21)..(21): Xaa in position 21 is Ile or Val
  Variant (22)..(22): Xaa in position 22 is Lys or Arg
  Variant (23)..(25): Xaa in position 23 to 25 is any amino acid
  Variant (26)..(26): Xaa in position 26 is Ile, Leu or Val
GPXXXXXXXXXXGXXXXXTXXXXXXX

SEQ ID NO: 6435 - protein, 19 aa, Artificial sequence
  protein pattern
  Variant (2)..(2): Xaa in position 2 is Phe, Ile, Leu, Met or Val
  Variant (3)..(3): Xaa in position 3 is any amino acid
  Variant (4)..(4): Xaa in position 4 is Ala, Ile, Leu or Val
  Variant (5)..(7): Xaa in position 5 to 7 is any amino acid
  Variant (10)..(11): Xaa in position 10 to 11 is any amino acid
  Variant (12)..(12): Xaa in position 12 is Ile, Leu, Met or Val
  Variant (13)..(14): Xaa in position 13 to 14 is any amino acid
  Variant (17)..(17): Xaa in position 17 is Ala, Ile, Leu or Val
  Variant (18)..(18): Xaa in position 18 is Ala, Ser or Thr
  Variant (19)..(19): Xaa in position 19 is Phe or Val
GXXXXXXSLXXXXXGGXXX

SEQ ID NO: 6436 - DNA, 1299 bp, Escherichia coli
  CDS (1)..(1299): transl_table=11
atgcgagttgtcatactgggaagtggtgtggtaggcgttgccagcgcctggtacttaaatcaggcaggacatgaggtcaccgtcattgatcgggagccgggggccgccctggaaaccagtgccgcgaatgccgggcaaatctcccccggatatgctgcaccgtgggcggcaccaggtgtgcctttaaaagcgattaaatggatgttccagcgccatgcgccgctggcggttcgtctcgacggtacgcagttccagttgaaatggatgtggcaaatgttacgtaactgcgacaccagccactacatggaaaacaaagggcggatggtgcgtctggcggaatacagccgtgattgcctgaaagcattgcgcgccgaaaccaatattcagtatgaagggcgtcagggtgggacgctgcaactgttccgtaccgaacaacagtatgaaaatgcgacccgcgatatcgccgtgctggaagatgccggcgtaccgtatcagctgctggaatccagccgcctggcggaagtggagcccgcgctggcagaagtggcgcacaaactgacgggcggcctgcagttacccaatgatgaaaccggagactgtcagctatttacccagaatctggcgcggatggcggagcaggcgggggttaaattccgctttaatacgcccgttgaccaactgctttgcgacggcgagcaaatctacggcgtgaagtgtggcgatgaagtgattaaggccgatgcgtatgtgatggcgtttggttcttactcgacggcgatgctcaaaggcattgttgatattccggtgtatccgctgaaaggctactcgctgaccattccaattgcgcaggaagatggtgcgccggtatccaccattcttgatgaaacctacaaaatcgccattacccgtttcgataaccgcattcgtgttggcggaatggcggagattgttggttttaataccgagctgttgcaaccgcgtcgtgaaacgctggagatggtggttcgcgatctctatccacgcggcggtcatgtcgagcaggcgactttctggactggtctgcgcccgatgacgccagacggcacgccggttgtcgggcgtacacgctttaaaaatctgtggctgaataccggtcacggcacgctcggctggacgatggcttgcggttccggtcagttgttaagcgatctgctctctggtcgcacgccagcgatcccatatgaggatctaagcgtagcgcgctacagccgtggatttacgccatcacgtccgggccatttacatggcgcacacagctaa

SEQ ID NO: 6437 - protein, 432 aa, Escherichia coli
MRVVILGSGVVGVASAWYLNQAGHEVTVIDREPGAALETSAANAGQISPGYAAPWAAPGVPLKAIKWMFQRHAPLAVRLDGTQFQLKWMWQMLRNCDTSHYMENKGRMVRLAEYSRDCLKALRAETNIQYEGRQGGTLQLFRTEQQYENATRDIAVLEDAGVPYQLLESSRLAEVEPALAEVAHKLTGGLQLPNDETGDCQLFTQNLARMAEQAGVKFRFNTPVDQLLCDGEQIYGVKCGDEVIKADAYVMAFGSYSTAMLKGIVDIPVYPLKGYSLTIPIAQEDGAPVSTILDETYKIAITRFDNRIRVGGMAEIVGFNTELLQPRRETLEMVVRDLYPRGGHVEQATFWTGLRPMTPDGTPVVGRTRFKNLWLNTGHGTLGWTMACGSGQLLSDLLSGRTPAIPYEDLSVARYSRGFTPSRPGHLHGAHS

SEQ ID NO: 6438 - DNA, 1302 bp, Xenorhabdus bovienii
  CDS (1)..(1302): transl_table=11
atgaaagtccttattttaggcggtggcgttattggcgtcaccagtgcgtggtatttggcacaggaaggccatgaagtgactgtggttgatcgccagaatagtgccgctgaagaaacgagtgcaggtaacgctggtcagatctcaccgggatatgcaacgccatggggagcaccgggaataccactgaaagcagtaaaatggatgtttcaacgccatgcaccactggctattcgccctgatggttcactgtttcagctacgctggatgtggcaaatgctgcgcaactgtgatgcagaccattacgccatgaataaaagcaggatggtgcgattggcagaatatagccgtgattgcattaaacggttaagggcagatactggcatgcaatatgaagggcgtcagggaggaactctgcaattatttagaaccgccaaacagtttgataatgccgccaatgatatcgcagtattggaacaagaaggtgttccttaccaattattgaccgcagaacaactggcatcagtggagcctgcacttgcccatgtttctcataaattggcgggtgggttacaactgccgaatgatgaaacgggtgattgtcagatatttaccaaggcactggcaaaaatggcagaagaggcgggagtcaagtttgtatttagcaatcaggttaaacagattctggtggatggaaacaaaatcacgggtgtccagtgtgatgatggcattatgacggcggataactacgtggtggcgatgggatcttattctaccgacatgctgaaagaattcgttaaaatccctgtttatccgctgaaaggctattctctgacgatgccgattatggatgaagcaagagcgccaacctcaactgtgctggatgaaacttacaagatagctattactcgttttgataaccgtattcgcgttggtggcatggcagaaatggttggtttcaatatgaatgtgccgaataatcgctgtgaaacgttaaaaatggttgtgcaggatctctaccacagcggtggcaatattgctgaagctacattctggactgggttacgcccaatgacgccagatggtactcctatcgtcggcccaaccaaatatagtaatctctatttaaacacagggcatggaacgctaggctggacgatggcctgtggttcagggaaattattgtctgatttaatttctggtaagacgccggaaatcgcggcagatgatctctcggtatttagatacatcaatggattcaatacaaaagtgcttcgagtgaagcatcgtttacatacggcataa

SEQ ID NO: 6439 - protein, 433 aa, Xenorhabdus bovienii
MKVLILGGGVIGVTSAWYLAQEGHEVTVVDRQNSAAEETSAGNAGQISPGYATPWGAPGIPLKAVKWMFQRHAPLAIRPDGSLFQLRWMWQMLRNCDADHYAMNKSRMVRLAEYSRDCIKRLRADTGMQYEGRQGGTLQLFRTAKQFDNAANDIAVLEQEGVPYQLLTAEQLASVEPALAHVSHKLAGGLQLPNDETGDCQIFTKALAKMAEEAGVKFVFSNQVKQILVDGNKITGVQCDDGIMTADNYVVAMGSYSTDMLKEFVKIPVYPLKGYSLTMPIMDEARAPTSTVLDETYKIAITRFDNRIRVGGMAEMVGFNMNVPNNRCETLKMVVQDLYHSGGNIAEATFWTGLRPMTPDGTPIVGPTKYSNLYLNTGHGTLGWTMACGSGKLLSDLISGKTPEIAADDLSVFRYINGFNTKVLRVKHRLHTA

SEQ ID NO: 6440 - DNA, 1326 bp, Klebsiella pneumoniae
  CDS (1)..(1326): transl_table=11
ttgttctttaactgttacggagtcgctatgcgtgtcgtcatactgggaagtggggtggttggggtagccagcgcgtgttatttgagtcaggcgggtcatgacgtgacggtcatcgaccgtcagcccggtccggcagaggagaccagcgcggccaacgccgggcagatttctcccggctatgcggcgccctgggcggcgccgggggtgccgctgaaggcgatcaaatggatgtttcagcgccatgcgccgctggcgatcggtcttgacggcacctcgttccagttgaagtggatgtggcagatgctgcgcaactgcgacacccgccactatatggagaacaaaggccgtatggtgcgcctggcggagtacagccgcgactgcctgaaggcgctgcgcgacaccaccggcattcagtatgaagggcgccagggcgggacgctgcagctgttccgtaccgccaaacagtatgaaaatgccacccgcgacatcgcggtgctggaggacgccggcgtgccgtatcagctgctggaagcgaagcggttggcggaagtggagccggcgctggcggaggtcagccacaaactgaccggcggcctgcgtctgccaaatgatgaaaccggcgactgccagctgtttaccacccgtctggcggcgatggcggagcaggccggcgtgaccttccgcttcaacaccgcagtggatgcgctgctgcacgagggcgatcgcattgccggggtgaaatgcggcgatgagattatcaagggcgatgcctatgtgatggccttcggctcctactcgacggcgatgcttaaagggctggtggatataccggtctacccgctgaaaggctactcattaactattccgatcgctcaggaggacggcgcgccggtttcaactatccttgatgagacttacaaaatcgccatcacccgcttcgatcagcgcattcgggtcggcggcatggcggagatcgtcggttttaacaaagcgctgctgcagccgcgtcgcgaaaccctggagatggtggtgcgcgatctgttcccgcgcggcggccacgtggagcaggcgactttctggacgggcctgcggccgatgacgccggacggcacgccggtggtcggccgcacagcgtataaaaatctgtggctcaacaccggccacggcacgcttggctggaccatggcctgcggctccgggcagcttatcagcgatctgatctccggccgcacgccggcgatcccttacgacgatctggcggttgcccgctacagccccggttttaccccggcgcgcccgcagcacctgcacggcgcacacaactaa

SEQ ID NO: 6441 - protein, 441 aa, Klebsiella pneumoniae
LFFNCYGVAMRVVILGSGVVGVASACYLSQAGHDVTVIDRQPGPAEETSAANAGQISPGYAAPWAAPGVPLKAIKWMFQRHAPLAIGLDGTSFQLKWMWQMLRNCDTRHYMENKGRMVRLAEYSRDCLKALRDTTGIQYEGRQGGTLQLFRTAKQYENATRDIAVLEDAGVPYQLLEAKRLAEVEPALAEVSHKLTGGLRLPNDETGDCQLFTTRLAAMAEQAGVTFRFNTAVDALLHEGDRIAGVKCGDEIIKGDAYVMAFGSYSTAMLKGLVDIPVYPLKGYSLTIPIAQEDGAPVSTILDETYKIAITRFDQRIRVGGMAEIVGFNKALLQPRRETLEMVVRDLFPRGGHVEQATFWTGLRPMTPDGTPVVGRTAYKNLWLNTGHGTLGWTMACGSGQLISDLISGRTPAIPYDDLAVARYSPGFTPARPQHLHGAHN

SEQ ID NO: 6442 - DNA, 1284 bp, Cupriavidus taiwanensis
  CDS (1)..(1284): transl_table=11
atgcgggtggtgatcgtgggcgcgggcgtggtgggcatgacgacggcatggcgcctggccgaggatggccaccaggtgacggtgctggagcgccacgacgggcccggcgaggagaccagctttgccaacggcgggcaactgagctacagctacgtggcgccgctggcgggaccgggcgtgatggccaaggtgcccggctggctgctgcggcgcgattcgccgatgcgctttcgcccggcggcggacccggcgcaatggcgctggctggccgccttcatgtcggcctgcaacgctgccaccagcgaggcgaccacgcgcaagctgctgcggctgggcttttattcgcgcgacctgatgcaggccttcgtggcccggcaccagcatgacgacggcggcgccggcttcagttttgcgcggcgcggcaagttggtggtgcaccgcgacgcggcggcgtttgagtcggcctgccggctgctggactaccaggccagcctgggttgcgaacaacaggcgctggaccgcgacgcctgcgtggcgctggagcccgcgctggcgggtatccgcgaccagatcgccggcgccatccataccccgagcgaagaggtgggagactgccatcgcttctgcctgtcgctggcacggttgctgcaagacgggtcctacgccggcgtgtcgttgcgctttggcaccgtcgtgcaagggctggtgcagcagggtgggcgcgtcaccggggtgcgtacgccggccggcgtggtgcccgccgacgtggtgatcatgtcgggcggcattggcagcgtgccgctgctgcgtccgctgggcgtacgcccgctgctgtggccgctcaagggctacagcatcacggtgccgctggccggcggcgcgcgggcgccgcatatcagcgtgacggatttcgccaacaagatcgtttatgcccggatcggcaatacactgcgggtggcgggcatggccgacctggtgcgcggcggcacccgcatcgatccggagcgggtcgggacgctggtggcgcagacccgcgcgctgtttcccggcatcgtgccggacgagccgctggcgcagctgcagccgtgggccgggctgcgcccggccacgccggacggcctgccgctggtgggaccgtcgcgggtgtcggggctctggctcaacctgggccacggcgcgctggggtttacgctggcgatgggcagtgccggcctgctggccgaccgcctggcggggcgccgccccgccatcgacgcagaagatttcgacgcggcgcgcgcctag

SEQ ID NO: 6443 - protein, 427 aa, Cupriavidus taiwanensis
MRVVIVGAGVVGMTTAWRLAEDGHQVTVLERHDGPGEETSFANGGQLSYSYVAPLAGPGVMAKVPGWLLRRDSPMRFRPAADPAQWRWLAAFMSACNAATSEATTRKLLRLGFYSRDLMQAFVARHQHDDGGAGFSFARRGKLVVHRDAAAFESACRLLDYQASLGCEQQALDRDACVALEPALAGIRDQIAGAIHTPSEEVGDCHRFCLSLARLLQDGSYAGVSLRFGTVVQGLVQQGGRVTGVRTPAGVVPADVVIMSGGIGSVPLLRPLGVRPLLWPLKGYSITVPLAGGARAPHISVTDFANKIVYARIGNTLRVAGMADLVRGGTRIDPERVGTLVAQTRALFPGIVPDEPLAQLQPWAGLRPATPDGLPLVGPSRVSGLWLNLGHGALGFTLAMGSAGLLADRLAGRRPAIDAEDFDAARA

SEQ ID NO: 6444 - DNA, 1305 bp, Cupriavidus taiwanensis
  CDS (1)..(1305): transl_table=11
atgcgcgttctcgtacttggcagtggcgtgattggcgtcaccagtgcgtggtacctggccaaggccggccatgaagtgaccgtggtcgaccgcgaggccggacccgcgctcggcaccagctttgccaatgcgggccagatctcgcccggctacgcgtcgccgtgggccgcgcccggcgtgccgctcaaggcgatcaagtggatgttccaggaacacgcgccgctcagcatccgtccggacggcacgctgttccagctgcaatggatgtggcagatgctgctgaactgcagcgccgggcgctatgccgtcaacaaggagcgcatggtgcggctggccgagtacagccgcgactgcatccgcgcgctgcgcgcggaaacaggcattgcctatgaaggccgccagcaaggcacgctgcaggtgttccgcaccgacgagcagctgcacggcgcggccaaggacatcgcggtgctggaacaggccggggttccctaccagttgctttcgcgcgaagaactcgccgcgagcgaaccggcgctggccgccgtccgccacaagctggccggcggcctgcgccttcccaatgacgaaaccggcgactgcgcgctgttcacgcaacgcctggccaacatggccagcacgcttggcgtccgcttcctgtacaaccgctcgatcgacggcctgatgagccagggcgatgccgtcaccggggccgtggtcgatggcgagccgatgtcggccgacctggtggtggtggcgctgggcagctggtcgacgcagctggtcaagccgttcctgcgcggcatgtccaacctgccggtctatccgctcaagggcttctcgatcacggtgccgctgaccgatgcctcgcgcgggccggtatcgacggtgctggacgaaacctacaaggtagccctgacacgtttcgacgaccgcatccgcgtcggcggcatggcgcagatcgtcggctatgaccgcagcctcgacccggccaagcgccgcacgctcgagcatgtggtgaccgacctgttcccgggcgccggcgatgtcagccaggccaccttctggaccggcctgcgccccatgacgccggacggcacgcccatcgtcggcccgacccaggtgcgcggcctgtggctgaacactggccacggcacgctcggctggaccatggcatgcggctcgggcaagctgctgtcggacctggtgtcgggcaagtcccccgcgatccgcgccgacgacctctcggtcagccgctacctgaagccagcgcgccatcacctggcgccgcgcccggcggccgcctga

SEQ ID NO: 6445 - protein, 434 aa, Cupriavidus taiwanensis
MRVLVLGSGVIGVTSAWYLAKAGHEVTVVDREAGPALGTSFANAGQISPGYASPWAAPGVPLKAIKWMFQEHAPLSIRPDGTLFQLQWMWQMLLNCSAGRYAVNKERMVRLAEYSRDCIRALRAETGIAYEGRQQGTLQVFRTDEQLHGAAKDIAVLEQAGVPYQLLSREELAASEPALAAVRHKLAGGLRLPNDETGDCALFTQRLANMASTLGVRFLYNRSIDGLMSQGDAVTGAVVDGEPMSADLVVVALGSWSTQLVKPFLRGMSNLPVYPLKGFSITVPLTDASRGPVSTVLDETYKVALTRFDDRIRVGGMAQIVGYDRSLDPAKRRTLEHVVTDLFPGAGDVSQATFWTGLRPMTPDGTPIVGPTQVRGLWLNTGHGTLGWTMACGSGKLLSDLVSGKSPAIRADDLSVSRYLKPARHHLAPRPAAA

SEQ ID NO: 6446 - DNA, 1302 bp, Cupriavidus taiwanensis
  CDS (1)..(1302): transl_table=11
atgcatgtgatcgtcatcggcgccggcgcgatcggcgtcagttccgcgtggtacctgcggcaggccggcttcgacgtgaccgtgctcgagcgccgcggcgcgccggcgcaggaagccagcttcggcaatgccggcgtgatcgcgcccggctacgtcacgccctgggccgcgccgggcatgccggccaagatcctgcgcacgctcttcgcgcgcgaggcgccggtgctgttccgccccgccgccgacccggccatgtggcgctggatcgcgcgctggctgcgcgaatgccggctcgagcgctaccgcgccaacaagctgcgcatgcagcggctggcgttctacagccgcgcctgcctgcaccggctgcgcagcgagctggacatcgactacgagcagtcgcagggatacctgcagctgttccgcaccgcgcgcgacctggatctggccagccccgccatcgccctgctgcgcgagaaccacgtgccgcaccggctggtcagcgccggcgaatgccgccagatcgaaccgggcctggccgcggacacgccgctggccggcggactgcatctgcccgaggatgaatccggcaactgcccgatgttcgtgcgcgcgctgcaccggcatgcgcaggccgcgggcgtgtcgttccgcttcgacaccagggtgacgcgcatccggccgggccacgccggcaagctggagctggaactgtcccagcccggcggccagggtgcggccgaggtgctgagcgccgagcgcgtgctgcttgccgccggcgccgacagtgccgcactgctgcgcccgctgggcttgcgcgtgccgctgtatccggtcaagggctattcggtgacggtaatgatccgcgacgagctgcaggccccgctgggggcgctgatggacgaatcgtacaaggtcgccatgacgcgcatgggcaaccggctgcgcgtggccggcacggcggagctgggctcgcgccggctcgacctgcgccccgccgcgctgaacacgctggtcaaggtggcgcgcgactggtttccggcggcaggcaactaccacgaggccacgcaatgggccggcgcgcggccgatgctgcccgacggcccgccgctgatcggacccaccgccgtgcccggactgttcctgaacctcggccatggttcgacgggctgggcgatgagctgcggatcaggcaagattgcggctgaccagatcgccgccagcgctggcgccagccacggcggccccgacatcgacatggaaggcctgctgccggatcgctacgggctggggccgtccggataa

SEQ ID NO: 6447 - protein, 433 aa, Cupriavidus taiwanensis
MHVIVIGAGAIGVSSAWYLRQAGFDVTVLERRGAPAQEASFGNAGVIAPGYVTPWAAPGMPAKILRTLFAREAPVLFRPAADPAMWRWIARWLRECRLERYRANKLRMQRLAFYSRACLHRLRSELDIDYEQSQGYLQLFRTARDLDLASPAIALLRENHVPHRLVSAGECRQIEPGLAADTPLAGGLHLPEDESGNCPMFVRALHRHAQAAGVSFRFDTRVTRIRPGHAGKLELELSQPGGQGAAEVLSAERVLLAAGADSAALLRPLGLRVPLYPVKGYSVTVMIRDELQAPLGALMDESYKVAMTRMGNRLRVAGTAELGSRRLDLRPAALNTLVKVARDWFPAAGNYHEATQWAGARPMLPDGPPLIGPTAVPGLFLNLGHGSTGWAMSCGSGKIAADQIAASAGASHGGPDIDMEGLLPDRYGLGPSG

SEQ ID NO: 6448 - DNA, 1257 bp, Vibrio sp. Ex25
  CDS (1)..(1257): transl_table=11
atggaagtcatcgtattaggcagcggcgtcatcggcttaacctctgcttggtatttatctcaagcaggctatcaagttaccgttattgaccgtcaaccaagcagtgcaatggaaacaagtttcgccaatgctgggcagatctcgtatggctattcttcgccttgggctgcgcctggtgttcctgttaaagccataaagtggttaatggaagagcatgctccactcaaaatcaaaccaaccctcaatgccgatatgatcagttgggcaagtaagatggtggccaactgcaccctgtctcgctaccaagtcaacaaagctcgcatgctttcgatagctaaccacagtcgtatgtgtctggaacaattacgtcaagaacatgccattgaatatcaaggtcgccagttcggcaccttgcaagtatttcgaacgcctcaacagctgcaagccattgaaaaggatatgcagcttctagagcaaagcgggactcggtttgagttgatggacgtagaacgctgcattgaacaagaacctggactggatcttgtgaaagataagctggttggtggcttgcacctgccagatgacgaaacaggcgattgctatcagttttgccaacaactaacagagctcgctaaggcccatggcgtcaggttcgagttcgacaccgaagtaagcaattgggttacagtaggcaaaaagatcatgggtgtccaaacgaaccgaggacagtttaaagcggaccaatatgtggttgcctctggcagctattctacagcgctactcaagcaaatcgacattgaaattcctgtctatccagtaaaaggctattcgctcaccatcccaatgaaagatgagcacttctctcctcgctctactgtgatggatgaaacctataaagtcgccatgactcggtttgatgacagaattcgcgtagcgggcaccgcagaattagcagggtttgatgcctcccttccgcaaaaacgaaaaaataccatcgaaatggtcatccgtgatcttttccctcgctgcggcgactttaaccaagccgagttttggagtggctttagaccaatgacgcctgatggcacaccgattatcggcgcgaccaaatacgataacctttttactaacactggacacggtactctgggttggactatggcttgtggttctggtcaattactagcgagcattatggctggtgaaaaagcgaaagtgatggatgacacagagcttaacctttgccgttatgcataa

SEQ ID NO: 6449 - protein, 418 aa, Vibrio sp. Ex25
MEVIVLGSGVIGLTSAWYLSQAGYQVTVIDRQPSSAMETSFANAGQISYGYSSPWAAPGVPVKAIKWLMEEHAPLKIKPTLNADMISWASKMVANCTLSRYQVNKARMLSIANHSRMCLEQLRQEHAIEYQGRQFGTLQVFRTPQQLQAIEKDMQLLEQSGTRFELMDVERCIEQEPGLDLVKDKLVGGLHLPDDETGDCYQFCQQLTELAKAHGVRFEFDTEVSNWVTVGKKIMGVQTNRGQFKADQYVVASGSYSTALLKQIDIEIPVYPVKGYSLTIPMKDEHFSPRSTVMDETYKVAMTRFDDRIRVAGTAELAGFDASLPQKRKNTIEMVIRDLFPRCGDFNQAEFWSGFRPMTPDGTPIIGATKYDNLFTNTGHGTLGWTMACGSGQLLASIMAGEKAKVMDDTELNLCRYA

SEQ ID NO: 6450 - DNA, 1236 bp, Mesorhizobium loti MAFF303099
  CDS (1)..(1236): transl_table=11
atgagtgtgattgtcgtcggcgccggcattgtcggactgagtgtcgcctacgaggcgctactaagcggagcggcggtcactatcatcgaccgagaccctgagggcgacaaagcatcattcggcaacgccggcggcatcgccgtaaccgaagtgatacccttatctgtcccgggattgtggaagaaagtgcccttctgggctctggatccgctcggcccactagcggtccggatcaggcatacgcctcatttattcccatggctttggcggttcgcaaaagtgggctcagcatccgaagtgcgacggatttctggcgcgctcgcggagatcaacagccgcgtttatgacgatctcgtgccgctcttcaacaaggtcggccttgcgaacgatctgtttcgcaagggggcgctgaccgtctacgagagcgagagcggtctgagacgcgaccggccggagtgggatgcaaagcgtgcactcggcgttgagagccaagagttatcggcttcgcaggtcagggacatggaaccagcgctcggtccgatagtgaaaaatggggtgttcacgcctcagtggtcgcatgtttcggatccgaagaggatcgtggacgttttgcgctgctggcttgccgataacggcgcggaaatcttgcaagaccaggttgaccgtgtagagcctagaaccgacggtgcggcgcttacgctaaacggcggcaagacactgagggcagcaaagatcgtcatcgcagcgggcgtttggtcggcacaactcgccaagcaattgggggatcgcgtgcttctcgagagcgagcgcggatacaacaccacgatcgcctcgccgggggttgtcctggaacgggaagtgatattcgcagatcggaaatttgtggcgacgccgctctcgatcggcttgcggattggcggagcggccgagtttggcggattgaaggctgcgccgaacttcaaccgctcgaaagccctcgtgacgcttgccaagctctatcttccgggcatcaaggaagagggaggcgtggagtggagcggtcatcggcctgccacgccagatagcctcccagtcataggccggtctggcccgagcccgcgtatcatctatgcgttcggtcatggtcatcttggactgacacaggggccaacaaccggcaaaatcgtcggggacctcctcttcgaacgaaagccatgcctgaatgtggagcctttttctgtggcccgcttttcttag

SEQ ID NO: 6451 - protein, 411 aa, Mesorhizobium loti MAFF303099
MSVIVVGAGIVGLSVAYEALLSGAAVTIIDRDPEGDKASFGNAGGIAVTEVIPLSVPGLWKKVPFWALDPLGPLAVRIRHTPHLFPWLWRFAKVGSASEVRRISGALAEINSRVYDDLVPLFNKVGLANDLFRKGALTVYESESGLRRDRPEWDAKRALGVESQELSASQVRDMEPALGPIVKNGVFTPQWSHVSDPKRIVDVLRCWLADNGAEILQDQVDRVEPRTDGAALTLNGGKTLRAAKIVIAAGVWSAQLAKQLGDRVLLESERGYNTTIASPGVVLEREVIFADRKFVATPLSIGLRIGGAAEFGGLKAAPNFNRSKALVTLAKLYLPGIKEEGGVEWSGHRPATPDSLPVIGRSGPSPRIIYAFGHGHLGLTQGPTTGKIVGDLLFERKPCLNVEPFSVARFS

SEQ ID NO: 6452 - DNA, 1242 bp, Agrobacterium tumefaciens str. C58
  CDS (1)..(1242): transl_table=11
atgcctgcacatgatgtcattgtcataggggcgggcgtcgtcggtctctcggcggcaattgccgcgcagggccgcggtctttcagtcacggtcatcgaccgcgagggaccggcggcgggcgcttctgccggcaatgccggggccttcgcctttaccgatatcctgccgcttgcatcccccggcattctctggaaggcgccgaagtggcttctcgatccgcttgggccgcttagcgtgccgccagcctatgcgctgaagatcgcgccatggatgttccgcttctggcgggcctgcgccgcatcgaaggtcgagcattccacagccgcgcagacagcaatgatggatctttccagggccgagctcgagccgttcctcagaaagaccgacaccattgccatgctgcgcaaggagggcaaccttcaggtctatgaaagcgaggcggaattcgaaagctcgctcgccggctggaaagcgcgcgaacgccacggcatcgagttccggcatctgaacaccgagcagatgtccgaaattcaacccggaatcgcaccgcgctttacctgcggcacattcacgcccggctggttctcgatcgccgatcccaagttctatacgctggcgctggccgaccatttccgcaccattggcggccgtatcgaatgcctggatgtggcttcgctcagaccgctggaagacggcgtcgaggtggtgagccatgatggccgcacccgcaaggccggtaaggtggtgctggcggcgggtgccttctcgcaccgcatcgcccgttcgcttggcgaaaaaattccgctggaaacggaacggggttataatactaccctgccagcaggcgcttttgatctgcgcacgcaggtcaccttcggcggccacgggttcgtcgttacccgcctctcgtctggtatccgcgtcggtggcgcggtggaactgggcgggctggagcttccggccaatttcgcccggtccgaggcgcttctggctaaggcgaaagccttcctgccgggcctcaaaaccgagggcggaaagcagtggatgggttttcgcccgtcgctcccggacagcctgccggccatcgggcaagcgcggcatacggcaagggtggtctatgctttcggccacgggcatctggggctgacgcagtcggcgggtacggcccgcatcgtcgccgatcttctgacggggcaaaaacccgccatcgatacaagggcattttcgccgcaacgtttctag

SEQ ID NO: 6453 - protein, 413 aa, Agrobacterium tumefaciens str. C58
MPAHDVIVIGAGVVGLSAAIAAQGRGLSVTVIDREGPAAGASAGNAGAFAFTDILPLASPGILWKAPKWLLDPLGPLSVPPAYALKIAPWMFRFWRACAASKVEHSTAAQTAMMDLSRAELEPFLRKTDTIAMLRKEGNLQVYESEAEFESSLAGWKARERHGIEFRHLNTEQMSEIQPGIAPRFTCGTFTPGWFSIADPKFYTLALADHFRTIGGRIECLDVASLRPLEDGVEVVSHDGRTRKAGKVVLAAGAFSHRIARSLGEKIPLETERGYNTTLPAGAFDLRTQVTFGGHGFVVTRLSSGIRVGGAVELGGLELPANFARSEALLAKAKAFLPGLKTEGGKQWMGFRPSLPDSLPAIGQARHTARVVYAFGHGHLGLTQSAGTARIVADLLTGQKPAIDTRAFSPQRF

SEQ ID NO: 6454 - DNA, 1290 bp, Sinorhizobium meliloti 1021
  CDS (1)..(1290): transl_table=11
atgcctgaagtgagcgctattgtcgtaggggcaggaattgttggcttgagcgtcgcgtatggggcgctccgaaacggagtctcggtcatgattgtggaccgcaatccggaaggggacaaagcatcgtttggaaatgctggcggcatcgccgtgacggaggtcgtcccggcttcggttcccggcttatggaagaaggtgccgttttggatgctcgatccgcttggccctcttgcgctcagaatggcgcatactcctcgcttgctgccctggctatggaatttcgcgcgggtgggcacagcttccgaagttcgccggatctctacggcgctagccgacatcaacggccgcgtttatgatgaccttttaccgctcttcaacgaggtcgggcttgctggagacctgctccaaaagggcgcgttgaccgtctacgaaagcgagaacggccttcgaaacgatatgcacgattgggacgccaagcgagacctcggtgtcgaagtgcaagagctgacggcagcggaaatccgggagatggagcccgccctcagcccaatcgtgaagaatggtgtgttcacgccgcaatggtctcacataaaggatccgaagcgggtcgtcgacgtgttgcgacactggctcgtagccaacggtgccgaaatcgtaaggggagaggtcgatcgcgtggtgccgacctcggacggcgctaaagtcgtgctggatggcggcagagaaatgacagcacgaaaaatcgtcatcgctgccggagcgtggtcggggcggctcgccaagcaaatgggcgaccgcgtgcttgttgagagcgagcgcggatacactactacgattgcatcgccaggggtcgcacttgaacgtgaagtgatctttgcggatcgaaagttcgttgcgacgccgctctcgatcggcttgcgcattggcggcgccgctgaattcggcggccttgaggtggccccgaattatgccagatcgaaagccctcgtgaagctcgccaagcactattttcccgacatcagggaagaagggggtgtggaatggagcggccaccggccaaccacacccgacagccttccggtaatcggccgctccggtcccagttccaacatcatctatgcattcggacatgggcatttgggcctgacgcaaggcccgacgaccggcaagattgttagcgacctcctccttggcaggaaaccgctcatcgacatagcgcccttctcggtcgcccgcttctctctcaagaaagctagcttctatgactcgccggacctttttctgcgttga

SEQ ID NO: 6455 - protein, 429 aa, Sinorhizobium meliloti 1021
MPEVSAIVVGAGIVGLSVAYGALRNGVSVMIVDRNPEGDKASFGNAGGIAVTEVVPASVPGLWKKVPFWMLDPLGPLALRMAHTPRLLPWLWNFARVGTASEVRRISTALADINGRVYDDLLPLFNEVGLAGDLLQKGALTVYESENGLRNDMHDWDAKRDLGVEVQELTAAEIREMEPALSPIVKNGVFTPQWSHIKDPKRVVDVLRHWLVANGAEIVRGEVDRVVPTSDGAKVVLDGGREMTARKIVIAAGAWSGRLAKQMGDRVLVESERGYTTTIASPGVALEREVIFADRKFVATPLSIGLRIGGAAEFGGLEVAPNYARSKALVKLAKHYFPDIREEGGVEWSGHRPTTPDSLPVIGRSGPSSNIIYAFGHGHLGLTQGPTTGKIVSDLLLGRKPLIDIAPFSVARFSLKKASFYDSPDLFLR

SEQ ID NO: 6456 - DNA, 1242 bp, Sinorhizobium meliloti 1021
  CDS (1)..(1242): transl_table=11
atggccgcaccggacgtcatcgtgatcggcgcgggggtcgtcggcctcacggctgcaattgccgccgtggccagcggcctgtcggtcaccgtgctcgaccgcgaggggccggcggccggcgcctccgccggcaatgccggggcattcgccttcacagatatccttccgcttgcctcgcccggcatcctcaaaaaggcgccgaaatggctcctggatccgctcgggccgctgaccgtgccgcccgcctatgcgctgaagatcgcgccatggatgttccgcttctggcgggcttgtcagccggggcgcgtggcgcattcgaccgcggcccagaccgcgctgatggacctgtcgaaagcggagctcgagccgttcctcggtgcgaccggcacggcgtccatgctgcgcaaggaaggcaaccttcaggtctacgagggagaggcggaattcaaggcgtcgctggccggctggaaggcgcgcgcggatcacgggatcgagttccgccatctcgatgccgcaggcattgccgagatccagccgggcctggcggcgcgcttcacccacgctaccttcacgcccggctggtactcgatcgccgatccgaagctctacacgcttgcgcttgccgatcatttccgcacgatcggcggggtgatcgagcgcgcggaggtcacggcgctgaagcccgtcgatggcggggtcgaagtcctgagcgccgacggcaggaggcggcgggcggcgcaggtggtcctctcggcgggcgctttctcgcaccgggttgcgcgcacgctcggcgaaagcattccgctcgaaaccgagcgcggatacaatacgacgcttcccgccgacgcgttcgacctgcggacgcagatcactttcggcggccatggcttcgtcgtgacacggctgtcgaccggtatccgggtcggcggtgcggtcgaactcggcgggctcgatctgccgccgaacttccgccgctcggaagcgatgctgaagaaggcgcaggccttcctgcccggtttgaaaccggaaggcggggtgcagtggatgggcttccggccgtcgctgcccgacagcctgccggccatcggccgcgcccgcgcgacgccgcgggtgatcttcgccttcggtcacggccatctcgggctcacccaatcggcgggcaccgcaaggatcgtcgccgatctcttgaccggccggactccggccatcgacattgcacccttttcgccgcaaagattctga

SEQ ID NO: 6457 - protein, 413 aa, Sinorhizobium meliloti 1021
MAAPDVIVIGAGVVGLTAAIAAVASGLSVTVLDREGPAAGASAGNAGAFAFTDILPLASPGILKKAPKWLLDPLGPLTVPPAYALKIAPWMFRFWRACQPGRVAHSTAAQTALMDLSKAELEPFLGATGTASMLRKEGNLQVYEGEAEFKASLAGWKARADHGIEFRHLDAAGIAEIQPGLAARFTHATFTPGWYSIADPKLYTLALADHFRTIGGVIERAEVTALKPVDGGVEVLSADGRRRRAAQVVLSAGAFSHRVARTLGESIPLETERGYNTTLPADAFDLRTQITFGGHGFVVTRLSTGIRVGGAVELGGLDLPPNFRRSEAMLKKAQAFLPGLKPEGGVQWMGFRPSLPDSLPAIGRARATPRVIFAFGHGHLGLTQSAGTARIVADLLTGRTPAIDIAPFSPQRF

SEQ ID NO: 6458 - DNA, 1272 bp, Ralstonia solanacearum GMI1000
  CDS (1)..(1272): transl_table=11
atgcacagcgacacagcggccccggccgggcgacgggccatcacggtggtgggcgccggcatcgtcggcgtgtcatgcgccttgcagctgcagcgcgacggccaccgggtcaccctgctggaccaggcgggcatcggcgaaggatgctcgtacggcaatgccggctgcctcagcgtggcatcggtggtggcgatggcgctgccgggcatgctcgcgcaggtgcccaaatggctggcggacccgctggggccgctgacggtgcgctggtcctacctgccgcgcgcgctgccgtggctgctcaagtggatccgcgccggcaccgaggcgcgagcgcgcgccgtggcgcggccgctggccgacctcttcagcgcgacctatcccggctaccgcggcctgctggagcccgcccagtacgacgacctgatccgcgccaccggccacctgtacgtgtggcgcacgctggcgcgcggcccgggcgaggtgctggcgcaatccatccgcgacgccaccggcgtgcgctcgcaggcactgagcgcgggcgaagtccgcgagctggagccggccctcgccggcgacatccggtccggcctgctgctgccggacaacggcttcacctgcaacccggagcggctggtcaagacgctcgcggcccatttcgtcgcggccggcggcaccgtgctgcggcgcaaggtgctggacttcgcgctgggcgagcgcggccccacccgcctgtacaccgactgcggttcgctaccggtctcgacgctggtgatctgcgcgggcgcgtggtcgatgcggctgggcgccaggctcaccggcgtgcgcatcccgctcgacacggagcgcggctaccacgccatgctgcgcgcgccgacggtgcagccctcgcggccggtcatggactgcgagcgcaagttcatcgccacgccgatggaagacggcctgcgcatcgccggcacggtggagatcggcggcctggacatcccacccgacttccgccgcgccgatacgctgacccggcacggccaggcgctgttcccgggcctcgccttcaccggcgacagcgcctggatgggctatcggccctccattcccgacagcctgcccgtgatcgaccgctccgagcggttccccgatgtcttcttcgccttcggccacggccacctgggcatgacgggggcgccgggcaccggccggctgatcgccgatctggtcgccggccggccgccattcatcgatgcccgcccctacggcctgcaacgttttgactga

SEQ ID NO: 6459 - protein, 423 aa, Ralstonia solanacearum GMI1000
MHSDTAAPAGRRAITVVGAGIVGVSCALQLQRDGHRVTLLDQAGIGEGCSYGNAGCLSVASVVAMALPGMLAQVPKWLADPLGPLTVRWSYLPRALPWLLKWIRAGTEARARAVARPLADLFSATYPGYRGLLEPAQYDDLIRATGHLYVWRTLARGPGEVLAQSIRDATGVRSQALSAGEVRELEPALAGDIRSGLLLPDNGFTCNPERLVKTLAAHFVAAGGTVLRRKVLDFALGERGPTRLYTDCGSLPVSTLVICAGAWSMRLGARLTGVRIPLDTERGYHAMLRAPTVQPSRPVMDCERKFIATPMEDGLRIAGTVEIGGLDIPPDFRRADTLTRHGQALFPGLAFTGDSAWMGYRPSIPDSLPVIDRSERFPDVFFAFGHGHLGMTGAPGTGRLIADLVAGRPPFIDARPYGLQRFD

SEQ ID NO: 6460 - DNA, 1263 bp, Brucella melitensis 16M
  CDS (1)..(1263): transl_table=11
atgaaatctgatccacagggtcagcaggatatcgtcatcattggcggggggatcgtcggtgtcgccaccgccgcattgctcgccgaggccgggcgcgaggtgctcgttattgaccggacaggcatttgcgaggaaacgagttccggcaatgcggcagcgctggccttttccgatattctgccgcttgcctcgaaaggcgtgatgcgcaaggtgccgggctggcttctggacccgcttggccctttcaccattcgccccacctatttccccaaaatgcttccctggctctatcgtttctggcgggccagcgcgcccaatgccttggccagaacggccattgcgcaagcggccatcatgcgccttgcggaaaacgagatgctgtcgctgatcgagcgtgcgggcttgcgcaacaggctgcgtgaagacggcaatctggagctttacgaaagcgaggcggagcttgcggcctcgcagcccggctgggatgtgcgcgaaaaggcgggcatcgcctatgaacatgtgcgcggcaggcggcttgcggaattgcagccggggctgaacccgcgcttcgtggctggaactttcgtgcctggctggaagaatgtgagcgatccgaagcttttcggcaaggcgatctggtcctatgcggaaagtcttggcgcacggttcctttccggcaaggttgcgagcgccaagcgccagaatggcggcgttcgtctgcggcttgaaaacggggtggagatcaatgccactcatctggtgctgatggcgggtgcgtggtcgcgggatctggcaaagggcttcggcgatatcgtgccgctcgataccgaacgcggttacaatacgacgcttccggtcggcagctttgatgtaaagcgccagctaacgtttcccggccatggctttgtcattacgccaatggagaccggccttcgtgttggcggagcggtggagttcggtgggctggatctgccgcccaattttgcacgctccgaagcgatgctgaagaaagcatcgaagtttttgccgggccttaaggttgaaggcggcaggcaatggatggggtatcggccctccatgccggattcccttccggttatcggccgcgcttcggcgggtggcaatgtttattacggtttcggccatgggcatctgggccttacgcaatcggcggcgacggcgcggcttatccgcgacctcatcacgggtagcgaacctgcaatcgatatcgaacctttcaagcttcaacgttttcggaactga

SEQ ID NO: 6461 - protein, 420 aa, Brucella melitensis 16M
MKSDPQGQQDIVIIGGGIVGVATAALLAEAGREVLVIDRTGICEETSSGNAAALAFSDILPLASKGVMRKVPGWLLDPLGPFTIRPTYFPKMLPWLYRFWRASAPNALARTAIAQAAIMRLAENEMLSLIERAGLRNRLREDGNLELYESEAELAASQPGWDVREKAGIAYEHVRGRRLAELQPGLNPRFVAGTFVPGWKNVSDPKLFGKAIWSYAESLGARFLSGKVASAKRQNGGVRLRLENGVEINATHLVLMAGAWSRDLAKGFGDIVPLDTERGYNTTLPVGSFDVKRQLTFPGHGFVITPMETGLRVGGAVEFGGLDLPPNFARSEAMLKKASKFLPGLKVEGGRQWMGYRPSMPDSLPVIGRASAGGNVYYGFGHGHLGLTQSAATARLIRDLITGSEPAIDIEPFKLQRFRN

SEQ ID NO: 6462 - DNA, 1233 bp, Corynebacterium glutamicum ATCC 13032
  CDS (1)..(1233): transl_table=11
atgagttcgtctggaaaagtcattgttgttggagccggcatagtgggtcttgccaccgcctggcatttacaggagcacgggttcgaggtgagcgtccttgatcgggatggtgtcgctgcaggttcttcgtggggtaatgctggttggttagcgccggcgaaaactattccgttgtcggagccggggctgtggacgtatggtccgaaagagctgttcaatccggtgtcgccgatgcatatgccacttcgtgtggatcccaaactgtggcttttcttggcgcaatttatggcgcaggcttttcaacgcaagtgggattccacgatggcggacctcacggagatcgataaggtcgcgctcgaagcttttgatgaactgtcgatcggtggcgtggaaggcctcacccatgaaggtccatttgttattggttttgaggaagagcgccaatcggcgggtttccgtaaggaaattgatggcgtgagcaggcacggccagaaagtggagatgtctcgactggagaatccacaagagttggcgccgatgctgaatgagcaaattcaggtggcttaccgtttggaaggccagcgtttcatcgagccgggtccatacgtgcagtcattggcggatgctgtggtgaagcgtggtggcgtgatccgcgccggggcagaagttgtgcatgtggcgaagggtgatcgtcccgcggtcattttggcggatggtagccgtgaagaagcggacaaggtggttgtggcaacgggtgcctggctgccgggtctaacgcgtgaatacggtgtgaaaactcttgttcaggctggtcgtggctattccttctctgtggcaacggatattcctgccaagcattctgtgtaccttccccaccaccgcatggcctgcacgccgtatgagggccgtttccgcattgcgggcaccatggagttccgcggtccggatgagccgttccagcagggccgggtggatgcgattgtttcgcaggcgaagaaggttatgagaggtattgatttcaacgatcgtcaggatgagtgggtgggttcccgcccggtcactccggatgggcgtccgttgattgggcagaccaaggcggagaacatttacgttgccggtggtcacggcatgtggggtgtggtgctgggccctgccaccggtaagtatttggcggagctgatggctacgggcaacaccaacccgatcatcaagccgttcgatccgctgcgttaa

SEQ ID NO: 6463 - protein, 410 aa, Corynebacterium glutamicum ATCC 13032
MSSSGKVIVVGAGIVGLATAWHLQEHGFEVSVLDRDGVAAGSSWGNAGWLAPAKTIPLSEPGLWTYGPKELFNPVSPMHMPLRVDPKLWLFLAQFMAQAFQRKWDSTMADLTEIDKVALEAFDELSIGGVEGLTHEGPFVIGFEEERQSAGFRKEIDGVSRHGQKVEMSRLENPQELAPMLNEQIQVAYRLEGQRFIEPGPYVQSLADAVVKRGGVIRAGAEVVHVAKGDRPAVILADGSREEADKVVVATGAWLPGLTREYGVKTLVQAGRGYSFSVATDIPAKHSVYLPHHRMACTPYEGRFRIAGTMEFRGPDEPFQQGRVDAIVSQAKKVMRGIDFNDRQDEWVGSRPVTPDGRPLIGQTKAENIYVAGGHGMWGVVLGPATGKYLAELMATGNTNPIIKPFDPLR

SEQ ID NO: 6464 - DNA, 1251 bp, Xanthomonas axonopodis pv. citri str. 306
  CDS (1)..(1251): transl_table=11
atgcacggcagccgcgatgatgtgctggtgatcggcgcgggcgcgattggcctggccaccgcgctggcacttgtcgaagcgggccggcaggtgcgtgtgctcgatgccggtgcgactggggcggcgacttcctacggcaattgcggcaccatcacgccgagccatgcaccgccgctggccgcgcccggcatgatcgcgcaggcactgaaatggatgttcaccccggatgccccgctgtatatcccgccccgtctggatccggagttgtggcgctggctactgcgcttcgcacgatgctgcaatgcacgcgattggcagtccagtgcacaggcgcgggcggcgctgttgcgcgatgcgcggcagcgtttcgacgcgtgggtggcgcggtacgcgctggagtgcgagtttcgcaacgacgggctggattacgtgttcggcgatgcgcgccgctttgcgcaataccgcgacgaatgcgcgctgctggcgcagtggggtatccgggcagaggtcatcgatggtgcggactatatgcgtcaggatcccgcatttcgcgatgggatcgctggcgcgatccacttcccgggcgatgcgcatctacgcccggagcaatacaccgcagagcttgcgagagtgctgcgcgcacgtggcggggtgatcgatgcgcactgccgcgtgcaggcaatcgtgcccgatggaggcggcagctgcgtgcagaccgagcacggcaagcgccgtgcgcgcgaggtagtgatcgcaaccggaccatggtcgccggcgctggcggcgcaacttggtctgcgcctgccggtgcaggccggcaagggctattcgattacctacagcgcgccgcatctgatgccgcgtcgcccggtggtgttgaaggaccgctgggtgttcgtggtgccgtggcgcgaccgcctgcgcatcggcagcacgatggaattttccgggcgcgatacgcagctcaatgccacgcgcctggctgcgttggagcgcgcggcggccgaatatctgcatacgccacgcggacctgcagtgatcgaacgctggtacggatggcggccgatgacctgggacgacgtgccggtcctgggcgcggtgccaggccatcctcacgtctggctcgcagccgggcatggcatgctcggcatcagcatgagcactgcaagcggacaattgatggccgacctgatcacgggccgcgcacctgcgctggacccgcatccttaccgggcggagcgtttcgcatga

SEQ ID NO: 6465 - protein, 416 aa, Xanthomonas axonopodis pv. citri str. 306
MHGSRDDVLVIGAGAIGLATALALVEAGRQVRVLDAGATGAATSYGNCGTITPSHAPPLAAPGMIAQALKWMFTPDAPLYIPPRLDPELWRWLLRFARCCNARDWQSSAQARAALLRDARQRFDAWVARYALECEFRNDGLDYVFGDARRFAQYRDECALLAQWGIRAEVIDGADYMRQDPAFRDGIAGAIHFPGDAHLRPEQYTAELARVLRARGGVIDAHCRVQAIVPDGGGSCVQTEHGKRRAREVVIATGPWSPALAAQLGLRLPVQAGKGYSITYSAPHLMPRRPVVLKDRWVFVVPWRDRLRIGSTMEFSGRDTQLNATRLAALERAAAEYLHTPRGPAVIERWYGWRPMTWDDVPVLGAVPGHPHVWLAAGHGMLGISMSTASGQLMADLITGRAPALDPHPYRAERFA

SEQ ID NO: 6466 - DNA, 1194 bp, Pseudomonas putida KT2440
  CDS (1)..(1194): transl_table=11
atgaagcagcgggtaacggtgatcggtggtggagtggtgggcctggcgacggcttacgcgctggttcgggaagggtggtcggttgacctgatcgaggcccgcgacagcctggcgtcggccaccagcttcgccaatggcgggcaattgtcctatcgctatgtggcgccgctggctgatgccggggtgccgtggcaggcgctgggctggctgttgcggggcgagtcgccattgcgcttgcgcttgcgcatggacccggcccagtggcgctggctgctggcattcaccctggcttgtaggcgtagcgtcaatcgccgtaatgccgggcaattgcttgagctggcgctgtgcagccaggccgttctggcgcaatggcgcgaagaccataacctgggagatttcggctggcggcgcaatggcaagctggtggcttttcgcagtgaacgggcctttgcccaaggccgggaacagttgacggacccggccagtcagcaggtgctggcggctgccgagctgcgcgggctggagcctgccctggatggcgcaccgtttgtggggggcgtgttcacggcgggcgaagaggttggcgattgccacgtgttttgcttgcggctggaggcgctgttgcgcgcgtcgggccagtgccgtttcctgcttggccggccggtgacgcaattggttcagcgccagggccaggtcgtggcactgcaactgggcgatcagcagctggacgtggagcagttggtgctgtgtgccgggcatcgcggcccaggcttggcattaccgggggtgcagataccggtttacccgctgaagggctacagcctgaccgcaccgatcagcgccgggcacctgcccccggaggtgagccttactgactatgagcgcaaaatcgtctatgcacgcctggggcagcagctgcgggtagcggcgatggtggacattgtcggcttcgacgagtcggtggacatgcgccgtttgcagagcatgcggcggctggcgctggagacgctgccaagggcggcggattatggccaggcggtggaatgggcggggatgcgaccagcgacaccgaccggggtgccgatcataggtgggacagtgtaccgcaacctgtggctgaacctggggcatggggcgttagggttcaccttggcctgtggcagtgcgcagcgtttggccaggatgatgcgttaa

SEQ ID NO: 6467 - protein, 397 aa, Pseudomonas putida KT2440
MKQRVTVIGGGVVGLATAYALVREGWSVDLIEARDSLASATSFANGGQLSYRYVAPLADAGVPWQALGWLLRGESPLRLRLRMDPAQWRWLLAFTLACRRSVNRRNAGQLLELALCSQAVLAQWREDHNLGDFGWRRNGKLVAFRSERAFAQGREQLTDPASQQVLAAAELRGLEPALDGAPFVGGVFTAGEEVGDCHVFCLRLEALLRASGQCRFLLGRPVTQLVQRQGQVVALQLGDQQLDVEQLVLCAGHRGPGLALPGVQIPVYPLKGYSLTAPISAGHLPPEVSLTDYERKIVYARLGQQLRVAAMVDIVGFDESVDMRRLQSMRRLALETLPRAADYGQAVEWAGMRPATPTGVPIIGGTVYRNLWLNLGHGALGFTLACGSAQRLARMMR

SEQ ID NO: 6468 - DNA, 1257 bp, Vibrio parahaemolyticus RIMD 2210633
  CDS (1)..(1257): transl_table=11
atggaagtcatcgtattaggcagcggtgttatcggtttaacctctgcttggtatttatctcaagcaggctatcaagtcacggtcatcgatcgccaaccaagcagcgcgatggaaacaagctttgccaatgcagggcaaatttcttatggctactcatccccatgggcggctccgggtatcccgctcaaggcgatcaaatggctgatggaagaacacgctccactaaaaataaagccgtcgctaagcacagacatgatcagttgggcaagcaagatggttgcgaactgcaccttgcctcgctatcaaatcaacaaagctcgcatgctgtctatcgccaaccacagccgagcttgcttagaacaattacgtaatgagcacgcgattgaataccaaggacgccagtttggtaccttgcaagtgttccgcacaactcaacagttaaccgcaatcgaaaaagacctcaagcttcttgagcaaagtggtactcgatttgagttgatggacgttgaacagtgccttcgacaagaacccggtttagcgttggtcaaagataaaatcgtaggcgggttgtatttgcctgatgatgaaacaggtgactgctttcagttttgccaacagctgacagaacttgcgaaagcgcatggtgtcacgtttaaattcaataccgaagtgagtaattgggttactgtaggcaaaaagatcataggtgtccaaacgaaccacggtttgtttaaggccgaccaatttgtcgttgcttctggtagcttttccacagcgcttttaaagcagctcgatattgatattccagtgtatccggttaaaggatattcactgacgctaccgatagaaaatgaagaatacgcaccgcgctctaccgtcatggatgagacttacaaagtcgctatgactcgatttgatgaccgcatacgagtggctggcaccgctgagcttgcaggtttcgacccatccttgccacaaaagcgcaaaaacacgattgagatggtggttcgcgatttgttccctcgcggcggtgatttcagccaagcagaattctggacaggatttcgcccaatgacgccagatggcacaccaatcataggtgcaacgccatacgacaacctctttactaatactgggcatgggacgttagggtggacaatggcatgtggttcagggcacttattagccaatatcatgacaggtgaaaaagccaaaatcatggagaactcagagctcaacttacttcgttacgcgtaa

SEQ ID NO: 6469 - protein, 418 aa, Vibrio parahaemolyticus RIMD 2210633
MEVIVLGSGVIGLTSAWYLSQAGYQVTVIDRQPSSAMETSFANAGQISYGYSSPWAAPGIPLKAIKWLMEEHAPLKIKPSLSTDMISWASKMVANCTLPRYQINKARMLSIANHSRACLEQLRNEHAIEYQGRQFGTLQVFRTTQQLTAIEKDLKLLEQSGTRFELMDVEQCLRQEPGLALVKDKIVGGLYLPDDETGDCFQFCQQLTELAKAHGVTFKFNTEVSNWVTVGKKIIGVQTNHGLFKADQFVVASGSFSTALLKQLDIDIPVYPVKGYSLTLPIENEEYAPRSTVMDETYKVAMTRFDDRIRVAGTAELAGFDPSLPQKRKNTIEMVVRDLFPRGGDFSQAEFWTGFRPMTPDGTPIIGATPYDNLFTNTGHGTLGWTMACGSGHLLANIMTGEKAKIMENSELNLLRYA

SEQ ID NO: 6470 - DNA, 1257 bp, Bordetella pertussis Tohama I
  CDS (1)..(1257): transl_table=11
atgaaagtagcggtattgggcagtggcatcataggagtctcgagcgcctggtggctgagccaggcaggccacgatgtcgtggtcgtcgatcgatgcaccggcgcggcgcaggaaaccagcctggccaacggcgcgcagatatccgtgtcgtacgccgagccctgggccaacccgcaggcgccgttcaagctgctgaagtggatgttccaggacgacgcgccgctgctgttccggccgcagctcgattggcgccaatggcaatggggcctggccttcctgcgcgaatgcctgccgtcgcggctggcgcccaatatccgcgccatggtgcgcatggccgaatacagccgcgccacgctgcagggcatgcgggccgaactgggcatccagtacgaccatctcgagcgcggcattctcaatttctaccgcgaccagcgcgagttcgagacctcgcagcgcgccgccggcctgatgcgcgacttcggcgtcgagcggcgggtgatcaacgccgacgaggtggtggccatcgagccggccctggccccgcatctccagaccatcgtcggcggcgactatacgcccgaggacgaaagcggcgacgtgcatctgtttaccgccgcgctggcccgacgctgcgaggccgccggcgtcgagttccgtttctcgacccgggtgacgcgcctgctgggcgaaggcgggcgcgtgcagggcgtggagctgatcgaacccgacggccgctacggccggctcgatgccgacgccttcgtggtggccatgggcagcttcagcgcgcaactggtgcgtccgctgggcgtgccctgcatggtgtatccggccaagggctattcggcgaccttcccggtgcgcccgggcgcgctggcgccggtggtcagcctgaccgacagcagccacaaagtggtgttctcgcgcctgggcgagcgcctgcgcatggctggcacggccgaactgtcgggctattcgcgcggcctgaataccggccgctgcgaagccatgacgcgcctggcgcgcgaactgtttcccgatgcgctcgatttcgagcgcgtcagctactggtcgggcctgcgcccgtccacaccttccaacgtgcccctgatcggccgtaccagcgtatccaacctgtacctcaataccggacatggtacgctgggctggacgatgggggtgggctctggccgggccctggccgacctgctcagcgggcggcggccggaaccggaatttccctttcttggtctgtga

SEQ ID NO: 6471 - protein, 418 aa, Bordetella pertussis Tohama I
MKVAVLGSGIIGVSSAWWLSQAGHDVVVVDRCTGAAQETSLANGAQISVSYAEPWANPQAPFKLLKWMFQDDAPLLFRPQLDWRQWQWGLAFLRECLPSRLAPNIRAMVRMAEYSRATLQGMRAELGIQYDHLERGILNFYRDQREFETSQRAAGLMRDFGVERRVINADEVVAIEPALAPHLQTIVGGDYTPEDESGDVHLFTAALARRCEAAGVEFRFSTRVTRLLGEGGRVQGVELIEPDGRYGRLDADAFVVAMGSFSAQLVRPLGVPCMVYPAKGYSATFPVRPGALAPVVSLTDSSHKVVFSRLGERLRMAGTAELSGYSRGLNTGRCEAMTRLARELFPDALDFERVSYWSGLRPSTPSNVPLIGRTSVSNLYLNTGHGTLGWTMGVGSGRALADLLSGRRPEPEFPFLGL

SEQ ID NO: 6472 - DNA, 1290 bp, Bordetella pertussis Tohama I
  CDS (1)..(1290): transl_table=11
atgcgcgtctgcgtcgttggcgccggtgtggtgggggtgacgtcggcctatttcctggcgcgccaggggcatgaggtggtgctggtcgacagccatgcgcagccggccgaggcgtcgagctacgccaacggcgggcagctcagctacagctatgtggcgccgctggccggccccggcgtgctgcccagcgtgccgggctggctgctgcgcagcgattcgccgctgcgcttgcggcccaggctcgatccgcatcagtggcgctggtgcctgcagttcgcgctggcctgccgcgcttcggtggccgagcgttcgaccgcccagctgcagacgctgtcctacctcagccgcgacgtcatggacggcctgctggcgcaggaggaactcgaattcggccatgtgcgcaacggcaagctgatcgcctatcgggaccatgccttgctggagaaggcccgtcggctggtggcctaccaggcttcgctgggcgccgagcagcaggtgctcgatgccgcgcagacgctggcgctggagccggccctggccgggctgggcgccagcctggccggcgccgtctacaccccgagcgaagaggccggcgattgccgccagttcaccgaggcgctgttcgcacgcctgcagcagctggacaacgtgcagtgcctgatgtccaacccggtgcgcggactgtggcgcgaagggcggcgcatcgtggcggtgcaggccgcgcagggcgatatcggcgtggacgcggtggtgctggccaccggcgtgggcacgcgcgccttgctcaagccgctgggccaggacgtgccgctgtatccgctcaagggctacagcctgagcgtgccgctgcccgtcggcgatacgacggcgcccgccatcagcgtgaccgattacgaacggcgcatcgtctacgcgcgcatcggccgcgtgctgcgcatcgccgccatggtggatatcggcggcgccgacgccgccatcgagcccgcgcgcatcgacctgctcaagcgccaggtggccgaggcgttcccgcagctggacctgagccaggccgtggcctgggcgggcctgcggccggccacgccgaccggcaagccgctgatcggcgccagccgcgcggccgacaacctgtggctgaatatcggccagggcgcgctgggtttcacgctggcctgcggcagcgcggcgctgctgaccgcgcagatgtcgggcctggaactgcccatcgacgccacgccgtttacacccgatcctcggcgtgcctgtccccgcacggggacaggcacccgctga

SEQ ID NO: 6473 - protein, 429 aa, Bordetella pertussis Tohama I
MRVCVVGAGVVGVTSAYFLARQGHEVVLVDSHAQPAEASSYANGGQLSYSYVAPLAGPGVLPSVPGWLLRSDSPLRLRPRLDPHQWRWCLQFALACRASVAERSTAQLQTLSYLSRDVMDGLLAQEELEFGHVRNGKLIAYRDHALLEKARRLVAYQASLGAEQQVLDAAQTLALEPALAGLGASLAGAVYTPSEEAGDCRQFTEALFARLQQLDNVQCLMSNPVRGLWREGRRIVAVQAAQGDIGVDAVVLATGVGTRALLKPLGQDVPLYPLKGYSLSVPLPVGDTTAPAISVTDYERRIVYARIGRVLRIAAMVDIGGADAAIEPARIDLLKRQVAEAFPQLDLSQAVAWAGLRPATPTGKPLIGASRAADNLWLNIGQGALGFTLACGSAALLTAQMSGLELPIDATPFTPDPRRACPRTGTGTR

SEQ ID NO: 6474 - DNA, 1296 bp, Bordetella parapertussis 12822
  CDS (1)..(1296): transl_table=11
ttgatgcgtgtattggtcctgggggcgggcgtggccggcatgaccgcagcctactacctgtggcgcgatggccatgttgtgaccgtggtcgagcgccaggccggcccggcgcgcgaaaccagtttcggcaacgccggcgggctgtgccccagcttcgccgggccgtgggccgcgcccggcatggtggccaaggtgctgcgcatggcgttgcagcgcaatgcgccgatccgcttctcgctggcgccgcggccgcgcaagctggcatggctggcatggctggcatggctggcatggctggcatggctggcacgctggctgggcgagtgctccgccgagcgctttcgtgtcaacaagctgcgcatgcagcgcgtggcccactacagccaggcctgcctgcgcgagatcgccgcagccgggctgccgatttcgttcgacttccaccaggatggcacgctacagctgtttcgcggcgaggccgacctgaaggccgtgcccaatatcacgcgtgcgctcgacgagttcgaggtgccatggcagttcttgagcggcgccgaggccgccgcacgcgagccggcgctggccggcgccggcgcgccggtggcgggcggcctgttcctgccgctcgatggctccggggattgctacaaattcgtttgcggcatgggcgcctggctggccggccagggcgtggcgttccgttacggctgtaccgtggcgagcctggcgcaagccggcggggcgatcgcgggcgtgcacaccgaccagggattgctgcaggccgacgcctatgtgatcgccctgggcggcagcacacctttcctgctgcggccgctgggcttgaagctgcccatttacccggtcaagggttactcgatcaccgcgccgattgccgacgaggcgcgcgcgccgcggacggccatcatggacgaatacaacaaggtgatgatttcccggctgggcccgcgtctgcgcgcggccggcatggccgaactgaaagggtacggcctggcgatcgacccaggccgcgtggcgtttctcaagcgcgtggtgcgcgagtggtttccgcaaggcgccgattacgacgcggcgcaggcatgggccggcctgcggcccatgacgccggacggcccggccatactggggccgacccgctacgccaatctctacctgaactgcggccacggctcgaatggctggacacaagcctgcggtaccggcaggatcgtcgcagacatcgttgccggccgcacgccgcagattgacctggatggcttgaccgccgaccgctacacctga

SEQ ID NO: 6475 - protein, 431 aa, Bordetella parapertussis 12822
MMRVLVLGAGVAGMTAAYYLWRDGHVVTVVERQAGPARETSFGNAGGLCPSFAGPWAAPGMVAKVLRMALQRNAPIRFSLAPRPRKLAWLAWLAWLAWLAWLARWLGECSAERFRVNKLRMQRVAHYSQACLREIAAAGLPISFDFHQDGTLQLFRGEADLKAVPNITRALDEFEVPWQFLSGAEAAAREPALAGAGAPVAGGLFLPLDGSGDCYKFVCGMGAWLAGQGVAFRYGCTVASLAQAGGAIAGVHTDQGLLQADAYVIALGGSTPFLLRPLGLKLPIYPVKGYSITAPIADEARAPRTAIMDEYNKVMISRLGPRLRAAGMAELKGYGLAIDPGRVAFLKRVVREWFPQGADYDAAQAWAGLRPMTPDGPAILGPTRYANLYLNCGHGSNGWTQACGTGRIVADIVAGRTPQIDLDGLTADRYT

SEQ ID NO: 6476 - DNA, 1212 bp, Bordetella bronchiseptica RB50
  CDS (1)..(1212): transl_table=11
atgtctcgaatcgccgtcatcggcgccggcatcaccggcgtcaccaccgcctatgcgctcgccttgcgcgatcaccaggtcacggtgttcgaccgccaccgctatagcgcgatggaaacctcgttcgccaacggcgggcagctctcggccagcaacgccgaggtctggaacagccgctccacgctcttcaagggcctgcgctggatgctgcggcgcgacgctccgctgctgctcaatccccggcccagctggcacaagtactcgtggctgggagagttcctgcgccagatcccccgctacgaagccaacaccatagaaaccgtgcggctggccatcgccgcgcgccagcatctgttcgacatcgcggcccgcgaacggatcgatttcgatcatgagcggcgcggcatcctgcacttctatgccagcaggcgggagtacgacagcgccttgcgggtcaacgccctgctgcgcgccggcgggctggagcggcggcccgtatcgcccgaggaaatgcgcgccatcgaaccggccctgcagggcgacttctacggcggcttctttaccgagtcggactccaccggcgacatccacaagttcaccactggcctggcccgggccgccgcgcggcacggcgccctgttccgctacgaaacgccagtcagcggcatcgaccatcgcggcggcgccatcgccatcacgaccgccgaagacgtcgaacgctacgacaaggtggtgatctgcgcgggcgtgggcagccgccgcttcgccagcatggtgggcgaccgcgtcaacatctatccggtcaagggatattcgatcacggtgagcctggacgacgaggccagccaggccggcgcgccctggaccagcctgctggacgaccgcgccaagatcgtgaccagccggctcggcgccggccggttccgggtggccggcaccgccgaattcaacggcttcaatcgcgatatccgcgccgaccgcgtcgaaccgctggtcgcatgggtgcgccggtattttccgcaggtctcgaccagccgcgtcgtgccctgggcgggcctgcggcccatgctgcccagcatgctgccgcgcgtcgggcccggcaagcggccgggcgtgttctacaacaccggccatggccacctcggatggacgctgtcggccgcgaccgcccagctggtggccgaagcggtgacggccggcgccggcacgtag

SEQ ID NO: 6477 - protein, 403 aa, Bordetella bronchiseptica RB50
MSRIAVIGAGITGVTTAYALALRDHQVTVFDRHRYSAMETSFANGGQLSASNAEVWNSRSTLFKGLRWMLRRDAPLLLNPRPSWHKYSWLGEFLRQIPRYEANTIETVRLAIAARQHLFDIAARERIDFDHERRGILHFYASRREYDSALRVNALLRAGGLERRPVSPEEMRAIEPALQGDFYGGFFTESDSTGDIHKFTTGLARAAARHGALFRYETPVSGIDHRGGAIAITTAEDVERYDKVVICAGVGSRRFASMVGDRVNIYPVKGYSITVSLDDEASQAGAPWTSLLDDRAKIVTSRLGAGRFRVAGTAEFNGFNRDIRADRVEPLVAWVRRYFPQVSTSRVVPWAGLRPMLPSMLPRVGPGKRPGVFYNTGHGHLGWTLSAATAQLVAEAVTAGAGT

SEQ ID NO: 6478 - DNA, 1290 bp, Bordetella bronchiseptica RB50
  CDS (1)..(1290): transl_table=11
atgcgcgtctgcgtcgttggcgccggtgtggtgggggtgacgtcggcctatttcctggcgcgccaggggcatgaggtggtgctggtcgacagccatgcgcagccggccgaggcgtcgagctacgccaacggcgggcagctcagctacagctatgtggcgccgctggccggccccggcgtgctgcccagcgtgccgggctggctgctgcgcagcgattcgccgctgcgcttgcggcccaggctcgatccgcatcagtggcgctggtgcctgcagttcgcgctggcctgccgcgcttcggtggccgagcgttcgaccgcccagctgcagacgctgtcctacctcagccgcgacgtcatggacggcctgctggcgcaggaggaactcgaattcggccatgtgcgcaacggcaagctgatcgcctatcgggaccatgccttgctggagaaggcccgtcggctggtggcctaccaggcttcgctgggcgccgagcagcaggtgctcgatgccgcgcagacgctggcgctggagccggccctggccgggctgggcgccagcctggccggcgccgtctacaccccgagcgaagaggccggcgattgccgccagttcaccgaggcgctgttcgcacgcctgcagcagctggacaacgtgcagtgcctgatgtccaacccggtgcgcggactgtggcgcgaagggcggcgcatcgtggcggtgcaggccgcgcagggcgatatcggcgtggacgcggtggtgctggccaccggcgtgggcacgcgcgccttgctcaagccgctgggccaggacgtgccgctgtatccgctcaagggctacagcctgagcgtgccgctgcccgtcggcgatacgacggcgcccgccatcagcgtgaccgattacgaacggcgcatcgtctacgcgcgcatcggccgcgtgctgcgcatcgccgccatggtggatatcggcggcgccgacgccgccatcgagcccgcgcgcatcgacctgctcaagcgccaggtggccgaggcgttcccgcagctggacctgagccaggccgtggcctgggcgggcctgcggccggccacgccgaccggcaagccgctgatcggcgccagccgcgcggccgacaacctgtggctgaatatcggccagggcgcgctgggtttcacgctggcctgcggcagcgcggcgctgctgaccgcgcagatgtcgggcctggaactgcccatcgacgccacgccgttcgaaccccaccttcggcgtgcctgtccccgcacggggacaggcacccgctga

SEQ ID NO: 6479 - protein, 429 aa, Bordetella bronchiseptica RB50
MRVCVVGAGVVGVTSAYFLARQGHEVVLVDSHAQPAEASSYANGGQLSYSYVAPLAGPGVLPSVPGWLLRSDSPLRLRPRLDPHQWRWCLQFALACRASVAERSTAQLQTLSYLSRDVMDGLLAQEELEFGHVRNGKLIAYRDHALLEKARRLVAYQASLGAEQQVLDAAQTLALEPALAGLGASLAGAVYTPSEEAGDCRQFTEALFARLQQLDNVQCLMSNPVRGLWREGRRIVAVQAAQGDIGVDAVVLATGVGTRALLKPLGQDVPLYPLKGYSLSVPLPVGDTTAPAISVTDYERRIVYARIGRVLRIAAMVDIGGADAAIEPARIDLLKRQVAEAFPQLDLSQAVAWAGLRPATPTGKPLIGASRAADNLWLNIGQGALGFTLACGSAALLTAQMSGLELPIDATPFEPHLRRACPRTGTGTR

SEQ ID NO: 6480 - DNA, 1260 bp, Bordetella bronchiseptica RB50
  CDS (1)..(1260): transl_table=11
ttgatgcgtgtattggtcctgggggcgggcgtggccggcatgaccgcagcctactacctgtggcgcgatggccatgccgtgaccgtggtcgagcgccaggccggcccggcgcgcgaaaccagtttcggcaacgccggcgggctgtgccccagcttcgccgggccgtgggccgcgcccggcatggtggccaaggtgctgcgcatggcgttgcagcgcaatgcgccgatccgcttctcgctggcgccgcggccgcgcaagctggcatggctggcacgctggctgggcgagtgctccgccgagcgctttcgtgtcaacaagctgcgcatgcagcgcgtggcgcactacagccaggcctgcctgcgcgagatcgccgcagccgggctgccgatttcgttcgacttccaccaggatggcacgctacagctgtttcgcggcgaggccgacctgaaggccgtgcccaatatcacgcgtgcgctcgacgagttcgaggtgccatggcagttcttgagcggtgccgaggccgccgcacgcgagccggcgctggccggcgccggcgcgccggtggcgggcggcctgttcctgccgctcgatggctccggggattgctacaaattcgtttgcggcatgggcgcctggctggccggccagggcgtggcgttccgttacggctgtaccgtggcgagcctggcgcaagccggcggggcgatcgcgggcgtgcacaccgaccagggattgctgcaggccgacgcctatgtgatcgccctgggcggcagcacacctttcctgctgcggccgctgggcttgaagctgcccatttacccggtcaagggttactcgatcaccgcgccgatcgccgacgaggcgcgcgcgccgcggacggccatcatggacgaatacaacaaggtgatgatttcccggctgggcccgcgtctgcgcgcggccggcatggccgaactgaaagggtacggcctggcgatcgacccaggccgcgtggcgtttctcaagcgcgtggtgcgcgagtggtttccgcaaggcgccgattacgacgcggcgcaggcatgggccggcctgcggcccatgacgccggacggcccggccatactggggccgacccgctacgccaatctctacctgaactgcggccatggctcgaatggctggacacaagcctgcggtaccggcaggatcgtcgcagacatcgttgccggccgcacgccgcagattgacctggatggcttgaccgccgaccgctacacctga

SEQ ID NO: 6481 - protein, 419 aa, Bordetella bronchiseptica RB50
MMRVLVLGAGVAGMTAAYYLWRDGHAVTVVERQAGPARETSFGNAGGLCPSFAGPWAAPGMVAKVLRMALQRNAPIRFSLAPRPRKLAWLARWLGECSAERFRVNKLRMQRVAHYSQACLREIAAAGLPISFDFHQDGTLQLFRGEADLKAVPNITRALDEFEVPWQFLSGAEAAAREPALAGAGAPVAGGLFLPLDGSGDCYKFVCGMGAWLAGQGVAFRYGCTVASLAQAGGAIAGVHTDQGLLQADAYVIALGGSTPFLLRPLGLKLPIYPVKGYSITAPIADEARAPRTAIMDEYNKVMISRLGPRLRAAGMAELKGYGLAIDPGRVAFLKRVVREWFPQGADYDAAQAWAGLRPMTPDGPAILGPTRYANLYLNCGHGSNGWTQACGTGRIVADIVAGRTPQIDLDGLTADRYT

SEQ ID NO: 6482 - DNA, 1257 bp, Chromobacterium violaceum ATCC 12472
  CDS (1)..(1257): transl_table=11
atggacgctcttgcccccggcgcggccgtcatcgtggtgggcgccggcgtggtcggcatcgccgcggccttgcagctgcgcctggccggtttcgaggtggcgctgctggaccgcggcgagccggcgatggaaaccagctacggcaatgccggcgccttcgccgtcagcgacgtgattccgctggccgaacccggcgtgctgcgcaaggtgccgggctggatgctggatccgctggggccgctggccctgcgctggcgctacctgcccacgctggcgccctggctgctgcgtttcctggccgccagccggccgcagcgggtggccgagctgacgcaggcgctggccgcgctgctgggccgggtcaacgacgactacgcggcgctgatagaacgggccggcttgggccatctgtggcggcggcacggcagcctgacgctgtaccgcagccgggaggagttcgacgccgccgcgccggcctgggacgacaagcgccgccatggcgtgcgctggctggcgctgggccgcgacgcgctcggcgaaggcgagccggtcttgcgcgaggaatggcagtacgcggtccaggtgccggcttggtcccatgtggacgacccctatgttttcagccgcggcctgttcgacgccttcctccaagaaggcggccgctttgtgcgggacgaggcgctggccacggcgatggaagccggccgcgtcactggggtagagacggccggcggcggccgcctgcgcgccgacgcggtggtgatcgcctgcggcgtgtggagcgaccgcttcgtcaaacagcaccgataccgcgtgccgctggaaagcgagcgcggctaccacgtcaacctgcccaaggccggcgtggcgctgcgccacttcatccagtgcgccagcgagagcttcgtcatcctgcccatggcccatggcggcctgcgcctggccggcacggtggagctggcgcaccgcgacgcgccgccggactggcgccgcgcccacatcctgctggacaaggccaggcgcatcgtcggcgatttctccaccgaagacatgacggtgtggatgggcaaccgcccgtcgctgcctgacaccctgcccatcatcggccctgcgccgctgccagggttatggttcgccaccggccacggccatttgggcctgaccctggcagccaccaccggcgcgctgctgcgcgacatgctgcagggcagggcgccggcgctggacatgcggccgtatcggctatctcgtttttga

SEQ ID NO: 6483 - protein, 418 aa, Chromobacterium violaceum ATCC 12472
MDALAPGAAVIVVGAGVVGIAAALQLRLAGFEVALLDRGEPAMETSYGNAGAFAVSDVIPLAEPGVLRKVPGWMLDPLGPLALRWRYLPTLAPWLLRFLAASRPQRVAELTQALAALLGRVNDDYAALIERAGLGHLWRRHGSLTLYRSREEFDAAAPAWDDKRRHGVRWLALGRDALGEGEPVLREEWQYAVQVPAWSHVDDPYVFSRGLFDAFLQEGGRFVRDEALATAMEAGRVTGVETAGGGRLRADAVVIACGVWSDRFVKQHRYRVPLESERGYHVNLPKAGVALRHFIQCASESFVILPMAHGGLRLAGTVELAHRDAPPDWRRAHILLDKARRIVGDFSTEDMTVWMGNRPSLPDTLPIIGPAPLPGLWFATGHGHLGLTLAATTGALLRDMLQGRAPALDMRPYRLSRF

SEQ ID NO: 6484 - DNA, 1248 bp, Chromobacterium violaceum ATCC 12472
  CDS (1)..(1248): transl_table=11
atgcgagtggcggttctcggggccggcgtggtgggcgtgtccactgcctggttcctggccaggatggggcatgaggtggtggtgctggagcgcgcttgcggcgccgcgcgggaaaccagcttcgccaatggcggccagctgtcggtcagccagtccgagccctgggccaatcccggcgcaccctggcaggtgctgcgctggctgtggcgcgacgacgcgccgctgctgttccggccgcggctggacccggcgcaatggcgctggatcgccggctttcttgccgaatgcctgccgggccgccatcagcgcaatacgcgtcagatggtggcgctgggcctgtatagccgcgatgcgatgcgccagctgcgcgaggagaccggcatttcctaccgccgtctgtcgcgcggcattctcagcctgcattacgatgcctgccagttgcgccatgccaggcgttcggctgcgcggttgcaggcgctgggcgtggacaagcgggtgctcaccccgatgcaggcgctggcgctggagccggcgctggagccggccttgcccatgctcagcggtgccagctggtgcccggacgacgagtccggcgatgtccacctgttcacccgcgggctggcggaagccgccgccggtttgggcgtggagttccgctacagtacgcggatcaatgcgctggaagccgcgagaggcgaagtgtccggggtgtcggtcaccgggccggacggcagctaccagcgcgtgacggcggacgcctacgtattggcgctgggcagccattcgccgctgttggccgcgccgctgggcctgcgcctgccgatttacccggccaagggctattcggcgacggcgccggtgaagagcctgatcgcggctcccatggtcagcctgaccgacgaatcccacaaactggtgttcagccggctgggggacgaattgcgcatcgcaggcacggccgaactgtctggttactcgtccagcctcgatccgaggcgttgcgaagccttgctgcggcgagccagggccttgtttcccgccgcctgcgattgggaggccgcgcgtttctggagcggcctgcggccggctacgccgggcaatgtgcccttgataggaaaaagccgcgtcggccgcttgtatctgaatacagggcatggcacgctgggctggaccgagggtgccggttcggggcgcgcgttggcggaaatcatcagcggcaggatgccgcagctggatttcgcgttctga

SEQ ID NO: 6485 - protein, 415 aa, Chromobacterium violaceum ATCC 12472
MRVAVLGAGVVGVSTAWFLARMGHEVVVLERACGAARETSFANGGQLSVSQSEPWANPGAPWQVLRWLWRDDAPLLFRPRLDPAQWRWIAGFLAECLPGRHQRNTRQMVALGLYSRDAMRQLREETGISYRRLSRGILSLHYDACQLRHARRSAARLQALGVDKRVLTPMQALALEPALEPALPMLSGASWCPDDESGDVHLFTRGLAEAAAGLGVEFRYSTRINALEAARGEVSGVSVTGPDGSYQRVTADAYVLALGSHSPLLAAPLGLRLPIYPAKGYSATAPVKSLIAAPMVSLTDESHKLVFSRLGDELRIAGTAELSGYSSSLDPRRCEALLRRARALFPAACDWEAARFWSGLRPATPGNVPLIGKSRVGRLYLNTGHGTLGWTEGAGSGRALAEIISGRMPQLDFAF

SEQ ID NO: 6486 - DNA, 1314 bp, Photorhabdus luminescens subsp. laumondii TTO1
  CDS (1)..(1314): transl_table=11
atgatgaaaatccttattttaggtagtggtgttattggtgtaaccagtgcctggtatttggtacagcaaggtcatgaagtcactgtcattgatcgccagggaagtgctgctgaggaaaccagtgcggcgaatgccgggcagatctcaccgggatacgcaaccccgtggggagcgccgggtattccattgaaagcgattaagtggatgtttcaacgtcatgctccattggctattcgtccggatggatcgctgtttcagttacgctggatgtggcagatgttgcgtaattgtgatgcaagtcactatgcgataaataagagccggatggtacgattggcagagtacagtcgtgactgtatcaaacagttgagggctgatacgggtattcaatacgaagggcgtcagagaggcacgcttcagttattccgcaccaataagcagtttgataatgcggtgaatgacatcgccgttcttgaacaggaaggtgttccttacaatttattaacggcagataaactcgcgacagtagagccggcattggcgcatgccgctcacaaactgacggggggcttacaattaccgaacgacgaaacgggtgattgccagctttttaccaaagagttggtaaaaatggcagaagcggcaggtgtaacgtttttgtttaataaacaggtcaaacagttattggtggaagggcatcggattatcggcgtccagtgcgaagatggtgttatgacagcagacaactatgttgttgcaatgggagcttattccactgaattactgaaaggtcttgtcaaaattccggtatatccactgaaaggttattcattaactatgcctattgtcgatgcggaacgggctccggtatctactgcattggatgaaacatacaaaattgcgattacccggtttgataaccgtattcgtgtgggtggaatggcagaagttgtcggtttcaatttgaatctgcttaaagcacgtcatgaaacattgaaaatggtggtgcaagacctttatccaggtggtggcgatattactcagactcatttttggacaggattacgtccaatgacgccagatggtacgccaattgttggtccgactgaatatcacaatctctacctaaatacagggcatggtacattgggatggacaatggcatgcggttccagtcaattactggcggatattatttcgggtaaaaagcctgctattgcatctgatgatttatccgtatttcgttatgttaatggttttaatacaaaattggtgccatttagccatcaattacacactgaactgagaggctaa

SEQ ID NO: 6487 - protein, 437 aa, Photorhabdus luminescens subsp. laumondii TTO1
MMKILILGSGVIGVTSAWYLVQQGHEVTVIDRQGSAAEETSAANAGQISPGYATPWGAPGIPLKAIKWMFQRHAPLAIRPDGSLFQLRWMWQMLRNCDASHYAINKSRMVRLAEYSRDCIKQLRADTGIQYEGRQRGTLQLFRTNKQFDNAVNDIAVLEQEGVPYNLLTADKLATVEPALAHAAHKLTGGLQLPNDETGDCQLFTKELVKMAEAAGVTFLFNKQVKQLLVEGHRIIGVQCEDGVMTADNYVVAMGAYSTELLKGLVKIPVYPLKGYSLTMPIVDAERAPVSTALDETYKIAITRFDNRIRVGGMAEVVGFNLNLLKARHETLKMVVQDLYPGGGDITQTHFWTGLRPMTPDGTPIVGPTEYHNLYLNTGHGTLGWTMACGSSQLLADIISGKKPAIASDDLSVFRYVNGFNTKLVPFSHQLHTELRG

SEQ ID NO: 6488 - DNA, 1248 bp, Bdellovibrio bacteriovorus HD100
  CDS (1)..(1248): transl_table=11
atgcaaaataaagaagtggatattctggtcgtgggcgccggtattattggcgcgtctgtgggtgctgaactttctcgtcgtggcgccaaggtgtgtgtgattgataagggcgccgtcggcaaaggctgttcttacggcaatgccggatggatgaccccttgttttgccatgcccctgccaatgcctggcatgctgattaaatccatgaagtggctgctgaatcccgaaggtcctctttacatcaaaccttcattatctttggatctggcgaactggatgtaccactttatgaagaacatgaacgccacccaagcacgccgcgcggtggatgccttggtggtgctttcccaaaaaagtctgaccgaatatgaaaagctggggcagctttatccggaaatccgcttccaacaaaaaggcctgatgatggtcagccgcacccaagccggcgtggctgctgccgtcgaagagctggaatacgtcaaaaacatcggcgtcaccggcaaggtcttaaacagcgacgacatccagcagatggagccagcactgaaagctccccttttgggcggtgtttactttgacaaggaagccatggccgaaccctatctagtggttcaggccctggccaaagaaatccgcaaaaacggtggtgaaattctggaaaactgcgagctgcaggatatggaaatctctggcaaccgtatcgaatcggtaaagacatcccaaggcaccattcgcgccaaacagattgtcatggccaccggcagctggtccaaatccctggccaagatgatgcgtctgcgggtgccgattctgggtggcaaaggctatgcgatgattgttccgaccctggaaaaacagccgcaatacccgatcatgctggtcgaaaaaaagatcgccatcaccccgcgcgaaaacacactgcgcatcgccggcacactggagctggtggaccaggacttctcaatcacccaaagacgtgttgaaagcatcaaaaagggcgccagagaatttttgcatcttccagaggagcttcaggtacaggaactgtgggcgggccttcgcccgtgcactccggatggtgtgcctttgattggatatcatcagaatctgaataatcttgttttggccgtgggtcaccagatgctgggactgcaaagtggcgcaggcacaggattgctggtcgcagaccttgtcgaaggaaagaagccgtttattgatatgtcggttgtgaacgcgaatcgtttctaa

SEQ ID NO: 6489 - protein, 415 aa, Bdellovibrio bacteriovorus HD100
MQNKEVDILVVGAGIIGASVGAELSRRGAKVCVIDKGAVGKGCSYGNAGWMTPCFAMPLPMPGMLIKSMKWLLNPEGPLYIKPSLSLDLANWMYHFMKNMNATQARRAVDALVVLSQKSLTEYEKLGQLYPEIRFQQKGLMMVSRTQAGVAAAVEELEYVKNIGVTGKVLNSDDIQQMEPALKAPLLGGVYFDKEAMAEPYLVVQALAKEIRKNGGEILENCELQDMEISGNRIESVKTSQGTIRAKQIVMATGSWSKSLAKMMRLRVPILGGKGYAMIVPTLEKQPQYPIMLVEKKIAITPRENTLRIAGTLELVDQDFSITQRRVESIKKGAREFLHLPEELQVQELWAGLRPCTPDGVPLIGYHQNLNNLVLAVGHQMLGLQSGAGTGLLVADLVEGKKPFIDMSVVNANRF

SEQ ID NO: 6490 - DNA, 1329 bp, Herminiimonas arsenicoxydans
  CDS (1)..(1329): transl_table=11
atgaaagtcatcgttttaggttcgggcattatcggtactgcatcggcatggttcttgaacaaggctggtcacgaagtcaccgtcattgatcgccaacccggcgcagcgcaggaaaccagttttgccaacggttgccagatttcggtatcgcacgcgacgccatgggccaataaaaccgctccgatgaccatactcaaatcactgggcaaggaagatgcgcctttgctgtatcgcttccgtgccgaatggctgcaatggaaatggggcgtgaattttctgcgcgaatgcatgcccgcacgtaccgtgcacaacatccaccagattgttgccatcgccgaatacagccgccagaccttgcaggctgtgcgtagcgaagtcgacatagactacgactgcctgacccgcggcatcctgcatttttataccagtcaaaaagactttgacgaatccctggcatctgctgccgtgatgcgcgatctgggttgcccacgcaccccgatgacagccgacgaagccgtcaaactggaaccggcattggcccatatccgcccgcagatcgtcggcgcagatttcactgaaacagacgaatccggcgatatctataaattcaccaccggcctggcacgcaaggcacaggaacgcggcgtacatttccaattcagcacgacagtgacgcgactgatcaccgagggcagcggcgctgcggcacgtgtgacgggggtagaagtcatcgatgcagaaggccgtcatcagacgctgcatgccgatgcatttgtgatggcgctgggcagcttttccgtaccgctactgcagccactcggcatccaactgatgatctatccaggcaagggatattcggccacctatccgcttgtgaacgccgagctggcacctaccgtctcgctgattgatgatggctacaaactggtgttgtcgcgcctgggtgacaaactgcgcgtagcaggcacctgcgaattcaacggctataccagggaattgaacgccacacgctgtgccgcgattacgcgccgcacacgcgagttatttccggacgcctgcgactatgagcagccggcatattgggctggcttgcgcccattgacgccctccaatgtgccttacatcggcaaaacaaagttcagcaatctcttcctgaataccgggcatggttcgctgggctggacgatgggttgcggttcggggcgcgccattgcggacatcatttccggtcatcaacctgacgtcgattttgcttttaccggcatggcgccgcgcaagatgtccaagcatgccttaatgccggcctgtccggatcgacatactgcctga

SEQ ID NO: 6491 - protein, 442 aa, Herminiimonas arsenicoxydans
MKVIVLGSGIIGTASAWFLNKAGHEVTVIDRQPGAAQETSFANGCQISVSHATPWANKTAPMTILKSLGKEDAPLLYRFRAEWLQWKWGVNFLRECMPARTVHNIHQIVAIAEYSRQTLQAVRSEVDIDYDCLTRGILHFYTSQKDFDESLASAAVMRDLGCPRTPMTADEAVKLEPALAHIRPQIVGADFTETDESGDIYKFTTGLARKAQERGVHFQFSTTVTRLITEGSGAAARVTGVEVIDAEGRHQTLHADAFVMALGSFSVPLLQPLGIQLMIYPGKGYSATYPLVNAELAPTVSLIDDGYKLVLSRLGDKLRVAGTCEFNGYTRELNATRCAAITRRTRELFPDACDYEQPAYWAGLRPLTPSNVPYIGKTKFSNLFLNTGHGSLGWTMGCGSGRAIADIISGHQPDVDFAFTGMAPRKMSKHALMPACPDRHTA

SEQ ID NO: 6492 - DNA, 1332 bp, Herminiimonas arsenicoxydans
  CDS (1)..(1332): transl_table=11
atggcggaaattgaaatgaaagtaattgtcttgggttcaggcatcatcggtactgcatctgcatggtttttaaacaaggccggccatgatgtcaccgtcattgatcgccagcctggcgccgcacaggaaaccagctttgccaatggctgccagatttccgtctcgcatgccgagccatgggccaatccggccgcgcccatgaaagtcctgaaatggctgggcaaggaagatgcgccattactgtatcgcttccgccccgaatggctgcagtggaagtgggccttgaacttcctgcgtgaatgcacgccagcccgcaccaatgaaaacatccgccagatcgtcgccatctgcgaatacagccgccagactctggtcggtttgcgcgccgaaaccgggatcgaatacgataatctgaatcgcggcattctgcatttctatacggaacaaaaagaattcgacgattcgctgccggcagccaaactgatgcgcgatctgggttgcccacgcgattccatcagcacggatgaagtcatcaggatagaacctgcattggcccgcatacgcgacaagatagtcggcggcgacttcaccgctaacgacgaatccggcgatgtctacaaattcacttccggcctggcgaaaaagtcagccgaagccggcgtcaattttcaattcaataccacggtcacccgcctgattaccgaaggtgccggcgccagcgccaaaatcaccggcgtggaaatcatcacgccggaaggtcgccacgaagtcctgcacgccgacgcatttgtattggcgatgggcagtttttctaccgcactggcaaaaccgttgggcatcgatctgatgatttatccgggtaagggttattcggcaacctacgccgtgaccgatccgtccgccgcgccatcggtatcactgaccgacgacggctacaaactggtagtctcgcgtctgggcgatcgcctgcgtgtcgccggcacttgcgaattgaacggttacacgcgcgacttgaataccgcacgttgcgaagccatcacgcgccgcacgcgcgaattattcccggatgcctgcgattacgaaaaccctgtgtactggaccggcttgcgcccattgacgccatccaatgtgccttacatcggcaaaacaaaattcagcaatctgttcctgaacaccggccacggcacactgggttggaccatgggttgcggttcgggccgcgccctggcagatatcgtttccggacatcaaccggaagtgaatttccgcttcaccggcatgccgtatcgctcatccgatcgcatcatcacgccgcaatcgatcactgcctaa

SEQ ID NO: 6493 - protein, 443 aa, Herminiimonas arsenicoxydans
MAEIEMKVIVLGSGIIGTASAWFLNKAGHDVTVIDRQPGAAQETSFANGCQISVSHAEPWANPAAPMKVLKWLGKEDAPLLYRFRPEWLQWKWALNFLRECTPARTNENIRQIVAICEYSRQTLVGLRAETGIEYDNLNRGILHFYTEQKEFDDSLPAAKLMRDLGCPRDSISTDEVIRIEPALARIRDKIVGGDFTANDESGDVYKFTSGLAKKSAEAGVNFQFNTTVTRLITEGAGASAKITGVEIITPEGRHEVLHADAFVLAMGSFSTALAKPLGIDLMIYPGKGYSATYAVTDPSAAPSVSLTDDGYKLVVSRLGDRLRVAGTCELNGYTRDLNTARCEAITRRTRELFPDACDYENPVYWTGLRPLTPSNVPYIGKTKFSNLFLNTGHGTLGWTMGCGSGRALADIVSGHQPEVNFRFTGMPYRSSDRIITPQSITA

SEQ ID NO: 6494 - DNA, 1245 bp, Herminiimonas arsenicoxydans
  CDS (1)..(1245): transl_table=11
atgcaagtagcagttgttggtgccggtgtagtcggggtctgtactgcgtattttttagccgaggcaggacatcaagtggtggtcatcgaacgtcgcaacaatgtggcggaagaagccagcttcggcgactcaggcattcttgcgccagccagcattgcaccgtgggcagcgcccggcgccgcaaaatccctgctctctcatctgctcaaatccgaatcgcccctgctgttcaatcggatgctggatccttcgatgtggcgctggatacggcgctggctgaaagaatgcgatatcgagcgttatcagatcaaccgcaaccgcatgcaacgcattgctttttacagcgatcaaatcatgcggcaattgcgcgaactgcatcagctggattatgagcaggcgcccggttacttgcaattatttcgctccgaacgcgatctgcaactggcaaaacccgctttcgattttcttgccgcgcatggcattcctcacgattttccggatgcagatggcgcgcgtgcgatagaacccgcattgaatccgcatacgccgcttgccggcagcctgcacctgccgactgacgaatccggcaactgtcctttgttcacgcgccagatgcgccagcttgcacaagccatcggcgtggaatttcattttggctgcaacgtcaaatcgatacggcaatccgaacacggtgtggatatccagatagaagaccgcagctttgccgccgaccgggtggtgctggcaagcggcgccgacagcagcaagctgctcgcaccgctgggtttgcatttaccggtctatccggtaaaaagctattcggcgacggccactatccgcaatttcgaatcggcgccagtggccgccttgatggatgaatcctacaaggtcgccatcacgcgcatgggcaatcgcatccgcatctcaggcatggcagagctgggggcgcgcacgtcggacttgcgccaggccggattgaataccctgcttaaagtcggctacgactggtttccggatgcatgcaactacaacactgctgcgttctggtccggcaccagtctgatgttgccggacggcccgccgctcataggtgcaacgcaagtcaggaatgtctacgttaacatcggccacggttctaccggctgggccatggcggcaggttcagccagggtattggcggatatcgtttcaggtcgtaccccggatatcgatctcgacggtttgacaccattgcggtttcgctga

SEQ ID NO: 6495 - protein, 414 aa, Herminiimonas arsenicoxydans
MQVAVVGAGVVGVCTAYFLAEAGHQVVVIERRNNVAEEASFGDSGILAPASIAPWAAPGAAKSLLSHLLKSESPLLFNRMLDPSMWRWIRRWLKECDIERYQINRNRMQRIAFYSDQIMRQLRELHQLDYEQAPGYLQLFRSERDLQLAKPAFDFLAAHGIPHDFPDADGARAIEPALNPHTPLAGSLHLPTDESGNCPLFTRQMRQLAQAIGVEFHFGCNVKSIRQSEHGVDIQIEDRSFAADRVVLASGADSSKLLAPLGLHLPVYPVKSYSATATIRNFESAPVAALMDESYKVAITRMGNRIRISGMAELGARTSDLRQAGLNTLLKVGYDWFPDACNYNTAAFWSGTSLMLPDGPPLIGATQVRNVYVNIGHGSTGWAMAAGSARVLADIVSGRTPDIDLDGLTPLRFR

SEQ ID NO: 6496 - DNA, 1266 bp, Burkholderia vietnamiensis G4
  CDS (1)..(1266): transl_table=11
atgtcacgaatcgccatcatcggcgccgggatcaccggcgtcacgactgcctacgcgcttgctcagcgtggatactctgtcactgtactagaacgccaccgttatgccgcaatggaaacatcgttcgcgaacggcggacagttgtcagcgagcaatgccgaagtctggaacagcagcgcaaccgtgctgaagggactccggtggatgctaaagagcgacgcgccgcttttgatgaacccgcgccccagttggcacaagtattcctggatcggcgagtttctcaggcagattcctaattaccatgacaatacgatcgagacagttcgtctcgctatcgccgctcgggagcatcttttctcgatcgcggagcgcgagcatatcgattttgatcttgaacgaagagggatcctgcatttctactcgacgcgtgccgaatttgacgctgcgacgaaggtgaatgagctattgcgtgccggtgggttggatcgacggcccgtctccgcgaatgaaatcacctgtattgagcccgcgctgcatggggatttttacggtgggttctttacggaatcggatgctacgggagacattcataaatttacccgcggactggcggaggcttgcgtacgacacggagttgagttccgttacgagacaaatgttgacgcgttgtccgtaaatcagccggacggaatctcaatatctacccaaaccggagaggatcgttcgacctcggtctttgatggtgtggtcatatgcgcaggtgttggcagtcgcggtttcgcgtctgtcctcggcgaccatgtgaacatctatccggtgaaaggctattcgattactgtctgcctcgacgatgaggatagccgtcgcgatgcgccgtgggtgagcttgctagatgacaaagccaagatcgtcaccagcagactcggtcgggaccggtttagagttgcagggacagcggagttgaatggcttcaacagggacattcgcgcggaccgaatcgaaccgctggtgagatggacgcgggatcactttcccggggtatcgacagcacggacgatcccatgggcggggttgcggcctatgttaccgtcaatgctgcctcgcgttggggcgggtagaacgcccggcgttttctacaacactggccacggtcatcttggttggactctgtcggctgcgactgccgaactcctggcagacgtcgtgcttgaacatgcgcctcggaaaagctcttcgctctctttcaaaatgagaaaggaaacgtga

SEQ ID NO: 6497 - protein, 421 aa, Burkholderia vietnamiensis G4
MSRIAIIGAGITGVTTAYALAQRGYSVTVLERHRYAAMETSFANGGQLSASNAEVWNSSATVLKGLRWMLKSDAPLLMNPRPSWHKYSWIGEFLRQIPNYHDNTIETVRLAIAAREHLFSIAEREHIDFDLERRGILHFYSTRAEFDAATKVNELLRAGGLDRRPVSANEITCIEPALHGDFYGGFFTESDATGDIHKFTRGLAEACVRHGVEFRYETNVDALSVNQPDGISISTQTGEDRSTSVFDGVVICAGVGSRGFASVLGDHVNIYPVKGYSITVCLDDEDSRRDAPWVSLLDDKAKIVTSRLGRDRFRVAGTAELNGFNRDIRADRIEPLVRWTRDHFPGVSTARTIPWAGLRPMLPSMLPRVGAGRTPGVFYNTGHGHLGWTLSAATAELLADVVLEHAPRKSSSLSFKMRKET

SEQ ID NO: 6498 - DNA, 1239 bp, Bradyrhizobium sp. ORS278
  CDS (1)..(1239): transl_table=11
atgcggagcgcaatcgttcttggcgggggcatggtcggcgtcggcacggcgctgcacctgcagatcaggggctggtcggtggcgctcgtcgaccgccgcgagcccggccgcgagaccagctacggcaatgccggcatcatccagagcgaggccgtccggccctacgcgatgccccatgacatcgctggcgtgctcgacatcgcgctggcgcgcaccaatgacgtccactacacgctcgccggcctgccgtatcacgtgcggccgctgctgcaatattggtggaattcgtttcccgcgcgccacgagatcctgacgcgcacctatgcgcagctgatcgcgcgtgccgcgcccgagcacgagccgctgatccaggccgccggcgccggcaatctcgtgcgccgcgacggctttcgcgtgctgcatcggacgcaagcgcagttcgacaaggaggcgaaagaagccgaagcggtcggcaaggcgtacggggtcaagtacagactgctcagcgccagcgagctggcgaaggccgagcccggcctgaccgacagcggcatcggcggcctgcactggcaggagccgtggacggtgtccgatccggggagcctcgttgcgtcctacgcggatctgttcgtcaagcgcggcggcaggctgctgacgggcgacgcgacgacgctgtcgcaagcgggcagcgggtgggccgtcacgacgcaggaaggccgcatcgaggccgaggccgtcgtcgtcgcgctcgggccgtggtcgccggaatttctgaagcgcttcggcatggacattccgatggtgcgcaagcgcggctatcaccgccactattcaggcggcgcgccgctcgatttgccgctgcgcgatgctgccttcggctacctcatgaacccgatggccaagggcgtgcgcatcaccaccggcgccgagctgtcagcgccggatgcgaagccgacgccggtgcaactcgggaaggccgaagcggccgcgcgccagctgatcgatctcggccagccggtcgagcccgagccgtggcttggtacgcgcccgtgcatgccggacatgctgcccgtcgtcggccaggcggcgcggcacaagggcctgtggctgcatttcggccacggccatcagggctttaccctgggaccggcgaccggccgcatcctcgccgagctgatgagcggcgaaagacccgatgtcgacgtgacggcgtgcgcgccggcgcgcttcggtgcgtag

SEQ ID NO: 6499 - protein, 412 aa, Bradyrhizobium sp. ORS278
MRSAIVLGGGMVGVGTALHLQIRGWSVALVDRREPGRETSYGNAGIIQSEAVRPYAMPHDIAGVLDIALARTNDVHYTLAGLPYHVRPLLQYWWNSFPARHEILTRTYAQLIARAAPEHEPLIQAAGAGNLVRRDGFRVLHRTQAQFDKEAKEAEAVGKAYGVKYRLLSASELAKAEPGLTDSGIGGLHWQEPWTVSDPGSLVASYADLFVKRGGRLLTGDATTLSQAGSGWAVTTQEGRIEAEAVVVALGPWSPEFLKRFGMDIPMVRKRGYHRHYSGGAPLDLPLRDAAFGYLMNPMAKGVRITTGAELSAPDAKPTPVQLGKAEAAARQLIDLGQPVEPEPWLGTRPCMPDMLPVVGQAARHKGLWLHFGHGHQGFTLGPATGRILAELMSGERPDVDVTACAPARFGA

SEQ ID NO: 6500 - DNA, 1254 bp, Klebsiella pneumoniae subsp. pneumoniae MGH 78578
  CDS (1)..(1254): transl_table=11
atgaacaaacgcattgtcattatcggcggcggcgtggtcggtctggccacggcctgggaactgatcaagcgcggccatcaggtgcaattactggagcgcaatgccgaaccgggcagcgccaccagttttgccaacggcggacaattaagttaccgctacgtcgccccccttgccgacagcggcgttcctctgcagggaatgaaatggatgggcaaagccgattcgccgctgaatatgcgtctcaggatgtctctccagcagtggcgctggctgctgcagtttctgcgcgcctgtaataaccagaccaataaaatgaatggcgaccatattttacgcctgtcgctgctcagccgtcaggtcatgcaggcgtggcgggatgaggataatcttgccgatttccactggcggcgcagcggaaaattaattatccatcgtcgcgaatatgattttaataaagcagcaaaagggattgatcctcagtatcagcaggcgctgaatgctgaagcctgcctgcagctggagccggcgctcaaacatattagtccttctctgcagggcggaatctattcgccaggcgatgaaacggcagattgtcatcagttctgccttgccctgctcgacaagctcaatgccagcagcgactttagcctgctgacccagtgtgaggtgcggcgactccataagcgcgggggacgcatcagcagcctggagaccagtcaggggaccctcaccggcgatgagtatgtcgtcgccgccggtaacggcagtggttctctgcttgggcatctgggggttcgcgtgccgctgtgcgccctgaaggggtacagcctgaccctgccctatcctgaaaaagcaggtattgcccctgacatcagcgtcaccgactacgggcacaaaatcgtttatgcccgccttggccaacagctgcgcatcgcggcgatggtggacatcggctacgacggcgacgaactgcgcgaatgccgcattcaggcgctgaagaacatcgtcgcccgcagctttcctgaactggaggggctggacgaggccgaagtctggaccggcatgcgcccgtcaacgccagccggcccgccgatgctggggcgtgccggctaccccaacctgtggatgaacctcggccagggtagcctcggctttactctcgccgccggcagcgcggtggtgctgggcgcgttaatcgacaatcagatgccagacatttctttagaaggtctcacatggaaacaaaccgcatga

SEQ ID NO: 6501 - protein, 417 aa, Klebsiella pneumoniae subsp. pneumoniae MGH 78578
MNKRIVIIGGGVVGLATAWELIKRGHQVQLLERNAEPGSATSFANGGQLSYRYVAPLADSGVPLQGMKWMGKADSPLNMRLRMSLQQWRWLLQFLRACNNQTNKMNGDHILRLSLLSRQVMQAWRDEDNLADFHWRRSGKLIIHRREYDFNKAAKGIDPQYQQALNAEACLQLEPALKHISPSLQGGIYSPGDETADCHQFCLALLDKLNASSDFSLLTQCEVRRLHKRGGRISSLETSQGTLTGDEYVVAAGNGSGSLLGHLGVRVPLCALKGYSLTLPYPEKAGIAPDISVTDYGHKIVYARLGQQLRIAAMVDIGYDGDELRECRIQALKNIVARSFPELEGLDEAEVWTGMRPSTPAGPPMLGRAGYPNLWMNLGQGSLGFTLAAGSAVVLGALIDNQMPDISLEGLTWKQTA

SEQ ID NO: 6502 - DNA, 1266 bp, Xanthobacter autotrophicus Py2
  CDS (1)..(1266): transl_table=11
atgcgcattctgattctcggcagcggcgtcgtgggaactgcatcggcctattacctggcaaaggccgggcacgaggtgaccgtgctcgaccgccagcgggcggcgggcatggaaacctcatttgccaatgcggggcaggtctcgcccggctattcggcgccctgggccggaccgggcatcccggtgaaggccatcaagtggctgctcatgcaccaccgcccgctggttgtgtggccgagcctcgaccccaagctctatctgtggctggccaagatgctggccaactgcaccgaggaggcctaccgccgcaacaaggcgcgcatggtggccctcgccgaatacagccgcgacgccctcgatgccctgaggtccgagaccggcatcgcctatgacgagcgcatgctgggcacgctccagctgttccgcacccgcaagcagctcgaccatgtgcattccgacaccgaggtgctggacgcccacaacgtccgctacgagctgctcgacccctcgggctgcatccgcgccgagccggcgctcgcccgggtgcgggacaagttcgtcggcggcttgcgcttgccgggggacgagaccggcgacgcccacatcttcacccgcaatcttgcggacatctgcgcgcggcagggcgtcaccttccgctatggcgtcaccgtggaagggctgaggcacgaggccgggcgcatcaccggcgtggcgctggcggggggcgaaatcgccaccgccgacatctacgtggccgccatgggcagctataccccggcgctgctcgcgcctttgggcatcaggctgccggtctatccggtgaagggctattccctcaccctgcccatcaccgacccggacgcggcgccccgctccaccgtcatggacgagacctacaaggtggccatcacccgcctcggcgagcgcatccgggtggggggaacggcggagctcgccggcttcgacctcagcctcagggagccgcgccgggccaccctcgcccattcggtgggcgacctgttccccgccggcggcgacatctcaaaagccacattctggaccgggctgcgccccatgacgccggacggcacccccatcatcggcccgacgaagctcgacaatctctttaccaataccggccacgggacgctgggctggaccatggcctgcggctccgggcgggtgctcgccgacctgataggcggacgcgcccccgacatcgacaccgccgacctctcggtcgcccgttatgctgaggcggcctga

SEQ ID NO: 6503 - protein, 421 aa, Xanthobacter autotrophicus Py2
MRILILGSGVVGTASAYYLAKAGHEVTVLDRQRAAGMETSFANAGQVSPGYSAPWAGPGIPVKAIKWLLMHHRPLVVWPSLDPKLYLWLAKMLANCTEEAYRRNKARMVALAEYSRDALDALRSETGIAYDERMLGTLQLFRTRKQLDHVHSDTEVLDAHNVRYELLDPSGCIRAEPALARVRDKFVGGLRLPGDETGDAHIFTRNLADICARQGVTFRYGVTVEGLRHEAGRITGVALAGGEIATADIYVAAMGSYTPALLAPLGIRLPVYPVKGYSLTLPITDPDAAPRSTVMDETYKVAITRLGERIRVGGTAELAGFDLSLREPRRATLAHSVGDLFPAGGDISKATFWTGLRPMTPDGTPIIGPTKLDNLFTNTGHGTLGWTMACGSGRVLADLIGGRAPDIDTADLSVARYAEAA

SEQ ID NO: 6504 - DNA, 1197 bp, Pseudomonas putida GB-1
  CDS (1)..(1197): transl_table=11
atgaagcagcgggtaacggtaatcggtggcggggtggttggcctggcaacggcctacgctcttgttcgtgacgggtattcggtagcgttgatcgaggcgcgcgacagcctggcgtcggccaccagttttgccaatggcgggcaattgtcctatcggtatgtggcgccactggccgatgccggggtgccctggcaggcactgggctggctgctgcagggcgagtcgccgctgcgcctgcgcttgcgccttgacccggcgcagtggcgctggctgctggcctttaccctggcttgccggcgcagcgtcaatcgccgtaatgccgggcaattgctggagctggcgttgcacagccaggccgttctggggcaatggcgcgaggcgcagaacctgggcgactttgcctggcggcgcaacggcaagctggtggcttttcgcagcgagcgggcctttgcccatggccgagcgcagttgacggaccctgccagccagcgggttttggcggcagtcgagctgcgcgcgctggagcctgcattggcgggggcaccgtttgtcggtggcgtgttcacagcggatgaagaggtgggtgattgccacttgttctgccagcgcctggaggccctgttacgcgcttcggggcaatgccgtgttctgcttggtcggccagtgacgcaactggtgcggtgccaggaccaggttgtagcgctacaactgggcgacgagcagatggaggtggagcagttggtgctatgcgccgggcatcgcggcccaggcttggcactaccgggggtgcatataccggtctacccgctgaagggctacagcctgacggcaccgatcggtgccgggcaccaagccccggaagtgagccttaccgattatgagcgcaagatcgtctacgcccgcctggggcagcagctacgggtagcggcgatggtggacattgtcggttttgacgagtcggtggaaaagcgcaggttgcagagcatgcggcggctggcacttgagacgttacccaaggctgcggattataaccaggcggtggagtgggccgggatgcggccggcgacaccgaccggggtgccgatcattggcgggacggtgtatcgcaacttgtggctgaacctggggcatggtgcgttggggtttaccttggcctgtggcagtgcgcagcgcctggtcgaaatgatggggcgatag

SEQ ID NO: 6505 - protein, 398 aa, Pseudomonas putida GB-1
MKQRVTVIGGGVVGLATAYALVRDGYSVALIEARDSLASATSFANGGQLSYRYVAPLADAGVPWQALGWLLQGESPLRLRLRLDPAQWRWLLAFTLACRRSVNRRNAGQLLELALHSQAVLGQWREAQNLGDFAWRRNGKLVAFRSERAFAHGRAQLTDPASQRVLAAVELRALEPALAGAPFVGGVFTADEEVGDCHLFCQRLEALLRASGQCRVLLGRPVTQLVRCQDQVVALQLGDEQMEVEQLVLCAGHRGPGLALPGVHIPVYPLKGYSLTAPIGAGHQAPEVSLTDYERKIVYARLGQQLRVAAMVDIVGFDESVEKRRLQSMRRLALETLPKAADYNQAVEWAGMRPATPTGVPIIGGTVYRNLWLNLGHGALGFTLACGSAQRLVEMMGR

SEQ ID NO: 6506 - DNA, 1266 bp, Cupriavidus taiwanensis
  CDS (1)..(1266): transl_table=11
atgaagacaatcgctgtcatcggcggtggcatcactggtgtcaccaccgcctacgcgctcgcccggcgcggattctccgtcacgctgttcgagcggcaccgctacgccgccatggagacctcgttcgccaacggcgggcagctctccgcttccaacgccgaggtctggacccactggtccacgctcgtcaaggggatgaagtggatgctgcgcaacgatgcgccgctgctgatcaatccccggcccagctggcacaagctgtcgtggttcgccgagttcatcgcgtcgattccccactatcgccgcaacaccatcgagaccgctcgcctggccatcgccgcgcgcgagcacctgtttgcgtgggcggcgcaggaaggcatcgacttcgacctgaagcgggccggcatcctccatatctaccgcgaccgcgccggcttcgagcatgccggccgggtctccgcgctgctggcgcaaggcggactggagcggcgcgccgtgaccccgcaggaaatgcgcgcgatcgagccgacgctggcggggtcgtactacggcggctacttcaccgaaagcgattccaccggcgacatccacaagttcaccagcggcctggccgcggccattgcgcgcctgggcgtgcgctgcctctacggccaggacgtgcgtgcagtaaaaacagacggcaagcgcgccaccgtcaccgtgcaggatggcgccgacacggccacctccaccttcgacggcgccgtgatctgcgcaggcacggcaagccgcgcgctggcggccgggctgggcgaccgcgtcaacatctatccggtcaagggctattcgatcaccgtcaacctggccgacgacgcgagccgcgcggcggcgccgacggtgagcctgctcgacgacgaaaccaagctcgtcaccagccgcctcggcgacgaccgcttccgcgtcgccggcaccgccgagttcaacggcaccaaccgcgatatccgcgccgaccgcatccgcccgctggtggactgggtgcagcagtgcttccccggcgtcagcacgcgcagcgtggtgccgtgggccgggctgcggccgatgatgcccgacatgctgccgcgcgtgggtcgcggccgcgcggcctgcatcttctacaacaccggccacgggcatttggggtggaccttgtcggcggtgacggcggacatggtggcgggggttgtggaccaggcgctgggaagcgcgccggcgatggcggttccggccgctatttctgcacctgcctga

SEQ ID NO: 6507 - protein, 421 aa, Cupriavidus taiwanensis
MKTIAVIGGGITGVTTAYALARRGFSVTLFERHRYAAMETSFANGGQLSASNAEVWTHWSTLVKGMKWMLRNDAPLLINPRPSWHKLSWFAEFIASIPHYRRNTIETARLAIAAREHLFAWAAQEGIDFDLKRAGILHIYRDRAGFEHAGRVSALLAQGGLERRAVTPQEMRAIEPTLAGSYYGGYFTESDSTGDIHKFTSGLAAAIARLGVRCLYGQDVRAVKTDGKRATVTVQDGADTATSTFDGAVICAGTASRALAAGLGDRVNIYPVKGYSITVNLADDASRAAAPTVSLLDDETKLVTSRLGDDRFRVAGTAEFNGTNRDIRADRIRPLVDWVQQCFPGVSTRSVVPWAGLRPMMPDMLPRVGRGRAACIFYNTGHGHLGWTLSAVTADMVAGVVDQALGSAPAMAVPAAISAPA

SEQ ID NO: 6508 - DNA, 1251 bp, Xanthomonas campestris pv. campestris
  CDS (1)..(1251): transl_table=11
atgagcaacgcacgcgtggatgtggtggtcatcggcgccggtgcaatcgggctggccaccgcgcgtgcgttggtcggtgccggccggcaggtgcaggtgcttgatgccggcgcgatcggcggggcaacctcgtatggcaactgcggcaccatcacgcccagccatgcgccgccgctggcagcgccgggcatgcttggccaggcgctgaaatggatgttcacgccggatgcgccgctgtacatcccgccgcggctggatcccacgttgtggcgttggttatggcgctttgcacggcgctgcaaccggcgcgattggcgggccagcgtgcaggcgcgcgctgcgctgctacacgatgcacgcctgcggcttgcccactggatcgaacgcgacgggctggactgcgaattccgcagcgatggcttggactatgtattcggcgatgcgcgcaggttcgaacattaccgtgccgaatgcgcagcgttggcgcagtggggtatccaggcacaggccatcgacggcgaagactatgtgcgggacgaccccgcctttcgccaggggattgccggcgcgatccacttccccggcgatgcgcatctgcgccccgaacgctacaccgccgagctggcacgcgtgctgcgcgcacgtggcggcgtgatccaggaacactgccgtgtgcacgccgtgcgtccggatgcgcagggcgtgtgcctgcacaccgcgcacggacaactgcatgcgcgcgaggtggtgatcgccaccgggccgtggtcgccgcaacttgctgcacaactggggctacggctgccggtgcaggccggcaaggggtattcgatcacctatagcgcgccggcgcagatgccaaaacgcccggtggtgctgaaggatcgttgggtgttcgtggtgccatggcgcgaccgcctgcggatcggcagcaccatggaattctccggccacaacagccaactcaacgcgacacgcctggcagcgctggagcgcgcggcagcgcaattcctgcatgcgccgaaaggccctgtcgaaatcgaacgctggtatggatggcgcccgatgacctgggacgatgtgccggtgttgggcgcggtgccgcgcagtcctcacgtctggctcgcggccggccatggcatgctcggcatcagcatgagtactgcaagtggacaactgatggccgacctgatcaccgggcgcgcacccgcgctggacccgcatccctaccgcgcagagcgttttgcatga

SEQ ID NO: 6509 - protein, 416 aa, Xanthomonas campestris pv. campestris
MSNARVDVVVIGAGAIGLATARALVGAGRQVQVLDAGAIGGATSYGNCGTITPSHAPPLAAPGMLGQALKWMFTPDAPLYIPPRLDPTLWRWLWRFARRCNRRDWRASVQARAALLHDARLRLAHWIERDGLDCEFRSDGLDYVFGDARRFEHYRAECAALAQWGIQAQAIDGEDYVRDDPAFRQGIAGAIHFPGDAHLRPERYTAELARVLRARGGVIQEHCRVHAVRPDAQGVCLHTAHGQLHAREVVIATGPWSPQLAAQLGLRLPVQAGKGYSITYSAPAQMPKRPVVLKDRWVFVVPWRDRLRIGSTMEFSGHNSQLNATRLAALERAAAQFLHAPKGPVEIERWYGWRPMTWDDVPVLGAVPRSPHVWLAAGHGMLGISMSTASGQLMADLITGRAPALDPHPYRAERFA

SEQ ID NO: 6510 - DNA, 1290 bp, Xanthomonas campestris pv. campestris
  CDS (1)..(1290): transl_table=11
atgcgggtgctcattctcggtagcggcgtcatcggcaccaccaccgcctggtatctggcgcagtccggctgcgaggtcaccgtggtggaccggcaaccggcttccgggctggaaaccagctacgccaacgccggccagctctccttcggctacacctcgccgtgggccgcccccggcgtgccgggcaaggcggtgaagtggctgttcgaacagcatgccccactgtcgatccgccccacccgcgacctgcgccagctggcctggctcagccagatgctgcgcaactgcaccgccgaacgctacgcggtgaacaaggcgcgcatggtgcgtttgtccgattacagccgtgactgcctcaatgaactgcgtgccagcaccgggctggaattcgaaggccgccagctcggcaccacgcagctgttccgcacccagcaacagctggacgcggccgcgcaggacatcgaggtgctggcgcagtacggcgtgccctacgagctgctatccccggcgcagatcgcccagtacgagcccggcctggccggcggtggcgcgcagatggccggcgcgctgcacctgcccgaagaccagaccggcgattgccggctgttcacccagcgcctggccgacctggccacgcaggccggcgtgcaattccgctatgggcagcagatcgagcgcctggagcatgcgggcggcgaaatcaccggcgtgcagatcgacggccgcctggtcaccgccgaccgctatgtgctggcattgggcagctactcggccgatctgctgctgtcgctgggcctgcatctgccggtgtacccgctcaagggctattcgctgaccatcccgattgtggacgcgcaacgcgcgccaacttccacggtgctggacgagagctacaagatcgcgctgacccgcttcgatgagcgcatccgcgtcgggggcatggccgaggtggccggcttcgacctgtcgttgaatccgcgccgccgcgccaccctggaaatggtggtcaacgacctgttccccggtgctggcgatctggcccaggccgagttctggaccggcctgcgcccggccacgccggacggcaccccggtggtgggcgccacgccgtacgccaacctgttcctcaacaccggccacggcacgctgggctggaccatggcctgcggctccggccgctacctggccgacctgatgcagggccgcacgcccgagatcgataccgaaggcctggacgtgttccgttatctgtccacgcgcagcacgcgcccgcaccgggaggccgcgtag

SEQ ID NO: 6511 - protein, 429 aa, Xanthomonas campestris pv. campestris
MRVLILGSGVIGTTTAWYLAQSGCEVTVVDRQPASGLETSYANAGQLSFGYTSPWAAPGVPGKAVKWLFEQHAPLSIRPTRDLRQLAWLSQMLRNCTAERYAVNKARMVRLSDYSRDCLNELRASTGLEFEGRQLGTTQLFRTQQQLDAAAQDIEVLAQYGVPYELLSPAQIAQYEPGLAGGGAQMAGALHLPEDQTGDCRLFTQRLADLATQAGVQFRYGQQIERLEHAGGEITGVQIDGRLVTADRYVLALGSYSADLLLSLGLHLPVYPLKGYSLTIPIVDAQRAPTSTVLDESYKIALTRFDERIRVGGMAEVAGFDLSLNPRRRATLEMVVNDLFPGAGDLAQAEFWTGLRPATPDGTPVVGATPYANLFLNTGHGTLGWTMACGSGRYLADLMQGRTPEIDTEGLDVFRYLSTRSTRPHREAA

SEQ ID NO: 6512 - DNA, 1245 bp, Acinetobacter sp. ADP1
  CDS (1)..(1245): transl_table=11
atgtctcatattattgttattggcgcaggaattacgggtgtaacctctgcgtatgaactgataaaactcgggtttcaggtgactgttattgatcgccatttatttccagcgatggaaacatcttttgcgaatggtggacagctttcagcttgtaatgcagaagtatggaatcagaggtcgacaatatccaaaggaattaaatggatgtcgaagaaagatgcacctctattgctcaatccttcatttaatctacacaaatatagctggctatttgaatttttatcgcatattaaacattacgaacaaaatacaatagagactgtgcgtcttgcattacttgcaagaaaacggctatttgaaattgcagaaattgaaaatatcgattttaatctggaaagaaggggaattttacatatttatcacaccccaagtgattatgaaattgcaaaaaatgtgaatgaccttttaaacaaagccacattgcatcgttatcaggttaatcctgacgaaataaaaacaatagaaccagcattatctggtgaatactgtggggggtattacacacctgatgatgcgactggtgatattcataaattttgtgtggggctggcagattcttccaagcgggatggtgtagattataaattcggctgggatgtaaatcagatagagcttttggaaaaaggcgtgattgtatcgtgtattccgagtacagaaaatatgactgagccatcgagtcaacacctcaggctagaagcagatgggatagtggtttgtggtggtgtcggaagttatcaacttgcacatatgttgggtgatcgcgtgaatgtgtatcctgtaaaaggctactccattacagttcatcttaatgatgaacacagcatcgaaaatgcgccatgggtaagtttattagatgaaagcgcgaaaattgtaacctctcgtttaggtaaagaccgattacgtgtagcaggaactgctgaatttaatggttataatcgcgatatacgtgccgataggattcaaccactaataaactgggtaaatgcaaattttgagatctctacagagcacgtggtaccgtggtctgggttaagaccgatgatgcccaatatgatgcctgttgttagacaaggtaagcatccacgtgttttttataatacagggcatggtcatctggggtggactctttcggctgctacagctgcaattattggtcaggaaatccagtcaaaaataccagtctaa

SEQ ID NO: 6513 - protein, 414 aa, Acinetobacter sp. ADP1
MSHIIVIGAGITGVTSAYELIKLGFQVTVIDRHLFPAMETSFANGGQLSACNAEVWNQRSTISKGIKWMSKKDAPLLLNPSFNLHKYSWLFEFLSHIKHYEQNTIETVRLALLARKRLFEIAEIENIDFNLERRGILHIYHTPSDYEIAKNVNDLLNKATLHRYQVNPDEIKTIEPALSGEYCGGYYTPDDATGDIHKFCVGLADSSKRDGVDYKFGWDVNQIELLEKGVIVSCIPSTENMTEPSSQHLRLEADGIVVCGGVGSYQLAHMLGDRVNVYPVKGYSITVHLNDEHSIENAPWVSLLDESAKIVTSRLGKDRLRVAGTAEFNGYNRDIRADRIQPLINWVNANFEISTEHVVPWSGLRPMMPNMMPVVRQGKHPRVFYNTGHGHLGWTLSAATAAIIGQEIQSKIPV

SEQ ID NO: 6514 - DNA, 1305 bp, Burkholderia pseudomallei K96243
  CDS (1)..(1305): transl_table=11
atggatgtaatcgtcatcggcggcggcatcgccggcatcgccaccgcctaccagttgcgcgcggccggccatcgcgtatgcgtcgtcgagcgccacgcgacggtcgcgcaaggcgcgacctacggccagggcggcgtgctgctgccgacgccgctcgacgtctggttcggcccgacgttcatgcgcgagcggcgcgcgcaaaagagcggcgtcgtctacaagccgggcctgaacggcgcgctgcggcgcttcacgcgccgcctcgacgcgctgcgcgagcccgccgcgttcgccgcgcaatacgcgcagctgcgcccgctcgtcgagctgtcgcgcgaggcgatcgccgacgtcgaagcgcgcttcaatctcgaattcgaacagaagagcggcgtgctgcacgtcgtgcgcgacgcggccgaatgggacgcgacgcagcccgcgctcgacctgatgcgcgacctcggccagccttacgagacgctcacgcccgacgcgtgcgcggcgctcgaaccgtcgatgcccgtcgatcccgcgttcgcgggcggcgtgctgctcgcgcaggagcgcaccgcgaactgcccgctcttcgcgaagctcgtcaagcaggtgctcgacgagcacgacgtgcagttccggctcggccgcgcggtcgcggcgatccgcaccgacgcgcgacgcgccgccgtcgagctcgcgcccgacgcggccgatccgcgcgcggcgaaatcgaaggaagtggacgtgatctccgccgacgcggtcgtcgtcgcggcgggcaccgaaagcctcgcgctcgtcgcgccgctcggcgtgcgcgcgccgctgcatccggtgcgcatccacacgctgacggcgcccctcgcgtatgaggagcacgcgccgcatctgagcatcgtcgattcggccaagcggatcgcgatcacccggctcggccagcggctgcgaatcggcggcggcgccgtgctgcaaagcgcgaaggatctcgcgcggccgctgcccgagccgctgtccgaagccgcgctcgcgctgctcggccaggcgacgcacgactggctgcccggcaccgcgaagatctccgccgcgcgcgcgtggcaaggcgcgaagctgctgtcgccggacggcctgcccgtcgtcgggccgaccgccgatccgcgggtgttcgtcaacttcggccacggcccggcgggctggggcctcgcgttcgggtctgctaaagtggtggcagatgacctcggcggcggcgcgcagcgcgtgcccgccgacacgctcgccgcgctgcgcgcggagcgctttgccacctga

SEQ ID NO: 6515 - protein, 434 aa, Burkholderia pseudomallei K96243
MDVIVIGGGIAGIATAYQLRAAGHRVCVVERHATVAQGATYGQGGVLLPTPLDVWFGPTFMRERRAQKSGVVYKPGLNGALRRFTRRLDALREPAAFAAQYAQLRPLVELSREAIADVEARFNLEFEQKSGVLHVVRDAAEWDATQPALDLMRDLGQPYETLTPDACAALEPSMPVDPAFAGGVLLAQERTANCPLFAKLVKQVLDEHDVQFRLGRAVAAIRTDARRAAVELAPDAADPRAAKSKEVDVISADAVVVAAGTESLALVAPLGVRAPLHPVRIHTLTAPLAYEEHAPHLSIVDSAKRIAITRLGQRLRIGGGAVLQSAKDLARPLPEPLSEAALALLGQATHDWLPGTAKISAARAWQGAKLLSPDGLPVVGPTADPRVFVNFGHGPAGWGLAFGSAKVVADDLGGGAQRVPADTLAALRAERFAT

SEQ ID NO: 6516 - DNA, 1266 bp, Azoarcus sp. EbN1
  CDS (1)..(1266): transl_table=11
atgcacgttctggttctcggcgccggcgtcaccggcgtcaccaccgcctggtatctcgccagggcaggcttcgaagtaagcgtggcagaccgccagcccgaggccgcgctcgaaaccagctacgccaacggcggccagatctcgatcagccaccctgaaccttgggcgaaccccgctgccccgctcaacgccttgcgctggctcggccgggaggatgccccgttgctgttccgcccccacgccgatcccgcccaatgggcgtggacgctcgcgttcctgcgtgaatgcctgccgcaccggacgcggcgcaacactgcagccatcgccagtctcgccgtgcatagtggcgaacgcctgcgcacgctgcgcgcggaaaccggcctcgcctacgatcatctcgagcacggcatcctgcatctgttctttacgccgcaggagttcgcgcgcgtccccaacaaggttgcagaactcgccacctacggcatccaggcccgctcgtgcagccgcgacgaatgcgtcgcgatcgaacctgcactcgccggcacggccggggagcttgcgggcggtctgtatgcaccgaacgacgagtcgggggacgctttccgtttcacccaggcactcgccgagcgggcagcgcaggcgggcgtgcgcttccattacagcaccacgatcagccgcatcgaccacagcggcgggcgcattaacggcatcgaggtccacgacgccgaaggacgcaacggcaccctcaccgccgcagcctacgtgctgtgcctcggcagctacagccgcctgctggtcgccccgcttggcgagcacctgccgatctacccggtgaaagggtattcggtgaccgttccgctacacgacttggcacgggcccccagcgtcagcctcaccgatgaatcgcgccgcatcgtgtgctcgcgcctcggcgaccggttgcgcgtcgcgggaactgcggaattgaacggctacaataccgacatcaacctggcccgctgccaggccatcctggactggctggaggcgcgctttcccggcgccaccgacaccgccgaggcgcacctgtgggccggcctgcgccccgccacgcccggcaacatcccgctgatcgggcggagccgcctgtcgaacctttggtacaacaccggacacgggacacttggatggacgctcgcctgcggctctgccagctgtctcgtcgatctcatgtcgggctatccggcgccggtgcccaacttcccgttcctgggaaacgaagcctga

SEQ ID NO: 6517 - protein, 421 aa, Azoarcus sp. EbN1
MHVLVLGAGVTGVTTAWYLARAGFEVSVADRQPEAALETSYANGGQISISHPEPWANPAAPLNALRWLGREDAPLLFRPHADPAQWAWTLAFLRECLPHRTRRNTAAIASLAVHSGERLRTLRAETGLAYDHLEHGILHLFFTPQEFARVPNKVAELATYGIQARSCSRDECVAIEPALAGTAGELAGGLYAPNDESGDAFRFTQALAERAAQAGVRFHYSTTISRIDHSGGRINGIEVHDAEGRNGTLTAAAYVLCLGSYSRLLVAPLGEHLPIYPVKGYSVTVPLHDLARAPSVSLTDESRRIVCSRLGDRLRVAGTAELNGYNTDINLARCQAILDWLEARFPGATDTAEAHLWAGLRPATPGNIPLIGRSRLSNLWYNTGHGTLGWTLACGSASCLVDLMSGYPAPVPNFPFLGNEA

SEQ ID NO: 6518 - DNA, 1242 bp, Pseudomonas fluorescens Pf-5
  CDS (1)..(1242): transl_table=11
atgagtcagcgggtttgcatcattggagggggcgtcatcggcttggccagtgcctacgccctggtccgccagggctttgaggtgaccctggtggaggctcaggagtccctgggcagccagaccagtttcgccaacggcgggcagttgtcctatcgctatgtggcgcctctggccgatgccggggtgccctggcaggccctgggctggatgctcaagggcgactctccgctcaagctgcggccacgcctggacccggcgcagtggcgctggctggcggggttcctcggtgcttgccggcactcggtgaaccggcgcaatggcgcgcacctgctgcgcctggcgctgctcagccagagcaccctgcaaagctggcgcgaagaggatggcctacaaggcttcgactggcggcgcaacggcaagctggtgactttccgcgagcaaaaaagcttcgagcacgcccggcacaacctggcggacagcggccagcaacaggtgctttgcgctgccgaatgcacggccctggaaccggccctgggggatacgcccttcgtcggcggtatctataccccggatgaagaagtggccgactgccacgccttctgccagcaactggccacgcggctgcgcgcttccgggcgctgcgaaatcctactgggccagcgggtgcggggcattcaccatgggggggataaggtccaggccatcgacctgggggagcgcgtgttgccggtggaccaactggtgctggctgccgggcaccgcagcgccgaactgcgcctgcccgggctccaactgccgctgtatccgctcaagggctacagcctcagcgtgcccatcggcccgcagcaccgggcgccggacatcagcatcaccgactacaaccgcaagatcgtctatgcgcgtatcggccagcaactgcgggtggcggccatggtcgacatcgtcggtttcgacccggcgccagaccccggccgcctggccctgatgcgccgtcaagcggtccagaccttcgccgaggccggtgactatcaggcagccgtggaatgggccggcatgcgtccggctacccccagcggcgtgccgctgatcggggccaccgcctaccgcaacctgtggctcaaccttggccacggcgcgctggggttcaccctggcctgtggcagcggccaattgctgggcgaactgatcggccagcgttgcaccagtatcgacatgcagggcctggcgccccgcgttgcctga

SEQ ID NO: 6519 - protein, 413 aa, Pseudomonas fluorescens Pf-5
MSQRVCIIGGGVIGLASAYALVRQGFEVTLVEAQESLGSQTSFANGGQLSYRYVAPLADAGVPWQALGWMLKGDSPLKLRPRLDPAQWRWLAGFLGACRHSVNRRNGAHLLRLALLSQSTLQSWREEDGLQGFDWRRNGKLVTFREQKSFEHARHNLADSGQQQVLCAAECTALEPALGDTPFVGGIYTPDEEVADCHAFCQQLATRLRASGRCEILLGQRVRGIHHGGDKVQAIDLGERVLPVDQLVLAAGHRSAELRLPGLQLPLYPLKGYSLSVPIGPQHRAPDISITDYNRKIVYARIGQQLRVAAMVDIVGFDPAPDPGRLALMRRQAVQTFAEAGDYQAAVEWAGMRPATPSGVPLIGATAYRNLWLNLGHGALGFTLACGSGQLLGELIGQRCTSIDMQGLAPRVA

SEQ ID NO: 6520 - DNA, 1302 bp, Pseudomonas fluorescens Pf-5
  CDS (1)..(1302): transl_table=11
atgcgcgttctggtcttgggcagtggcgttatcggaaccaccagtgcctattatctggctcgagccggatttgaagtgaccgtagtggaccgtcagccggccgccgccatggaaaccagcttcgccaacgccggccaggtctcgcctggctatgcgtcgccctgggccgctccgggtgtaccgctcaaagccatcaaatggctgctgcagcgccacgcgccactggcgatcaaggccacggccgacatcgaccagtacctgtggatggcacagatgctgcgcaattgcaccgccagccgctatgcggtgaacaaggaacgcatggtgcgcctgtccgaatacagccgtgactgcctcgacgagttgcgagcggaaaccggcattgcctacgaaggccgcagcctgggcactacccagctgttccgcacccaggcgcagctggacggtgcggcgaaagacatcgccgtgctcaaggaatccggcgtgccgttcgaactgctggaccgcgaaggcatcgcccgggtcgagccggccctggccaatgtcactgacatcctcgccggtgccctgcgcctgcccaacgaccagactggcgactgccagatcttcaccacgcgcctggcggaaatggccagcaagctgggtgtggaattccgcttcggccaggacatccagcgcatcgactttgccggtgaccggatcaacggcgtgtggatcgacggcaagctggaaactgcagaccgctacgtgctggccctgggcagctactcgccgcaattgctcaagccgctgggcatcaaggcgccggtgtacccgctcaagggttactccctgaccgtgccgatcaccaacccggccatggccccgacttctaccatcctcgacgaaacctacaaggtcgcgatcacccgtttcgacaaccggatccgggtcggcggcatggcggagatagccggttttgacctctcgctcaatccgcgccggcgtgaaacgctggagatgatcgtcaacgatctctatcctcagggcggcgacctgtcccaggccagtttctggaccgggctgcgtcccactaccccggatggcacgccgattgtgggcgccacgccgttccgcaacctgttcttgaacactggccacggtacgctcggctggaccatggcttgcgggtccggtcgcctgctggcggacctgatggccaagaaaaagccgcagatcagcgccgaaggcctcgatatttcccgttacggtaaccctcaggagtcagctaaacatgtcaatccagcgccagctcaccaatga

SEQ ID NO: 6521 - protein, 433 aa, Pseudomonas fluorescens Pf-5
MRVLVLGSGVIGTTSAYYLARAGFEVTVVDRQPAAAMETSFANAGQVSPGYASPWAAPGVPLKAIKWLLQRHAPLAIKATADIDQYLWMAQMLRNCTASRYAVNKERMVRLSEYSRDCLDELRAETGIAYEGRSLGTTQLFRTQAQLDGAAKDIAVLKESGVPFELLDREGIARVEPALANVTDILAGALRLPNDQTGDCQIFTTRLAEMASKLGVEFRFGQDIQRIDFAGDRINGVWIDGKLETADRYVLALGSYSPQLLKPLGIKAPVYPLKGYSLTVPITNPAMAPTSTILDETYKVAITRFDNRIRVGGMAEIAGFDLSLNPRRRETLEMIVNDLYPQGGDLSQASFWTGLRPTTPDGTPIVGATPFRNLFLNTGHGTLGWTMACGSGRLLADLMAKKKPQISAEGLDISRYGNPQESAKHVNPAPAHQ

SEQ ID NO: 6522 - DNA, 1332 bp, Psychrobacter arcticus 273-4
  CDS (1)..(1332): transl_table=11
atgacccatattgcggtactcggagcaggcgtggtgggcgtgaccaccgcatggtatcttcgccaagcaggctatgatgtgagcgtgattgagcgtgaatcagcggcaggtatgcaaacctcatttgccaatggcggacagatatctgtctcccatgccacgccttgggcaaaccctactgcaccgatgaaagcgcttaaatggctatttaaagaagatgcgccgctgctatatcgtttgcgcgctgataaagcacagctcaaatgggccatgcagtttttgcaagagtgccgcgcagacaaagccgatgccaatctggtacaaatggtgcgtttgggattgtactcacgtgatgccttgcaacagttacgtgctgatatcggtgttgattacgagcagcaaacgcgcggtatcatgcatttttatactaatcaagctgaatttgatgccgctatcgcgccaactgagcgcatgcaagcgctcggctgcgagcgttatgtcattgacatcaataatgctgttagcctcgagccagcactttatcctgttgcccacaagctcaaaggcgcgacatatactagccatgatgagtcaggtaatgcacacttatttacccagcgtttagcggagcactgcataaaggctggcgttaagtttttatacgatactgagattttagccatcaatactgatgacgattatgctcatccgcacgtacatagtattactattcgacctaatggcgaaaatgcgcaaacctttagtgcagatagctatgtattggcgcttggtagttatagcgtcgccttaatgaaaccacttaagatacatctgcctatttttcctgccaaaggctactcagccacttatcaaatcaatcctcgtgctccgcatctagcaccctttgttagcttgattgatgatgagtttaagctggtaacatcgcgtcttggtgataaattacgagtggctgggacagcagaatttaacggctacaacttagatttaaataccatacgctgtgaagccatcactcgccgcgtgcagcagttatttcccaaaggtatcatcgccaattcagtgcagtactggacaggactacgaccgatgaccccatcaaatgtgccgttgattggacacgcacatatgggccaagttcggcatggtagtcacaatgtgcaagcgacttttgataacttatggcttaacaccggtcatggcacgcttggctggactcatgcttgtggttcggcaaaagcgattagtttattgatacagggcgagataccagccgttgattttgattttattggtatggtcaactcactataa

SEQ ID NO: 6523 - protein, 443 aa, Psychrobacter arcticus 273-4
MTHIAVLGAGVVGVTTAWYLRQAGYDVSVIERESAAGMQTSFANGGQISVSHATPWANPTAPMKALKWLFKEDAPLLYRLRADKAQLKWAMQFLQECRADKADANLVQMVRLGLYSRDALQQLRADIGVDYEQQTRGIMHFYTNQAEFDAAIAPTERMQALGCERYVIDINNAVSLEPALYPVAHKLKGATYTSHDESGNAHLFTQRLAEHCIKAGVKFLYDTEILAINTDDDYAHPHVHSITIRPNGENAQTFSADSYVLALGSYSVALMKPLKIHLPIFPAKGYSATYQINPRAPHLAPFVSLIDDEFKLVTSRLGDKLRVAGTAEFNGYNLDLNTIRCEAITRRVQQLFPKGIIANSVQYWTGLRPMTPSNVPLIGHAHMGQVRHGSHNVQATFDNLWLNTGHGTLGWTHACGSAKAISLLIQGEIPAVDFDFIGMVNSL

SEQ ID NO: 6524 - DNA, 1284 bp, Colwellia psychrerythraea 34H
  CDS (1)..(1284): transl_table=11
atgagcacagtcgttgatcaagaagggaataacaaacaacaaaccgttgcggttatcggtgctggaattatcggtataaactgtgcgttagaattacaaagcttaggctatcaagtgaccttacttgataaagaaggcattggtttagggtgctctaaagctaatgctggtcattttgctactgaacaagtctttccacttgctgagttttcattgttatggcaaatgccaaaattactgtttgatccgcttgggcctgtcgctttatctgccaagcacttcatcaaagccattccgtggtttatgcagttttttaataatatgcgcccaacactacgtaacaaaaacaagaaagccctacaagcactcaacaaaaatgccatccaccattatacagcactactgaaagctgctgaggccgagcatttaattagcttagatggttcgttactagtctttgaaaccaatgaccgaactaaagttgagcttatgtatcagcattatttagctgcgggcattgcggtaaaacttttagataaaaggcaaacccttgagttagagcccaatttaagtaacaacatcaactactcactatattttactgatgttgcccatacaattgacccgctagcactgagcaaaacattggctgagtttgcgatgtgtaaaggcatgacctttcaacaaacagccgtaacttctgtcactcagacacagtctggagtcaccgtagagatagatgaacaacatttacatgttgatcactgcgttattgcatgtggcgcgtggtcaaaaaagttactcaatggcttaaactatcatttacctatcgaagctgagcgaggatatagtttgagtttgcccatttcagcagcagccagcgcccttttgtctcggcccgttgcttctgccgaacgtcgctttattattacgccgatgggtaaaacattaaggttagcaggtactgttgaatacgcggggctgaacgctccggcaaattataagcgtgctgaaatgttaaaaggtaatgccgcttatattttaaagagattgcctgaaaatgaagagaagcaagaagcttggatggggtgtcgtccatcactacctgactctttacctgtaatttgccaagcgccaaatcatgataaaattttttttgctcttgggcatcagcacttagggttaacccaaggagcaataacggggaaacttatcggtcagttagtgacagggcattcacctgaaattaatatagaccctttttgtatccgccgctttaactaa

SEQ ID NO: 6525 - protein, 427 aa, Colwellia psychrerythraea 34H
MSTVVDQEGNNKQQTVAVIGAGIIGINCALELQSLGYQVTLLDKEGIGLGCSKANAGHFATEQVFPLAEFSLLWQMPKLLFDPLGPVALSAKHFIKAIPWFMQFFNNMRPTLRNKNKKALQALNKNAIHHYTALLKAAEAEHLISLDGSLLVFETNDRTKVELMYQHYLAAGIAVKLLDKRQTLELEPNLSNNINYSLYFTDVAHTIDPLALSKTLAEFAMCKGMTFQQTAVTSVTQTQSGVTVEIDEQHLHVDHCVIACGAWSKKLLNGLNYHLPIEAERGYSLSLPISAAASALLSRPVASAERRFIITPMGKTLRLAGTVEYAGLNAPANYKRAEMLKGNAAYILKRLPENEEKQEAWMGCRPSLPDSLPVICQAPNHDKIFFALGHQHLGLTQGAITGKLIGQLVTGHSPEINIDPFCIRRFN

SEQ ID NO: 6526 - DNA, 1305 bp, Ralstonia eutropha JMP134
  CDS (1)..(1305): transl_table=11
atgcgcgttctcgtacttggtagtggcgttatcggcgtcaccagtgcgtggtatctggccaaagccggtcacgaagtgaccgttgtcgatcgcgaggcggggcccgcgcttggcaccagctttgccaatgccgggcagatctcgcccggctatgcgtcgccatgggcggctcctggcgtgcctctgaaggcgatcaagtggatgttccaggaacatgccccactgtcgatccgcccggacgggaccctgttccagttgcagtggatgtggcaaatgctgcagaactgcagcgccgagcgctacgcggtcaacaaggagcgcatggtccgtctggccgaatacagccgcgactgcatccgggcgctgcgcgccgacaccggcattgcgtatgaaggccgccagcacgggacgctgcaagttttccgcacgcaggaccagcttgatggcgccgccaaggacatcgcggtgcttgaagaagccggcgtgccctaccagttgctttcgcgcgaagaactcgccgcgagcgaaccggcgctggccgccgtcagccacaagctgaccggaggcctgcgcctgcccaacgatgaaaccggcgactgccagctgtttacccgacagctggcagccatggccgaggcgctgggcgtgaaattccagtacaaccgttcgatcaacagcctcatgacccagggcgacgccgtaaccggcgccgtggtggacggcgagccgatcgcggccgacctcgtcgtggtagcactcggcagctggtcgacgcagctcgtcaagccgttcctgcatggcatgtcgaacctgccggtctatccgctcaaaggcttctcaatcacggtgccgatgactgacgccgcgcgcagcccggtgtcgaccgtgctcgacgaaacctacaaggtggcgatcacgcgtttcgaggaccgcattcgcgtcggcggcatggcgcagatcgttggctacgaccgctcgctcgatccggccaagcgccgcacgctcgagcacgtcgtgaccgacctgttcccgggcgccggcgacgtcagcgaggccaccttctggaccggcctgcgcccaatgacgccggacggcacaccgatcgtcggcccgactcaggtgcgcggcctgtggctgaacacgggtcacggcacccttggctggaccatggcgtgcggctcgggcaagttgctgtccgacctggtatcgggccgctcgcccgcgatccgcgccgatgacctgtcagtcgggcgctacctgaagccgcagcgcatgcagggcgccccgcgtcccgctacggcttga

SEQ ID NO: 6527 - protein, 434 aa, Ralstonia eutropha JMP134
MRVLVLGSGVIGVTSAWYLAKAGHEVTVVDREAGPALGTSFANAGQISPGYASPWAAPGVPLKAIKWMFQEHAPLSIRPDGTLFQLQWMWQMLQNCSAERYAVNKERMVRLAEYSRDCIRALRADTGIAYEGRQHGTLQVFRTQDQLDGAAKDIAVLEEAGVPYQLLSREELAASEPALAAVSHKLTGGLRLPNDETGDCQLFTRQLAAMAEALGVKFQYNRSINSLMTQGDAVTGAVVDGEPIAADLVVVALGSWSTQLVKPFLHGMSNLPVYPLKGFSITVPMTDAARSPVSTVLDETYKVAITRFEDRIRVGGMAQIVGYDRSLDPAKRRTLEHVVTDLFPGAGDVSEATFWTGLRPMTPDGTPIVGPTQVRGLWLNTGHGTLGWTMACGSGKLLSDLVSGRSPAIRADDLSVGRYLKPQRMQGAPRPATA

SEQ ID NO: 6528 - DNA, 1281 bp, Ralstonia eutropha JMP134
  CDS (1)..(1281): transl_table=11
atgcgggtagtgatcgtaggcgccggcgtggtcggcatgaccagtgcgtggcgcctggcgcaggatggccacgaggtgacggtgctcgaacgccatgacggccctggcgaggaaaccagcttcgccaacggcgggcagcttagctacagctacgtggcgccgctggccggaccgggcgtgatgggcaaggtgccaggctggcttctgcggcgcgattcgccgatgcgcttccggcccgtagccgatcccgcgcagtggctctggctggcggcattcatgcgcgcttgcaatgccggcaccagcgaggccaccacgcgcaagctgctgcgcctggcattttactcgcgcgacctgatggaggcgttcgtcgccagcgaaggcgcgaaggccgggacggcgagcgatttcgattttgcgcggcgcggcaaactgattgtgcaccgcgatggcgcggcgtttgaatcggcgcgccgcttgctcgattatcaagccagtctcgggtgcgaacagcaggcactcgaccgggacgcgtgcgtggcgctggaacccgcgctggcaggtatccgcgacgagatcgccggcgcgatctacacaccgagcgaggaggtgggcgactgccatcgcttctgcctgtcgctggcacggttgctgcagcatcagccgggcgtgtcgatgcggttcggcaatgtcgtgcacggcctggtgcaacaaggggaccgcgtcacgggcgtgcagacggtagccggcgtagtgcccgccgatgcggtggtggtggcgggtggcatcggcagcgtgccgctgctgcgcccactgggcgtgcggccgatgctttggccgttgaagggctacagcattaccgtgccgctgtcgaacagtgggccggctccgcacatcagcatcacggatttcgccaacaagatcgtctatgcacgcatcggcaatacgctgcgcgtcgcgggcatggccgatctcgtgcgtggtggcgcgcggatcgatcccgagcgcattggcacgctggtggcgcagacgcgcacggtgtttgagggtatcgtgcccgacatcccgctcgcgcagttgcagccgtgggcagggctgcggcccgcgacgcccgatggcttgccgatggtcgggccatcacgcctgcgcggcctgtggctcaatctcgggcatggcgcgcttggctttacgcttgctatgggcagcgcagggctgcttgccgaccgccttgccggacgcaagcctgccgtcaatggcgatgatttcatcgccgcgcacgcgtag

SEQ ID NO: 6529 - protein, 426 aa, Ralstonia eutropha JMP134
MRVVIVGAGVVGMTSAWRLAQDGHEVTVLERHDGPGEETSFANGGQLSYSYVAPLAGPGVMGKVPGWLLRRDSPMRFRPVADPAQWLWLAAFMRACNAGTSEATTRKLLRLAFYSRDLMEAFVASEGAKAGTASDFDFARRGKLIVHRDGAAFESARRLLDYQASLGCEQQALDRDACVALEPALAGIRDEIAGAIYTPSEEVGDCHRFCLSLARLLQHQPGVSMRFGNVVHGLVQQGDRVTGVQTVAGVVPADAVVVAGGIGSVPLLRPLGVRPMLWPLKGYSITVPLSNSGPAPHISITDFANKIVYARIGNTLRVAGMADLVRGGARIDPERIGTLVAQTRTVFEGIVPDIPLAQLQPWAGLRPATPDGLPMVGPSRLRGLWLNLGHGALGFTLAMGSAGLLADRLAGRKPAVNGDDFIAAHA

SEQ ID NO: 6530 - DNA, 1251 bp, Ralstonia eutropha JMP134
  CDS (1)..(1251): transl_table=11
atgtctcacatgctcgtcatcggcgccggcattaccggcgtcacgaccgcctataccctcgcgaaactcggctatcgcgtcaccgtactggaccgccaagactatccggcgatggaaacgtctttcgccaacggcggacagctttccgcctgcaatgccgaggtctggaacaacgccggcacgctgctcaagggcctgaaatggatgatgaagcgcgatgcgccgctgctgctgaatccgcgtccatcgtggcacaagtattcgtggctcggcgaattcgtcgggcacctgcgcggctatcgcgccaacacgatcgaaaccacgcggctggccattgccgcgcgcgagcacctgttcgcaatggccgagcgcgagcagatcgatttcaatctcgagcgccgcggcatcctgcacttctatcacgaccgcccgagcttcgacgccgcgggccgcaccaaccggatgctgatggagggcgggctggaacgctacgccgtcacgccggaagagattcgcaccatcgagcccacgctgcagggcagctactacggcggctactacacgccgtccgattccaccggtgatatccacaagttcacgcgcggcctggcccgtgcttgcgagcggctcggcgtgacgttcgtgcacggcgtcgatgtgaaggccgtggaccagcgctccgatggcgtggtgatgcgcgtggcggcgtcggaagccgccgtagccgcaggtcaggatggcggcgagcgcgagatcaaggggacggcagtcgtggtgtgcgctggcgtgggcagtcgccatatcgctgccatgctgggggatcggctaaacgtgtatccggtcaagggctactcgatcaccgtgcatctcgatgacgtgcgcagcgtgaacaatgcgccgtacgtgagtttgctcgacgaaagcgccaagatcgtgaccagccggctcggtgccgaccgcttccgcgtggcgggcacggcggaattcaacggccacaatcgcgatatccgcgccgatcgcatcgcgccgctggtgtcgtgggtgcggcgcaatttcgatatcgaaacctcgcgcgcggtaccctgggcagggctgcggccgatgatgccggacatgatgccgcgtgttgcgcgtggccgtgctgccagggtcttctacaacacagggcacggccatctgggctggacgctgtcggccgcgacggcgacgatgatcggccagaccatcgcaacaagccatcccgtccactga

SEQ ID NO: 6531 - protein, 416 aa, Ralstonia eutropha JMP134
MSHMLVIGAGITGVTTAYTLAKLGYRVTVLDRQDYPAMETSFANGGQLSACNAEVWNNAGTLLKGLKWMMKRDAPLLLNPRPSWHKYSWLGEFVGHLRGYRANTIETTRLAIAAREHLFAMAEREQIDFNLERRGILHFYHDRPSFDAAGRTNRMLMEGGLERYAVTPEEIRTIEPTLQGSYYGGYYTPSDSTGDIHKFTRGLARACERLGVTFVHGVDVKAVDQRSDGVVMRVAASEAAVAAGQDGGEREIKGTAVVVCAGVGSRHIAAMLGDRLNVYPVKGYSITVHLDDVRSVNNAPYVSLLDESAKIVTSRLGADRFRVAGTAEFNGHNRDIRADRIAPLVSWVRRNFDIETSRAVPWAGLRPMMPDMMPRVARGRAARVFYNTGHGHLGWTLSAATATMIGQTIATSHPVH

SEQ ID NO: 6532 - DNA, 1242 bp, Pseudomonas fluorescens PfO-1
  CDS (1)..(1242): transl_table=11
atggctcagcgtgtgtgcatcatcggcggcggcgtgatcgggctggcaacggcctgggcgctggtgcgcgacggcttcgaggtgacggtggtcgaggcgcggcagtcgctgggcagcgaaaccagcttcgccaacggcggccagttgtcctaccgctacgttgcgccgctggccgatgccggcgtgccgttgcaggcaatcggctggatgctgcgcggcgactcaccgctcaagctgcgcccgcgcctggacccggcgcaatggcgctggatggcctcgtttctcgccgcgtgccgcacctcggtcaaccgcgaaaacgccgcgcatctgttgcgtctggcgctgttcagccagagcacactgaaacgctggcgcgaagacgacggactggtcggtttcaattggcggcgcaacggcaaactggtgaccttccgcaatgccgccagcttcgagcatgcacgcaacggtctggccgatccgcagcaacaacaggtgttgtccgccaccgaatgtgcacgactggaaccggcactggccgatgcgccgtttgtgggcgcgatctacacgccggatgaagaagtcggcgactgtcacggcttctgccagcagctggcggcgcgattgaaggcgtcgggtcgctgcgagtttcgccttgggcaggcagtcaccggcattcgccacaaccacggcgcggtcacggccattgaacttggcgacgaaaccctgccggtcgaacaactggtgatcgccgccggccatcgcagcccgttgctggcgctgcccggcctgcgcctgccgttgtacccgctgaagggctacagcctgaccgtgccgatcggcagcgagcatcgggcgccggacgtgagcatcaccgactacgaccgcaagatcgtctacgcgcgtatcggcgaacaactgcgcgtggcggcgatggtcgacatcgtcggtttcgacccggcggtggatcccgagcggctggcgctgatcaaacgtcaggcccgcggcacctttcccgacgcaggcgactacgatgcggccgtcgaatgggccggcatgcgcccggccacgcccaccggcgttccgctgctgggcgccacggcgtatcgcaacctgtggctcaacctcggccacggcgcgctgggtttcaccctggcctgcggcagcgggcagttgctcagcgagctgattggcgagcagcgcacatccattgatctgcacgggttcaatccccgtgcggcgtga

SEQ ID NO: 6533 - protein, 413 aa, Pseudomonas fluorescens PfO-1
MAQRVCIIGGGVIGLATAWALVRDGFEVTVVEARQSLGSETSFANGGQLSYRYVAPLADAGVPLQAIGWMLRGDSPLKLRPRLDPAQWRWMASFLAACRTSVNRENAAHLLRLALFSQSTLKRWREDDGLVGFNWRRNGKLVTFRNAASFEHARNGLADPQQQQVLSATECARLEPALADAPFVGAIYTPDEEVGDCHGFCQQLAARLKASGRCEFRLGQAVTGIRHNHGAVTAIELGDETLPVEQLVIAAGHRSPLLALPGLRLPLYPLKGYSLTVPIGSEHRAPDVSITDYDRKIVYARIGEQLRVAAMVDIVGFDPAVDPERLALIKRQARGTFPDAGDYDAAVEWAGMRPATPTGVPLLGATAYRNLWLNLGHGALGFTLACGSGQLLSELIGEQRTSIDLHGFNPRAA

SEQ ID NO: 6534 - DNA, 1305 bp, Pseudomonas fluorescens PfO-1
  CDS (1)..(1305): transl_table=11
atgcgcgttatggtcttgggtagcggcgtcatcggtaccgccagtgcttactatctggcccgtgccgggtttgaagtggtggtggtcgaccggcagcccgccgcggccatggagaccagtttcgccaacgccggccaggtctcgccgggctacgcctcgccgtgggccgcgccgggcgtacccctcaaagccatcaagtggctgctgcaacgccacgcaccgctggcgatcaaggccaccgccgacatcgaccagtacctgtggatggcgcagatgctgcgcaactgcaccgccaaccgttacgcggtgaacaaggagcgcatggtgcgtctgtccgagtacagccgcgactgcctcgacgaactgcgcgctgaaaccggcatcgcctacgaaggccgcagcctcggtacgacccagttgttccgcacacaagcgcaactggataacgccgccaaggacatcgccgtattgaaagagtccggcgtgccgttcgaagtcctcgaccgcgccggcattgcccgcgtcgaaccggcgctggccggtgtcaccgacatcctcgccggtgccctgcgcctgccgaacgaccagaccggcgactgccagatcttcaccacccgcctcgccgaaatggccatcaagctcggtgtggaattccgtttcggtcaggacatccagcgcctcgacttcgccggtgaccgcatcaacggcgtgtggatcgacggcaagctggaaaccgccgaccgctacgtgctggccctcggcagctactcgccgcaactgctcaagccgctgggcatcaaggccccggtgtatccgttgaagggctactcgctgactgtgccgatcaccaacccggccatggccccgacttcgaccattctcgacgagacctataaggtcgcgatcacccgtttcgacaaccgcatccgcgtcggcggcatggcggagatcgccggttttgacctgtcgctcaacccgcgtcggcgcgaaaccctggagatgatcgtcaacgacctttatcctcagggcggcaatctggccgaagcgagtttctggaccggcctgcgtccaactaccccggatggcacgccgatcgtcggcgccaccccgttcaagaacctgttcctgaacaccggtcacggcaccctcggctggaccatggcgtgcggttccggtcgcttgctggccgacctgatggcgaagaaaaagccacagatcagcgccgaaggcctcgatatttcccgttatggcaacaccacccaggagtccgcaaagcatggcaatccagcgccagctcaccaatga

SEQ ID NO: 6535 - protein, 434 aa, Pseudomonas fluorescens PfO-1
MRVMVLGSGVIGTASAYYLARAGFEVVVVDRQPAAAMETSFANAGQVSPGYASPWAAPGVPLKAIKWLLQRHAPLAIKATADIDQYLWMAQMLRNCTANRYAVNKERMVRLSEYSRDCLDELRAETGIAYEGRSLGTTQLFRTQAQLDNAAKDIAVLKESGVPFEVLDRAGIARVEPALAGVTDILAGALRLPNDQTGDCQIFTTRLAEMAIKLGVEFRFGQDIQRLDFAGDRINGVWIDGKLETADRYVLALGSYSPQLLKPLGIKAPVYPLKGYSLTVPITNPAMAPTSTILDETYKVAITRFDNRIRVGGMAEIAGFDLSLNPRRRETLEMIVNDLYPQGGNLAEASFWTGLRPTTPDGTPIVGATPFKNLFLNTGHGTLGWTMACGSGRLLADLMAKKKPQISAEGLDISRYGNTTQESAKHGNPAPAHQ

SEQ ID NO: 6536 - DNA, 1317 bp, Burkholderia sp. 383
  CDS (1)..(1317): transl_table=11
atgcacgtgatcgttctcggcgccggcgtgatcggcgtcgccaccgcctggcacctgcgcgaagcaggctgcgacgtcaccgtgatcgagcgcgaggccgatgtcgcgcaggcgacgagcctcggcaacgcgggcgtgatcgcccccggctacgtaatgccgtgggccgcgcccgggatgcccggcaagatcctcaagtacctgttcaagcccgcttcgccgctgatcttccggccgacgctcgacgccgcgcagtggcgctggatcgcgcgctggctgcgcgaatgcgaattcgagcggttccgcgtgaacaagcagcggatgcagcgcatcgcgtactacagccgcgcgtgcctgcacgcgtttcgcgagcgtcatccattcgactacggcgcgagccgcggctacctgcaactgctgcgcggcgcgttcgacgtcgagatggtgcagcccgcgttgaaggtgctgcgcgacgcgggcatcgcgtttcgcgaactcgacgcggccggctgcacgacgatcgagccgggcttgcgctgggcgcggcaggcccccgttggcggcatctacctgcccgacgacgaagccggcgactgcgctcgcttcacgcgcgaactgcgggcgctgtgcgaggccaacggcgtgacgttccgctttcgcacggcagtgcaggcgctcgacgttgaagccggccgcgtgcgcggcgtgcggatcgtcggcagcggcgacgaggacggcggaccgaatccgcacgcatcgaacgccggcggcgagcaccgcgacgcacggctcgctgccgacgcgatcgtcgtcgcgctcggcgtcgacagcgccggcctgctgcggccgcacggcatcgacgtgccgttgtatccggtgaagggctactcggcgacgctcgccgtcgtcgacaatgaaaaggcgccgcgcgcggcgctgatggacgaatcgctgaagacggcgatcacgcgcttcggcccgacgttgcgcgtcgcaggtaccgcggaactcggcaaccggcacgcagcgctgcgccagcaggcgctcgatacgctgatgaaggtgctcgacgactggtttccgcacgcggccgatcgtgcgtcggcgcgcttctgggtcggccgccggccgatgacgcccgacgggccgccgctgctcggcgcgagcgggatcggcgggctctggctcaacgtcggccacggctcgaccgggtgggcgatgtcgatgggatcggggaaggtggtggcggatctcgtcacggggcgagatccggagatcgatctgtcggggttgacgctcgcgcgctacgaccggtag

SEQ ID NO: 6537 - protein, 438 aa, Burkholderia sp. 383
MHVIVLGAGVIGVATAWHLREAGCDVTVIEREADVAQATSLGNAGVIAPGYVMPWAAPGMPGKILKYLFKPASPLIFRPTLDAAQWRWIARWLRECEFERFRVNKQRMQRIAYYSRACLHAFRERHPFDYGASRGYLQLLRGAFDVEMVQPALKVLRDAGIAFRELDAAGCTTIEPGLRWARQAPVGGIYLPDDEAGDCARFTRELRALCEANGVTFRFRTAVQALDVEAGRVRGVRIVGSGDEDGGPNPHASNAGGEHRDARLAADAIVVALGVDSAGLLRPHGIDVPLYPVKGYSATLAVVDNEKAPRAALMDESLKTAITRFGPTLRVAGTAELGNRHAALRQQALDTLMKVLDDWFPHAADRASARFWVGRRPMTPDGPPLLGASGIGGLWLNVGHGSTGWAMSMGSGKVVADLVTGRDPEIDLSGLTLARYDR

SEQ ID NO: 6538 - DNA, 1260 bp, Rhodospirillum rubrum ATCC 11170
  CDS (1)..(1260): transl_table=11
gtggatgttcttgtgctgggggcggggttgatcggaacgacctcggcccatttccttgcccgggctggccatgacgtaacggtgatcgatcgtcagcccggccccggactggaaaccagtttcgccaatggcggccagatctcggcctgtcacacccaaccctgggcccatcccgaaacgccgctgatggccctgcgctggctggggcgcgccgatgcgccgctggtgttcgactgggcgcgctgggacccggcgctctgggtttggggcctgcgcttcctagccaattgcacgctgtcggcctatgaccgcaatatggagcgcgccgtccgcgtcgccctttatagtcggagtgttctcaaagagttacgggccgaaaccggcttgcggtatgacgaacgcacgcgcggcatcctcaagatctatcgcgatcagggcgatttcgacaaaggcttgcgggccatggagaaaaccgcggcctggggcctgcgccaaagcgcctgcccggccgcgcgatgcctggagctggaaccggccctggcgaccggcggcgtccggctggccggggggattctcgccgccgaggacgaaagcggcgacgcccatctcttcacccagggtctggccgcgctctcggcggccaaaggcgtgcgctttcttggcgagacgacgatcaccgggctgcgcctagagggccgacgggtcgccgaggtgctgaccagccggggtcccttgcgcgccgataccatcgtgctggcggcgggcagtttctcgcccggcctcgcccgcaccatcggcctgcgcctgccggtctatccggccaagggctattcgatcacccttgatgtcgacggggcggggcaaggggcgcccaccctgtcgatcaccgatgaagccagcaagatggtctattcgcgcctgggccagcgcctgcgggcggcgggcaccgccgaactggccggctggagcctgacgcccaaccccgcccgcgccgccctcatccgccgcgaggcggcgaggctgttccccaaggccggcgattacgcccgggcgcgggactggtgcggcctgcgcccgaccaccccggattccgtgccgatcatcggtaaggcgccgggaatcgataacctttttctcaataccggccacggcaccctgggctggaccatggcctgcggctctggcaaactgatcgccgatctgatatcgggacgggccacggacatcgataccacaggactcgggctagaccgcttctag

SEQ ID NO: 6539 - protein, 419 aa, Rhodospirillum rubrum ATCC 11170
MDVLVLGAGLIGTTSAHFLARAGHDVTVIDRQPGPGLETSFANGGQISACHTQPWAHPETPLMALRWLGRADAPLVFDWARWDPALWVWGLRFLANCTLSAYDRNMERAVRVALYSRSVLKELRAETGLRYDERTRGILKIYRDQGDFDKGLRAMEKTAAWGLRQSACPAARCLELEPALATGGVRLAGGILAAEDESGDAHLFTQGLAALSAAKGVRFLGETTITGLRLEGRRVAEVLTSRGPLRADTIVLAAGSFSPGLARTIGLRLPVYPAKGYSITLDVDGAGQGAPTLSITDEASKMVYSRLGQRLRAAGTAELAGWSLTPNPARAALIRREAARLFPKAGDYARARDWCGLRPTTPDSVPIIGKAPGIDNLFLNTGHGTLGWTMACGSGKLIADLISGRATDIDTTGLGLDRF

SEQ ID NO: 6540 - DNA, 1338 bp, Burkholderia thailandensis E264
  CDS (1)..(1338): transl_table=11
atggggccgtacatctgttcatttgccgggaccatttcggtcagcaagactgagcggcatcgacaacctgttgaaggacggccggcagtcatgcggatttgcatattgggcgcgggcgtcgtcggtctgacgagcgcctactatctcgcacgcgaaggtcacgacgtgacggtgctggaggcgcgcccggacgccgtgctcgacgccagtttcgcgaacggcgggcaactgagctacagctacgtcgcgccgctcgccgatcccgcggtgctgggcaagctgcccgcatggctcgtgaggcgcgactcggcgctgcgcttcgtgccgcggctcgacgtcgatcaatggctgtggtgcgccgcgtttctcgccgcgtgccgcaccgcccgcgcgcggaggaccgcggccgagatgctcgaactcggcgcgctcagccgcgccgcgctgcatacgctcgtcgagcaggaagcgctcgacttcgactatgcgcgcaacggcaagctcgtcgtctaccgcgaccagcgggaattcgaccgcgcacgccgcgcgatggaccatctgatcgcggccggcgcgcgccagcacgcgctcgacgcggccgcgtgcgtcgcgctggagcccgcgctcgggccctcggccggcctgctcgcgggcggcattcatacgccgtcggaagaagtgggcgattgccgccggttcggcgccgggctcgcccgcgtgctgcgcgagcggcttcgcgtcgcgatccactatcaaacgccgatcgccgcgctgcgcgccgaaggcgcgacgatcgtcgcggcgcgcaccgcgcgcggcgacatcggcgccgacgcgttcgtcctttccgcgggcaacggcagcgcgccgctgctgcgccggctcggcatgcggctgccgatccatccgctgacgggctacagcctgacgctgcccggccggcaagacgccatgccgcgcgtgagcgtgacggacctgcatcgcaagatcgtctatgcgccgcttggcgcgcgcttgcggatcgcgggcatggtcgagatcgccggccttcgttcgtccggcgccgcgcgccggctcgcactgctcgcgcggcaggcgcaggagatctttccgcatgcgggcgactacgcgcgcggcgaaacgtggtgcggccatcgccccgcgacgcccgacggcaagccgctgatcggcgcgacgccgttccggaatctgtggctcaacacaggccacggcgcgctcggcttcacgctcgcctgcggcagcgcgcgcgtgctggccgatctgatcgcaggccgcgagcccgcgctggacgcccgcgcgtatgcgttgcatcgttga

SEQ ID NO: 6541 - protein, 445 aa, Burkholderia thailandensis E264
MGPYICSFAGTISVSKTERHRQPVEGRPAVMRICILGAGVVGLTSAYYLAREGHDVTVLEARPDAVLDASFANGGQLSYSYVAPLADPAVLGKLPAWLVRRDSALRFVPRLDVDQWLWCAAFLAACRTARARRTAAEMLELGALSRAALHTLVEQEALDFDYARNGKLVVYRDQREFDRARRAMDHLIAAGARQHALDAAACVALEPALGPSAGLLAGGIHTPSEEVGDCRRFGAGLARVLRERLRVAIHYQTPIAALRAEGATIVAARTARGDIGADAFVLSAGNGSAPLLRRLGMRLPIHPLTGYSLTLPGRQDAMPRVSVTDLHRKIVYAPLGARLRIAGMVEIAGLRSSGAARRLALLARQAQEIFPHAGDYARGETWCGHRPATPDGKPLIGATPFRNLWLNTGHGALGFTLACGSARVLADLIAGREPALDARAYALHR

SEQ ID NO: 6542 - DNA, 1305 bp, Burkholderia thailandensis E264
  CDS (1)..(1305): transl_table=11
atggatgtaatcgtcatcggcggcggcatcgccggcatcgccaccgcctaccagctgcgcgcggccggccatcgcgtgtgcgtcgtcgaacgtcacgcgacggtcgcgcaaggcgcgacctacggccagggcggcgcgctgctgccgacgccgctcgacgtctggttcggcccgaccttcatgcgcgagcggcgcgcgcaaaagagcggcgtcgtctacaagcccgggttcaaccgcgcgctgcggcgcttcacgcgccgcctcgacgcgctgcgcgagcccaccgcgttcgccgcccaatacgcgaagctgcggccgctcgtcgagctgtcgcgcgaggcgatcgccgacgtcgaggcgcgcttcaatctcgaattcgaacagaagagcggcgtgctgcacgtcgtgcgcgacgcggccgaatgggacgcggtgcagcccgcgctcgacctgatgcgcgacctcggccagccttacgagacgctcacgcccgatgcgtgcgcggcgctcgagccgtcgatgccggccgaccccgcgttcgcggccggcgtgctgttcgcgcaggagcgcaccgcgaactgcccgctcttcgcgaagctcgtcaagcaggtgctcgacgagcgcgacgtgcagttccggctcggccgcgcggtcgccgcgatccgcaccgacgcgaagcgcgcggccgtcgagctcgcgcccgacccggccgacccgcgcgcggcgaaatcgaaggaggtcgacgtgatctcggccgacgcggtcgtcgtcgcggcgggcacggaaagcctcgcgctcgtcgagccgctcggcgtgcgcgcgccgctgcacccggtgcgcatccacacgctgacggcgcccctcgcgtacgaggagcacgcgccgcacctgagcatcgtcgattcggtcaggcgaatcgcgatcacgcggctcggccagcggctgcggatcggcggcggcgccgtgctgcaaagcgcgcgggatctcgcgcggccgctgcccgagccgctgtccgaagcggcgctcgcgctcctcggccaagcgacgcacgactggctgcccggcgcggcgaagatctccgccgcgcgcgcgtggcaaggcgcgaagctgctgtcgccggacggcctgcctgtcgtcgggccgacggccgatccgcgcgtcttcgtcaacttcggccacggcccggcgggctggggcctcgcgttcgggtctgctaaagtggtggcagatgacgtcggcggcggcgcgcagcgcgtgcccgccgacacgctcgccgcgctgcgcgcggagcgctttgccacctga

SEQ ID NO: 6543 - protein, 434 aa, Burkholderia thailandensis E264
MDVIVIGGGIAGIATAYQLRAAGHRVCVVERHATVAQGATYGQGGALLPTPLDVWFGPTFMRERRAQKSGVVYKPGFNRALRRFTRRLDALREPTAFAAQYAKLRPLVELSREAIADVEARFNLEFEQKSGVLHVVRDAAEWDAVQPALDLMRDLGQPYETLTPDACAALEPSMPADPAFAAGVLFAQERTANCPLFAKLVKQVLDERDVQFRLGRAVAAIRTDAKRAAVELAPDPADPRAAKSKEVDVISADAVVVAAGTESLALVEPLGVRAPLHPVRIHTLTAPLAYEEHAPHLSIVDSVRRIAITRLGQRLRIGGGAVLQSARDLARPLPEPLSEAALALLGQATHDWLPGAAKISAARAWQGAKLLSPDGLPVVGPTADPRVFVNFGHGPAGWGLAFGSAKVVADDVGGGAQRVPADTLAALRAERFAT

SEQ ID NO: 6544 - DNA, 1212 bp, Burkholderia xenovorans LB400
  CDS (1)..(1212): transl_table=11
atgtcacgaatcgccattatcggcgccggcattaccggcgtcacgaccgctcacgccctcgcccggcgcggccaccacgtcactgtcttcgaacgccatcgctatgcggcaatggagacctcgttcgccaacggcggccagttgtccgccagcaatgccgaagtctggaacagcgccgccaccgtcatgaagggcctgcgctggatgctcacgcgcgacgccccgctgctgctcaatcccacgcccacctggcacaaatactcatggatgggcgaattcctgcggcagattccgcactaccgggcgaacacggtcgaaaccgtgcggctcgcgattgccgcgcgcgagcatctgttttcgattgccgagaccgagggcatcgacttcgatctggagcggcgcggcattctgcacatctacaagacccgcaaggaattcgacgccgcgagcaaggtgaaccaactgctgcgcgaaggcggcctcgaccgcagtccggtcacggcaagcgagttgcatggcatcgaacccacgctgcatggcgatttctacggcggatttttcacgccgtccgattcgaccggcgatattcacaagttcacgcgcggtctcgccgaggcgtgcgtgcggcatggcgtcgagtttcattacgacgcggagatcacgtcgatcgagcagcctggcgagggccgcttttcgctggcggtcaatctcgacggcgaatcgcagcggtttgcgttcgagcggatcgtggtgtgcgccggtgtgaagagccgcgattttgcggccatgctgggcgaccacgtgaacatctacccggtgaaaggctattcgatcaccgtctgtctcgacgacgaaatcagccagcagcgcgccccctgggtgagtctgctcgacgatagcgcgaagatcgtcacgagccggctgggcgcggatcgttttcgcgtggccggcacggccgagatcaacggcttcaaccgcgatatccgctcggaccggatcgcgccgctggtggactggacccggcgctatttccccgaggtatcgacctcgcgcgtgattccctgggcgggcttgcggccgatgctgccgagcatgttgcccaaggtaggccgaggaaaacggcgtggcgtgttctacaacaccgggcatgggcatctgggctggaccttgtcggccgcaacggcgcaggcgctggcgggcgcgatccagtag

SEQ ID NO: 6545 - protein, 403 aa, Burkholderia xenovorans LB400
MSRIAIIGAGITGVTTAHALARRGHHVTVFERHRYAAMETSFANGGQLSASNAEVWNSAATVMKGLRWMLTRDAPLLLNPTPTWHKYSWMGEFLRQIPHYRANTVETVRLAIAAREHLFSIAETEGIDFDLERRGILHIYKTRKEFDAASKVNQLLREGGLDRSPVTASELHGIEPTLHGDFYGGFFTPSDSTGDIHKFTRGLAEACVRHGVEFHYDAEITSIEQPGEGRFSLAVNLDGESQRFAFERIVVCAGVKSRDFAAMLGDHVNIYPVKGYSITVCLDDEISQQRAPWVSLLDDSAKIVTSRLGADRFRVAGTAEINGFNRDIRSDRIAPLVDWTRRYFPEVSTSRVIPWAGLRPMLPSMLPKVGRGKRRGVFYNTGHGHLGWTLSAATAQALAGAIQ

SEQ ID NO: 6546 - DNA, 1230 bp, Burkholderia xenovorans LB400
  CDS (1)..(1230): transl_table=11
atgacccgaatcgctgttattggcgccggaattaccggcgtcacctccgcctacacactcgcccgagccggttacgacgtcactgtcgtcgaccgttgcaggtatccggcaatggacacgtcgtttgcgaacggcggccagctttccgcgagcaatgctgaagtctggaacaacggtgccacgttgctgaaggcgctgcgatggatgtggacggcgggcgcgccgctgctgctcaatcccgtacctggctggcacaagtacacgtggctcgccgcattcgtcgcgaatatgccgcggtaccgggtcaatactgtcgagacggtgcgcatggcaatcgccgcccgccaatatctccatgcgatggcggaagaggaaggcatcgacttcgatctcgaacgcaggggcattctgcacatctaccctgaccggcgtgcattcgaggcggcgaagcgtgtcaacgcgctacttcgcgaaggcggtctcgagcgccacgcagtgacgcctgccgaagtgcgctcgattgagccgtcgttgcgcacggcgtgccatggagggttctatacgccgtcggactcgacgggggacattcacaagttcacgcgtggtctcgcagacgcctgccgacgtcgcggagtgaagttcgtcatggagcaggagatcgcacggatagcgcgcgacggcgaacggtttctgctgatgcctcgcacggcggacggatcggtcgcgagcgacggggcgttcgacggtctcgtcgtcgcggccggagtcgccagtcgccgtattgctgcaatgctgggtgaccatgtgaacgtctatccggtcaaagggtattcgatcaccgttcatctcgacgacgacgccagccggcagtcggcgccatgggtcagcctgctcgacgaggaacgcaagatcgtcacgagccgtctcggtgcggaccggtttcgcgtggcgggcaccgcggagatcaacggcgagaaccggaacattcgggccgaccggatcgcgccgctcgtcgactgggtgcgccagcattttccggatgtcggcacgtcgcgcgtggtaccgtggtgcggactcaggccgatgatgcccgacatgatgccgagggtcggccctggcaggatgcccggtgtcttctacaacaccggccacggtcacctcgggtggacgttgtcggcagctaccgcgcagattctggctgccgcggtcgcagcgggattgccggcgtag

SEQ ID NO: 6547 - protein, 409 aa, Burkholderia xenovorans LB400
MTRIAVIGAGITGVTSAYTLARAGYDVTVVDRCRYPAMDTSFANGGQLSASNAEVWNNGATLLKALRWMWTAGAPLLLNPVPGWHKYTWLAAFVANMPRYRVNTVETVRMAIAARQYLHAMAEEEGIDFDLERRGILHIYPDRRAFEAAKRVNALLREGGLERHAVTPAEVRSIEPSLRTACHGGFYTPSDSTGDIHKFTRGLADACRRRGVKFVMEQEIARIARDGERFLLMPRTADGSVASDGAFDGLVVAAGVASRRIAAMLGDHVNVYPVKGYSITVHLDDDASRQSAPWVSLLDEERKIVTSRLGADRFRVAGTAEINGENRNIRADRIAPLVDWVRQHFPDVGTSRVVPWCGLRPMMPDMMPRVGPGRMPGVFYNTGHGHLGWTLSAATAQILAAAVAAGLPA

SEQ ID NO: 6548 - DNA, 1299 bp, Burkholderia xenovorans LB400
  CDS (1)..(1299): transl_table=11
atggatgtcatcgtcatcggcggcgggattgcgggcgtcgccaccgcttatcaactgcgcgcggccggccaccgggtatgcgtcgtcgagcgccacgccactgtcgcgcagggcgcgacctatggacacagcggcaccgtcctgccgaccccgctggacgtctggttcggcccgactttcatggccagccgtcagaacgccaaaaacggcatagtcaacaaagccggcttcaacgggccggcgcgccagctggtcaaacagctcgccgagttgcaggagcccaacgccttcggccatcaatacggactgctgcgaccgctgatcgagctctcgcgcgacaccctcgcggacatggaagcgcgcttcgggctggagttcgaacaggcgagcggcgtgctctatctggtccgtaccgaacaggagtggcagcagttgcggccggccctcgggctgctgcggctcttcgaagtgccgcaccacgagttgactcccgaacaatgcgccgcgttcgagcattccgtgcgcaccgagccggcattcgccggcggcgtgctgttcgaccaagagcgcacggccaactgcccgctgttcacgaagctcatcaagcagacactggatacccagggcgacgtccagttcatgctgggctgcgaagtcgcgtcgatccgcctggaaggccagcgcgccgcggtggagctggcgccgcggccgggcgcggcatcccgctcgcgcgaagtcgacgtgatccacgccgacgcggtggtcgtggccgccggccacggcagcctggcgctgctcgagcgcctcggcttgcgcctgccgctgcatccgctgcgcctgcacacgctggtggcaccgatcgcgcacgaggaatgcgcgccgcacgtcgccatcgtggacgcggtgaagcggatcgcgatcagccggatgaaccatcgcctgcggatcgcgggcggcgcggttctgcaaagcgccggccagatcgacaagccgctgggcgaagcggtgacgaaagaagccctcgcgctgctcggccaggccacgcacgactggattccgggcgccgcgcgaatctcggcggcgctgccgtgggaaggcgccaaactactgtcgccggacggcttgccggtgatcggcaatgcgcttcatccgcgccttttcgtcaatatcggccacggccccgcgggctggggtctcgcctgcggatcgggcaaactggttgccgacctgatttcgggcagcgcgcccgagcttcccgcagacacgctggccgccctgcgcgcggatcgcttccgttga

SEQ ID NO: 6549 - protein, 432 aa, Burkholderia xenovorans LB400
MDVIVIGGGIAGVATAYQLRAAGHRVCVVERHATVAQGATYGHSGTVLPTPLDVWFGPTFMASRQNAKNGIVNKAGFNGPARQLVKQLAELQEPNAFGHQYGLLRPLIELSRDTLADMEARFGLEFEQASGVLYLVRTEQEWQQLRPALGLLRLFEVPHHELTPEQCAAFEHSVRTEPAFAGGVLFDQERTANCPLFTKLIKQTLDTQGDVQFMLGCEVASIRLEGQRAAVELAPRPGAASRSREVDVIHADAVVVAAGHGSLALLERLGLRLPLHPLRLHTLVAPIAHEECAPHVAIVDAVKRIAISRMNHRLRIAGGAVLQSAGQIDKPLGEAVTKEALALLGQATHDWIPGAARISAALPWEGAKLLSPDGLPVIGNALHPRLFVNIGHGPAGWGLACGSGKLVADLISGSAPELPADTLAALRADRFR

SEQ ID NO: 6550 - DNA, 1266 bp, Burkholderia xenovorans LB400
  CDS (1)..(1266): transl_table=11
atgaaaacgattgttctgggcggcggcgtgatcggcgtcgccacggctttttacctgcgccagcaaggctgcgaggtgaccgtgatcgagcgtgagccggatgtcgcgctcgccaccagtttcggcaacgcgggggtgatcgcaccaggctacgtgactccttgggccgcgcccgggatgccggccaagattctcaaatacctgttcaaaccggcctcgccgctcattttccgcccaactctcgatcccgctcaatggcgctggatcgcgcactggctgcgcgaatgcgatctcgaacggtttcgcgtcaacaagcagcgcatgcagcgcattgcttactacagccgcgagtgcctgcgcgaattccgcggccgccatccgttcgactatggccgcagccagggctatctgcagctgttccgcagcgagtacgacgtcgaactcgcgcagccggcgcttgcggtgctgcgcgaggccggcatcgcgcaccgggaagtcagcgcggcgcagtgtgccgaaatcgagccgggcttgcgctgggcgcgtcagacgccgctttcaggcctctatctgcccgacgacgaagccggcgattgtgcccgcttcacccgcgaactgcgcgcgatctgcgagcgcaacggcgtgcgtttccgtttcgacacgcgggtgagctcgctcgacgtggaaggcggtgcggtgcgcgcggtgcgtatcgagagcgaacgcggcgccgggaggttgcacgcggatgccgtggtggtggcgctgggcgtcgacagtgattcgctgcttgcgcggctcggcgtgaaggtgccgctttaccccgtgaaaggctattcggcgacactgcccatcaccgatgaagaaaaagccccgcgcgccgcgttgatggatgagtcgttgaagacggcgatcacgcgctttggcaacaacctgcgggtggccggcaccgcagaactcggcaatcgccagagcacgttgcgcgaacaggcgctgcaaacgctgatgaaagtgctcggcgactggttcccgcatgcggccaatcccacgtccgcgcatttctgggtgggtcgccgtccgatgacgccggatggcgcgccgctgctcggtccgtcaggtgtggagaaactgtggttgaaccttggacacggctcgacgggctgggcgatgtcgatggggtcgggtcgcgtggtcgcggacctgattacgggccgcaagccggagatcgatctggatggactgacgctggcgcggtatcgcaactga

SEQ ID NO: 6551 - protein, 421 aa, Burkholderia xenovorans LB400
MKTIVLGGGVIGVATAFYLRQQGCEVTVIEREPDVALATSFGNAGVIAPGYVTPWAAPGMPAKILKYLFKPASPLIFRPTLDPAQWRWIAHWLRECDLERFRVNKQRMQRIAYYSRECLREFRGRHPFDYGRSQGYLQLFRSEYDVELAQPALAVLREAGIAHREVSAAQCAEIEPGLRWARQTPLSGLYLPDDEAGDCARFTRELRAICERNGVRFRFDTRVSSLDVEGGAVRAVRIESERGAGRLHADAVVVALGVDSDSLLARLGVKVPLYPVKGYSATLPITDEEKAPRAALMDESLKTAITRFGNNLRVAGTAELGNRQSTLREQALQTLMKVLGDWFPHAANPTSAHFWVGRRPMTPDGAPLLGPSGVEKLWLNLGHGSTGWAMSMGSGRVVADLITGRKPEIDLDGLTLARYRN

SEQ ID NO: 6552 - DNA, 1278 bp, Ralstonia metallidurans CH34
  CDS (1)..(1278): transl_table=11
atgcgcatagcgatcgtgggtgccggtgtggtcggcatgacctccgcgtggcggttggccaacgatggtcacgaagtcaccgtggtcgagcgccatgatggtccgggcgaggaaaccagcttcgccaacggcggccagctcagctacagctatgtggcgccgctggccggaccgggcgtgttgtcgaaggtgccgggctggctgctggatcgcgattcaccgatgcgcttccggccatccatggacccgtcgcaatggcgctggctgctggctttcgctcgggcgtgcaatgcatcggcaagcgaggccgccacgcgcaagctgctgcgcctgtcgttctactcgcgcgatctgatgcaggctttcgtcgatcgtccggacgcgcggcaggagggcggtggtttcgatttcgcgcgtagcggcaagctgatcgtgcaccgtgatgcggcggcctacgaatcggcctgccgcctgctcgactatcaggccagccttggttgcgaacagcaggcattggatcgcgatgccacggttgcgctggagccggcgttggccggcattcggcagggcatcgtcggtgcgatccacacgccgagcgaggaagtgggcgattgccatcgcttctgcgtgtcactggcccatctgttgcaaggcaggccgggtgtcacgctgcgcttcggcacgcgtgtgaccggactggtgcgcgcgggggatcgcgtgacgggcctgcgcaccgatgcgggtgatatccgcgccgatgcggtgattgtgtcgggcggcatcggcagcgtgccgttgctcaagccgctcggtgtgcggccgatgctgtggccgctgaaggggtacagcatcacggtgccgatcaggcagggcgtgctggcgccacgtatcagcgtgacggacttcgccaacaagatcgtctatgcgcgcatcggcgatacgctgcgcgtggcggggatggcggatatcgtgcgcggcggcgtggtgatcgaccgcgagcgcgcgcagacgctggtcacgcagacgcgtgcggtgtttggcgacgtgagccatggcgcggaccttgatgcattgcagccgtgggccggcctgcgtccggccacgcccacgggtttgccgatgatcggcgaatcacgcattcgcggtctgtggctgaaccttggccacggcgcgctgggtttcacgctggccatgggcagcgcgggtgtgctggccgatcggatggctggccgcaagccggtggtggatgccgaagatttcagtgcagcgctcgcatag

SEQ ID NO: 6553 - protein, 425 aa, Ralstonia metallidurans CH34
MRIAIVGAGVVGMTSAWRLANDGHEVTVVERHDGPGEETSFANGGQLSYSYVAPLAGPGVLSKVPGWLLDRDSPMRFRPSMDPSQWRWLLAFARACNASASEAATRKLLRLSFYSRDLMQAFVDRPDARQEGGGFDFARSGKLIVHRDAAAYESACRLLDYQASLGCEQQALDRDATVALEPALAGIRQGIVGAIHTPSEEVGDCHRFCVSLAHLLQGRPGVTLRFGTRVTGLVRAGDRVTGLRTDAGDIRADAVIVSGGIGSVPLLKPLGVRPMLWPLKGYSITVPIRQGVLAPRISVTDFANKIVYARIGDTLRVAGMADIVRGGVVIDRERAQTLVTQTRAVFGDVSHGADLDALQPWAGLRPATPTGLPMIGESRIRGLWLNLGHGALGFTLAMGSAGVLADRMAGRKPVVDAEDFSAALA

SEQ ID NO: 6554 - DNA, 1305 bp, Ralstonia metallidurans CH34
  CDS (1)..(1305): transl_table=11
atgcgcgttctaattcttggcagtggcgttattggcgtcaccagtgcgtggtatctggcccgcgccggtcacgaagtgatcgtggtagaccgcgaaggcggccccgctcttggcaccagctttgccaacgccggccagatctctccgggctatgcgtcgccgtgggcagcacccggcgttccgctcaaggcgatcaagtggatgttccaggagcacgcgccgctcacgatcaaacccgacggcacgctgttccagcttcagtggatgtggcagatgctgcagaactgcacagccgaccgctacgcggtgaacaaggagcgcatggtgcgtctggccgagtacagccgggactgtatccgcgcgctgcgcgcggataccggcatcagctatgaaggccgccagcaaggcacgctccaggtgttccgcaccgacgcgcaattggaagccgcgtcgcgcgacatcgccgtactcgaggaagccggcgtgccatacgaattgctttcgcgcgaagaactcgccgcgagcgaaccggcgctcgccgccgtcggccacaagctggccggtggcctgcgcctgccgaacgatgaaaccggggactgccagctgtttacggaacggctggcagccatggctgaatcgatcggcgtgcagttcatctacaaccgctcgatcgacggcctgctgacgcagggcgacgccgtgaccggcgcaatcgtcgaagggcaaccgatgatggccgatgccgtcgtagtggcgctgggcagctggtccacgccgttcgtgaagcacgtgctgccgggcctgtcgaacctgcccgtctatccgctcaagggcttctcgatcacggtgccgctcaccgatgcatcgaagagcccggtgtcgacggtgctcgacgagacatacaaggtggcgatcacgcgcttcgacgaccgcatccgcgtgggcggcatggcgcagatcgtcggctatgaccgctcgctcgatccgaataagcgccgcacgctggaacacgtggtgaacgatctgttcccgggcgcgggcgatgtgagccgcgccacgttctggaccggcctgcgcccgatgacacccgatagcactccggtggtcggccccgctggcatccgcggcctctggctcaacacgggtcacggcacgcttgggtggacgatggcctgcggctcgggccagttgctgtccgacctggtctcgggcacgcgcccggcaatccgtgccgacgacctctcggtggatcgctaccgcaagcagccgcgcacgcaccacttgccacggccgctaccggcctga

SEQ ID NO: 6555 - protein, 434 aa, Ralstonia metallidurans CH34
MRVLILGSGVIGVTSAWYLARAGHEVIVVDREGGPALGTSFANAGQISPGYASPWAAPGVPLKAIKWMFQEHAPLTIKPDGTLFQLQWMWQMLQNCTADRYAVNKERMVRLAEYSRDCIRALRADTGISYEGRQQGTLQVFRTDAQLEAASRDIAVLEEAGVPYELLSREELAASEPALAAVGHKLAGGLRLPNDETGDCQLFTERLAAMAESIGVQFIYNRSIDGLLTQGDAVTGAIVEGQPMMADAVVVALGSWSTPFVKHVLPGLSNLPVYPLKGFSITVPLTDASKSPVSTVLDETYKVAITRFDDRIRVGGMAQIVGYDRSLDPNKRRTLEHVVNDLFPGAGDVSRATFWTGLRPMTPDSTPVVGPAGIRGLWLNTGHGTLGWTMACGSGQLLSDLVSGTRPAIRADDLSVDRYRKQPRTHHLPRPLPA

SEQ ID NO: 6556 - DNA, 1290 bp, Ralstonia metallidurans CH34
  CDS (1)..(1290): transl_table=11
atgcacgtgatcatcatcggcgccggcgcaatcggcgtctgctcggcctggtacctgcgccaggccggcttcgaagtcactgtactggagcgacgcggcgcccccgcgcaggaagccagctttggcaacgcgggcatgatcgcccccggctacgtcacaccctgggcggcgcccgggatgcccggcaagattgtgcgctcactgttccagcacgcctcgccggtcgtgttccgcccaagcgtcgaccccgcgatgtggcgctggatcgtgcgctggctgcgcgaatgcaaccccgaaagctatcgcaccaacaagctgcggatgcagcgtgtggcgttctacagccgcgcctgtctgcacgagcttcgctcggcgctcgagatcgagtacgagcaatcacgtggctacctgcaactgtttcgcacacagcgcgaccttgatctcgcatcgcctgcattggcgctgctgcgcgagaacaacgtcccgcatcagctcatcgacgccgccggttgccggcgtatcgaacccggcctgaccgacgacacgccactagctggcggcctgcaccttccggaggatgaatccggcaattgcccgatcttcgtgcgcagactgcaccagcacgcggaagccgcgggggtgcggtttcgcttccagaccgaagttgcccggttgcgcaggacggacggccgcctgacagtcgaactcgccgcgctccgtggccatgcccgggaagtgctcgatgcggaccgcgtgctgcttgccgccggcgttggcagcgagacgctgctgcgcccgctggggctgcgcctgccgctctacccggtcaagggttactcggccacggtcatggtgacggacgaactacaggcgccgctaggcgccctgatggacgaatcgttcaaggtggccatcacgcgcatgggcaatcgactgcgcgtggcgggcaccgcggagcttggatcgcgcaagctcgatctgcggccggccgcgttgcaaaccctgatcaaggtcgcgcgcgactggtttccggtagccgggcactacaatgccgccacgctctgggccggagcgcgaccgatgctgcctgacggcccgcccctgatcggcgccacccgcgtgccgggcctgtttctgaacctcggccatggctcgacgggctgggcgatgagctgcggatcgggcaaaattgccgcggaccagatcgccgcgagcgccggccaaggcgacgggccagccatcgacatggatgggctgacacccgaacgttaccggctgggccccgcctga

SEQ ID NO: 6557 - protein, 429 aa, Ralstonia metallidurans CH34
MHVIIIGAGAIGVCSAWYLRQAGFEVTVLERRGAPAQEASFGNAGMIAPGYVTPWAAPGMPGKIVRSLFQHASPVVFRPSVDPAMWRWIVRWLRECNPESYRTNKLRMQRVAFYSRACLHELRSALEIEYEQSRGYLQLFRTQRDLDLASPALALLRENNVPHQLIDAAGCRRIEPGLTDDTPLAGGLHLPEDESGNCPIFVRRLHQHAEAAGVRFRFQTEVARLRRTDGRLTVELAALRGHAREVLDADRVLLAAGVGSETLLRPLGLRLPLYPVKGYSATVMVTDELQAPLGALMDESFKVAITRMGNRLRVAGTAELGSRKLDLRPAALQTLIKVARDWFPVAGHYNAATLWAGARPMLPDGPPLIGATRVPGLFLNLGHGSTGWAMSCGSGKIAADQIAASAGQGDGPAIDMDGLTPERYRLGPA

SEQ ID NO: 6558 - DNA, 1254 bp, Ralstonia metallidurans CH34
  CDS (1)..(1254): transl_table=11
atgcgggtatgcgtactgggtggcggagtggttggcgtcgcgagcgcctactatctggcgcgcgaggggcataccgttaccctgctggaagcgcgcgacgaactggcacaggaaaccagcctggccaatggcgcgcaactcagctacagctacgtggcgccgctggccgacccggccgtgctgcccaagctgccgggatggctgctcgaccgcaactcgcccctgcgtttcgttcctcgccttgattggcgccagtggacctggtgcctcgagttcctgcgtgcctgccgcaccggcgtggccaagaaagtcaccgcgcagttgctcgggctgggccagctcagccgcgatggcgtgcatgaactggtcgagcgcgaggcgctgcacttcaactatcagcgcaacggcaagctggtggtgtatcgcgatccggttgccttcgacggcgcccggcggcaactggaatatcaggcctcgcttggcagccgccagcaggcgctggacgccgcggcctgcgtggcgctcgaaccggccttagcatcggtgcagcacaagctggccggcggcatccacacccctagcgaggaagctggtgactgccatgctttcaccgttggcctggccgcggccgccacgcgccgtttcggcgcgagcttccgctgcggtacgcgggtgacggggctgcggcacgcagggcgacgcgtggtggccgcgcgcaccgatgcgggtgacatcgaggccgatgccttcgtggtcgctgccggcatgcaaagcgtgccgatgctggcgccgcttggcgtgacgttgccactgtatccgctgaccggctacagcctgaccgcgccgacgcaaccgggccaccatcatccccctgccatcagcgtgacggacctgcactacaaggtggtctacgcccgtctgggcgagcggttgcgcatcgccggcatggttgacctgattggccgccatccgcgtgccgatgcacgtcgcgtcgccctgctggcccggcaggcgcgcgaaaccttcccggacggcgcaaacttcgacgcggcaacctcgtggtgcggcggccgtcctgccacgcccgacagcaagccgctgatcggcgccacgccgtacgacaacctgtggctcaacaccggtcatggcgcgttgggcttcacgctggcctgcggcagcgccgcgctgctcgccgacgccatggccggccgcccctcgtcgctggatgcatcggcgttcgcgctgatgcgctaa

SEQ ID NO: 6559 - protein, 417 aa, Ralstonia metallidurans CH34
MRVCVLGGGVVGVASAYYLAREGHTVTLLEARDELAQETSLANGAQLSYSYVAPLADPAVLPKLPGWLLDRNSPLRFVPRLDWRQWTWCLEFLRACRTGVAKKVTAQLLGLGQLSRDGVHELVEREALHFNYQRNGKLVVYRDPVAFDGARRQLEYQASLGSRQQALDAAACVALEPALASVQHKLAGGIHTPSEEAGDCHAFTVGLAAAATRRFGASFRCGTRVTGLRHAGRRVVAARTDAGDIEADAFVVAAGMQSVPMLAPLGVTLPLYPLTGYSLTAPTQPGHHHPPAISVTDLHYKVVYARLGERLRIAGMVDLIGRHPRADARRVALLARQARETFPDGANFDAATSWCGGRPATPDSKPLIGATPYDNLWLNTGHGALGFTLACGSAALLADAMAGRPSSLDASAFALMR

SEQ ID NO: 6560 - DNA, 1269 bp, Ralstonia metallidurans CH34
  CDS (1)..(1269): transl_table=11
atgaaatccatcgcagtgatcggcggcggcatcaccggcgccacgacggcttacgccctggccaaacgcgggttctccgtcaccctgttcgaacggcaccgctatgcggccatggaaacctcgttcgccaacggcggacagctctccgcctccaacgcggaagtctggacgcactggtccacgctggccaagggcctgaagtggatgctgcgcaacgacgcgccgctgctcgtcaacccgcgcccgacctggcacaagctgagctggttcgccgagttcatcgcatcgatcccgcattaccgcggcaacacggtggagaccacgcggcttgccattgccgcgcgccagcacctgtttgcgtgggcggaggcggagggcatcgacttcgacctcaagcggcgcggcatcctgcatatctatcgggacaaggcgggcttcgatcacgcagggcaagtctcgaagctcctggccgaaggcggactcgaacggcgcgcggtgaccccggacgagatgcgaagcatcgagccgacgctggcaggccagtactatggcggctactacacggaaagcgactctaccggcgacatccacaagttcaccaccggtatcgctgcggcggcgcgcagactgggtgtccagatgctgtacaaccaggacgtgagcgccgtgtcgaccagcggccggcgagtgacgatcgtctcggctgacgatggccagacgacatcgcgcgaattcgacgcagtggtcgtctgcgccggcgttgccagccgcgatttcgcgcggcaactcggagaccgcgtgaacatctatccggtcaagggctattcgatcacggtcaacctcaacgatgccgaaagccaggcctcggcgcccacggtcagcctgctcgacgacgaaaccaagcttgtcaccagccgtctgggcgtggaccgattccgcatagccggcaccgccgagttcaacggcgtcgaccgcgacatccgcgccgatcgcattcgtccgctgatcgactgggtccatgcttgcttccccggcgtcagcacccgtagcgtggtgccctgggcggggttgcggccgatgatgccgaacatgatgccgcgcgttggccggggccatgccgctaacgtgttctacaacacagggcatgggcatctcggctggacgctgtccgccgtgacggccgagatggtgggggatgtcgtgcgccacgccgccacggcgcagcaagggcgcgtgggcgttggcggattggtggtgggcaacggctga

SEQ ID NO: 6561 - protein, 422 aa, Ralstonia metallidurans CH34
MKSIAVIGGGITGATTAYALAKRGFSVTLFERHRYAAMETSFANGGQLSASNAEVWTHWSTLAKGLKWMLRNDAPLLVNPRPTWHKLSWFAEFIASIPHYRGNTVETTRLAIAARQHLFAWAEAEGIDFDLKRRGILHIYRDKAGFDHAGQVSKLLAEGGLERRAVTPDEMRSIEPTLAGQYYGGYYTESDSTGDIHKFTTGIAAAARRLGVQMLYNQDVSAVSTSGRRVTIVSADDGQTTSREFDAVVVCAGVASRDFARQLGDRVNIYPVKGYSITVNLNDAESQASAPTVSLLDDETKLVTSRLGVDRFRIAGTAEFNGVDRDIRADRIRPLIDWVHACFPGVSTRSVVPWAGLRPMMPNMMPRVGRGHAANVFYNTGHGHLGWTLSAVTAEMVGDVVRHAATAQQGRVGVGGLVVGNG

SEQ ID NO: 6562 - DNA, 1287 bp, Silicibacter sp. TM1040
  CDS (1)..(1287): transl_table=11
atggggccacccggccccttatctgtaccatttcagagagccgtacccatgtcgcaggatattgttgttattggcgccggtattattggcatcagcattgctgctgagttggtccagcaagggcatcgcgtccgggttctggatcgcagcggtgtggctgcggaaacctccaagggcaacgcgggtgcctttgcctttacggatgtgatgccgctggccacgcccggcatcatgcgcaaagcgccaaaatggctgctcgatccgcttggcccattgtcgatcccgccccgctacgcgttgaaaatcgcgccatggatgctccggttctggcgcgccagttggcgtgaccgttttgagacctctgtcgcggcacaaagtgccctcatggacctgtccagatccgcgctggagcgacagattgcaacgcatggcgccgaacatcttattcagcgcgatggacaattgcagctctttgagggggagacccaatttcgcgacagcctgcccggctgggaactgcgcggccagtatgggatcaaatatgaccttctgcgcagccccgaggaaattgccgaaattcagccgggacttgatcgtcgatttacccatgcaggattcacccccgattggatcaacacgaccgatcctcagatctggacagagcatctggcccagagcgttgtgaacgcggggggcgagattgtggattgcgatatacagtccatctcaactgtcggcgacagggtccagctgacgcacgacggcggatcccttactgcagacaaagtcatcgtcgcggctggcgcttggtcccaccatctggcgcgcacgctgggggaccggatcccgcttgagaccgagcgcggatacaacaccacattgcccgctggggccttcgacgtgcgaactcatctgacatttggcgcccacggctttgtggtcagccggatcaacggcggcgtccgtgttggaggcgctgttgaacttggcgggttgaaactgccacccaattatcgacgcgccaagatcctgctggagaaagccaagcgctttctgcccggcttggacaccgcgggcgggcgccaatggatggggtaccgcccctcgattccggacactcttccggtgatcagtcgctctccgaagtctgacaatgtgatttatgcctttggtcatgggcatttggggctgacacaatccgccgccaccgccgagcttgtgcgggatttgatcaacaaaaacagcagcccgatctcgcttgatccctatcgggccagccggttctaa

SEQ ID NO: 6563 - protein, 428 aa, Silicibacter sp. TM1040
MGPPGPLSVPFQRAVPMSQDIVVIGAGIIGISIAAELVQQGHRVRVLDRSGVAAETSKGNAGAFAFTDVMPLATPGIMRKAPKWLLDPLGPLSIPPRYALKIAPWMLRFWRASWRDRFETSVAAQSALMDLSRSALERQIATHGAEHLIQRDGQLQLFEGETQFRDSLPGWELRGQYGIKYDLLRSPEEIAEIQPGLDRRFTHAGFTPDWINTTDPQIWTEHLAQSVVNAGGEIVDCDIQSISTVGDRVQLTHDGGSLTADKVIVAAGAWSHHLARTLGDRIPLETERGYNTTLPAGAFDVRTHLTFGAHGFVVSRINGGVRVGGAVELGGLKLPPNYRRAKILLEKAKRFLPGLDTAGGRQWMGYRPSIPDTLPVISRSPKSDNVIYAFGHGHLGLTQSAATAELVRDLINKNSSPISLDPYRASRF

SEQ ID NO: 6564 - DNA, 1254 bp, Mycobacterium sp. MCS
  CDS (1)..(1254): transl_table=11
atgttcggcggtgacggagtcgacggcggaccccgatcggtgatcgtggtgggcgccggcatcgtcggcctgtccaccgcctggttcctgcaggagcgcggcgtcgaggtgacggtggtcgaccgcggcggggtggccgcgggcgcgtcctggggtaacgccggctgggtgtccccggcgctgacgattcccctcaaccagccgtcggtgctgggctacgggctgcggtcgctggcgaacccggccgcaccgctgcacgtccccgcccgcgccgacatcgggctgtggtcgttcctcacccggttcgcggccaactgccggcgctcgtcgtgggaccgcgcggtcgccgccaacctgccgttcaacgccgaatgcctcgaagcgttcgacgtgctgaccggcaacggggtcgacgtaccgaccaccgactgtccgatcaccgcggtgttcacctccgaacggcaggccgcgcacctgctcgacgaactgcgcgccttgcagcaggcgggtcaggacgtgtcctaccgccgcctcaccctcgatgagctcgaggatcaggtgccactggcgtcgcgggcggtgacggtcggcgtcagcgtcgaggatcagcggttcgtcgatccggggcggttcacccacgcgctggcccgggcggtcgtggcgcgcggggcgacgatcggcgaggtcgacgtcgtcgacctgctgccccaccggcgaggggtccgggtctacccccggaccggcgcaccgctgaccgccgacgccgcggtgatcgccaccggcgcctggatctctgcgctcgccgaccggtgggtccgcacaccggtgcgcgccgggcgcggctactcgttcaccgtgcccgtcgaccgtccggtgccgggtccgatctatctgcccgaggtgcgggtggcgtgcacgccctaccggggggcgctgcgcgtcgcgggcaccatggaattccgcggcccggacgaaccggcgatcccggcccgcgtcgaggcgatcgtcggttcgaccgcaccgctgttcgacggtgtgcgctggggtgagcgcaccgacgagtgggtgggtcctcggcccgtcacccccgacggccggccgctgatcggaaacgtcgaccgcaatgtgtacgtcgcgggcggccacgggatgtgggggctggcgcacggccccgtcaccggccgcctgctggccgagcagatcaccaccggtaagcaacccgaggcgctgcgggccgtcgacccgctgcgctga

SEQ ID NO: 6565 - protein, 417 aa, Mycobacterium sp. MCS
MFGGDGVDGGPRSVIVVGAGIVGLSTAWFLQERGVEVTVVDRGGVAAGASWGNAGWVSPALTIPLNQPSVLGYGLRSLANPAAPLHVPARADIGLWSFLTRFAANCRRSSWDRAVAANLPFNAECLEAFDVLTGNGVDVPTTDCPITAVFTSERQAAHLLDELRALQQAGQDVSYRRLTLDELEDQVPLASRAVTVGVSVEDQRFVDPGRFTHALARAVVARGATIGEVDVVDLLPHRRGVRVYPRTGAPLTADAAVIATGAWISALADRWVRTPVRAGRGYSFTVPVDRPVPGPIYLPEVRVACTPYRGALRVAGTMEFRGPDEPAIPARVEAIVGSTAPLFDGVRWGERTDEWVGPRPVTPDGRPLIGNVDRNVYVAGGHGMWGLAHGPVTGRLLAEQITTGKQPEALRAVDPLR

SEQ ID NO: 6566 - DNA, 1287 bp, Rubrobacter xylanophilus DSM 9941
  CDS (1)..(1287): transl_table=11
atgaggattgtgatcatcggcggaggggttgtcgggctttgttgcgcccgcgagatcgcccggtgtgggggggaggtgacgcttgtcgagaagaactgctgtggcggggcgacctcgctgcgcaacgctgggcagatcgtcccctcgctgtgcaccccacttgcctcgccgggtgtcatgaagcaggccctgaggtggctcgtccggcgcgacagcccgctcgggttgagggtgagcccagacccagagtacctgggctggctgcttcgcttcgcgctaaacgcctccgaagagaagttccgggagtgcctgaaggcagccctcgcgctgggtagagatacccatctcctcttcgaagagctgcgcaaggagggtgtagagttcgagatgcacaagaagggtatgctcttcgccaccctctccgaggagacattgcgtgaggacgtcgagatctacaggaagctcgagcgggccggctatgagggccaatatgaagtcctcagtggcgaggaggcgcgcaggatcgagccgtcgttgagcaagagggtggttggggggatcttcgtgaaggaggagcggcacgtccggcccgagagtctcatgcgaggcttggtagcggatctcagatccagaggcgtgcagatactcgagggcacggaggtctacggcctcaagaagggagagggaggcacctggagggtgctcacgcccgagggagaactggatgcggatcgggtcctcgtcgctgccggtgtctggtcaaaggagctgctcgcccaactgggggtaaggattccactggaggcaggcaaaggatacagcgtcacctcggtggggacgggaacaccgccggagcggccgctcaagttcgccgaggcccaggtcgtcgcaaccccctacgaaggtggtgtgaggatctccgggaggtttgagctcagcgggatcgacctttctctccaacgccgcaagatcgactcgatcatccgcgctgcctctccgtacctgcgcgactggagaccagagaagccgaggctggagtgggtcgggctgcgtccggccacccccgatagtctacccctgatcggcaaggtgccgaacttgcctaacctctacctggccacgggacacgggatgctcggcttgacccacgcccccgcaacggccaaagcaataacgcccctgattctcgaagaaaggatggcgccagagctcaaaccgttcaacgtcggcagaatatcatataatgagatagaatcaatgcttgccaggaaaatatccccatgttaa

SEQ ID NO: 6567 - protein, 428 aa, Rubrobacter xylanophilus DSM 9941
MRIVIIGGGVVGLCCAREIARCGGEVTLVEKNCCGGATSLRNAGQIVPSLCTPLASPGVMKQALRWLVRRDSPLGLRVSPDPEYLGWLLRFALNASEEKFRECLKAALALGRDTHLLFEELRKEGVEFEMHKKGMLFATLSEETLREDVEIYRKLERAGYEGQYEVLSGEEARRIEPSLSKRVVGGIFVKEERHVRPESLMRGLVADLRSRGVQILEGTEVYGLKKGEGGTWRVLTPEGELDADRVLVAAGVWSKELLAQLGVRIPLEAGKGYSVTSVGTGTPPERPLKFAEAQVVATPYEGGVRISGRFELSGIDLSLQRRKIDSIIRAASPYLRDWRPEKPRLEWVGLRPATPDSLPLIGKVPNLPNLYLATGHGMLGLTHAPATAKAITPLILEERMAPELKPFNVGRISYNEIESMLARKISPC

SEQ ID NO: 6568 - DNA, 1278 bp, Rhodococcus sp. RHA1
  CDS (1)..(1278): transl_table=11
atgaaggtggcagttctcggagcaggggtcgtcggtgtggcgactgcccacgctctggccgagcgtggacacgaggttcatgtatacgaccggcgcagcgaggtcgcgtccgacaccagcgcgagcaccgccggattgatcgcccccggtcactcctacgcgtgggcgtcgccgtcggctcccaccatgctggcccgatcgttgctcggcgcgtcgacctcgatccgtgtccggccccgggcggacgccgaactcgcccggtggggtgtgcgattcctccgcgagtgcacggcctcccgggcgcggtcgaacactctcgcgaagctccgactggcccggtacagccagcagctgatggacgaactcaccgcccgcgagaacctggagtactgccagacacgcaacggcgtgctgtacctgtaccgggacgaagcggaactggaacgagcgcaggtgaactcgcaactgctccgcgaccacggacagctgcaggacgtgctgggacccgacgagatcgtggccgcggagcccgcgctcggtcacgggacggccacgttcgcgggggcgatccacgaccgcaccgacggcaccggcgacccgcacaggttctcggtggggcttgccgaggaatgcggacggctgggggtcaggttccacctgggcacgtccgtcatgcgcctcgagaccgacggcgcggccatcacgtcagccgtcaccgaccggggcgagattcgcgcggatgccttcgttctcgccgccggggccgcgagcgctctcgtcgcgaggagtatcggtgtgcgactgcccgtctacccggccaagggatacacgctgaccgcgaccgtcaaggaccccgaacgcgcaccggtggtgggtggcatcgacgagaagacgctcgtcgcctggtcgcggttcggtgacgaactgagaatgtcggcgaccgcggaattcgtcggatacgaccgcagtcactcgcccgccgactacgcggggatcgtggacgcggggaacgaactgttccccggcgccgtggactgggacacggccaggtatcggacgggccttcgcccgatgacacccgacggcccgccgatgatcggactgggacggcacgacaatctgtacttcaacaccggtcacggtcacgtcggctggaccatggcggtcggctcggcccgcatcctcgcggacctcgtcgacgaacggcgaccggacatcgacccgactccgtactccccgatttcgtcccgtcggcatccgagccggcgaggcgcgtaa

SEQ ID NO: 6569 - protein, 425 aa, Rhodococcus sp. RHA1
MKVAVLGAGVVGVATAHALAERGHEVHVYDRRSEVASDTSASTAGLIAPGHSYAWASPSAPTMLARSLLGASTSIRVRPRADAELARWGVRFLRECTASRARSNTLAKLRLARYSQQLMDELTARENLEYCQTRNGVLYLYRDEAELERAQVNSQLLRDHGQLQDVLGPDEIVAAEPALGHGTATFAGAIHDRTDGTGDPHRFSVGLAEECGRLGVRFHLGTSVMRLETDGAAITSAVTDRGEIRADAFVLAAGAASALVARSIGVRLPVYPAKGYTLTATVKDPERAPVVGGIDEKTLVAWSRFGDELRMSATAEFVGYDRSHSPADYAGIVDAGNELFPGAVDWDTARYRTGLRPMTPDGPPMIGLGRHDNLYFNTGHGHVGWTMAVGSARILADLVDERRPDIDPTPYSPISSRRHPSRRGA

SEQ ID NO: 6570 - DNA, 1266 bp, Alkalilimnicola ehrlichei MLHE-1
  CDS (1)..(1266): transl_table=11
atgaaggtgacagtggtgggcggcggcgtgatcggcatcacgaccgcgtggtacctggcggaggccggccacgcggtcacggtcgtcgaccgcgcgccggcaatggccgacgagaccagtcacgccaacggcggcctgctgcacgccagtcacgccgaaccctggaacgggcccggggtgttctgggacctgatccgttggatcggccgcgagaactccccactgctggtgcggccacgggcggtgccggggttgatccgctggggtctgggctttctgcgctacagccgccgccggcaccatgagcacagcctggcggtgaacgcccggctggcggtccacagcctggagcggctgcgcgccctgcgtgccgagaccggcctgcgctatgacgaccgccaggaaggcatcctcaaggtcttcaacgaccgcaccgcctttgagagcgcggtgcaggcctccaccctgatggcggaggcgggggtgcgctaccaggtgctggacccggaccaaacggtggcactggacccggcctacggcgatgcccgggcacagttggcgggcgccatctactacccggaggatgagagcggcgacgcctgcctgttcacccggcggctggcggcgctggcggccgagcgccacggggtcagcctgctcaacgacaccgcggtggaggactggcggctggaggccggccgcatcgtcgccgcccgcaccaaccggggcgagatcgaggcggatgcctgggtcctggcggcgggcagctacaccccgttgctgacccgaccgctgggcctgcgggtgccaatctatccggtcaagggctattcggtcaccctgcataccccggactgggagggtgcaccgcgcatccccatgatcgacgacgaacgcaaggtggtcatggcccggctcggcgaccggatacgcatggccggcaccgccgagttcgccggttacgatttgtcactgcgcccggcgcgctgtgacaatgtcctcaacaacgtactggcgacgttccccggtttgcgggatcatatcgcccccgagacacgggaggactggtgcgggctgcgccccatgagcatggacgggccgccgatcatcggcgcgacgccggtgcccaacctgtacctcaacagcggcaccggccacctgggttggacgttcgcctgcggggtgtcgcacctgctggcgcagcagctatcaggtgagccccctgcgctggacatggccccgctggccctcagccgctttaactga

SEQ ID NO: 6571 - protein, 421 aa, Alkalilimnicola ehrlichei MLHE-1
MKVTVVGGGVIGITTAWYLAEAGHAVTVVDRAPAMADETSHANGGLLHASHAEPWNGPGVFWDLIRWIGRENSPLLVRPRAVPGLIRWGLGFLRYSRRRHHEHSLAVNARLAVHSLERLRALRAETGLRYDDRQEGILKVFNDRTAFESAVQASTLMAEAGVRYQVLDPDQTVALDPAYGDARAQLAGAIYYPEDESGDACLFTRRLAALAAERHGVSLLNDTAVEDWRLEAGRIVAARTNRGEIEADAWVLAAGSYTPLLTRPLGLRVPIYPVKGYSVTLHTPDWEGAPRIPMIDDERKVVMARLGDRIRMAGTAEFAGYDLSLRPARCDNVLNNVLATFPGLRDHIAPETREDWCGLRPMSMDGPPIIGATPVPNLYLNSGTGHLGWTFACGVSHLLAQQLSGEPPALDMAPLALSRFN

SEQ ID NO: 6572 - DNA, 1233 bp, Hyphomonas neptunium ATCC 15444
  CDS (1)..(1233): transl_table=11
atgaaagtagtcatcctgggcgccggtgtcatcggcatcacaaccgcctactatgccgcgcgcgatggccatgacgtcaccgtggtagaccgcatgagcggccctgcgttggagaccagcttcgccaatgccggtgaaatatcgcctggctacgcctcgccctgggcctcgccggacgtgccccagaaggcgctgaaatggctgttcatggaacacgccccgctgatcatccagtaccacaagctcagccccgccatggtagcctggtgtctcgccatgctgcgcaactgcacgcccgcgcgctacgccgccaacaaggaaaagatggtccgcctggccacctacagccgcgacatgctccgggaactgcgcgccgccgaaggcatagactacgaccaccgctccctcggaaccctgcaactcttccgtacacaaaaacaatatgacgccgccgcccgcgacatagaagtactcaaatccggcggtatcgatttccagctgctcgaccgcgaaggctgccaccgcgccgaaccgggccttgcccattccgaagatgccatcatcggcggcctgcgtctgccgggcgatgaaaccggcgactgtttcaagttcaccaacgccatcgccgccattgcagaggcgcggggcgtaaaattccgttggaacacaacaattgacgccctctccgaaagcggcggccgcgtccgcgcgcgcattggcggagagcccatggacgccgacgccttcgtcctggccgcgggcagctggtcgcccggtcttgcccggcccctcggcctgcgcctgccggtctatccggtgaaggggtattccatgactgtgccgatcacggacgaaacccgtgcgcctcagtccaccctgctggatgaaaccttcaaagtggccatcacccgcctcggagaccgcgtccgcgtcggcggcatggcagagcttgcaggttttgatcgcagcctacgccccgaacgcctcaagacactggaatgctccgcattcagcctgtttcccggcgtcacaagctcaaccgagcgcaacctctggtgcggccaccgcccgatgacgcccaacggcgtgccgcttgtcggcgcaacaaagtatcagaatctttggctgaacacgggtcacggaacgcttggctggaccatgtcctgcggttccgccggtgtcatagcggaccagatttcgggccgcacgccagcggtgtcattggaaggctga

SEQ ID NO: 6573 - protein, 410 aa, Hyphomonas neptunium ATCC 15444
MKVVILGAGVIGITTAYYAARDGHDVTVVDRMSGPALETSFANAGEISPGYASPWASPDVPQKALKWLFMEHAPLIIQYHKLSPAMVAWCLAMLRNCTPARYAANKEKMVRLATYSRDMLRELRAAEGIDYDHRSLGTLQLFRTQKQYDAAARDIEVLKSGGIDFQLLDREGCHRAEPGLAHSEDAIIGGLRLPGDETGDCFKFTNAIAAIAEARGVKFRWNTTIDALSESGGRVRARIGGEPMDADAFVLAAGSWSPGLARPLGLRLPVYPVKGYSMTVPITDETRAPQSTLLDETFKVAITRLGDRVRVGGMAELAGFDRSLRPERLKTLECSAFSLFPGVTSSTERNLWCGHRPMTPNGVPLVGATKYQNLWLNTGHGTLGWTMSCGSAGVIADQISGRTPAVSLEG

SEQ ID NO: 6574 - DNA, 1212 bp, Rhizobium leguminosarum bv. viciae 3841
  CDS (1)..(1212): transl_table=11
atggcgcgcgttgcagtgatcggcgccggcgtcatcggcgtatcgtcggcctatcttctggcccgggcggggcatgatgtgacacttatcgatgcggcaagcgagccgggcatgggggcgagtgccggcaacgccgcgcagctgtcctgggcctacggtgacgcaatggcatcaccagccctgctgaagcatctgccagcgattgcgatgggccgcgatccagccttccggatccgctggcaactcgatcgggactttctctgttgggggctgaaattccttgccaatacaccgttcagtagttggtggaacaatacgcaggagatcctgcgccttgccgagcaatcccgtcacgagctcgtaatcctgcttaaggaaaccgatatcgaattcgactatcgtgtcgccggaaaactgcacctctatgccgaccggcaaagttttgccgccgccgattccagtgtcgcgcgcaagaatgctctcggcttcgaacagcgcctgctgacgcgggtggaggcggaagacgtcgagcctgcgctcgccgcatatcagggagagattgccggcgccgtttatacacccagtgatgccctcggcgatgcggccggattttgccgccaactgaccgcctggatgatcgagcgccggcaggtgtcggtgcttttcggcaggaaggtctcgaccttcgtccaaacgggaagcgtgctgacaggattgaggttcgaggaccgcgacgagcttcgcgtcgacgcggccatcgttgccgcaggaccggaggtccgttccttcatatccgatttgcccgaggcccgagacatacgccccatcagaggctactcgctcaccgttcgaagaactggcctcgcaccaagtatcagcctgacagacgtcaaacgaaagcttgcctttgcggcaatcggcgaccgttttcgtgtcgccggactggcagatatcgagcgtcccggggccggttttgatgccggacgtttcgagacgctgaggctggccgcgtctgctgtgctgcccgaccttttcgagcgatcggacgaactgatgagatggtcgggcgagaggcctatgacaccgacctccatgcccattatcgccgcttcccgacgcatcaaaggtctctacatcaatgccggtcacggcatgttgggatggacgcttgcattaggctctgcccgccgcgtggtcgatttctttcaataa

SEQ ID NO: 6575 - protein, 403 aa, Rhizobium leguminosarum bv. viciae 3841
MARVAVIGAGVIGVSSAYLLARAGHDVTLIDAASEPGMGASAGNAAQLSWAYGDAMASPALLKHLPAIAMGRDPAFRIRWQLDRDFLCWGLKFLANTPFSSWWNNTQEILRLAEQSRHELVILLKETDIEFDYRVAGKLHLYADRQSFAAADSSVARKNALGFEQRLLTRVEAEDVEPALAAYQGEIAGAVYTPSDALGDAAGFCRQLTAWMIERRQVSVLFGRKVSTFVQTGSVLTGLRFEDRDELRVDAAIVAAGPEVRSFISDLPEARDIRPIRGYSLTVRRTGLAPSISLTDVKRKLAFAAIGDRFRVAGLADIERPGAGFDAGRFETLRLAASAVLPDLFERSDELMRWSGERPMTPTSMPIIAASRRIKGLYINAGHGMLGWTLALGSARRVVDFFQ

SEQ ID NO: 6576 - DNA, 1251 bp, Pseudomonas aeruginosa UCBPP-PA14
  CDS (1)..(1251): transl_table=11
atggctcagcgggtttgcatcatcggcgccggcgtggtcggcctggccacggcctacgccctggttcgcgaaggattcgacgtgaccctggtggaggcgcgcgagcggggcgggctggaaaccagctacgccaatggcgggcagttgtcctatcgctacgtggcgccattggccgacagcggcgtgccggcccaggcgctcggctggctgctgcgcaatgatgcgccgttgcgcctgcggccgcgccttgatccggcgcagtggcgctggctgctgggcttcctcgcggcctgccgcggctcgctgaaccgccgcaatgccgcgcacctgctgcgcctggcattgctcagccagcgcaccctgcaggactggcgcgaggaggatggcctcgatggcttcgactggcggcgcaacggcaagctggtggcgtttcgccaaccggccagctttgcgcgggcccgccagggcctggccgatccttcggcgcaattcgtcctgaccgccgccgagtgcctcgcgctggagccggccctgtccgccgcgcccttcgtcggcggcatccacacgccggacgaggaggtcgccgactgccatgccttctgcgtgcaacttgccgagcgcttgcaggcttccggacattgccggcaactgcatggccgcagggtgacgaagatcgtcgagggcggcgcggcggtgcgtggcgtcgaggtcggcggcgatctcatcgaggccgatcatgtggtgctggccgccggctaccgcagcgccgaattgatgctgccgggcctgcgcctgccgctatacccgctcaagggctatagcttgaccctgccggtcggcgcgcagcaccgcgcgccggataccagcatcaccgattacgaccgcaagatcgtctacgcgcgaatcggcgagcggctgcggatcgccgcgatggtcgacatcgtcggcttcgaccccggcctcgagcccgcgcgcctggcactgctgcgccagcaggcgcgggacacgttcccgcagggcggcgatttcgacgccgccgtcgaatgggccggcatgcgcccggccacgcccaccggggtaccgctggtgggcaacggcggctaccgcaacctctggctcaacctcggccacggcgcgctcggcttcaccctggcctgcggcagcgcgcgcctgctggccgagcagatcggccgccgcccgccgagcatcgataccactggcctgctgccgcgcggcgcgctggctggctga

SEQ ID NO: 6577 - protein, 416 aa, Pseudomonas aeruginosa UCBPP-PA14
MAQRVCIIGAGVVGLATAYALVREGFDVTLVEARERGGLETSYANGGQLSYRYVAPLADSGVPAQALGWLLRNDAPLRLRPRLDPAQWRWLLGFLAACRGSLNRRNAAHLLRLALLSQRTLQDWREEDGLDGFDWRRNGKLVAFRQPASFARARQGLADPSAQFVLTAAECLALEPALSAAPFVGGIHTPDEEVADCHAFCVQLAERLQASGHCRQLHGRRVTKIVEGGAAVRGVEVGGDLIEADHVVLAAGYRSAELMLPGLRLPLYPLKGYSLTLPVGAQHRAPDTSITDYDRKIVYARIGERLRIAAMVDIVGFDPGLEPARLALLRQQARDTFPQGGDFDAAVEWAGMRPATPTGVPLVGNGGYRNLWLNLGHGALGFTLACGSARLLAEQIGRRPPSIDTTGLLPRGALAG

SEQ ID NO: 6578 - DNA, 1251 bp, Azoarcus sp. BH72
  CDS (1)..(1251): transl_table=11
atgcatgtgatggttctcggcgccggcgtcaccggcgtcaccaccgcctggtatctgcgccaggcgggcttcgaggtcagcatcgtcgaccgtcagccagcccccggcatggaaaccagcttcgccaacggcggacagatttcggtcagccatccggagccgtgggccaatccctccgcacccttgacggtactgcgctggctggggcgcgaggacgcgccgctgcggtttcgtcctcacgcccaggccgcgcaatggcgatgggcgctgtccttcctgcacgaatgcctgccctggcgcagccgccgcaacactgcggccattgccgcgctggcgatggacagtgcccggcgcctgcgcgagcttcgcgagacggccgccctgcactatgaccagcggcagcgcggcatactccatttgttctacaaccgcagcagcttcgcctccgtggcggcgagggtgcgcgaactgcagcatttcgggatggatgtgcgcgcatgctcggcggccgaatgcgtagcaatcgagccggcgctcggtcacgtcgcatccacgctgcgcggcgggctctacgcgccggacgacgaatcgggcgacgcacatctgttcacccaggcgctggcggagcgcctgcgcgaagacggcgtgcgcttccacctcaatacgcggatcgaacgcctctcgcagacgggcgggcggatcgacggggtggaggtgcgcgacgaggccggccgcaccggcatcctgctcgctgatcattacgtgctgtgccttggcagctacggcacggcactgatggcgcggctgggcgtgcgcctgccgatctacccggtcaagggctattcgctgaccgcagcggtgatcgcgccggagcgggcgccggaagtgagcctcaccgacgaatcccgccgcatcgtgtgctcccgcctgggtgaccgcctgcgggtcgcgggcaccgcggaactggacggcttcaatactgcgctgcgtccggagcgggggcggatgctggccgactggctgaacagccgcttcccgggtgcgatcgacccggcggcggcgacgctatgggccggcctgcgccccgccacgcccggcaacgtaccgctgatcggcaagagcccgttcgagcgcctctggtacaacaccggccacggcacgctcgggtggacgctggcctgcggttcgggcgccgccactgccgacctcatcgccggccggcggccgacgccgcgttttccgttccgctga

SEQ ID NO: 6579 - protein, 416 aa, Azoarcus sp. BH72
MHVMVLGAGVTGVTTAWYLRQAGFEVSIVDRQPAPGMETSFANGGQISVSHPEPWANPSAPLTVLRWLGREDAPLRFRPHAQAAQWRWALSFLHECLPWRSRRNTAAIAALAMDSARRLRELRETAALHYDQRQRGILHLFYNRSSFASVAARVRELQHFGMDVRACSAAECVAIEPALGHVASTLRGGLYAPDDESGDAHLFTQALAERLREDGVRFHLNTRIERLSQTGGRIDGVEVRDEAGRTGILLADHYVLCLGSYGTALMARLGVRLPIYPVKGYSLTAAVIAPERAPEVSLTDESRRIVCSRLGDRLRVAGTAELDGFNTALRPERGRMLADWLNSRFPGAIDPAAATLWAGLRPATPGNVPLIGKSPFERLWYNTGHGTLGWTLACGSGAATADLIAGRRPTPRFPFR

SEQ ID NO: 6580 - DNA, 1314 bp, Azoarcus sp. BH72
  CDS (1)..(1314): transl_table=11
atgcatatcatcgtcctcggcagcggcgtcatcggtaccaccaccgcctggtatctcgcccgcaacggcgcccgcgtcaccgtgctcgaccgccagccggcaccggcgctggagacgagctacgccaacgcgggccaggtttcgccgggctactcgacgccgtgggcggcgcccggcattccgctgaaggcgctgaagtggctgttccagcgccacgcgccgctggcgatccgcccggacggcacgctgttccagttgcgttggatgctcgcgatgctggcgcaatgccgcgccggccgttatgccgagaacaaggcccgcatgatgcggctggccgaatacagccgcgactgcctgcgccagttgcgcgcggacagcggcattcactacgaagaacgcagccgcggcacgctgcagctgttccggaccgaggcccagtacgaggcggcggcgcgcgacatcgcggtgctggaggcctgcggcgtgcccttcgaactgctcgaccgcgaccacctggcggacgccgaacccgcgctcgcggcccggcgcgaccgtctggccggcgggctgcggctgcccaacgacgaaaccggcgactgccggctcttcaccgcccgcctcgccgcacaggcggccgagctgggcgtggacttccgcttcggcatcgacgtgcgcgggctggcgcaccgcggcggccacatcgacggcgtgcgcatcggcagcgcggccggcgaggacgtcctcaaggccgaccgctatgtgctcgcgctcggcagctattcgcgcgcgctcgccgccagcctcgggctggcgctgccggtgtatccgatgaagggctattcgctcaccgcgcggctggtggacgcggccgccgcgccggtgtccacggtgctcgacgaaacctacaagatcgcggtcacccgcttcgacgaacgcatccgcatcggcggcatggcggagatcgccggcttcgacctgcgcctcgacccgcgccgccgggccacgctggaaatggtcgccggcgatctgttccccggcgcggccgacctgggcggcgccgagttctggaccgggctgcggccgatgacgcccgacggcacgcccatcgtcggcgccaccccctaccccgaactcttcatcaacaccggccacggcacactgggttggacgatggcctgcggtgccggccagttgcttgccgacctcgtcaccggaaagcgtccggtgatccgccacgacgacctcgcgctggcccgttatggcaaagtgacgaccggccgcggcagcggcttcgacctgtcccccgcggcctga

SEQ ID NO: 6581 - protein, 437 aa, Azoarcus sp. BH72
MHIIVLGSGVIGTTTAWYLARNGARVTVLDRQPAPALETSYANAGQVSPGYSTPWAAPGIPLKALKWLFQRHAPLAIRPDGTLFQLRWMLAMLAQCRAGRYAENKARMMRLAEYSRDCLRQLRADSGIHYEERSRGTLQLFRTEAQYEAAARDIAVLEACGVPFELLDRDHLADAEPALAARRDRLAGGLRLPNDETGDCRLFTARLAAQAAELGVDFRFGIDVRGLAHRGGHIDGVRIGSAAGEDVLKADRYVLALGSYSRALAASLGLALPVYPMKGYSLTARLVDAAAAPVSTVLDETYKIAVTRFDERIRIGGMAEIAGFDLRLDPRRRATLEMVAGDLFPGAADLGGAEFWTGLRPMTPDGTPIVGATPYPELFINTGHGTLGWTMACGAGQLLADLVTGKRPVIRHDDLALARYGKVTTGRGSGFDLSPAA

SEQ ID NO: 6582 - DNA, 1365 bp, Acidovorax sp. JS42
  CDS (1)..(1365): transl_table=11
ttgggccgcagcacactgcgcgccatgaaaaccatcgtcctgggcgccggcatcatcggcattagcaccgcctggcatctgcgcgagcgcgggcatgaagtcactgtggtcgaccgccagcccgacgcggcgctggagaccagttttgccaacgcggcgcagatctcggtaagctactgtgagccctgggccaaccgcgaggcgccatggaaggccctcaagtggatgttcgacaaggaagcgccgctgctgtttcgcccccagctcgactgggagcaatggcgctggtgcctgaagttcctggcgcagtgcaacgacacggccttcgcacgcaacgtgcagcagatcgtggcgctgggcgcgtacagccatgccgcactcaaggacatagtgcgcgccacgggcatcgagtaccaccggctggaacgcggcatcgcgcacttctacaccgaccagaagtcctttgacgacgcggcccacgccgtggaactgatgcgccgcttcggcgtgcagcggcgcgtggtcagccgcgacgagctgctcgccatcgagccggccttccgcgcttacggcgaccgcatcaccggcggcacctacaccagcaccgacgagagcggcgacgcgcgcgtattcacccaggcactggcccgccgctgcgccgagcgcggcgtgcagttcctctacggtcacgacgtgctgcgcctgaaccgctccggcgacgctattgaatcaatagctattcgcgctcgccaggaaagcgctacaggccaaaaagaccaaatactgaaagccgatgccgtggtcgttgcatgcggcagctacagcgcaccgctgctgcggggcgtgggcgtgcacctgcccatctaccccggcaagggctatagcgccacgttcccgctgctcaaaccggagggcgcgcccatggtttccaccatcgacgacggcaagaagatcgccatgagccgcctgggcaacgtgctgcgcgtggccggcaccatcgagctgggcggctacgacctgtcgctggacagccctgtggcgcgcgcgcgctgccacatgctgtcgcgccgcattgagaccatcctgcccggcgtgtgcgacacgcgcacgcccgaggaaggcggagatccgcagtactggaccggcctgcgccccgccacgcccaccaacatcccgttcatcggccgtacgccgctgcacggcctgtgggtgaacgccggccacggcacgctgggctggacgcatggcgccggctcgggcaaggcgatggccgagctgctgagcggcgagcggccagccatggacttcgcctttctgggcgacgacacgcccgctgccgcctacggggcgccgcgcctggcctga

SEQ ID NO: 6583 - protein, 454 aa, Acidovorax sp. JS42
MGRSTLRAMKTIVLGAGIIGISTAWHLRERGHEVTVVDRQPDAALETSFANAAQISVSYCEPWANREAPWKALKWMFDKEAPLLFRPQLDWEQWRWCLKFLAQCNDTAFARNVQQIVALGAYSHAALKDIVRATGIEYHRLERGIAHFYTDQKSFDDAAHAVELMRRFGVQRRVVSRDELLAIEPAFRAYGDRITGGTYTSTDESGDARVFTQALARRCAERGVQFLYGHDVLRLNRSGDAIESIAIRARQESATGQKDQILKADAVVVACGSYSAPLLRGVGVHLPIYPGKGYSATFPLLKPEGAPMVSTIDDGKKIAMSRLGNVLRVAGTIELGGYDLSLDSPVARARCHMLSRRIETILPGVCDTRTPEEGGDPQYWTGLRPATPTNIPFIGRTPLHGLWVNAGHGTLGWTHGAGSGKAMAELLSGERPAMDFAFLGDDTPAAAYGAPRLA

SEQ ID NO: 6584 - DNA, 1248 bp, Acidovorax sp. JS42
  CDS (1)..(1248): transl_table=11
atgcacattatcatcgtgggcgccggcatcgtcggcgcggccactgcttatgaactggccgcggacggccatcaggtcaccgtggtcgagcagcgcggcgccgcggcagaggaggcgagcttcggcagctccggcctgctggcgccctcgctactcatgccgtgggcggcgccgggcctgggtgggccgctcggccgctggccttggagccgcgatgccacgctgcgcctggtacgcggcgccggcatggcaggccggcgctggcgctggcgctggtcccaggcgggtcgccggcccgagacggcggcgcggctggccgcgctggaaggtctgggccgctacagcctggcacgcacgcgcgaactcatccaccaattggacgtggacctggaaaccagccgcggcactctggtgctgctgcgccgccccgaagatgtggagcgcctgcagcccgcgctgaaggtgctgcgcgacgcgggcgtgggcctgcgcgatgtggatgccgacaccgcgcggctcatcgagcccggcctgtccaccgacgtgccgctggcgggcgccgtgcatgtaccggatggcgaatccggcaactgccggctgtttgcgcagatcctgcgccacgcggcgcaggagcgcggcgcacagttcgtgttcggcgcgcatgtccgcgctctcagcgcatcgccgcccggcgtccacgtcgtaggcgaagccgccccgcgtcaggccgacgccgtggtgctgtgcgccggcgtggccagcgccgcgctgctgcgcccgctggggcgccacctgcccctggaggccgtacatggctacaccgtcagcgcgccggtgcgcgaggacagccatgcaccccagggctcggtgatcgatccgctgcaccgcatcaccatcacccgccagggtcagcgcgtgcgtgtgtccggcggcgccgagatcgggcacggcaacggcagccaccacgcgcccacgctgcagacgctctacctcgcgctgtcgggctggttcccgggcggcgcactcacctcgtccccgcaggtgcaggtctggcgcggcgcgcgccccacgctgaccgatggcgcccccgccatcggcgcgagtggtgtgtccggcctgtggatcaacaccggccacggcgcttgcggctgggcccaggcctgtggcagtgcccgcgccctggcggacctgatcgcccagcgcagtccggcgattgacctgcagccctttgcgccgcagcgcttctag

SEQ ID NO: 6585 - protein, 415 aa, Acidovorax sp. JS42
MHIIIVGAGIVGAATAYELAADGHQVTVVEQRGAAAEEASFGSSGLLAPSLLMPWAAPGLGGPLGRWPWSRDATLRLVRGAGMAGRRWRWRWSQAGRRPETAARLAALEGLGRYSLARTRELIHQLDVDLETSRGTLVLLRRPEDVERLQPALKVLRDAGVGLRDVDADTARLIEPGLSTDVPLAGAVHVPDGESGNCRLFAQILRHAAQERGAQFVFGAHVRALSASPPGVHVVGEAAPRQADAVVLCAGVASAALLRPLGRHLPLEAVHGYTVSAPVREDSHAPQGSVIDPLHRITITRQGQRVRVSGGAEIGHGNGSHHAPTLQTLYLALSGWFPGGALTSSPQVQVWRGARPTLTDGAPAIGASGVSGLWINTGHGACGWAQACGSARALADLIAQRSPAIDLQPFAPQRF

SEQ ID NO: 6586 - DNA, 1311 bp, Acidovorax sp. JS42
  CDS (1)..(1311): transl_table=11
atgcgcgtgatcgttctgggcgccggcgtcgtcggcaccacctctgcgtacttcctccagcaactcggccacgaggtcaccgtcatcgaccggcaggctgtgcccggtgcggaaaccagcttcgccaacggcggccagatctcggtcagccacgccgagccctgggccaaccccggcgcgccgctcaaggtgctgcagtggctgggcaaagaggatgcgccgctcttgtttcgcctgcgcgcggacatgcgccagtggctttggggcctgcaattcctgcgcgaatgcacgcccgcgcgcacgcgccacaacatcgagcagatcgtgagcctgggcagctacagccgcagcacgctgcagcagctgcgcgccgacacgggcctgcagtacgaccagcgcacacagggcatcctgcacttctacaccagcgcccaggaactcgacgccgcgctggcgcccgccgagcagatgcgtgcgctgggctgccaccgccgcgtggtggatgccgacgaggccgtgcgcatcgagccagccctggcccacgtccgcccgcagctgacgggcgccacctacacggcggaggacgagtccggtgacgcccacctgttcacgcgcgcgctggccggcgtggcccaggccgcgggcgtgcaattccgcctgggctgccacatcaccgcgctgcacccggcgggcggcgccatcgaccatgtggagatcaccaacgaggccggcggctacgagcgcgtgcgcggcgacgcctacgtgctggcgctgggcgcattcaccccgctgctggcccagcccctgggcctgcgcctgcccatctacccggccaagggctattcggtgacgctgccggtgcgcgacgcggccgccgcctaccaggtgagcctgacggacgacgagtacaagctggtcttctcgcgctacaccagcgcgcagggcgaccggctgcgcatcgcggggacggccgagctcaacggctacgagcgcgcactgaacgccgtgcgctgcgaagccatcgtgcggcgcgtggagcagctctttcccggcgcgggcgatgcgagccaggcgcagttctggagcggcctgcgccccgccacgccgagcaacgtgccgctgatcggcaagacgcgctacggcaacctgttcctgaacaccggccacggcacgctgggctggacccacgcctgcggctcgggcaagtccatcgcgcgcatcgtgagcgggctggagccggagctggacttcgcgttctgcggcctgccgcgccctgctgcggcgccccgccccgccgtcatcggcgtttga

SEQ ID NO: 6587 - protein, 436 aa, Acidovorax sp. JS42
MRVIVLGAGVVGTTSAYFLQQLGHEVTVIDRQAVPGAETSFANGGQISVSHAEPWANPGAPLKVLQWLGKEDAPLLFRLRADMRQWLWGLQFLRECTPARTRHNIEQIVSLGSYSRSTLQQLRADTGLQYDQRTQGILHFYTSAQELDAALAPAEQMRALGCHRRVVDADEAVRIEPALAHVRPQLTGATYTAEDESGDAHLFTRALAGVAQAAGVQFRLGCHITALHPAGGAIDHVEITNEAGGYERVRGDAYVLALGAFTPLLAQPLGLRLPIYPAKGYSVTLPVRDAAAAYQVSLTDDEYKLVFSRYTSAQGDRLRIAGTAELNGYERALNAVRCEAIVRRVEQLFPGAGDASQAQFWSGLRPATPSNVPLIGKTRYGNLFLNTGHGTLGWTHACGSGKSIARIVSGLEPELDFAFCGLPRPAAAPRPAVIGV

SEQ ID NO: 6588 - DNA, 1308 bp, Xylella fastidiosa Ann-1
  CDS (1)..(1308): transl_table=11
atgcgcgtgctcattttgggaagcggcgtgatcggtaccaccagtgcctggtatctgtccaaggctggttgtgaggtagtggtggtggatcgtcagtctggtgctggtctggagaccagttatgccaatggtggtcagctgtcttttggttatacctcgccctgggcggcccccggtgttccgttgaaggctgtgaggtggttgtttgagcggcatgcgccgctgtcgattcgtccgacgactgattggaatcagtatgtttggttggcacggatgttgcgtcattgctctgctgagcgctatgcagtgaataagtcgcggatgttgcgtctcagtgagtacagtcgtgaagcgttggaggcgttatctgctgaaactgggatcacgttcgaggggcgccgtttagggactattcagttatttcggacgcagcagcagcttgatgcggctgttcgggatatcgaactactcactcagtacggtattccatacgaggtgctcagtccgcatcagcttgctaagtttgagcctggtttggtcgatggtagcgtccgttttgcgggtgcgctgcgcttgcctcatgatcagactggggattgttgtttgttcacgcaacggttggctgcgttggcggctaagcgtggggttgagttccgttacggttgtacggtgcaacgcttggaagtggatggtcctcgtgtgacgggcgcttggatcaatggagcgttggagcgtgccgattgttgtgtggttgcgctcggtagttattcgccgctgttattggcgcctttgggcttgcgtttgccagtgtatccgttgaaagggttttcgttgacgttgccgatgattgatgcgtcgcgtgcgcccgtttcgacggtgcttgacgaaagttacaaggttgcggttactcgtttcgatgaacgtatccgtgtggcgggtatggcagaggtctctggttacgatgtgtcgttgaatccacgtcgccgtgcgacgttggagatggtggtgcaggatgtgtaccctgggtgcggtgatttggggcgtggcgagttttggactgggctgcgcccggcgacgccggatgggacgccggtgatcggtgcgacgccctatcagggtttgtttcttaatacggggcacggcacgcttggttggacgatgtcatccggttcaggccgttatttagccgatttgatatgttgtcgcccttgtgaaatctccagtgaagggttggatatgttccgttacttggtgtcgacgataccttgcccgcaagagtgtgctccgtgcgccccgcccacgccgtaa

SEQ ID NO: 6589 - protein, 435 aa, Xylella fastidiosa Ann-1
MRVLILGSGVIGTTSAWYLSKAGCEVVVVDRQSGAGLETSYANGGQLSFGYTSPWAAPGVPLKAVRWLFERHAPLSIRPTTDWNQYVWLARMLRHCSAERYAVNKSRMLRLSEYSREALEALSAETGITFEGRRLGTIQLFRTQQQLDAAVRDIELLTQYGIPYEVLSPHQLAKFEPGLVDGSVRFAGALRLPHDQTGDCCLFTQRLAALAAKRGVEFRYGCTVQRLEVDGPRVTGAWINGALERADCCVVALGSYSPLLLAPLGLRLPVYPLKGFSLTLPMIDASRAPVSTVLDESYKVAVTRFDERIRVAGMAEVSGYDVSLNPRRRATLEMVVQDVYPGCGDLGRGEFWTGLRPATPDGTPVIGATPYQGLFLNTGHGTLGWTMSSGSGRYLADLICCRPCEISSEGLDMFRYLVSTIPCPQECAPCAPPTP

SEQ ID NO: 6590 - DNA, 1308 bp, Xylella fastidiosa Ann-1
  CDS (1)..(1308): transl_table=11
atgcgcgtgctcattttgggaagcggcgtgatcggtaccaccagtgcctggtatctgtccaaggctggttgtgaggtagtggtggtggatcgtcagtctggtgctggtctggagaccagttatgccaatggtggtcagctgtcttttggttatacctcgccctgggcggcccccggtgttccgttgaaggctgtgaggtggttgtttgagcggcatgcgccgctgtcgattcgtccgacgactgattggaatcagtatgtttggttggcacggatgttgcgtcattgctctgctgagcgctatgcagtgaataagtcgcggatgttgcgtctcagtgagtacagtcgtgaagcgttggaggcgttatctgctgaaactgggatcacgttcgaggggcgccgtttagggactattcagttatttcggacgcagcagcagcttgatgcggctgttcgggatatcgaactactcactcagtacggtattccatacgaggtgctcagtccgcatcagcttgctaagtttgagcctggtttggtcgatggtagcgtccgttttgtgggtgcgctgcgcttgcctcatgatcagactggggattgttatttgttcacgcaacggttggctgcgttggcggctaagcgtggggttgagttccgttacggttgtaaggtgcaacgcttggaagtggatggtcctcgtgtgacgggagcttggatcaatggagcgttggagcgtgccgattgttgtgtggttgcgctcggtagttattcgccgctgttattggcgccgttgggcctgcgtttgccagtgtatccgttgaaagggttttcgttgacgttgccgatgattgatgcgtcgcgtgcgcccgtttcgacggtgcttgacgaaagttacaaggttgcggttactcgtttcgatgaacgtatccgtgtggcgggtatggcagaggtctctggttacgatgtgtcgttgaatccacgtcgccgtgcgacgttggagatggtggtgcaggatgtgtaccctgggtgcggtgatttggggcgtggcgagttttggactgggctgcgtccggcgacgccggatgggacgccggtgatcggtgcgacgccctatcagggtttgtttcttaatacggggcacggcacgcttggttggacgatgtcatccggttcaggccgttatttagccgatttgatatgttgtcgcccttgtgaaatctccagtgaagggttggatatgttccgttacttggtgtcgacgataccttgcccgcaagagtgtgctccgtgcgtcccgcccacgccgtaa

SEQ ID NO: 6591 - protein, 435 aa, Xylella fastidiosa Ann-1
MRVLILGSGVIGTTSAWYLSKAGCEVVVVDRQSGAGLETSYANGGQLSFGYTSPWAAPGVPLKAVRWLFERHAPLSIRPTTDWNQYVWLARMLRHCSAERYAVNKSRMLRLSEYSREALEALSAETGITFEGRRLGTIQLFRTQQQLDAAVRDIELLTQYGIPYEVLSPHQLAKFEPGLVDGSVRFVGALRLPHDQTGDCYLFTQRLAALAAKRGVEFRYGCKVQRLEVDGPRVTGAWINGALERADCCVVALGSYSPLLLAPLGLRLPVYPLKGFSLTLPMIDASRAPVSTVLDESYKVAVTRFDERIRVAGMAEVSGYDVSLNPRRRATLEMVVQDVYPGCGDLGRGEFWTGLRPATPDGTPVIGATPYQGLFLNTGHGTLGWTMSSGSGRYLADLICCRPCEISSEGLDMFRYLVSTIPCPQECAPCVPPTP

SEQ ID NO: 6592 - DNA, 1257 bp, Neptuniibacter caesariensis
  CDS (1)..(1257): transl_table=11
atgcaggttttggttttaggtgcaggtgtggttggcgttactagcgcttggtatttagccaaggctggccatgacgtaactataatcgatcgccaggtagatgtcgcgttagaaacgagttatgccaacgcgggtcaaatatctccgggctattcagcgccctgggccggcccaggcattccggtaaaagccgtaaaatggctgatgcaagacctagcgccttttatgatcagtggtaaagaactggacacccagacactatcctggatgaccaaaatgctaaccaactgtaccgagagcgcttatcacgtcaataaagcccggatggtccgtctggctgaatacagccgcgattgttttgtcgatcttcgcaacgaactggatatcgattacgagcaacgcactaaaggcaccctgcaagtattccgtacagaaaaacaggttaaagattctaagaaagatatctctgttttggaagaatctggcgtagattttcaggttctggatgtggatggctgcgttgaatacgagccagccctagccaatgtaaaagataagattgtcggcggccttcgtcttccgggtgatgagacgggtgattgctttaagttcaccaactccctggctgatgaatgcaagaagatgggcgttaagttcatcatgaaaaccgacatcctgaatatcaatactcagggcgaccagattgaaagcgttactacatcccgcggtaaaatgactgcagatgcttacctcgtggcactgggtagctattcaacacctgtgctatcgaagatcgatctgaaagtacctgtatacccaatcaagggctactcattaactctaccgatcgttgacgcaagcaaagcgccaacctcgacggtcatggatgaaacctacaaagtcgccgtaacacgatttgacgatcgaatccgtgttggcggaacagctgagattgcatcctacaacaaagagcttgaagagaagcgcaaagccaatgttgagtttgtggttagcgacctgttccctggcggtggcgatatcgaacaggccgaattctggacaggcctgcgcccaatgactcctgacggaacaccaattctgggcgaaacaaaatattccaacctgttcctgaacacaggccacggcacgctgggctggactatgtcactgggctcgggtaaatacgtcgccgacatcatcagccagagacagcctgatattgataaagaaggcctttccgtagcgcgttacggttaa

SEQ ID NO: 6593 - protein, 418 aa, Neptuniibacter caesariensis
MQVLVLGAGVVGVTSAWYLAKAGHDVTIIDRQVDVALETSYANAGQISPGYSAPWAGPGIPVKAVKWLMQDLAPFMISGKELDTQTLSWMTKMLTNCTESAYHVNKARMVRLAEYSRDCFVDLRNELDIDYEQRTKGTLQVFRTEKQVKDSKKDISVLEESGVDFQVLDVDGCVEYEPALANVKDKIVGGLRLPGDETGDCFKFTNSLADECKKMGVKFIMKTDILNINTQGDQIESVTTSRGKMTADAYLVALGSYSTPVLSKIDLKVPVYPIKGYSLTLPIVDASKAPTSTVMDETYKVAVTRFDDRIRVGGTAEIASYNKELEEKRKANVEFVVSDLFPGGGDIEQAEFWTGLRPMTPDGTPILGETKYSNLFLNTGHGTLGWTMSLGSGKYVADIISQRQPDIDKEGLSVARYG

SEQ ID NO: 6594 - DNA, 1272 bp, Marinobacter sp. ELB17
  CDS (1)..(1272): transl_table=11
atgcacgttgtggtgattggtggtggtgtggttggtgtaaccacagcttgggaactttgtcgccgcggccatcaagtgaccgttctggagcgacacagcttggcagggaacgaaaccagtaaggccaatgcagcgcagcgttcctatggtgttgtgtacccttgggcagacccggctatggtgcttaaagcactgccttggttggtaaagcaggacgggccactaaaaatggggatgccgccgtcgctggcaaccattcgtttcatgttttcgacgttgcgctacgcctggtcgccagggcttttcggttttaacaggcgcgccatgttgcgcctggccaggcacagccgtgagcgtttcctggttctggaaaacgagctcgagctaaactttgacggtgcccataaaggcctgttgcatttagccagtacgccggaggcgttggacggctatcgcaggactcaacgcttgctgaatagtatggacattcccgcacgtattttgaacgccgccgaggtagaacagttagagcctggcctgagcggcaacgggccactttatggcgcgattagctatgacactgacggcaccggcgactgctacctgttcagccgcgaactggcgcgggcctgtgaagaaaaaggcgtggtgtttcgttatgaggtagatgtagaacaactgctggcagacgaccggcgtgtcaacagcatcatgttgcgcagcaaagacgggcagcgggaaaatctgaacgccgatgcggttgttgtcagcgccggttgctggtctgacaagctaacccggccattgggtcagccactgccgatttatccggtgaaaggttacagcctgacggcaaccatcacggatgaacagaaagcgccaacgtctaccgtacatgatgaccggtacaaagtggttatgacccgcttgggcgaccgcttgcgggcaacggggtttgtggaattgaacgattttgaccggggcattccgcaggcacgtcttgaaactattaaaaaggcggttcgcggtcgctttccgggttgcaccgatatcgatagtgcagagagctggacagggttccgcccgatgacgccagacggccctgcgatcattggccgtggcaaccgcgaaaatctgtatttgaataccggccacggtgtatttggctggacgcttgccgctggaagcgcggatgtgatcgccagtgtgatcgataatcaggagccggcggtgtgcctggatgcattccgcccggagcgcttcagtgagtag

SEQ ID NO: 6595 - protein, 423 aa, Marinobacter sp. ELB17
MHVVVIGGGVVGVTTAWELCRRGHQVTVLERHSLAGNETSKANAAQRSYGVVYPWADPAMVLKALPWLVKQDGPLKMGMPPSLATIRFMFSTLRYAWSPGLFGFNRRAMLRLARHSRERFLVLENELELNFDGAHKGLLHLASTPEALDGYRRTQRLLNSMDIPARILNAAEVEQLEPGLSGNGPLYGAISYDTDGTGDCYLFSRELARACEEKGVVFRYEVDVEQLLADDRRVNSIMLRSKDGQRENLNADAVVVSAGCWSDKLTRPLGQPLPIYPVKGYSLTATITDEQKAPTSTVHDDRYKVVMTRLGDRLRATGFVELNDFDRGIPQARLETIKKAVRGRFPGCTDIDSAESWTGFRPMTPDGPAIIGRGNRENLYLNTGHGVFGWTLAAGSADVIASVIDNQEPAVCLDAFRPERFSE

SEQ ID NO: 6596 - DNA, 1233 bp, Marinobacter sp. ELB17
  CDS (1)..(1233): transl_table=11
atgaagcatattgcagttattggcggtggtatcaccggtatcaccaccgcttactctctggccaagcgcggcttcgacgtcaccgtttacgaaaagcatcgttatgcggctatggaaacgtctttcgcaaatggcggtcaattgtcggcgtccaatgcagaagtctggaacaactggcagaccgtgatcaaaggcatgaaatggatgttccacagcaatgcaccgctgctggttaatcccaagccctcctggcacaaattgagctggtttgccgagttcatggcggccattccccagtacgaaaaaaataccaccgaaaccgcccgcctggcgatcgctgcccgtgagcatctgttttcatgggcaaaagaagaaggtatcgatttcgacctgaaggaacagggcatactgcacatctatcgcgacaaggccggcttcgaccacgcggcaaacgtctcgaaattgctggcagcaggaggtctggagcgccgggcagtcacgcccgatgaaatgaaggcaatcgagcccaccctggccggcacctactacggtggctttttcaccgaaagcgattccaccggtgatattcacaagtttaccagcggcctggcagatgcgatccagcgccgcggcgtaaaaacgtgttatggccacacggttaccgagctgagtgcagatcaatcccatgcctgggtaacgtcttttgatggcgaacaacaaattcgtaacaccttcgatggtgtcgtggtatgtgcaggcgttggcagcagggatctggctgcgaaactgggcgaccgcgttaacatttatccggtgaaaggctattccatcacggttgagctggacgacgaagcttcccggcaagcggcgccgaccgttagcctgctggacgatgccaccaagctggtcaccagccggttgggcgatgatcgtttccgcattgcgggcacagcagaattcaacggctacaatcgcaacattcgggatgaccgcattcgcccactcacccgttgggttgagcaatgcttccccggggtctgtacccggcgcgttgtgccctgggcgggactgcgccccatgcttcccaccatgatgccgcgagtcggcccgggtcgcctgccaacggtgttctacaatactggccatggccacttgggttggacgctgtcacccattaccgccgagatgctggccgaagccgttgaaacggcgcctgcttaccaggaacgctga

SEQ ID NO: 6597 - protein, 410 aa, Marinobacter sp. ELB17
MKHIAVIGGGITGITTAYSLAKRGFDVTVYEKHRYAAMETSFANGGQLSASNAEVWNNWQTVIKGMKWMFHSNAPLLVNPKPSWHKLSWFAEFMAAIPQYEKNTTETARLAIAAREHLFSWAKEEGIDFDLKEQGILHIYRDKAGFDHAANVSKLLAAGGLERRAVTPDEMKAIEPTLAGTYYGGFFTESDSTGDIHKFTSGLADAIQRRGVKTCYGHTVTELSADQSHAWVTSFDGEQQIRNTFDGVVVCAGVGSRDLAAKLGDRVNIYPVKGYSITVELDDEASRQAAPTVSLLDDATKLVTSRLGDDRFRIAGTAEFNGYNRNIRDDRIRPLTRWVEQCFPGVCTRRVVPWAGLRPMLPTMMPRVGPGRLPTVFYNTGHGHLGWTLSPITAEMLAEAVETAPAYQER

SEQ ID NO: 6598 - DNA, 1263 bp, Marinobacter sp. ELB17
  CDS (1)..(1263): transl_table=11
atgcacgtagtggttttaggcgcgggtgtggttggcgttaccagtgcctggtttttgcagcgtcagggttaccaagtcacagtgatagatcgtcagccagcagccgggcttgaaaccagttacgccaacggcggccagatttcagtgtgccatgccgagccttgggccaacccatcgacaccgctgaaggttctgaaatggctgcaccgtaatgacgcgccgctgctgttccggccacgactggatgctgcccaatggcgctgggcgctggcgtttctgggccaatgcacctctgcacgggcggctgacaatctgcgtcagatggtcaacctgggcctttacagccgcagcaaattacaggaactgcgggccgaactgggtttagagtacgaccatctgacccgtggaattctgcacttttacaccaaccagaaagaattcgacagcgccctggaaccggcgcggcagatgcgcgagctggggtgtgaccggcaagtggtgagtgctgcgcgggcaatcgaactggagccggctttggcgcccttgaagcatcgcctcgcagggggcacctacaccgaggaagacgaatccggtgatgctcgcaaatttacccaggccctggcggagcgctgtaaacaagcgggtgtggtgttcaaacacaacaccgaagtggttgggtttgagcgcggtatcgggcgtatcgatgcggtggaaaccctgtcccaaggccatcaccataatctgcgtgcagacgcttgggttctcagtttgggtagctttagcgcgccactggtgcggcaattgggactggctttgaatatttatccagccaagggctattccatcaccgtgccggtgaaaaatcctgaggcggcgttcaatgtcagcctgaccgacgatgagtacaagctggtttactcacgtttgggtgatcgtatgcggattgcgggtacggcagagctcagcggctattccagacgcctgaatgtcacccgctgccgggccgtgttgcgccgggtggcggctgttatgcccgaggcgggtcactgggagcaggctgaatactggagcgggttgcggccaacgacgccgtccagcgtgccctacgtgggtaagagcgttattagtaatctgtttttgaataccgggcatggtactttgggctggacccatgcctgcgggtcagcggccgcgctggcggatattatcgccgggcggccgccgcagctggattttcgcttcagtggcgtttcagtgacgtaa

SEQ ID NO: 6599 - protein, 420 aa, Marinobacter sp. ELB17
MHVVVLGAGVVGVTSAWFLQRQGYQVTVIDRQPAAGLETSYANGGQISVCHAEPWANPSTPLKVLKWLHRNDAPLLFRPRLDAAQWRWALAFLGQCTSARAADNLRQMVNLGLYSRSKLQELRAELGLEYDHLTRGILHFYTNQKEFDSALEPARQMRELGCDRQVVSAARAIELEPALAPLKHRLAGGTYTEEDESGDARKFTQALAERCKQAGVVFKHNTEVVGFERGIGRIDAVETLSQGHHHNLRADAWVLSLGSFSAPLVRQLGLALNIYPAKGYSITVPVKNPEAAFNVSLTDDEYKLVYSRLGDRMRIAGTAELSGYSRRLNVTRCRAVLRRVAAVMPEAGHWEQAEYWSGLRPTTPSSVPYVGKSVISNLFLNTGHGTLGWTHACGSAAALADIIAGRPPQLDFRFSGVSVT

SEQ ID NO: 6600 - DNA, 1269 bp, Moritella sp. PE36
  CDS (1)..(1269): transl_table=11
atggaagtcatggtattaggttgtggggttattgggttaacgtcagcgtggtatttggcgcaagctgggcatgatgtgactgtcattgatcgccagccaaggggggctgaagaaactagttttgctaatgcgggacagatttcttatggttattcatctccttgggctgcgcctggtataccgatgaaagcaatcaaatggttggcgcaaaaacacgccccgttaaaaataaaaccgggactgtcacccgatttgtatttatgggcagcaaaaatgttagccaattgtaatcaacatagctacgagattaataaagcgcggatgttgcgcattgccaactatagcagagactgtttgattgaattacgtcagcagcaagacattcaatacgaggctcgacagcagggcacattacaggtattccgtcatgagtcacagttagctgcaatcgccaaagacattaaaatattggcagatagtggcacgctatatgaagaattagatgttgcggcttgtattgctgtggagcctggattggccggtgtgaaagataaaattgtcggtggattacgtctacctgatgatgaaaccggagactgttatatgttctgccagcagctaacagcattagcgcaagctgcgggggttaagtttaaatttgatgtgacggtcaataaattgaaccatagcgacaacaaaatcaagtcagtcagcaccaatgtgggagagttaacggcggatgcttatgtggtcgcgatggggtgttattcatcggcattgttatcaccaatcttgtcaccgcaaggtttagctatgcctatttatccggtaaaagggtattcactcacggttcctattgttgatagtagccaagcgccagtatcaaccgtcatggatgaaacctataaagtggcgatgacgcgttttgatcaacgaattcgcgttgctggaacagcagagttggcgggatataatttagatctgacggcatctcgaaaagacacgataacaatggtgataaacgatttatttcccaacgcaggagatatgagcaaagctgaattttggaccgggttacgacctatgacgcccgatggtacgccgattattggtaaaacgccgatggctaatttatttactaactgtgggcatggcacgttgggttggaccatggcatgtggctcggcgcgttatcttgctgatgttgtcagcggtgttacacctgatattgatagcaatgacttggatatttatcgctatggccgttag

SEQ ID NO: 6601 - protein, 422 aa, Moritella sp. PE36
MEVMVLGCGVIGLTSAWYLAQAGHDVTVIDRQPRGAEETSFANAGQISYGYSSPWAAPGIPMKAIKWLAQKHAPLKIKPGLSPDLYLWAAKMLANCNQHSYEINKARMLRIANYSRDCLIELRQQQDIQYEARQQGTLQVFRHESQLAAIAKDIKILADSGTLYEELDVAACIAVEPGLAGVKDKIVGGLRLPDDETGDCYMFCQQLTALAQAAGVKFKFDVTVNKLNHSDNKIKSVSTNVGELTADAYVVAMGCYSSALLSPILSPQGLAMPIYPVKGYSLTVPIVDSSQAPVSTVMDETYKVAMTRFDQRIRVAGTAELAGYNLDLTASRKDTITMVINDLFPNAGDMSKAEFWTGLRPMTPDGTPIIGKTPMANLFTNCGHGTLGWTMACGSARYLADVVSGVTPDIDSNDLDIYRYGR

SEQ ID NO: 6602 - DNA, 1242 bp, Gemmata obscuriglobus UQM 2246
  CDS (1)..(1242): transl_table=11
atgcggcgtgtggttgttgtgggcggcggggtcgtcggggcgtgcagtgcgtacgcgctggcgaaggccgggaaacaggtcgtgatcgtcgagcagaagggcttcggctcgggcagctcgcacgcgaactgtgggtacgtgtccccgagtcacgtgctgccgttcgccgggccgggggcgatcgggtccacgctgaaaacgctgttccagcggaactcgccgctcaaagtgcgcccgggcgtggcgctcgccaacctcggctggttcctcgggttcgcgcggcggtgcaatacgcgcgacatgatggccgccggccgggccatccaggcgctgctgaactcgtcgcggtccctgttcgagcaactggtcgaaacggagcggctggagtgcgagtgggaaacgaaggggctactcttcgtgttccggacgccgaagcacttcgaacactacgcccacacgaacgaaatgctcgcgcgcgagttcaacatgcccgcgcgcccactcgattccgcggctctcgccgcactcgaaccggccctcaaccccggtcaggccggcggttacctctacgaatccgacgcgcacctgcggcccgaccggctgatgagcgagctgaagcgcgtgctcacgggcctcggcgtcgagatccgcgagaactgtgccttcacgggattcgtgaaggggaacggcacggtggcggcggtcaaaaccgcttccggtgaggttgccgcggaccagttcgtgatcgcgaccggcgcgtggaccccgaagctcaacgcggaactcgggtgccgggtgccgatccagcctgggaaggggtactcgatcaccatgccgcgcccggcggtgtgcccgaagtacccgctcattttcgaggaacaccgggtggcggtcacgccgttcgcgagcggctaccgcctgggctccacgatggagttcgggggctacgacgagtcgctgaaccggtcccgcctgtcactgctgacggagggggcgaagctgtaccttcgcgacccgctggcggaaccggtgcaagaggagtggtggggctggcggccgatgacttacgacagcgttccggtgatcgacttcgcaccggccatgagcaacgttctgatcgccgccgggcacaacatgctcgggctctcgatggcgaccgccaccgggaagctggtggccgaaatgctggggggcgggaagacgcacatcgacccggccccgtactcgctccgacggttctga

SEQ ID NO: 6603 - protein, 413 aa, Gemmata obscuriglobus UQM 2246
MRRVVVVGGGVVGACSAYALAKAGKQVVIVEQKGFGSGSSHANCGYVSPSHVLPFAGPGAIGSTLKTLFQRNSPLKVRPGVALANLGWFLGFARRCNTRDMMAAGRAIQALLNSSRSLFEQLVETERLECEWETKGLLFVFRTPKHFEHYAHTNEMLAREFNMPARPLDSAALAALEPALNPGQAGGYLYESDAHLRPDRLMSELKRVLTGLGVEIRENCAFTGFVKGNGTVAAVKTASGEVAADQFVIATGAWTPKLNAELGCRVPIQPGKGYSITMPRPAVCPKYPLIFEEHRVAVTPFASGYRLGSTMEFGGYDESLNRSRLSLLTEGAKLYLRDPLAEPVQEEWWGWRPMTYDSVPVIDFAPAMSNVLIAAGHNMLGLSMATATGKLVAEMLGGGKTHIDPAPYSLRRF

SEQ ID NO: 6604 - DNA, 1269 bp, Thauera sp. MZ1T
  CDS (1)..(1269): transl_table=11
atgcacgtcatggttctcggcgccggcctgtccggcgtcacgaccgcctggtacctgacccgcgccggcttccaggtcagcctggtcgaccgccagcccggcgccggactggagaccagcttcgccaacggcgggcagatctcgatcagccatcccgagccctgggccaaccccggcgcacccgcgcaggtgctgcgctggctcggacgcgcggacgcgccgctgaagttccgcccgcaccgcgcccttgcgcagtggacctggggcctgcgtttcctgctcgaatgcctgcccgcacgggcgcaccgcaacaccgtcgcgatcgccgcgctcgcgctcgccagcgggcagcgactgcgtgcgctgcgcgccgaactcggcctcgaatacgaccagctcgagcgcggcatcctgcacctgttctacagccgcggggagttcgccaaggcccccgcgcgcgctgcgcagctgcgcgccttcggtatcgcggccgaggtgctggaccgcgatgcctgcctggaacgcgagcccgcgctggccacgtgcgccggcagcctggccggcgggatcttcgcccagggcgacgaatcgggcgacgcgcacaagttcacccgcgcgctcgcgcacaggctggaagaaggtggtgtggtcctgcaccgggagaccgaggtgagcgcgctcgagaccggatccggcggccgggtcgtgggcgcgcgcgtgcgccgcgcggacggcagcgtcgacagcctgcgcgcggacgcctgcgtgctctgcctgggcagccacggcccgcgcctcgccgcgccgctcggcttgcggctgccgatctacccggtcaagggctactcgatcaccgcaccggtactcgagcccgcgctcgcaccctacgtgagcctgaccgacgagtcgcgccggatcgtgtgctcgcgcctgggcgaccgcctgcgcgtcgccggcacggcggaactcgacggcttcgacaccacgatccgcgcggcgcggatcgcgccgatcatggcgtgggtgcaggcgcgcttcccgcacgcgatcgatctcgaacgcgcggaaccctgggccgggttgcgccccgccacgccgggaaacgtgccactgatcggacgcagcgcgcgccccgggctatggctcaacaccggccatggcacgctgggatggacgctggcctgcggttcggccgccgcactggcggatctgatgagcgggcgcaggccggaggtggcgtttcctttcctcgcggcggcggaggtctag

SEQ ID NO: 6605 - protein, 422 aa, Thauera sp. MZ1T
MHVMVLGAGLSGVTTAWYLTRAGFQVSLVDRQPGAGLETSFANGGQISISHPEPWANPGAPAQVLRWLGRADAPLKFRPHRALAQWTWGLRFLLECLPARAHRNTVAIAALALASGQRLRALRAELGLEYDQLERGILHLFYSRGEFAKAPARAAQLRAFGIAAEVLDRDACLEREPALATCAGSLAGGIFAQGDESGDAHKFTRALAHRLEEGGVVLHRETEVSALETGSGGRVVGARVRRADGSVDSLRADACVLCLGSHGPRLAAPLGLRLPIYPVKGYSITAPVLEPALAPYVSLTDESRRIVCSRLGDRLRVAGTAELDGFDTTIRAARIAPIMAWVQARFPHAIDLERAEPWAGLRPATPGNVPLIGRSARPGLWLNTGHGTLGWTLACGSAAALADLMSGRRPEVAFPFLAAAEV

SEQ ID NO: 6606 - DNA, 1326 bp, Thauera sp. MZ1T
  CDS (1)..(1326): transl_table=11
atgaacgtgatcgtactcggcagcggcgtgatcggcaccaccaccgcgtggtatctggcccaacgcggcgcgcgcgtcaccgtgatcgaccgccagcccggcgccgcgctcgagaccagctacgccaacgccggccaggtctcgcccggctactccacgccctgggccgcgcccggcattccgctgaaggcgctgaagtggctgttccagcgccacgccccgctcgcgatccgcgccgacggcagcctgttccagctgcgctggatggcgcagatgctcgccaactgctcgagcgcgcgctacgcggtgaacaaggaacgcatgatgcgcgtctccgagtacgcccgcgactgcctgcgcacgctgcgcgccgacaccggcatcgcctacgaggagcgcagccgcggcacgctgcagctgttccgcacccaggcccagctcgacgccgccgcgcgcgacatcgcggtgctggaggagtgcggcgtaccctacgagctgctcgacggcgacgcgctcgccggcgccgagccggcgctggcccgtcgccccggcaagctcgccggcggcctgcgcctgcccaacgacgagaccggcgactgccagctcttcaccacccgcctggcggcgatggcggaggcggccggcgtgacgttccgcttcggcaccgaggtgcgcgagctggtgcgccgcggcggccatatcgagggcgtgcgcatcgccggtgccgacggcgtcgagcacacgctggtcgccgaccgctacgtgctcgccttcggcagctactcgcgcgcgctcgccgccagcctcggactggacctgccggtgtatccggtgaagggctactcgctgaccgtgccgctggtcgacgccgcgcgcgcgccggtgtccaccgtgctcgacgagacctacaaggtcgcggtgacgcgcttcgacgagcgcatccgcgtcggcggcatggccgagctcggcggcttcgacctgcgcctcaacccgcgccggcgcgagaccctggagctggtggtgaacgacctcttccccggtggcggcgacgtcaaggcggcggagttctggaccggcctgcgcccgatgacgccggattccaccccgatcatcggcgccacgcccttccccgagctcttcctcaacaccggccacggcaccctggggtggacgatgtcctgcggcgccggcgcgctggtcgccgacctggtcgtcggccgccagccggcgatccgccacgacgacctcggcctcgcgcgctacggcgccgagcaccgcagcataccggtggccggcgcccgccagcgtccgctcggcaccgtctga

SEQ ID NO: 6607 - protein, 441 aa, Thauera sp. MZ1T
MNVIVLGSGVIGTTTAWYLAQRGARVTVIDRQPGAALETSYANAGQVSPGYSTPWAAPGIPLKALKWLFQRHAPLAIRADGSLFQLRWMAQMLANCSSARYAVNKERMMRVSEYARDCLRTLRADTGIAYEERSRGTLQLFRTQAQLDAAARDIAVLEECGVPYELLDGDALAGAEPALARRPGKLAGGLRLPNDETGDCQLFTTRLAAMAEAAGVTFRFGTEVRELVRRGGHIEGVRIAGADGVEHTLVADRYVLAFGSYSRALAASLGLDLPVYPVKGYSLTVPLVDAARAPVSTVLDETYKVAVTRFDERIRVGGMAELGGFDLRLNPRRRETLELVVNDLFPGGGDVKAAEFWTGLRPMTPDSTPIIGATPFPELFLNTGHGTLGWTMSCGAGALVADLVVGRQPAIRHDDLGLARYGAEHRSIPVAGARQRPLGTV

SEQ ID NO: 6608 - DNA, 1263 bp, Magnetospirillum gryphiswaldense
  CDS (1)..(1263): transl_table=11
gtgaaggtgctggtcttgggtgccggaatcatcggcaccaccaccgcatatcatctggcccaggccggacaccaggttgtggtcgtcgaccgccaggacggtgtcggcatggaaaccagcttcgccaatggcggccagatttcgccttgccacgccgaaccttgggccaatccgtcggtgctgcccaaggtgatcaaatggctgggccgcgacgacgcccccctcctgttccgctggaaccgctgggatccggcgctgtggacctggggcctgcgcttcatcgccaattgcacctcttcccgcgccgccatcaataccgaacggaccttgcgcgtcgcgctttattcccgcgcctgtttgcaggatctccgtgaaagactggggctgcaatacgaccagcgccgccagggcatcttgcatgtctaccgctcggaacgggaattcgcccaaggccgcaaggcggcggcgctgatgaatcgcttcggcctcgaccgccagatcaaggattcggcgcaatgcgtcgccatcgaaccggcgctggcctcggtggccagacaattggccggcggcatcctgacgccgggcgatgaaagcggcgatgcccataaattcacccgcgccatggccgatcacgccctgcgggaaggggccgagttccgcttcggcacccgggtcagcgccattgtgcgcgatgatgatcgggtcaccggaatccgcaccgaccagggcgatatccaggccgacgcggtggtgctggcgctgggatcgtggagccccttgctggcgcgcccggcgggcattcgcctgcccatcgtcccggccaagggctattccatcaccatcccggcggatggtccggcggcgcccttcgtctcggttaccgacgacgagcacaagatggtctattcccgcctgggcgaccgcctgcgcgccgccggcaccgccgagatgaccggccatgacatttcgctcaaccccaagcgctggcacctgatcctggaacgcgcccgcgccctgttcccactggccggtgacttcgatcaggcccaaccctgggccggcctgcgcccggtcacccccgacagcgtgcccttgatcggcgccacccgcctgcccggcctgtggctgaataccggccacggcaccttgggctggaccatggcctgtggttcggcccgcatcgtcgccgacctgatctcggggcgccatcccgacatcgacctgagcggattggggccggaacgtttcagccttccgttttga

SEQ ID NO: 6609 - protein, 420 aa, Magnetospirillum gryphiswaldense
MKVLVLGAGIIGTTTAYHLAQAGHQVVVVDRQDGVGMETSFANGGQISPCHAEPWANPSVLPKVIKWLGRDDAPLLFRWNRWDPALWTWGLRFIANCTSSRAAINTERTLRVALYSRACLQDLRERLGLQYDQRRQGILHVYRSEREFAQGRKAAALMNRFGLDRQIKDSAQCVAIEPALASVARQLAGGILTPGDESGDAHKFTRAMADHALREGAEFRFGTRVSAIVRDDDRVTGIRTDQGDIQADAVVLALGSWSPLLARPAGIRLPIVPAKGYSITIPADGPAAPFVSVTDDEHKMVYSRLGDRLRAAGTAEMTGHDISLNPKRWHLILERARALFPLAGDFDQAQPWAGLRPVTPDSVPLIGATRLPGLWLNTGHGTLGWTMACGSARIVADLISGRHPDIDLSGLGPERFSLPF

SEQ ID NO: 6610 - DNA, 1305 bp, Pseudomonas fluorescens
  CDS (1)..(1305): transl_table=11
atgcgcgttctggtattgggtagcggcgtcatcggtaccgtcagtgcttactatctggcccgggccggattcgaagtggtggtggtcgaccgtcagccagcgcctgcgatggaaaccagtttcgccaatgccggccaggtgtcgccggggtatgcctcgccgtgggccgcgccgggcgtaccgctcaaggccatcaaatggctgctgcagcgccatgcgccgctggcgatcaaggccactgccgacattgaccaatacctgtggatggcacagatgctgcgcaattgcaccgccagccgctatgccatcaacaaggagcgcatggtgcgcctgtccgagtacagccgtgattgcctggacgagctgcgcgccgaaaccggcattgcctacgaaggccgcagcctggggactacacagttgttccgcacccaggcccagctcgatggcgcggcgaaagacatcgcggtgttgaaagagtccggcgtaccgttcgaagtgctcgaccgtgcgggcatcgcccgggtcgaaccggccctggccaatgtcaccgacatcctggctggcgccttgcgcctgcccaacgaccagactggcgattgccagatgttcaccacgcgcctggcggaaatggcgacgaagctgggtgtgcaatttcgcttcggccaggatatccagcgcctggacttcgccggtgaccgcatcaacggtgtctggatcgacggcaagctggaaaccgccgaccgctatgtgctcgccctgggcagctattcgccgcaattgctcaagcccctcgggatccgcgcaccggtgtatccgctcaagggttactccctgaccgtgccgatcaccaatccggcgatggcgccgacttcgaccattctcgacgaaacctacaaggtcgcgatcacccggttcgacaatcgcattcgggtgggtggcatggcggaaatcgccggttttgacctatctctcaacccgcgtcggcgcgaaaccctggagatgatcgtcaacgacctttatcctcagggcggcaatctggccgaggcgagtttctggaccggcctgcgcccgaccaccccggacggcacgccgatcgtgggtgccacgcccttcaagaatctgttcctgaacaccggtcacggcaccctcgggtggaccatggcctgtggttccggtcgcctgttggccgacctgatggcgaagaaaaaaccgcagatcagcgccgaaggcctcgatatttcccgttatggcagcaaacaccaggagtctgcaaaacatgtcaatccagcgccagctcaccaatga

SEQ ID NO: 6611 - protein, 434 aa, Pseudomonas fluorescens
MRVLVLGSGVIGTVSAYYLARAGFEVVVVDRQPAPAMETSFANAGQVSPGYASPWAAPGVPLKAIKWLLQRHAPLAIKATADIDQYLWMAQMLRNCTASRYAINKERMVRLSEYSRDCLDELRAETGIAYEGRSLGTTQLFRTQAQLDGAAKDIAVLKESGVPFEVLDRAGIARVEPALANVTDILAGALRLPNDQTGDCQMFTTRLAEMATKLGVQFRFGQDIQRLDFAGDRINGVWIDGKLETADRYVLALGSYSPQLLKPLGIRAPVYPLKGYSLTVPITNPAMAPTSTILDETYKVAITRFDNRIRVGGMAEIAGFDLSLNPRRRETLEMIVNDLYPQGGNLAEASFWTGLRPTTPDGTPIVGATPFKNLFLNTGHGTLGWTMACGSGRLLADLMAKKKPQISAEGLDISRYGSKHQESAKHVNPAPAHQ

SEQ ID NO: 6612 - DNA, 1308 bp, Pseudomonas fluorescens
  CDS (1)..(1308): transl_table=11
atgaatatgcgagttatggtattgggtggcggcgttattggtactgccagcgcctattatctggcccgagccggttttgatgtggttgtcgtggaccgtcagccagccgttgcaatggaaaccagctttgccaacgcgggccaggtgtccccgggctacgcttcgccgtgggctgcaccgggcgtgccgctcaaggcgatcaagtggttgctcgaacgccacgcacctctggccatcaaggccacgaccagcattgatcagtacctgtggatggcacagatgctgcgcaactgcaccgccagccgctatgccgtgaacaaggagcgcatggttcgcctgtccgagtacagccgtgactgcctcgacgaactgcgtgccgaaacgggtattgcctacgaagcccgtaacctcggcaccacacaactgttccgcactcaggcccagctcgatggcgccgccaaggacatcgctgtcctgaaagaatccggtgtaccgttcgaactgctcgaccgtgccggtattgcccgggttgagcccgcactggccagcgtgaccgacattttggccggcgccctgcgcctgcccaatgaccagactggcgactgtcagatgtttaccacccgcctggctgaaatggccaaaaacctgggtgttgagttccgcttcggccaggatatccagcgtctggactacgcaggtgatcgcatcaatggcgtgatgatcgacggcaaactcgaaaccgccgatcgttacgtactggcactgggcagctactcgccgcaaatgctcaagccactgggcatcaaggcgccggtttacccgctcaagggctactcgctgaccattccgattaccaattcggacatggcaccgacctcgaccattctcgatgagacctacaaggtcgcgatcacccgtttcgacaaccgcattcgcgttggcggcatggctgaaatcgccggttttgacctgtcgctgaacccgcgccgacgcgaaaccctggagatgatcgtcaacgacctttatcctcagggcggtgatctgagccaggccagtttctggaccggcctgcgcccgaccaccccggacggcacgccgattgtgggcgcaaccccgttcaaaaacctgttcctgaacaccgggcatggcacactgggttggaccatggcctgcggttccggtcgtttcctcgcggacgtaatggccaaaaagaccccgcaaatcagcgccgaaggccttgatatttcccgctacggcaaccaccaggagactgcaaaacatggcaatccagcgccagctcaccaatga

SEQ ID NO: 6613 - protein, 435 aa, Pseudomonas fluorescens
MNMRVMVLGGGVIGTASAYYLARAGFDVVVVDRQPAVAMETSFANAGQVSPGYASPWAAPGVPLKAIKWLLERHAPLAIKATTSIDQYLWMAQMLRNCTASRYAVNKERMVRLSEYSRDCLDELRAETGIAYEARNLGTTQLFRTQAQLDGAAKDIAVLKESGVPFELLDRAGIARVEPALASVTDILAGALRLPNDQTGDCQMFTTRLAEMAKNLGVEFRFGQDIQRLDYAGDRINGVMIDGKLETADRYVLALGSYSPQMLKPLGIKAPVYPLKGYSLTIPITNSDMAPTSTILDETYKVAITRFDNRIRVGGMAEIAGFDLSLNPRRRETLEMIVNDLYPQGGDLSQASFWTGLRPTTPDGTPIVGATPFKNLFLNTGHGTLGWTMACGSGRFLADVMAKKTPQISAEGLDISRYGNHQETAKHGNPAPAHQ

SEQ ID NO: 6614 - DNA, 1326 bp, Xanthomonas oryzae pv
  CDS (1)..(1326): transl_table=11
gtggttgtgggggaatgcccttttgaggagaacgacatgcgtgtgctcattctcggcagcggcgtcattggcgtgaccagtgcgtggtacctggcgcaggccggttgcgaagtgaccgtggttgaccgccagccggccgctgcgctggagaccagctacgccaacgccggccagctgtcgttcggctacacctctccctgggccgcgcccggcgtgcccggcaaggcggtgaagtggctgttcgaacagcatgcgccgctgtcgatccgccccacccgcgacctacgccagctggcgtggctgagccagatgctgcgcaactgcaccgccgagcggtatgcggtgaacaaggcgcgcatggtgcgcatgtccgactacagtcgcgactgcctcaatgcactgcgtgccgagactgggatcgaattcgaaggccgccagctcggcaccacccagttgttccgcacccagcagcagcttgacgcggctgcgcaggacatcgaagtgttggcccagtacggcgtgccgtacgagctgctgagcccggcgcagattgcgcaattcgagcccggactggccggcggtggcgcgcagatggccggcgcactgcgcctgcccgaagaccagaccggcgactgccgcctgttcacccagcgcctggccgaactggctgcgcaggcaggtgtcacctttcgctacggttaccagatcgagtggctggaacacgctggcggccaggtcaccggcgtgcaaatcgatggccgcatcgaaaccgccgaccgctacgtgctggcgctgggtagctattcggccgacctgttgctctcgctcggcctgcatctgccggtgtacccgctcaagggctactcgctcaccatcccgatcgtcgatgcgcagcgcgcgccgacctccaccgtgctcgacgaaagctacaagatcgcgctcacccgcttcgacgaccgcatccgcgtcggcggtatggccgaggtggccggcttcgacatgtcgctgaatccgcgtcgccgcgccaccctggaaatggtggtcaacgacctgttccccggcggtggcgatctggcccaggccgaattctggaccggcctgcgcccggccaccccggatggcacgccggtggtcggcgccacgccgtatgccaacctgttcctcaacaccggccacggcacgctgggctggaccatggcctgcggctccggacgctacctggccgatctcatgcagggccgcacgccggagatcgataccgacggtctggatattttccggtacctgtcgccacgcagtgcgcgcccgcagcgggaggccgcctag

SEQ ID NO: 6615 - protein, 441 aa, Xanthomonas oryzae pv
MVVGECPFEENDMRVLILGSGVIGVTSAWYLAQAGCEVTVVDRQPAAALETSYANAGQLSFGYTSPWAAPGVPGKAVKWLFEQHAPLSIRPTRDLRQLAWLSQMLRNCTAERYAVNKARMVRMSDYSRDCLNALRAETGIEFEGRQLGTTQLFRTQQQLDAAAQDIEVLAQYGVPYELLSPAQIAQFEPGLAGGGAQMAGALRLPEDQTGDCRLFTQRLAELAAQAGVTFRYGYQIEWLEHAGGQVTGVQIDGRIETADRYVLALGSYSADLLLSLGLHLPVYPLKGYSLTIPIVDAQRAPTSTVLDESYKIALTRFDDRIRVGGMAEVAGFDMSLNPRRRATLEMVVNDLFPGGGDLAQAEFWTGLRPATPDGTPVVGATPYANLFLNTGHGTLGWTMACGSGRYLADLMQGRTPEIDTDGLDIFRYLSPRSARPQREAA

SEQ ID NO: 6616 - DNA, 1296 bp, Acinetobacter sp
  CDS (1)..(1296): transl_table=11
ctgacagatggggcaacttctgaaatgtttatacatttcaagcgagtagatatgtctcatattattgttattggcgcaggaattacgggtgtaacctctgcgtatgaactgataaaactcgggtttcaggtgactgttattgatcgccatttatttccagcgatggaaacatcttttgcgaatggtggacagctttcagcttgtaatgcagaagtatggaatcagaggtcgacaatatccaaaggaattaaatggatgtcgaagaaagatgcacctctattgctcaatccttcatttaatctacacaaatatagctggctatttgaatttttatcgcatattaaacattacgaacaaaatacaatagagactgtgcgtcttgcattacttgcaagaaaacggctatttgaaattgcagaaattgaaaatatcgattttaatctggaaagaaggggaattttacatatttatcacaccccaagtgattatgaaattgcaaaaaatgtgaatgaccttttaaacaaagccacattgcatcgttatcaggttaatcctgacgaaataaaaacaatagaaccagcattatctggtgaatactgtggggggtattacacacctgatgatgcgactggtgatattcataaattttgtgtggggctggcagattcttccaagcgggatggtgtagattataaattcggctgggatgtaaatcagatagagcttttggaaaaaggcgtgattgtatcgtgtattccgagtacagaaaatatgactgagccatcgagtcaacacctcaggctagaagcagatgggatagtggtttgtggtggtgtcggaagttatcaacttgcacatatgttgggtgatcgcgtgaatgtgtatcctgtaaaaggctactccattacagttcatcttaatgatgaacacagcatcgaaaatgcgccatgggtaagtttattagatgaaagcgcgaaaattgtaacctctcgtttaggtaaagaccgattacgtgtagcaggaactgctgaatttaatggttataatcgcgatatacgtgccgataggattcaaccactaataaactgggtaaatgcaaattttgagatctctacagagcacgtggtaccgtggtctgggttaagaccgatgatgcccaatatgatgcctgttgttagacaaggtaagcatccacgtgttttttataatacagggcatggtcatctggggtggactctttcggctgctacagctgcaattattggtcaggaaatccagtcaaaaataccagtctaa

SEQ ID NO: 6617 - protein, 431 aa, Acinetobacter sp
MTDGATSEMFIHFKRVDMSHIIVIGAGITGVTSAYELIKLGFQVTVIDRHLFPAMETSFANGGQLSACNAEVWNQRSTISKGIKWMSKKDAPLLLNPSFNLHKYSWLFEFLSHIKHYEQNTIETVRLALLARKRLFEIAEIENIDFNLERRGILHIYHTPSDYEIAKNVNDLLNKATLHRYQVNPDEIKTIEPALSGEYCGGYYTPDDATGDIHKFCVGLADSSKRDGVDYKFGWDVNQIELLEKGVIVSCIPSTENMTEPSSQHLRLEADGIVVCGGVGSYQLAHMLGDRVNVYPVKGYSITVHLNDEHSIENAPWVSLLDESAKIVTSRLGKDRLRVAGTAEFNGYNRDIRADRIQPLINWVNANFEISTEHVVPWSGLRPMMPNMMPVVRQGKHPRVFYNTGHGHLGWTLSAATAAIIGQEIQSKIPV

SEQ ID NO: 6618 - DNA, 1254 bp, Agrobacterium sp
  CDS (1)..(1254): transl_table=11
atgcgtgtcgttgttctcggggccggcgtcgtcggcatcgcaaccgcctggtatctctccaaagccggccatgacgtcacggtgatcgaccgggagccggcggccggctttggcaccagctatggcaatgccgggcagatttcgccggcattgtcatcgccctgggcctttccggggctcgtgaaaaaggctgttcactgggccttcgccgagtatccgccgctaattgtcggccgggtaccggacgccgcgatggcacggtttctctggcgcatgtggcgggcctcaagcgtggatcaatacgtcaccgccaaacgcgccatggtgacactcgccgagtacagccgcgactgcttccgggcgctccggcgggaaatcccgatcgactacgcaggtcgtcagcgcggcttgctcgtggcctttcggtcgccggagcaaagcgatggctacgcccgcgatctcgcggtgctcgacgaactccgcgtaccctatcgtcgtctctcgcgcgaagaggtcgccgaagtcgaacccaacatcgcgccgacatccggtgtcatcggcggcgtccagctggagaccgacgaaagcggggattgcttccgcttcacccaggcgctggccgcacgatgcgccgagaacggggtgcgtttcgtctatggccatgccgcgagcgcgcttctcatggagaacggccggatcaaggcggtaagaacggccgaagccgacgtcgagatggatgcggtcgtggtcgcgctcggggtctggtcgaatgcgctgctgaagccgctcggcatcgacctgcctatctatccggtgaagggctattcactcaccgtcaaggccgatccggacactttcggtccgatggcaacgatcagcgacgaaacctataaggtgggcgtcaccaatctcggcgaccggatccgcgtcggggggacggccgaacttgccgggtttgatgtctcccagcccgaaaagcgctatgccggtctataccagacgctcaaaagcctgtttccaaaagtgccggaagcagccatcgccgatgccgaacgctggagcggcctgcggccggtgaccccggacgggccgcctctgatcggtcggagccggattccaaacctttacatcaacagcggccacggcacgcttggttggaccatgtcttgcggatcgggccgcctgcttgccgacgtcatcggcgacgagcgacccgcagtctctctctcccgctttgcgcccacggccttatag

SEQ ID NO: 6619 - protein, 417 aa, Agrobacterium sp
MRVVVLGAGVVGIATAWYLSKAGHDVTVIDREPAAGFGTSYGNAGQISPALSSPWAFPGLVKKAVHWAFAEYPPLIVGRVPDAAMARFLWRMWRASSVDQYVTAKRAMVTLAEYSRDCFRALRREIPIDYAGRQRGLLVAFRSPEQSDGYARDLAVLDELRVPYRRLSREEVAEVEPNIAPTSGVIGGVQLETDESGDCFRFTQALAARCAENGVRFVYGHAASALLMENGRIKAVRTAEADVEMDAVVVALGVWSNALLKPLGIDLPIYPVKGYSLTVKADPDTFGPMATISDETYKVGVTNLGDRIRVGGTAELAGFDVSQPEKRYAGLYQTLKSLFPKVPEAAIADAERWSGLRPVTPDGPPLIGRSRIPNLYINSGHGTLGWTMSCGSGRLLADVIGDERPAVSLSRFAPTAL

SEQ ID NO: 6620 - DNA, 1299 bp, Pseudomonas aeruginosa
  CDS (1)..(1299): transl_table=11
atgcgagttctggtccttggcagcggtgtcatcggtaccgccagtgcgtattacctggcccgtgccgggttcgaggtggtggtggtcgaccgtcaggacggtcccgcgctggaaaccagcttcgccaacgccggccaggtgtctcccggctacgcttcgccctgggcagccccgggcattcccctgaaggccatgaagtggctgctggaaaagcacgcgccgctggccatcaagctcacctccgatcccagccagtacgcctggatgctgcagatgctgcgcaactgcaccgccgagcgctacgccgtgaacaaggagcgcatggtccgcctgtccgagtacagccgcgattgcctcgacgaactgcgcgccgagaccggcatcgcctacgagggccgcaccctcggcaccacccaactgttccgcacccaggcgcagctggacgccgccggcaaggacatcgccgtgctcgagcgctccggcgtgccctacgaggttctcgaccgcgacggcatcgcccgcgtagagccggctttggccaaggtcgccgacaagctggtcggcgccttgcgcctgcccaacgaccagaccggcgactgccagctgttcaccacccgcctggcggaaatggccaagggcctgggcgtggagttccgcttcggccagaacatcgagcgcctggacttcgccggcgaccgcatcaacggcgtgctggtcaacggcgaattgctcaccgccgaccactacgtgctggccctgggcagctactcgccgcaactgctcaagccgctgggtatcaaggctccggtctatccgctgaagggttattcgctgaccgtgccgatcaccaacccggagatggcgccgacctcgaccatcctcgacgagacctacaaggtggcgatcacccgcttcgaccagcgcatccgcgtcggcggcatggcggaaatcgccggcttcgacctgtcgctgaacccgcgccgccgcgagaccctggaaatgatcaccaccgacctctatcccgagggcggcgatatcagccaggcgaccttctggaccggcctgcgcccggcgaccccggatggcaccccgatcgtcggcgccacccgctaccgcaacctgttcctcaataccggccacggcaccctgggttggaccatggcctgcgggtcgggtcgctacctggccgacctgatggcgaagaagcgcccgcagatcagtaccgaaggcctggatatttcccgctacagcaattccccggagaacgccaagaatgcccatccagcgccagcacactaa

SEQ ID NO: 6621 - protein, 432 aa, Pseudomonas aeruginosa
MRVLVLGSGVIGTASAYYLARAGFEVVVVDRQDGPALETSFANAGQVSPGYASPWAAPGIPLKAMKWLLEKHAPLAIKLTSDPSQYAWMLQMLRNCTAERYAVNKERMVRLSEYSRDCLDELRAETGIAYEGRTLGTTQLFRTQAQLDAAGKDIAVLERSGVPYEVLDRDGIARVEPALAKVADKLVGALRLPNDQTGDCQLFTTRLAEMAKGLGVEFRFGQNIERLDFAGDRINGVLVNGELLTADHYVLALGSYSPQLLKPLGIKAPVYPLKGYSLTVPITNPEMAPTSTILDETYKVAITRFDQRIRVGGMAEIAGFDLSLNPRRRETLEMITTDLYPEGGDISQATFWTGLRPATPDGTPIVGATRYRNLFLNTGHGTLGWTMACGSGRYLADLMAKKRPQISTEGLDISRYSNSPENAKNAHPAPAH

SEQ ID NO: 6622 - DNA, 1299 bp, Pseudomonas putida
  CDS (1)..(1299): transl_table=11
atgcgtgtactgatacttggtagcggcgtcgtcggaactgtcagtgcctactacctcgctcgagaagggtttgaagtcgtcgtggtagatcgccaagacggccccgcgatggaaacaagcttcgcaaacgcagggcaggtttctccggggtatgcctccccttggtcagcccctggagtgccattgaaggccattagatggatgcttcagcaacacgcacctttagcgatcaagccaacgtctagcctggatcagtatcgttggatgatccagatgttgcgtaactgtaatccggcaagctatgcagtcaacaaagaacggatggttcgaatttccgaatatagccgagactgcctggatgaactcagggctgagactggtatatcttacgaggctcgccaactcggaactacgcaactgttccgcactcaagctcaagtagataatgctgctaaggacatagctatcctgaaacagtcaggcgtgcctttcgagttacttgatcgcgacggaattgctaaagctgagccggcgctcgcaagtgttcgcgataagctagcaggggctcttcgcttgccaaatgatcagaccggtgactgtcaaatgttcacgcggaagttggcaaagatggccgaagagcttggcgtggagtttcgttttggatgtaatattgaccgcctcgaatgctctggagatactatttccggcgtatggatcgacggaaaactcgaagtagccgaccaatatgtgctggcgctgggaagttacagcccccatatgttaaagccgctgggcatccaagcacctatctacccgctgaagggatactcccttacgattcccatcaccgatgcaagtatggccccctcatcaaccattcttgatgaaacctacaaggtcgctatcacacgcttcgatgatcgaatccgtgttggtggcatggctgaaatagcgggcttcgatctgtcactgaacgctcgccgccgagacacgcttgagcttgttgtaggcgacctttatccaaaaggtggggatctcaccaaagctacgttttggacagggctacgcccagcaacgcctgacggtactccgattgtaggtaaaacaaaataccgcaacctgttcctcaataccggccacgggactctaggctggacgatgtcttgcggctcaggtcgattgctggccgatttgatggcaggaaaaaagccaaagatcagcgccaaaggccttgatatctcccgttactccaaccaaaaggaagcccataatcatggcaatccagcgactgcactctaa

SEQ ID NO: 6623 - protein, 432 aa, Pseudomonas putida
MRVLILGSGVVGTVSAYYLAREGFEVVVVDRQDGPAMETSFANAGQVSPGYASPWSAPGVPLKAIRWMLQQHAPLAIKPTSSLDQYRWMIQMLRNCNPASYAVNKERMVRISEYSRDCLDELRAETGISYEARQLGTTQLFRTQAQVDNAAKDIAILKQSGVPFELLDRDGIAKAEPALASVRDKLAGALRLPNDQTGDCQMFTRKLAKMAEELGVEFRFGCNIDRLECSGDTISGVWIDGKLEVADQYVLALGSYSPHMLKPLGIQAPIYPLKGYSLTIPITDASMAPSSTILDETYKVAITRFDDRIRVGGMAEIAGFDLSLNARRRDTLELVVGDLYPKGGDLTKATFWTGLRPATPDGTPIVGKTKYRNLFLNTGHGTLGWTMSCGSGRLLADLMAGKKPKISAKGLDISRYSNQKEAHNHGNPATAL

SEQ ID NO: 6624 - DNA, 1290 bp, Ralstonia solanacearum
  CDS (1)..(1290): transl_table=11
atgcgcgtgctcgttcttggcagcggcgtcatcggcgtgaccagcgcctattatctggcccgcgcgggccacgaggtcacggtcgtcgaccgcgaggccggtcctgcgctcgacacgagcttcgccaatgccggccagatctcgccgggctatgcatcgccgtgggccgcgccgggcgtgccgctcaaggccatcaagtggatgttccagcagcacgcaccgctgtccatccgccctgacggcaccctcttccagttgcaatggatgtggcagatgctgcgcaactgcaacgccgccagctatgccgagaacaaggaacggatggtccgcctggccgagtacagccgcgactgcatccgcgccctgcgcgccgagaccggcatcgcctatgaaggccgccagcaaggcacgctgcaggtgttccgcacccagcagcagctcgatggcgccgcgaacgacatcgcggtgctcgagcgcgccggcgtgccctacgaactgctatcgcgcgacgacctcgtgcgcagtgaaccgggcctggcctccacccgccacaagctggccggcggcctgcgcctgcccaacgacgaaacgggcgactgccagctcttcaccacgcgcctggccgcgatggccgagaagctgggcgtgcgcttccgtttcaacagccgcatcaacagcctgatcgtgcagaacgatgccgtgcgcggcgcgctggtcgatggcgaagcaatgaccgccgacctggtggtggtcgcgatgggcagctacagcacgccgttcctgaagaacctggtgggtgtgccggtctatccgctcaagggcttctcgatcaccgtgccgatgaccgatgccgagcgcagcccggtctccacggtgctggatgagacctacaaggtggcgatcacgcgcttcgacgaccgcatccgcgtgggcggcatggcgcagatcgtcggctacgacaagcgcctggatccgggcaagcgcaagacgctggagttcgtcgtgagcgacctgttccccggcggcggcgacgtctcgcgcgccacgttctggaccggcctgcgcccgatgacgccggacggcacgccgatcgtcggcccgacgccggtgcgcggcctgtggatcaacaccgggcacggcacgctgggctggaccatggcgtgcggctcgggccaactgctgtcggacctcgtttcgggccgctcgcccgccatccgcgcggacgacctgtcggtctatcgctacctgcgcggcggccaggcaccggcgaccaagcctgcgctggcctga

SEQ ID NO: 6625 - protein, 429 aa, Ralstonia solanacearum
MRVLVLGSGVIGVTSAYYLARAGHEVTVVDREAGPALDTSFANAGQISPGYASPWAAPGVPLKAIKWMFQQHAPLSIRPDGTLFQLQWMWQMLRNCNAASYAENKERMVRLAEYSRDCIRALRAETGIAYEGRQQGTLQVFRTQQQLDGAANDIAVLERAGVPYELLSRDDLVRSEPGLASTRHKLAGGLRLPNDETGDCQLFTTRLAAMAEKLGVRFRFNSRINSLIVQNDAVRGALVDGEAMTADLVVVAMGSYSTPFLKNLVGVPVYPLKGFSITVPMTDAERSPVSTVLDETYKVAITRFDDRIRVGGMAQIVGYDKRLDPGKRKTLEFVVSDLFPGGGDVSRATFWTGLRPMTPDGTPIVGPTPVRGLWINTGHGTLGWTMACGSGQLLSDLVSGRSPAIRADDLSVYRYLRGGQAPATKPALA

SEQ ID NO: 6626 - DNA, 1257 bp, Rhizobium loti
  CDS (1)..(1257): transl_table=11
atgcagatcatggtgctgggcggcggcgtcatcggggtgaccacggcctattatctcgccgaggccggccacgaggtgacggtgctcgatcgccagaaaggcccggcgctggaaaccagttttgccaatgccggcgagatttcgcccggctatgcctcgccctgggccgggcccggcattccgctaaaggcgatcaaatggctgttgatgaagcatggcccactggtggttcgaccggccttcgacccgcatatgtggacctggctggtcaagatgctgcgcaactgcacgaccgagcgctatgccatcaacaagtcgcgcatggtgccgctggccgaatacagccgcgacacgctgaaggcgctgcgcgaggcgaccggcatcacctatgacgagcgcacccagggcacgctgcagctgtttcgcacccaaaagcagctcgatggcaccggtggtgacgtcgaggtgctgaagaaatatggcgtttcctacgagatcctcgaccaggacggctgcattgcggcggagccggcgctgggcggcgtgcgcgagaaattcgtcggcgggctgaggctgccgcatgacgagaccggcgactgcaagatgttcaccgagaaactggccgagctctgcgtggcgcgtggcgtcaagttcgaatacgacacgacgatctggcgcgtccttcgcagccgcaaccgcgttgccaacctcagcaccagcaaggggttcaaggcttccgaagcctatgtgatggcgctgggcagctactcggccggcttcatgcgccggatgaaacggtcgatcccggtctatccggtcaagggctattcgatcaccgtgccgatcaaggacgccgacgtggcgccggtgtcgaccgtgatggatgagacctacaaggtggcgatcacccggctcggcgaccgtatccgcgtcggcggcacggccgagatttcaggcttcgacctcaggctccatgaatcgcggcggcgcacgctggaacattcggtgggcgatctctttccgggcgccggcgccatgcgcgaggcgaccttctggtgcggcctgcggccgatgacgccggacgggccgccgctgatcggccgcaccgagctttccaatctcttcctcaacaccggccatggcacgctcggctggaccatggcctgcggttcggccaaggtgctggccgacatcatgtcgaacaaggtgcccgagatcgatgcccgtgccctggcacaggagcgctacctgaaatag

SEQ ID NO: 6627 - protein, 418 aa, Rhizobium loti
MQIMVLGGGVIGVTTAYYLAEAGHEVTVLDRQKGPALETSFANAGEISPGYASPWAGPGIPLKAIKWLLMKHGPLVVRPAFDPHMWTWLVKMLRNCTTERYAINKSRMVPLAEYSRDTLKALREATGITYDERTQGTLQLFRTQKQLDGTGGDVEVLKKYGVSYEILDQDGCIAAEPALGGVREKFVGGLRLPHDETGDCKMFTEKLAELCVARGVKFEYDTTIWRVLRSRNRVANLSTSKGFKASEAYVMALGSYSAGFMRRMKRSIPVYPVKGYSITVPIKDADVAPVSTVMDETYKVAITRLGDRIRVGGTAEISGFDLRLHESRRRTLEHSVGDLFPGAGAMREATFWCGLRPMTPDGPPLIGRTELSNLFLNTGHGTLGWTMACGSAKVLADIMSNKVPEIDARALAQERYLK

SEQ ID NO: 6628 - DNA, 1251 bp, Pseudomonas aeruginosa
  CDS (1)..(1251): transl_table=11
atggctcagcgggtttgcatcatcggcgccggcgtggtcggcctggccacggcctacgccctggttcgcgaaggattcgacgtgaccctggtggaagcgcgcgagcggggcgggctggaaaccagctacgccaatggcgggcagttgtcctatcgctacgtggcgccattggccgacagcggcgtgccggcccaggcgctcggctggctgctgcgcaacgatgcgccgttgcgcctgcggccgcgtcttgatccggcgcagtggcgctggctgctgggcttcctcgcggcctgccgcggctcgctgaaccgccgcaatgccgcgcacctgctgcgcctggcattgctcagccagcgcaccctgcaggactggcgcgaggaggatggcctcgatggcttcgactggcggcgcaacggcaagctggtggcgtttcgccaaccggccagctttgcgcgggcccgccagggcctggccgatccttcggcgcaattcgtcctgaccgccgccgagtgcctcgcgctggagccggccctgtccgccgcgccctttgtcggcggcatccacacgccggacgaggaggtcgccgactgccatgccttctgcgtgcaacttgccgagcgcctgcaggcttccggacattgccggcaactgcatggccgcagggtgacgaagatcgtcgagggcggtgcggcggtgcgtggcgtcgaggtcggcggcgatctcatcgaggccgatcatgtggtgctggccgccggctaccgcagcgccgaattgatgctgccgggcctgcgcctgccgctatacccgctcaagggctatagcctgaccctgccggtcggcgcgcagcaccgcgcgccggataccagcatcaccgattacgaccgcaagatcgtctacgcgcggatcggcgagcggctgcggatcgccgcgatggtcgacatcgtcggcttcgaccccggcctcgagcccgcgcgcctggcactgctgcgccagcaggcgcgggacacgttcccgcagggcggcgatttcgacgctgccgtcgaatgggccggcatgcgcccggccacgcccaccggggtaccgctggtgggcaacggcggctaccgcaacctctggctcaacctcggccacggcgcgctcggcttcaccctggcctgcggcagcgggcgcctgctggccgagcagatcggccgccgcccgccgagcatcgataccactggcctgctgccgcgcggcgcgctggctggctga

SEQ ID NO: 6629 - protein, 416 aa, Pseudomonas aeruginosa
MAQRVCIIGAGVVGLATAYALVREGFDVTLVEARERGGLETSYANGGQLSYRYVAPLADSGVPAQALGWLLRNDAPLRLRPRLDPAQWRWLLGFLAACRGSLNRRNAAHLLRLALLSQRTLQDWREEDGLDGFDWRRNGKLVAFRQPASFARARQGLADPSAQFVLTAAECLALEPALSAAPFVGGIHTPDEEVADCHAFCVQLAERLQASGHCRQLHGRRVTKIVEGGAAVRGVEVGGDLIEADHVVLAAGYRSAELMLPGLRLPLYPLKGYSLTLPVGAQHRAPDTSITDYDRKIVYARIGERLRIAAMVDIVGFDPGLEPARLALLRQQARDTFPQGGDFDAAVEWAGMRPATPTGVPLVGNGGYRNLWLNLGHGALGFTLACGSGRLLAEQIGRRPPSIDTTGLLPRGALAG

SEQ ID NO: 6630 - DNA, 1305 bp, Pseudomonas putida
  CDS (1)..(1305): transl_table=11
atgcgagttctggtacttggtagcggtgtaatcggaaccgccagtgcctactacctggcccggcaaggtttcgaagtcacggtggtcgaccgccagccggcggtggccatggaaaccagctttgccaacgccggccagatctcgcccggctatgcctcgccctgggctgcgcctggcgtaccgctcaaagccatcaagtggctgctggagcgtcacgcccccctggccatcaagctcacgggcgatgtcgaccagtacctgtggatggcacagatgctgcgcaactgcactgccagccgctacgcggtgaacaaggagcgcatggtgcgcctgtccgagtacagccgtgactgcctcgacgagctgcgcgccgaaaccggcatcaactacgaaaaccgcagcctgggcaccacccagctgttccgcacccaggcccaggtcgatgctgcggccaaggacattgccgtactcgaacagtccggtgtgccctacgagctgctcgaccgcgacggcattgcccgcgtcgaacccgccctggccggcgtgaaagatatcctggccggcgccctgcgcctgccgaacgaccagactggcgactgccagctgtttaccaccaagcttgccgacatggcgttgaagctgggcgtggagttccgcttcggccaggacatccagcgcctggacttcgcgggtgaccgcatcaatggcgtgtggatcgacggcaagctggaaacggcagaccgctacgtgctggcgctgggcagctactcgccacagatgctcaagccgctgggcatcaaggctccggtgtatccgctgaaaggctattcgctgaccgtgccgatcaccaacagcgacatggccccgacttcgaccattctcgacgagacctacaaggttgccatcacccgtttcgacaaccgcatccgcgttgggggcatggctgaaatcgctggttttgacctgtcgctgaacccgcgtcggcgcgaaacgctggagatgatcgtcaacgacctttatcctcgcggcggtgacctgagccaggccagcttctggaccggcttgcgcccggcgaccccggacggcacaccgatcgtgggtgccacggcgttccgcaacctgttcctgaacaccggtcacggtaccttgggctggaccatggcgtgcggttccggccgcctgctggccgacctgattgcgcgcaagaagccgcagatcagtgccgaaggcctggatatctcccgttatggcaatagccgggaagtggccaagcacgggcaaagcgcgccggctcaccagcagtaa

SEQ ID NO: 6631 - protein, 434 aa, Pseudomonas putida
MRVLVLGSGVIGTASAYYLARQGFEVTVVDRQPAVAMETSFANAGQISPGYASPWAAPGVPLKAIKWLLERHAPLAIKLTGDVDQYLWMAQMLRNCTASRYAVNKERMVRLSEYSRDCLDELRAETGINYENRSLGTTQLFRTQAQVDAAAKDIAVLEQSGVPYELLDRDGIARVEPALAGVKDILAGALRLPNDQTGDCQLFTTKLADMALKLGVEFRFGQDIQRLDFAGDRINGVWIDGKLETADRYVLALGSYSPQMLKPLGIKAPVYPLKGYSLTVPITNSDMAPTSTILDETYKVAITRFDNRIRVGGMAEIAGFDLSLNPRRRETLEMIVNDLYPRGGDLSQASFWTGLRPATPDGTPIVGATAFRNLFLNTGHGTLGWTMACGSGRLLADLIARKKPQISAEGLDISRYGNSREVAKHGQSAPAHQQ

SEQ ID NO: 6632 - DNA, 1278 bp, Ralstonia solanacearum
  CDS (1)..(1278): transl_table=11
atgcagatcacggttgtgggcgccggcatcgtcggcatcagtacggcgtacgcgctggcccaggagggccatcaggtcacgctggtcgagcggaacccgggcccgggtgagggcaccagctatgccaacggcgggcagctcagctatagctatgtggcgccgctggccgggccgggcgtgctgtcgcatgtgccgggctggctgttgcggcgcgattcgccgctgcggctcaagccatcgctggacccggtgctgctgcgctggggcctgcgcttcattgccgcgtgcaaccgcgaacgggccgaccgcaccacgcgcgagctgctggcgctgtcgttctacagccgcgcccgcatggaggcgctgcgcgcggcctcgcccgatctgtccttcagctttgcgcggcgcggcaagctggtggtctaccgtgatgccgcggcctttgcgtcggcccgtgcccaggtcggctaccaggcgacgctcggctgcgagcagcatgcgctgtcggccgacgagaccatcgcccgggagcccgcgctggctggcgcgcgcggtgcgatcgtcggcgccatctacacgccggatgaagacgtggccgactgccaccagctctgcgtcggcctgttcaaccggctgtgcgccctgcccaatgtggcgctgcgcttcaatgccggcgccgaatcgctgtgggtggagggccggcgcgtgcgcggcgtgcgcacggcccatgagccgatcaccgccgatgccgtggtggtggctgccggcgtggccagtgccggactgctcggcccgttgcgcatcgacccgggcctgtatccgctcaagggctacagcatcagcctgccattgggcgagggcggggcgggcagcgatggcgcaccggtcgtcagcgtcacggacgcggcgcgcaagatcgtctacgcccgcatcggccgcacgctgcgcgtggcgggcatggcggacctggtgggctggtcggaccggctcgacccgcgccgcgtgcagaccctctacgacgaaacccgcgcgctgtttcccgccgcgctgcgcgccagcgatgccggcgccgatgccgcgccgtgggcgggcatgcggccggcgaccccgaccggcgtgccggtggtgggcccgtcgccggtggacggcctgtggctcaatgtcggccatggcgcgctgggctttacactggccatgggcagcgccggcctgctggccgacctgatcgcgcggcgcgcgccggcgatcgcggcggcgccgtatgcgctggcgcgctag

SEQ ID NO: 6633 - protein, 425 aa, Ralstonia solanacearum
MQITVVGAGIVGISTAYALAQEGHQVTLVERNPGPGEGTSYANGGQLSYSYVAPLAGPGVLSHVPGWLLRRDSPLRLKPSLDPVLLRWGLRFIAACNRERADRTTRELLALSFYSRARMEALRAASPDLSFSFARRGKLVVYRDAAAFASARAQVGYQATLGCEQHALSADETIAREPALAGARGAIVGAIYTPDEDVADCHQLCVGLFNRLCALPNVALRFNAGAESLWVEGRRVRGVRTAHEPITADAVVVAAGVASAGLLGPLRIDPGLYPLKGYSISLPLGEGGAGSDGAPVVSVTDAARKIVYARIGRTLRVAGMADLVGWSDRLDPRRVQTLYDETRALFPAALRASDAGADAAPWAGMRPATPTGVPVVGPSPVDGLWLNVGHGALGFTLAMGSAGLLADLIARRAPAIAAAPYALAR

SEQ ID NO: 6634 - DNA, 1251 bp, Rhizobium loti
  CDS (1)..(1251): transl_table=11
atgaagataacggtgctcggcgccggcgttgtcggtacggcagcggcctattacctggccgccgacgggcacgaggtcaccgtgatcgagcgccatgcggcgcccgcgcggggcaccagccaatccaatgccggcttggtttcgccaggcgacgccaccgcttgggcttcgccggcggcactgaagacgttcctgcgcgggctctacaatcatgatctcggcatcaaggtgcggctgcgcttcgatccctatttcctcgcctggagcctgcgcttcctgcgccaatgcacggtggcccgcctgcgcgccaacagccaggtcaagctgcgcctggcgctctattcgcgcgactgcatcaacgccatctcggccgacaccggcatccactatgacgagcgcaagaaaggcatcctgtatttcttccgctcgcagcacagcctcaacaccggcaccgacaattaccgctatctggccgagcacggcctgccgatcgagatcgtcggccgcgaccggctggtcgaactcgagccgggccttgccggggtgaaggaaaagatcgccggcggcgtctattcgccaatcgatcagaccggcgattccagactgttcgtcgacaatctcgccgcctatgccagcgaaaagctcggcgtcaaattcctgttcggcaccacggtcgagggcctcgatatccaaggcgaccgagtgcgggcggttatgacctcggccggaccggtgacgggtgacgccgtcgtcatctcgatggggccggaaagcggcctgcttggccgccgctacggcatcgacctgccggtctatccggtgaagggctataccgcgaccattccgctggaagacgagagcaaggggccgaccataggcggcgccgacgaggaccagctgatggcctattcgaggcttggcaaccggttgcggctggcttcgaccgccgaattcaccggcttcgaccgcacccataagccaagcgactttaccaccatgttcaggaccgccagggatcttttccccggcgccttcgacgagaagaaggcggagctctgggcggggctgcggccaatgatgccgggctccgtgccggtcatcggccaagcgcgctacaaaaacctctatctcgacaccggccacggccatgtcggctggaccatggcctgcggctcgggaaaattcctggccgacctcgttgccggccgcaagcccgagatcgacccgcaggggcttgtgtacggggggtag

SEQ ID NO: 6635 - protein, 416 aa, Rhizobium loti
MKITVLGAGVVGTAAAYYLAADGHEVTVIERHAAPARGTSQSNAGLVSPGDATAWASPAALKTFLRGLYNHDLGIKVRLRFDPYFLAWSLRFLRQCTVARLRANSQVKLRLALYSRDCINAISADTGIHYDERKKGILYFFRSQHSLNTGTDNYRYLAEHGLPIEIVGRDRLVELEPGLAGVKEKIAGGVYSPIDQTGDSRLFVDNLAAYASEKLGVKFLFGTTVEGLDIQGDRVRAVMTSAGPVTGDAVVISMGPESGLLGRRYGIDLPVYPVKGYTATIPLEDESKGPTIGGADEDQLMAYSRLGNRLRLASTAEFTGFDRTHKPSDFTTMFRTARDLFPGAFDEKKAELWAGLRPMMPGSVPVIGQARYKNLYLDTGHGHVGWTMACGSGKFLADLVAGRKPEIDPQGLVYGG

SEQ ID NO: 6636 - DNA, 1260 bp, Acinetobacter sp
  CDS (1)..(1260): transl_table=11
atgcgtgtcattgttttaggtagtggtgtgattggtgtagcaagcgcttattaccttgcgcaacaaggggcacatgtcactgttcttgatcgtcaaacaggtccagcagaagaaaccagttttggtaatgcaggacaaatttctcctggttattcgacgccttgggcagcgcctggcattccatttaaagcggtcaaatggatgtttcagcatcatgcaccattggccattaatctggatggcagcatgtggcaattacagtggatggcacaaatgctgaaaaactgtaatccgcaaagttatagccaaaataaagaacgcatgatgcgcgttgcggaatatagtcgtgactgtctgaaatctctacgcgagactacgggaatcagttatgaaaatcgcgctaaaggtacactacaggtgtttcgtaaagaagcacagcttgaagcagtacagcgtgatattgaagttctacaagagtgtggtgtcagttatgagctgttatatcaagatgatctggcgcgtgtagaaccagcactcgaacatgccaaagataaactggtcggtggtttacatttaccaaatgatgaaacaggtgattgctacctgtttaccaatgccttggcccagaaagccaaagaactgggtgtaaattttcagtttaaccagaatgtagaaggtctggtggttgaaggtgacgagattaaaggcgttcgtgtgaatggtcaggtgttaaaagcagatcgttatgtattggcatttggcagttattcacgtgattttctcaaaccactggcgttaaatttacctgtttatccagtgaaaggttactcgctgaccatcccaattgtacaacctgagtttgcaccacagtcgacggtactggatgaaacctacaagattgccattacccgttttgaccagcgtatccgtgtagggggaatggctgagctcagtggttttaatttgggtttgaatcaggatcgccgtgccacacttgaaatggtgacacaagaccttttccctggcggtaatatggcagaagcttcgttctggacgggcttacggcctatgacaccagacagcacgccaattatcggtgcgacccgttttaaaaatctatttctaaatacaggacatggcaccttgggctggacgatggcctgcggctcgggcaagttgatcagcgatattgtattgagccatcagaccgagattagtaccgaaggtctttcactacagcgttattcaaccgctgcttaa

SEQ ID NO: 6637 - protein, 419 aa, Acinetobacter sp
MRVIVLGSGVIGVASAYYLAQQGAHVTVLDRQTGPAEETSFGNAGQISPGYSTPWAAPGIPFKAVKWMFQHHAPLAINLDGSMWQLQWMAQMLKNCNPQSYSQNKERMMRVAEYSRDCLKSLRETTGISYENRAKGTLQVFRKEAQLEAVQRDIEVLQECGVSYELLYQDDLARVEPALEHAKDKLVGGLHLPNDETGDCYLFTNALAQKAKELGVNFQFNQNVEGLVVEGDEIKGVRVNGQVLKADRYVLAFGSYSRDFLKPLALNLPVYPVKGYSLTIPIVQPEFAPQSTVLDETYKIAITRFDQRIRVGGMAELSGFNLGLNQDRRATLEMVTQDLFPGGNMAEASFWTGLRPMTPDSTPIIGATRFKNLFLNTGHGTLGWTMACGSGKLISDIVLSHQTEISTEGLSLQRYSTAA

SEQ ID NO: 6638 - DNA, 1257 bp, Agrobacterium tumefaciens
  CDS (1)..(1257): transl_table=11
atgaacgtcactatcctcggagccggcgtcgtcggcgtgacatccgcctggtatctggccaaagccggacacaaggtgacggtgattgaccgccagccggccgcagcgctcgaaaccagctttgccaatgccggcgaggtttcccccggttattcatcgccctgggctgcccccggcattccaatgaaggcgatgaaatggctgttcatgaaacatgcgccgctgattatccgcccgacagccgacccggccgcctggcgctggatgagccagatgctgcgcaactgcacctcggcgcgttatgccatcaacaagagccgcatggtgcgcgttgccgaatatagccgcgattgcctgatggcgctgcgcgaagagaccggcatcgactatgaccagcgcatgcagggcacgctggaagtgttccgcacccagaagcagttcgatgccatcggcaaggatgtggacgtgctgacggcgggcggtgtgcctttcgagattctcgaccgcgacggctgcgccgccatcgaacccggccttgcacccgccaaggagaagatcgtcggtggtctgcggctgcccggcgacgagaccggcgactgcttcatgttcaccacggaactcgcccgcatggcggaagaggcaggcgtcaccttcctttacgacaccggcatcatgcgccccatcgttgagggaggccgtatcaaggccgttgaaaccacgcgcggcctgatcgaggcggatattttcgtggctgcactcggcagctattcgccgcaattcgtgcggcaacttgggctgaccctgccggtctatccggtgaaggggtattccatcacggttccgatcgtgaaagaggagcgcgcgcccgtctccacagtcatggacgagacattcaaagtggcgatcacccgtctcggctcgcgcatccgcgccggcggcatggcggaaatcgccggtttcagcaaggatttgccggccgcacgccaggaaacgctcgcccattcggtggaagacctgtttggcggcgcgggtgatcaaagccaggcgaaattctggtgcggtctgcgcccgatgacgccagatggcacgcctgtcatcggcgccacccgctacagcaatctttatctcaacaccggtcacggcacgctcggctggaccatgtcctgcggctcggcccgtgtacttgccgacctgatcagcgggaacaagccggagatcgatacacacgacctcgccatcagccgctacgccgcctga

SEQ ID NO: 6639 - protein, 418 aa, Agrobacterium tumefaciens
MNVTILGAGVVGVTSAWYLAKAGHKVTVIDRQPAAALETSFANAGEVSPGYSSPWAAPGIPMKAMKWLFMKHAPLIIRPTADPAAWRWMSQMLRNCTSARYAINKSRMVRVAEYSRDCLMALREETGIDYDQRMQGTLEVFRTQKQFDAIGKDVDVLTAGGVPFEILDRDGCAAIEPGLAPAKEKIVGGLRLPGDETGDCFMFTTELARMAEEAGVTFLYDTGIMRPIVEGGRIKAVETTRGLIEADIFVAALGSYSPQFVRQLGLTLPVYPVKGYSITVPIVKEERAPVSTVMDETFKVAITRLGSRIRAGGMAEIAGFSKDLPAARQETLAHSVEDLFGGAGDQSQAKFWCGLRPMTPDGTPVIGATRYSNLYLNTGHGTLGWTMSCGSARVLADLISGNKPEIDTHDLAISRYAA

SEQ ID NO: 6640 - DNA, 1305 bp, Bordetella bronchiseptica
  CDS (1)..(1305): transl_table=11
atgcacgtcatcgtcctgggcagcggcgtcatcggcacgacgaccgcctattatctggcgcgccagggcgcgcaggtcacggtgctggagcgccgcgccgggccggccgacgaaaccagctacggcaatgccggccaggtgtcgccgggctactccacgccgtgggcggcgcccggcatcccgctcaaggcgctgaagtggatgttccagaagcatgcgccgctggccatccgcgccgacggcagtttctaccagtggcggtggctggcggcgatgctggccaattgctcggccggccgctacagcgtcaacaaggaacgcatgctgcgcctggccgaatacagccgcgactgcctgcgcaccttgcgcgccgataccggcatccagtacgagcagcgcacccagggcacgctgcagctgtttcgcaccgccgcgcagatggaagccgcgcggcgcgacattgccgtgctcgaagagtgcggcgtgccgtacgaattgctcgaccgcaaccgcctgcccaccgccgagccggcgctggcgcgcgcgctggacaagctggccggcggcctgcgcctgcccaacgacgaaaccggcgattgccggcgcttcaccctgcagctggccgacaaggccaaggcgctgggcgtgcaattccgcttcaaccagcaggtcgaggggctggacgtgcgcggcgggcaggtggctggcgtgcgcgtgggcggcgagcaactggcggccgaccgctacgtcgcggcgttcggcagctatacgcgtggctttctgcgtccgctgggcctggatctgccggtctaccctgtcaagggctattcgctcaccatccccatgaccgacgagtccgccgcgccggtttccaccatcctggatgaaacctacaaggtcgcggtcacgcgcttcgaccagcgcatccgcgtcggcggcatggccgagctggcgggcttcgacctgcgcctgaaggaggcgcgccgcaagaccctggagctggtggtcaacgatttgttccccggcagcggcgcggtcgagcaggccgagttctggaccggcctgcggccgatgacgccggacagcacgcccatcatcggcgccaccaagtatggcaacctgttcctgaacaccggccacggcaccctgggctggaccatggcctgcgggtcgggccagttggtggccgaccaggtgtgcgggcgccagccggccatccgcgccgacgacctcgcgctgtcgcgctacggcgcgggcgggcaggcgggcggcggcgtggcgcgcgcgcagcacaacgcggcctga

SEQ ID NO: 6641 - protein, 434 aa, Bordetella bronchiseptica
MHVIVLGSGVIGTTTAYYLARQGAQVTVLERRAGPADETSYGNAGQVSPGYSTPWAAPGIPLKALKWMFQKHAPLAIRADGSFYQWRWLAAMLANCSAGRYSVNKERMLRLAEYSRDCLRTLRADTGIQYEQRTQGTLQLFRTAAQMEAARRDIAVLEECGVPYELLDRNRLPTAEPALARALDKLAGGLRLPNDETGDCRRFTLQLADKAKALGVQFRFNQQVEGLDVRGGQVAGVRVGGEQLAADRYVAAFGSYTRGFLRPLGLDLPVYPVKGYSLTIPMTDESAAPVSTILDETYKVAVTRFDQRIRVGGMAELAGFDLRLKEARRKTLELVVNDLFPGSGAVEQAEFWTGLRPMTPDSTPIIGATKYGNLFLNTGHGTLGWTMACGSGQLVADQVCGRQPAIRADDLALSRYGAGGQAGGGVARAQHNAA

SEQ ID NO: 6642 - DNA, 1305 bp, Bordetella parapertussis
  CDS (1)..(1305): transl_table=11
atgcacgtcatcgtcctgggcagcggcgtcatcggcacgacgaccgcctattatctggcgcgccagggcgcgcaggtcacggtgctggagcgccgcgccgggccggccgacgaaaccagctacggcaatgccggccaggtgtcgccgggctactccacgccgtgggcggcgcccggcatcccgctcaaggcgctgaagtggatgttccagaagcatgcgccgctggccatccgcgccgacggcagtttctaccagtggcggtggctggcggcgatgctggccaattgctcggccggccgctacagcgtcaacaaggaacgcatgctgcgcctggccgaatacagccgcgactgcctgcgcaccttgcgcgccgataccggcatccagtacgagcagcgcacccagggcacgctgcagctgtttcgcaccgccgcgcagatggaagccgcgcggcgcgacattgccgtgctcgaagagtgcggcgtgccgtacgaattgctcgaccgcaaccgcctgcccaccgccgagccggcgctggcgcgcgcgctggacaagctggccggcggcctgcgcctgcccaacgacgaaaccggcgattgccggcgcttcaccctgcagctggccgacaaggccaaggcgctgggcgtgcaattccgcttcaaccagcaggtcgaggggctggacgtgcgcggcgggcaggtggctggcgtgcgcgtgggcggcgagcaactggcggccgactgctacgtcgcggcgttcggcagctatacgcgtggctttctgcgtccgctgggcctggatctgccggtctacccggtcaagggctattcgctcaccatccccatgaccgacgagtccgccgcgccggtttccaccatcctggatgaaacctacaaggtcgcggtcacgcgcttcgaccagcgcatccgcgtcggcggcatggccgagctggcgggcttcgacctgcggctgaaggaggcgcgccgcaagaccctggagctggtggtcaacgatttgtcccccggcagcggcgcggtcgagcaggccgagttctggaccggcctgcggccgatgacgccggacagcacgcccatcatcggcgctaccaagtatggcaacctgttcctgaacaccggccacggcaccctgggctggaccatggcctgcgggtcgggccagttggtggccgaccaggtgtgcgggcgccagccggccatccgcgccgacgacctcgcgctgtcgcgctacggcgcgggcgggcaggcgggcggcggcgtggcgcgcgcgcagcacaacgcggcctga

SEQ ID NO: 6643 - protein, 434 aa, Bordetella parapertussis
MHVIVLGSGVIGTTTAYYLARQGAQVTVLERRAGPADETSYGNAGQVSPGYSTPWAAPGIPLKALKWMFQKHAPLAIRADGSFYQWRWLAAMLANCSAGRYSVNKERMLRLAEYSRDCLRTLRADTGIQYEQRTQGTLQLFRTAAQMEAARRDIAVLEECGVPYELLDRNRLPTAEPALARALDKLAGGLRLPNDETGDCRRFTLQLADKAKALGVQFRFNQQVEGLDVRGGQVAGVRVGGEQLAADCYVAAFGSYTRGFLRPLGLDLPVYPVKGYSLTIPMTDESAAPVSTILDETYKVAVTRFDQRIRVGGMAELAGFDLRLKEARRKTLELVVNDLSPGSGAVEQAEFWTGLRPMTPDSTPIIGATKYGNLFLNTGHGTLGWTMACGSGQLVADQVCGRQPAIRADDLALSRYGAGGQAGGGVARAQHNAA

SEQ ID NO: 6644 - DNA, 1266 bp, Bradyrhizobium japonicum
  CDS (1)..(1266): transl_table=11
gtgaaagttctgatcctcggcagcggtgtcatcggtgtcacctctgcctactaccttgcgggtgctggccatgacgtgacggtcgtcgaccgtcaaccggagccggcactggagacctctttcgccaatgccggcgaggtgtcgcccggctattcctcgccttgggctgggcccggcgtgccggtgaaggcggtcaagtggctcttgatgaagcacggcccgctggtgatccggccgaagctcgatccggtgatgtgggtctggctgctcaagatgctgcgcaactgcaccagcgcgcgctacgcggtcaacaagagccggatgatcccgatcgcggaatacagccgcgactgcctgcgcgacctgcgccgcgacatcggcattcaatatgacgagcgctcgcagggcacgctccagctgttccgccaccaggcgcagctcgacggcaccggcgaagacatcgccgtgctcaagcaatatggcgtgcccttcgaggtgctgggccgcgaaggctgcatcgcggtcgagccggcgctcgccggcgtgaaggagaagttcgccggcggacttcgcctgccgcaggacgagaccggcgactgccacatgttcacgcaggcgctggccaagcatgcccaggcgctcggcgtgcgcttcatgttcaataccggcatcgaccgcatcgtcaccgacggcgcacgcgtcagtggcgtcgtgaccagcgccggcgtgttgcaggccgacgcctacgtcctggcgctcggaagctggtcgtcgcggctggttgcgccgctcggcatttcgctgccggtctatccggtgaagggatattcgatcacggtgccgatcaaggatgcctcgggcgcgccggaatcgaccgtgatggacgagagctacaaggtcgcgatcacgcgcctcggcaatcgcatccgcgtcggcggcactgccgaaatctcgggcttctcgagcaagctctatgacgcccgccgcgccacgctggatcactccttgactgatctgttcccgcgcggcggcgatctgtccaaggcgacgttctggagcggcctgcgtccgatgacgccggacggcccgcccgtgatcggcccgacgcaatacgccaatctccacctcaacaccggacacggcacgctcggctggaccatgtcctgcggttcgggacgggtgctcgcggacatgctgtcaggcaagaagccggaggtcgacgtcagcgcgctgacggtggatcggtacgcgcaccggttcgggtga

SEQ ID NO: 6645 - protein, 421 aa, Bradyrhizobium japonicum
MKVLILGSGVIGVTSAYYLAGAGHDVTVVDRQPEPALETSFANAGEVSPGYSSPWAGPGVPVKAVKWLLMKHGPLVIRPKLDPVMWVWLLKMLRNCTSARYAVNKSRMIPIAEYSRDCLRDLRRDIGIQYDERSQGTLQLFRHQAQLDGTGEDIAVLKQYGVPFEVLGREGCIAVEPALAGVKEKFAGGLRLPQDETGDCHMFTQALAKHAQALGVRFMFNTGIDRIVTDGARVSGVVTSAGVLQADAYVLALGSWSSRLVAPLGISLPVYPVKGYSITVPIKDASGAPESTVMDESYKVAITRLGNRIRVGGTAEISGFSSKLYDARRATLDHSLTDLFPRGGDLSKATFWSGLRPMTPDGPPVIGPTQYANLHLNTGHGTLGWTMSCGSGRVLADMLSGKKPEVDVSALTVDRYAHRFG

SEQ ID NO: 6646 - DNA, 1251 bp, Brucella suis
  CDS (1)..(1251): transl_table=11
atgcagatcactattctcggtagcggcgtcatcggcgttacgacggcctactatctcgccaagctcggccatgaagtaacggtcatcgaccgtgaagaaggcccggcgcccgaaacctccttcgccaatgcaggtcaggtttcgccaggctatgcgtccccctgggctgcccccggcattcccctgaaggcggccaagtggctctttcagaaacatgccccgctcattctccgcctcaccaccgatccggtacaatatcgctggctgctgcagatgctcgccaactgcaccgacagccggtacaagatcaacaagacgcgcatggtgcgcgtggccgaatatagccgcgattgcctgatcgagttgcgcaaggataccggcattgaatatgaccagcgctcgcagggtaccttgcagcttttccgcgagcaataccagctcgacggcattggcaaggatatcgaggttctgcgtcaggacggcgtaccgttcgaggtgctcgaccgcgacggatgcgtgaacgtggagccggcgcttgcccatgcgaaggacaagttcgtcggtggcctgcgcctgccgaacgacgagaccggtgactgtttcaaattcaccaatgccttggcgaagattgccgaagggctgggcgtgaagttccgcttcggcgtcaacatcaagtcgctgctcatgtcgggcggcaagatttccggcgtggagacctctgagggcatcgtcaccgccgaacgctatgtcgtggcgcttggcagctatacgccggcactcatcaaggcgcttggcctcaacgccccgatctatccggtgaagggttattccatcaccgcaccgatcgtcgatgaaagccgcgcaccggtttcaaccgttctggatgaaagctacaagatcgccatcacccgcctcggcgaccgcatccgcgtcggcggcatggcggaagtgtcaggctttaccgatgacctgcccgccgcgcgccgcgccacactcgacctgtcggtgacagatctcttccccggcggcgatctcaaggctgcaaccttctggtcgggcctgcgccccatgacaccggattccacgcctatcatcggcggcacgcgctatgacaacctgttcatcaatgcaggccacggtacgctcggctggaccatggcctgcggctccggccgcctgcttgccgatctgatttccggcaacaaggcggatatccgcgccgacgatctgggcattgcgcgctataattaa

SEQ ID NO: 6647 - protein, 416 aa, Brucella suis
MQITILGSGVIGVTTAYYLAKLGHEVTVIDREEGPAPETSFANAGQVSPGYASPWAAPGIPLKAAKWLFQKHAPLILRLTTDPVQYRWLLQMLANCTDSRYKINKTRMVRVAEYSRDCLIELRKDTGIEYDQRSQGTLQLFREQYQLDGIGKDIEVLRQDGVPFEVLDRDGCVNVEPALAHAKDKFVGGLRLPNDETGDCFKFTNALAKIAEGLGVKFRFGVNIKSLLMSGGKISGVETSEGIVTAERYVVALGSYTPALIKALGLNAPIYPVKGYSITAPIVDESRAPVSTVLDESYKIAITRLGDRIRVGGMAEVSGFTDDLPAARRATLDLSVTDLFPGGDLKAATFWSGLRPMTPDSTPIIGGTRYDNLFINAGHGTLGWTMACGSGRLLADLISGNKADIRADDLGIARYN

SEQ ID NO: 6648 - DNA, 1287 bp, Burkholderia pseudomallei
  CDS (1)..(1287): transl_table=11
atgcgtgtggttattttgggcagtggcgtggtcggcgtggcgagcgcctattatttggcgcgcgcgggtcacgaagtcacggtgatcgaccgcgaggccggccccgccctcgacacgagctttgcgaacgcgggccagatctcgcccggctacgcggcgccgtgggccgcgcccggcgtaccgctgaaggccgtcaaatggatgttcgagaagcatgcgccgctcgcgatccgcctcgacggcacgcgcttccagctgcaatggatgtggcaaatgctgcgcaactgcacgaccgagcgctacgcgctgaacaagggccggatggtgcgcctcgccgaatacagccgcgattgcctgcaggcgctgcgcgcggagacggctatccaatacgagggccgcacgggcggcacgctgcaggtcttccgcacgcagcaacagctcgacggcgccgcgaaggacatcgcggtgctgcgcgaagcgaacgtgccgttcgagctgctgtcgagcgacgaactgaagaaggccgagccggcgctcgccgcggtgtcgcacaagctgacgggcggcctgcgcctgccgggcgacgaaacgggcgactgccagctcttcacgacgcgccttgccgcgctcgccgagcagctcggcgtgaagttccgcttcaatacgcgcatcgacgcgctcgccgtcgcgggcggcaagatcgccggcgtccagtgcggcggcgaaatggtgcgcgctgacgcttacgtggtcgcgctcggctcatactcgacgaacctcgtcgcgagtctcgtgaagattccggtgtatccgctgaagggctattcgatcaccgcgccgatcgtcgacgcggcgaaggcgcccgtgtcgaccgtgctcgacgaaacctacaagatcgcgatcacgcgtttcgacgaccggattcgcgtcggcgggatggcggagatcgtcggcttcgacaagcggctgcgcgacgcgcgccgcggcacgctcgagatgtgcgtcaacgacctgttcccgggcggcggcgatacggagaaggcgacgttctggaccggcctgcggccgatgacgccggacggcacgccgatcgtcggccgcacgccggtgccgaacctgttcctcaacacggggcatggcacgctcggctggacgatgtcgtgcggctccggccaactgctcgccgatctgatgtcgggcaagaagcccgcgatccgcgcggacgacctgtcggtgcatcgctatctgagcgagacggacggcgagcatcgccccgcatacgcatga

SEQ ID NO: 6649 - protein, 428 aa, Burkholderia pseudomallei
MRVVILGSGVVGVASAYYLARAGHEVTVIDREAGPALDTSFANAGQISPGYAAPWAAPGVPLKAVKWMFEKHAPLAIRLDGTRFQLQWMWQMLRNCTTERYALNKGRMVRLAEYSRDCLQALRAETAIQYEGRTGGTLQVFRTQQQLDGAAKDIAVLREANVPFELLSSDELKKAEPALAAVSHKLTGGLRLPGDETGDCQLFTTRLAALAEQLGVKFRFNTRIDALAVAGGKIAGVQCGGEMVRADAYVVALGSYSTNLVASLVKIPVYPLKGYSITAPIVDAAKAPVSTVLDETYKIAITRFDDRIRVGGMAEIVGFDKRLRDARRGTLEMCVNDLFPGGGDTEKATFWTGLRPMTPDGTPIVGRTPVPNLFLNTGHGTLGWTMSCGSGQLLADLMSGKKPAIRADDLSVHRYLSETDGEHRPAYA

SEQ ID NO: 6650 - DNA, 1287 bp, Burkholderia sp
  CDS (1)..(1287): transl_table=11
atgcgagtcgtcattctgggcagcggtgtggtgggcgtggcaagcgcgtattacctcgcgcgcgccggtcatgaagtcacggtgatcgaccgggaggccggcccggcgctcgagacgagcttcgcgaacgcaggccagatctcccccggctatgccgcgccgtgggccgcacccggcgtgccgctgaaggccgtcaagtggatgttcgaaaaacacgcgccgctcgcgatccgcctcgacggcacgcgcttccagctccagtggatgtaccagatgctgcgcaactgcacggccgagcgctatgcggtcaacaagggccgcatggtccgcctcgccgaatacagccgcgactgcctgcaggcactgcgcgccgataccggcatccagtacgaaggccgcacgggcggcacgctgcaactgttccgcacgcagcagcaactcgacggcgcggcgaaggacatcgccgtcctgcaggaagcgaacgtgccgttcgaactgctgtcgccggccgacctgaagaaagccgaaccggcgcttgccgccgtctcgcacaagctgacgggcggcctgcgcctgccgggtgacgaaacgggcgactgccagctgttcacgacgcgccttgcagcgctcgccgaatcgcttggcgtgaagttccgctacaacacgccgatcgatgcactcgcaatcgcgggcggcaagatcgccggcgtgcaatgcggcagcgagacggtgcgcgcggacgcttacgtcgtcgcgctcggctcgtactcgaccagcttcatctcgaacctgatgaagatccccgtctatccgctgaagggctattcgatcaccgcgccgatcgtcaacgaagcggccgcgcccgtgtcgaccgtgctcgacgaaacctacaagatcgcaatcacgcgtttcgaccagcgcatccgcgtcggcggcatggcggaaatcgtcggcttcgacaagaagctacgtgccgcgcgccgcgaaacgctcgaaatgtgcgtgaacgacctgttcccgggcggcggcgacacgtcgaaggcaacgttctggacgggcctgcgcccgatgacgccggacggtacgccgatcgttggccgcacgccggtgtcgaacctgttcctgaacaccggtcacggcacgcttggctggacgatgtcgtgcggctcgggccagctgctcgccgacctgatctcgggcaagatgcccgcgatccaggccgacgacctgtcggtgcatcgttacctgaaggacgtggccggccagacgcgtccggcatacgcataa

SEQ ID NO: 6651 - protein, 428 aa, Burkholderia sp
MRVVILGSGVVGVASAYYLARAGHEVTVIDREAGPALETSFANAGQISPGYAAPWAAPGVPLKAVKWMFEKHAPLAIRLDGTRFQLQWMYQMLRNCTAERYAVNKGRMVRLAEYSRDCLQALRADTGIQYEGRTGGTLQLFRTQQQLDGAAKDIAVLQEANVPFELLSPADLKKAEPALAAVSHKLTGGLRLPGDETGDCQLFTTRLAALAESLGVKFRYNTPIDALAIAGGKIAGVQCGSETVRADAYVVALGSYSTSFISNLMKIPVYPLKGYSITAPIVNEAAAPVSTVLDETYKIAITRFDQRIRVGGMAEIVGFDKKLRAARRETLEMCVNDLFPGGGDTSKATFWTGLRPMTPDGTPIVGRTPVSNLFLNTGHGTLGWTMSCGSGQLLADLISGKMPAIQADDLSVHRYLKDVAGQTRPAYA

SEQ ID NO: 6652 - DNA, 1287 bp, Burkholderia thailandensis
  CDS (1)..(1287): transl_table=11
atgcgtgtggttattttgggcagtggcgtggttggcgtggcaagcgcctattatctggcgcgcgcgggccatgaagtcacggtgatcgaccgcgaggccggccccgcccttgacacgagctttgcgaacgcgggccagatctcgcccggctacgcggcgccgtgggccgcgcccggcgtgccgctgaaggccgtcaagtggatgttcgagaagcacgcgccgctcgcgatccgcctcgacggcacgcgcttccaactgcaatggatgtggcagatgctgcgcaactgcacgaccgagcgctatgcgctgaacaagggccggatggtgcgccttgccgaatacagccgcgattgcctgcaggcgctgcgcgcggagacggacatccagtatgaaggccgcacgggcggcacgctgcaggtcttccgcacgcagcagcaactcgacggcgccgcgaaggacatcgccgtgctgcgggaagcgaacgtgccgttcgagctgctgtcgagcgacgaactgaagaaagccgagccggcgctcgccgcggtgtcgcacaagttgacgggcggcctgcgcctgccgggcgacgaaacgggcgactgccagctcttcacgacgcgtctcgccgcgctcgccgagcagctcggcgtgaagttccgcttcaacacgcgcatcgatgcgctcgccgtcgcgggcggcaagatcgcgggcgtccagtgcggcggcgaaatggtgcgcgccgacgcctacgtggtcgcgctcggcgcgttctcgacgaacctcgtcgcgaatctcgtgaagattccggtgtatccgctgaaaggctattcgatcaccgcgccgatcgtcgacgcggcgaaagcgcccgtgtcgaccgtgctcgacgagacctacaagatcgcgatcacgcgtttcgacgagcggattcgcgtcggcggaatggcggagatcgtcggcttcgacaagcgactgcgccaggcgcgccgcgacacgctcgaaatgtgcgtgaacgacctgttcccgggcggcggcgacacggcgaacgcgtcgttctggaccggcctgcggccgatgacgccggacggcacgccgatcgtcggccgcacgcccgtgccgaatctgttcctgaacacgggccacggcacgctcggctggacgatgtcgtgcggctccggccagttgctcgccgatctgatgtccggcaagaagcccgcgatccgcgcggacgatctgtcggtgcatcgctacctgagcgagacggacggcgagcatcgccccgcgtacgcatga

SEQ ID NO: 6653 - protein, 428 aa, Burkholderia thailandensis
MRVVILGSGVVGVASAYYLARAGHEVTVIDREAGPALDTSFANAGQISPGYAAPWAAPGVPLKAVKWMFEKHAPLAIRLDGTRFQLQWMWQMLRNCTTERYALNKGRMVRLAEYSRDCLQALRAETDIQYEGRTGGTLQVFRTQQQLDGAAKDIAVLREANVPFELLSSDELKKAEPALAAVSHKLTGGLRLPGDETGDCQLFTTRLAALAEQLGVKFRFNTRIDALAVAGGKIAGVQCGGEMVRADAYVVALGAFSTNLVANLVKIPVYPLKGYSITAPIVDAAKAPVSTVLDETYKIAITRFDERIRVGGMAEIVGFDKRLRQARRDTLEMCVNDLFPGGGDTANASFWTGLRPMTPDGTPIVGRTPVPNLFLNTGHGTLGWTMSCGSGQLLADLMSGKKPAIRADDLSVHRYLSETDGEHRPAYA

SEQ ID NO: 6654 - DNA, 1287 bp, Burkholderia vietnamiensis
  CDS (1)..(1287): transl_table=11
atgcgagtcgtcattctgggcagcggtgtggtgggcgtggcgagcgcgtattaccttgcgcgcgccggtcatgaagtcacggtgatcgaccgggaggccggcccggcgctcgatacgagcttcgcaaacgcgggccagatctcgcccggctatgcggcgccgtgggccgcgcccggcgtgccgctgaaggcggtcaagtggatgttcgaaaagcatgcgccgctcgcgatccgcctcgacggcacgcgcttccagctgcaatggatgtggcagatgctgcgcaactgcacgcccgagcgctatgcagtcaacaagggccgcatggtgcgtctcgccgaatacagccgcgattgcctgcaggcgctgcgcgccgatacgggcatcgagtacgaaggccgcaccggcggcacgctgcagttgttccgctcgcagcagcaactcgacggcgcggcgaaggacatcgcggtgctgcgcgaagcgaacgtgccgttcgaactgctgtcgccggccgagctgaagaatgccgaaccggccctcgccgccgtgtcgcacaagctcaccgggggcctgcgcctgccgggtgacgaaacgggcgattgccagttgttcacgacgcgcctcgcggcgctcgcggaatcgctcggcgtgaagttccgctacaacacgccgatcgacgcgctcgcgatcgcaggcggcaagatcgccggcgtgcaatgcggcagcgagacggtgcgcgccgacgcatacgtcgtcgcgctgggttcgtactcgaccaacttcgtgtcgaagctgatgaagatcccggtctatccgctgaagggttattcgatcaccgcgccgatcgtcaacgaggcggccgcgccggtgtcgacggtgctcgacgagacctacaagatcgcgatcacgcgcttcgaccagcgcattcgcgtcggcgggatggccgagatcgtcggcttcgacaagaagctgcgcgccgcgcgccgcgaaacgctcgaaatgtgcgtgaacgacctgttccccggcggcggcgacacgtcgaaggcgacgttctggacgggcctgcgcccgatgacgccggacggcacgccgatcgtcggccgcacgccggtgtcgaacctgttcatgaataccggccacggcacgctcggctggacgatgtcgtgcggttcgggccagctgctcgccgacctgatctcgggcaagaagccggcgatccaggccgacgacctgtcggtgcatcgctacctgaacgaagtggccggccagacgcgtcccgcatacgcgtaa

SEQ ID NO: 6655 - protein, 428 aa, Burkholderia vietnamiensis
MRVVILGSGVVGVASAYYLARAGHEVTVIDREAGPALDTSFANAGQISPGYAAPWAAPGVPLKAVKWMFEKHAPLAIRLDGTRFQLQWMWQMLRNCTPERYAVNKGRMVRLAEYSRDCLQALRADTGIEYEGRTGGTLQLFRSQQQLDGAAKDIAVLREANVPFELLSPAELKNAEPALAAVSHKLTGGLRLPGDETGDCQLFTTRLAALAESLGVKFRYNTPIDALAIAGGKIAGVQCGSETVRADAYVVALGSYSTNFVSKLMKIPVYPLKGYSITAPIVNEAAAPVSTVLDETYKIAITRFDQRIRVGGMAEIVGFDKKLRAARRETLEMCVNDLFPGGGDTSKATFWTGLRPMTPDGTPIVGRTPVSNLFMNTGHGTLGWTMSCGSGQLLADLISGKKPAIQADDLSVHRYLNEVAGQTRPAYA

SEQ ID NO: 6656 - DNA, 1290 bp, Burkholderia xenovorans
  CDS (1)..(1290): transl_table=11
atgcgagtcgtcgttttgggcagtggcgtcgtcggggtgacgagtgcgtattacctggcgcgcgccggtcacgaagtgacggttatcgatcgcgaggccggcccggcgctcgaaaccagtttcgccaatgccggccagatctcgccgggctacgcatcgccgtgggccgcgccgggtgtgccgctgaaggccgtcaagtggatgttccagaaacacgcgccgctggccatccgcctcgacggaacgcaattccagttgcaatggatgtggcagatgctgcaaaactgcacgtcgtcgcgctatgcggtgaacaaaggccgcatggtccgcctcgccgaatacagccgcgactgcctgcaggcgctgcgcgctgaaaccggcatccagtacgaaggccgcacgggcggcacgctgcaggtgttccgcacgcagcagcaattcgaaggcgccgcgaaagacatcgccgtgctgcgggaagccagtgtgccgtacgaactgctgtcgccggctgaactggcgcaggcggaaccggcgctcgccgccgtgtcgcacaagctgaccggcggtctgcgcctgccgggcgatgaaaccggcgactgccagatgttcaccacgcgcctcgccgcgctggccgaacaactgggcgtcaaattccgctacaacacgccgatcgacgcactcgcaatggccggcgaccgcatcgccggcgtgaagtgcggcgaagaactcgtgcgcgccgattcgttcgtcgtcgcgctcggttcgtactccacccaattcctgtctggcctcgtaaagatcccggtgtatccgctcaagggttattcgatcacggcgccaatcgtcaacgaagcatcggcaccagtgtctaccgtgctcgacgaaacctacaagatcgcgatcacgcgtttcgacgaccggattcgcgtgggcggcatggccgagattgtcggcttcgacaaatcgctgcgcgaggcgcgccgtgaaacgctggaactgtgcgtgaacgatctgttcccgggcggcggcgacacgtcgaaggccacgttctggtccggtctgcgccccatgacgccggacggcacgccgatcgtcggccgcacgccggtggccaacctgttcctgaacacgggccacggcacgctgggctggacgatgtcgtgcggctcgggccaactgctcgccgacgtgatgtcgggcaagcagccggccatcaaggcggacgacctgtcggtgcatcgctatctcggtgagacgcgcggtgcgcatcgcccggcttatgccgcctga

SEQ ID NO: 6657 - protein, 429 aa, Burkholderia xenovorans
MRVVVLGSGVVGVTSAYYLARAGHEVTVIDREAGPALETSFANAGQISPGYASPWAAPGVPLKAVKWMFQKHAPLAIRLDGTQFQLQWMWQMLQNCTSSRYAVNKGRMVRLAEYSRDCLQALRAETGIQYEGRTGGTLQVFRTQQQFEGAAKDIAVLREASVPYELLSPAELAQAEPALAAVSHKLTGGLRLPGDETGDCQMFTTRLAALAEQLGVKFRYNTPIDALAMAGDRIAGVKCGEELVRADSFVVALGSYSTQFLSGLVKIPVYPLKGYSITAPIVNEASAPVSTVLDETYKIAITRFDDRIRVGGMAEIVGFDKSLREARRETLELCVNDLFPGGGDTSKATFWSGLRPMTPDGTPIVGRTPVANLFLNTGHGTLGWTMSCGSGQLLADVMSGKQPAIKADDLSVHRYLGETRGAHRPAYAA

SEQ ID NO: 6658 - DNA, 1308 bp, Chromobacterium violaceum
  CDS (1)..(1308): transl_table=11
atgaaggtaatcgtgctgggcggcggcgttctgggggtatccaccgcgtggtatctggccaaggcaggctgccaggtgacagtgctggagcgccaggacggcgtggcgctggagaccagtttcggcaacgccggccagatttccccgggctactccgccccgtgggcggcgcccggcattccgttgaaggggctgaagtggatgttccagcgccacgcgccgctggccattaccccggacggcagcctgtaccagctgcagtggatcgccaagatgctggccaactgcaacgagaaggcctacgcggtcaacaagggccgcatgatgcgcctggccgagtacagccgcgacaagatcaaggagctgcgcgcggagaccggcctgcagtacgaaggccgccagggcggcacgctgcagctgctgcgcagccaggcccaggtggagggcatggccaaggacatcgctgtgctgcgcgagtgcggcgtcgatttcaacgtgctcgatccggacggctgcgcccgcgtggaacctgcgctggcggcggtcaagcacaagctggccggcggcctgcagctgccgaacgacgaaaccggcgactgcaatctgttcaccagccgcctggcggagctggcccgcgacaagggcgtggaattccgcttcggcgtgaccgtggacggcatcgagaatgatggcaagcgcatcaccggcgtgcgcatcggcgacgagctgctgcgcgccgaccactacgtggtggcgatgggcagctattcccgcgacatggtgaaggagctgggcatcgacatcccggtctacccggtcaagggctactcgctgaccgtgccgatcaccaacccggacggcgcgccgacttccaccatcctggacgaaacctacaaggtggcgatcacccgcttcgacaaccgcatccgcgtcggcggcatggccgagctgtccggctacaacctggagctgaacccgcgccgccgcgagacgctggaaatggtggtgggcgacctgtacccgaacggcggcgacatcaaggcggccagcttctggaccggcctgcgcccgatgacgccggacggcacgccgatcatcggcggcacccgcttcgccaacctgtcgctgaacaccggccacggcacgctgggctggaccatgtgcgccggctccggcaaggtgctggccgacatcattaccggcgccaagccggaaatcagcgtcgacggcctgtcgatgcagcgttacgccaagcagggcgaaaccctggtggtgccggtgattcgtcccgcggtgcaaggggcctga

SEQ ID NO: 6659 - protein, 435 aa, Chromobacterium violaceum
MKVIVLGGGVLGVSTAWYLAKAGCQVTVLERQDGVALETSFGNAGQISPGYSAPWAAPGIPLKGLKWMFQRHAPLAITPDGSLYQLQWIAKMLANCNEKAYAVNKGRMMRLAEYSRDKIKELRAETGLQYEGRQGGTLQLLRSQAQVEGMAKDIAVLRECGVDFNVLDPDGCARVEPALAAVKHKLAGGLQLPNDETGDCNLFTSRLAELARDKGVEFRFGVTVDGIENDGKRITGVRIGDELLRADHYVVAMGSYSRDMVKELGIDIPVYPVKGYSLTVPITNPDGAPTSTILDETYKVAITRFDNRIRVGGMAELSGYNLELNPRRRETLEMVVGDLYPNGGDIKAASFWTGLRPMTPDGTPIIGGTRFANLSLNTGHGTLGWTMCAGSGKVLADIITGAKPEISVDGLSMQRYAKQGETLVVPVIRPAVQGA

SEQ ID NO: 6660 - DNA, 1257 bp, Dechloromonas aromatica
  CDS (1)..(1257): transl_table=11
ttgagagtgctcgtgctgggtgccggcgttgtcggcacaacgagcgcgtggtatctcgctcgggccgggcatcaggtcacggtcgtcgaccgccagccggtggccggcaatgaaaccagcttcgccaacggcggccagatttcggtgtcgcatgccgagccgtgggccaatccacatgtcctgccgcgtgtgctgaagtggctcggtcgcgaagatgcgccgctgttgtggcgctggcgggccgatccggcccaactggcctgggggttgcggtttctcggtgagtgcttccccggccgggtccggcgcaatatcgccgccatcgtgtccatggcactttacagccgtggccgattgcaggctctgcgcgaagagttggggctgcaatacgatcatctcgaacgcggcatcctgcacatctacaccgaccgtgacgaattttcggcagcgcttgatgcagcacgcgtcatgcgccagttcggtctggatcgcgacacggtcgatgtcgacaagtgcctggaaatcgaaccggccttgtctggtgcgcgccatctgctggtcggtggcgactacacgcgctcggatgaatccggtgatgccaacaaatttacctgtgccctggccgaacacgccaaagcagccggcgtcgattttcgttatggtctgactgtcgagcgaatcgcgaccagcggcagcgagattgtcggcgtgctggtgcagcacagcgaaggtggcccggaacggctgacggccgatgcttatgtggtcgccctcggtagctattcgcccttgttgctcaggccgatcggtgtcggcctgccggtctatccggccaagggctattcggcgacgctgacgctggccgaagccagcctggcgccgacggtcagcctgaccgacgacgagcgcaagctggtcttttcccggctcggcaatcgactgcgcattgccggcaccgccgaattcaatggctacaacctcgaactcaatccggtgcgctgtcaggcgctgatcgaccgcacgcgtcagctttttcctcgcctggaaatcgttggcgagccgaccttgtggtgcggcttgcgcccggccaccccgtcgaacgtgccttatatcggccaaacccgctatcgcaacctgtggttgaataccggccacggcacattgggctggacgatggcctgcggctcggccgcctcgctggccgaaatgatcagcggtcgccgccccgaaccggaatttcccttcctgcgatgctga

SEQ ID NO: 6661 - protein, 418 aa, Dechloromonas aromatica
MRVLVLGAGVVGTTSAWYLARAGHQVTVVDRQPVAGNETSFANGGQISVSHAEPWANPHVLPRVLKWLGREDAPLLWRWRADPAQLAWGLRFLGECFPGRVRRNIAAIVSMALYSRGRLQALREELGLQYDHLERGILHIYTDRDEFSAALDAARVMRQFGLDRDTVDVDKCLEIEPALSGARHLLVGGDYTRSDESGDANKFTCALAEHAKAAGVDFRYGLTVERIATSGSEIVGVLVQHSEGGPERLTADAYVVALGSYSPLLLRPIGVGLPVYPAKGYSATLTLAEASLAPTVSLTDDERKLVFSRLGNRLRIAGTAEFNGYNLELNPVRCQALIDRTRQLFPRLEIVGEPTLWCGLRPATPSNVPYIGQTRYRNLWLNTGHGTLGWTMACGSAASLAEMISGRRPEPEFPFLRC

SEQ ID NO: 6662 - DNA, 1254 bp, Erwinia carotovora subsp
  CDS (1)..(1254): transl_table=11
atgcgggttgtgattctgggaagtggtgtagttggcgtcagtaccgcctggtatcttgcgcaggcagggcatgatgtcaccgttatcgacagacaaccggagcctgcgttggaaaccagcgccgggaatgccggacagatttcccccggctatgccgcgccttgggctgcaccgggaataccgctgaaagcgataaaatggatgttccagcgccatgcgccgttggccattcggcctgacttcacgactgcacagctttgttggatgtggcaaatgctgcttaactgcgatgcgcgccactataaaaccaataaagcgcggatggtgcgtctggctgaatacagccgtgactgcttgcaacagctgcggcgagatacgggtatccagtacgaaggtcgacaaggtggaacgctgcaactgttccgcaccgaacagcaatatgacaatgcgacacgggatatcgccgtgctggaagaggctggcgtaccgtatcaactactggctcgccatgagctggcctcggttgaacccgcgttggcgaatatagtcgggaccctgaccggcgggctgcgtttaccacatgatgagacgggcgattgccaactgttcacccgccaactggcagcgatggccgctgaggctggtgtcacgtttaaactggggcgtaacgtccgtcaactgcgggttgaaggacagagcgtcacgggcgtgcagtgcgacgacgagatgattgtggcagatgcctatgtgatggcctgcggttcctattcaacgggactactgcgccagtggttcgatattccggtttatccgctgaaaggctattcactgacgatcccgctggcggatgacgcctcagcaccggtttctaccgtgctggatgaaacgtacaaagtggcaattacgcgttttgacaatcgtattcgcgttggtggaatggcagaagtcgtgggcttcaacactgatttgaaccccaagcgccgggaaacgctggaaatggtggtacgcgatctgtatccccattgtggcccgattgagcaagcgacattctggacgggattgcgtccgatgacaccggacggtacgccgctggtgggacgttcaccgctgaaaaacctgtatctgaataccggtcacggcacattaggctggacgatggcctgcgggtcggggaaattgctagcggatattctgtcggataaatcaccggagattgaggccgatgatttatccgtatctcgctatacgcgttag

SEQ ID NO: 6663 - protein, 417 aa, Erwinia carotovora subsp
MRVVILGSGVVGVSTAWYLAQAGHDVTVIDRQPEPALETSAGNAGQISPGYAAPWAAPGIPLKAIKWMFQRHAPLAIRPDFTTAQLCWMWQMLLNCDARHYKTNKARMVRLAEYSRDCLQQLRRDTGIQYEGRQGGTLQLFRTEQQYDNATRDIAVLEEAGVPYQLLARHELASVEPALANIVGTLTGGLRLPHDETGDCQLFTRQLAAMAAEAGVTFKLGRNVRQLRVEGQSVTGVQCDDEMIVADAYVMACGSYSTGLLRQWFDIPVYPLKGYSLTIPLADDASAPVSTVLDETYKVAITRFDNRIRVGGMAEVVGFNTDLNPKRRETLEMVVRDLYPHCGPIEQATFWTGLRPMTPDGTPLVGRSPLKNLYLNTGHGTLGWTMACGSGKLLADILSDKSPEIEADDLSVSRYTR

SEQ ID NO: 6664 - DNA, 1299 bp, Klebsiella aerogenes
  CDS (1)..(1299): transl_table=11
atgcgtgtcgtcatactgggaagtggggtgtttggggtagccagcgcgtggtatttgagtcaggcgggtcatgacgtgacggtcatcgaccgtcagcccggtccggcagaggagaccagcgcggccaacgccgggcagatttctcccggctatgcggcgccctgggcggcgccgggggtgccgctgaaggcgatcaaatggatgtttcagcgccatgcgccgctggcgatcggtcttgacggcacctcgttccagttgaagtggatgtggcagatgctgcgcaactgcgacacccgccactatatggagaacaaaggccgtatggtgcgcctggcggagtacagccgcgactgtctgaaggcgctgcgcgacaccaccggcattcagtatgaagggcgccagggcgggacgctgcagctgttccgtaccgccaaacagtatgaaaatgccacccgcgacatcgcggtgctggaggacgccggcgtgccgtatcagctgctggaagcgaagcggttggcggaagtggagccggcgctggcggaggtcagccacaaactgaccggcggcctgcgtctgccaaatgatgaaaccggcgactgccagctgtttaccacccgtctggcggcaatggcggaccaggccggcgtgaccttccgcttcaacaccgcggtggatgcgctgctgcacgagggcgatcgcattgccggggtgaaatgcggcatgagaattatcaagggcgatgcctatgtgatggccttcggctcctactcgacggcgatgcttaaaggtctggtggatataccggtctacccgctgaaaggctactcattgactattccgatcgctcaggaggacggcgcgccggtttcaactatccttgatgtgacttacacaatcgccatcacccgcttcgatcagcgcattcgggtcggcggcatggcggagatcgtcggttttaacaaaacgctgctgcagccgcgtcgcgaaaccctggagatggtggtgcgcgatctgttcccgcgcggcggccacgtggagcaggcgacgttctggacgggcctgcggccgatgacgccggacggcacgccggtggtcggccgcacagcgtataaaaatctgtggctcaacaccggccacggcacgcttggctggaccatggcctgcggctccgggcagcttatcagcgatctgatctccggccgcacgccggcgatcccttacgacgatctggcggttgcccgctacagccccggttttaccccggcgcgcccgcagcacctgcacggcgcacacaactaa

SEQ ID NO: 6665 - protein, 432 aa, Klebsiella aerogenes
MRVVILGSGVFGVASAWYLSQAGHDVTVIDRQPGPAEETSAANAGQISPGYAAPWAAPGVPLKAIKWMFQRHAPLAIGLDGTSFQLKWMWQMLRNCDTRHYMENKGRMVRLAEYSRDCLKALRDTTGIQYEGRQGGTLQLFRTAKQYENATRDIAVLEDAGVPYQLLEAKRLAEVEPALAEVSHKLTGGLRLPNDETGDCQLFTTRLAAMADQAGVTFRFNTAVDALLHEGDRIAGVKCGMRIIKGDAYVMAFGSYSTAMLKGLVDIPVYPLKGYSLTIPIAQEDGAPVSTILDVTYTIAITRFDQRIRVGGMAEIVGFNKTLLQPRRETLEMVVRDLFPRGGHVEQATFWTGLRPMTPDGTPVVGRTAYKNLWLNTGHGTLGWTMACGSGQLISDLISGRTPAIPYDDLAVARYSPGFTPARPQHLHGAHN

SEQ ID NO: 6666 - DNA, 1299 bp, Klebsiella pneumoniae subsp
  CDS (1)..(1299): transl_table=11
atgcgtgtcgtcatactgggaagtggggtggttggggtagccagcgcgtggtatttgagtcaggcgggtcatgacgtgacggtcatcgaccgtcagcccggtccggcagaggagaccagcgcggccaacgccgggcagatttctcccggctatgcggcgccctgggcggcgccgggggtgccgctgaaggcgatcaaatggatgtttcagcgccatgcgccgctggcgatcggtcttgacggcacctcgttccagttgaagtggatgtggcagatgctgcgcaactgcgacacccgccactatatggagaacaaaggccgtatggtgcgcctggcggagtacagccgcgactgcctgaaggcgctgcgcgacaccaccggcattcagtatgaagggcgccagggcgggacgctgcagctgttccgtaccgccaaacagtatgaaaatgccacccgcgacatcgcggtgctggaggacgccggcgtgccgtatcagctgctggaagcgaagcggttggcggaggtggagccggcgctggcggaggtcagccacaaactgaccggcggcctgcgtctgccaaatgatgaaaccggcgactgccagctgtttaccacccgtttggcggcgatggcggagcaggccggcgtgaccttccgcttcaacaccgcagtggatgcgctgctgcacgagggcgatcgcattgccggggtgaaatgcggcgatgagattatcaagggcgacgcctatgtgatggccttcggctcctactcgacggcgatgcttaaagggctggtggatataccggtctacccgctgaaaggctactcattgactattccgatcgctcaggaggacggcgcgccggtttcaactatccttgatgagacttacaaaatcgccatcacccgcttcgatcagcgcattcgggtcggcggcatggcggagatcgtcggttttaacaaaacgctgctgcagccgcgtcgcgaaaccctggagatggtggtgcgcgatctgttcccgcgcggcggccacgtggagcaggcgacgttctggacgggcctgcggccgatgacgccggacggcacgccggtggtcggccgcacagcgtataaaaatctgtggctcaacaccggccacggcacgcttggctggaccatggcctgcggctccgggcagcttatcagcgatctgatctccggccgcacgccggcgatcccttacgacgatctggcggttgcccgctacagccccggttttaccccggcgcgcccgcagcacctgcacggcgcacacaactaa

SEQ ID NO: 6667 - protein, 432 aa, Klebsiella pneumoniae subsp
MRVVILGSGVVGVASAWYLSQAGHDVTVIDRQPGPAEETSAANAGQISPGYAAPWAAPGVPLKAIKWMFQRHAPLAIGLDGTSFQLKWMWQMLRNCDTRHYMENKGRMVRLAEYSRDCLKALRDTTGIQYEGRQGGTLQLFRTAKQYENATRDIAVLEDAGVPYQLLEAKRLAEVEPALAEVSHKLTGGLRLPNDETGDCQLFTTRLAAMAEQAGVTFRFNTAVDALLHEGDRIAGVKCGDEIIKGDAYVMAFGSYSTAMLKGLVDIPVYPLKGYSLTIPIAQEDGAPVSTILDETYKIAITRFDQRIRVGGMAEIVGFNKTLLQPRRETLEMVVRDLFPRGGHVEQATFWTGLRPMTPDGTPVVGRTAYKNLWLNTGHGTLGWTMACGSGQLISDLISGRTPAIPYDDLAVARYSPGFTPARPQHLHGAHN

SEQ ID NO: 6668 - DNA, 1254 bp, Methylobacillus flagellatus
  CDS (1)..(1254): transl_table=11
gtgaaagtgatcgtcttgggcagtggcgtcatcggcgtgacggctgcctggtatcttgccgaggcaggacatgaagtcatcgtactggaccggcaacctggcccagcgcttgaaaccagctacgccaatgccggacaggtgtctcccggttatgccagtccatgggcagcgccgggcattccgctcaaggcaatcaaatggatgctgcgccgccatgcgcctttgttcatcaaacctgacggcacctggcagcaactgcgatggatgtggcaactgctgcagaattgcacagggacgcgttatgagcagaacaaggcgcgcatggtgcgcctcgctgaatacagtcgagattgcctggatcaattgcgcgctgataccggcatcgaatacgaaggcaggcagcggggcaccttgcagctgttccgcacccgtgaacaacttgatgccgcgttgcgggacatcgaagtcctgcgctttgcccatgtgccttttgagttgttgccgccatcactgttgaccaaggctgagcctgccctagaacatgtcaagcataaactgacaggcggcctgtggctgccacgcgatgaaaccggggattgccgattgttcacggttcgcctggcagacatggcggcggccaggggcgtgcagtttcgctatggacaggaaatctctcatctcgctattgaatcgggcaatgtcaacggcgtggtcgtgagtggtgtgcgggtgcaggcggatgcctatgtcgtcgccttggccgcctattcggttgatgttctcaagggtgtgctcgacttgcccgtttatccagtcaagggatactccattaccgtgcccatcattgatgaggccttggctcccgtgtcgaccgtgctggatgaaacttacaagaccgctgtcacgcgcttcgacaatcgtatccgtgtcggcggcatggcagaattggtcggcttcgaccgccgtctcagccccaggcgggaaggtacgttgaaactgatcgtccacgacttgttccctggcgcagccgacctcagccagactagcttctggactggcttgcgccccatgacgcctgatgggccccccatcatcggtgcgacgcccattcccaacctttacctgaacaccgggcatggcacgctgggctggaccatggcatgcggctcaggaaaactacttgccgatatcatctcgggcaagaaaaccgacatccagcatgatgacttgggaatagggcgatacgcaaaataa

SEQ ID NO: 6669 - protein, 417 aa, Methylobacillus flagellatus
MKVIVLGSGVIGVTAAWYLAEAGHEVIVLDRQPGPALETSYANAGQVSPGYASPWAAPGIPLKAIKWMLRRHAPLFIKPDGTWQQLRWMWQLLQNCTGTRYEQNKARMVRLAEYSRDCLDQLRADTGIEYEGRQRGTLQLFRTREQLDAALRDIEVLRFAHVPFELLPPSLLTKAEPALEHVKHKLTGGLWLPRDETGDCRLFTVRLADMAAARGVQFRYGQEISHLAIESGNVNGVVVSGVRVQADAYVVALAAYSVDVLKGVLDLPVYPVKGYSITVPIIDEALAPVSTVLDETYKTAVTRFDNRIRVGGMAELVGFDRRLSPRREGTLKLIVHDLFPGAADLSQTSFWTGLRPMTPDGPPIIGATPIPNLYLNTGHGTLGWTMACGSGKLLADIISGKKTDIQHDDLGIGRYAK

SEQ ID NO: 6670 - DNA, 1260 bp, Neisseria gonorrhoeae
  CDS (1)..(1260): transl_table=11
atgaaagtgcttgttttaggtgcgggtgttgccggcgtatcctccgtgtggtatctggcagaggccggacatgaagtaacggtcatcgaccgcaccgagggtgtggcgatggaaaccagttttgccaatgcaggccagctttcttacggctataccacgccttgggctgcacccggtattccgaccaaagcactgaaacggctgtttaaaagccatccgcctttactgttccgccctgacggcggcctgtatcaaatcgaatggctgtggcggatgctgcaaaactgcacggcaacgcgctatcaaatcaataaagagcgcatggtcaggatttccgaatacagccgtgaaatgttccgccgttttgaagcgcaaaccgacatgaattttgagggacgcaaaaaagggacgttgcagattttccgccaaaccgaagaagtcgaagcggcaaaacaagacattgccgttttggaacgctacggcgtgccgtaccgccgtctgaagcccgaagaatgcgcagaattcgagcctgcgctggcacgcgttaccgccaaaattgtcggcggtctgcacctgcctgcggatgcgaccggcgactgccgcctcttcaccgaaaacctgtacaaattgtgtcaagagaagggcgtacggttctacttcaaccaaaccatcagccgcatcgaccacaacgggctgcgcatcaaagccgttgaaaccgaaacagggcggtttgaaacagatgccgttgtctgcgcgctcggctgcttcagcaggactgtgttggcgcagttggatctcaatctgcccatttatcccgtcaaaggctattccttgaccctgccggtcacaaattccgacggcgcaccggtgtccactgttttagatgaaagctacaaagtcgccatcacgcgttttgacaacagaatccgcgtcggcggaatggcggaattgtccggctacgaaaccaaactgcccgaaaaacgccgcgaaaccttggctttggtcgtcaacgacttgttcccggaaggcggcgatttgagccaagcattgtcctggagcggcctcaggccgatgacgcccgacagtacgccgttaatcgggcgcacccgctttgaaaacctgtttctgaataccgggcacggtactttgggctggaccatgtcgccgggttcggcaaaattgaccgccgatatcgtgagcggcaaagacaccgaaatccgcagcgacgatttgagcctgtcgcgctatcaaaaactgtaa

SEQ ID NO: 6671 - protein, 419 aa, Neisseria gonorrhoeae
MKVLVLGAGVAGVSSVWYLAEAGHEVTVIDRTEGVAMETSFANAGQLSYGYTTPWAAPGIPTKALKRLFKSHPPLLFRPDGGLYQIEWLWRMLQNCTATRYQINKERMVRISEYSREMFRRFEAQTDMNFEGRKKGTLQIFRQTEEVEAAKQDIAVLERYGVPYRRLKPEECAEFEPALARVTAKIVGGLHLPADATGDCRLFTENLYKLCQEKGVRFYFNQTISRIDHNGLRIKAVETETGRFETDAVVCALGCFSRTVLAQLDLNLPIYPVKGYSLTLPVTNSDGAPVSTVLDESYKVAITRFDNRIRVGGMAELSGYETKLPEKRRETLALVVNDLFPEGGDLSQALSWSGLRPMTPDSTPLIGRTRFENLFLNTGHGTLGWTMSPGSAKLTADIVSGKDTEIRSDDLSLSRYQKL

SEQ ID NO: 6672 - DNA, 1257 bp, Neisseria meningitidis serogroup A
  CDS (1)..(1257): transl_table=11
atgaaagtgcttgttttaggtgctggtgttgccggcgtatcttccgcgtggtatctggcagaggcaggacatgaagtaacggtcatcgaccgcgccgagggcgtggcgatggaaaccagttttgccaacgcaggccagctttcttacggctataccacgccttgggctgcacccggtattccgaccaaagcactgaaatggctgtttaaaagccatccgcctttgctgtttcgccccgacggcagcctgtatcaaatcgaatggctgtggcagatgctgcaacactgcacggcagcgcgctatcaaatcaataaagagcgcatggtcaggatgtccgaatacagccgtgaaatgttccgccgttttgaagcgcaaaccggcatgaattttgagggacgcaaaaaagggacgttgcagattttccgccaaaccaaagaagtcgaagcggcaaaacaagacattgccgttttggaacgctacggcgtgccgtaccgccgtctgaagcccgaagaatgcgcagaattcgagcctgcgctggcacgcgttaccgccaaaattgccggcggcctgcacctgcccgcagacgcgaccggcgactgccgcctcttcactgaaaacctgtacaaattgtgtcaggaaaagggcgtacggtttcatttcaaccaaaccatcagccgcatcgaccacaacgggctgcgcatcaaaaccgttgaaaccgaaacagggcggtttgaagcagatgccgttgtctgcgcgctcggctgcttcagcaggacggttttggcgcaagtggatctcaatctgccgatttatcccgtcaaaggctattccttgactctgccggtcacaaattccgacggcgcaccggtgtccaccgttttagatgagagctacaaagtcgccatcacgcgcttcaacaacagaatccgcgtcggcggcatggcggaattgtccggctacgcaatcaaactgcccgaaaaacgccgcgaaaccttggctttggtcgtcaacgacttgttccccgaaggcggcgatttaaaccaaacattgttctggagcggactcagaccgatgacgcctgacagcacgccgttaatcgggcgcacccgctttgacaacctgtttctgaataccggccacggtactttgggctggaccatgtcgctgggttcggcaaaattaaccgccgatatcgtgagcggcaaagacaccgaaatccgaagcgacgatttgagcctgtcgcgctatcaggcttaa

SEQ ID NO: 6673 - protein, 418 aa, Neisseria meningitidis serogroup A
MKVLVLGAGVAGVSSAWYLAEAGHEVTVIDRAEGVAMETSFANAGQLSYGYTTPWAAPGIPTKALKWLFKSHPPLLFRPDGSLYQIEWLWQMLQHCTAARYQINKERMVRMSEYSREMFRRFEAQTGMNFEGRKKGTLQIFRQTKEVEAAKQDIAVLERYGVPYRRLKPEECAEFEPALARVTAKIAGGLHLPADATGDCRLFTENLYKLCQEKGVRFHFNQTISRIDHNGLRIKTVETETGRFEADAVVCALGCFSRTVLAQVDLNLPIYPVKGYSLTLPVTNSDGAPVSTVLDESYKVAITRFNNRIRVGGMAELSGYAIKLPEKRRETLALVVNDLFPEGGDLNQTLFWSGLRPMTPDSTPLIGRTRFDNLFLNTGHGTLGWTMSLGSAKLTADIVSGKDTEIRSDDLSLSRYQA

SEQ ID NO: 6674 - DNA, 1257 bp, Neisseria meningitidis serogroup B
  CDS (1)..(1257): transl_table=11
atgaaagtgcttgttttaggtgcgggtgttgccggcgtgtcttccgcgtggtatctggcagaggccggacatgaagtaacggtcatcgaccgcgccgagggtgtggcgatggaaaccagttttgccaacgcaggccagctttcttacggctataccacgccttgggctgcacccggtatcccgaccaaagcgctgaaatggctgtttaaaagccatccgcctttgctgtttcgccccgacggcagcctgtatcaaatcgaatggctgtggcaaatgctgcaaaactgcacggcagcgcactatcaaaccaataaagagcgcatggtcaggatttccgaatacagccgtgaaatgttccgccgttttgaagcgcaaaccggcatgaattttgagggacgcaaaaaagggacgttgcagattttccgccaaaccaaagaagtcgaagcggcaaaacaagacattgccgttttggaacgctacggcgtgccgtaccgccgtctgaaacccgaagaatgtgcagaatttgagcctgcgctggcacgcgttaccgccaaaattgccggcggcctgcacctgcctgcagatgcgaccggcgactgccgcctcttcactgaaaacctatacaaattgtgtcaggaaaagggcgtacggtttcatttcaaccaaaacatcagccgcatcgaccacaacgggctgcgcatcaaaaccgttgaaaccgaaacagggcggtttgaagcagatgccgttgtctgcgcgctcggttgcttcagcaggacggttttggcgcagttggatctcaatctgcccatttatcccgtcaaaggctattccttgaccctgccggtcaccaattcagacggcgcaccggtgtccaccgttttagatgaaagctacaaagtcgccatcacgcgctttgacaacagaatccgcgtcggcggtatggcggaattgtcgggctacgaaatcaaactgcccgaaaaacgccgcgaaaccttggctttggtcgtcaacgacttgttcccggaaggcggcgatttgagccaagcatcgttctggagcggcctcagaccgatgacgcccgacagcacgccgttaatcggtcgcacccgctttgacaacctgtttctgaataccggccacggtactttaggctggaccatgtcgctgggttcggcaaaattaaccgccgatatcgtgagcggcaaagacaccgaaatccgcagcgacgatttgagcctgtcgcgttatcaggcttaa

SEQ ID NO: 6675 - protein, 418 aa, Neisseria meningitidis serogroup B
MKVLVLGAGVAGVSSAWYLAEAGHEVTVIDRAEGVAMETSFANAGQLSYGYTTPWAAPGIPTKALKWLFKSHPPLLFRPDGSLYQIEWLWQMLQNCTAAHYQTNKERMVRISEYSREMFRRFEAQTGMNFEGRKKGTLQIFRQTKEVEAAKQDIAVLERYGVPYRRLKPEECAEFEPALARVTAKIAGGLHLPADATGDCRLFTENLYKLCQEKGVRFHFNQNISRIDHNGLRIKTVETETGRFEADAVVCALGCFSRTVLAQLDLNLPIYPVKGYSLTLPVTNSDGAPVSTVLDESYKVAITRFDNRIRVGGMAELSGYEIKLPEKRRETLALVVNDLFPEGGDLSQASFWSGLRPMTPDSTPLIGRTRFDNLFLNTGHGTLGWTMSLGSAKLTADIVSGKDTEIRSDDLSLSRYQA

SEQ ID NO: 6676 - DNA, 1257 bp, Neisseria meningitidis serogroup C
  CDS (1)..(1257): transl_table=11
atgaaagtgcttgttttaggtgcgggtgttgccggcgtgtcttccgcgtggtatctggcagaggccggacatgaagtaacggtcatcgaccgcgccaagggtgtggcgatggaaaccagttttgccaatgcaggccagctttcttacggctataccacgccttgggctgcacccggtattccgaccaaagcactgaaatggctgtttaaaagccatccgcctttgctgtttcgccccgacggcagcctgtatcaaatcgaatggctgtggcggatgctgcaaaactgcacggcagcgcactatcaaaccaataaagagcgcatggtcaggatttccgaatatagccgtgaaatgttccgccgttttgaagcgcaaaccggcatgaattttgaggaacgcaaaaaagggacgttgcagattttccgccaaaccaaagaagtcgaagcggcagaacaagacattgccgttttggaacgctacggcgtgccgtaccgccgtctgaaacccgaagaatgtgcagaatttgagcctgcgctggcacgcgttaccgccaaaattgccggcggcctgcacctgcctgcagatgcgaccggcgactgccacctcttcactgaaaacctatacaaattgtgtcaggaaaagggcgtacagtttcatttcaaccaaaccatcagccgcatcgaccataacgggctgcgcatcaaagccgttgaaaccgaaacagggcggtttgaagcagatgccgttgtctgtgcgctcggctgcttcagtaggactgtgttggcgcagttagacctcgatctgccgatttatcccgtcaaaggctattccttgaccctgccggtcaccaattcagacggcgcgccggtgtccaccgttttggatgaaagctacaaagtcgccatcacgcgctttgacaacagaatccgcgtcggcggcatggcagaattgtcgggctacgaaatcaaactgcccgaaaaacgccgcgaaaccttggctttggtcgtcaacgatttgttcccggaaggcggcgatttgagccaagcattgttctggagcggcctcagaccgatgacgcccgacagcacgccgttaatcggccgcacccgctttgaaaacttattcttgaatacaggccacggcactttgggctggaccatgtcgctgggttcggcaaaattaaccgccgatatcgtgagcggcaaagacaccgaaatccgaagcgacgatttgagcctgtcgcgctatcaggcttaa

SEQ ID NO: 6677 - protein, 418 aa, Neisseria meningitidis serogroup C
MKVLVLGAGVAGVSSAWYLAEAGHEVTVIDRAKGVAMETSFANAGQLSYGYTTPWAAPGIPTKALKWLFKSHPPLLFRPDGSLYQIEWLWRMLQNCTAAHYQTNKERMVRISEYSREMFRRFEAQTGMNFEERKKGTLQIFRQTKEVEAAEQDIAVLERYGVPYRRLKPEECAEFEPALARVTAKIAGGLHLPADATGDCHLFTENLYKLCQEKGVQFHFNQTISRIDHNGLRIKAVETETGRFEADAVVCALGCFSRTVLAQLDLDLPIYPVKGYSLTLPVTNSDGAPVSTVLDESYKVAITRFDNRIRVGGMAELSGYEIKLPEKRRETLALVVNDLFPEGGDLSQALFWSGLRPMTPDSTPLIGRTRFENLFLNTGHGTLGWTMSLGSAKLTADIVSGKDTEIRSDDLSLSRYQA

SEQ ID NO: 6678 - DNA, 1314 bp, Photorhabdus luminescens subsp; identical to SEQ ID NO: 6486
  CDS (4)..(1314): transl_table=11

SEQ ID NO: 6679 - protein, 436 aa, Photorhabdus luminescens subsp
MKILILGSGVIGVTSAWYLVQQGHEVTVIDRQGSAAEETSAANAGQISPGYATPWGAPGIPLKAIKWMFQRHAPLAIRPDGSLFQLRWMWQMLRNCDASHYAINKSRMVRLAEYSRDCIKQLRADTGIQYEGRQRGTLQLFRTNKQFDNAVNDIAVLEQEGVPYNLLTADKLATVEPALAHAAHKLTGGLQLPNDETGDCQLFTKELVKMAEAAGVTFLFNKQVKQLLVEGHRIIGVQCEDGVMTADNYVVAMGAYSTELLKGLVKIPVYPLKGYSLTMPIVDAERAPVSTALDETYKIAITRFDNRIRVGGMAEVVGFNLNLLKARHETLKMVVQDLYPGGGDITQTHFWTGLRPMTPDGTPIVGPTEYHNLYLNTGHGTLGWTMACGSSQLLADIISGKKPAIASDDLSVFRYVNGFNTKLVPFSHQLHTELRG

SEQ ID NO: 6680 - DNA, 1302 bp, Pseudomonas syringae pv
  CDS (1)..(1302): transl_table=11
atgcgcgttctggtccttggaagtggtgtaatcggtacaaccagtgcttattatctggcgcgtgccggttttcaggtgaccgtggtagaccgccagccagccgccgccatggagaccagctttgccaatgccggccaggtctcgccaggctatgcctcgccatgggccgcgccgggtgttccgctgaaggcgatcaagtggttgctgcagcgccacgcgccattggcgatcaaggccacggcagatatcgatcaatacctgtggatggcgcaaatgctgcgcaactgcaccgccagccgctataccgtgaataaagagcgcatggtgcgcctgtccgaatacagccgcgattgtctcgatgaactgcgcctggaaacaggtattgcctacgaagggcgcagcctgggtactactcagctgttccgcactcaggcgcaactggacaacgctgccaaggatattgccgtgctcgagcagtccggtgttccgtacgagctgctcgatcgcgacggcatcgcccgtgtcgagcccgcactggccggtgtgaccggcattctcagcggtgcactgcgcttgccgaatgaccagaccggcgattgccagttgttcaccacgcgccttgcagaaatggccgtagagctgggtgtcgagttccgctacggacagaacatcgagcgcctcgaccacgctggcgaccgcatcaatggtgtgtggatcgacggtaagctggaaacagccgaccgctacgtgctggcgctgggcagctattctccgcaactgctcaaaccgctgggtatcaaggctccggtttacccgctgaagggttattcgctgacggtgccgatcactaacccggccatggctccgacctcgaccattctcgatgaaacctacaaggtcgccatcacccgcttcgacaaccgcatccgggtcggcggcatggcggaaatcgccggtttcgacctgtcgctcaatcctcgtcgacgcgaaacactggagatgatcgtcggtgacctctatcctcagggtggcgacctgacccaggccagtttctggaccgggttgcgtccgaccactcccgatggcacaccgattgtgggtgcaacaccgttccgcaacctgttcctcaataccggccatggcacattgggctggacgatggcgtgtggttccggtcgcttgctggcagacctcattgcccgcaagacaccccgtatcagtgccgaaggcctcgatatctctcgttacggcaacactcaggagaatgcacagcatgtcaatccagcgccagctcaccaatga

SEQ ID NO: 6681 - protein, 433 aa, Pseudomonas syringae pv
MRVLVLGSGVIGTTSAYYLARAGFQVTVVDRQPAAAMETSFANAGQVSPGYASPWAAPGVPLKAIKWLLQRHAPLAIKATADIDQYLWMAQMLRNCTASRYTVNKERMVRLSEYSRDCLDELRLETGIAYEGRSLGTTQLFRTQAQLDNAAKDIAVLEQSGVPYELLDRDGIARVEPALAGVTGILSGALRLPNDQTGDCQLFTTRLAEMAVELGVEFRYGQNIERLDHAGDRINGVWIDGKLETADRYVLALGSYSPQLLKPLGIKAPVYPLKGYSLTVPITNPAMAPTSTILDETYKVAITRFDNRIRVGGMAEIAGFDLSLNPRRRETLEMIVGDLYPQGGDLTQASFWTGLRPTTPDGTPIVGATPFRNLFLNTGHGTLGWTMACGSGRLLADLIARKTPRISAEGLDISRYGNTQENAQHVNPAPAHQ

SEQ ID NO: 6682 - DNA, 1305 bp, Pseudomonas putida
  CDS (1)..(1305): transl_table=11
atgcgagttttggtacttggtagcggtgtaatcggaaccgccagtgcctattacctggcccggcaaggttttgaagtgacggtggtcgaccgccagccggcggtggccatggaaaccagctttgccaacgccggccagatctcgcccggctacgcctcgccctgggccgcccctggtgtaccactgaaggccatcaagtggctgctcgaacgccacgcgcccctggccatcaagctcaccggcgacgtcgatcagtacctgtggatggcgcagatgctgcgcaactgcaccgccagccgttacgcggtgaacaaggagcgcatggtgcgtctgtccgagtacagccgtgactgcctcgatgaactgcgcgccgaaaccggcatcaactacgaaaaccgcagcctgggtaccacccagctgttccgcacccaggcccaggtggatgccgcggccaaggacattgccgtgctcgagcagtccggcgtgccttacgagctgctcgaccgcgacggcattgcccgcgtcgaacctgccctggccggcgtcaaagacatcctggccggtgccctgcgcctgccaaatgatcagacgggcgactgccagctgttcaccaccaaactggccgacatggcgctgaaactgggcgtggagttccgcttcggccaggacatccagcgcctggacttcgcaggcgaccgcatcaatggtgtgtggatcgacggcaagctggaaactgccgaccgctatgtgctggcgctgggcagctactcgccgcagatgctcaagccgctgggcatcaaagccccggtgtacccgctgaaaggctactcgctgaccgtgccgatcaccaacggcgacatggcgccgacgtcgaccatcctcgacgaaacctacaaagtcgccatcacccgtttcgacaaccgcatccgtgtcggcggcatggctgaaatcgccggttttgacctgtcgctgaacccgcgtcggcgcgaaacgctggagatgatcgtcaacgacctttatcctcgcggcggtgacctgagccaggccagcttctggaccggcctgcgcccggcgaccccggacggcacgccaatcgttggcgccacagcgttccgtaacctgttcctgaacaccggtcacggtaccttgggctggaccatggcgtgtggctccggtcgcctgctggccgacctgatcgcgcgcaagaagccgcagatcagtgccgaaggcctggacatttcccgttatggcaacagccgggaagtggccaagcacgggcagaccgcgccggctcaccagcagtaa

SEQ ID NO: 6683 - protein, 434 aa, Pseudomonas putida
MRVLVLGSGVIGTASAYYLARQGFEVTVVDRQPAVAMETSFANAGQISPGYASPWAAPGVPLKAIKWLLERHAPLAIKLTGDVDQYLWMAQMLRNCTASRYAVNKERMVRLSEYSRDCLDELRAETGINYENRSLGTTQLFRTQAQVDAAAKDIAVLEQSGVPYELLDRDGIARVEPALAGVKDILAGALRLPNDQTGDCQLFTTKLADMALKLGVEFRFGQDIQRLDFAGDRINGVWIDGKLETADRYVLALGSYSPQMLKPLGIKAPVYPLKGYSLTVPITNGDMAPTSTILDETYKVAITRFDNRIRVGGMAEIAGFDLSLNPRRRETLEMIVNDLYPRGGDLSQASFWTGLRPATPDGTPIVGATAFRNLFLNTGHGTLGWTMACGSGRLLADLIARKKPQISAEGLDISRYGNSREVAKHGQTAPAHQQ

SEQ ID NO: 6684 - DNA, 1302 bp, Pseudomonas syringae pv
  CDS (1)..(1302): transl_table=11
atgcgcgttctggtccttggtagtggcgtaatcggtacaaccagtgcttattatctggcgcgtgccggcttccaggtgacagtggtcgatcgtcagccggcggtcggcatggaaaccagcttcgccaatgccggtcaggtctcgccgggctacgcctcgccttgggctgcgccgggtgtgccgctcaaggcaatcaaatggctgctgcagcgtcattcgcctctggcaatcaaagccaccgcagatattgatcaatacctgtggatggcgcaaatgcttcgcaattgcacggccaaccgctatgccgtcaacaaagagcgcatggtgcgtctgtccgaatacagccgcgattgccttgatgagctgcgcatcgaaaccggcattgcctatgaagggcgcagcctggggaccacccagttgtttcggacccaggcacaactggataacgccgccaaggatatcgccgtgcttgaacagtccggcgtgccttacgagctgctggaccgcgcaggcattgcccgtgtcgagcctgcgcttgccggtgtgaccggcatcctcagtggcgcactgcgcctgcccaacgaccagaccggcgattgccagttgttcaccacgcgcctggctcagatggctgtcgagctgggtgtcgagtttcgttacgggcagaacatcgaacgccttgagcatgcaggcgacaccgtcagtggcgtgtggattgatggtgtactggaaaccgctgaccgctacgtgctggcgctgggcagctattcgccgcagttgctcaagccgctgggcatcaaggcaccggtctacccgctcaagggctattcgctgaccgtgccgatcagcaacccggccatggcaccgacttcaaccattctcgatgaaacctacaaagtcgccatcacccgcttcgataaccggatccgggtcggcggcatggcggaaatcgccgggttcgatctctcgctcaacccgcgtcggcgtgaaacgctggagatgatcgtcggcgacctctatcctcagggcggcgacctgagccaggccagtttctggaccgggctgcgtccgactacacccgatggcacaccgatcgtgggtgcaacaccgttgcgcaacctgttcctcaataccggtcacggtacattgggctggacgatggcgtgcggttcaggccgcttgctggcagacctcattgcccgcaagagacctcagatcagtgccgcagggcttgatatttctcgttacggcaacccccaggagaatgcacagcatgtcaatccagcgccagctcaccaatga

SEQ ID NO: 6685 - protein, 433 aa, Pseudomonas syringae pv
MRVLVLGSGVIGTTSAYYLARAGFQVTVVDRQPAVGMETSFANAGQVSPGYASPWAAPGVPLKAIKWLLQRHSPLAIKATADIDQYLWMAQMLRNCTANRYAVNKERMVRLSEYSRDCLDELRIETGIAYEGRSLGTTQLFRTQAQLDNAAKDIAVLEQSGVPYELLDRAGIARVEPALAGVTGILSGALRLPNDQTGDCQLFTTRLAQMAVELGVEFRYGQNIERLEHAGDTVSGVWIDGVLETADRYVLALGSYSPQLLKPLGIKAPVYPLKGYSLTVPISNPAMAPTSTILDETYKVAITRFDNRIRVGGMAEIAGFDLSLNPRRRETLEMIVGDLYPQGGDLSQASFWTGLRPTTPDGTPIVGATPLRNLFLNTGHGTLGWTMACGSGRLLADLIARKRPQISAAGLDISRYGNPQENAQHVNPAPAHQ

SEQ ID NO: 6686 - DNA, 1302 bp, Pseudomonas syringae pv
  CDS (1)..(1302): transl_table=11
atgcgcgttctggtcctgggtagtggcgtcatcggtacaaccagtgcttattatctggcgcgtgccggtttccaggtgactgtcgttgaccgtcagcctgctgctgccatggaaaccagttttgccaatgccggccaggtttctccgggctatgcgtcgccatgggctgcgccgggtgttccgctcaaagccctcaaatggctgctgcagcgtcatgcgccattggcgatcaaggcaacggcagatatcgatcagtacctgtggatggcgcaaatgctgcgcaactgcacggccagccgctatgccatcaataaagagcgcatggtacgcctgtccgaatacagccgcgattgcctggatgaactgcgcctcgagaccggcattgcctacgaaggacgcagcctgggcaccacacagttgttccgtacccaggcccagctggataacgctgccaaggacatcgccgtgctcgagcagtccggtgtgccctatgaactgctcgatcgcgacggcattgcccgtgtcgagcccgcgctggccggcgtgaccggcatcctcagcggcgcgttgcgcctgcccaacgaccagactggtgactgtcagctgttcaccacgcgcctggcggaaatggccgtcgcgctgggtgtcgagttccgctacgggcagaacatcgaacgcctcgatcacgctggcgaccgcattaatggcgtgtggatcgacggcaagctggagaccgccgatcgttacgtactggcgctgggcagttactcgccgcagttgctcaagccgctgggcatcaaggcaccggtctatccgctgaaaggctattcgctgaccgtgccgatcaccaacccggacatggcaccgacttcgaccattctcgatgaaacctataaagtcgcgatcacccgtttcgacaatcggatccgcgtcggcggcatggcggaaatcgccggttttgacctgtcgctcaatccgcgtcgacgcgaaacactggagatgatcgtcggtgacctctatcctcaaggcggcgacctgacccaggccgatttctggaccgggttgcgtccgaccacgcccgacggtacaccgattgtgggtgcgacaccgttccgtaacctgttcctcaataccggccatggcaccctgggctggacgatggcgtgtggttccggtcgtttgctggcagacctcatcgcccgcaagacacctcgtatcagtgctgaaggccttgatatctctcgttacggcaatacccaggagaatgcacagcatgtccatccagcgccagctcaccaatga

SEQ ID NO: 6687 - protein, 433 aa, Pseudomonas syringae pv
MRVLVLGSGVIGTTSAYYLARAGFQVTVVDRQPAAAMETSFANAGQVSPGYASPWAAPGVPLKALKWLLQRHAPLAIKATADIDQYLWMAQMLRNCTASRYAINKERMVRLSEYSRDCLDELRLETGIAYEGRSLGTTQLFRTQAQLDNAAKDIAVLEQSGVPYELLDRDGIARVEPALAGVTGILSGALRLPNDQTGDCQLFTTRLAEMAVALGVEFRYGQNIERLDHAGDRINGVWIDGKLETADRYVLALGSYSPQLLKPLGIKAPVYPLKGYSLTVPITNPDMAPTSTILDETYKVAITRFDNRIRVGGMAEIAGFDLSLNPRRRETLEMIVGDLYPQGGDLTQADFWTGLRPTTPDGTPIVGATPFRNLFLNTGHGTLGWTMACGSGRLLADLIARKTPRISAEGLDISRYGNTQENAQHVHPAPAHQ

SEQ ID NO: 6688 - DNA, 1251 bp, Rhizobium leguminosarum bv
  CDS (1)..(1251): transl_table=11
atgaaggtcatcgttctaggagccggcatcgtcggcgttacatccgcttatcaactggccaaggccggtcatgacgtcacggtcgtcgaccggcagccgggtccggcactggagacgagctttgccaatgccggcgaagtctccttcggctattgctcgccatgggcagcgcccggcattcctatgaaggccatgaagtggctgttcatgaaacatgcgccgctcatcctgcgcccaaaattagacatggccatgctttcctggatggcgaggatgctgtcgaactgcacctccgagcgttacgcgatcaacaagagccgcatgctgcgccttgccgattacagccgcatcgcgctggccgatcttcgcgccgagaccggcatcgcctatgatgaacgcatgcagggaaccctgcagctgttccgcacgcagcagcagctcgaggcctcggcaaaggatgtcaaggcgctggctgccgacggcattccctatgaggtgctggaccgggacggctgcatccgcttcgaaccggcgctgaagcatgtgcgcgacaagattgtcggcggtctgctgacgccgaaggacgaaaccggcgattgcttcaagttcaccaatgcgctggcggccaaagccgaggcgctcggcgtccgtttcgcttacgggacgacgatcaaggcgctggatgtcgaggccggccgcgtgcgtggggtcatcaccgatcgtgaaaggatgagtgcggaggcggtggtggtcgcgctcggcagctattcgccgctgctgctcaagccgctcggcatccggctgccggtctatcccgtcaagggctattcgctcaccatcccgatcgccgatgcgtcacgcgcgccggaatcgactgtgatggacgagacctacaagatcgcgatcacccggctcggcgatcgcattcgtgtcggcggcatggctgaaatatcaggctataccaatgatctcggcctggcccgtcgcagcacgctggaatattcggtcaccgatctcttccccggcggcgatatttccaaggcctccttctggtccggcctgcgcccgatgacgcctgatggcacgccggttatcggcccgacaaaggtcgccggtctcttcctcaataccggccacggcacgctcggctggacgatgagcaccggttcggcgcggctcatcggcgatctcgtcggcggcggccagccggaaatcgacgcgagggatctcgccatcacccgctacggctga

SEQ ID NO: 6689 - protein, 416 aa, Rhizobium leguminosarum bv
MKVIVLGAGIVGVTSAYQLAKAGHDVTVVDRQPGPALETSFANAGEVSFGYCSPWAAPGIPMKAMKWLFMKHAPLILRPKLDMAMLSWMARMLSNCTSERYAINKSRMLRLADYSRIALADLRAETGIAYDERMQGTLQLFRTQQQLEASAKDVKALAADGIPYEVLDRDGCIRFEPALKHVRDKIVGGLLTPKDETGDCFKFTNALAAKAEALGVRFAYGTTIKALDVEAGRVRGVITDRERMSAEAVVVALGSYSPLLLKPLGIRLPVYPVKGYSLTIPIADASRAPESTVMDETYKIAITRLGDRIRVGGMAEISGYTNDLGLARRSTLEYSVTDLFPGGDISKASFWSGLRPMTPDGTPVIGPTKVAGLFLNTGHGTLGWTMSTGSARLIGDLVGGGQPEIDARDLAITRYG

SEQ ID NO: 6690 - DNA, 1311 bp, Rhodobacter sphaeroides
  CDS (1)..(1311): transl_table=11
atgaggatcgtggttctgggcgcgggcgtcgtcggtgtcacgtcggcttacgagctggcgcgggcggggcacgaggtgacggtggtggatcgccagcccgcggcggcgctcgagacctccttcgccaatgcgggcgagatcagcccgggctatgcctcgccctgggccgcgcccggcatccccgccaaggcgctgcgctggatgttcatgaagcacgcgccgctggtcatccggccgcggctcgacgcggcgcaggtccgcttccttctggcgatcctgcgcaactgcacgcctgcggcctatgcgcagaacaagggccgcatggtgcggcttgcggaatattcgcgcgactgcctcaccgatcttcgcgccacgaccggcctcgccttcgacgagcgccagcagggcacgcttcagctcttccgttcgcagaagcagctcgacgccgccgcgcgcgacatcgaggtgctgcgcgcaggcggggtgccgttcgagcttctggatgccgacggctgtctcgccgccgagccgggtctgcgggccgcgcgcgacaggatcgcgggcgggctgcgcctgacgggcgacgagacgggcgactgtttcaagttcacgcaagggctcgcgggtctggccgaggaaggcggcgtgcgcttccgctacggaaccggcgtcgagcgtctgagggtcgagggcggccgcgtcacgggcgtcgagaccaccaagggcacgttcctcgccgatgccgtcgtcgtggcgctcggctcccattcgcccgcgctggtcgcgccgctcgggctgcggctgcccgtctatccggtgaagggctattcgatcacggtgcccatcgtcgatgccgatcgggcgccggtctcgaccgtgatggacgagacctacaagatcgcgatcacgcggctcggcacccggatccgtgtgggcggcatggccgaggtggcgggcttcagcgccaccctgcccccggcacggcgcgagacgcttgccatgtcggtgaacgacctcttcggcggcgcgggcgatctgtcgcgcgcgagcttctggaccggcctccggccgatgacgccggacggcacgcccgtggtgggccgcacgccggtggcgggcctctggctcaacacggggcacgggacgctcggctggacgatggccgcaggctcggcgcgggtgctgtcggatctcatcgacgggcgcgcgcccgagatcgagagtgccgatctcggcatcgagcgctatgccgccccaggccgccgcgcgcggcccgcggtcaggctcaacccggcccggcaggcgggctga

SEQ ID NO: 6691 - protein, 436 aa, Rhodobacter sphaeroides
MRIVVLGAGVVGVTSAYELARAGHEVTVVDRQPAAALETSFANAGEISPGYASPWAAPGIPAKALRWMFMKHAPLVIRPRLDAAQVRFLLAILRNCTPAAYAQNKGRMVRLAEYSRDCLTDLRATTGLAFDERQQGTLQLFRSQKQLDAAARDIEVLRAGGVPFELLDADGCLAAEPGLRAARDRIAGGLRLTGDETGDCFKFTQGLAGLAEEGGVRFRYGTGVERLRVEGGRVTGVETTKGTFLADAVVVALGSHSPALVAPLGLRLPVYPVKGYSITVPIVDADRAPVSTVMDETYKIAITRLGTRIRVGGMAEVAGFSATLPPARRETLAMSVNDLFGGAGDLSRASFWTGLRPMTPDGTPVVGRTPVAGLWLNTGHGTLGWTMAAGSARVLSDLIDGRAPEIESADLGIERYAAPGRRARPAVRLNPARQAG

SEQ ID NO: 6692 - DNA, 1299 bp, Salmonella arizonae
  CDS (1)..(1299): transl_table=11
atgcgagttgtcatcctggggagtggcgtggttggcgtgaccagcgcctggtatttgagtcaggcgggacatgatgtcaccgtcatcgatcgcgaatccggcccggcgcaaggaaccagcgcggcgaatgccgggcaaatttcaccgggatacgcggcgccatgggcggcccccggtgtacctctgaaggcgataaaatggatgttccagcgccatgcgccgctggcggtgcgtcttgatggcaccccgtttcaactgaagtggatgtggcaaatgctgcgtaactgcgatacccggcattacatggaaaataaaggccgcatggtgcgtctggcggaatatagccgcgactgtctgaaaacgctgcgcgccgagactggtatcaaatatgaaggccgccaggggggaacgctacagctctttcgtaccgcgcgacagtatgagaatgccacccgtgatatcgcggtgctggaagatgctggggtgccgtatcaactcctggaatccagccgactggcggaggtcgaacccgctctggctgaggttgcgcataaattgaccggcgggctgcgcttgccgaatgatgaaaccggggactgtcagctctttacccagcgtctggcgcacatggcggagcaggcgggcgtaacctttcgctttaatactcctgtggaaaaattgctgtacgaaaatgaacagatttatggcgtaaaatgcgccgatgagatcattaaagcggatgcgtatgtcatggcgtttggatcgtattcaacggcgatgctcaaaggtattgttgatattccggtttatccgctgaaaggttattcattaaccatcccgattgtcgagccagatggcgcgccggtatcaactatccttgatgaaacctacaaaatcgccattacgcgttttgataagcgtattcgtgtgggaggaatggcggaaattgtgggatttaataccgacttacagcaaccgcgccgcgaaacgctggagatggttgtgcgcgatctttttccgcgcggcggtcgtattgagcaggccacattctggaccggtctgcgtcccatgacgccggacggcacgccggtagtgggacgcacccgttttaaaaatctgtggcttaataccggacacggcacgttaggctggacgatggcttgcggttcaggtcagttgttaagcgatatcttgtctggtcgtacgccagcgataccctacgacgatctgagcattgcgcgataccgttccgattttgcgccctcccgtcagcaacgtttgcatagcgcgcataactga

SEQ ID NO: 6693 - protein, 432 aa, Salmonella arizonae
MRVVILGSGVVGVTSAWYLSQAGHDVTVIDRESGPAQGTSAANAGQISPGYAAPWAAPGVPLKAIKWMFQRHAPLAVRLDGTPFQLKWMWQMLRNCDTRHYMENKGRMVRLAEYSRDCLKTLRAETGIKYEGRQGGTLQLFRTARQYENATRDIAVLEDAGVPYQLLESSRLAEVEPALAEVAHKLTGGLRLPNDETGDCQLFTQRLAHMAEQAGVTFRFNTPVEKLLYENEQIYGVKCADEIIKADAYVMAFGSYSTAMLKGIVDIPVYPLKGYSLTIPIVEPDGAPVSTILDETYKIAITRFDKRIRVGGMAEIVGFNTDLQQPRRETLEMVVRDLFPRGGRIEQATFWTGLRPMTPDGTPVVGRTRFKNLWLNTGHGTLGWTMACGSGQLLSDILSGRTPAIPYDDLSIARYRSDFAPSRQQRLHSAHN

SEQ ID NO: 6694 - DNA, 1299 bp, Salmonella choleraesuis
  CDS (1)..(1299): transl_table=11
atgcgagttgtcatcctggggagtggcgtagttggcgtgaccagcgcctggtatttgagtcaggcggggcatgatgtcaccgtcatcgatcgcgaatccggcccggcgcaagaaaccagcgcggcgaatgccggacaaatttcaccgggatatgcggcgccctgggcggcccctggcgtaccgctgaaggcgataaaatggatgttccagcgccatgcgccgctggcggtgcgtctggatggcaccccgtttcaactgaagtggatgtggcaaatgctgcgtaactgcgatacccggcattatatggaaaataaaggccgcatggtgcgtctggcggaatatagtcgcgactgtctgaaaacgctacgcgccgtgaccggtatcgaatatgaaggctgccaggggggaacgctgcaactctttcgcaccgcgcaacagtatgagaacgccacccgtgatatcgccgtgctggaagatgccggggtgccgtatcagctcctggaagccagccgactggcggaagttgaacccgctctggctgaggttgcgcataaattaaccggcggactgcgcttaccgaatgatgaaaccggggactgtcagctctttacccagcgtctggcgcgcatggcggagcaggcgggcgtaacctttcgctttaatactcccgtggaaaaattactgtacgaaaatgatcagatttacggcgtgaaatgcgccgatgagatcattaaagcagatgcgtatgttatggcgtttggatcgtattcgacggcgatgcttaaaggcattgttgatatcccggtgtatccgctgaaaggctattcattaaccatcccaatcgtcgagccagacggcgcgccggtatcaacgattcttgatgaaacctacaaaatcgctattacgcgttttgataagcgtattcgcgtggggggaatggcagaaatcgtgggctttaataccgacttactgcaaccgcgccgcgagacgctggagatggttgtgcgcgatctctttccgcgcggcggtcatattgagcaggccacattctggaccggcctgcgccccatgacgccggacggcacgccggtagtaggacgtacccgttataaaaatctgtggcttaatactggacacggcaccttaggctggacgatggcctgcggttcaggccagttgttaagcgatatcttgtcgggtcgtacgccagcgataccctacgacgatctgagcgtggcgcgataccgttccgattttacgcccacccgcccgcaacgtttgcatagcgcgcataactga

SEQ ID NO: 6695 - protein, 432 aa, Salmonella choleraesuis
MRVVILGSGVVGVTSAWYLSQAGHDVTVIDRESGPAQETSAANAGQISPGYAAPWAAPGVPLKAIKWMFQRHAPLAVRLDGTPFQLKWMWQMLRNCDTRHYMENKGRMVRLAEYSRDCLKTLRAVTGIEYEGCQGGTLQLFRTAQQYENATRDIAVLEDAGVPYQLLEASRLAEVEPALAEVAHKLTGGLRLPNDETGDCQLFTQRLARMAEQAGVTFRFNTPVEKLLYENDQIYGVKCADEIIKADAYVMAFGSYSTAMLKGIVDIPVYPLKGYSLTIPIVEPDGAPVSTILDETYKIAITRFDKRIRVGGMAEIVGFNTDLLQPRRETLEMVVRDLFPRGGHIEQATFWTGLRPMTPDGTPVVGRTRYKNLWLNTGHGTLGWTMACGSGQLLSDILSGRTPAIPYDDLSVARYRSDFTPTRPQRLHSAHN

SEQ ID NO: 6696 - DNA, 1299 bp, Salmonella paratyphi A
  CDS (1)..(1299): transl_table=11
atgcgagttgtcatcctggggagtggcgtagttggcgtgaccagcgcctggtacttgagtcaggcggggcatgatgtcaccgtcatcgatcgcgaatccggcccggcgcaagaaaccagcgcggcgaatgccggacaaatttcaccgggatatgcggcaccctgggcggcccctggcgtaccgctgaaggcgataaaatggatgttccagcgccatgcgccgctggcggtgcgtctggatggcaccccgtttcaactgaagtggatgtggcaaatgctgcgtaactgcgatacccggcattatatggaaaataaaggccgcatggtgcgtctggcggaatatagtcgcgactgcctgaaaacgctacgcgccgcgaccggtatcgaatatgaaggccgccaggggggaacgctacaactcttccgcaccgcgcaacagtatgagaacgccacccgtgatatcgccgtgctggaagatgccggggtgccgtatcagctcctggaagccagccgactggcggaagttgaacccgctctggctgaggttgcgcataaattaaccggcgggctgcgcttaccgaatgatgaaaccggggactgtcagctctttacccagcgtctggcgcgcatggcggagcaggcgggcgtaacctttcgctttaatactcccgtggaaaaattactgtacgaaaatgatcagatttacggcgtgaaatgcgccgatgagatcattaaagcagatgcgtatgtcatggcgtttggatcgtattcgacggcgatgcttaaaggcatcgttgatatcccggtgtatccgctgaaaggctattcattaaccatcccaatcgtcgagccagacggcgcgccggtatcgacgattcttgatgaaacctacaaaatcgctattacgcgttttgataagcgtattcgcgtggggggaatggcggaaatcgtgggctttaataccgacttactgcaaccgcgccgcgagacgctggagatggttgtgcgcgatctttttccgcgcggcggtcatattgagcaggccacattctggaccggcctgcgccccatgacgccggacggcacgccggtagtaggacgcacccgttataaaaatctgtggcttaatactggacacggcaccttaggctggacgatggcctgcggttcaggccagttgttaagcgatatcttgtcgggtcgtacgccagcgataccctacgacgatctgagcgtggcgcgataccgttccgattttacgcccacccgcccgcaacgtttgcatagcgcgcataactga

SEQ ID NO: 6697 - protein, 432 aa, Salmonella paratyphi A
MRVVILGSGVVGVTSAWYLSQAGHDVTVIDRESGPAQETSAANAGQISPGYAAPWAAPGVPLKAIKWMFQRHAPLAVRLDGTPFQLKWMWQMLRNCDTRHYMENKGRMVRLAEYSRDCLKTLRAATGIEYEGRQGGTLQLFRTAQQYENATRDIAVLEDAGVPYQLLEASRLAEVEPALAEVAHKLTGGLRLPNDETGDCQLFTQRLARMAEQAGVTFRFNTPVEKLLYENDQIYGVKCADEIIKADAYVMAFGSYSTAMLKGIVDIPVYPLKGYSLTIPIVEPDGAPVSTILDETYKIAITRFDKRIRVGGMAEIVGFNTDLLQPRRETLEMVVRDLFPRGGHIEQATFWTGLRPMTPDGTPVVGRTRYKNLWLNTGHGTLGWTMACGSGQLLSDILSGRTPAIPYDDLSVARYRSDFTPTRPQRLHSAHN

SEQ ID NO: 6698 - DNA, 1299 bp, Salmonella paratyphi B
  CDS (1)..(1299): transl_table=11
atgcgagttgtcatcctggggagtggcgtagttggcgtgaccagcgcctggtacttgagtcaggcggggcatgatgtcaccgtcatcgatcgcgaatccggcccggcgcaagaaaccagcgcggcgaatgccggacaaatttcaccgggatatgcggcgccctgggcggcccctggcgtaccgctgaaggcgataaaatggatgttccagcgccatgcgccgctggcggtgcgtctggatggcaccccatttcaactgaagtggatgtggcaaatgctgcgtaactgcgatacccggcattatatggaaaataaaggccgcatggtgcgcctggcggaatatagtcgcgactgtctgaaaacgctacgcgccgcgaccggtatcgaatatgaaggccgccaggggggaacgctacaactcttccgcaccgcgcaacagtatgagaacgccacccgtgatatcgccgtgctggaagatgccggggtgccgtatcagctcctggaatccagccgactggcggaagttgaacccgctctggctgaggttgcgcataaattaaccggcggactgcgcttaccgaatgatgaaaccggggactgtcagctctttacccagcgtctggcgcgcatggcggagcaggcgggcgtaacctttcgctttaatactcccgtggaaaaattactgtacgaaaatgatcagatttacggcgtgaaatgcgccgatgagatcattaaagcagatgcgtatgttatggcgtttggatcgtattcgacggcgatgcttaaaggcattgttgatatcccggtgtatccgctgaaaggctattcattaaccatcccaatcgtcgagccagacggcgcgccggtatcgacgattcttgatgaaacctacaaaatcgctattacgcgttttgataagcgtattcgcgtggggggaatggcggaaatcgtgggctttaataccgacttactgcaaccgcgccgcgagacgctggagatggttgtgcgcgatctctttccgcgcggcggtcatattgagcaggccacattctggaccggcctgcgccccatgacgccggacggcacgccggtagtaggacgcacccgttataaaaatctgtggcttaatactggacacggcaccttaggctggacgatggcctgcggttcaggccagttgttaagcgatatcttgtcgggtcgtacgccagcgataccctacgacgatctgagcgtggcgcgataccgttccgattttacgcccacccccccgcaacgtttgcatagcgcgcataactga

SEQ ID NO: 6699 - protein, 432 aa, Salmonella paratyphi B
MRVVILGSGVVGVTSAWYLSQAGHDVTVIDRESGPAQETSAANAGQISPGYAAPWAAPGVPLKAIKWMFQRHAPLAVRLDGTPFQLKWMWQMLRNCDTRHYMENKGRMVRLAEYSRDCLKTLRAATGIEYEGRQGGTLQLFRTAQQYENATRDIAVLEDAGVPYQLLESSRLAEVEPALAEVAHKLTGGLRLPNDETGDCQLFTQRLARMAEQAGVTFRFNTPVEKLLYENDQIYGVKCADEIIKADAYVMAFGSYSTAMLKGIVDIPVYPLKGYSLTIPIVEPDGAPVSTILDETYKIAITRFDKRIRVGGMAEIVGFNTDLLQPRRETLEMVVRDLFPRGGHIEQATFWTGLRPMTPDGTPVVGRTRYKNLWLNTGHGTLGWTMACGSGQLLSDILSGRTPAIPYDDLSVARYRSDFTPTPPQRLHSAHN

SEQ ID NO: 6700 - DNA, 1299 bp, Salmonella typhi
  CDS (1)..(1299): transl_table=11
atgcgagttgtcatcctggggagtggcgtagttggcgtgaccagcgcctggtacttgagtcaggcggggcatgatgtcaccgtcatcgatcgcgaatccggcccggcgcaagaaaccagcgcggcgaatgccggacaaatttcaccgggatatgcggcaccctgggcggcccctggcgtaccgctgaaggcgataaaatggatgttccagcgccatgcgccgctggcggtgcgtctggatggcaccccatttcaactgaagtggatgtggcaaatgctgcgtaactgcgatacccggcattatatggaaaataaaggccgcatggtgcgtctggcggaatatagtcgcgactgcctgaaaacgctacgcgccgcgaccggtatcgaatatgaaggccgccaggggggaacgctacaactcttccgcaccgcgcaacagtatgagaacgccacccgtgatatcgccgtgctggaagatgccggggtgccgtatcagctcctggaagccagccgactggcggaagttgaacccgctctggctgaggttgcgcataaattaaccggcgggctgcgcttaccgaatgatgaaaccggggactgtcagctctttacccagcgtctggcgcgcatggcggagcaggcgggcgtaacctttcgctttaatactcccgtggaaaaattactgtacgaaaatgatcagatttacggcgtgaaatgcgccgatgagatcattaaagcagatgcgtatgtcatggcgtttggatcgtattcgacggcgatgcttaaaggcattgttgatatcccggtgtatccgctgaaaggctattcattaaccatcccaatcgtcgagccagacggcgcgccggtatcgacgattcttgatgaaacctacaaaatcgctattacgcgttttgataagcgtattcgcgtggggggaatggcggaaatcgtgggctttaataccgacttactgcaaccgcgccgcgagacgctggagatggttgtgcgcgatctttttccgcgcggcggtcatattgagcaggccacattctggaccggcctgcgccccatgacgccggacggcacgccggtagtaggacgcacccgttataaaaatctgtggcttaatactggacacggcaccttaggctggacgatggcctgcggttcaggccagttgttaagcgatatcttgttgggtcgtacgccagcgataccctacgacgatctgagcgtggcgcgataccgttccgattttacgcccacccgcccgcaacgtttgcatagcgcgcataactga

SEQ ID NO: 6701 - protein, 432 aa, Salmonella typhi
MRVVILGSGVVGVTSAWYLSQAGHDVTVIDRESGPAQETSAANAGQISPGYAAPWAAPGVPLKAIKWMFQRHAPLAVRLDGTPFQLKWMWQMLRNCDTRHYMENKGRMVRLAEYSRDCLKTLRAATGIEYEGRQGGTLQLFRTAQQYENATRDIAVLEDAGVPYQLLEASRLAEVEPALAEVAHKLTGGLRLPNDETGDCQLFTQRLARMAEQAGVTFRFNTPVEKLLYENDQIYGVKCADEIIKADAYVMAFGSYSTAMLKGIVDIPVYPLKGYSLTIPIVEPDGAPVSTILDETYKIAITRFDKRIRVGGMAEIVGFNTDLLQPRRETLEMVVRDLFPRGGHIEQATFWTGLRPMTPDGTPVVGRTRYKNLWLNTGHGTLGWTMACGSGQLLSDILLGRTPAIPYDDLSVARYRSDFTPTRPQRLHSAHN

SEQ ID NO: 6702 - DNA, 1266 bp, Vibrio cholerae
  CDS (1)..(1266): transl_table=11
atgatggaagttttggttttaggcagtggtgtggtcggattaaccagcgcttggtatcttgcgcaggcaggccatgatgtcaccgtcgtcgatcgccaaccacgtggcgccgaagaaaccagctttgcgaacgcagggcaaatctcctatggctactcttccccttgggctgcgccgggcattccgcaaaaagcgctaaaatggatgctggaaaaacatgcaccactcaaaatccaaccctcgcttgatcctgcattactgagctggatgggcaaaatgctgctcaactgccagttgtcgcgctaccaagttaacaaatcgcggatgttggcgattgccaactatagccgcgagtgtttaaaagcgctcaatcaaacctattcgctcgattaccaaggccgccaacgcggtactttgcaggtatttcgtgatgaaaagcagttaaccgcgattgaaaaagacatgcagcttctggcgcaaagtggcgtacgttttgagttactgaatgtcgcccagtgtctgactcatgaaccggggctcgcccctgtgcaggaaaaactggtgggcggcctatggctgccggatgacgaaacgggcgattgttacttgttttgccaacagttaaccgaactggccaagcaacagggtgtacgttttcattttgactgccacattcagcaactggtttgtgagggcaaaaagatcatcggtgtccaaaccgatttaggcttgctcaaagcggatgcttatgtagtcgcattgggcagttattcgacctcattgcttaaaccgctggggattgaaattcctgtctacccagtaaaaggatactcgttaaccttaccgattattgatgaaaaatttgcgccgcaatcgaccgtgatggatgaaacctataaggttgcactgactcgcttttccgatcggatccgcgtggcgggaacggctgagttagcgggttttgatccagcgattccagaagcacgtaaagcgacgattgagatggtcgcgcgtgatttgtttccgcacggcggcgattttgcaaaagggcaattctggaccggttttcgtcccatgactcccgatggcacaccaatcatcggtgccactccctataccaatctctatacaaatactgggcatggcacactgggatggaccatggcttgcggatccgccagtattctggccgatgtgctcacccatggcgaaagcccgctcagccgtttggggctagatctgttccgttatccgaaagcatcttaa

SEQ ID NO: 6703 - protein, 421 aa, Vibrio cholerae
MMEVLVLGSGVVGLTSAWYLAQAGHDVTVVDRQPRGAEETSFANAGQISYGYSSPWAAPGIPQKALKWMLEKHAPLKIQPSLDPALLSWMGKMLLNCQLSRYQVNKSRMLAIANYSRECLKALNQTYSLDYQGRQRGTLQVFRDEKQLTAIEKDMQLLAQSGVRFELLNVAQCLTHEPGLAPVQEKLVGGLWLPDDETGDCYLFCQQLTELAKQQGVRFHFDCHIQQLVCEGKKIIGVQTDLGLLKADAYVVALGSYSTSLLKPLGIEIPVYPVKGYSLTLPIIDEKFAPQSTVMDETYKVALTRFSDRIRVAGTAELAGFDPAIPEARKATIEMVARDLFPHGGDFAKGQFWTGFRPMTPDGTPIIGATPYTNLYTNTGHGTLGWTMACGSASILADVLTHGESPLSRLGLDLFRYPKAS

SEQ ID NO: 6704 - DNA, 1254 bp, Vibrio vulnificus
  CDS (1)..(1254): transl_table=11
atgaaagcagtggtattgggcagtggtgtggttggcttgatgagcgcgtggtatctacaaaaagcgggctatcaggtgaccgttgtcgaccgccaagcgcgcagcgcggaagaaaccagttttgccaatgcaggacagatctcttacggctactcttcgccttgggctgcaccgggcattccccaaaaagcgcttcgctggctgatggaagagcacgcaccactgaaaatcaaaccctctcttgatcctcaactgctgaaatgggcgacacaaatgttggccaactgccaactcagtcgttatcaagtgaacaaagcgaggatgctggcaattgccaatcacagccgtgaatgccttagccaacttcgccaagagcacgatattgaataccaaggccgccaacaaggcacgttgcaggtttttcgtactcaaaagcaattgatcgccattgaaaaagacatcgcactgcttgagcaaagcggtacgcgctatcaacgtatgagtgtcgatgagtgcattaagcaagagccggggttggcagccgtgagccataaactgacgggcggtctctatctacctgacgatgaaacgggcgattgctatttgttttgccaacagatgacagaactggcacaacagcaaggcgtaacttttttgttcaatacgaacgtgaagaaagtcaatactcagggtaaccaagtagtgagcgtgtctactgatgctggcgagttgcaagcggatgtatacgtggtggccatgggcagttattccaccgcgctactggcgaaactggggatcacgatacctgtttatccggtcaaaggttattcactgaccgttccgatcaccgatgaaagccaagctccggtttctacggtcatggatgaaacctataaagtggcgctgactcgatttgatgaccgtatccgcgtggcaggcacggcagagctggccggattcgatcctgcaattcctgagaaacgcaaagcaaccatttctatggtggtaaacgatcttttccctcatagcggtgattttgccaaggcggaattctggacaggttttcgccctatgacaccagacggcacaccactcatcggcaaaaccccgctcaagaatctttataccaataccggacatggcaccttaggttggaccatggcgtgtggctcaggtcacttgctgagccaaatcatcactggcgagcaatcggagaatccggcagggttggatctcttccgctacgccagctaa

SEQ ID NO: 6705 - protein, 417 aa, Vibrio vulnificus
MKAVVLGSGVVGLMSAWYLQKAGYQVTVVDRQARSAEETSFANAGQISYGYSSPWAAPGIPQKALRWLMEEHAPLKIKPSLDPQLLKWATQMLANCQLSRYQVNKARMLAIANHSRECLSQLRQEHDIEYQGRQQGTLQVFRTQKQLIAIEKDIALLEQSGTRYQRMSVDECIKQEPGLAAVSHKLTGGLYLPDDETGDCYLFCQQMTELAQQQGVTFLFNTNVKKVNTQGNQVVSVSTDAGELQADVYVVAMGSYSTALLAKLGITIPVYPVKGYSLTVPITDESQAPVSTVMDETYKVALTRFDDRIRVAGTAELAGFDPAIPEKRKATISMVVNDLFPHSGDFAKAEFWTGFRPMTPDGTPLIGKTPLKNLYTNTGHGTLGWTMACGSGHLLSQIITGEQSENPAGLDLFRYAS

SEQ ID NO: 6706 - DNA, 1311 bp, Vibrio vulnificus
  CDS (58)..(1311): transl_table=11
ttgttaccaagttgtaaacctaagaaactcacgctgtttctaatcaggagaaaatcgatgaaagcagtggtattgggcagtggtgtggttggcttgatgagcgcgtggtatctacaaaaatcgggctatcaggtgaccgttgtcgaccgccaagcacgcagcgcggaagaaaccagttttgccaatgcaggacagatctcttacggctactcttcgccttgggctgcaccgggcattccccaaaaagcgcttcgctggctgatggaagagcacgcaccactgaaaatcaaaccctctcttgatcctcaactgctgaaatgggcgacacaaatgttggccaattgccaactcagtcgttatcaagtgaacaaagcaaggatgttggcaattgccaatcacagccgcgaatgccttagccaactgcgccaagagcacgatattgaataccaaggccgccaacaaggcacattgcagatttttcgtactcaaaaacagttgatcgccattgaaaaagacatcgcactgcttgagcaaagcggtacgcgctatcaacgtatgagtgtcgatgagtgcattaagcaagagccggggttggcagccgtgagccataaactgacaggcggtctctatctacctgacgatgaaacgggcgattgctatttgttttgccaacagatgacagaactggcacaacagcaaggcgtgacctttttgttcaatacgaacgtgaagaaagtcaacgctcaaggtaaccaagtagtgagtgtgtctactgatgctggcgaattgcaagccgatgtatacgtggtggccatgggcagttattccaccgcactactggcacaactggggatcacgatacctgtttatcctgtcaaaggttattcactgaccgttccgatcaccgatgaaagccaagctccggtttctacggtcatggatgaaacctataaagtggcgctgactcgatttgatgaccgcattcgcgtggcaggcacggcagagctcgcggggttcgatcctgcgattcctgagaaacgcaaagcaaccatttctatggtggtaaacgatcttttccctcatagcggtgattttgccaaggcggaattctggacaggttttcgccctatgacaccagacggcacaccactcatcggcaaaactccgctcaagaatctttataccaataccggacatggcaccttaggttggaccatggcgtgtggctcaggtcacttgctgagccaaatcattactggcgagcaatcggagaatcaggcagggttggatctcttccgctacgccagctaa

SEQ ID NO: 6707 - protein, 417 aa, Vibrio vulnificus
MKAVVLGSGVVGLMSAWYLQKSGYQVTVVDRQARSAEETSFANAGQISYGYSSPWAAPGIPQKALRWLMEEHAPLKIKPSLDPQLLKWATQMLANCQLSRYQVNKARMLAIANHSRECLSQLRQEHDIEYQGRQQGTLQIFRTQKQLIAIEKDIALLEQSGTRYQRMSVDECIKQEPGLAAVSHKLTGGLYLPDDETGDCYLFCQQMTELAQQQGVTFLFNTNVKKVNAQGNQVVSVSTDAGELQADVYVVAMGSYSTALLAQLGITIPVYPVKGYSLTVPITDESQAPVSTVMDETYKVALTRFDDRIRVAGTAELAGFDPAIPEKRKATISMVVNDLFPHSGDFAKAEFWTGFRPMTPDGTPLIGKTPLKNLYTNTGHGTLGWTMACGSGHLLSQIITGEQSENQAGLDLFRYAS

SEQ ID NO: 6708 - DNA, 1290 bp, Xanthomonas axonopodis pv
  CDS (1)..(1290): transl_table=11
atgcgtgtgctcattctcggtagcggcgtcatcggcgtgaccagtgcgtggtacctggcgcaggccggttgcgaagtgaccgtggtcgaccgccagccggcggcggcgctggagaccagctacgccaacgccggccagctgtcgttcggctacacctccccctgggccgcacccggcgtgcctggcaaggcggtgaagtggctgttcgagcagcacgcaccgctgtcgatccgccccacccgcgacctgcgccagctggcctggctgagccagatgctgcgcaactgcaccgccgagcgctatgcggtgaacaaggcgcgcatggtgcgcatgtccgactacagccgcgattgcctcaacgccttgcgcgccgagaccggcatcgaattcgaaggccgccagctgggcaccacgcagttgttccgcacccagcagcagctggacgcggccgcgcaggacatcgaagtgctggcccagtacggggtgccgtacgagctgctgagcccggcgcagattgcgcagttcgaacctggcctggccggcggcggcgcgcagatggccggcgcgttgcgcctgcccgaagaccagaccggtgactgccgcctgtttacccaacgcctggccgaactggccacgcaggcaggtgtcacgttccgctatgggcagcagatcgagcggctggagcatgccggcggccaaatcactggcgtgcagatcgatggccgcatcgagaccgccgaccgctacgtgctggcgctgggcagctattcggccgacgtgctgctctcgctcggcctgcatttgccggtgtacccgctcaagggctattcgctgaccatcccgatcgtcgatgcgcagcgcgcgccgacctctacggtgctggacgagagctacaagatcgcgctcacccgtttcgacgaccgtatccgcgtcggcggcatggccgaggtggccggcttcgacatgtccttgaatccgcgtcgtcgcgccaccctggaaatggtggtcaacgacctgttccccggcggcggcgatctggcccaggccgagttctggaccggcttgcggccggccaccccggatggcaccccggtggtcggcgccacgccgtatgccaacctgttcctcaacaccggtcacggcacgctgggctggaccatggcctgcggttccgggcgctatctggccgacctcatgcagggccgcacgcccgagatcgataccgaaggcctggacgtgttccgctacctgtcgccgcgcagcgtgcgcccgcatcgggaggccgcgtag

SEQ ID NO: 6709 - protein, 429 aa, Xanthomonas axonopodis pv
MRVLILGSGVIGVTSAWYLAQAGCEVTVVDRQPAAALETSYANAGQLSFGYTSPWAAPGVPGKAVKWLFEQHAPLSIRPTRDLRQLAWLSQMLRNCTAERYAVNKARMVRMSDYSRDCLNALRAETGIEFEGRQLGTTQLFRTQQQLDAAAQDIEVLAQYGVPYELLSPAQIAQFEPGLAGGGAQMAGALRLPEDQTGDCRLFTQRLAELATQAGVTFRYGQQIERLEHAGGQITGVQIDGRIETADRYVLALGSYSADVLLSLGLHLPVYPLKGYSLTIPIVDAQRAPTSTVLDESYKIALTRFDDRIRVGGMAEVAGFDMSLNPRRRATLEMVVNDLFPGGGDLAQAEFWTGLRPATPDGTPVVGATPYANLFLNTGHGTLGWTMACGSGRYLADLMQGRTPEIDTEGLDVFRYLSPRSVRPHREAA

SEQ ID NO: 6710 - DNA, 1308 bp, Xylella fastidiosa
  CDS (1)..(1308): transl_table=11
atgcgcgtgctcattttgggaagcggcgtgatcggtaccaccagtgcctggtatctgtccaaggctggttgtgaggtagtggtggtggatcgtcagtctggtgctggtttggagaccagttatgccaatggtggtcagctgtcttttggttatacctcgccctgggcggcccccggtgttccgttgaaggctgtgagatggttgtttgagcggcatgcgccgctgtcgattcgtccgacgactgattggaatcagtatgtttggttggcacggatgttgcgtcattgctctgctgagcgctatgcagtgaataagtcgcggatgttgcgtctcagtgagtacagtcgtgaagcgttggaggcgttatctgctgaaactgggatcacgttcgaggggcgtcatttagggactattcagttatttcggacgcagcagcagcttgatgtggttgttcgggacatcgaactactcactcagtacggtattccatacgaggtgctcagtccgagtcagatttccaagtttgagcctggtttggccgatggtagcgtccgttttccgggtgcgctgcgcttgcctcatgatcagactggggattgctgtttgttcacgcaacggttggctgcgttggcggctaagcgtggggttgagttccgttacggttgtacggtgcaacgcttggaagtggatggtcctcgtgtgacgggcgcttggatcaatggagcgttggagcgtgccgattgttgtgtggttgcgctcggtagttattcgccgctgttattggcgccgttgggcctgcgtttgccagtgtatccgttgaaagggttttcgttgacgttgccgatgattgatgcgtcgcgtgcgcccgtttcgacggtgcttgacgaaagttacaaggttgcggttactcgtttcgatgaacgtatccgtgtggcgggtatggcagaggtctccggttacgatgtgtcgttgaatccacgtcgccgtgcgacgttggagatggtggtgcaggatgtgtaccctggctgcggtgatttggggcgtggcgagttttggactgggctgcgcccggcgacgccggatgggacgccggtgatcggtgcgacgccctatcagggtttgtttcttaatacggggcacggcacgcttggttggacgatgtcatccggttcaggccgttatttggccgatttgatatgttgtcgaccttgtgaaatctccagtgaagggttggatatgttccgttacttggtgtcgacgataccctgcccgcaagagtgtgctccgtgcgtcccgcccacgccgtaa

SEQ ID NO: 6711 - protein, 435 aa, Xylella fastidiosa
MRVLILGSGVIGTTSAWYLSKAGCEVVVVDRQSGAGLETSYANGGQLSFGYTSPWAAPGVPLKAVRWLFERHAPLSIRPTTDWNQYVWLARMLRHCSAERYAVNKSRMLRLSEYSREALEALSAETGITFEGRHLGTIQLFRTQQQLDVVVRDIELLTQYGIPYEVLSPSQISKFEPGLADGSVRFPGALRLPHDQTGDCCLFTQRLAALAAKRGVEFRYGCTVQRLEVDGPRVTGAWINGALERADCCVVALGSYSPLLLAPLGLRLPVYPLKGFSLTLPMIDASRAPVSTVLDESYKVAVTRFDERIRVAGMAEVSGYDVSLNPRRRATLEMVVQDVYPGCGDLGRGEFWTGLRPATPDGTPVIGATPYQGLFLNTGHGTLGWTMSSGSGRYLADLICCRPCEISSEGLDMFRYLVSTIPCPQECAPCVPPTP

SEQ ID NO: 6712 - DNA, 1308 bp, Xylella fastidiosa
  CDS (1)..(1308): transl_table=11
atgcgcgtgctcattttgggaagcggcgtgatcggtaccaccagtgcctggtatctgtccaaggctggttgtgaggtagtggtggtggatcgtcagtctggtgctggtctggagaccagttatgccaatggtggtcagctgtcttttggttatacctcgccctgggcggcccccggtgttccgttgaaggctgtgaggtggttgtttgagcggcatgcgccgctgtcgattcgtccgacgactgattggaatcagtatgtttggttggcacggatgttgcgccattgctctgctgagcgctatgcagtgaataagtcgcggatgttgcgtctcagtgagtacagtcgtgaagcgttggaggcgttatctgctgaaactgggatcacgttcgaggggcgccgtttagggactattcagttatttcggacgcagcagcagcttgatggggctgttcgggatatcgaactactcactcagtacggtattccatacgaggtgctcagtccgcatcagcttgctaagtttgagcctggtttggccgatggtagcgtccgttttgtgggtgcgctgcgcttgcctcatgatcagactggggattgttgtttgttcacgcaacggttggctgcgttggcggctaagcgtggggttgagttccgttacggttgtacggtgcaacgcttggaagtggatggtcctcgtgtgacgggtgcttggatcaatggagcgttggagcgtgccgattgttgtgtggttgcgctcggtagttattcgccgctgttattggcgccgttgggcttgcgtttgccagtgtatccgttgaaagggttttcgttgacgttgccgatgattgatgcgtcgcgtgcgcccgtttcgacggtgcttgacgaaagttacaaggttgcggttactcgtttcgatgaacgtatccgtgtggcgggtatggcagaggtctctggttacgatgtgtcgttgaatccacgtcgccgttcgacgttggagatggtggtgcaggatgtgtaccctgggtgcggtgatttggggcgtggcgagttttggactgggctgcgcccggcgacgccggatgggaccccggtgatcggtgcgacgccctatcagggtttgtttcttaatactgggcacggcacgcttggttggacgatgtcatccggttcaggccgttatttagccgatttgatatgttgtcgcccttgtgaaatctccagtgaagggttggatatgttccgttacttggtgtcgacgataccttgcccgcaagagtgtgctccgtgcgtcccgcccacgccgtaa

SEQ ID NO: 6713 - protein, 435 aa, Xylella fastidiosa
MRVLILGSGVIGTTSAWYLSKAGCEVVVVDRQSGAGLETSYANGGQLSFGYTSPWAAPGVPLKAVRWLFERHAPLSIRPTTDWNQYVWLARMLRHCSAERYAVNKSRMLRLSEYSREALEALSAETGITFEGRRLGTIQLFRTQQQLDGAVRDIELLTQYGIPYEVLSPHQLAKFEPGLADGSVRFVGALRLPHDQTGDCCLFTQRLAALAAKRGVEFRYGCTVQRLEVDGPRVTGAWINGALERADCCVVALGSYSPLLLAPLGLRLPVYPLKGFSLTLPMIDASRAPVSTVLDESYKVAVTRFDERIRVAGMAEVSGYDVSLNPRRRSTLEMVVQDVYPGCGDLGRGEFWTGLRPATPDGTPVIGATPYQGLFLNTGHGTLGWTMSSGSGRYLADLICCRPCEISSEGLDMFRYLVSTIPCPQECAPCVPPTP

SEQ ID NO: 6714 - DNA, 1299 bp, ESCHERICHIA COLI
  CDS (1)..(1299): transl_table=11
atgcgagttgtcatactgggaagtggtgtggtaggcgttgccagcgcctggtacttaaatcaggcaggacatgaggtcaccgtcattgatcgggagccgggggccgccctggaaaccagtgccgcgaatgccgggcaaatctcccccggatatgctgcaccgtgggcggcaccaggtgtgcctttaaaagcgattaaatggatgttccagcgccatgcgccgctggcggttcgtctcgacggtacgcagttccagttgaaatggatgtggcaaatgttacgtaactgcgacaccagccactacatggaaaacaaagggcggatggtgcgtctggcggaatacagccgtgattgcctgaaagcattgcgcgccgaaaccaatattcagtatgaagggcgtcagggtgggacgctgcaactgttccgtaccgaacaacagtatgaaaatgcgacccgcgatatcgccgtgctggaagatgccggcgtaccgtatcagctgctggaatccagccgcctggcggaagtggagcccgcgctggcagaagtggcgcacaaactgacgggcggcctgcagttacccaatgatgaaaccggagactgtcagctatttacccagaatctggcgcggatggcggagcaggcgggggttaaattccgctttaatacgcccgttgaccaactgctttgcgacggcgagcaaatctacggcgtgaagtgtggcgatgaagtgattaaggccgatgcgtatgtgatggcgtttggttcttactcgacggcgatgctcaaaggcattgttgatattccggtgtatccgctgaaaggctactcgctgaccattccaattgcgcaggaagatggtgcgccggtatccaccattcttgatgaaacctacaaaatcgccattacccgtttcgataaccgcattcgtgttggcggaatggcggagattgttggttttaataccgagctgttgcaaccgcgtcgtgaaacgctggagatggtggttcgcgatctctatccacgcggcggtcatgtcgagcaggcgactttctggactggtctgcgcccgatgacgccagacggcacgccggttgtcgggcgtacacgctttaaaaatctgtggctgaataccggtcacggcacgctcggctggacgatggcttgcggttccggtcagttgttaagcgatctgctctctggtcgcacgtcagcgatcccatatgaggatctaagcgtagcgcgctacagccgtggatttacgccatcacgtccgggccatttacatggcgcacacagctaa

SEQ ID NO: 6715 - protein, 432 aa, ESCHERICHIA COLI
MRVVILGSGVVGVASAWYLNQAGHEVTVIDREPGAALETSAANAGQISPGYAAPWAAPGVPLKAIKWMFQRHAPLAVRLDGTQFQLKWMWQMLRNCDTSHYMENKGRMVRLAEYSRDCLKALRAETNIQYEGRQGGTLQLFRTEQQYENATRDIAVLEDAGVPYQLLESSRLAEVEPALAEVAHKLTGGLQLPNDETGDCQLFTQNLARMAEQAGVKFRFNTPVDQLLCDGEQIYGVKCGDEVIKADAYVMAFGSYSTAMLKGIVDIPVYPLKGYSLTIPIAQEDGAPVSTILDETYKIAITRFDNRIRVGGMAEIVGFNTELLQPRRETLEMVVRDLYPRGGHVEQATFWTGLRPMTPDGTPVVGRTRFKNLWLNTGHGTLGWTMACGSGQLLSDLLSGRTSAIPYEDLSVARYSRGFTPSRPGHLHGAHS

SEQ ID NO: 6716 - DNA, 23 bp, Artificial sequence
  primer
atgcgagttgtcatactgggaag

SEQ ID NO: 6717 - DNA, 24 bp, Artificial sequence
  primer
ttagctgtgtgcgccatgtaaatg

SEQ ID NO: 6718 - protein, 463 aa, Artificial sequence
  consensus sequence
  Variant (2)..(2): Xaa in position 2 is any amino acid
  Variant (4)..(5): Xaa in position 4 to 5 is any amino acid
  Variant (7)..(9): Xaa in position 7 to 9 is any amino acid
  Variant (11)..(12): Xaa in position 11 to 12 is any amino acid
  Variant (14)..(16): Xaa in position 14 to 16 is any amino acid
  Variant (18)..(19): Xaa in position 18 to 19 is any amino acid
  Variant (21)..(21): Xaa in position 21 is any amino acid
  Variant (23)..(24): Xaa in position 23 to 24 is any amino acid
  Variant (26)..(31): Xaa in position 26 to 31 is any amino acid
  Variant (32)..(32): Xaa in position 32 is any or no amino acid
  Variant (35)..(36): Xaa in position 35 to 36 is any amino acid
  Variant (38)..(38): Xaa in position 38 is any amino acid
  Variant (40)..(41): Xaa in position 40 to 41 is any amino acid
  Variant (43)..(47): Xaa in position 43 to 47 is any amino acid
  Variant (49)..(49): Xaa in position 49 is any amino acid
  Variant (51)..(51): Xaa in position 51 is any amino acid
  Variant (53)..(56): Xaa in position 53 to 56 is any amino acid
  Variant (57)..(60): Xaa in position 57 to 60 is any or no amino acid
  Variant (62)..(67): Xaa in position 62 to 67 is any amino acid
  Variant (70)..(81): Xaa in position 70 to 81 is any amino acid
  Variant (82)..(93): Xaa in position 82 to 93 is any or no amino acid
  Variant (95)..(118): Xaa in position 95 to 118 is any amino acid
  Variant (119)..(121): Xaa in position 119 to 121 is any or no amino acid
  Variant (123)..(141): Xaa in position 123 to 141 is any amino acid
  Variant (142)..(148): Xaa in position 142 to 148 is any or no amino acid
  Variant (150)..(150): Xaa in position 150 is any amino acid
  Variant (152)..(171): Xaa in position 152 to 171 is any amino acid
  Variant (172)..(174): Xaa in position 172 to 174 is any or no amino acid
  Variant (176)..(187): Xaa in position 176 to 187 is any amino acid
  Variant (188)..(190): Xaa in position 188 to 190 is any or no amino acid
  Variant (193)..(193): Xaa in position 193 is any amino acid
  Variant (195)..(199): Xaa in position 195 to 199 is any amino acid
  Variant (200)..(203): Xaa in position 200 to 203 is any or no amino acid
  Variant (205)..(212): Xaa in position 205 to 212 is any amino acid
  Variant (213)..(213): Xaa in position 213 is any or no amino acid
  Variant (216)..(218): Xaa in position 216 to 218 is any amino acid
  Variant (220)..(222): Xaa in position 220 to 222 is any amino acid
  Variant (224)..(260): Xaa in position 224 to 260 is any amino acid
  Variant (261)..(283): Xaa in position 261 to 283 is any or no amino acid
  Variant (285)..(286): Xaa in position 285 to 286 is any amino acid
  Variant (288)..(288): Xaa in position 288 is any amino acid
  Variant (290)..(290): Xaa in position 290 is any amino acid
  Variant (292)..(293): Xaa in position 292 to 293 is any amino acid
  Variant (295)..(304): Xaa in position 295 to 304 is any amino acid
  Variant (305)..(309): Xaa in position 305 to 309 is any or no amino acid
  Variant (311)..(312): Xaa in position 311 to 312 is any amino acid
  Variant (314)..(314): Xaa in position 314 is any amino acid
  Variant (319)..(319): Xaa in position 319 is any amino acid
  Variant (321)..(325): Xaa in position 321 to 325 is any amino acid
  Variant (326)..(332): Xaa in position 326 to 332 is any or no amino acid
  Variant (335)..(339): Xaa in position 335 to 339 is any amino acid
  Variant (341)..(343): Xaa in position 341 to 343 is any amino acid
  Variant (345)..(348): Xaa in position 345 to 348 is any amino acid
  Variant (350)..(354): Xaa in position 350 to 354 is any amino acid
  Variant (355)..(358): Xaa in position 355 to 358 is any or no amino acid
  Variant (360)..(361): Xaa in position 360 to 361 is any amino acid
  Variant (363)..(364): Xaa in position 363 to 364 is any amino acid
  Variant (366)..(367): Xaa in position 366 to 367 is any amino acid
  Variant (369)..(373): Xaa in position 369 to 373 is any amino acid
  Variant (374)..(380): Xaa in position 374 to 380 is any or no amino acid
  Variant (382)..(393): Xaa in position 382 to 393 is any amino acid
  Variant (395)..(403): Xaa in position 395 to 403 is any amino acid
  Variant (404)..(410): Xaa in position 404 to 410 is any or no amino acid
  Variant (412)..(412): Xaa in position 412 is any amino acid
  Variant (414)..(414): Xaa in position 414 is any amino acid
  Variant (417)..(417): Xaa in position 417 is any amino acid
  Variant (420)..(422): Xaa in position 420 to 422 is any amino acid
  Variant (424)..(425): Xaa in position 424 to 425 is any amino acid
  Variant (427)..(431): Xaa in position 427 to 431 is any amino acid
  Variant (432)..(446): Xaa in position 432 to 446 is any or no amino acid
  Variant (448)..(449): Xaa in position 448 to 449 is any amino acid
  Variant (451)..(451): Xaa in position 451 is any amino acid
  Variant (455)..(455): Xaa in position 455 is any amino acid
  Variant (458)..(458): Xaa in position 458 is any amino acid
  Variant (460)..(462): Xaa in position 460 to 462 is any amino acid
GXGXXGXXXAXXLXXXGXXVXVXXRXXXXXXXTSXXNXGXXSXXXXXPXAXPXXXXXXXXWXXXXXXPLXXXXXXXXXXXXXXXXXXXXXXXXWXXXXXXXXXXXXXXXXXXXXXXXXXXXSXXXXXXXXXXXXXXXXXXXXXXXXXXGXLXXXXXXXXXXXXXXXXXXXXXXXGXXXXXXXXXXXXXXXEPXLXXXXXXXXXGXXXXXXXXXGDXXXFXXXLXXXXXXXXXXXXXXXXXXXXXXXXXXXXXXXXXXXXXXXXXXXXXXXXXXXXXXXXXXXXDXXVXAXGXXSXXXXXXXXXXXXXXXPXXPXKGYSXTXXXXXXXXXXXXAPXXXXXDXXXKXXXXRXXXXXXXXXRXXGXXEXXGXXXXXXXXXXXXRXXXXXXXXXXXXPXXXXXXXXXXXXXXXXWXGXRPXTPXXXPXXGXXXXXXXXXXXXXXXXXXXXLXXNXGHGXLGXTXXXG

SEQ ID NO: 6719 - protein, 26 aa, Artificial sequence
  protein pattern
  Variant (2)..(2): Xaa in position 2 is any amino acid
  Variant (3)..(4): Xaa in position 3 to 4 is any or no amino acid
  Variant (6)..(6): Xaa in position 6 is Ala, Gly or Ser
  Variant (8)..(8): Xaa in position 8 is Ile or Val
  Variant (9)..(9): Xaa in position 9 is any amino acid
  Variant (11)..(12): Xaa in position 11 to 12 is any amino acid
  Variant (13)..(13): Xaa in position 13 is Ala, Cys, Ser or Thr
  Variant (15)..(16): Xaa in position 15 to 16 is any amino acid
  Variant (18)..(20): Xaa in position 18 to 20 is any amino acid
  Variant (22)..(23): Xaa in position 22 to 23 is any amino acid
  Variant (25)..(25): Xaa in position 25 is any amino acid
  Variant (26)..(26): Xaa in position 26 is Ile, Leu or Val
VXXXGXGXXGXXXAXXLXXXGXXVXX

SEQ ID NO: 6720 - protein, 15 aa, Artificial sequence
  protein pattern
  Variant (2)..(3): Xaa in position 2 to 3 is any or no amino acid
  Variant (6)..(6): Xaa in position 6 is any amino acid
  Variant (9)..(9): Xaa in position 9 is any amino acid
  Variant (11)..(11): Xaa in position 11 is any amino acid
  Variant (12)..(12): Xaa in position 12 is Ala, Gly or Ser
  Variant (13)..(14): Xaa in position 13 to 14 is any amino acid
  Variant (15)..(15): Xaa in position 15 is Ala, Ser or Thr
GXXHGXLGXTXXXXX

SEQ ID NO: 6721 - protein, 18 aa, Artificial sequence
  protein pattern
  Variant (2)..(2): Xaa in position 2 is any amino acid
  Variant (3)..(3): Xaa in position 3 is Ala or Gly
  Variant (5)..(6): Xaa in position 5 to 6 is Ala, Cys or Gly
  Variant (7)..(7): Xaa in position 7 is any amino acid
  Variant (8)..(8): Xaa in position 8 is Phe, Ile, Leu or Val
  Variant (9)..(14): Xaa in position 9 to 14 is any amino acid
  Variant (16)..(16): Xaa in position 16 is any amino acid
  Variant (17)..(17): Xaa in position 17 is any or no amino acid
SXXNXXXXXXXXXXPXXA

SEQ ID NO: 6722 - protein, 14 aa, Artificial sequence
  protein pattern
  Variant (2)..(2): Xaa in position 2 is any amino acid
  Variant (5)..(5): Xaa in position 5 is any amino acid
  Variant (7)..(7): Xaa in position 7 is any amino acid
  Variant (8)..(8): Xaa in position 8 is Ala, Asp, Gly, Asn, Ser or Thr
  Variant (9)..(9): Xaa in position 9 is Asp, Gly, Asn or Ser
  Variant (10)..(10): Xaa in position 10 is any amino acid
  Variant (11)..(11): Xaa in position 11 is Ala or Pro
  Variant (12)..(12): Xaa in position 12 is any amino acid
  Variant (13)..(13): Xaa in position 13 is Ile, Leu or Val
  Variant (14)..(14): Xaa in position 14 is Ala, Asp or Gly
GXRPXTXXXXXXXX

SEQ ID NO: 6723 - DNA, 2574 bp, Escherichia coli
  CDS (1)..(2574): transl_table=11
atgcgtctggatcgtcttactaataaattccagcttgctcttgccgatgcccaatcacttgcactcgggcacgacaaccaatttatcgaaccacttcatttaatgagcgccctgctgaatcaggaagggggttcggttagtcctttattaacatccgctggcataaatgctggccagttgcgcacagatatcaatcaggcattaaatcgtttaccgcaggttgaaggtactggtggtgatgtccagccatcacaggatctggtgcgcgttcttaatctttgcgacaagctggcgcaaaaacgtggtgataactttatctcgtcagaactgttcgttctggcggcacttgagtctcgcggcacgctggccgacatcctgaaagcagcaggggcgaccaccgccaacattactcaagcgattgaacaaatgcgtggaggtgaaagcgtgaacgatcaaggtgctgaagaccaacgtcaggctttgaaaaaatataccatcgaccttaccgaacgagccgaacagggcaaactcgatccggtgattggtcgtgatgaagaaattcgccgtaccattcaggtgctgcaacgtcgtactaaaaataacccggtactgattggtgaacccggcgtcggtaaaactgccatcgttgaaggtctggcgcagcgtattatcaacggcgaagtgccggaagggttgaaaggccgccgggtactggcgctggatatgggcgcgctggtggctggggcgaaatatcgcggtgagtttgaagaacgtttaaaaggcgtgcttaacgatcttgccaaacaggaaggcaacgtcatcctatttatcgacgaattacataccatggtcggcgcgggtaaagccgatggcgcaatggacgccggaaacatgctgaaaccggcgctggcgcgtggtgaattgcactgcgtaggtgccacgacgcttgacgaatatcgccagtacattgaaaaagatgctgcgctggaacgtcgtttccagaaagtgtttgttgccgagccttctgttgaagataccattgcgattctgcgtggcctgaaagaacgttacgaattgcaccaccatgtgcaaattactgacccggcaattgttgcagcggcgacgttgtctcatcgctacattgctgaccgtcagctgccggataaagccatcgacctgatcgatgaagcagcatccagcattcgtatgcagattgactcaaaaccagaagaactcgaccgactcgatcgtcgtatcatccagctcaaactggaacaacaggcgttaatgaaagagtctgatgaagccagtaaaaaacgtctggatatgctcaacgaagaactgagcgacaaagaacgtcagtactccgagttagaagaagagtggaaagcagagaaggcatcgctttctggtacgcagaccattaaagcggaactggaacaggcgaaaatcgctattgaacaggctcgccgtgtgggggacctggcgcggatgtctgaactgcaatacggcaaaatcccggaactggaaaagcaactggaagccgcaacgcagctcgaaggcaaaactatgcgtctgttgcgtaataaagtgaccgacgccgaaattgctgaagtgctggcgcgttggacggggattccggtttctcgcatgatggaaagcgagcgcgaaaaactgctgcgtatggagcaagaactgcaccatcgcgtaattggtcagaacgaagcggttgatgcggtatctaacgctattcgtcgtagccgtgcggggctggcggatccaaatcgcccgattggttcattcctgttcctcggcccaactggtgtggggaaaacagagctttgtaaggcgctggcgaactttatgtttgatagcgacgaggcgatggtccgtatcgatatgtccgagtttatggagaaacactcggtgtctcgtttggttggtgcgcctccgggatatgtcggttatgaagaaggtggctacctgaccgaagcggtgcgtcgtcgtccgtattccgtcatcctgctggatgaagtggaaaaagcgcatccggatgtcttcaacattctgttgcaggtactggatgatgggcgtctgactgacgggcaagggagaacggtcgacttccgtaatacggtcgtcattatgacctctaacctcggttccgatctgattcaggaacgcttcggtgaactggattatgcgcacatgaaagagctggtgctcggtgtggtaagccataacttccgtccggaattcattaaccgtatcgatgaagtggtggtcttccatccgctgggtgaacagcacattgcctcgattgcgcagattcagttgaaacgtctgtacaaacgtctggaagaacgtggttatgaaatccacatttctgacgaggcgctgaaactgctgagcgagaacggttacgatccggtctatggtgcacgtcctctgaaacgtgcaattcagcagcagatcgaaaacccgctggcacagcaaatactgtctggtgaattggttccgggtaaagtgattcgcctggaagttaatgaagaccggattgtcgccgtccagtaa

SEQ ID NO: 6724 - protein, 857 aa, Escherichia coli
MRLDRLTNKFQLALADAQSLALGHDNQFIEPLHLMSALLNQEGGSVSPLLTSAGINAGQLRTDINQALNRLPQVEGTGGDVQPSQDLVRVLNLCDKLAQKRGDNFISSELFVLAALESRGTLADILKAAGATTANITQAIEQMRGGESVNDQGAEDQRQALKKYTIDLTERAEQGKLDPVIGRDEEIRRTIQVLQRRTKNNPVLIGEPGVGKTAIVEGLAQRIINGEVPEGLKGRRVLALDMGALVAGAKYRGEFEERLKGVLNDLAKQEGNVILFIDELHTMVGAGKADGAMDAGNMLKPALARGELHCVGATTLDEYRQYIEKDAALERRFQKVFVAEPSVEDTIAILRGLKERYELHHHVQITDPAIVAAATLSHRYIADRQLPDKAIDLIDEAASSIRMQIDSKPEELDRLDRRIIQLKLEQQALMKESDEASKKRLDMLNEELSDKERQYSELEEEWKAEKASLSGTQTIKAELEQAKIAIEQARRVGDLARMSELQYGKIPELEKQLEAATQLEGKTMRLLRNKVTDAEIAEVLARWTGIPVSRMMESEREKLLRMEQELHHRVIGQNEAVDAVSNAIRRSRAGLADPNRPIGSFLFLGPTGVGKTELCKALANFMFDSDEAMVRIDMSEFMEKHSVSRLVGAPPGYVGYEEGGYLTEAVRRRPYSVILLDEVEKAHPDVFNILLQVLDDGRLTDGQGRTVDFRNTVVIMTSNLGSDLIQERFGELDYAHMKELVLGVVSHNFRPEFINRIDEVVVFHPLGEQHIASIAQIQLKRLYKRLEERGYEIHISDEALKLLSENGYDPVYGARPLKRAIQQQIENPLAQQILSGELVPGKVIRLEVNEDRIVAVQ

SEQ ID NO: 6725 - DNA, 2667 bp, Glycine max
  CDS (1)..(2667)
atggcatggcaagcaattatctcagcaccagaagtagctaaggagaacaagcatcagattgtggagactgagcacttgatgaaagctttgttagagcaaaagaatggacttgctcgccggatcttttctaaggttggggtagataatactcggcttctggagactactgataagcacattcagcggcaacccaaggttgtaggggaatccactggttcaatgttggggcgtgatttggaggcattgattcagagagccagggacttcaagaaagaatatggagactcatttgtgtcagttgagcactttgttcttggttttgcccaagataaacgatttgggaagatattgtttagagattttcaaatatctcagcaagcactaaaatctgccatagagtccataaggggacgccagttagttattgaccaagatcctgaaggaaaatatgaagccttggaaaagtatgggaaagatttgacagcaatggctaaagcaggaaaacttgacccagtcataggaagagatgacgaaatacgcaggtgcattcagattctctccaggagaacaaagaacaatcctgtgctaattggggagcctggtgttggaaagactgcaatctctgaaggacttgctcaaagaattgttcaaggagatgttcctcaagctttgatgaatcgaaggcttatatcccttgatatgggtgcacttattgctggagcaaagtaccggggagaatttgaggatagactgaaagctgttctgaaagaagtaacagaatctgatggtcagactatccttttcattgatgaaatccatacagttgtcggggcaggtgcttcaaatggtgctatggatgctggtaatctcttaaaacctatgcttggtcggggggagctgcgatgtattggtgcaacaacattagatgagtatcgaaagtatattgagaaggaccctgcacttgagcgtcgtttccagcaagtttatgttgaccaaccttctgttgaggataccatttcaatactaaggggactgcgggaaagatatgagctgcatcacggagttcgcatttctgacagtgcacttgtggatgctgcaattctctcagatcgatacataagtgggaggtttttgcctgataaagccattgatctggttgatgaagcagctgctaaactaaaaatggaaattacttcaaaacctactgcacttgatgagattaatcggtcagtcctgaaactcgagatggagagactctctctcatgaatgatacagacaaggcttctaaagatagattaaatcgtcttgagacagaactctctctcttaaaagagaaacaggatgaattgactggacagtgggagcatgaaaagtctgtaatgactaatctgcagtcgattaaagaggagatagacagggtaaatcttgagattcaacaggctgagcgagagtatgatcttaatcgtgctgctgaattgaagtatggtagtctaaactccttgcaacgccaacttgaaagtgcagagaaagaattgcatgaatatatgaactctggtaagtctatgttaagagaggaagttactggaaatgacattgctgaaattgtaagcaagtggactggtatccccatttctaaacttcaacaatcagatagagagaagttgttgtatctagaggaagagctccataagcgtgttgtcggtcaagatcctgctgtcaaggcagtagctgaggctatccaacgttcaagagcaggtctttcagatccccatcgcccaatcgctagcttcatgtttatgggaccaacgggtgtaggaaagaccgagctagccaaggcccttgcttcatatttgttcaacacagaagaagcacttgtacggattgatatgagtgagtacatggaaaagcatacggtttcaagattgattggggctccacctggatatgttgggtatgaagaaggagggcaactaacagagaccgttcgtcgccgaccatatgctgtcattttgtttgatgagattgagaaggcacactcagatgttttcaatgtattccttcaaatcttggatgatggaagggtaactgattcacagggtcggaccgtaagttttaccaacacagttatcattatgacctcaaatgttggatctcagtacattctcaatacagatgatgacactgtgcccaaagagtccacatatgaagctataaaacagcgggtaatggacgctgcaagatccatctttcgcccagagttcatgaatagagttgatgagtatattgttttccagcctctagaccgcgaccaaataagtagtattgtcaggttacagttggagcgtgtgcagaagagaattgtggatcgtaagatgaaaatccaagttacagaagctgccatccaacttcttggaagtttggggtatgatccaaactacggtgctaggccagtcaagcgagtgattcagcaaaacgtggagaatgaacttgccaagggtattcttagaggagagttcaaggaagaagacacaattttagtagacacagaagtcacagtacttgccaatggtcaaattccccaacaaaagctagtttttaggagggttgaagctgattccagttctgctgctgaagacagacgggaaggctttccacagattctgtga

SEQ ID NO: 6726 - protein, 888 aa, Glycine max
MAWQAIISAPEVAKENKHQIVETEHLMKALLEQKNGLARRIFSKVGVDNTRLLETTDKHIQRQPKVVGESTGSMLGRDLEALIQRARDFKKEYGDSFVSVEHFVLGFAQDKRFGKILFRDFQISQQALKSAIESIRGRQLVIDQDPEGKYEALEKYGKDLTAMAKAGKLDPVIGRDDEIRRCIQILSRRTKNNPVLIGEPGVGKTAISEGLAQRIVQGDVPQALMNRRLISLDMGALIAGAKYRGEFEDRLKAVLKEVTESDGQTILFIDEIHTVVGAGASNGAMDAGNLLKPMLGRGELRCIGATTLDEYRKYIEKDPALERRFQQVYVDQPSVEDTISILRGLRERYELHHGVRISDSALVDAAILSDRYISGRFLPDKAIDLVDEAAAKLKMEITSKPTALDEINRSVLKLEMERLSLMNDTDKASKDRLNRLETELSLLKEKQDELTGQWEHEKSVMTNLQSIKEEIDRVNLEIQQAEREYDLNRAAELKYGSLNSLQRQLESAEKELHEYMNSGKSMLREEVTGNDIAEIVSKWTGIPISKLQQSDREKLLYLEEELHKRVVGQDPAVKAVAEAIQRSRAGLSDPHRPIASFMFMGPTGVGKTELAKALASYLFNTEEALVRIDMSEYMEKHTVSRLIGAPPGYVGYEEGGQLTETVRRRPYAVILFDEIEKAHSDVFNVFLQILDDGRVTDSQGRTVSFTNTVIIMTSNVGSQYILNTDDDTVPKESTYEAIKQRVMDAARSIFRPEFMNRVDEYIVFQPLDRDQISSIVRLQLERVQKRIVDRKMKIQVTEAAIQLLGSLGYDPNYGARPVKRVIQQNVENELAKGILRGEFKEEDTILVDTEVTVLANGQIPQQKLVFRRVEADSSSAAEDRREGFPQIL

SEQ ID NO: 6727 - DNA, 2937 bp, Glycine max
  CDS (1)..(2937)
atggcctcggcgacgtcgtttttgggcctcggtcttcgcccctccgtcccaatttgcgccaacagaaacaacggcattcgattctctcagtttcaagtctcctttggctttcgtgagaactccacttccctcaagactttgaattcaacaccgttgaagaaaagagaagctttctcaaatgggtcttcgagaacgcgaagaaacccgttgttctctgttcgctgcacagtttcatcaagtggaaagattacacaacaggaattcacggaaatggcatggcaagcaattatctcggcaccagaagtggctaaggagaacaagcatcagattgtggagactgagcacttgatgaaagcattgttggagcaaaagaatggacttgctcgccggatcttttctaaggttggggtagataatactcggcttctagaggccactgataagcacattcagcggcaacccaaggttgtaggggaatctgctggttcaatgctagggcgtgatttggaggcattgattcagagagccagggacttcaagaaagaatatggggactcatttgtgtcggttgagcactttgttcttggttttgcccaagataaacgatttgggaagatattgtttagagattttcaaatatctcagcaagctctaaaatctgccatagaatccataaggggacgccagtcagttattgaccaagatcctgaaggaaagtatgaagccttggaaaagtatgggaaagatttgacggcaatggctaaagcaggaaaacttgacccagtcataggaagagatgatgaaatacgcaggtgcattcagattctctccaggaggacaaagaacaatcctgttctaattggggagcctggtgttggaaagactgcaatctctgaaggacttgctcaaagaattgttcaaggagatgttcctcaagctttgatgaatcgaaggcttatatcccttgatatgggtgcacttattgctggagcaaagtaccggggagaatttgaggatagactgaaagctgttctgaaagaagtaacagaatctgatggtcagactatccttttcattgatgaaatccatacagttgttggggcaggtgcttcaaatggtgctatggatgctggtaatctcttaaaacctatgcttggtcggggggagctgcgatgtattggtgcaacaacattagatgagtatcgaaagtatattgagaaggaccctgcacttgagcgtcgtttccagcaagtttatgttgaccaaccttcagttgaggataccatttcaatactaaggggactgcgggaaagatatgagctgcatcatggagttcgcatttctgacagtgctcttgtggatgctgcaattctctcagatcgatacataagtgggaggtttttgcctgataaagctattgatctggttgatgaagcagctgctaaactaaaaatggaaattacttcaaaacccactgcacttgatgagattaatcggtcagtcttgaaactcgagatggagagactctctctgatgaatgatacagacaaggcttctaaagatagattaaatcgtcttgagaccgaactctctctcttaaaagagaaacaggacgaattgactggacagtgggagcatgaaaagtctgtaatgactaatctgcaatcgattaaagaggagatagacagggtaaatcttgagattcaacaggctgagcgagagtatgatcttaatcgcgctgctgaattgaagtatggtagtctaaactccttgcaacgccaacttgaaagtgcagagaaagaattgcatgaatatatgaactctggtaagtctatgttaagagaggaagttactggaaatgacattgctgatattgtaagcaagtggactggtatccccatttcaaaacttcaacaatcagatagagagaagttgttgtatctagaggaagagctccacaagcgtgttgtcggtcaagatcctgctgtcaaggcagtagctgaggctatccaacgttcaagagcaggtctttcagatccccatcgcccaatcgctagcttcatgtttatgggaccaacgggtgtaggaaagaccgagctagccaaggcccttgcttcatatttgttcaacacagaagaagcacttgtacgaattgatatgagtgagtacatggaaaagcatacggtttcaagattgattggggctccacctggatatgttgggtatgaagagggagggcaactaacagagacagttcgtcgccgaccatatgctgtcattttgtttgatgagattgagaaggcacactcagatgttttcaatgtattccttcaaatcttggatgatggaagggtaactgattcacagggccgaaccgtaagttttaccaacacagttatcattatgacctcaaatgttggatcacagtacattctcaacacagatgatgacactgtgcccaaagagtctgcatatgaaactataaagcagcgggtaatggacgctgcaagatccatctttcgccctgagttcatgaatagagttgatgaatatattgttttccagcctctagaccgcaaccaaataagtagtattgtcaggttacagttggagcgtgtgcagaagagaattgcagatcgtaagatgaaaatccaagttacagaagctgcaatccaacttcttggtagtttggggtatgatccaaactacggtgctaggccagtcaagcgagttattcagcaaaacgtggagaatgaacttgctaagggtattcttagaggagagttcaaggaagaagacacaattttagtagacacagaagtcacggtatttgccaatggtcaacttccccaacaaaagctagtttttaggagggttgaagctgattccaattctactgttgaagacagaagggaaggctttccacagattctgtga

SEQ ID NO: 6728 - protein, 978 aa, Glycine max
MASATSFLGLGLRPSVPICANRNNGIRFSQFQVSFGFRENSTSLKTLNSTPLKKREAFSNGSSRTRRNPLFSVRCTVSSSGKITQQEFTEMAWQAIISAPEVAKENKHQIVETEHLMKALLEQKNGLARRIFSKVGVDNTRLLEATDKHIQRQPKVVGESAGSMLGRDLEALIQRARDFKKEYGDSFVSVEHFVLGFAQDKRFGKILFRDFQISQQALKSAIESIRGRQSVIDQDPEGKYEALEKYGKDLTAMAKAGKLDPVIGRDDEIRRCIQILSRRTKNNPVLIGEPGVGKTAISEGLAQRIVQGDVPQALMNRRLISLDMGALIAGAKYRGEFEDRLKAVLKEVTESDGQTILFIDEIHTVVGAGASNGAMDAGNLLKPMLGRGELRCIGATTLDEYRKYIEKDPALERRFQQVYVDQPSVEDTISILRGLRERYELHHGVRISDSALVDAAILSDRYISGRFLPDKAIDLVDEAAAKLKMEITSKPTALDEINRSVLKLEMERLSLMNDTDKASKDRLNRLETELSLLKEKQDELTGQWEHEKSVMTNLQSIKEEIDRVNLEIQQAEREYDLNRAAELKYGSLNSLQRQLESAEKELHEYMNSGKSMLREEVTGNDIADIVSKWTGIPISKLQQSDREKLLYLEEELHKRVVGQDPAVKAVAEAIQRSRAGLSDPHRPIASFMFMGPTGVGKTELAKALASYLFNTEEALVRIDMSEYMEKHTVSRLIGAPPGYVGYEEGGQLTETVRRRPYAVILFDEIEKAHSDVFNVFLQILDDGRVTDSQGRTVSFTNTVIIMTSNVGSQYILNTDDDTVPKESAYETIKQRVMDAARSIFRPEFMNRVDEYIVFQPLDRNQISSIVRLQLERVQKRIADRKMKIQVTEAAIQLLGSLGYDPNYGARPVKRVIQQNVENELAKGILRGEFKEEDTILVDTEVTVFANGQLPQQKLVFRRVEADSNSTVEDRREGFPQIL

SEQ ID NO: 6729 - DNA, 2925 bp, Glycine max
  CDS (1)..(2925)
atggcctccacgacgtcgttttctctctctcacgctgttgttcccttctcctgcaacacaaagcatggtcatttatctcacaaccgccactatctctccctcccaaaacccatttccctgaagcccctccgatcgccttccttcaataaaagacactcttttgcaaatgggtttcagacaattcggagaaattcctcacctttcaccgttcgctgtgaagcttcaagtggaaggattacgcagcaagagttcacagagatggcgtggcaggcaatagtttcgtcgccggaggtggccaaagagaacaagcatcagatagtagagacagagcacttgatgaaggctttgttggagcagaagaatgggcttgctcgcaggatcttttcgaaggttggggtggataacactcgccttctagaagctactgataagtacattcagcggcaacccaaggttctaggggaatcatctggttcaatgttgggccgtgatttggaggcattgattcagagagctagggaccacaagaaaaagtatggggattcatttgtttcagttgagcacttggttcttgcttttacccaagatcaacgatttgggaagcaattctttagagattttcaaatatctgagcctgctctaaaatctgcaatagagtctgttaggggacgtcagtcagttattgatcaagatcctgaagggaagtatgaagccttggaaaaatatggaaaagatttgaccgcaatggcaaaagctggaaaactcgacccagtcataggaagagatgatgaaatacgaaggtgcatccaaattctctccaggaggacaaagaacaatcccgtgctaattggtgaacctggtgttggaaagactgctatttctgaaggactggctcagagaatagtgcacggagatgttcctcaagctttgatgaaccgtaggcttatatctctcgatatgggagcacttattgctggagcgaagtaccggggagaattcgaggataggctgaaagctgtactaaaagaagtgacagaatctgatggtcagactatccttttcattgacgagattcatacagttgttggggcaggagctacaaatggtgctatggatgctggtaatctcttaaaacctatgcttggtcggggtgagttgcgatgtattggtgcaacaacactggacgagtatcggaagtatattgagaaggacccagcactagaacgccgtttccagcaagtttatgttgaccaacctacagttgaagatacaatttcaatactaaggggactgcgggaaaggtatgaactacatcatggagtccgaatttctgacagtgcacttgtggaagctgcaattctctcagatagatatatcagtggaagatttttgcctgacaaagctattgacctggttgatgaggcggctgcaaaactgaaaatggaaatcacttctaaacctactgcacttgatgagatcaacagatcagtcctgaaactagagatggagagactctctctcatgaatgatacagataaggcttctaaagataggctgaatcgtcttgaggcagagctttctctcttaaaagagaaacaggctgagctgactgaacagtgggagcatgaaaagtctgtaatgactcgtattcaatcaatcaaagaagagatagacagagtgaatcttgagatccaacaggctgagcgggagtatgatcttaatcgtgctgctgaattaaagtatggcagtcttaactccttgcaacggcaacttgaaagtgcagagaaggagttagacgaatatatgaactctgggaagtctatgctgagagaggaagttacgggaaatgatattgctgaaattgtaagcaagtggactggtatccctgtttcaaaacttcaacaatcagagagggagaagttgttgtatttagaggaagtgcttcataagcgtgttgttggccaagaccctgtagttaaggcagttgctgaggctatccaacgttcaagagcaggtctttcagatcctcatcgtccaattgccagcttcatgtttatgggacctacaggtgtaggaaagacggagctggctaaggcacttgcagcctacttgttcaacactgaagaagctcttgtacgaattgatatgagtgagtacatggaaaaacatgctgtttcaagattgattggggctccacctggatatgttgggtacgaagaaggagggcaacttactgagatagttcgccgcagaccatatgctgttattttgtttgatgagattgagaaggcacatgctgatgtcttcaatgtattccttcaaattttggatgatggaagagtaaccgactcacaaggtcgcacagtaagttttaccaacactgttatcattatgacctcaaatgttggatcacagtacatcttgaacacagatgatgacaccacgccgaaagagttggcttatgaaaccataaaacagcgcgtaatggatgctgcaagatccatctttcgccctgagtttatgaatagagttgacgaatatattgttttccagcctctagaccgtgaacaaataagtagcattgtcagattacagctggagcgtgtgcaaaagagaattgcagatcgcaagatgaaaatccaagtgacggatgctgctgttcaacttcttggaagtttagggtatgaccccaactatggcgctaggccagtcaagcgagtgattcagcagaatgtggagaatgaactcgccaagggtattctcagaggagagtttaaggaagaggatgcaattctaatagacactgaactcacagcatttaccaacggccaacttccccagcaaaagcttgtttttaagaaacttgcagctgattcagaatctacccctcaaggcaccttggaacccttcccacaggccccatga

SEQ ID NO: 6730 - protein, 974 aa, Glycine max
MASTTSFSLSHAVVPFSCNTKHGHLSHNRHYLSLPKPISLKPLRSPSFNKRHSFANGFQTIRRNSSPFTVRCEASSGRITQQEFTEMAWQAIVSSPEVAKENKHQIVETEHLMKALLEQKNGLARRIFSKVGVDNTRLLEATDKYIQRQPKVLGESSGSMLGRDLEALIQRARDHKKKYGDSFVSVEHLVLAFTQDQRFGKQFFRDFQISEPALKSAIESVRGRQSVIDQDPEGKYEALEKYGKDLTAMAKAGKLDPVIGRDDEIRRCIQILSRRTKNNPVLIGEPGVGKTAISEGLAQRIVHGDVPQALMNRRLISLDMGALIAGAKYRGEFEDRLKAVLKEVTESDGQTILFIDEIHTVVGAGATNGAMDAGNLLKPMLGRGELRCIGATTLDEYRKYIEKDPALERRFQQVYVDQPTVEDTISILRGLRERYELHHGVRISDSALVEAAILSDRYISGRFLPDKAIDLVDEAAAKLKMEITSKPTALDEINRSVLKLEMERLSLMNDTDKASKDRLNRLEAELSLLKEKQAELTEQWEHEKSVMTRIQSIKEEIDRVNLEIQQAEREYDLNRAAELKYGSLNSLQRQLESAEKELDEYMNSGKSMLREEVTGNDIAEIVSKWTGIPVSKLQQSEREKLLYLEEVLHKRVVGQDPVVKAVAEAIQRSRAGLSDPHRPIASFMFMGPTGVGKTELAKALAAYLFNTEEALVRIDMSEYMEKHAVSRLIGAPPGYVGYEEGGQLTEIVRRRPYAVILFDEIEKAHADVFNVFLQILDDGRVTDSQGRTVSFTNTVIIMTSNVGSQYILNTDDDTTPKELAYETIKQRVMDAARSIFRPEFMNRVDEYIVFQPLDREQISSIVRLQLERVQKRIADRKMKIQVTDAAVQLLGSLGYDPNYGARPVKRVIQQNVENELAKGILRGEFKEEDAILIDTELTAFTNGQLPQQKLVFKKLAADSESTPQGTLEPFPQAP

SEQ ID NO: 6731 - DNA, 2667 bp, Glycine max
  CDS (1)..(2667)
atggcgttgcaggcaatagtttcgtcaccagaggtggccaaggagaacaagcatcagattgtggagacagagcacttgatgaaggctttgttggagcagaagaatggacttgctcgcaggatcttttccaaggttggggtggataacactcgccttctagaagctactgataagtacattcagcggcaacccaaggttctaggggaatcctctggttcaatgttgggccgtgatttggaggcattgattcagagagctagggaccacaagaaaaagtatggggattcatttgtttcagttgagcacttggttcttgcttttacccaagatcaacggtttgggaagcaattcttcagagattttcaaatatctgagccagctctaaaatctgcaatagagtctgttaggggacgtcagtcagttattgatcaagatcccgaaggaaagtatgaagccttggaaaaatatggaaaagatttgaccgcaatggcaaaagctggaaaacttgacccagtcataggaagagatgatgaaatacgaaggtgcattcaaattctctccaggaggacaaagaacaatcccgtgctaattggtgaacctggtgttggaaagaccgccatttctgaaggactggctcagagaatagtgcaaggagatgttcctcaagctttaatggaccgtaggcttatatctctggatatgggagcacttattgctggagcgaagtaccggggagaattcgaggataggctgaaagctgtactaaaagaagtgacagaatctgatggtcagactatccttttcattgacgagattcatacagttgttggggcaggagccacaaatggtgctatggatgctggtaatctcttaaaacctatgcttggtcggggtgagctgcgatgtattggtgcaacaacactggacgagtatcggaagtatatcgagaaggacccagcactagagcgtcgcttccaacaagtttatgttgaccaacctacagttgaagatacaatttcaatactaaggggactgcgggaaaggtatgaactacatcatggagtccgaatttctgacagtgcacttgttgaagctgcaattctctcagatagatatatcagtggaagatttttgcctgacaaagctattgacctggttgatgaggcagctgccaaactgaaaatggaaatcacttctaaacctactgcacttgatgagatcaatagatcagtcctgaaactagagatggagagactctctctcatgaatgatacagataaggcttctaaagataggctgaatcgtcttgaggcagagctttctctcttaaaagagaaacaggctgagctgactgaacagtgggagcatgaaaagtctgtaatgactcgtattcaatcaatcaaagaagagatagacagagtgaatcttgagatccaacaggctgaacgggagtatgatcttaatcgtgctgctgaattaaagtatggcagtcttaactccttgcaacggcaacttgaaagtgccgagaaggagttagacgaatatatgaactctgggaagtctatgctgagagaggaagttacgggaaatgatattgctgaaattgtaagcaagtggactggtatccctgtttcaaaacttcaacaatcagagagggagaagttgttgcatttagaggaagtgcttcataagcgtgttgtaggccaagaccctgctgttaaggcaattgctgaggctatccaacgttcaagagcaggtctttcggatcctcatcgtccaattgccagcttcatgtttatgggacctacaggtgtaggaaagacagagctggctaaggcacttgcagcctacttgttcaacactgaagaagctcttgtacggattgatatgagcgagtacatggaaaaacatgctgtttcaagattgattggggctccacctggatatgttgggtacgaagaaggagggcaacttactgagatagttcgccgcagaccatatgctgttattttgttcgatgagattgagaaggcgcacgccgatgtcttcaatgtatttcttcaaattttggatgatggaagagtaaccgactcacagggtcgcacagtaagttttaccaacactgttatcattatgacctcaaatgttggatcacagtacatcttgaacacagatgacgacaccacgccaaaagagttggcttatgaaaccataaaacaacgtgtaatggatgctgcaagatccatcttccgccctgagtttatgaatagagttgacgaatatattgttttccagcctctagaccgtgaacaaataagtagcattgtcagattacagttggagcgcgtgcagaagagaattgcagatcgcaagatgaaaatccaagtgacggatgctgctgttcaacttcttggaagtttggggtatgaccccaactatggtgctaggccagtcaagcgagtgattcagcagaatgtggagaatgaactcgccaagggtattctcagaggagaatttaaggaagaagatgcaattataatagacacagaactcacagcatttaccaacggccaacttccccagcaaaagcttgtttttaagaaacttgcagctgattcagaatctacccctcaagacaccttggaacccttcccacaggctccatga

SEQ ID NO: 6732 - protein, 888 aa, Glycine max
MALQAIVSSPEVAKENKHQIVETEHLMKALLEQKNGLARRIFSKVGVDNTRLLEATDKYIQRQPKVLGESSGSMLGRDLEALIQRARDHKKKYGDSFVSVEHLVLAFTQDQRFGKQFFRDFQISEPALKSAIESVRGRQSVIDQDPEGKYEALEKYGKDLTAMAKAGKLDPVIGRDDEIRRCIQILSRRTKNNPVLIGEPGVGKTAISEGLAQRIVQGDVPQALMDRRLISLDMGALIAGAKYRGEFEDRLKAVLKEVTESDGQTILFIDEIHTVVGAGATNGAMDAGNLLKPMLGRGELRCIGATTLDEYRKYIEKDPALERRFQQVYVDQPTVEDTISILRGLRERYELHHGVRISDSALVEAAILSDRYISGRFLPDKAIDLVDEAAAKLKMEITSKPTALDEINRSVLKLEMERLSLMNDTDKASKDRLNRLEAELSLLKEKQAELTEQWEHEKSVMTRIQSIKEEIDRVNLEIQQAEREYDLNRAAELKYGSLNSLQRQLESAEKELDEYMNSGKSMLREEVTGNDIAEIVSKWTGIPVSKLQQSEREKLLHLEEVLHKRVVGQDPAVKAIAEAIQRSRAGLSDPHRPIASFMFMGPTGVGKTELAKALAAYLFNTEEALVRIDMSEYMEKHAVSRLIGAPPGYVGYEEGGQLTEIVRRRPYAVILFDEIEKAHADVFNVFLQILDDGRVTDSQGRTVSFTNTVIIMTSNVGSQYILNTDDDTTPKELAYETIKQRVMDAARSIFRPEFMNRVDEYIVFQPLDREQISSIVRLQLERVQKRIADRKMKIQVTDAAVQLLGSLGYDPNYGARPVKRVIQQNVENELAKGILRGEFKEEDAIIIDTELTAFTNGQLPQQKLVFKKLAADSESTPQDTLEPFPQAP

SEQ ID NO: 6733 - DNA, 2736 bp, Glycine max
  CDS (1)..(2736)
atgaatcctgagaagtttactcacaagactaatgaagctcttgcgtcggcccacgagctcgcgatgagttcaggccacgcgcaattgactcccatccacttggcccacgcgctgatttccgatcccaacggcatcttcgtgctagcgataaacagcgcgggcggcggcgaggaatcggcacgcgccgtggagcgagtgttgaaccaggctctgaagaagctaccctgccagtcccctccgccggacgaggtgccggcgagcaccaacctcgtgagggccatcaggagagcacaggcggcgcaaaaatcacgtggcgacacgcatttggccgttgatcagttgatcctcggaatcctcgaagactcccaaatcggagacctgttgaaggaagcgggggttgcggtggcgagggtaaaatcggaagtggataagcttcgtgggaaggaagggaagaaggttgagagcgcttccggggatacgaatttccaagctttgaagacttatgggcgtgaccttgttgaacaagcggggaagcttgaccctgttattggccgtgacgaagagattagaagggttgtgaggattctatcacggaggactaagaacaacccggttctcattggagaaccgggtgtgggaaaaactgcggttgtggaagggttggcacagaggatagtaagaggggatgttccaagcaaccttgctgatgtgaggcttattgcgttggatatgggggcgttggtcgcgggtgccaagtatagaggcgagtttgaggagcggttaaaggctgttttgaaggaagtggaggaggctgaggggaaggtgatactcttcattgatgagattcatttggtccttggtgctggtagaactgaaggctccatggatgctgctaatctattcaaacctatgcttgctcgcggccagcttaggtgcattggtgccaccacgcttgaggagtacaggaagtatgtggagaaggatgctgcattcgagaggaggttccaacaggtttttgtggcggaacctagtgtggttgataccattagcattcttcgtggcttgaaagagagatatgaaggccatcacggtgttagaattcaggaccgtgctttggttatggcagctcaattgtctaaccggtatataactgggcgtcatcttcctgacaaggcaattgatttggttgacgaggcttgtgcaaatgttagggttcaacttgatagtcagcctgaggaaattgataaccttgaaaggaagagaatgcagctagaagtggaacttcatgctctggagaaagagaaagacaaggctagcaaagcccgtcttgttgaagtgcggaaagaacttgatgacttgagggacaagcttcagcctttgatgatgaagtaccgaaaagagaaagagagggttgatgagattcgaaggctcaagaagaaaagagaagagcttctttttgctttacaagaggctgagagaagatatgatctggctagagctgcagacctgcgatatggagcaattcaagaggtggaaactgcaatacaacaacttgaagggagcactgaagagaatctgatgttgactgaaactgttggaccggagcaaatagctgaggttgtgagccgctggaccggtataccagttacaaggcttggccaaaatgaaaaagaaagattgattggacttggtgacagattgcacagcagagttgtaggacaagaccaagctgttaatgctgttgctgaggctgtgttgagatctagagctgggctaggaagacctcaacaaccaactggttcattcctattccttggtccaactggtgttggtaaaactgagcttgcaaaggctcttgctgagcaactatttgataatgaaaaccagttggtgagaattgatatgtccgaatacatggagcagcactcggtttcaagattgattggtgcaccaccagggtatgttggacatgaggaaggtggacaactaactgaagccgtaaggcgaagaccttacagtgtggtgctttttgatgaagtggaaaaggcacatacatctgtgttcaatactcttcttcaagttttggacgatgggaggttaactgatggacaaggccgtactgtggactttagaaacactgtaattatcatgacctcaaatcttggagcagagcacctcctcagtggactttcaggaaaatgtaccatgcaagttgctcgggatcgggtaatgcaggaggtgagaaggcaatttaggccagaattgctgaatcgacttgatgaaattgtggtatttgaccccctttcacatgaccaattgaggaaggttgcaaggctacaaatgaaggatgtagctagtcgtcttgctgagaaaggaattgccttggcagtcactgatgcagcactagactatatacttgccgagagctatgatccggtgtatggtgctagaccaataaggaggtggcttgagaagaaggtggtgacagagttgtctagaatgcttgtaagagaggagattgatgagaattcaacggtttacatagatgctggacccaatgggggcgagttggtctaccgtgtagaaaagaatggaggggttgttaatcctacaactgggcagaagtccgatatcttgattcagatacctaatggacatgcacctaaaactgatgctgttcaagcagtcaagaagatgaagattgaggaaattgatgatgatgaaatggaagagtga

SEQ ID NO: 6734 - protein, 911 aa, Glycine max
MNPEKFTHKTNEALASAHELAMSSGHAQLTPIHLAHALISDPNGIFVLAINSAGGGEESARAVERVLNQALKKLPCQSPPPDEVPASTNLVRAIRRAQAAQKSRGDTHLAVDQLILGILEDSQIGDLLKEAGVAVARVKSEVDKLRGKEGKKVESASGDTNFQALKTYGRDLVEQAGKLDPVIGRDEEIRRVVRILSRRTKNNPVLIGEPGVGKTAVVEGLAQRIVRGDVPSNLADVRLIALDMGALVAGAKYRGEFEERLKAVLKEVEEAEGKVILFIDEIHLVLGAGRTEGSMDAANLFKPMLARGQLRCIGATTLEEYRKYVEKDAAFERRFQQVFVAEPSVVDTISILRGLKERYEGHHGVRIQDRALVMAAQLSNRYITGRHLPDKAIDLVDEACANVRVQLDSQPEEIDNLERKRMQLEVELHALEKEKDKASKARLVEVRKELDDLRDKLQPLMMKYRKEKERVDEIRRLKKKREELLFALQEAERRYDLARAADLRYGAIQEVETAIQQLEGSTEENLMLTETVGPEQIAEVVSRWTGIPVTRLGQNEKERLIGLGDRLHSRVVGQDQAVNAVAEAVLRSRAGLGRPQQPTGSFLFLGPTGVGKTELAKALAEQLFDNENQLVRIDMSEYMEQHSVSRLIGAPPGYVGHEEGGQLTEAVRRRPYSVVLFDEVEKAHTSVFNTLLQVLDDGRLTDGQGRTVDFRNTVIIMTSNLGAEHLLSGLSGKCTMQVARDRVMQEVRRQFRPELLNRLDEIVVFDPLSHDQLRKVARLQMKDVASRLAEKGIALAVTDAALDYILAESYDPVYGARPIRRWLEKKVVTELSRMLVREEIDENSTVYIDAGPNGGELVYRVEKNGGVVNPTTGQKSDILIQIPNGHAPKTDAVQAVKKMKIEEIDDDEMEE

SEQ ID NO: 6735 - DNA, 2892 bp, Glycine max
  CDS (1)..(2892)
atgcaagtttcatcctcatggttcggaacattagtaccttccaaccgtttctcacacgttcgctctctccctctggaaccgtgttccaccacatcggtttctgctacctcgtaccctctatccacgcgcccctatagttctctttcgtttctcgtctctcaaagaaaaggcttctccctcgcctcgctggcccccatcagaactaataagaagagaagaagagcgtcgtcgttgagggtttctgcggtgttcgagaggttcacggagagagcgataaaggccatagttttgtcgcagagggaagccaaagcgcttggaagcgaattggtttacacgcagcatcttcttctggggctcatagccgaggaggatcgttcctccgatgggtttctcgcgtctggtgtcaccgtcgagaaggcgcgtgaggttgtgcgcagcgtctggcatcggaatagcttcgcacgtgccggctctggtgccgcacgtgccggggttgatggtgatagcaaagtgagtgccacgcaggttcccttttctgttaacgcaaagcgcgtgtttgaggctgcgtttgagtattcgaagtctttgggacacaagttcgttggccccgaacacattatcgttggtttggtcaaagtagatgatggaagtgttagtagggtcctttacagattggggacaaatggaagccagttggcatctgtggcattctccagactacaaaaagagattgccaaagatggtagagaaccgaatgtgttgtccaagggggtgcctaaccaatcgatttctagaaacggttctgatgctggagcctctgccaccacaggagaggggagtgctctatcacaattttgtgtggatctcactgcccgtgcgagtgaaggacgaatcgatccagttgtcggccgagaagttgaggttcagagaattattcaaattatatgccgaaaaaccaaaagcaatcccattcttcttggtgaagctggggttggaaaaactgctattgcagaggggctggcgcttcgcattgctaaggcagatgtttctccttttttattgacaaagcgtgtgatgtccttggatatagccctattaatggctggagcaaaagaaagaggagaactagaggaacgtgttacaaaattaattaaagacataataaagtcaggtgatgtcattctcttcattgatgaagttcacatacttgttcaggcagggacaattgggagaggaaataagggatctggccttgacatagctaatttacttaaacctgcacttggaaggggtcaatttcagtgtattgcatcaaccaccttagatgaatacagactttattttgagaaagatacggcattggctcgacggtttcaacctgtttgggttgatgagccgagtgaggatgacacaattaagatacttacgggtctacgtgagaaatatgaggcacatcacaaatgcagatacacagcagaggctataaaggctgcagttgatttgtcagctagatacatagttgataggtatctacctgataaagctattgacctcatagatgaagcaggaagtagagctcgtattgaagcctttaagaagaaaaaggaacatgaaactggaatcctttctaagtgcccagctgattactggcaagaaattaaagatgttaagtccatgcatgaaatggtaatggcattgcttacagtattttcctgttctctgtatcagatgcttacagagaataaacttaaatactatggcgcttctagcattgacgatactaatgaactcatactagactcatatttatcttctgcaaccaccaataatgaacctatagaagttgggccagaagatatagcagcagttgcttccctctggtcaggaattcctgtacagaagctcacagctgatcaaagaattcttctgttacatcttgagaatcaacttcggaagcgtgtgattggacaagaggaggctgttgctgccatttctagagctgtgaagagatcccgggttggccttaaggatcctgatagacccatagctgctatgttattctgtggcccaaccggtgttgggaaaacagaacttgcaaaatctttggcagcgtgttactttggatcggaggcagccatggtacgattagacatgagtgaatatatggaacggcatacagtgagcaaattgataggatctcccccaggttatgttggttatggagagggtggcgttttaacagaagcaattagaagaaaaccattcacactgttattgcttgacgaaatagaaaaagctcatccagatatattcaacattcttcttcaaattttagaagatggacaacttactgattctcagggtcggagagtttcatttaaaaatgcattggtggtgatgacttcaaatgtggggtctagtgccattgctaagggtcgacacaactccataggtttcttgattccagatgataaaaaaacatcatacaatggcttgaaatcaatggtaattgaagaactgaggacatattttcgtccagaattgctcaacaggatagatgaagtggtagtgtttcaacctcttgaaaagtctcagttgctccagatattggatgtgctgctgcaagacatgaagaaaagggtattgtccctaggaatccatgtaaaggtgtctgaagcagtgaagaaccttgtctgccaacaaggctataaccccacatatggtgctcgccctcttagaagggccattacatcactaattgaagaccctttgagtgaggcattactttatggagagtgcaagcaaggagacactgtcctcgttgatttggatgctaatggtaacccctttgttacaaatcagctcgatcagattgtcaacttatctgactga

SEQ ID NO: 6736 - protein, 963 aa, Glycine max
MQVSSSWFGTLVPSNRFSHVRSLPLEPCSTTSVSATSYPLSTRPYSSLSFLVSQRKGFSLASLAPIRTNKKRRRASSLRVSAVFERFTERAIKAIVLSQREAKALGSELVYTQHLLLGLIAEEDRSSDGFLASGVTVEKAREVVRSVWHRNSFARAGSGAARAGVDGDSKVSATQVPFSVNAKRVFEAAFEYSKSLGHKFVGPEHIIVGLVKVDDGSVSRVLYRLGTNGSQLASVAFSRLQKEIAKDGREPNVLSKGVPNQSISRNGSDAGASATTGEGSALSQFCVDLTARASEGRIDPVVGREVEVQRIIQIICRKTKSNPILLGEAGVGKTAIAEGLALRIAKADVSPFLLTKRVMSLDIALLMAGAKERGELEERVTKLIKDIIKSGDVILFIDEVHILVQAGTIGRGNKGSGLDIANLLKPALGRGQFQCIASTTLDEYRLYFEKDTALARRFQPVWVDEPSEDDTIKILTGLREKYEAHHKCRYTAEAIKAAVDLSARYIVDRYLPDKAIDLIDEAGSRARIEAFKKKKEHETGILSKCPADYWQEIKDVKSMHEMVMALLTVFSCSLYQMLTENKLKYYGASSIDDTNELILDSYLSSATTNNEPIEVGPEDIAAVASLWSGIPVQKLTADQRILLLHLENQLRKRVIGQEEAVAAISRAVKRSRVGLKDPDRPIAAMLFCGPTGVGKTELAKSLAACYFGSEAAMVRLDMSEYMERHTVSKLIGSPPGYVGYGEGGVLTEAIRRKPFTLLLLDEIEKAHPDIFNILLQILEDGQLTDSQGRRVSFKNALVVMTSNVGSSAIAKGRHNSIGFLIPDDKKTSYNGLKSMVIEELRTYFRPELLNRIDEVVVFQPLEKSQLLQILDVLLQDMKKRVLSLGIHVKVSEAVKNLVCQQGYNPTYGARPLRRAITSLIEDPLSEALLYGECKQGDTVLVDLDANGNPFVTNQLDQIVNLSD

SEQ ID NO: 6737 - DNA, 2634 bp, Glycine max
  CDS (1)..(2634)
atgatgagcaccttacgaatgcctgctttaagaatgtcgagtttctccggattacgtactcttaatcctatggattctctgtcgagaccacgccacacttttccgttgaatacaacttctaggcgcgagagggctaaaagatgtgtacctaaagctatgtttgagcgtttcacagagaaggcaatcaaagtcattatgctagcccaggaggaagcaagacgactggggcacaattttgttggaacggaacagattctattgggtcttattggcgaaggaaccggcattgctgctaaggttctgaagtcaatgggaattaatcttaaagatgctcgggttgaagtggagaaaattattggaaggggtagtggatttgttgccgttgagattccgtttactccccgggcaaagcgtgttttggaattctcactggaggaagctcgccaacttgaggtcataattatattggatctgagcacttgcttcttgcacgtgttcttgaaaatttgggtgctgatccaaacaatattcgtgctcaggctagttatccgcatggttggtgagggtgctgacagtgttggtgctactgttggccctggaagtagtaataacaataagatgccaactttggaggagtatggcacgaatttgaccaagctagcggaagagggaaaattggatcctgttgtgggtaggcagcaacaaattgaacgtgtcactcaaattttgggtcgtcgtaccaaaaataatccttgtcttattggggaacctggggttggcaagacagctattgctgaaggtcttgcccaaaggattgcaaatggtgatgttcctgaaaccatagagggaaagaaggttataacccttgatatgggtctactggtggctggaactaaatatcgtggagaatttgaggagagattgaagaaactaatggaggaaatcaaacaaagtgatgagataatactttttattgatgaagtgcacactctaattggagctggagcagctgagggggcaattgatgctgcaaacatattaaaaccagctcttgccagaggtgaactgcagtgtataggagccacgacactagatgaatataggaagcacattgaaaaggatccagctctggagaggcgattccagccagttaaagtgccagagccaactgtcgatgaaaccatacaaatactgaaaggacttagagaacgctatgaaattcaccacaagctccgttatacagatgatgctctcgtagccgctgctcagctgtcacaccaatatattagtgatcgatttttgcccgacaaagctatagatttaattgatgaagcaggttctcgagtccggcttcaacatgcccagttacctgaagaagcaagagagcttgacaaggaggtcaggcagattgtgaaggagaaagaagaatttgttcgcaatcaagactttgaaaaggctggagagctaagagacagagaaatggatcttaaggcccagatatctgcacttatagaaaaaggcaaggagatgagtaaggcagaaagcgaggcaggagatgaaggtcccatggtgactgaagttgacatacaacatattgtctcctcctggactggtattcctgtggagaaagtctcaactgatgaatctgatcgtctcctcaagatggaagagactttacacaagcgagtcataggtcaggatgaagcagtgaaagccataagcagggccatccgtcgagccagggttggactgaagaaccctaaccgtccaattgccagcttcatcttttctgggccaactggtgtggggaagtctgagttggccaaagcattggctgcatactactttggttctgaagaagccatgattcggcttgacatgagtgaattcatggaaaggcacacagtctccaaactcattggttcacctcctggatacgttggttacactgagggtggtcaactgaccgaggcagttcggcgtcgtccctacactgttgtactctttgatgagattgagaaagcccatcctgatgtattcaacatgatgcttcagatcctggaagatggaagattaacagacagcaaaggaagaactgtggacttcaagaacacgcttcttataatgacatcaaatgttggaagcagtgtgattgagaaaggaggccgtaaaataggatttgaccttgattatgatgagaaggatagcagttacaaccgaatcaagagcttggtgactgaggaactgaagcaatacttcaggccagagttcttgaataggttggatgaaatgattgtcttccggcaactcacaaaattggaggtaaaggagatagcagacataatgttgaaggaggtgtttgatagactgaaagccaaggaaattgatctctcagtaacagaaagatttagggagagggtggttgacgaaggatataatccgagttatggggctaggcctctaagaagagctataatgcgacttttggaggacagcatggctgagaagatgcttgctagagagattaaagagggtgactcagttatagttgatgctgactccgatggtaatgtgattgtgctcaacggtagtagtggtgccccagattcattagaagaagctcttcctgtgtaa

SEQ ID NO: 6738 - protein, 877 aa, Glycine max
MMSTLRMPALRMSSFSGLRTLNPMDSLSRPRHTFPLNTTSRRERAKRCVPKAMFERFTEKAIKVIMLAQEEARRLGHNFVGTEQILLGLIGEGTGIAAKVLKSMGINLKDARVEVEKIIGRGSGFVAVEIPFTPRAKRVLEFSLEEARQLEVIIILDLSTCFLHVFLKIWVLIQTIFVLRLVIRMVGEGADSVGATVGPGSSNNNKMPTLEEYGTNLTKLAEEGKLDPVVGRQQQIERVTQILGRRTKNNPCLIGEPGVGKTAIAEGLAQRIANGDVPETIEGKKVITLDMGLLVAGTKYRGEFEERLKKLMEEIKQSDEIILFIDEVHTLIGAGAAEGAIDAANILKPALARGELQCIGATTLDEYRKHIEKDPALERRFQPVKVPEPTVDETIQILKGLRERYEIHHKLRYTDDALVAAAQLSHQYISDRFLPDKAIDLIDEAGSRVRLQHAQLPEEARELDKEVRQIVKEKEEFVRNQDFEKAGELRDREMDLKAQISALIEKGKEMSKAESEAGDEGPMVTEVDIQHIVSSWTGIPVEKVSTDESDRLLKMEETLHKRVIGQDEAVKAISRAIRRARVGLKNPNRPIASFIFSGPTGVGKSELAKALAAYYFGSEEAMIRLDMSEFMERHTVSKLIGSPPGYVGYTEGGQLTEAVRRRPYTVVLFDEIEKAHPDVFNMMLQILEDGRLTDSKGRTVDFKNTLLIMTSNVGSSVIEKGGRKIGFDLDYDEKDSSYNRIKSLVTEELKQYFRPEFLNRLDEMIVFRQLTKLEVKEIADIMLKEVFDRLKAKEIDLSVTERFRERVVDEGYNPSYGARPLRRAIMRLLEDSMAEKMLAREIKEGDSVIVDADSDGNVIVLNGSSGAPDSLEEALPV

SEQ ID NO: 6739 - DNA, 2502 bp, Glycine max
  CDS (1)..(2502)
atgtttgagcgtttcacagagaaggcaatcaaagtaattatgctagcccaggaggaagcaagacgactggggcacaattttgttggaacggaacagattctattgggtctcattggcgaaggaaccggcattgctgctaaggttctgaagtcaatgggaattaacctcaaggatgctcgggttgaagtggagaaaattattggaaggggtagtggatttgttgctgttgagattccgtttacttcccgtgcaaagcgtgttttggaactctcactggaggaagctcgccaacttggtcacaattatattggatctgagcacttgcttcttggtctccttcgagagggtgagggtgtagcagcacgtgttcttgaaaatttggctgctgatccaaacaatattcgcgctcaggttatccgcatggttggtgagggtgctgacagtgttggtgctactgttggccctggaagtagtaataacaacaagatgccaactttggaggagtatggcaccaatttgaccaagctagcggaagaggggaaattggatcctgtcatgggtaggcagccacaaattgaacgtgtcactcaaattttgggtcgtcgtacaaaaaataatccttgtcttattggggaacctggggtcgggaagacagctattgctgaaggtcttgcccaaaggattgcaaatggtgatgtacctgaaaccatagagggaaagaaggttataacccttgatatgggtctgctggtagctggaactaaatatcgtggagaatttgaagagagattgaagaaactaatggaggaaatcaaacaaagtgatgagataatactctttattgatgaagtgcacactctaattggagctggagcagctgagggagcaattgatgctgcaaatatattaaaaccagctcttgccagaggtgaactgcagtgtataggagccacaacactggatgaatataggaagcacattgaaaaggatccagctttggagaggcgattccagccagttaaagtgccagagccaactgtcaatgaaaccatacaaatactgaaaggactcagagaacgctatgaaattcaccacaagcttcattacacagatgatgctcttgtagctgctgcccagctatcacaccaatatattagtgatcgatttttgccagacaaagctatagatttaattgatgaagcaggttctcgagtccggcttcaacatgcacagttacctgaagaagcaagagagcttgacaaggaggttagacagattgtaaaggagaaagaagaatctgttcgcaatcaagactttgagaaggccggagagctaagagataaagaaatggatcttaaggcgcagatatctgcacttatagaaaaaggcaaggagatgagtaaggcagaaagtgaggcaggagatgaaggtcccatggtcactgaagttgacatacaacatattgtctcctcctggactggtattcctgtggagaaagtctcgactgatgaatctgatcgcctcctcaaaatggaagagactttacacaagcgagtcataggtcaggatgaagcagtgaaagccataagcagggccatccgtcgagccagggttggactgaagaaccctaaccgtccaattgccagcttcatcttttctgggccaactggtgtggggaagtctgagttggccaaagcattggctgcatactactttggttctgaagaagccatgattcggcttgacatgagtgaattcatggaaaggcacacagtctcgaaacttattggttcacctcctggatacgttggttacactgagggtggtcaactgactgaggcagttcgccgtcgtccctatactgttgtactctttgatgagattgagaaagcccatcctgatgtattcaacatgatgcttcagatcctggaagatggaagattaacagacagcaaaggaagaactgtggacttcaagaacacgcttcttataatgacatcaaatgttggaagcagtgtaattgagaaaggaggccgtaaaataggatttgaccttgattatgatgagaaggatagcagttacaaccgaatcaagagcttggtgactgaggaactgaagcaatactttaggccagagttcttgaataggttggatgaaatgattgttttcaggcaactcacaaaattggaggttaaggagatagcagacataatgctgaaggaggtgttccagagactgaaagctaaagagattgatctttcagtgacagaaagatttagggagagggtggttgacgaaggatataatcctagttatggggctaggcctctaagaagagccataatgcaacttttggaggatagcatggctgagaagatgcttgctagagagattaaggagggtgactcagttatagttgattctgattctgagggtaatgtgattgtgctcaacggtagtagtggtgccccagattcactagaagatgtcttagttagttga

SEQ ID NO: 6740 - protein, 833 aa, Glycine max
MFERFTEKAIKVIMLAQEEARRLGHNFVGTEQILLGLIGEGTGIAAKVLKSMGINLKDARVEVEKIIGRGSGFVAVEIPFTSRAKRVLELSLEEARQLGHNYIGSEHLLLGLLREGEGVAARVLENLAADPNNIRAQVIRMVGEGADSVGATVGPGSSNNNKMPTLEEYGTNLTKLAEEGKLDPVMGRQPQIERVTQILGRRTKNNPCLIGEPGVGKTAIAEGLAQRIANGDVPETIEGKKVITLDMGLLVAGTKYRGEFEERLKKLMEEIKQSDEIILFIDEVHTLIGAGAAEGAIDAANILKPALARGELQCIGATTLDEYRKHIEKDPALERRFQPVKVPEPTVNETIQILKGLRERYEIHHKLHYTDDALVAAAQLSHQYISDRFLPDKAIDLIDEAGSRVRLQHAQLPEEARELDKEVRQIVKEKEESVRNQDFEKAGELRDKEMDLKAQISALIEKGKEMSKAESEAGDEGPMVTEVDIQHIVSSWTGIPVEKVSTDESDRLLKMEETLHKRVIGQDEAVKAISRAIRRARVGLKNPNRPIASFIFSGPTGVGKSELAKALAAYYFGSEEAMIRLDMSEFMERHTVSKLIGSPPGYVGYTEGGQLTEAVRRRPYTVVLFDEIEKAHPDVFNMMLQILEDGRLTDSKGRTVDFKNTLLIMTSNVGSSVIEKGGRKIGFDLDYDEKDSSYNRIKSLVTEELKQYFRPEFLNRLDEMIVFRQLTKLEVKEIADIMLKEVFQRLKAKEIDLSVTERFRERVVDEGYNPSYGARPLRRAIMQLLEDSMAEKMLAREIKEGDSVIVDSDSEGNVIVLNGSSGAPDSLEDVLVS

SEQ ID NO: 6741 - DNA, 2769 bp, Oryza sativa Japonica Group
  CDS (1)..(2769)
atgggccggctcggtggaggcgggctgctggttccgccgccgccgccgcagcggaggctgttccaccccacgcaggcggcgaggtacagcacctcgtcgtcgtctcagataactccaggagaatttactgagatggcctgggagggggttgtcggcgcggttgatgcagctagaatgtcgaagcaacaagtagtggaagcagagcacctgatgaaagctcttctggagcagaaggatggtttagcgcgcagaatattttcgaaagctggaatagataacacatctgtcctgcaagctactgatgagttcatctcgagacagccaaaggttgttggcgatacaagtggaccgatcattgggtcaagctttgtatcaattttggataatgcaaggaagcataagaaagaatatgctgatgagtttgtatctgttgagcacatattgcgagcattcacagaagataagaggtttggacaacagctgttcagagatctcaaaattggggagaatgagttgaaggaagctatctccgctgtacgtggcagtcagcgggtcacagatcagaatccggaggggaagtaccaggctctagagaagtatggtattgacatgacagaattagctcgacgtggaaaactggatcctgttattggccgtgatgatgaagtgcgacgatgcattcagatcctttgcaggagaactaagaataatcctgtaattattggtgagccaggagtcggcaaaactgctatcgctgaaggattggcacagcgtattgtgcggggagatgttcctgaacctttacagaatagaaagcttatttcattggacatgggagcattacttgctggggctaaattccaaggtcaatttgaagagagacttaaggctgttctgaaggagatcactgcctcgaatgggcagatcatcttgttcattgatgagatccacactattgttggtgcaggagcagcaggtggggcaatggatgctggtaatttgctgaagccaatgttaggtcggggtgaactccgttgcattggagcaacaacactagatgagtacaggaagtacattgagaaggatgctgctctggagcgtaggttccagcaggtttattgtggtgagccagcagttgaggatacaatctctatactgcgtggcctaagagagcggtatgaactgcaccatggtgtcaaaatatcagatggagctcttgtttctgcggctgttttatcagatcgctacatcactggacgttttttgcctgataaagctattgacctagttgatgaagcagctgctaagctgaaaatggagataacatcgaaacctattgaattggatgaggtagatagggaaatcataaggcttgaaatggagaagctctcattgaagaatgataccgataaagcctccaaacagcgactgagcaagcttgaagctgatctagaatctctgaagcagaagcagaaaaacctttcagaacattgggaatatgagaagtccttgatgactcgcataagatcgatcaaggaagagactgacagagttaacctggagattgaagctgctgagagagagtatgatttgaaccgtgcagctgagctcaagtacggaacacttctgtcgctacaaaaacagcttgaagaggctgagaacaaactcatggaattccagcagtcaggcaagtcaatgcttcgagaagaggtgactgatgttgacattgctgagattgttagcaagtggactggtattccagtgtcaaaccttcaacaatctgaaaaggaaaagctactgctattggaagatgtactccacaagagggttattggccaagatattgcagtgaagtcagtggctaatgcaatccgtcgttctagggcaggcctatcagaccctaaccgtcccatagcaagcttaatgtttatgggtccaacaggtgtaggaaagaccgaactggggaaaacactagctgaattccttttcaacacagagaatgctctaatacggattgatatgagcgagtacatggaaaagcatgccgtctcccgtttggttggagcccctcctggctatattggttatggggaagggggccaactgacagaagctgttcgtcgtaggccttattctgtggttcttttcgatgaaattgagaaagcgcaccaggatgtgttcaacatcttattgcaacttttggatgatggaagaataaccgactctcagggcagaacagtcagctttactaactgtgttatcatcatgacttcaaacattgggtcgccattgattcttgatacgcttagaaacacatcagacagcaaggaggcagtttatgaaataatgaagaagcaagtgattgacatggctcggcagtcattccggccagagtttttgaataggatagatgagtacattgtattccagccgctggacaccacagagataaatcgcatcgtggagatccagctgaaccgagtcaagaaccggctgaggcaacagaagattcatctgcagtacacaccagaagctgtggagcatcttggctctctcggctttgaccctaactacggtgctaggcctgtgaagagggtgatccagcagatggtagagaacgagatcgccctcagtgtcctgaagggcgacttcaaagaagacgacaccgtcctcgtcgacgtgagctccgtggcgatcgcgaaaggccttgctccacagaagaagcttgtcctccagaggggagggattgagaggagaagagaagattga

SEQ ID NO: 6742 - protein, 922 aa, Oryza sativa Japonica Group
MGRLGGGGLLVPPPPPQRRLFHPTQAARYSTSSSSQITPGEFTEMAWEGVVGAVDAARMSKQQVVEAEHLMKALLEQKDGLARRIFSKAGIDNTSVLQATDEFISRQPKVVGDTSGPIIGSSFVSILDNARKHKKEYADEFVSVEHILRAFTEDKRFGQQLFRDLKIGENELKEAISAVRGSQRVTDQNPEGKYQALEKYGIDMTELARRGKLDPVIGRDDEVRRCIQILCRRTKNNPVIIGEPGVGKTAIAEGLAQRIVRGDVPEPLQNRKLISLDMGALLAGAKFQGQFEERLKAVLKEITASNGQIILFIDEIHTIVGAGAAGGAMDAGNLLKPMLGRGELRCIGATTLDEYRKYIEKDAALERRFQQVYCGEPAVEDTISILRGLRERYELHHGVKISDGALVSAAVLSDRYITGRFLPDKAIDLVDEAAAKLKMEITSKPIELDEVDREIIRLEMEKLSLKNDTDKASKQRLSKLEADLESLKQKQKNLSEHWEYEKSLMTRIRSIKEETDRVNLEIEAAEREYDLNRAAELKYGTLLSLQKQLEEAENKLMEFQQSGKSMLREEVTDVDIAEIVSKWTGIPVSNLQQSEKEKLLLLEDVLHKRVIGQDIAVKSVANAIRRSRAGLSDPNRPIASLMFMGPTGVGKTELGKTLAEFLFNTENALIRIDMSEYMEKHAVSRLVGAPPGYIGYGEGGQLTEAVRRRPYSVVLFDEIEKAHQDVFNILLQLLDDGRITDSQGRTVSFTNCVIIMTSNIGSPLILDTLRNTSDSKEAVYEIMKKQVIDMARQSFRPEFLNRIDEYIVFQPLDTTEINRIVEIQLNRVKNRLRQQKIHLQYTPEAVEHLGSLGFDPNYGARPVKRVIQQMVENEIALSVLKGDFKEDDTVLVDVSSVAIAKGLAPQKKLVLQRGGIERRRED

SEQ ID NO: 6743 - DNA, 2739 bp, Zea mays
  CDS (1)..(2739)
atgaatccggacaacttcacccacaagacgaacgaggcgatcgtgggggcgcacgagattgcggtggaggccggccacgcgcagctcacgccgctgcacctggccgcagtgctggctgcggacaagggcggcatcctgcggcaggccatcacgggggcgtcggggggcgacggagcggccggggactcgttcgagcgcgtgctgaacaactcgctcaagaagctgccgtcgcagtccccgccgccggactccgtcccggcgtccacggcactgatcaaggtcatccgccgggcgcagtccgcgcagaaaaaacgcggggactctcacctcgccgtcgaccagctgctgctcggcctgctcgaggactcgcagatctccgactgcctcaaggaggccggcgtgtccgcggcgcgggtgcgcgccgagcttgagaagctccgcggcggggaggggcgccgcgtggagtccgcgtcgggggacaccaacttccaggcgctcaagacatacggccgggacctcgttgagcaggccgggaagctggaccccgtcatcggccgcgacgaggagatccgccgcgtggtgcgcatcctctcgcgccgcactaagaacaaccccgtcctcatcggcgagcccggcgttggcaagacggccgtcgtggagggcctcgcgcagcgcatcgttcgcggcgacgtgcccagtaacctcctcgacgtccgcctcatcgcgctcgacatgggcgcgctcgtcgcgggcgccaagtaccgcggcgagttcgaggagcggctcaaggccgtgctcaaggaggtggaagaggccgaggggaaggtcattctcttcatcgacgagatacacctcgtcctgggcgcgggcaggacggagggttccatggacgcggccaacctgttcaagccaatgctggcgaggggacagctcaggtgcatcggcgccaccacgctggaggagtaccgcaagtacgtggagaaggacgcagcgttcgagcggcggttccagcaggtgttcgtcgcggagccgagcgtgcccgacaccgtcagcattctgaggggactcaaggagaagtacgaggggcaccatggcgtgaggatccaggaccgcgccctcgtggtcgcggcacagctatccgcgaggtacatcatgggtcggcacctgcctgacaaagccatagacctggtggacgaggcctgcgccaatgtgagggtgcagctcgacagccagccggaggagattgataacctggagaggaagagaatccagcttgaggttgagctccacgcgctcgagaaggagaaggacaaggccagcaaagcccggctgatcgaggtcaggaaggaattggacgatctgagggacaagctgcagcccctgaccatgaagtacaggaaggagaaggagagaatcgatgagatcaggaagctgaagcagcgccgcgaggagctccagttcaccctgcaggaggccgagcgccggatggacctggcccgtgtggccgacctcaagtacggcgccctccaggaaatcgacgccgcgatctccaagctggagagcgaaacaggggagaacctgatgctcaccgaaaccgtcggccctgaacaaattgcagaggtggtgagccgttggacgggtattccagtgacccggcttggccagaacgacaaggagaggctggtcggcctggctgacaggcttcaccagagggtggtcggccagacagaggctgtgagcgccgtcgcagaggcggtgctgaggtcgagggccggtcttggcaggccacaacagcccactggctcgttcctgttcctgggtccgactggcgtggggaaaactgagctagccaaggccctagccgaacagctgttcgacgacgagaaccttcttgtccgcatcgacatgtcggagtacatggagcagcactcggttgctcgcctcatcggagcaccgcctggctacgtcggccatgaagagggtgggcagctgactgaacaagtgaggaggaggccgtacagcgtgatcctgttcgacgaggtcgagaaggcccatgtcgccgtgttcaacaccctgctccaggtcctcgacgacggcaggttgacggatgggcaaggcaggacggtggacttcaggaacaccgtgatcatcatgacatcgaacctcggcgccgagcacctcctcgctgggatggtgggcaagaactccatgaaggtcgctcgcgatctggtcatgcaggaggtgaggaggcacttccgacccgagctgctgaaccgtctcgacgagatcgtgatcttcgatcctctgtcccacgagcagctgaggaaggtcgctcgccttcagatgaaggatgtggccgtccgtcttgccgaaaggggcatcgctctggctgtgaccgacgccgcattggacatcatcttgtctctctcttacgatccggtgtacggcgcgcggccaatcaggaggtggatcgagaagagggtggtgacgcagctgtcgaagatgctgatccaggaggagatcgacgagaactgcacggtctacatcgacgccgcgcccggcaaggacgagctggtctacagggtggaccggagcggcggtctggtgaacgctgagacggggatgaagtcggacatcctgatccaggtccccaacagctccaccaggagcgacgctgcgcaggccgtcaagaagatgaggatcatggaggaggacgaggacggtatggacgaggagtaa

SEQ ID NO: 6744 - protein, 912 aa, Zea mays
MNPDNFTHKTNEAIVGAHEIAVEAGHAQLTPLHLAAVLAADKGGILRQAITGASGGDGAAGDSFERVLNNSLKKLPSQSPPPDSVPASTALIKVIRRAQSAQKKRGDSHLAVDQLLLGLLEDSQISDCLKEAGVSAARVRAELEKLRGGEGRRVESASGDTNFQALKTYGRDLVEQAGKLDPVIGRDEEIRRVVRILSRRTKNNPVLIGEPGVGKTAVVEGLAQRIVRGDVPSNLLDVRLIALDMGALVAGAKYRGEFEERLKAVLKEVEEAEGKVILFIDEIHLVLGAGRTEGSMDAANLFKPMLARGQLRCIGATTLEEYRKYVEKDAAFERRFQQVFVAEPSVPDTVSILRGLKEKYEGHHGVRIQDRALVVAAQLSARYIMGRHLPDKAIDLVDEACANVRVQLDSQPEEIDNLERKRIQLEVELHALEKEKDKASKARLIEVRKELDDLRDKLQPLTMKYRKEKERIDEIRKLKQRREELQFTLQEAERRMDLARVADLKYGALQEIDAAISKLESETGENLMLTETVGPEQIAEVVSRWTGIPVTRLGQNDKERLVGLADRLHQRVVGQTEAVSAVAEAVLRSRAGLGRPQQPTGSFLFLGPTGVGKTELAKALAEQLFDDENLLVRIDMSEYMEQHSVARLIGAPPGYVGHEEGGQLTEQVRRRPYSVILFDEVEKAHVAVFNTLLQVLDDGRLTDGQGRTVDFRNTVIIMTSNLGAEHLLAGMVGKNSMKVARDLVMQEVRRHFRPELLNRLDEIVIFDPLSHEQLRKVARLQMKDVAVRLAERGIALAVTDAALDIILSLSYDPVYGARPIRRWIEKRVVTQLSKMLIQEEIDENCTVYIDAAPGKDELVYRVDRSGGLVNAETGMKSDILIQVPNSSTRSDAAQAVKKMRIMEEDEDGMDEE

SEQ ID NO: 6745 - DNA, 2433 bp, Aquifex aeolicus VF5
  CDS (1)..(2433): transl_table=11
atgtttgagaagttcacagaaagggcaagacaagttatcttgagggcgagggaagaagccctcgagctgggacacagctacttgggaagtgaacatattttgcttgctctgataaaggatgaggacatacccgtcctcgtcctcagcaagctgggtgtctctcctgagaagataagaaaggccataatgggccaaataactaagggaagccactcgggagaggtactcttcgcacccgacgcaaaaagggtaatagagtttgcagttgaagaagcgagaattcttcaccaccagttcgtaggtcccgaacacctacttatcggagtggttagagaaaagacgggactcggtggaagaattttaaggagctttggactggacgagtactccgtaaggagagaggtacttcaactactcggagaacttccccctcaagaaagccagaggtacgtatccactcctaaccttgacaggttctcaagggacctcacccaaatggcaagggaaggaaagctcgacccagtaataggcagggaaaaggaaatagagagagttatccagatactcgtaagaagaaggaagaacaaccctgtcttgctcggagaccccggagttggtaagacggcgatagtagaagggctggctcaaaggatagcaaataaggaagttcccgaaccgctactcaataagagggtagtggctttagaccttgcggcactagttgcgggaaccaagtacagaggacagttcgaagaaaggcttaagaacatcttaaaagaacttgagaaggctaacaacgtaatactcttcatagacgaacttcacacactcgttggagcgggttctgcggaaggctcgatagacgcatccaatatgctaaaacccgccctcgcgagaggtgaaattcaggtaataggagctaccaccgtagacgagtacaggaagtacatagaaaaggacggagcactggagagaaggttccagcccgtttacgtagaacagccatcacccgaggatacgatccagatactttacggactcaaacccaagtttgaagagttccacaaggtagagtacacacccgaggcaatagaaaaggctgtggaactctccgtcaagtacataaccgacagaaacctgccagataaggctatagacgttatggacgaggcgggagcactcgtaaagctgaaggcaactcaactccctcctgaactcaaggagatagaggaaaagattaaggaactcgagaaggaaaaggaaaaggctgtaaaggaacaggactacgagaaggctgcaaagataagggacgaagagttgagactcagggctaagttcgaaacgatgaaggctaagtggaaggaagaaatggaaaagaacagacccaaagttacggacgaggacgttgcagaagtagtcgcaaggtggacgggcgttcccgtgaagagggtacacgaaagtgatgcggagaaactcctccacatagaagaagaattgaagaagagggttgtaggtcaggacgaggctataaaggcagtagcgaaggcgataagacgttcaagagtcggactgaaaggaaaacacagacccataggcgtattcatgttcctaggacctactggtgtgggtaagaccgaaaccgcgaaggcacttgcggaatacctattcggaacggaagacgcactcatcaggtttgatatgtccgagtacatggaaaagcacaccgtttcaagactaatcggtgcacctcccggatacgttggatacgaagaaggtggacagctcacagaggcggtaaggagaagaccttacagcgttctcctatttgacgaaatagagaaggcccacccagacgtattcaacatcttcctccagatattcgacgacggaagactaacggacggactcggaaggaccgttgacttctccaacaccataataatcatgacctcaaacctcggagctagactcatcacaggcggaacgatgggattcgaaaagaaacagggactccttaacttcgaagagatgaggaaaaacgtccttgatcaggtaaagagaaccttcagccctgaattcctaaacagactggacgaaattatagtgttcaggcctctcgagaagaaagacatagaacagatactcgaactacaactaaaagagataaacgaaaaactaaaagactggaacgtgagagtaaaactccacaagtccttcgtaaactggatcatagaaaaagagtacaagcccgaattcggagcaaggagcttgaagagggctctccaaagacacgttgaagatctgctcgctgaagaactcataaagggaacgctcaaaggcgtagaagaagtagaaataagggtaaggaacgacaagccctacctcaaacccgtaaagaagaaggaaaaagtagaagcccttctcgaaaagtaa

SEQ ID NO: 6746 - protein, 810 aa, Aquifex aeolicus VF5
MFEKFTERARQVILRAREEALELGHSYLGSEHILLALIKDEDIPVLVLSKLGVSPEKIRKAIMGQITKGSHSGEVLFAPDAKRVIEFAVEEARILHHQFVGPEHLLIGVVREKTGLGGRILRSFGLDEYSVRREVLQLLGELPPQESQRYVSTPNLDRFSRDLTQMAREGKLDPVIGREKEIERVIQILVRRRKNNPVLLGDPGVGKTAIVEGLAQRIANKEVPEPLLNKRVVALDLAALVAGTKYRGQFEERLKNILKELEKANNVILFIDELHTLVGAGSAEGSIDASNMLKPALARGEIQVIGATTVDEYRKYIEKDGALERRFQPVYVEQPSPEDTIQILYGLKPKFEEFHKVEYTPEAIEKAVELSVKYITDRNLPDKAIDVMDEAGALVKLKATQLPPELKEIEEKIKELEKEKEKAVKEQDYEKAAKIRDEELRLRAKFETMKAKWKEEMEKNRPKVTDEDVAEVVARWTGVPVKRVHESDAEKLLHIEEELKKRVVGQDEAIKAVAKAIRRSRVGLKGKHRPIGVFMFLGPTGVGKTETAKALAEYLFGTEDALIRFDMSEYMEKHTVSRLIGAPPGYVGYEEGGQLTEAVRRRPYSVLLFDEIEKAHPDVFNIFLQIFDDGRLTDGLGRTVDFSNTIIIMTSNLGARLITGGTMGFEKKQGLLNFEEMRKNVLDQVKRTFSPEFLNRLDEIIVFRPLEKKDIEQILELQLKEINEKLKDWNVRVKLHKSFVNWIIEKEYKPEFGARSLKRALQRHVEDLLAEELIKGTLKGVEEVEIRVRNDKPYLKPVKKKEKVEALLEK

SEQ ID NO: 6747 - DNA, 2376 bp, Thermotoga maritima MSB8
  CDS (1)..(2376): transl_table=11
atgttcaatctggaagagtacacggaaaaggcgcagaaagtaatgatgagcattcaggatataatgacccgatacagacaaaaccagctttccagtgagcacatactgctcgcgattctggaagaaggaaacaacgttggtgtagaacttctgaaggagctgaacgtggatataaacaggctcaaagatgaggtggaggtgttcattgggaaatacggggttagagtccctgaaggagcatctgtttctcagattttcataactccggacgcgaggcatgtcattgaaaaagcgagagaagaagcgagaagaatgggagattcaaaaataggaaccgagcaccttattttggggatggtcctgtcacctgattccacggccttccgaatcctctcgagatacggtgtaacacctgagagagtctacgaagcaataaggaagatcagatcaacgggtaaaacagatgaagcagagaacgtggaagcgctcgctcgcttcacagtggatctcacacagctagcccgcgaaaaaaagctcatgcctgtagtggatcgtgaaaaggaaatcagaagggtgatacagatactgtccagaagaacgaagaacaatccggtcctcataggagacccgggggtgggaaagactgctgttgtcgaggggctcgcccagagaatagttgaagggaaagtccctctgtttttgagaaacgtcagagtcttgaaactcgacatgggcagattggtggcagggacccgtttcagaggagattttgaagaaagactgaaacgtcttcttgatgaattgaagaggaaaaaaggagaagtaatactcttcatcgacgaggtgcacacggtggtaggagcgggagcagccgaaggtgctctcgacgccgcgaacataatgaaaccagaactcacaacgggagagattcagataataggagcaaccaccgttgaagagtacagaaaatacatagagaaagacagggcgcttgagagaagattccagccggtcatggtggaagagccgacggtcgagcagacaattgaaatactgaaaggattaagaaaggtctttgaagaacatcatcacgtgaagataacggatgacgctctggaagccgcggcgaaactctccgcacgatacataaccaacagattcctcccggacaaggccgttgatctgatagacgaagcggcagcgtacgtgcgtcttgaatcctcgtacccttcagaagaactcctgaaactcgaagaagagatcaaaaaccttgaagacaaaataaacgacgccgttgtgaagggagagtacgaagaagcggcaaagctgaaggtcgaactccagaaattgaaaaacgaatacgaagaaaaaaggaaaaaacaagaaaaggtggaaccggttgtcgatgagaacgttgtggcaaagatcgtggaacagtggaccggcattcccgtgtctcgaatcatggaatccgaaagagagaaactcctgaaactcgaagaattcatccaccagcgcttggtgaatcaggaggaagccgtgaagatagtggcacggaccataagacgtgcaagggtcggtatcaagaatccgagaaggcccatcggtgtctttctgttcctcggaccaacgggcgtgggaaagacagaactcgccagaactctcgcagacgtgctcttcggcagcgaagacgccatgatcaggctcgacatgagtgaatacatggagaaacactccgttgccagactcataggagcacctccgggttacgtgggttatgaagagggagggcagcttaccgaggctgtgagaaaaaggccttacagtgtgattctcctcgacgaaatagaaaaggcgcatccagacgtattcaacatcctgcttcaagtgttcgaagacgggcgattgactgatggaaagggaaacaccgtggacttcagaaacaccatcatcatcatgacgagcaacataggaagtgagaagatcctcgaaatgtcggaaaacggtgtgagaattgagatagaaaaagaactgcgaaacaccttcaaacccgagttcctgaacagaatagacgccatagtttacttcaaaccgctcacgatggaagaagtgaagaagatagtggaaatcatggtgagacagctccaggaaatactgaaagagaagaacatctccatcgagcttacagaaagagcgaaggagtacctggcagaagcgggttacgtgccatctctcggtgcaagaccgcttcgaagaatcatagaactcgaactcgagtcgatgatagcggataaaatactggaaggagagataaaagaaggagacagggttctggtcgacgcggacgaatacggtctgaagatagagaggaggtga

SEQ ID NO: 6748 - protein, 791 aa, Thermotoga maritima MSB8
MFNLEEYTEKAQKVMMSIQDIMTRYRQNQLSSEHILLAILEEGNNVGVELLKELNVDINRLKDEVEVFIGKYGVRVPEGASVSQIFITPDARHVIEKAREEARRMGDSKIGTEHLILGMVLSPDSTAFRILSRYGVTPERVYEAIRKIRSTGKTDEAENVEALARFTVDLTQLAREKKLMPVVDREKEIRRVIQILSRRTKNNPVLIGDPGVGKTAVVEGLAQRIVEGKVPLFLRNVRVLKLDMGRLVAGTRFRGDFEERLKRLLDELKRKKGEVILFIDEVHTVVGAGAAEGALDAANIMKPELTTGEIQIIGATTVEEYRKYIEKDRALERRFQPVMVEEPTVEQTIEILKGLRKVFEEHHHVKITDDALEAAAKLSARYITNRFLPDKAVDLIDEAAAYVRLESSYPSEELLKLEEEIKNLEDKINDAVVKGEYEEAAKLKVELQKLKNEYEEKRKKQEKVEPVVDENVVAKIVEQWTGIPVSRIMESEREKLLKLEEFIHQRLVNQEEAVKIVARTIRRARVGIKNPRRPIGVFLFLGPTGVGKTELARTLADVLFGSEDAMIRLDMSEYMEKHSVARLIGAPPGYVGYEEGGQLTEAVRKRPYSVILLDEIEKAHPDVFNILLQVFEDGRLTDGKGNTVDFRNTIIIMTSNIGSEKILEMSENGVRIEIEKELRNTFKPEFLNRIDAIVYFKPLTMEEVKKIVEIMVRQLQEILKEKNISIELTERAKEYLAEAGYVPSLGARPLRRIIELELESMIADKILEGEIKEGDRVLVDADEYGLKIERR

SEQ ID NO: 6749 - DNA, 2628 bp, Deinococcus radiodurans R1
  CDS (1)..(2628): transl_table=11
ttgacaataggacactcaagtttcagaatgagggcagttaaaccatgcccccactctggaggttttcctttgaatcctgaacgctttaccgaggcgagtgccgtcgccatcaatgcggcgcagcaactcgcgcaagagaaccacaaccaaaacctgacgcacttccatgtgctgcgaaccctgctcgacaacgacaccgcttcccgcgccctgacgctggcgggcggcgacctgaacacggccagagccgcgctggacgccgaaatcgccaagctgcccaaagtgcagggcagcgacggccagctttacctcgacccggcgctcaaccgcgcgtttcagaaggccgacacgctcgccgcgcaactcggcgacagtttcgtggccgccgatacgctgctgctggcgctgcggggcgagtaccggggccggggcctgcccgacgaagtgagcctgaaccgcgccgtgaccgagcagcgcaaggggaaaaccgtgaccaacaaaaccagtgaacagcaattcgacgcgctgaacaaatacggcaccgacctgacccagcgcgcccgcgacggcaaattcgacccggtgatcggccgcgacgaggagatccgccgcgtcatgcagattctgctgcgccgcagcaaaaacaaccccgtcctgatcggcgaacccggcgtgggcaagaccgccatcgccgagggcctcgccatgcgcatcgtcaagggcgacgtgcccgagggcctgcgcgacaagaaaatcgtctcgctggaaatgggcagtctgctcgcgggcgccaagttccggggcgagttcgaggagcgcctcaagggcgtcattgacgaagtcgtgaagtcggcaggcgaaatcatcctgttcgtggacgagattcacaccatcgtcggcgcgggcaagaccgagggcagccccgacgcgggcaacatgctcaagcctgcgctggcacgtggtgaactgcacctgatcggcgcgaccacgctcgacgaataccgcgaaatcgagaaggacgcggccctcgaacggcgtttccagccggtcttcgtggacgaacccagcgtggaagacaccatttccatcctgcgcggcatcaaggagcgctatcaggtccaccacaacgtcgaaatcaccgaccctgcgctggtggccgccgcgacgctgtccaaccgttacatcaccgaccggcaactgcccgacaaggcgattgacctgatcgacgagtcggcggcccggctgcggatggcgctggaatcgagccccgagcgcatcgaccagctctcgcgccgcaagttgcaactggaaatcgagcgcgaggccctcaagcgcgagaaggacgtggattcgcaaaaccgtctgctggacatcgaaaatcagctcaagacgctgactgacgagctgaacgaagtccgcagccgctgggaagccgagcgcggtgaggtggccgccctgcgcgaaaagcgtgaaaagctcgacgcggtgcgcacccagatcgaaaaggcccggcgcgactatgatctcgaagaagccgcccggctggaatacggcgaactgcctgcgctggaaaaagacgtgcaggacctggaaaagaaactcaagtctgccgaattcgcccacatggaagtcaccgaggaagacatcgccgccgtggtcagccgctggaccggcattcccgtcagcaagctgatggaaggcgaacgcgaaaagctgctgcacctcgaagagcaactgcacgggcgcgtcatcgggcaggaccgcgcgatcgtctccgtctccgacgccattcgccgggcacgcgcgggcctcaacgaccccaaccgtccgctgggctccttcatgttcctggggccgtccggggtgggcaaaaccgagctggccaaagcgctggccgagttcctgttcgacagcagcgacgcgatggtgcgcatcgacatgtccgagtacatggagaaacatacggtggcccgcctgatcggggcccctcccggatacgtgggcttcgaggaaggcggccagctgaccgaggccgtgcgccgccgcccctacgccgtgattctcttcgacgagatcgaaaaagcgcaccccgacgtgttcaacgtgctgctgcaagtactcgacgatggtcgcctgaccgacgggcagggccgcacggtggatttccgcaacaccctgatcatcatgaccagcaacatcggttcgccgctgattctggagatgcagcagcggggcgaggacgcggagacgatcaagtcggcagtgatggacgagctgcgcggcgagttccggcccgagttcctcaaccgcgtggacgacatcatcgtgttcgacgcgctgacggcgaaggatttgcagtccatcgtggacattcagctgggcggcctgcggaggcgattggccgagcgccgcatcaccctgcacctgaccgaggacgccaaggacaagctggccgaactgggctacgaccccgcctacggcgcgcgtccgctgcggcgcaccatcagccagtacattgaaacgccgctggcccgcgagattctgggcggccagattcaggacggcagcgtgctgaacgtggattacggcgacggtggatttacctttaacagcggctctttgaactga

SEQ ID NO: 6750 - protein, 875 aa, Deinococcus radiodurans R1
MTIGHSSFRMRAVKPCPHSGGFPLNPERFTEASAVAINAAQQLAQENHNQNLTHFHVLRTLLDNDTASRALTLAGGDLNTARAALDAEIAKLPKVQGSDGQLYLDPALNRAFQKADTLAAQLGDSFVAADTLLLALRGEYRGRGLPDEVSLNRAVTEQRKGKTVTNKTSEQQFDALNKYGTDLTQRARDGKFDPVIGRDEEIRRVMQILLRRSKNNPVLIGEPGVGKTAIAEGLAMRIVKGDVPEGLRDKKIVSLEMGSLLAGAKFRGEFEERLKGVIDEVVKSAGEIILFVDEIHTIVGAGKTEGSPDAGNMLKPALARGELHLIGATTLDEYREIEKDAALERRFQPVFVDEPSVEDTISILRGIKERYQVHHNVEITDPALVAAATLSNRYITDRQLPDKAIDLIDESAARLRMALESSPERIDQLSRRKLQLEIEREALKREKDVDSQNRLLDIENQLKTLTDELNEVRSRWEAERGEVAALREKREKLDAVRTQIEKARRDYDLEEAARLEYGELPALEKDVQDLEKKLKSAEFAHMEVTEEDIAAVVSRWTGIPVSKLMEGEREKLLHLEEQLHGRVIGQDRAIVSVSDAIRRARAGLNDPNRPLGSFMFLGPSGVGKTELAKALAEFLFDSSDAMVRIDMSEYMEKHTVARLIGAPPGYVGFEEGGQLTEAVRRRPYAVILFDEIEKAHPDVFNVLLQVLDDGRLTDGQGRTVDFRNTLIIMTSNIGSPLILEMQQRGEDAETIKSAVMDELRGEFRPEFLNRVDDIIVFDALTAKDLQSIVDIQLGGLRRRLAERRITLHLTEDAKDKLAELGYDPAYGARPLRRTISQYIETPLAREILGGQIQDGSVLNVDYGDGGFTFNSGSLN

SEQ ID NO: 6751 - DNA, 2508 bp, Nostoc sp. PCC 7120
  CDS (1)..(2508): transl_table=11
atgaaggcgctactggaacaagatggtttggccagtgggattttgaccaaagcaggtgtgaacttacaaaagattagcgatcgcactgaacaatacatccaacgccaacctaaagtctcaggtaacagcacttcagtatacctggggcggagtctggatacgctgttagaccgggcagaagcacatcgaaaagattttcaagacgaatatatttctattgaacatttattactggcttatcctaaagacgatcgcttcggcaaaggtttattccaagaattcgctttagacgaaagcaagctcaaaaatatcattaaacaagttcgtgggagccaaacagtgactgaccaaaatccagaaggcaaataccaatcactggaaaaatacgggcgtgacctcacagaagctgcccggaaaggtcaacttgatccagtcattgggcgggatgatgaaattcggcgtaccatccaaattctttctcgccgcaccaaaaataaccccgtactcattggtgaaccgggtgtgggtaaaacggcgatcgctgaaggtctagcacagcgtattgtggctggcgatgtaccccagtccctcaaagaccgcaaactaatctccttagatatgggggcgatgattgctggggcaaaattccgaggagaatttgaagaacgtctgaaagcagtattaaaggaagtcaccgaatctggcggcaatatagttttatttattgatgaaatacataccgttgtcggtgcgggtgcaactcaaggggcaatggatgccggtaatttgttaaaacccatgctggcgcggggtgaactgcgctgtattggggcgacaactttagatgagtaccggaaatacattgaaaaagatgcggcactagaaagacgcttccaacaagtttacgtagaccagcctagtgttgaagatactatttctattttacgtggcttgaaggaacggtatgaagtccaccacggggtaaaaatttctgatagttccttagttgctgctgctacattgtccagtcgttatattagcgatcgcttcctcccagataaagccattgatttggtagacgaagctgccgctagactgaaaatggagattacttctaagccagaagaactcgatgaaatagaccggaagattctgcaattggagatggaaaagctatctctgcaaaaagaaagtgatgcagcctcccgcgaacgcctggaaagattagaaaaagaactggcggatctcaaggaagagcaaagaaccctcaatacccaatggcaatcggaaaaggatgtcattaataaacttcagtccgttaaggaagagattgacaaagttaatttagaaattcagcaagcagaaagaaattacgacctcaaccgcgccgcagaattaaaatatggcaacttaacagacttgcaccggagactggaagcgacagaacgggaattgtcccaaacccaaggtacgggtaaatccctgttgcgagaggaagtaaccgaagccgacattgcggaaatcatttctaagtggacaggaatccccatcagtaaattggtggaatcggaaaaagaaaaactactgcacttagaagatgaactccatcaccgggtaattggacaagatgaagccgtcacagctgtcgccgatgccattcagcgatcgcgtgctgggttggccgatcctaatcggcccacagctagttttgttttcttaggccccactggtgtaggtaaaactgaactggcgaaggcgttagcgtcatatatgttcgacaccgaagacgcactagtccggattgatatgtcggaatacatggagaaacacgccgtatctcgcttaattggtgcgcctcctggttatgtaggttatgaagaaggcggacaactcacagaaacaattcgtcgccgtccttacgccgtaattctcttcgacgaaatcgagaaagcccaccccgatgtatttaatattttcttgcaaatcctcgatgatggtcgcgtcaccgatgcccaaggtcatacagtggacttcaagaacacgattattatcatgaccagtaacatcggttcgcagtacattctcgatatagcgggggataactcacgctatgatgaaatgcgccatcgggtgatggaggcgatgcgaaatagcttccgtcctgagttcctcaaccggattgatgaagtaattatcttccacagtttagataagaaagaattacgacaaattgtccagttgcaagtggaaaggttaaaggccagattagacgatcgcaaaatatccctcaggctctccgatgttgcactagactttttggcagaagttggatacgacccagtattcggggcgcgtccactgaagcgagcgattcagcgcgagttagaaacgcaaattgctaaggcgattttgcgcggcgaatttaacgatggagacacgatttttgtcgatgtgcagaatgaaaggttgtctttcagccgcttacctgttgaggtgtttagtagttag

SEQ ID NO: 6752 - protein, 835 aa, Nostoc sp. PCC 7120
MKALLEQDGLASGILTKAGVNLQKISDRTEQYIQRQPKVSGNSTSVYLGRSLDTLLDRAEAHRKDFQDEYISIEHLLLAYPKDDRFGKGLFQEFALDESKLKNIIKQVRGSQTVTDQNPEGKYQSLEKYGRDLTEAARKGQLDPVIGRDDEIRRTIQILSRRTKNNPVLIGEPGVGKTAIAEGLAQRIVAGDVPQSLKDRKLISLDMGAMIAGAKFRGEFEERLKAVLKEVTESGGNIVLFIDEIHTVVGAGATQGAMDAGNLLKPMLARGELRCIGATTLDEYRKYIEKDAALERRFQQVYVDQPSVEDTISILRGLKERYEVHHGVKISDSSLVAAATLSSRYISDRFLPDKAIDLVDEAAARLKMEITSKPEELDEIDRKILQLEMEKLSLQKESDAASRERLERLEKELADLKEEQRTLNTQWQSEKDVINKLQSVKEEIDKVNLEIQQAERNYDLNRAAELKYGNLTDLHRRLEATERELSQTQGTGKSLLREEVTEADIAEIISKWTGIPISKLVESEKEKLLHLEDELHHRVIGQDEAVTAVADAIQRSRAGLADPNRPTASFVFLGPTGVGKTELAKALASYMFDTEDALVRIDMSEYMEKHAVSRLIGAPPGYVGYEEGGQLTETIRRRPYAVILFDEIEKAHPDVFNIFLQILDDGRVTDAQGHTVDFKNTIIIMTSNIGSQYILDIAGDNSRYDEMRHRVMEAMRNSFRPEFLNRIDEVIIFHSLDKKELRQIVQLQVERLKARLDDRKISLRLSDVALDFLAEVGYDPVFGARPLKRAIQRELETQIAKAILRGEFNDGDTIFVDVQNERLSFSRLPVEVFSS

SEQ ID NO: 6753 - DNA, 2796 bp, Brucella melitensis 16M
  CDS (1)..(2796): transl_table=11
atggcgcggttttccgcgccatttttatttggattttccgatgcctgccggtcttgccgaaagagggcaatattcccatatgcacttttgagaagagcccgcccttgtggggggtcgtcacccaacatctctcggtgccgcgggacggaccgagaggcaaacggagacattatgaatatcgaaaaatatacagaacgggtccgcggcttcatccagtctgcccagaccttcgcgctttcctccggcaatcagcaattcactccagaacatatcctgaaggttctcatcgacgacgatgaggggttggcggcgtcgctggtcgagcgggctggcggacgggttggcgatgtgcgcatgggcctgcaaagcgcgcttgaaaaactgccgaaagtttcgggtggcaatgaccagctctatctttcgcagcctcttgccaaggtgttctcgcttgccgaggaactggccagcaaggcgggtgacagcttcgtcaccgtcgagcgcctcctgacggcgctggcgatggaaaaatccgccaaaacctccgagatactttctgctgcgggcgtcaccccgacggcattgaacagggttatcaacgatatgcgcaaaggccgcaccgccgattccgcctcagccgaaagcaattatgatgctttgaagaaatatgcgcgcgatctgacggaagacgcacgcgcgggcaagcttgatccggtcatcggccgcgatgaggaaatccgccgcacgatccaggttctgtcacgccgcaccaagaacaatccggtgctgatcggtgagccgggcgtgggcaagaccgcaatcgcggaaggtctggcgctgcgcatcgtcaatggcgacgtgcccgaatcgctgaaggacaagcaattgatggcgctcgacatgggcgcgctgattgcgggcgccaaatatcgcggcgaattcgaggaacgcctgaaggccgttctctcggaagtgcagacggctgccgggcagatcatcctcttcatcgacgaaatgcacacattggtcggcgcgggcaagacggatggcgcaatggatgcgtcgaaccttttgaagcctgctctggcgcgcggtgaattgcattgcgtcggcgccaccacgcttgaggaatatcgcaaatatgtggagaaggacgccgcccttgcgcgccgtttccagcccgtttttgtcgatgagccaacagtggaggacacaatctccattctgcgtggcctgaaggagaaatacgagcagcaccataaggtgcgcgtgtcggactccgcgctggtggctgcggcaatgctctcaaaccgctatatcaccgaccgtttcctgccggacaaggccatcgaccttgtggatgaggctgcatcgcgcctgcgtatgcaggtcgattccaagccggaagaactggacgagatcgatcgtcgcatcatgcagctcaagatcgagcgcgaagcactgaaggtggaaacggacgccgcttccaaggaccgcttgcagcgcattgaaaaggaactgagcgatcttgaggaagaatcagccgaactgaccgccaagtggcaggcggaaaagcagaagcttgggcttgctgccgatctcaagcgtcagcttgaagaggcacgcaatgcacttgccattgcgcagcgcaatggtgagtttcagaaagcgggcgagcttgcctatggcacgatcccgcaactggaaaagcaacttgctgatgcggaaagtcaggaaaacaagggttccctcctggaagaaaccgtgacgccggaccatgtggcgcaggtcatttcgcgctggaccggcattccggttgaccggatgctggaaggtgagcgcgaaaagctgttgcgcatggaagacgagatcggcaagcgcgtcgtcggccagggcgaggcggtgcaggccatatccaaggcggtgcgccgtgcccgtgccggtctgcaggacccgaaccggcccatcggctcgttcatcttcctcggccccactggcgtcggcaagacggaactcaccaaggcgctcgcctcgttcctgttccaggatgataccgcaatggtgcgtatcgatatgtcggaattcatggaaaagcattccgtgagccgccttatcggtgctcctcccggctatgtcggctatgaagagggtggtgtgctgaccgaagctgtccggcgcaggccctatcaggtgatcctgttcgacgagattgaaaaggcgcacccggatgtcttcaatgttctgttgcaggtgctggacgacggacgcctgacggacggccagggccacacggttgatttccgcaatacggtcatcatcatgacgtcaaacctcggcgcggaatatctcgtcaatctgggcgaaaacgatgatgtcgagactgttcgcgatgatgtgatgggcgtggtccgtgcttcgttccggccggaattcctcaaccgtgttgatgaaatcatcctgttccaccggctgcgccgcgaagacatgggtgcaattgtcgatatccagatgcagcgtctccaatatctgctttccgatcgcaagatcaccttgcagcttgaggacgacgcccgcgaatggctcgccaacaaggggtatgacccggcctatggcgcgcgcccgctgaagcgcgtaatccagaaggaagtgcaggatccgctggccgaacgtatcctgcttggtgatattctcgacggttccctcgtcaagatcactgccggttcggatcggctcaatttccgtccgatcagcggtgcgttcagcgcggcggagccggaaagagaagacgagaaagcctga

SEQ ID NO: 6754 - protein, 931 aa, Brucella melitensis 16M
MARFSAPFLFGFSDACRSCRKRAIFPYALLRRARPCGGSSPNISRCRGTDREANGDIMNIEKYTERVRGFIQSAQTFALSSGNQQFTPEHILKVLIDDDEGLAASLVERAGGRVGDVRMGLQSALEKLPKVSGGNDQLYLSQPLAKVFSLAEELASKAGDSFVTVERLLTALAMEKSAKTSEILSAAGVTPTALNRVINDMRKGRTADSASAESNYDALKKYARDLTEDARAGKLDPVIGRDEEIRRTIQVLSRRTKNNPVLIGEPGVGKTAIAEGLALRIVNGDVPESLKDKQLMALDMGALIAGAKYRGEFEERLKAVLSEVQTAAGQIILFIDEMHTLVGAGKTDGAMDASNLLKPALARGELHCVGATTLEEYRKYVEKDAALARRFQPVFVDEPTVEDTISILRGLKEKYEQHHKVRVSDSALVAAAMLSNRYITDRFLPDKAIDLVDEAASRLRMQVDSKPEELDEIDRRIMQLKIEREALKVETDAASKDRLQRIEKELSDLEEESAELTAKWQAEKQKLGLAADLKRQLEEARNALAIAQRNGEFQKAGELAYGTIPQLEKQLADAESQENKGSLLEETVTPDHVAQVISRWTGIPVDRMLEGEREKLLRMEDEIGKRVVGQGEAVQAISKAVRRARAGLQDPNRPIGSFIFLGPTGVGKTELTKALASFLFQDDTAMVRIDMSEFMEKHSVSRLIGAPPGYVGYEEGGVLTEAVRRRPYQVILFDEIEKAHPDVFNVLLQVLDDGRLTDGQGHTVDFRNTVIIMTSNLGAEYLVNLGENDDVETVRDDVMGVVRASFRPEFLNRVDEIILFHRLRREDMGAIVDIQMQRLQYLLSDRKITLQLEDDAREWLANKGYDPAYGARPLKRVIQKEVQDPLAERILLGDILDGSLVKITAGSDRLNFRPISGAFSAAEPEREDEKA

SEQ ID NO: 6755 - DNA, 2895 bp, Arabidopsis thaliana
  CDS (1)..(2895)
atggcgctaaggagattatcaaagtctgtttcgtcagccatcaaagctcaatacactctctcgagaccctctcctctcctccgttctcgctctctctcttcctctcctcactacacctctattggccggccaacaaattcattcatcggaaaaatcaataactcttctatcactcatgcgactactactcatggtcaactcttccctctttcttctccgcgacgcttttgtactaccacagctcaggttaatcaaaatgagtttacggagatggcatgggaagggcttatcaacgcctttgacgcggctcgtgaatcgaaacaacagattgtggaatctgaacatttgatgaaagctcttcttgagcaaaaagatggtatggctagaaagattttcactaaagctggaattgacaattcctctgttcttcaagctacagacttgttcatatctaaacaaccaacggttagtgatgcaagtggtcagagactagggtcatctcttagtgttatattagaaaatgcaaagaggcataagaaagatatgttggatagttatgtatccgtggagcactttttgttggcttattattcagatacaaggtttggacaagagtttttcagggacatgaaacttgatattcaagtgctaaaggatgctattaaagatgtacgcggtgatcaacgagtaactgatcggaatcctgaaagcaaatatcaagcacttgaaaagtatggaaatgatttaactgagatggctagacgagggaagctggatcctgtcattgggcgggatgatgaaattaggcgttgcatccagatattatgtaggagaacaaaaaacaatccggttattattggtgaacctggtgtagggaaaactgcaattgcagaggggttggctcaacgaattgtgcgaggagatgtccctgaacctctcatgaatcgaaagttgatatctctcgacatgggttcacttcttgctggtgccaaatttcgaggagattttgaggagaggttgaaagcagtaatgaaggaagtatctgcttccaatgggcaaacaatcttgtttattgatgagatccacactgttgttggtgcaggagctatggatggagcaatggatgcaagcaacctcttgaaaccaatgcttggacgaggtgaactgagatgcattggtgcaactacactgaccgaataccgcaaatatatagagaaagacccagctctagagcgtaggtttcaacaagtgttatgtgttcagccctctgttgaagatacaatctcgattcttcgtgggttaagagagcggtacgagttacaccatggcgttactatatcagatagtgcccttgtttcagcagcagttcttgcagaccgctacatcaccgaacgctttctgccagacaaagctattgatcttgttgacgaagctggtgcaaagctgaagatggagatcacttctaaaccaactgaactagatggaatagatagagctgtgatcaaattggagatggaaaagctttctcttaaaaatgatactgataaagcatctaaagaacggctacagaagattgagaatgatctgtccacgctcaaacagaaacagaaagaactcaatgtccaatgggagaaagaaaagtcgctcatgacaaaaatacgttcgtttaaggaagagattgatcgagttaacctcgaaattgaatctgctgaacgtgaatatgatctaaaccgagctgctgagctgaagtatggaacacttttgtccctccaacgccaattagaagaagctgagaagaatctcacgaatttccgacagtttggacagtcactactccgagaagtggttaccgatcttgacatagcagaaatagtaagcaagtggactggtattccactatctaatcttcagcaatcagagagagagaagttagtgatgttggaagaagtgctccaccatagagttattggtcaagacatggctgtaaaatcagtagcagatgctatccgacgttcaagggctggtctttctgatcctaaccgcccaatagctagtttcatgttcatgggtccaacaggtgttggtaagaccgagcttgccaaggctctagcgggatacctttttaacactgaaaatgcaatagtgagggtcgatatgagtgagtacatggaaaaacactcagtctcacggcttgttggtgcaccacctggctatgtcggttatgaagaaggtgggcagttaactgaagttgttcgcaggagaccttactcggtggttctgtttgatgagatcgagaaagcccaccctgatgtctttaatatcttgctacaactgctagacgatggaagaataactgattctcaaggaaggaccgtaagtttcaaaaactgtgttgtaattatgacgtcgaatataggatctcaccacatacttgagaccctccgcaacaatgaagacagcaaagaagcagtttatgagataatgaagcggcaagttgtggagttagcaagacaaaatttcaggcctgagttcatgaacagaattgacgagtacatagttttccagccgctggattctaacgaaatctccaaaatcgtagagttacagatgagacgggtgaagaatagcttggaacagaagaaaatcaaacttcagtataccaaagaggcagtggatctccttgctcagcttggctttgaccctaactacggggcaaggccggtgaagcgagtgattcaacagatggtggagaatgagatcgctgtcgggattttgaaaggagattttgcagaagaagataccgttcttgtcgatgttgaccacttggctagtgacaacaaattggttatcaagaagcttgagagtaatgcttcagctgaagaaatggccgcttaa

SEQ ID NO: 6756 - protein, 964 aa, Arabidopsis thaliana
MALRRLSKSVSSAIKAQYTLSRPSPLLRSRSLSSSPHYTSIGRPTNSFIGKINNSSITHATTTHGQLFPLSSPRRFCTTTAQVNQNEFTEMAWEGLINAFDAARESKQQIVESEHLMKALLEQKDGMARKIFTKAGIDNSSVLQATDLFISKQPTVSDASGQRLGSSLSVILENAKRHKKDMLDSYVSVEHFLLAYYSDTRFGQEFFRDMKLDIQVLKDAIKDVRGDQRVTDRNPESKYQALEKYGNDLTEMARRGKLDPVIGRDDEIRRCIQILCRRTKNNPVIIGEPGVGKTAIAEGLAQRIVRGDVPEPLMNRKLISLDMGSLLAGAKFRGDFEERLKAVMKEVSASNGQTILFIDEIHTVVGAGAMDGAMDASNLLKPMLGRGELRCIGATTLTEYRKYIEKDPALERRFQQVLCVQPSVEDTISILRGLRERYELHHGVTISDSALVSAAVLADRYITERFLPDKAIDLVDEAGAKLKMEITSKPTELDGIDRAVIKLEMEKLSLKNDTDKASKERLQKIENDLSTLKQKQKELNVQWEKEKSLMTKIRSFKEEIDRVNLEIESAEREYDLNRAAELKYGTLLSLQRQLEEAEKNLTNFRQFGQSLLREVVTDLDIAEIVSKWTGIPLSNLQQSEREKLVMLEEVLHHRVIGQDMAVKSVADAIRRSRAGLSDPNRPIASFMFMGPTGVGKTELAKALAGYLFNTENAIVRVDMSEYMEKHSVSRLVGAPPGYVGYEEGGQLTEVVRRRPYSVVLFDEIEKAHPDVFNILLQLLDDGRITDSQGRTVSFKNCVVIMTSNIGSHHILETLRNNEDSKEAVYEIMKRQVVELARQNFRPEFMNRIDEYIVFQPLDSNEISKIVELQMRRVKNSLEQKKIKLQYTKEAVDLLAQLGFDPNYGARPVKRVIQQMVENEIAVGILKGDFAEEDTVLVDVDHLASDNKLVIKKLESNASAEEMAA

SEQ ID NO: 6757 - DNA, 2859 bp, Arabidopsis thaliana
  CDS (1)..(2859)
atggcttggtcgatagctcttcttacacctcctttttttggtcccggaaggcatgtgcaggccaaagaatacagggaaccaagagggtgtgtgatgaagatgagcagtttaaaagcacctgttctgagaattcaggccacagaatacagagaaccaagagggcgtgtgaagatgatgtccagtttacaagcacctcttctgacaattcagagcttctcagggttaagggcccccagtgcattagattatttgggaaggcctagtccaggtttccttgttaagtataaacttgcaaaatcatctgggagagaaaaagctagccgatgtgtacccaaagcaatgtttgagcgttttaccgagaaagcaattaaggtcataatgctgtctcaagaggaagctcggagacttggccataactttgttgggactgagcaaatactgttgggtctaattggagaagggactgggattgccgccaaggttcttaaatccatggggatcaatcttaaagattcacgcgtggaagtagaaaagataattgggagaggcagtggattcgtggcagtggagattccatttactcctcgcgcaaagcgggtgctggagttgtcactagaggaagctcgacaacttgggcataactacattggttcagagcaccttttgcttggtctacttcgtgaaggggagggtgtggcagctcgtgtcttggagaatttgggtgcagatcctagtaatatacggacacaggttatacgtatggtcggggaaaacaatgaagtcacagcaagcgttggtgggggaagcagcggaaacagcaaaatgccaacacttgaagagtatgggactaacttaactaaactagcagaggagggtaaactggatccggttgttggaaggcagccacagatcgaacgagtggtccagatcttggctcgaagaaccaagaacaacccatgtcttattggagaacctggagttggtaagacggcaatagcagaaggacttgcacagcgaatagctagtggtgatgttcctgaaacaatcgaggggaagacggttataacccttgatatgggtcttctagtggctggaacgaaataccgtggagagttcgaggaaagattgaagaagcttatggaggaaatcaggcaaagtgatgagataattctgtttattgatgaagtgcacacgctcatcggtgcaggagccgctgaaggtgcgatcgatgctgctaacatcttaaagccagctctagcaagaggtgaattgcagtgtattggtgcaacaacaattgatgagtacaggaaacacattgagaaagatcctgcattggagagacggttccagcctgtgaaagtacctgaaccaactgtagaagaagctatacagattttgcaaggtctgcgtgagcgctatgagatccaccacaaacttcgatacactgatgaagccttggttgctgctgcacaattgtcacatcagtacatcagtgatcggtttcttcccgacaaagcgattgacttgattgatgaagctgggtctcgggttcgactacgccatgctcagcttcctgaggaagctagagagcttgaaaagcaactcaggcaaatcaccaaagagaagaatgaagctgtgcgaagccaagacttcgagatggctggttctcatcgtgaccgtgaaatagagctcaaggctgagatagctaatgttttatctcgaggcaaagaagtggccaaagccgagaatgaagctgaggaaggaggacctactgtcacagaatctgacatccaacacatcgtcgccacctggacaggaatcccggtagagaaagtctcgtctgatgaatctagccgtcttctccaaatggagcagacccttcacacaagagtcattggccaagatgaagccgttaaagcaatcagtcgggctatccgccgtgcccgtgttgggctcaaaaacccaaaccgtcctatcgccagtttcatcttctctggtccaactggtgttgggaaatcagagcttgctaaggccttggctgcttactacttcggttcagaagaagcaatgatccgtcttgacatgagtgagttcatggaacgacacactgtttcgaaactcatcggttcacctcctggttacgtaggatacacagaaggaggtcagttaacagaggcggttcgacgcaggccctacactcttgttctctttgacgaaattgagaaagcacatcccgatgttttcaacatgatgcttcagatcctagaagacggtagactaactgatagcaaaggaagaactgtcgatttcaagaacacgcttctgatcatgacttcaaacgtagggagcagcgtgatcgaaaaaggtggtagaagaattgggtttgatcttgaccacgacgagaaagacagcagttacaacagaatcaagagcttagtgactgaggaactaaaacagtatttcagaccagagttcttgaacaggttagatgagatgattgttttcagacagttaacaaagctggaagtcaaggagattgctgatataatgcttaaagaagtggtggcgagacttgaggtcaaagagattgagcttcaggtgactgagaggtttaaagagagagtggtggatgaaggattcgacccgagttatggtgcgaggccacttagacgtgcaataatgaggcttttggaggatagtatggcggagaagatgctttcaagggacattaaagaaggagattctgtgattgttgatgttgatgccgaaggaagtgtggttgtgttgagtggtaccactggacgtgttggtggttttgctgctgaagaagccatggaagatcctattccaatattgtag

SEQ ID NO: 6758 - protein, 952 aa, Arabidopsis thaliana
MAWSIALLTPPFFGPGRHVQAKEYREPRGCVMKMSSLKAPVLRIQATEYREPRGRVKMMSSLQAPLLTIQSFSGLRAPSALDYLGRPSPGFLVKYKLAKSSGREKASRCVPKAMFERFTEKAIKVIMLSQEEARRLGHNFVGTEQILLGLIGEGTGIAAKVLKSMGINLKDSRVEVEKIIGRGSGFVAVEIPFTPRAKRVLELSLEEARQLGHNYIGSEHLLLGLLREGEGVAARVLENLGADPSNIRTQVIRMVGENNEVTASVGGGSSGNSKMPTLEEYGTNLTKLAEEGKLDPVVGRQPQIERVVQILARRTKNNPCLIGEPGVGKTAIAEGLAQRIASGDVPETIEGKTVITLDMGLLVAGTKYRGEFEERLKKLMEEIRQSDEIILFIDEVHTLIGAGAAEGAIDAANILKPALARGELQCIGATTIDEYRKHIEKDPALERRFQPVKVPEPTVEEAIQILQGLRERYEIHHKLRYTDEALVAAAQLSHQYISDRFLPDKAIDLIDEAGSRVRLRHAQLPEEARELEKQLRQITKEKNEAVRSQDFEMAGSHRDREIELKAEIANVLSRGKEVAKAENEAEEGGPTVTESDIQHIVATWTGIPVEKVSSDESSRLLQMEQTLHTRVIGQDEAVKAISRAIRRARVGLKNPNRPIASFIFSGPTGVGKSELAKALAAYYFGSEEAMIRLDMSEFMERHTVSKLIGSPPGYVGYTEGGQLTEAVRRRPYTLVLFDEIEKAHPDVFNMMLQILEDGRLTDSKGRTVDFKNTLLIMTSNVGSSVIEKGGRRIGFDLDHDEKDSSYNRIKSLVTEELKQYFRPEFLNRLDEMIVFRQLTKLEVKEIADIMLKEVVARLEVKEIELQVTERFKERVVDEGFDPSYGARPLRRAIMRLLEDSMAEKMLSRDIKEGDSVIVDVDAEGSVVVLSGTTGRVGGFAAEEAMEDPIPIL

SEQ ID NO: 6759 - DNA, 2907 bp, Arabidopsis thaliana
  CDS (1)..(2907)
atggcgacggctacgacgactgctacggcggcgtttagtggtgtagtcagtgtaggaacggagactcgaaggatttattcgttttctcatcttcaaccttctgcggcttttccggcgaagcctagttccttcaaatctctcaaattaaagcagagcgcgaggctcacacggcggcttgatcatcggccgttcgttgtccgatgtgaagcttcttcttctaatggaaggcttacacagcaagaattcacagaaatggcgtggcaatcgatagtttcgtcaccagatgttgcaaaagagaataagcaacagattgtggagacagagcatctaatgaaagctcttttggagcagaagaatggtttagctcgtaggattttctctaagatcggtgtggataacacaaaggttctagaagcaacagagaagttcattcaacgccaaccaaaggtgtatggagatgctgctggttcgatgttggggcgtgatttggaagctctgttccagagagcaagacagtttaagaaagatttaaaggactcttatgtgtcagtggagcatttggttcttgcttttgctgatgataagcggtttgggaaacagttgtttaaggattttcagatatcagagaggagcttgaaatctgcaattgaatccattagagggaaacaatcagtcattgaccaagatccggaaggcaagtatgaggcgttggagaagtatggaaaagacttgacagcaatggcaagagagggaaaactagatcctgtgataggtagagatgacgagatccgaagatgcattcagattctctcaaggagaacaaagaacaaccctgtgttgatcggtgaaccaggtgttggtaaaactgcaatttcagaaggacttgctcagaggattgtgcaaggagatgtacctcaagcattgatgaacagaaagttgatatctcttgatatgggtgctctcattgctggagcaaagtatcggggagaattcgaagacagactaaaagctgtgcttaaggaagtcacagactcagaaggccaaatcattttgttcatcgatgagatccatacagttgttggtgcaggtgcgactaatggggccatggatgctggtaatctgctgaaaccgatgctgggccgaggcgagttacgttgtatcggtgcaaccacgcttgatgaatataggaaatacatagagaaagatccagccttggagcgtaggtttcaacaggtttatgttgatcaacctacggttgaagacacgatttctattctccgtggtttgcgggaaaggtatgaactacatcatggagttcgcatctcagatagtgctctagtggaagctgctatcctctcagaccgttacatcagtggccggtttctacccgataaagcaattgacttggtcgatgaagcggcagccaaattgaaaatggaaatcacttcgaaacctacagctcttgacgagcttgaccgttcggtaataaagcttgaaatggagaggctttcacttaccaatgatacagacaaagcttctagagagagattgaatcgaattgaaactgagttagtgctattaaaggagaaacaagctgagttaactgaacagtgggagcacgagaggtctgttatgtcccgtcttcagtcgattaaagaggagattgatcgagtaaacctcgagatccagcaggcggaacgtgaatacgatctcaaccgtgcagctgagctcaaatacggaagcttaaactcattgcagcgacagcttaatgaagcagagaaagagctgaacgagtacttaagctctgggaaatctatgttcagagaagaggttttgggtagcgatatcgccgagattgtgagtaaatggactggaatcccggtatcaaaacttcaacagtctgaacgagataagcttctacatttggaagaagaattgcataaaagagtagtcggtcaaaacccagcagtgactgcggtagctgaagcaatccaacgatcaagagctggtctttcggatccaggccgtcctatagctagtttcatgtttatgggaccaactggtgttggtaaaacagagctagccaaagcacttgcttcttatatgttcaacactgaagaagctttagtgagaattgacatgagtgaatacatggagaagcatgcggtgtctaggctcattggagctccacctggatatgttggttacgaagaaggaggacagttaacagaaacggttagaagaaggccttattcggtcattctatttgatgagattgagaaagctcatggagatgtcttcaatgtgtttctccaaatcttggacgatgggcgagtcacagattctcaaggacgtacagtgagtttcaccaataccgtcattattatgacctcaaatgttggttcgcagtttattctgaacaacacagatgatgatgctaatgagctctcttatgaaacgattaaagagagagtgatgaatgctgcaaggtcaatctttcgtcctgaattcatgaatagggttgatgagtatatagttttcaaacctcttgaccgcgagcagatcaaccgcattgtccggttacagctggcacgtgtgcagaagcgaattgcagacaggaaaatgaagataaacatcacggatgcagcagtcgatcttcttggaagcctagggtatgatccaaactatggagctagacctgttaagcgtgtgatacagcaaaacattgagaatgagcttgctaagggtatcttgagaggagatttcaaggaggaagatggcattttgatcgataccgaggtcacagcgttctccaatggccagttacctcagcaaaagctcacattcaagaagattgagtcagaaacagcagatgctgaacaagaagaagcagctttctcaaaatag

SEQ ID NO: 6760 - protein, 968 aa, Arabidopsis thaliana
MATATTTATAAFSGVVSVGTETRRIYSFSHLQPSAAFPAKPSSFKSLKLKQSARLTRRLDHRPFVVRCEASSSNGRLTQQEFTEMAWQSIVSSPDVAKENKQQIVETEHLMKALLEQKNGLARRIFSKIGVDNTKVLEATEKFIQRQPKVYGDAAGSMLGRDLEALFQRARQFKKDLKDSYVSVEHLVLAFADDKRFGKQLFKDFQISERSLKSAIESIRGKQSVIDQDPEGKYEALEKYGKDLTAMAREGKLDPVIGRDDEIRRCIQILSRRTKNNPVLIGEPGVGKTAISEGLAQRIVQGDVPQALMNRKLISLDMGALIAGAKYRGEFEDRLKAVLKEVTDSEGQIILFIDEIHTVVGAGATNGAMDAGNLLKPMLGRGELRCIGATTLDEYRKYIEKDPALERRFQQVYVDQPTVEDTISILRGLRERYELHHGVRISDSALVEAAILSDRYISGRFLPDKAIDLVDEAAAKLKMEITSKPTALDELDRSVIKLEMERLSLTNDTDKASRERLNRIETELVLLKEKQAELTEQWEHERSVMSRLQSIKEEIDRVNLEIQQAEREYDLNRAAELKYGSLNSLQRQLNEAEKELNEYLSSGKSMFREEVLGSDIAEIVSKWTGIPVSKLQQSERDKLLHLEEELHKRVVGQNPAVTAVAEAIQRSRAGLSDPGRPIASFMFMGPTGVGKTELAKALASYMFNTEEALVRIDMSEYMEKHAVSRLIGAPPGYVGYEEGGQLTETVRRRPYSVILFDEIEKAHGDVFNVFLQILDDGRVTDSQGRTVSFTNTVIIMTSNVGSQFILNNTDDDANELSYETIKERVMNAARSIFRPEFMNRVDEYIVFKPLDREQINRIVRLQLARVQKRIADRKMKINITDAAVDLLGSLGYDPNYGARPVKRVIQQNIENELAKGILRGDFKEEDGILIDTEVTAFSNGQLPQQKLTFKKIESETADAEQEEAAFSK

SEQ ID NO: 6761 - DNA, 2790 bp, Arabidopsis thaliana
  CDS (1)..(2790)
atggctatggccacaagggtgttggctcaatcgactccaccgtctttagcttgttaccagaggaatgttccttcacgtggatctggaagatcgagaagatcggtgaaaatgatgtgtagtcagttacaagtgtctggtttaagaatgcaagggtttatgggattacgtggtaacaatgctttagacactcttggaaaaagtcgtcaagattttcattcgaaggtgcgacaggcaatgaatgtgcccaaggggaaagctagccggtttacggtgaaagcaatgtttgaaagatttacggagaaagctatcaaagttattatgcttgctcaggaggaagctagaagactaggccacaattttgtgggaaccgaacaaattcttcttggtcttattggtgagggtactggaatcgctgctaaagttttgaaatccatggggattaacttaaaagatgcacgtgtggaggttgagaagattattggaaggggaagtggctttgttgctgttgagatcccattcactcctcgtgccaagcgtgttcttgaactctctcttgaggaagctcgccaacttggtcacaattacattggatccgagcaccttttgcttgggttgctacgtgaaggtgaaggagttgcagctcgagtccttgagaatttaggtgcagatcctagtaatattcgcactcaggtgatacgcatggtgggtgagaacaatgaagtaactgctaatgttgggggaggaagcagcagcaataagatgccaactcttgaagagtacggaacaaacttgacgaaactggctgaggagggtaaattggacccagttgttggaaggcagccgcagatagaacgtgtggtgcaaattcttggcaggagaaccaagaacaacccttgtcttattggagaacctggtgttggtaagacagctattgctgaaggacttgcacagcgtattgccagtggcgatgtccctgaaactattgaagggaagaaggttataacactcgacatgggtcttctagttgctggaacaaaatatcgtggagagtttgaagagagattgaaaaagcttatggaggaaattagacagagcgatgagataatcttatttatcgacgaagtgcatactttgattggggctggagcagcagaaggtgcaattgacgcagctaacattttaaaaccagctctcgctagaggtgaattgcagtgcattggagcgacaacattagatgaataccgaaagcacattgagaaagaccctgccttggaaagaagattccagccagtgaaagtacctgaacctaccgtggatgaaactattcagatccttaagggtctgcgagagcgatatgaaattcaccacaagcttcgttacacagacgaatctttagtagcagctgcacagttgtcataccagtatataagtgatcgtttccttcctgacaaggcaattgacttgattgatgaagctggttctcgggttcgacttcgtcatgcacaggtccctgaggaagctagggagcttgagaaggagcttaggcagataacaaaggagaagaatgaagctgtccgtggccaggactttgagaaggctgggacacttcgggatagagaaattgaactcagagctgaggtatctgcaatccaagcgaaaggcaaggagatgagcaaagcagagagtgagaccggtgaggaaggccctatggtcacggagtcagacatccaacacattgtgtcttcatggactggtattcctgttgagaaagtatcaaccgatgagtctgaccgtctcctcaagatggaagaaaccctccacaaacgtatcataggccaagacgaagctgtgaaagccataagccgagccattcgccgtgcacgtgttggactcaagaatcctaaccgtccaatcgctagtttcatattctcgggtccaaccggtgttgggaaatctgagcttgccaaagctttagcagcttactacttcggttccgaagaagccatgattcgtctagatatgagtgagttcatggagaggcacactgtctccaaactcatcggttcacctcctggatatgtcggatacaccgaaggaggtcagttaacagaagcggttagacgtcgcccttacaccgtcgttctattcgatgagattgaaaaagcccatccagatgttttcaacatgatgcttcaaatccttgaagatggtagattaacagacagcaaaggaagaacagttgacttcaaaaacacacttctcatcatgacatcaaacgtcggaagcagcgtgattgagaaaggaggaagacgtatcggattcgacttagactacgacgagaaagacagcagttacaacagaatcaagagccttgtaacagaggagctgaaacaatacttcagacccgagttcctaaacaggctagacgagatgattgtgttcagacagctaacaaagctggaagtgaaagaaattgctgacatactgttgaaggaagtgttcgagaggttgaagaagaaagagattgagcttcaggtgaccgaaagattcaaagagagagtagtagacgaaggttataacccgagctatggagcaagaccgttgagaagagccatcatgaggcttttagaggatagtatggcagagaagatgcttgcgagagagatcaaagaaggagactcggtgattgtggacgttgacgctgaaggtaacgtcacggtgctaaatggtggaagtggcactccaactacttccttggaggagcaggaagattctctccctgttgcttaa

SEQ ID NO: 6762 - protein, 929 aa, Arabidopsis thaliana
MAMATRVLAQSTPPSLACYQRNVPSRGSGRSRRSVKMMCSQLQVSGLRMQGFMGLRGNNALDTLGKSRQDFHSKVRQAMNVPKGKASRFTVKAMFERFTEKAIKVIMLAQEEARRLGHNFVGTEQILLGLIGEGTGIAAKVLKSMGINLKDARVEVEKIIGRGSGFVAVEIPFTPRAKRVLELSLEEARQLGHNYIGSEHLLLGLLREGEGVAARVLENLGADPSNIRTQVIRMVGENNEVTANVGGGSSSNKMPTLEEYGTNLTKLAEEGKLDPVVGRQPQIERVVQILGRRTKNNPCLIGEPGVGKTAIAEGLAQRIASGDVPETIEGKKVITLDMGLLVAGTKYRGEFEERLKKLMEEIRQSDEIILFIDEVHTLIGAGAAEGAIDAANILKPALARGELQCIGATTLDEYRKHIEKDPALERRFQPVKVPEPTVDETIQILKGLRERYEIHHKLRYTDESLVAAAQLSYQYISDRFLPDKAIDLIDEAGSRVRLRHAQVPEEARELEKELRQITKEKNEAVRGQDFEKAGTLRDREIELRAEVSAIQAKGKEMSKAESETGEEGPMVTESDIQHIVSSWTGIPVEKVSTDESDRLLKMEETLHKRIIGQDEAVKAISRAIRRARVGLKNPNRPIASFIFSGPTGVGKSELAKALAAYYFGSEEAMIRLDMSEFMERHTVSKLIGSPPGYVGYTEGGQLTEAVRRRPYTVVLFDEIEKAHPDVFNMMLQILEDGRLTDSKGRTVDFKNTLLIMTSNVGSSVIEKGGRRIGFDLDYDEKDSSYNRIKSLVTEELKQYFRPEFLNRLDEMIVFRQLTKLEVKEIADILLKEVFERLKKKEIELQVTERFKERVVDEGYNPSYGARPLRRAIMRLLEDSMAEKMLAREIKEGDSVIVDVDAEGNVTVLNGGSGTPTTSLEEQEDSLPVA

SEQ ID NO: 6763 - DNA, 2556 bp, Encephalitozoon cuniculi GB-M1
  CDS (1)..(2556)
atgactacaaggaagtatactgagagagcgcagaatgccctgaagatgtgtgtggacgaggcgcttgcaaataacaacaacaccatcgagcccgagcatcttctgaaggcgatactaagcgaccagacgtctgtgttacataacgtgctgagtcctacagagaggaacaacgtcaagaatgcactcataaagagaatcggggggtttgcaaagcagtataactgcacggagccccgtgtcggagagacacttgcaaaagttctgatggcggctgaaagtaagggggagggcgagtatgtttctgtgaatgcgttagtgctgagtcttcttgaagtggagagcatcagggagctgattgccaactcggaggacataagaaaaaaggttgaagagcagacaaagaacaagaggttcgactctcgaaacgccgacgatgggaccgatgtgatgtcgagattcgctgttgacatggttgagcaggccaggcagaatgtctttgaccctgtgattgggagggacgaggagatccgcagggttcttgagatattgtcgaagaagacaaagagtaacgcaatattggttggaaagccgggggttgggaagactgcaatagtgaatggaattgcacagctgatagcaaacggagaggcgcctacgcttcggggtgcccggatctataatgtggacgtgggatcgatggttgcggggacgtctcacaggggggactttgaagaaaggctgaagaccctggtcaaggaggcggaaacaacacctggggtgattctgtttattgacgagatccacattgtgctgggcgcaggaaagacggacggggcgatggatgcggcaaacatgctgaagcctggactggcagcagggacgatcaaatgcattggggcgacaacgcatgacgagtacaggaagtacattgagaacgacccggcgtttgaaagaaggtttgtgcaggttgttgtgaacgagccgtccattgaggactcgatcacgatgctccgaggactcaaggggagactggaggcataccacggtgtgaagatagccgacagtgctattgtgtatgcagtcaactcgtcgaagaagtatatttctaacagaaggcttccggatgtggcaattgacctgctggacactgcctgtgccagcgtgatgatagctcttgagagtgagccgcaggagattctaaatcaaaagtcaaaggcgtggggtttggatatcgcgaagacaagcctggagtttgacctttctcaaaagaaggacgagcagactctaaagaagcttaaggaagtggttgaagagttggagaaggtgaaggcgagcctacagccgatggaggaggcatatctgagggataagaagcacataatagaggcgaagaagctaaagaagaagctggaggacaccaagctaaggcttgcacaggcggagagagacagaaacacatatgttgcatacgacctcaagaccaacgtgattcctgtgattgaaagtgagctcaaaaggctcgagctcgagagtgtggtggttattctcccttcgcatgttgcagagatcataagcagatggacggggattgatgtaaagaggctgacgatcaaagagaacgaaaggctgatggagatgtcctcgaggataaagaagaggatatttgggcaggaccacgcggtggatgcaattgttgactcgattcttcagtccagggttgggctggacgacgatgacaggccggttgggtcctttcttcttctcgggcccactggggttggaaagacagagcttgccaaggcggttgcgatggagctgtttgacaatgagaaggacatgcttgtgattgacatgagcgagtatggaaatgagatgggtataacaaagctgattggagcaaatgcagggtatgttgggtataaccagggtggaacgcttacggagcccatcaagggaaggccctacaatgtgattctgctggacgaggttgacctggcacaccagactgtcctgaatacactgtaccaactcctggacgagggacgggtcacggatggaaaaggggctgtcgtggacttcagaaactgtgtggtgatcatgacctcgaatctaggccaggagataataatgcggtctcgtggtgagcttaacgacgatgaaaggaagaaaattgaggagatagtgctgaacaggtttggagcaccctttgtcaatcgtattgacgaggtgctgtatttcaacaatcttgatagagagaacatgcacaggattcttgaatatcagatgggctacttggagaagaagctcaggggccgcggcataacattcaaggtctctgatgctgtgaaggaagacatggttaccaaggtcctctcctcgatctatggagcccggcaacttaggagattcatccggtcaagctttaagcgtgcactaacgaaggtcctcttgatgagagtaaacgaggatcccattgaggtcagctgcactcatccatctgagggagctggaggaatccgcatttccgactatgtctactctatggtgcagcagtag

SEQ ID NO: 6764 - protein, 851 aa, Encephalitozoon cuniculi GB-M1
MTTRKYTERAQNALKMCVDEALANNNNTIEPEHLLKAILSDQTSVLHNVLSPTERNNVKNALIKRIGGFAKQYNCTEPRVGETLAKVLMAAESKGEGEYVSVNALVLSLLEVESIRELIANSEDIRKKVEEQTKNKRFDSRNADDGTDVMSRFAVDMVEQARQNVFDPVIGRDEEIRRVLEILSKKTKSNAILVGKPGVGKTAIVNGIAQLIANGEAPTLRGARIYNVDVGSMVAGTSHRGDFEERLKTLVKEAETTPGVILFIDEIHIVLGAGKTDGAMDAANMLKPGLAAGTIKCIGATTHDEYRKYIENDPAFERRFVQVVVNEPSIEDSITMLRGLKGRLEAYHGVKIADSAIVYAVNSSKKYISNRRLPDVAIDLLDTACASVMIALESEPQEILNQKSKAWGLDIAKTSLEFDLSQKKDEQTLKKLKEVVEELEKVKASLQPMEEAYLRDKKHIIEAKKLKKKLEDTKLRLAQAERDRNTYVAYDLKTNVIPVIESELKRLELESVVVILPSHVAEIISRWTGIDVKRLTIKENERLMEMSSRIKKRIFGQDHAVDAIVDSILQSRVGLDDDDRPVGSFLLLGPTGVGKTELAKAVAMELFDNEKDMLVIDMSEYGNEMGITKLIGANAGYVGYNQGGTLTEPIKGRPYNVILLDEVDLAHQTVLNTLYQLLDEGRVTDGKGAVVDFRNCVVIMTSNLGQEIIMRSRGELNDDERKKIEEIVLNRFGAPFVNRIDEVLYFNNLDRENMHRILEYQMGYLEKKLRGRGITFKVSDAVKEDMVTKVLSSIYGARQLRRFIRSSFKRALTKVLLMRVNEDPIEVSCTHPSEGAGGIRISDYVYSMVQQ

SEQ ID NO: 6765 - DNA, 2412 bp, Schizosaccharomyces pombe 972h-
  CDS (1)..(2412)
atgaatattttacctaagagtattccgatacgaatacaatcgctccgtaggtaccaaggaagtttaaaaacttctcttcgggcattgagtactcgacccatttttgaaaaacggctgttagctgaaacaccattttctataagaccaagtaatgcttctgtactcatagctaagagatctccaaagtttggatggaagcaagtacgcttttatgcagcaaatccaaatggaggaaattttcgaatggatttaggcggcggacgcaaacaaggagccgctttggaagaatatggcacagacttaacagccttggctaaacaaggaaaattggatcctgtaattgggcgtgaagaagagattcaaagaaccatccaaattctctctcgacgcacaaagaataatcctgcgttagttggtccggctggtgtaggtaaaacagcaattatggagggattagcctcgcgaatcattcgtggagaggtccctgagtccatgaaggataaacgtgttattgtcctagatttaggcgctctcatttcaggagccaaatttcggggagattttgaggaacgtttaaaatctgtactgagtgacctggaaggagctgaaggaaaggtcattttgtttgttgatgaaatgcaccttttacttggctttggtaaagctgaaggctcaattgatgccagcaatctattaaaacctgctttagcccgtggtaaattgcactgttgtggtgcgacaaccttggaggaatacagaaaatacatcgagaaagacgctgctttggcaagaagatttcaagcagttatggtaaatgaaccttctgtagctgacaccatctcaattcttcgtggtctgaaagaacgatacgaagttcatcatggtgtacgtatcactgacgatgctttggtaacagcagctacgtacagcgctagatacatcaccgatcgatttcttcccgataaagccattgatttagtcgatgaagcctgctcctctcttcgcttacaacaagagtctaaacctgatgaattgcggcgtttagaccgtcaaatcatgactatacaaattgaattggaatcccttaggaaggaaactgacacgacatcggttgagcgacgtgagaaattggagtccaagctcactgatttgaaggaggaacaagataaactatctgcggcatgggaagaagagagaaagcttttggactccatcaagaaggctaaaactgaacttgaacaggctcgaatagagcttgagagaacacaacgtgaaggtaattatgcccgtgcttctgagctccaatatgcgattattcctgaattggagcgtagtgttccaaaggaagagaaaacgcttgaagaaaagaagccatccatggtacatgattcggttactagcgatgatattgcggttgttgtatcaagggcgacaggaattcctaccactaatttaatgcgtggtgaaagagacaagctccttaatatggaacaaactattggcaagaagattattggtcaggacgaagctttgaaagcgatagccgatgcagttcgtttatcacgcgcaggtctccaaaacaccaacagacctttggcatcattccttttccttggacctaccggtgtaggtaagactgcacttaccaaagctttagcagagtttctatttgacactgacaaggctatgattcgttttgatatgtccgagtttcaggagaaacatacaattgcgcgtctgattggtagtcctcctggatatattggttatgaagaatctggagagttgactgaagctgtgcgtcgcaaaccatacgccgtacttttgtttgacgaattagaaaaagcgcatcatgatattaccaaccttcttctacaagtactagacgaaggatttttgaccgattcacaaggacgtaaagtggatttccgatctaccttgattgttatgacctcgaatttgggaagcgatatcttggttgctgatcctagtactactgtcacccccaaatccagggatgccgttatggatgttgtacagaaatattatcctcctgaatttttgaacagaattgacgaccaaattgttttcaacaaattatcggaaaagaaccttgaagacatagtaaacgttcgtttggacgaagttcaacaacgtcttaatgaccgtcgtataatccttacagttacagaagcagctcgcaaatggcttgctgaaaaaggttattctccagcgtatggcgctagacctttgaatcgcttaatacagaagcgtattttgaacacaatggcgatgaaaattattcagggagaaattaagtcggacgaaaatgttgtgatcgacgttttggatggtgaacttgagtttaaagcaaataagcttgagccacaatctacaagtcatgaggattaa

SEQ ID NO: 6766 - protein, 803 aa, Schizosaccharomyces pombe 972h-
MNILPKSIPIRIQSLRRYQGSLKTSLRALSTRPIFEKRLLAETPFSIRPSNASVLIAKRSPKFGWKQVRFYAANPNGGNFRMDLGGGRKQGAALEEYGTDLTALAKQGKLDPVIGREEEIQRTIQILSRRTKNNPALVGPAGVGKTAIMEGLASRIIRGEVPESMKDKRVIVLDLGALISGAKFRGDFEERLKSVLSDLEGAEGKVILFVDEMHLLLGFGKAEGSIDASNLLKPALARGKLHCCGATTLEEYRKYIEKDAALARRFQAVMVNEPSVADTISILRGLKERYEVHHGVRITDDALVTAATYSARYITDRFLPDKAIDLVDEACSSLRLQQESKPDELRRLDRQIMTIQIELESLRKETDTTSVERREKLESKLTDLKEEQDKLSAAWEEERKLLDSIKKAKTELEQARIELERTQREGNYARASELQYAIIPELERSVPKEEKTLEEKKPSMVHDSVTSDDIAVVVSRATGIPTTNLMRGERDKLLNMEQTIGKKIIGQDEALKAIADAVRLSRAGLQNTNRPLASFLFLGPTGVGKTALTKALAEFLFDTDKAMIRFDMSEFQEKHTIARLIGSPPGYIGYEESGELTEAVRRKPYAVLLFDELEKAHHDITNLLLQVLDEGFLTDSQGRKVDFRSTLIVMTSNLGSDILVADPSTTVTPKSRDAVMDVVQKYYPPEFLNRIDDQIVFNKLSEKNLEDIVNVRLDEVQQRLNDRRIILTVTEAARKWLAEKGYSPAYGARPLNRLIQKRILNTMAMKIIQGEIKSDENVVIDVLDGELEFKANKLEPQSTSHED

SEQ ID NO: 6767 - DNA, 2718 bp, Schizosaccharomyces pombe 972h-
  CDS (1)..(2718)
atggctgattatccttttactgacaaagccgcaaagacattgtctgatgcgtactcaattgcacaatcttatggtcattcacaattaacccctattcacattgctgctgctcttttgtccgacagtgacagtaacggtactaccttactgcgcaccatcgtcgacaaagctggtggtgatggtcaaaagtttgagcgaagtgttactagtcggttagttcgcttgcctgctcaggatccacctccagaacaagtgactctgtcacctgaaagtgcgaaactgctgcgaaatgctcatgaacttcaaaaaacacaaaaagattcttacattgctcaagatcattttatcgctgtgttcactaaagacgacacgctaaagagtttattggcagaagccggtgtcaccccgaaagcgtttgaatttgctgtaaataacgtccgtggtaataaaagaatcgattcaaagaatgccgaggaaggatttgatgcactaaataaatttactgttgatcttacagagctcgctagaaatggtcaactggatccagttatcggacgtgaagatgaaattcgtcgtacaattcgcgtactttctagaagaacgaaaaataatccagttcttattggtgagcctggtgtaggtaagacctccattgctgaaggacttgctcgtcgtataattgacgatgatgtccccgctaatctttcgaattgtaagcttctcagcctggacgtcggaagcttagttgccggctccaaatttcgtggtgaatttgaagagcgtatcaaatctgttttaaaagaagttgaagaaagtgaaactcccattattttattcgtagatgaaatgcatcttttaatgggcgcaggttccggtggtgaaggtggcatggacgctgccaatttgctgaagccaatgcttgcacgtggtaagcttcactgtattggtgctactactttggctgaatacaagaaatacatcgaaaaagatgctgctttcgaacgtagattccaaatcatcttggtaaaagagccttctattgaagatacgatttctatccttcgtggtcttaaagaaaagtatgaggttcatcatggtgttactatctctgaccgtgccttggttactgctgcccatctcgcttcccggtacctaacttctcgtcgtcttccagattctgccatcgacttggtcgatgaagctgcggctgcagttcgtgttactcgtgaatctcagcccgaagttcttgataaccttgagagaaagcttcgacaactccgcgttgaaattcgtgctttagagcgtgagaaggacgaagcttccaaagaacgtctcaaggctgctcgtaaagaggctgaacaagtggaagaagaaacaagacctattcgtgagaagtatgaattagaaaagtctcgtggaagtgaacttcaagatgctaagcgtcgtcttgatgagttgaaggctaaggctgaggatgccgagcgtcgtaatgatttcactcttgctgctgatttgaaatactatggtattcctgatttgcaaaaacgtattgaatatttagagcaacaaaaaagaaaggctgatgcagaagcgattgcaaacgctcaaccaggctcagaacctttacttattgacgtagttgggcccgatcaaatcaacgaaatcgttgcaaggtggactggtattccggttactcgtttgaagacaactgaaaaggaacgactccttaacatggagaaggttctcagtaaacaagtaattggtcaaaatgaagcagttactgcagttgcaaacgccattcgcttatctcgtgctggtctttctgatcctaatcaaccaatcgcatctttcttgttttgcggtccttccggtactggtaagactttattgacaaaggcattggcatcatttatgtttgatgatgaaaatgcaatgattcgtattgacatgtctgaatacatggaaaaacactctgtttcacgtctcattggagcaccacccggttatgttggacatgaagctggtggacagcttactgaacaacttcgtcgacgaccttactccgtcatcttgtttgacgagattgaaaaggctgctccagaagtattgactgtacttttgcaggtactagatgatggacgtatcactagtggccaaggccaggttgttgatgccaagaatgctgttatcattatgacttctaacttgggcgctgaatacttgacaacagacaatgagtctgatgatggaaagatagatagtaccactcgggaaatggttatgaactcgattcgtggcttcttccgtcccgaatttttgaatcgtatctcttcaatcgttatctttaatcgtctgcgtcgtgtggatatccgcaatattgtcgaaaatcgtatattagaggttcagaaacggcttcaatccaatcatcgctcaattaaaatcgaggttagcgacgaagctaaagaccttcttggaagcgctggttattcccctgcttatggtgcaagacctttgaaccgtgtcattcaaaatcaagttttgaatcccatggctgtcttaattttgaatggccagcttcgcgataaggagactgctcatgtcgtagtccaaaatggcaagatatttgtcaaaccaaatcatgaagctaatgcaaacggctctgctgatattgacatggatggtattgacgacgatgttaatgatgaagaattggaataa

SEQ ID NO: 6768 - protein, 905 aa, Schizosaccharomyces pombe 972h-
MADYPFTDKAAKTLSDAYSIAQSYGHSQLTPIHIAAALLSDSDSNGTTLLRTIVDKAGGDGQKFERSVTSRLVRLPAQDPPPEQVTLSPESAKLLRNAHELQKTQKDSYIAQDHFIAVFTKDDTLKSLLAEAGVTPKAFEFAVNNVRGNKRIDSKNAEEGFDALNKFTVDLTELARNGQLDPVIGREDEIRRTIRVLSRRTKNNPVLIGEPGVGKTSIAEGLARRIIDDDVPANLSNCKLLSLDVGSLVAGSKFRGEFEERIKSVLKEVEESETPIILFVDEMHLLMGAGSGGEGGMDAANLLKPMLARGKLHCIGATTLAEYKKYIEKDAAFERRFQIILVKEPSIEDTISILRGLKEKYEVHHGVTISDRALVTAAHLASRYLTSRRLPDSAIDLVDEAAAAVRVTRESQPEVLDNLERKLRQLRVEIRALEREKDEASKERLKAARKEAEQVEEETRPIREKYELEKSRGSELQDAKRRLDELKAKAEDAERRNDFTLAADLKYYGIPDLQKRIEYLEQQKRKADAEAIANAQPGSEPLLIDVVGPDQINEIVARWTGIPVTRLKTTEKERLLNMEKVLSKQVIGQNEAVTAVANAIRLSRAGLSDPNQPIASFLFCGPSGTGKTLLTKALASFMFDDENAMIRIDMSEYMEKHSVSRLIGAPPGYVGHEAGGQLTEQLRRRPYSVILFDEIEKAAPEVLTVLLQVLDDGRITSGQGQVVDAKNAVIIMTSNLGAEYLTTDNESDDGKIDSTTREMVMNSIRGFFRPEFLNRISSIVIFNRLRRVDIRNIVENRILEVQKRLQSNHRSIKIEVSDEAKDLLGSAGYSPAYGARPLNRVIQNQVLNPMAVLILNGQLRDKETAHVVVQNGKIFVKPNHEANANGSADIDMDGIDDDVNDEELE

SEQ ID NO: 6769 - DNA, 2595 bp, Fusobacterium nucleatum subsp. nucleatum ATCC 25586
  CDS (1)..(2595): transl_table=11
atgttaggaggttttattatgatgaatccaaatcaatttacagagaatactatttctgcaattaatttagcagtagatattagtaaaggtaatatgcaacaaagtataaaaccagaagctcttgctttgggattacttatgcaaaacaacggattaattccaagagtaatagaaaaaatgggattgaatttacaatatatcatttctgaattagaaaaagaaatgaataattatccaaaagttgaagtgaaagttagcaatgaaaatatttcacttgaccaaaaaacaaattctatactaaatcgtgcagaaaaaattatgaatgaaatggaagatagctttttaagtgttgaacatatttttaaagctatgatagaagaaatgccaattttcaaaagatttggtattagtttagaaaaatacatggaggtattgatgaatataagaggaaacagaaaagtagataatcaaaatccagaagcaacttatgaagttttagaaaaatatgcaaaagatttagttgaacttgccagagaaggtaagatagaccctatcattggtagagattctgaaatcagaagagctattcaaataatttcaagaagaacaaaaaatgaccctattttaattggtgaacctggagttggtaaaactgcaatagttgaaggacttgctcaaagaatattaaatggagatgttcctgaaagtctaaagaataaaaaaatattctcgcttgatatgggagctttggttgcaggtgcaaaatacaaaggtgaatttgaagaaagaatgaaaggtgttttaaaagaagttgaagaatcaaatggaaatatcattcttttcatagatgaaattcacacaatagttggtgctggtaaaggagaaggttctcttgatgcaggaaatatgttaaaacctatgcttgcaagaggtgaattaagagttattggtgcaacaacaatagatgaatatagaaaatatattgaaaaagatcctgcacttgaaagaaggttccaaacaatattagtcaatgaacctaatgttgatgatactatttcaattttaagaggtcttaaagataaatttgaaacttatcatggtgttagaattacagatactgcaatagttgaagctgcaacccttagccaaagatatataagtgatagaaaacttccagataaagctattgacctaattgatgaagcagctgctatgataagaacagaaattgactctatgccagaagaactcgaccaattgacaagaaaggctttacaattagaaattgaaattaaggcattggaaaaagaaactgatgatgcttctaaggaaagattgaaagttatagaaaaagaattagctgaattaaatgaagaaaagaaagttttgacatcaaaatgggaacttgaaaaagaagatatttctaaaataaaaaatattaaaagagaaattgaaaatgttaaacttgaaatggaaaaagcagaaagagaatatgacttaacaaaattatctgaattaaaatatggtaaacttgcaactcttgaaaaagaattacaagaacaacaaaataaggttgataaagatggaaaagaaaattctctattaaaacaagaagttactgctgatgagattgcagatattgtttcaagatggacaggtattcctgtatcaaaacttaccgaaactaaaaaagaaaagatgttacatcttgaagaccatataaaagaaagagttaaaggacaagatgaagccattaaatccgttgctgatactatgcttagatcagttgcaggtttaaaagatcctaacagacctatgggttcatttatattcttaggacctactggggttggtaaaacatatcttgcaaaaactttagcatataacctatttgatagtgaagataatgttgtcagaatagatatgagtgaatatatggataagttctcagttacaagacttataggtgcacccccaggatatgttggttatgaagaaggtggacaacttacagaagctataagaactaaaccttattcagtaatattgtttgatgaaattgaaaaggctcatcctgatgtatttaatgtactattacaagttttagatgatggtagacttacagatgggcaaggaagaatagtggatttcaaaaacactttaattataatgacatctaatataggtagccattttatacttgaagatcctaatctttctgaagatacgagagaaaaagtagcagatgaattaaaagctagatttaagccagaatttttaaatagaattgatgaaataatcactttcaaggctttagatttaccagctattaaagaaatcgtaaaattaagtctaaaagacttagaaaacaaattaaaacctaaacacattacacttgaattttctgataagatggttgattacttagctaacaatgcttatgaccctcactatggtgcaagacctctaagaagatatattcaaagagaaattgaaacaagtcttgctaagaaaattcttgcaaatgaagtacatgaaaaatctaatgtcttaatagatttagataataaccatattgtttttaaagaagtataa

SEQ ID NO: 6770 - protein, 864 aa, Fusobacterium nucleatum subsp. nucleatum ATCC 25586
MLGGFIMMNPNQFTENTISAINLAVDISKGNMQQSIKPEALALGLLMQNNGLIPRVIEKMGLNLQYIISELEKEMNNYPKVEVKVSNENISLDQKTNSILNRAEKIMNEMEDSFLSVEHIFKAMIEEMPIFKRFGISLEKYMEVLMNIRGNRKVDNQNPEATYEVLEKYAKDLVELAREGKIDPIIGRDSEIRRAIQIISRRTKNDPILIGEPGVGKTAIVEGLAQRILNGDVPESLKNKKIFSLDMGALVAGAKYKGEFEERMKGVLKEVEESNGNIILFIDEIHTIVGAGKGEGSLDAGNMLKPMLARGELRVIGATTIDEYRKYIEKDPALERRFQTILVNEPNVDDTISILRGLKDKFETYHGVRITDTAIVEAATLSQRYISDRKLPDKAIDLIDEAAAMIRTEIDSMPEELDQLTRKALQLEIEIKALEKETDDASKERLKVIEKELAELNEEKKVLTSKWELEKEDISKIKNIKREIENVKLEMEKAEREYDLTKLSELKYGKLATLEKELQEQQNKVDKDGKENSLLKQEVTADEIADIVSRWTGIPVSKLTETKKEKMLHLEDHIKERVKGQDEAIKSVADTMLRSVAGLKDPNRPMGSFIFLGPTGVGKTYLAKTLAYNLFDSEDNVVRIDMSEYMDKFSVTRLIGAPPGYVGYEEGGQLTEAIRTKPYSVILFDEIEKAHPDVFNVLLQVLDDGRLTDGQGRIVDFKNTLIIMTSNIGSHFILEDPNLSEDTREKVADELKARFKPEFLNRIDEIITFKALDLPAIKEIVKLSLKDLENKLKPKHITLEFSDKMVDYLANNAYDPHYGARPLRRYIQREIETSLAKKILANEVHEKSNVLIDLDNNHIVFKEV

SEQ ID NO: 6771 - DNA, 2451 bp, Thermoanaerobacter tengcongensis MB4
  CDS (1)..(2451): transl_table=11
atggccatgtttggcaggtttacagaaagggctcaaaaggctctttatctagctcaagaggaagcaaggtctttttaccataactatgttggaacagagcacatcctattaggtttacttaaagaggacgaagggattgcagcaagagttttaaaaaaattgggagtgacttatgaggctacaagagaaaaagtcctttctttaattggaatggggaacattcctggagatgtagtaggctatacgccgagagctaaaagggttctggaacttagcttgagtgaagccaggagatttaacacaagctatgtgggcacagagcacattttgcttgggcttttaagagaaggagaaggagttgccgtaaggattttaatggagcagggaatagattttaacagagtgagagaagagattgtaaaaatgctaagcgaggaaccagcagctgggccttctaaagtttcaaaagctaaaaacaccaatactcctactctcaatcagtttggaagagacttgactgaccttgcaagagacggaaaacttgaccctgtgataggaagagagaaggaaattgaaagggtaatacagattttgagcaggaggacaaaaaacaatcctgtgctcataggagagccgggagttggtaaaactgccatcgtagaaggactggctcaaaaaattgtcgagggtgaagttcctgagatattaaaggataaaagagtggttaccctagatttagcttcactggttgctggaactaaatacagaggagaatttgaagatagattaaaaactgtaataaatgaggtaataaaggcaggaaatgttatactttttgtagatgagatgcacacattaataggtgctggagctgctgaaggtgcaatagatgcttccaacatcttaaagcctgctctggcaagaggagaaattcaggtaattggtgctaccacattggatgaatacagaaaatatgtggaaagagacccggctttagaaagaagattccaacccataatggtagaagagcctactgtagaagagacgattgaaatactaaaagggctaagagacaaatatgaagctcaccacagagttaaaattactgatgaggcattggaagcagcagcaaagctttctcacaggtacatcacagacaggttccttccagataaggcgattgatttgatagatgaagctgcctctcgagtgagattaaaaaccgtcactgctcctcctgagataaaagaattggaggacaagattaacgacctcataaaggaaaaagaagaagctataaggactcaggaatatgaaaaagctgctaaaataagggacgaagaacagaaattgagagaacagctggaggaattaaaagctaaatggcagcagaattctctctctgaagaaaagagcgttggtccagaagaaatagcccaagtcgtatccatgtggactggaatacctgtgaagaagctagcagaagaagagtcagagagactcttacacttggaagaaatactgcatgaaagagtaatcggacaggacgaagcagtagaggcagtggcaaaggctataagaagggcaagagtagggttaaaagatccaaaaaggccgatagggtccttcatattcttaggacctacaggtgttggtaagacggagctcagtaaggctttagcagaagctctgtttggcgatgaaaatgccatgataagattagatatgtcagaatacatggaaaggcatacagtttcaaaactcataggctctcctccaggttatgtgggctttgaagaaggaggacagcttacagaaaaagtaagaaggagaccttattcagtgatactcttggacgagattgaaaaagcgcatccagatgttttcaacattctcctccagatacttgaagacggaaggttgactgactctaagggaaggactgtagatttcaaaaacacagttataatcatgacatcaaatgtcggtgcagaactattgaagaagcagactacacttggatttatgccacaggaaaaagaggacaaggcttcttttgagaagatcaaagagacattgatggcagagcttagaaaaaccttcagaccagagtttttaaacagggtagacgaaataattgtcttccatccgctttctaaagagcacattgagaagattgccgacataatgataaaggaattgaataagaggttagaggaaaacaacattaagctagagtttactccggaagctaaagaagaaatcatcaaacaaggttacgaccccaactacggcgcaagacctttgagacgggttatacagaggattgtagaaaatcagctgtctgaattgatgcttcagggagaagtcaaaccaggtgatgagctcatcgtcacagctgaagatggaaagataaagtttgtcaaaaaggatgtggttcaaaaggcttag

SEQ ID NO: 6772 - protein, 816 aa, Thermoanaerobacter tengcongensis MB4
MAMFGRFTERAQKALYLAQEEARSFYHNYVGTEHILLGLLKEDEGIAARVLKKLGVTYEATREKVLSLIGMGNIPGDVVGYTPRAKRVLELSLSEARRFNTSYVGTEHILLGLLREGEGVAVRILMEQGIDFNRVREEIVKMLSEEPAAGPSKVSKAKNTNTPTLNQFGRDLTDLARDGKLDPVIGREKEIERVIQILSRRTKNNPVLIGEPGVGKTAIVEGLAQKIVEGEVPEILKDKRVVTLDLASLVAGTKYRGEFEDRLKTVINEVIKAGNVILFVDEMHTLIGAGAAEGAIDASNILKPALARGEIQVIGATTLDEYRKYVERDPALERRFQPIMVEEPTVEETIEILKGLRDKYEAHHRVKITDEALEAAAKLSHRYITDRFLPDKAIDLIDEAASRVRLKTVTAPPEIKELEDKINDLIKEKEEAIRTQEYEKAAKIRDEEQKLREQLEELKAKWQQNSLSEEKSVGPEEIAQVVSMWTGIPVKKLAEEESERLLHLEEILHERVIGQDEAVEAVAKAIRRARVGLKDPKRPIGSFIFLGPTGVGKTELSKALAEALFGDENAMIRLDMSEYMERHTVSKLIGSPPGYVGFEEGGQLTEKVRRRPYSVILLDEIEKAHPDVFNILLQILEDGRLTDSKGRTVDFKNTVIIMTSNVGAELLKKQTTLGFMPQEKEDKASFEKIKETLMAELRKTFRPEFLNRVDEIIVFHPLSKEHIEKIADIMIKELNKRLEENNIKLEFTPEAKEEIIKQGYDPNYGARPLRRVIQRIVENQLSELMLQGEVKPGDELIVTAEDGKIKFVKKDVVQKA

SEQ ID NO: 6773 - DNA, 2526 bp, Streptomyces coelicolor A3(2)
  CDS (1)..(2526): transl_table=11
atgttcgagaggttcaccgaccgcgcgcggcgggttgtcgtcctggctcaggaagaagcccggatgctcaaccacaactacatcggcaccgagcacatcctcctgggcctgatccacgagggtgagggtgtcgccgccaaggcccttgagagcctcgggatttcgctcgaggcggtccgccagcaggtggaggagatcatcggccagggccagcaggccccgtccggccacatccccttcaccccccgtgccaagaaggttctggagctgtcgctccgcgaggccctccagctgggccacaactacatcggcacggagcacatcctgctcggcctgatccgcgagggcgagggcgtcgccgcccaggtcctggtcaagctgggcgcagatctgaaccgggtgcggcagcaggtcatccagctgctctccggttaccagggcaaggagaccgccaccgccggcggtcctgcggagggcaccccctccacgtccctggtcctcgaccagttcggccggaacctcacccaggccgctcgcgagtccaagctcgacccggtcatcgggcgcgagaaggagatcgagcgggtcatgcaggtgctgtcccgccgtacgaagaacaacccggtgctgatcggtgagcccggcgtcggcaagaccgccgtcgtcgagggcctcgcgcaggccatcgtcaagggcgaggtgcccgagaccctcaaggacaagcacctctacaccctggacctcggtgccctggtcgccggctcccgctaccgcggtgacttcgaggagcgcctgaagaaggtgctcaaggagatccgcacccgcggcgacatcatcctgttcatcgacgagctgcacacgctggtcggtgccggtgccgccgagggcgccatcgacgccgcgtcgatcctcaagccgatgctggcccgcggtgagctccagaccatcggtgcgaccacgctggacgagtaccgcaagcacctggagaaggacgcggccctcgagcgccgcttccagccgatccaggtcgcggagccgtcgctgccgcacacgatcgagatcctcaagggcctgcgcgaccgctacgaggcccaccaccgcgtctccatcacggacgaggccctggtccaggcggcgacgctcgccgaccgctacatctcggaccgcttcctgccggacaaggcgatcgacctgatcgacgaggccggatcccggatgcgcatccgccggatgaccgcgccgccggacctccgcgagttcgacgagaagatcgccggcgtccgccgcgacaaggagtccgcgatcgactcgcaggacttcgagaaggccgcttccctccgcgacaaggagaagcagctcctggccgccaaggccaagcgggagaaggagtggaaggccggcgacatggacgtcgtcgcggaggtggacggcgagctgatcgccgaggtcctcgccacggcgaccggcatcccggtcttcaagctcacggaggaggagtcgtcccgcctgctgcgcatggaggacgagctccacaagcgggtcatcggccagaaggacgccgtcaaggcgctctccaaggcgatccgccgtacccgtgccggcctgaaggacccgaagcgtcccggtggctcgttcatcttcgccggcccgtccggtgtcggtaagaccgagctgtccaaggcactcgccgagttcctcttcggtgacgaggacgcgctgatctccctcgacatgtcggagttcagcgagaagcacacggtctcgcgcctcttcggttcgccccccggctacgtgggctacgaggagggcggccagctgacggagaaggtccgccgcaagccgttctcggtcgtcctcttcgacgaggtcgagaaggcccacccggacatcttcaacagccttctccagatcctggaggacggtcgcctgaccgactcccagggccgggtcgtggacttcaagaacacggtcatcatcatgacgaccaacctcggcacccgggacatctccaagggcttcaacctcggcttcgccgccgcgggcgacacgaagtccaactacgagcgcatgaagaacaaggtccaggacgagctgaagcagcacttccggcccgagttcctcaaccgtgtcgacgacgtggtcgtcttcccgcagctcagccaggacgacatcctgcagatcgtcgacctgatgatccagaaggtcgacgagcgcctcaaggaccgggacatgggcatcgagctctcccagtccgccaaggagctgctgtccaagcggggctacgacccggtgctgggcgcgcgtccgctgcgccgcacgatccagcgcgaggtcgaggactcgctgtcggagaagatcctcttcggcgagctgcgtcccggtcacatcgtggtcgtggacaccgagggcgagggcgacgcggcgaccttcaccttccggggtgaggagaagtcgaccctccccgacgtcccgccgatcgagcaggcggcgggcggcgcggggcccaacctgagcaaggaggcctag

SEQ ID NO: 6774 - protein, 841 aa, Streptomyces coelicolor A3(2)
MFERFTDRARRVVVLAQEEARMLNHNYIGTEHILLGLIHEGEGVAAKALESLGISLEAVRQQVEEIIGQGQQAPSGHIPFTPRAKKVLELSLREALQLGHNYIGTEHILLGLIREGEGVAAQVLVKLGADLNRVRQQVIQLLSGYQGKETATAGGPAEGTPSTSLVLDQFGRNLTQAARESKLDPVIGREKEIERVMQVLSRRTKNNPVLIGEPGVGKTAVVEGLAQAIVKGEVPETLKDKHLYTLDLGALVAGSRYRGDFEERLKKVLKEIRTRGDIILFIDELHTLVGAGAAEGAIDAASILKPMLARGELQTIGATTLDEYRKHLEKDAALERRFQPIQVAEPSLPHTIEILKGLRDRYEAHHRVSITDEALVQAATLADRYISDRFLPDKAIDLIDEAGSRMRIRRMTAPPDLREFDEKIAGVRRDKESAIDSQDFEKAASLRDKEKQLLAAKAKREKEWKAGDMDVVAEVDGELIAEVLATATGIPVFKLTEEESSRLLRMEDELHKRVIGQKDAVKALSKAIRRTRAGLKDPKRPGGSFIFAGPSGVGKTELSKALAEFLFGDEDALISLDMSEFSEKHTVSRLFGSPPGYVGYEEGGQLTEKVRRKPFSVVLFDEVEKAHPDIFNSLLQILEDGRLTDSQGRVVDFKNTVIIMTTNLGTRDISKGFNLGFAAAGDTKSNYERMKNKVQDELKQHFRPEFLNRVDDVVVFPQLSQDDILQIVDLMIQKVDERLKDRDMGIELSQSAKELLSKRGYDPVLGARPLRRTIQREVEDSLSEKILFGELRPGHIVVVDTEGEGDAATFTFRGEEKSTLPDVPPIEQAAGGAGPNLSKEA

SEQ ID NO: 6775 - DNA, 2529 bp, Streptomyces coelicolor A3(2)
  CDS (1)..(2529): transl_table=11
atgaccagcggctacatgggcccggagggcgacccgttcgcggagttcctggcacgcttcttcggcgggcccaggccccggcagatcgacatcggccggctgctcagccagcccgcccgggagctggtgcgcggcgccgcccagtacgccgccgagcacggcagccgggacctggacaccgagcacctgctgcgggccgcgctcgccaccgagccgacccgggggctgctcagccgggccggtgccgaccccgactcgctggcctcgcagatcgacgagcggaccggaccggtgcagcacccgccgggcgaggtcccgccgcccacgtcgctctcgctcaccccggccgtcaagcgtgccctgctggacgcgcacgagctggcccgctccaccggcaccgggtacatcggcccggagcacgtgctcagcgccctggccgccaaccccgactcggccgccgggcacatcctgaacgcggcccgcttcgcgccctcgaacctgcccacggagacgccggaggccgcgaagggccgtaccgagagcgcccggaccacgaacacgccgaccctcgacaagtacggccgcgatctcaccgatctggcgcagcagggccggatcgacccggtgatcgggcgtgaggaggagatcgagcagaccgtcgaggtgctctcccggcgcggcaagaacaaccccgtcctgatcggggacgccggcgtcggcaagaccgcgatcgtggaggggctcgcccagcgcatcaccgacggcgacgtgccggacgtgctgatcgggcgccgggtggtcgcgctcgacctgacgggcgtcgtcgcgggcacccgctaccggggcgacttcgaggagcggatgaacaacatcgtgggcgagatccgcgcccactccgacgagctgatcatcttcatcgacgagctgcacaccgtcgtcggcgcgggcgggggcggcgagagcgggtcgatggacgccgggaacatcctcaagccggccctggcccgcggcgagctgcacatcgtgggcgccaccacgctggaggagtaccgcaggatcgagaaggacgcggccctcgcccgccgcttccagccgatcctggtgccggagcccaccaccgccgacgcgatcgagatcctgcgcggcctgcgcgaccgctacgaggcccaccaccaggtccgctacaccgacgaggcgctggtcgcggccgtggagatgtccgaccgctacctcaccgaccggcgcctgcccgacaaggccatcgacctgatcgaccaggcgggcgcccgcgtgcggctgcgggcgcgcaccaagggcaccgacgtacgggccctggagcgcgaggtcgaccagctggtgagggacaaggaccaggcggtcgcggacgagcagtacgagcaggcgacccagctgcgggaccggatcgtcgggctgaagcagcgcatcaccgaggccaccggcgacggccaggccgacgagggcctcgacctggtcgtggacaccgagtccatcgccgaggtggtctcccggcagaccggcatcccggtcagcagcctcacccaggaggagaaggaccgcctgctgggcctggagtcccacctgcacgagcgggtcgtcggccaggacgaggcggtacgggtcgtctccgacgccgtgctgcgctcccgcgccgggctgtccagtgcggaccggcccatcggcagcttcctcttcctcggcccgaccggcgtcggcaagaccgagctggcccgggcactggccgaggcgctgttcggcagcgaggaccggatggtgcgcctcgacatgagcgagtaccaggagcgccacaccgtcagccgcctggtcggcgccccgcccggctacgtcgggcacgaggaggccggtcagctcaccgaggtggtgcgccggcacccgtactcgctgctcctgctggacgaggtggagaaggcgcaccccgacgtcttcaacatcctgctccaggtcctggacgacgggcggctgaccgactcgcagggccggacggtggacttctccaacacggtcgtcgtgatgaccagcaacctgggctccgacgtgatcacccggcgcggtgccggcatcggcttcggcgcgggcggcgcggaggcggacgaggaagcccggcgcgagcaggtgctgcgcccgctgcgggagcacttccggcccgagttcctcaaccgcgtcgacgagatcgtggtcttccgccagctcagcggcgagcagctgcggcagatcaccagcctgctcctggagcagacccgtcgcatggtgcacgcgcagggcgtcaccgtcgacttcaccgacgcggccgtggactggctcgccgagcgcggctaccagcccgagtacggcgcccgaccgctgcgccgcaccatccagcgcgaggtggacaacgagctgtcccggctgctgctcgacggccgggtggcggagggcggccgggtgacggtcgacgtcgaggacgggcggctggcgttccgcacgccggagcgacccgtccccgaactgtga

SEQ ID NO: 6776 - protein, 842 aa, Streptomyces coelicolor A3(2)
MTSGYMGPEGDPFAEFLARFFGGPRPRQIDIGRLLSQPARELVRGAAQYAAEHGSRDLDTEHLLRAALATEPTRGLLSRAGADPDSLASQIDERTGPVQHPPGEVPPPTSLSLTPAVKRALLDAHELARSTGTGYIGPEHVLSALAANPDSAAGHILNAARFAPSNLPTETPEAAKGRTESARTTNTPTLDKYGRDLTDLAQQGRIDPVIGREEEIEQTVEVLSRRGKNNPVLIGDAGVGKTAIVEGLAQRITDGDVPDVLIGRRVVALDLTGVVAGTRYRGDFEERMNNIVGEIRAHSDELIIFIDELHTVVGAGGGGESGSMDAGNILKPALARGELHIVGATTLEEYRRIEKDAALARRFQPILVPEPTTADAIEILRGLRDRYEAHHQVRYTDEALVAAVEMSDRYLTDRRLPDKAIDLIDQAGARVRLRARTKGTDVRALEREVDQLVRDKDQAVADEQYEQATQLRDRIVGLKQRITEATGDGQADEGLDLVVDTESIAEVVSRQTGIPVSSLTQEEKDRLLGLESHLHERVVGQDEAVRVVSDAVLRSRAGLSSADRPIGSFLFLGPTGVGKTELARALAEALFGSEDRMVRLDMSEYQERHTVSRLVGAPPGYVGHEEAGQLTEVVRRHPYSLLLLDEVEKAHPDVFNILLQVLDDGRLTDSQGRTVDFSNTVVVMTSNLGSDVITRRGAGIGFGAGGAEADEEARREQVLRPLREHFRPEFLNRVDEIVVFRQLSGEQLRQITSLLLEQTRRMVHAQGVTVDFTDAAVDWLAERGYQPEYGARPLRRTIQREVDNELSRLLLDGRVAEGGRVTVDVEDGRLAFRTPERPVPEL

SEQ ID NO: 6777 - DNA, 2514 bp, Streptomyces coelicolor A3(2)
  CDS (1)..(2514): transl_table=11
atgtcgatgtcgtcgttcggattcggtgcgtccgatccgttcagtgatctgttcaaccggttcttcggaacgtcgcccgcgtcctcgcccccggcggtgcagcgggtgccgatcggccggatgctgaccgagtcctcgcaggagctcctcaacctggcggcacggcggtcgctggaggacgggacgtccgacctggacacggagcacctgttgtgggcggccacgaaggtcgagcccgcgcgggggctgctcgcccgggcgggcgccgaccccgacgcgctcgcctcccggatcgccgaggtcctgccccgcgaggcgggcgagccgtccgccgagccgggcctcaccccggccgccaagcgcaccctcgccaccgcctacgcccgctcccgggcctccggcgtctcctacatcggccccgagcacatcctgggcgccctgctggcggacggcgacacgggcgcggcccggctgctgggcgcccaggggcaggacatcggcaagctggaggggctcaccgagcaggccgcccgtccgggcggggccccgggcgacgacggcgggagaccggccaccacgctggacgagtacggacgggacctgaccgacgaggcgaaggccgggaagctcgaccccgtcgtcggccgcgccgaggagatcgagcagaccgtcgagatcctctcccggcgctccaagaacaatccggtgctgatcggcgagcccggcgtcggcaagaccgccatcgtggagggactggcccagcgcatcgtggccggtgaggtcccgaacacgctgaaggacaagagggtggtcgccctcgacctgtccgccatggtggcgggcgcgcagtaccggggccagttcgaggagcggctcaagaaggtcatcgaggacgtccagcaggcccgcggcgacatcatcctgttcatcgacgaactgcacaccgtcgtcggcgccggagcgagcggcgagagctccatggatgccggcaacatgctcaagccggccctcgcgcgcggcgaactgcacgtggtgggcgccacgaccatcgacgagtaccgcaagtacgtcgagaaggacgccgccctcgaacgccgcttccagcccgtgatggtccccgagccctcggtcgaggagacggtgcagatcctggagggcctgcgcgacgcctacgaggcgcaccaccaggtccgcttcgccgacggagcgctgaccgcggcggcggagctgtccgaccgctacgtcagcgaccgcttcctgcccgacaaggcgatcgacgtcatggaccaggcgggcgcccgggtacggctgcgcagcgcgagccgttccaccgaggtcgtcggccgcgaggaccgcatcgcgaagctgcgccgggagcaggagcaggccgtcgcggccgaggactacgcccgcgcgggcgagctgaaacgcgagatcgccgaggcggagggcgaactggcgggcatcgaggagcgccgcgagggcgtcgtctccgtcaccgccgacgacatcgcggacgtgatctcccgccgcaccggcatcccggtctcccagctgacggcgggggagaaggagcggctgctcaggctggaggaggagatgcacgcccggatcgtcggccaggacgaggcggtcaccgccgtctcacgggccgtgcgccgcaaccgggccggcatgggcgaccccgaccgccccgtgggctccttcctcttcctcggccccaccggtgtcggcaagaccgagctggccaagaccctcgccgagctgctgttcggcgaggagaaccgcatgatccgcttcgacatgagcgagttccaggagaagcacacggtcgcccggctcgtcggcgcgcccccgggctacgtcggctacgaggaggccggccagctcaccgagaaggtccgcaggcagccctacagcgtggtcctgttcgacgaggtcgagaaggcccaccccgacgtcttcaacacgctgctgcagatcctcgacgacggccgcctcaccgacggacagggacgcaccgtcgacttccggcactgcgtggtcatcatgacgtccaacatcggcgcccaccgcatcctcgaccacaagggcgacgtgtccgacctcaaggacgaactcatgcaggagctgcggggccggttcctgccggagttcctcaaccgcatcgacgagatcatcgtcttccacggcctcaccgaggacgacctctcgcggatcgtggaccacctgctggcgcagagcgaacggcgggtgcacgcccagggcatgacactgaaggtcaccgaggcggccaagaagctgctgatcgcccacggacaccagccggagttcggcgcccgaccgctcaggcgcaccatccaggccgaactcgacaaccgcgtcgccgacctgctcctcggcggcgaggccgaccccggcgacaccatcgtcgccgacgtggtcgacgactccctgcactgcacggtcgacaagtccggcaccgcacgacccgcggaggcgagcggcacatga

SEQ ID NO: 6778 - protein, 837 aa, Streptomyces coelicolor A3(2)
MSMSSFGFGASDPFSDLFNRFFGTSPASSPPAVQRVPIGRMLTESSQELLNLAARRSLEDGTSDLDTEHLLWAATKVEPARGLLARAGADPDALASRIAEVLPREAGEPSAEPGLTPAAKRTLATAYARSRASGVSYIGPEHILGALLADGDTGAARLLGAQGQDIGKLEGLTEQAARPGGAPGDDGGRPATTLDEYGRDLTDEAKAGKLDPVVGRAEEIEQTVEILSRRSKNNPVLIGEPGVGKTAIVEGLAQRIVAGEVPNTLKDKRVVALDLSAMVAGAQYRGQFEERLKKVIEDVQQARGDIILFIDELHTVVGAGASGESSMDAGNMLKPALARGELHVVGATTIDEYRKYVEKDAALERRFQPVMVPEPSVEETVQILEGLRDAYEAHHQVRFADGALTAAAELSDRYVSDRFLPDKAIDVMDQAGARVRLRSASRSTEVVGREDRIAKLRREQEQAVAAEDYARAGELKREIAEAEGELAGIEERREGVVSVTADDIADVISRRTGIPVSQLTAGEKERLLRLEEEMHARIVGQDEAVTAVSRAVRRNRAGMGDPDRPVGSFLFLGPTGVGKTELAKTLAELLFGEENRMIRFDMSEFQEKHTVARLVGAPPGYVGYEEAGQLTEKVRRQPYSVVLFDEVEKAHPDVFNTLLQILDDGRLTDGQGRTVDFRHCVVIMTSNIGAHRILDHKGDVSDLKDELMQELRGRFLPEFLNRIDEIIVFHGLTEDDLSRIVDHLLAQSERRVHAQGMTLKVTEAAKKLLIAHGHQPEFGARPLRRTIQAELDNRVADLLLGGEADPGDTIVADVVDDSLHCTVDKSGTARPAEASGT

SEQ ID NO: 6779 - DNA, 2616 bp, Xanthomonas axonopodis pv. citri str. 306
  CDS (1)..(2616): transl_table=11
gtgccggccacctgttcagaggatcttcccatgcggatggacaagctcacctcgcggttccagcaggcgctggccgacgcgcagtcgttggctgtgggccgcgaccacaacatcatcgagccggtgcacgtgctggccgcgctgctcgaccagagcggcggcagcacccgaccgctgctgtcgcaggccggcgtcaacgtgccgctgctgcgcgagcgcctcggcgaggcgctggacacgctgcccaaggtgtccgggcaggaaggcaatctgtcgatcggcaacgatctcaatcgcctgctcaaccagaccgacaagcttgcccagcaacatggcgacgcgttcatcgccagcgaatggttcgtgctggccgccgccgacgatgccagcccgctgggcgtggcgttgcgcgctgccggcggtgacaagaagaagatcgaagcggccatcgacaagctgcgtggtggcgaaaccgtgcagtcggaaaacgccgaagaacagcgccaggcgctggagaaatacaccatcgatctgaccgcacgcgccgagagcggcaagctcgatccggtgatcggccgcgacgaagaaatccgccgcaccatccaggtgctgcagcgccgcaccaagaacaacccggtgctgatcggcgaaccgggcgtgggcaagaccgccatcgtcgagggcctggcccagcgcatcatcaacggcgaagtgcccgaaggcctgcgcggcaagcgcgtgctgtcgctggacatgggcgcgctgattgccggtgccaagtttcgcggcgagttcgaagaacgcctgaaggcggtgctcagcgacctgtccaagaacgaaggccagatcatcctgttcatcgatgagctgcacaccatggtcggcgccggcaaggccgacggcgcgatggatgccggcaacatgctcaagccggcgctggcgcgcggtgagctgcattgcatcggcgccaccacgctggacgaataccgcaagtacatcgaaaaagatgcggcattggagcgccgcttccagaaagtgttcgtgggcgagccgacggtggaagacaccattgcgatcctgcgtgggctgaaggagcgctacgccgtgcatcacggcgtggagatcaccgacccggccatcgtggccgccgcgacgttgtccaaccgctacatcaccgaccgccagttgccggacaaggccatcgatttgatggacgaagcggcatcgcgcatccgcatggagatcgactccaagccggaggagctcgatcgcctggagcgccgcctgatccagctcaagatccagcgcgagatgctcaagaaggaaaaggacgatgcctcgcggcaacggctggccgatctggaaaccgatatcgacaagctcgagcgcgagttctatgacctcaacgagctgtggaaatccgagaaggctgcgctgcagggcaccaccaaggtcaaggagcagatcgaacacgccaagctggaactggaggccgcgcagcgccgccaggactacgccaagatgagcgagatccagtacggcgtgctgccgcagctggaaaagcagatggcgttggccaacgaagtcgaacaccacgatttcaagctggtgcaggaccgcgtgaccgccgaggaaatcgccgaagtggtgtcgcgctggaccggcattccggtcaacaagatgctcgaaggcgagcgcgacaagctgttgcgcatggaagacgaactgcatcatcgcgtggtcgggcagaacgaggcgatcaaggtggtgtccgatgcggtgcgccgctcgcgcgccggcctgtccgacccgaaccgccccagtggctcgttcctgttcttaggtcccaccggcgtgggtaagaccgagctgtgcaaggcgctggcggatttcctgttcgacagcaccgaagcgatgattcgcatcgacatgagcgagttcatggagaagcattcggtcgcgcgcctgatcggtgcacctcctggctatgtgggttatgaagaaggcggttatctcaccgaggccgtgcgtcgtcgtccgtattcgctgatcctgctggacgaagtggaaaaggcgcatccggatgtcttcaacatcctgctgcaggtgctcgacgatggccgcctgaccgatggccagggccgcaccgtggacttccgcaataccgtcatcgtgatgacctccaacctgggctcgcaccagatccaggagctgtccggcgacgatagcgccgaggcgtacacgcagatgaaggccgcggtgatgggggtggtgcaggcccacttccgcccggagttcatcaaccggctggacgacatcgtggtgttccatccgctggacaaggcgcagatcaagtcgattgcgcgcatccagttgcaaggcctggaaaaacgcctggccgagcgcggcctcaagctggacctggacgatgcggcgctggaggtgctgggcagtgtcggcttcgacccggtgtacggcgcgcgtccgctcaaacgcgcgatccaatcgcaggtggagaacccgctggcgcagcagatcctgtcgggccagtatctcagcggcgatagcgtgcgcgtgcgtgccgacggcggacggctggtgtttaccaaggactga

SEQ ID NO: 6780 - protein, 871 aa, Xanthomonas axonopodis pv. citri str. 306
MPATCSEDLPMRMDKLTSRFQQALADAQSLAVGRDHNIIEPVHVLAALLDQSGGSTRPLLSQAGVNVPLLRERLGEALDTLPKVSGQEGNLSIGNDLNRLLNQTDKLAQQHGDAFIASEWFVLAAADDASPLGVALRAAGGDKKKIEAAIDKLRGGETVQSENAEEQRQALEKYTIDLTARAESGKLDPVIGRDEEIRRTIQVLQRRTKNNPVLIGEPGVGKTAIVEGLAQRIINGEVPEGLRGKRVLSLDMGALIAGAKFRGEFEERLKAVLSDLSKNEGQIILFIDELHTMVGAGKADGAMDAGNMLKPALARGELHCIGATTLDEYRKYIEKDAALERRFQKVFVGEPTVEDTIAILRGLKERYAVHHGVEITDPAIVAAATLSNRYITDRQLPDKAIDLMDEAASRIRMEIDSKPEELDRLERRLIQLKIQREMLKKEKDDASRQRLADLETDIDKLEREFYDLNELWKSEKAALQGTTKVKEQIEHAKLELEAAQRRQDYAKMSEIQYGVLPQLEKQMALANEVEHHDFKLVQDRVTAEEIAEVVSRWTGIPVNKMLEGERDKLLRMEDELHHRVVGQNEAIKVVSDAVRRSRAGLSDPNRPSGSFLFLGPTGVGKTELCKALADFLFDSTEAMIRIDMSEFMEKHSVARLIGAPPGYVGYEEGGYLTEAVRRRPYSLILLDEVEKAHPDVFNILLQVLDDGRLTDGQGRTVDFRNTVIVMTSNLGSHQIQELSGDDSAEAYTQMKAAVMGVVQAHFRPEFINRLDDIVVFHPLDKAQIKSIARIQLQGLEKRLAERGLKLDLDDAALEVLGSVGFDPVYGARPLKRAIQSQVENPLAQQILSGQYLSGDSVRVRADGGRLVFTKD

SEQ ID NO: 6781 - DNA, 2475 bp, Thermosynechococcus elongatus BP-1
  CDS (1)..(2475): transl_table=11
atgtttgaacgctttacagaaaaagccattaaagtcatcatgctggcacaggaagaggctcgccgcctcggccacaactttgtcggtaccgaacaaattctcctcggactgattggtgaaggtaccggtgtggccgccaaggttctacgttctatgggcgtgaacctcaaggatgcccgcatcgaagtggaaaaaattattggccgtggatctggttttgtcgcggtggagattccctttaccccccgtgccaagcgagtgttagaactctcccttgaagaagctcgtcaactgggtcacaactacattggtactgaacacctcctgctgggactgatccgcgaaggggaaggggtggccgcccgcgtccttgaaaatttgggtgttgatctatcgaaagtgcgcacccaagtcattcggatgctgggtgaaaccgcagaagtgaccgctggcgctagccaaggacgtaccaaaacgccgacgctggacgaatttggtgtcaacctcacccagctggctattgagggcaagctagatcccgtggtgggtcggcaaaaagaaattgagcgggtgattcaaattctgggccgtcgcaccaaaaataaccccgtgctgatcggtgaaccgggggtgggtaaaaccgcgattgctgaaggcctggcccagcgcattgccaacaaagatgttcccgacattcttgaagacaagcgggtggtcaccctcgatatcggcctcttggtggcaggcacgaagtaccggggtgaatttgaagagcggctgaaaaagatcatggatgaaatccgccaagccggtaacgtgatcttggtgattgacgaggtgcacacgttaattggggctggggcggcggagggtgctattgatgcagccaatatcctcaaacccgccctggctcgtggggagttgcagtgcattggtgccactactttggatgagtaccgcaaacacattgagcgggatgccgccttggagcggcgcttccaaccggtgatggtgggtgagccctccgttgaggaaaccattgagatcctctacggcctgcgggaacgctatgagaagcaccacaaactgaaaatttccgatgaagcccttgaggcggcagcgaagctgtccgatcgctacattagcgatcgctatctaccggacaaggccattgacctcattgacgaagcaggctcacgggtgcgcctgattaactcgcaactaccccctgcggccaaggaactggatcgcgaattgcggcaagtgctcaaagaaaaagacgatgccgtgcgggcccaaaactttgacaaagcgggtgaactgcgcgatcgcgagatggaactgaaagcacaaatccgtgccattgcccagcagaaaaaagccgaaatcgccaacggtgaagaggagacccccgtcgtcaccgaagaggacattgcccacattgtcgcctcgtggacgggtgtgcccgttagcaagctcaccgaaagcgagtcggaaaaactgctgcacatggaggagaccttgcaccagcgggtcattggccaagatgaagcggtgaaagcgatctcccgcgccattcgccgtgcccgtgtcggtctcaaaaatcccaatcgtcccattgccagctttatcttctcggggccaaccggtgtcggtaaaaccgagttaacgaaagccttggcggcctacttctttggctcggaagaggcgatgatccgcttggatatgtccgaatacatggagcggcataccgtctccaagctcatcggttcgccccccggctatgttggctacaacgagggcggtcagctcaccgaagccgtgcggcggcgtccctatacggtggtgctcttcgatgaaatcgagaaagctcaccccgatgtctttaacctgctactgcaaatccttgaggatggccgtcttactgactccaagggacgtaccgttgacttcaagaataccctcttgatcatgacctcgaacattggctccaaggtgattgagaagggggcggcgggccttggctttgagtttggcactgaggatgccgccgaatcccaatacaaccgcattcgctccttggtgaatgaggaactgaagcaatacttccgccctgaattcctcaaccgccttgatgagattattgtcttccgtcaattgacgaaggacgaagtcaagcaaattgccgacattctccttaaggaagtgttctcgcgcctcacagaaaaaggcatcaccttggaggtgaccgaacgcttcaaggaacggctcattgatgagggctacaaccccagctatggagcgcggcccctgcggcgggcaattatgcgccttttggaggacaccttggctgaggaaatgctctctggccgcatccgcgaaggcgacactgccctcattgatgtggatgaatccggtcaagtgaagatccaagctcaacctcggcgtgagctattgccccaggcggttgagtag

SEQ ID NO: 6782 - protein, 824 aa, Thermosynechococcus elongatus BP-1
MFERFTEKAIKVIMLAQEEARRLGHNFVGTEQILLGLIGEGTGVAAKVLRSMGVNLKDARIEVEKIIGRGSGFVAVEIPFTPRAKRVLELSLEEARQLGHNYIGTEHLLLGLIREGEGVAARVLENLGVDLSKVRTQVIRMLGETAEVTAGASQGRTKTPTLDEFGVNLTQLAIEGKLDPVVGRQKEIERVIQILGRRTKNNPVLIGEPGVGKTAIAEGLAQRIANKDVPDILEDKRVVTLDIGLLVAGTKYRGEFEERLKKIMDEIRQAGNVILVIDEVHTLIGAGAAEGAIDAANILKPALARGELQCIGATTLDEYRKHIERDAALERRFQPVMVGEPSVEETIEILYGLRERYEKHHKLKISDEALEAAAKLSDRYISDRYLPDKAIDLIDEAGSRVRLINSQLPPAAKELDRELRQVLKEKDDAVRAQNFDKAGELRDREMELKAQIRAIAQQKKAEIANGEEETPVVTEEDIAHIVASWTGVPVSKLTESESEKLLHMEETLHQRVIGQDEAVKAISRAIRRARVGLKNPNRPIASFIFSGPTGVGKTELTKALAAYFFGSEEAMIRLDMSEYMERHTVSKLIGSPPGYVGYNEGGQLTEAVRRRPYTVVLFDEIEKAHPDVFNLLLQILEDGRLTDSKGRTVDFKNTLLIMTSNIGSKVIEKGAAGLGFEFGTEDAAESQYNRIRSLVNEELKQYFRPEFLNRLDEIIVFRQLTKDEVKQIADILLKEVFSRLTEKGITLEVTERFKERLIDEGYNPSYGARPLRRAIMRLLEDTLAEEMLSGRIREGDTALIDVDESGQVKIQAQPRRELLPQAVE

SEQ ID NO: 6783 - DNA, 2574 bp, Shigella flexneri 2a str. 301
  CDS (1)..(2574): transl_table=11
atgcgtctggatcgtcttactaataaattccagcttgctcttgccgatgcccaatcacttgcactcgggcacgacaaccaattcatcgaaccacttcatttaatgagcgccctgctgaatcaggaagggggttcggttagtcctttattaacatccgctggcataaatgctggccagttgcgcacagatatcaatcaggcattaaatcgtttaccgcaggttgaaggtactggtggtgatgtccagccatcacaggatctggtgcgcgttcttaatctttgcgacaagctggcgcaaaaacgtggtgataactttatctcgtcagaactgttcgttctggcggcacttgagtctcgcggcacgctggccgacatcctgaaagcaacaggggcgaccaccgccaacattactcaagcgattgaacaaatgcgtggaggtgaaagcgtgaacgatcaaggtgctgaagaccaacgtcaggctttgaaaaaatataccatcgaccttaccgaacgagccgaacagggcaaactcgatccggtgattggtcgtgatgaagaaattcgccgtaccattcaggtgctgcaacgtcgtactaaaaataacccggtactgattggtgaacccggcgtcggtaaaactgccatcgttgaaggtctggcgcagcgtattatcaacggcgaagtgccggaaggattgaaaggccgccgcgtactggcgctggatatgggcgcgctggtggctggggcgaaatatcgcggtgagtttgaagaacgtttaaaaggcgtgcttaacgatcttgccaaacaggaaggcaacgtcatcctgtttatcgacgaattacataccatggtcggcgcgggtaaagccgatggcgcaatggacgccggaaacatgctgaaaccggcgctggcgcgtggtgaattgcactgcgtaggtgccacgacgcttgacgaatatcgccagtacatcgaaaaagatgctgcgctggaacgtcgtttccagaaagtgtttgttgccgagccttctgttcaagacaccattgcgattctgcgtggcgtgaaagaacgtttcgaattgctccaccatgtgcaaattactgacccggcaattgttgcagcagcgacgttgtctcatcgctacattgctgaccgtcagctgccggataaagccatcgacctgatcgatgaagcagcatccagcattcgtatgcagattgactcaaaaccagaagaactcgaccgactcgatcgtcgtatcatccagctcaaactggaacaacaggcgttaatgaaagagtctgatgaagccagtaaaaaacgcctggatatgctcaacgaagaactgagcgacaaagaacgtcagtactccgagttagaagaagagtggaaagcagagaaggcatcgctttctggtacgcagaccattaaagcggaactggaacaggcgaaaatcgctattgaacaggctcgccgtgtgggggacctggcgcggatgtctgaactgcaatacggcaaaatcccggaactggaaaagcaactggaagccgcaacgcagctcgaaggcaaaactatgcgtctgttgcgtaataaagtgaccgatgccgaaattgctgaagtgctggcgcgttggacggggattccggtttctcgcatgatggaaagcgagcgcgaaaaactgctgcgtatggagcaagaactgcaccatcgcgtcattggtcagaacgaagcggttgatgcggtatctaacgctattcgccgtagccgtgcggggttggcggatccaaatcgcccgattggttcattcctgttcctcggcccaacgggtgtggggaaaactgagctttgtaaggcgctggcgaactttatgtttgatagcgacgaggcgatggtccgtatcgatatgtccgaatttatggagaaacactcggtgtctcgtctggttggtgcgcctccgggatatgtcggttatgaagaaggtggctacctgaccgaagctgtgcgtcgtcgtccgtattccgtcatcctgctggatgaagtggaaaaagcgcatccggatgtcttcaatattctgttgcaggtactggatgatgggcgtctgactgacgggcaggggagaacggtcgacttccgtaatacggttgtcattatgacctctaacctcggttccgatctgattcaggaacgcttcggtgaactggattatgcgcacatgaaagagctggtgctcggtgtggttagccataacttccgtccggaattcattaaccgtattgatgaagtggtggtcttccatccgctgggtgaacagcacattgcctcgattgcgcagattcagttgaaacgtctgtacaaacgtctggaagaacgtggttatgaaatccacatttctgacgaggcgctgaaactgctgagcgagaacggttacgatccagtctatggtgcacgtcctttgaaacgtgctatccagcagcagatcgaaaacccgctggcacagcaaatactgtctggtgaattggttccgggtaaagtgattcgcctggaagttaatgaagaccggattgtcgctgtccagtaa

SEQ ID NO: 6784 - protein, 857 aa, Shigella flexneri 2a str. 301
MRLDRLTNKFQLALADAQSLALGHDNQFIEPLHLMSALLNQEGGSVSPLLTSAGINAGQLRTDINQALNRLPQVEGTGGDVQPSQDLVRVLNLCDKLAQKRGDNFISSELFVLAALESRGTLADILKATGATTANITQAIEQMRGGESVNDQGAEDQRQALKKYTIDLTERAEQGKLDPVIGRDEEIRRTIQVLQRRTKNNPVLIGEPGVGKTAIVEGLAQRIINGEVPEGLKGRRVLALDMGALVAGAKYRGEFEERLKGVLNDLAKQEGNVILFIDELHTMVGAGKADGAMDAGNMLKPALARGELHCVGATTLDEYRQYIEKDAALERRFQKVFVAEPSVQDTIAILRGVKERFELLHHVQITDPAIVAAATLSHRYIADRQLPDKAIDLIDEAASSIRMQIDSKPEELDRLDRRIIQLKLEQQALMKESDEASKKRLDMLNEELSDKERQYSELEEEWKAEKASLSGTQTIKAELEQAKIAIEQARRVGDLARMSELQYGKIPELEKQLEAATQLEGKTMRLLRNKVTDAEIAEVLARWTGIPVSRMMESEREKLLRMEQELHHRVIGQNEAVDAVSNAIRRSRAGLADPNRPIGSFLFLGPTGVGKTELCKALANFMFDSDEAMVRIDMSEFMEKHSVSRLVGAPPGYVGYEEGGYLTEAVRRRPYSVILLDEVEKAHPDVFNILLQVLDDGRLTDGQGRTVDFRNTVVIMTSNLGSDLIQERFGELDYAHMKELVLGVVSHNFRPEFINRIDEVVVFHPLGEQHIASIAQIQLKRLYKRLEERGYEIHISDEALKLLSENGYDPVYGARPLKRAIQQQIENPLAQQILSGELVPGKVIRLEVNEDRIVAVQ

SEQ ID NO: 6785 - DNA, 2823 bp, Pseudomonas putida KT2440
  CDS (1)..(2823): transl_table=11
gtgctgcggcaggctccatctcgtcatctcaatgactcaaggagcgcccgcatggccagcaaacaatgccaggtctgtggccaacccgccacgacacgggtggaggccaaggtcaatggccgccacagcatcatgctgttgtgtgatgatcactaccgccaattggtgcgccagcaaaaacgcaccctttccccactggaagcccttttcggctcgcgcagcggtttgttcgaagagttcatgggcagcgatttgctgcgcatcggagaagactcggcatccgttgccacggatgccgatgaagtggctgaagcgtcgtctggggaacctggccgcgcagcgtccggcacgccacgccgccgcagcagcgggctggccagccgcatcagcgaacactccgaggccctgttgcaggaagccgccaagcgtgccacggagttcggtcggtccgaagtcgacaccgaacacctgctattggcgctggccgacagcgacgtggtgaagaccatcctgagccagttcaagatcaaggttgatgagctcaagcgccagatcgaagccgaagccaagcgcggcgacaagccatttgaaggcgaagtcggcgtgtcgcctcgggtcaaggatgcgctcagtcgcgccttcgtcgcctccaatgagttggggcacgcatacgtaggccccgagcacttcttgatcgggctggccgaagagggcgaagggctggccgccaacttgctgcgccgctatggccttatgccgcaggccctgcgccagtgcgtcagcaaggtggttggcaagggtgcagaggatggtcgcgccgaggcaccgaccgaaacgccggagctcgacaagtactcgcgcgatctcaccaggatggcgcgcgatggcaagctggacccggtcatcgggcgggcacaggaaatcgaaaccaccattgaggtactggcgcggcgcaagaagaacaacccggtgttgatcggcgagcctggcgtgggcaagacggccatcgtcgaggggctggcgcagcgcatggtggccggcgaggtgcccgagacgctgcgcgacaagcgcctggtcgaactgaacatcaattcgttggtggctggcgcgaagtaccgaggcgagttcgaggagcgcgtgcagaaggtgctgaaggaaatcgccgagcatcagggcgagctgattctcttcatcgacgaagtgcacaccatcgtcggggcaggccagggcggtggagaaggcggcttggacgtggccaacgtcttcaagccgatgatggcgcgtggtgagctgaacctgattggcgcgacgacgctcaacgagtaccagaagtacatcgagcaggacgctgcgctggagcggcgtttccaaccggtcgtggtgcccgagccaacggtggcgcagaccatcatgatcctgcgcggcctgcgcgacaccttcgaagcgcaccacaaggtcagcatcaccgaggaggcgatcatcgctgccgccgaactgtccgaccgctacgtcagcgcgcgctttctgccggacaaggccatcgatctgctcgatcaggctgccgcccgcgtcaagttatcggcgacggcgcgtccggttgcggtgcaggaaatggagtcggagttgcaccagttgcgccgcgagcaggactacgcggcttcgcgcaagcaatatgacaatgcggcgcagatcagcaagcgcgtcgaagccacggaggccgaactcaagcagcgggtcgaggagtgggagcgcgagcgcggctcgggcagcaccgaggtcaaggcggaacatgtggcgcaaatcgtctcgcggctaaccggcattccggtcaatgaactgacggtggaggagcgcgagaagctgttgcacctggagcagcggctgcatgagcgcctggtggggcaggacgaggcggtgcgtgcggtggcggacgcggttcggctgtcgcgcgctgggctgcgcgaaggcagcaagcccgttgccacgttcctgttcctgggctccaccggtgtcggcaagaccgagctggccaaggcgctggccgaaaccatctacggcgacgagagcgccctgttgcgtatcgacatgtcagagtatggcgagcgccattccgtggctcggctggtgggcgcgcctccgggttacgttggttatgacgaaggcggccagcttaccgaaaaggtccggcgcaagccctatagcgtgctgctgctcgacgaaatcgagaaggcccacgccgacgtctacaacatcctgctgcaggtgttcgacgacgggcgactgaccgatggcaaggggcgcgtggtggacttcaccaacaccattatcatcgccacgtccaacctgggctccgacattattcagcggcggctgaaggcgcctggagcggctggtgaggagtacgagaagaccaaggtcgaggtgatggaagtgctgcgcgggcactttcgccccgagttcctcaaccgaatcgatgagatcatcgtcttccatgcgctgggcaagcaggagatccgccacattgttggcctgcaacttgagcgcgtagcccgcaatgccgcgagccagggcgtgacgctgacgttcgacgagacactggtcgatcacttggcgcaagtcggctacaagcccgaattcggtgcccgcgagctcaagcgactgatccgcagcgagctggagacggcactggcacgtgaaatgctcggcggcggcattggcaagggtgatcacgcccatgtgcgctgggacgacaaggcggagcgggtcgggttcgaccgccggcaagccgcgccggccaaagagctcgacagtgaaaatgcgtga

SEQ ID NO: 6786 - protein, 940 aa, Pseudomonas putida KT2440
MLRQAPSRHLNDSRSARMASKQCQVCGQPATTRVEAKVNGRHSIMLLCDDHYRQLVRQQKRTLSPLEALFGSRSGLFEEFMGSDLLRIGEDSASVATDADEVAEASSGEPGRAASGTPRRRSSGLASRISEHSEALLQEAAKRATEFGRSEVDTEHLLLALADSDVVKTILSQFKIKVDELKRQIEAEAKRGDKPFEGEVGVSPRVKDALSRAFVASNELGHAYVGPEHFLIGLAEEGEGLAANLLRRYGLMPQALRQCVSKVVGKGAEDGRAEAPTETPELDKYSRDLTRMARDGKLDPVIGRAQEIETTIEVLARRKKNNPVLIGEPGVGKTAIVEGLAQRMVAGEVPETLRDKRLVELNINSLVAGAKYRGEFEERVQKVLKEIAEHQGELILFIDEVHTIVGAGQGGGEGGLDVANVFKPMMARGELNLIGATTLNEYQKYIEQDAALERRFQPVVVPEPTVAQTIMILRGLRDTFEAHHKVSITEEAIIAAAELSDRYVSARFLPDKAIDLLDQAAARVKLSATARPVAVQEMESELHQLRREQDYAASRKQYDNAAQISKRVEATEAELKQRVEEWERERGSGSTEVKAEHVAQIVSRLTGIPVNELTVEEREKLLHLEQRLHERLVGQDEAVRAVADAVRLSRAGLREGSKPVATFLFLGSTGVGKTELAKALAETIYGDESALLRIDMSEYGERHSVARLVGAPPGYVGYDEGGQLTEKVRRKPYSVLLLDEIEKAHADVYNILLQVFDDGRLTDGKGRVVDFTNTIIIATSNLGSDIIQRRLKAPGAAGEEYEKTKVEVMEVLRGHFRPEFLNRIDEIIVFHALGKQEIRHIVGLQLERVARNAASQGVTLTFDETLVDHLAQVGYKPEFGARELKRLIRSELETALAREMLGGGIGKGDHAHVRWDDKAERVGFDRRQAAPAKELDSENA

SEQ ID NO: 6787 - DNA, 2700 bp, Rhodopirellula baltica SH 1
  CDS (1)..(2700): transl_table=11
ttgattccgcgtcccacctccttatcccacccacttctctgcctggagattctgatggcctttcgaatcgacaaactcacaacacaagctcaaaacgtggtcgcagaagcgcaagctcaggccacttcggccggcaacgccgagatcgatccgctgcatgttctttcggcggcggtcaaccagcgagatggcatcacgacgccgttgctcgaaaagatcaacgtggatgttccgaagctgaagtcgttgctgacgagcgaactggaaaagctgccccatgcatcgggcatgggtcaggcccgagtatccgcgaaattgcaggcggctctggaagcgtcggcgacctcggcggagtcgttgaaggacgagtacgtcagcaccgagcatctgctcgttggtttggctcgcaccgacaacaaagccaaaaatctgttgtctttgctgggtgtgtcggacaacgatctgctcacggcaatgagccaaattcgcggatcggctcgcgtgaccgaccccaatgcagaatcgacttatcaagctctcgagaagtttggcattgacctgacccagttggctcaaagcggcaagctcgatcctgtcatcggacgtgacaatgagatccgtcgtgtgattcaggttctctcgcgtcggacaaagaataatcctgttctgatcggacagcctggtgtcggtaaaacagcaatcgcggagggattggcacttcgtatcttcgaaggtgatgttcctcaaagcctcaaaggcaagaaggtcgtctcgctcgacatgggagcactcgtcgcgggagctaagttccgcggtgatttcgaagagcgtttgaagtcggtgcttcgcgaagtcaaagactccgatggcaaagtgattctatttatcgatgagttgcacttggtcgttggtgctggcaacgcggagggttcggccgacgcagcgaacttgctcaagcctgaactggcccgtggtgcgctccgctgcatcggtgcgacgacgttggatgagtatcgtcagcacatcgaaaaggatgcggcgctcgagcgtcggttccaaccggttttcgtgggtgaaccaaacgtggaagacaccgtcgcgattctgcgagggctgaaacctcgttacgaatcgcaccatggtgtccgtatcacagatagtgctttggttgccgccgccaatctatcggatcgttacattgcggatcgattcctgccggacaaagcgatcgacttgatcgacgaagccgccagtcgtttggcgatggaaaaagaaagtgtgcctgaaccgattgatcgtttgcaacgtcgtcttcggcaattggaattggttcaccgtcaactggtggacgaacaagaagcttctgccgtcgataaacgcgtcgaggtggaagaagaaatggaatctgccaaagcagagttggccagtttgaaggaacaatgggaaaccgaaaaaatgggtttggacgacgtccagtccgttcgacaagaagttgatcagcttcagcatcgttttgctcagctagatgcggatgcgaaggagaagcagcttcgaggcgagagtcctgaggatgcgtatagcgagatgctgcaggtgcaatcgcggcttcgtgagttgcaggcccggattgatgaagctgaaaaacatgacgattcagcggatcaaaccaaggaagaaccgggagatgaaaaacgtcgcctgcttcgcaaggaagttaccgaagaagaaattgcagaggtcgtcagcacttggaccggtgttccagtcactcgaatgatggaaaccgaacgagccaagttgttggtgatggaagagagattgcatcaacgggttgttggacaggatgaagcggtcaccgcagtttcggacgcggttcgtcgcagtcgcagtgggttgcaagatcccaatcgtccgatcggttcgttcctgttcctaggacccaccggtgtcggaaagacggaactttgcaaagcattggcggaagtcatgtttgatgatgaatccgcgatggttcgtatcgacatgagtgagttcatggaacgccacagcgtgtcgcgactgattggtgcgcctcccggctacgttggctacgaagagggcggcaagctaaccgaggccgttcgccggagaccttacgcggtgattctgctcgatgagatggagaaggcgcatccggatgtgttcaacgttctattgcaagtgctcgatgatgggcgattgaccgacgggcaaggccgaacggtgaacttcaccaataccgtggttgtgatgaccagcaatgttggtagccaggtgattcagcgagtgacggaggaaggcggtggtgaagatgaaatgcgtcaggcggtggaagatgctttgaaggcaaggttcttgccagagtttctcaaccggatcgatgacacagtgatctttcacccgctgcagcaaactcagattcgcaggattgttcaattgcaactcgaagagctgcgttcgcgtttggcagccaatggcttgtcattcgaaatcacagacgctgcgatcgatcaaattgcggaagtggggtatgacccagcgtatggggcaaggcctctgaagcgtgtgatccaacgcgaggtgcagaatccgcttgcttcagcgattttgaagaacagctatgccgaaggcaccacgatcaagatcgaccacgatggcgatcaattcgtgttctctgggtga

SEQ ID NO: 6788 - protein, 899 aa, Rhodopirellula baltica SH 1
MIPRPTSLSHPLLCLEILMAFRIDKLTTQAQNVVAEAQAQATSAGNAEIDPLHVLSAAVNQRDGITTPLLEKINVDVPKLKSLLTSELEKLPHASGMGQARVSAKLQAALEASATSAESLKDEYVSTEHLLVGLARTDNKAKNLLSLLGVSDNDLLTAMSQIRGSARVTDPNAESTYQALEKFGIDLTQLAQSGKLDPVIGRDNEIRRVIQVLSRRTKNNPVLIGQPGVGKTAIAEGLALRIFEGDVPQSLKGKKVVSLDMGALVAGAKFRGDFEERLKSVLREVKDSDGKVILFIDELHLVVGAGNAEGSADAANLLKPELARGALRCIGATTLDEYRQHIEKDAALERRFQPVFVGEPNVEDTVAILRGLKPRYESHHGVRITDSALVAAANLSDRYIADRFLPDKAIDLIDEAASRLAMEKESVPEPIDRLQRRLRQLELVHRQLVDEQEASAVDKRVEVEEEMESAKAELASLKEQWETEKMGLDDVQSVRQEVDQLQHRFAQLDADAKEKQLRGESPEDAYSEMLQVQSRLRELQARIDEAEKHDDSADQTKEEPGDEKRRLLRKEVTEEEIAEVVSTWTGVPVTRMMETERAKLLVMEERLHQRVVGQDEAVTAVSDAVRRSRSGLQDPNRPIGSFLFLGPTGVGKTELCKALAEVMFDDESAMVRIDMSEFMERHSVSRLIGAPPGYVGYEEGGKLTEAVRRRPYAVILLDEMEKAHPDVFNVLLQVLDDGRLTDGQGRTVNFTNTVVVMTSNVGSQVIQRVTEEGGGEDEMRQAVEDALKARFLPEFLNRIDDTVIFHPLQQTQIRRIVQLQLEELRSRLAANGLSFEITDAAIDQIAEVGYDPAYGARPLKRVIQREVQNPLASAILKNSYAEGTTIKIDHDGDQFVFSG

SEQ ID NO: 6789 - DNA, 2628 bp, Synechococcus sp. WH 8102
  CDS (1)..(2628): transl_table=11
atgcccatacggtttgttcaggacaaccgcaacagtcatatgcaacccacagccgaacagttcaccgaacaggcctgggccgccatcgtcgcggcccagcaactcgcccaggcctccaggcaccagcagctggaaaccgaacatctgctgctggcgctgcttcgacagaacggactggccgggcgaatcctcagcaaaaccggcgttgacgtcaccaccttcgaggccagtgttgaaggccatctgcaacggcttcccagccttggctcggcacccgactcggtgtttcttggccgatccctcaacaaggccctcgaccgagccgagcagcggcgggatggattcggcgacagcttcatcgccatcgagcatctgcttctggccctggcggaggatgatcgctgcggccggcaactgctcagccaggccggggtgaccaccaacacactcaaggaggcgatcacggcggtgcgcggcaaccaaacggtgacagaccagaaccctgaggccacctacgaatccctggcgaaatacggccgcgatctcacagcagcggcccgcgatggtcagctggatccggtgatcggacgggatgaagagatccgccgcaccattcagatactcagccgccgcaccaagaacaaccccgtgctgatcggtgaacccggggtcggcaaaacagcaatcgtcgagggcttggcacagcggatcgtcaatggtgatgtgccccaggccctgcagaaccgacagctcattaccctcgacatgggtgccctgatcgccggggcgaaataccggggtgagttcgaagaacggctcaaagcggtgctgaaggaggtcaccacctccgatggacagattgtgctgttcatcgatgagatccacacggtggtgggcgctggcgccagcggtggtgccatggacgccagcaatctgctgaaaccgatgctggcccggggtgaactgcgctgcatcggggccaccacccttgatgagcaccgtcagcacatcgaaaaggatcccgccctggagcgacgctttcagcaggtgctggtggatcagcccacagtgccggacacgatttcaatcctgcggggcctgaaggagcgctacgaggtacaccacggcgtacgcattgccgacagcgctttggtggccgccgccatgctcagcagcagatacatcaccgatcgcttcctgccggacaaggccatcgacctggtggatgaatccgccgcccggctgaaaatggagatcacctccaaaccggagcagatcgacgagatcgatcgcaaaattctgcagctggagatggaaaaactctccctcggccgtgagtccgacagtgccagccaggagcggttgcaacggattgaacgggaattggcggaactgggtgaacaacagagcagcctcaatgcccagtggcagagcgaaaaaggtgccattgatcagctctcggctctcaaggaggagatcgaacgggtgcagctgcaggtggagcaggccaaacgcaattacgacctcaacaaggcagctgaactcgaatacggaactctcgccacgctgcaacgccagctgcaggagcaggaagacctcttggaagacgaggacggaacagacaaaaccctgctgcgggaggaggtcaccgaagacgacatcgctgaagtgattgccaagtggaccggcatccccgtggctcgcctggtgcagagcgaaatggagaaactgctgcagctggaggacgacctgcatcaacgggtgatcggacagaaccaggcggtcactgccgttgccgacgcgattcaacgctcaagggcaggcctcagcgatcccaaccggcccatcgcgagctttctgttcctcgggccgacgggtgtcggcaagacggaactgtccaaggcgctggccaatcgcctgttcgacagcgacgacgccatggtgcgcatcgacatgtcggagtacatggagaaacacaccgtgagccgactgatcggtgcccctccgggctatgtgggttatgaagccggcggccagctcacggaagcggtacggcgacggccttacgccgtgatcctgttcgacgaggtggagaaagcccaccccgatgtgttcaatgtgatgctgcagatcctcgatgacggccgcgttaccgacggccagggccgcacggtggatttcaccaacaccgtgttgatcctcaccagcaacatcggcagccaatcgattcttgagctggctggggatccggagcaacacacggcgatggagcaacgggtcaacgaggcgctcaaggccaaattccgtcccgaatttctcaacaggctcgacgatcagatcatcttccgcagccttgaaaaagaggagctgcgccggatcgtgtcactgcaggtggagcgtctgcggtcgcgactggagcaacgcaagctggaccttcagctcagcgacatcgcagccgattggctggccaccattggctttgacccggtttacggagcaagacccctcaaacgcgccatccagcgggagctggaaacaccaatcgccaaagcgatcctggcgggacagctcagtgagggacagacggtgcaggttgatgcaggtgacgacaaactctcaatcagttga

SEQ ID NO: 6790 - protein, 875 aa, Synechococcus sp. WH 8102
MPIRFVQDNRNSHMQPTAEQFTEQAWAAIVAAQQLAQASRHQQLETEHLLLALLRQNGLAGRILSKTGVDVTTFEASVEGHLQRLPSLGSAPDSVFLGRSLNKALDRAEQRRDGFGDSFIAIEHLLLALAEDDRCGRQLLSQAGVTTNTLKEAITAVRGNQTVTDQNPEATYESLAKYGRDLTAAARDGQLDPVIGRDEEIRRTIQILSRRTKNNPVLIGEPGVGKTAIVEGLAQRIVNGDVPQALQNRQLITLDMGALIAGAKYRGEFEERLKAVLKEVTTSDGQIVLFIDEIHTVVGAGASGGAMDASNLLKPMLARGELRCIGATTLDEHRQHIEKDPALERRFQQVLVDQPTVPDTISILRGLKERYEVHHGVRIADSALVAAAMLSSRYITDRFLPDKAIDLVDESAARLKMEITSKPEQIDEIDRKILQLEMEKLSLGRESDSASQERLQRIERELAELGEQQSSLNAQWQSEKGAIDQLSALKEEIERVQLQVEQAKRNYDLNKAAELEYGTLATLQRQLQEQEDLLEDEDGTDKTLLREEVTEDDIAEVIAKWTGIPVARLVQSEMEKLLQLEDDLHQRVIGQNQAVTAVADAIQRSRAGLSDPNRPIASFLFLGPTGVGKTELSKALANRLFDSDDAMVRIDMSEYMEKHTVSRLIGAPPGYVGYEAGGQLTEAVRRRPYAVILFDEVEKAHPDVFNVMLQILDDGRVTDGQGRTVDFTNTVLILTSNIGSQSILELAGDPEQHTAMEQRVNEALKAKFRPEFLNRLDDQIIFRSLEKEELRRIVSLQVERLRSRLEQRKLDLQLSDIAADWLATIGFDPVYGARPLKRAIQRELETPIAKAILAGQLSEGQTVQVDAGDDKLSIS

SEQ ID NO: 6791 - DNA, 2595 bp, Yersinia pestis biovar Microtus str. 91001
  CDS (1)..(2595): transl_table=11
ttgaccaatattggaggtgttatgcgtctggatcgtcttaccagtaaattccagcttgccctcgccgatgcccagtctttagctcttgggcgcgacaaccagtttattgaaccgttacatttgatgagcgcactgcttaatcaggatggggggacggttcgccctttattgacctcggcagggattaatgttgcacgtttacgtagcgacattgagcaagctttaggtcgtcttcctcaagttgaaggcaccggcggtgatgttcaaccatcaaacgagctggttcgtgtattaaatctttgcgacaaattagcgcagaaacgttcggataagtttatctcttccgagctgttcgtcctggccgtacttgaagatcgtggcacgttaactgacatgttaaaggctgcaggtgcaaccgtcgctataatagataaggcaattgaaaccatgcgtggtggtgacaaagtcgatgatcagggtgctgaagatcagcgccaggcgttgaaaaaattcactatcgacctgactgagcgtgccgagcaaggcaaactcgatccggttattggccgtgatgaagaaattcgccgtactattcaggtattacaacgtcgaaccaaaaataacccagtgttgattggtgagcctggggtgggtaaaaccgctattgtggaaggtttggcgcaacgcattgtgaacggcgaagtgccagaaggcttgaagcataagcgtgtactctcattagatatggggtcgctgattgccggtgccaaatatcgtggtgaatttgaagagcgtttgaaaggcgtactgaacgacttatcaaaacaagaaggcagtgtgatcttgtttattgatgagttgcataccatggtcggtgccggtaaaggcgatggggcgatggatgccggtaacatgctgaaacctgcattagcgcgaggtgagttacattgtgtgggggccactaccctcgatgaataccgtcaatatatagagaaagatgctgcgctcgagcggcgtttccaaaaagtgtatgttgcggaaccaacggtagaagacactatcgctattttacgtgggctgaaagagcgctacgaactgcaccatcacgtgcagatcactgacccagctattgtggcagccgcaacattgtcacaccggtatatttctgatcgtcagttaccggataaagctatcgacctcattgatgaggcaggttccagcatccgtatgcaaatggattcaaaacccgaatcattggatcgtctagagcgccggattattcagcttaaactggaacagcaggccctaaaaaaagagtcagatgacgccagtaaaaaacggttggaaatgctcaatactgagttagagcaaaaagagcgtgaatattctgaactggaagaagagtggaaagcagaaaaagcttcactcaccgggactcagaatatcaagacggagttggaacaagctaaaatcaccttagaacaagctcgtcgagtaggtgatctggctcggatgtcagaacttcagtacggtacaatccctgagctggaaaaacagctggcggcggcaaccgcgctagaagggaaaaccatgaagttgctgcgtaaccgtgtcacagaaatcgaagttgctgaagtcctggctcgctggaccggtatcccggtatctcgcatgttggaaagtgagcgggataagctgctacgtatggaacaggacttgcatcaacgagtcattgggcaagatgaagctgttgaagccgtctccaacgctatccgtcggagtcgcgcagggttgtctgatccaaaccgaccaattggttcgttcttattcttagggccaacgggggttggtaaaactgaattgtgtaaagcgttggcaacgttcttgttcgacagtgacgatgccatggtgcgaatcgacatgtccgagtttatggagaaacattccgtatcgcggttggtcggtgcacctcctggctatgttgggtatgaagaaggtggctatctgacggaagcggttcgtcgtcgtccttattctgtgattttgctggatgaagttgaaaaagcacatccagatgttttcaacatattgttacaggtattggatgatggtcgtttgaccgacgggcaggggagaactgtcgactttcgtaacacggtagtcattatgacctctaaccttggttcagatttgattcaggaacatttcggccaaatgaattacagcgaaatgaagacagtggttatggatgttgttagtcaccacttccgtcctgaatttattaaccgtatagatgaggttgttgtcttccacccacttggtcgggcgcacttggcttctattgccaacattcaactggagcgtttgtataaacgtctggaagaacgtggctatgaagtgaagattactcagcctgcattggaattcttgggtgaagctggcttcgaccctgtttatggggcgcggccattaaaacgtgcaattcagcaggaaattgagaacccgctggcacagcagatactttctggcaaactaataccgggaatccccgtgactttagatgttgaaaatgggcatattattgctaagcagtaa

SEQ ID NO: 6792 - protein, 864 aa, Yersinia pestis biovar Microtus str. 91001
MTNIGGVMRLDRLTSKFQLALADAQSLALGRDNQFIEPLHLMSALLNQDGGTVRPLLTSAGINVARLRSDIEQALGRLPQVEGTGGDVQPSNELVRVLNLCDKLAQKRSDKFISSELFVLAVLEDRGTLTDMLKAAGATVAIIDKAIETMRGGDKVDDQGAEDQRQALKKFTIDLTERAEQGKLDPVIGRDEEIRRTIQVLQRRTKNNPVLIGEPGVGKTAIVEGLAQRIVNGEVPEGLKHKRVLSLDMGSLIAGAKYRGEFEERLKGVLNDLSKQEGSVILFIDELHTMVGAGKGDGAMDAGNMLKPALARGELHCVGATTLDEYRQYIEKDAALERRFQKVYVAEPTVEDTIAILRGLKERYELHHHVQITDPAIVAAATLSHRYISDRQLPDKAIDLIDEAGSSIRMQMDSKPESLDRLERRIIQLKLEQQALKKESDDASKKRLEMLNTELEQKEREYSELEEEWKAEKASLTGTQNIKTELEQAKITLEQARRVGDLARMSELQYGTIPELEKQLAAATALEGKTMKLLRNRVTEIEVAEVLARWTGIPVSRMLESERDKLLRMEQDLHQRVIGQDEAVEAVSNAIRRSRAGLSDPNRPIGSFLFLGPTGVGKTELCKALATFLFDSDDAMVRIDMSEFMEKHSVSRLVGAPPGYVGYEEGGYLTEAVRRRPYSVILLDEVEKAHPDVFNILLQVLDDGRLTDGQGRTVDFRNTVVIMTSNLGSDLIQEHFGQMNYSEMKTVVMDVVSHHFRPEFINRIDEVVVFHPLGRAHLASIANIQLERLYKRLEERGYEVKITQPALEFLGEAGFDPVYGARPLKRAIQQEIENPLAQQILSGKLIPGIPVTLDVENGHIIAKQ

SEQ ID NO: 6793 - DNA, 2778 bp, Chlamydomonas reinhardtii
  CDS (1)..(2778)
atgtcgtttgacaccaagaaagcgacagaaaaggtcaataatgtgcttggagaggcgattaacctagccaaggaggacaagcacgcggcgctgacgccgactcatctagcggttgttctcttcgaggagccgcatggcctggccaaggttgccgccaccaaggtggccggcgaggaggtgtggcgctccgccatccgagtgctgcgcaagcgcctcaccaagctgccgaaggtcgaccccgcgcccgaatccgtctcgcccggccgcgagctgagcaaggtcctgaccgcggccgccaagctgcagaaggaccgcggcgatgccttcctgggcaccgacacgctgctgacggcggtgatcaacgccgccgaggtgtcggaggcgctgggagaggcgggcatcagcaaggcgcagctggagaccgcgctgagcgaggtgcggcaggcggccggcggcggccccatcaacagcgagacggcggacgccaacttcgacgccctggcaaagtacggcaccgacctcaccgccaacgccgcacgtgccgaccccgtgatcggccgtgacgacgagatccggcgcgtggtgcgcgtgctgtgccgccgcaccaagaacaacccggtgctcatcggcgagccgggtgtgggcaagaccgccattgtggagggactggcacagcgcatcgtcaagaacgacgtgcctgagacgctgcagggcgtgcgcctgatcagcctggacatggggtcgctggtggcgggcgccaagtaccgcggcgagttcgaggagcggctcaaggcggtgctgaacgaggtggcgcagcagcagggcaaggtggtgctgttcatcgacgagctgcacctggtgctgggcgcgggcaagagcggagacggagccatggacgcggcaaacctgctcaagcccatgctggctcgcggcgagctgcgctgcattggcgccaccaccctaggcgagtaccgcgagcacattgagaaggacgcggccttcgagcgccgcttccaacaggtgctggtgaaggagccgtccgtgcccgacaccatcgccatcctgcgcggcatcaaggaccgctacgagacgcaccacggcgtgcacatcaccgaccgcgcgctggtcgtggcggcggagctgagcgaccgctacatcaccacccgcttcctgcccgacaaggccatcgacctggtggacgaggcgtgcgccaacatgcgcgtgcagctggactccaaacccgagcagctggatgcgctggagcggcagcggcagcggctgcaggtggaggcggcggcgctggccaaggagaaggacgcgctgagcaaggcgcgcgccaaggaggtgggcaaggagctggcggcgctggaggaggcgctgaggccactgcagatgaagtacgcgcaggagaaggccaggctggaggagctccgcaggctgggtcagaagcgcgacgagatcctggtcaacatccagatcgcggagcagcacggcaacctggcgcgcatcgccgacctgcgctacggcgcgctgcctgacgtggaggaccgcatcaagcaggttcgcgcggccgcgccctccgacgccatgctgagcgaggaggtgggcacggaggagatcgcggtggtggtcagccgctggaccggcatccccgtcaaccggctcaagcagacggagcgcgacaaactgctcagcctgcggtcggagctgcagcaacgcgtggtgggccaggacgcggcggtggcggcggtggcggatgcggtgctgcgctcgcgggcgggcctggcggcgcgcggccgcggctcctcgttcctgttcctgggccccacgggtgtaggcaagacggagcttgccaaggccctggcgcagctgctgtttgacgacgagaagatgatgatccgcatcgacatgggcgagtacatggagaagcacagcgtcagccgcctcatcggcgcaccgcccggctacgtgggccacgagcagggcggccagctgacggaggcggtgcggcggcggccgtacagcgtggttctgtttgacgaggtggagaaggcgcacgccgaggtgtttaacgtgctgctgtccatcctggacgacggccgcgtcaccgactccaagggccgcacagtcaactttgcaaacaccgtcatcatcctcacctccaacctgggggcggaggcgctgctccacgcggcgcacgacgtgctggcgcacccgggcaaggcggcggcgggccaggacccgtacaaggcggcccgcgagagcgtgctggcggccgtgcggcgcttcttccgtcccgagttcctgaaccgcctggatgacatcgtggtgtttgagccgctgcggccggagcagctggtggacatcgcgcggctcatgggcaacgagctggcggcgcgcctcacgccgcgcaacatcaccctcacctttacggagcccgcgctgcagttcgcggtgagccatgcctacgacccggcctacggcgcgcggccgctgcggcgctggatggagcagaaggtggtgacgcagctgtcgcgcatggtggtgggcggcgacctgcccgacaacagcaatgtggaggtggggctggcggagggtgggcgcgactttgactaccgtgtgtggcccaagccggcggcggaggcgggcggcggcaacggcagcggcgcggcgacggaggcgctcctgaagaaggcgcgcatgtacagcgtggagcacccggacgagggtgaggacagcatggatgagggtgacgatgtgggcgcgatgcgcgactag

SEQ ID NO: 6794 - protein, 925 aa, Chlamydomonas reinhardtii
MSFDTKKATEKVNNVLGEAINLAKEDKHAALTPTHLAVVLFEEPHGLAKVAATKVAGEEVWRSAIRVLRKRLTKLPKVDPAPESVSPGRELSKVLTAAAKLQKDRGDAFLGTDTLLTAVINAAEVSEALGEAGISKAQLETALSEVRQAAGGGPINSETADANFDALAKYGTDLTANAARADPVIGRDDEIRRVVRVLCRRTKNNPVLIGEPGVGKTAIVEGLAQRIVKNDVPETLQGVRLISLDMGSLVAGAKYRGEFEERLKAVLNEVAQQQGKVVLFIDELHLVLGAGKSGDGAMDAANLLKPMLARGELRCIGATTLGEYREHIEKDAAFERRFQQVLVKEPSVPDTIAILRGIKDRYETHHGVHITDRALVVAAELSDRYITTRFLPDKAIDLVDEACANMRVQLDSKPEQLDALERQRQRLQVEAAALAKEKDALSKARAKEVGKELAALEEALRPLQMKYAQEKARLEELRRLGQKRDEILVNIQIAEQHGNLARIADLRYGALPDVEDRIKQVRAAAPSDAMLSEEVGTEEIAVVVSRWTGIPVNRLKQTERDKLLSLRSELQQRVVGQDAAVAAVADAVLRSRAGLAARGRGSSFLFLGPTGVGKTELAKALAQLLFDDEKMMIRIDMGEYMEKHSVSRLIGAPPGYVGHEQGGQLTEAVRRRPYSVVLFDEVEKAHAEVFNVLLSILDDGRVTDSKGRTVNFANTVIILTSNLGAEALLHAAHDVLAHPGKAAAGQDPYKAARESVLAAVRRFFRPEFLNRLDDIVVFEPLRPEQLVDIARLMGNELAARLTPRNITLTFTEPALQFAVSHAYDPAYGARPLRRWMEQKVVTQLSRMVVGGDLPDNSNVEVGLAEGGRDFDYRVWPKPAAEAGGGNGSGAATEALLKKARMYSVEHPDEGEDSMDEGDDVGAMRD

SEQ ID NO: 6795 - DNA, 3123 bp, Chlamydomonas reinhardtii
  CDS (1)..(3123)
atgcttcagacgcttcaaaacagcctaacaacttttgagccgcttatcgcttcccaggccctgccagcagcagccgaactccttcgccaaatcatgctacagcaaggacccatgcggctggcgaagaacaccccagcggccacaaatgtgcctagggtgctttcaggcatgcacgccgggcctcggacaacagcggtgcggttcagcagtgggcacgtcgaggccgctgctcccctcctgcccttcagcgctcggcagctagcgcaaccgtccccgctctcgggcctgtcgctcgcgcctggtctgaccgtgaggcccggccgccgcaccctggcgacccgcgccgcgcagtccggctccggcggcggctccggcggcggcaagcgcatcacccagaaccagttcacggacaaggcctggcaggcggtggtggcggcgcccgagatcgccaaggagtacgggcagcaggtggtggagacggagcacctgctcaaggcgctgctggagcagcccaacggcctggcccgccgcatcctgtccaaggccgggtcggacgccacccggctgctggaccgtgtggacgcctacatacggcggcagcccaccgtcagcggcgacagcggccaggttctgggccgcaacctggaggcgctggtgaaccggtccatggagctgcaggccaagtggggcgaccagttcgtgtccattgagcacctggtggcggccatggcggaggacggcaggttcggcgagagcctgttcaaggccgagggcctgaccaaggacaagctggacgcggccatcaaggacgtgcgcggcaccaataaggtggtggaccaggacccggagggcaagtacgaggcgcttaacaagtacgcgcgggacctgacggcggccgcgcgcgacggcaagctggatccagtgattgggcgcgatgacgagatccggcgcacgatccagatcctgtcgcgccgcaccaagaacaacccctgcctgatcggcgagccgggcgtgggcaagacggcggtggtggaggggctggcgcagcgcattgtggcgggcgacgtgccgcaggcgctgcagggccgcacgctgatggcgctggacatgggctccctcatcgcgggcgccaagtaccgcggcgagttcgaggaccgcctcaaggccgtgatcaaggaggtcacggacagcgccggcaaaatcgtgctgttcatagatgagatccacaccatcgtgggagccggagccaccgggggcgccatggacgcctccaacctgctcaagcccatgctgtcgcgaggcgagctgcgctgcatcggcgccaccaccctggacgagtaccgcaaatacatcgagaaggaccccgccctggagcgccgcttccagcaggtgtacgtggaccagcccaacgtggcccagacggtgtccatcctgcgcggcctgcgggagcgctacgaggtgcaccacggcgtgcgcatcagcgactcagcgctggtggaggcggcggtgctcagcgaccgatacatcgccgaccgcttcctgcccgacaaggccatcgacctggtggacgaggcggcggccaagctcaagatggagatcaccagcaagccgctggcgctggacgagatcgaccgcaaggtgctgcagctggagatggagaagctgagcctgaccaagaacagcgaccgcgccgccgccgcgcgcctggcggctctggacgcggagctggacgacctcaaggagcagcagaaggtgatcacgggccagtggcgcaaggagaaggacgacatgggccgcgtgcaggacctcaaggaggagatcgagcgcgtcaacattgagatcgcgcaggccgagcgcacgtacgacctgaaccgcgccgccgagctcaagtacggcacccttcacagcctgcagcagagcctgaaggccgcggaggaggccctacggcaggcggaggcgcacgacggaaagaagctgctcaaggaggaggtgaccgagtccgacatcgctgagatcatctccaagtggaccggcatccctgtttccaagctggtggagagcgagcgcgagaagctgctgcacctggcggacgagctgcacaagcgcgtgatcgggcaggaggcggcggtggacgcggtggcggacgcgatccagcgctcccgcgccggcctggccgaccccaaccgccccattgccagtttcatgttcctgggccctaccggtgtgggcaagacggagctggccaaggcgctggcccagttcctgttcaacacggaggacgccatggtgcgcatcgacatgtccgagtacatggagaagcacagcgtcagccgcctcatcggtgcgccgcccggctacgtgggctacgacgagggcggtcagctgacggaggcggtgcggcggcggccctacgccgtcatcctgttcgacgaggtggagaaggcgcacgccgacgtcttcaacgtgctgctgcagatcctggacgacgggcgtgtgacggactcgcagggccgtgtggtgtcgttcaagaactccatcatcatcctcacatccaaccttggatccaactccatcctggagctcggcaccgccgccggcgatgacgccggcagccccgccgcgcgcaacgccatcaagaacatcgtcatggcctccgtccgctcccacttccggcccgagttcatcaaccgcatcgacgagttcatcatcttcgacccgctctcgcaagaccagatcgcgcacatcgtgcggctgcaagccaagcgcgtcgccgagcgcctcgccgacaagaagatcggtctggatctgacggagagcgccgtacggcatctggccgcgattggattcgacccagtgtacggcgcgcgccccgtgaagcgtgccgtacagcaggagcttgagacctcgatcgccaaggccatgctgcgtggggagttcgtggaggatgacacgatagtggtggaggcggagccgaacggcggcggcctggtgctgcggcacggccccaagctgagctccagcggcaacggctcaggcggtgcgggcgcgctggccggctctggtggccgcagcggcagcaccggtcgcagcggcggcagcggcaactggcggcagcaggcatag

SEQ ID NO: 6796 - protein, 1040 aa, Chlamydomonas reinhardtii
MLQTLQNSLTTFEPLIASQALPAAAELLRQIMLQQGPMRLAKNTPAATNVPRVLSGMHAGPRTTAVRFSSGHVEAAAPLLPFSARQLAQPSPLSGLSLAPGLTVRPGRRTLATRAAQSGSGGGSGGGKRITQNQFTDKAWQAVVAAPEIAKEYGQQVVETEHLLKALLEQPNGLARRILSKAGSDATRLLDRVDAYIRRQPTVSGDSGQVLGRNLEALVNRSMELQAKWGDQFVSIEHLVAAMAEDGRFGESLFKAEGLTKDKLDAAIKDVRGTNKVVDQDPEGKYEALNKYARDLTAAARDGKLDPVIGRDDEIRRTIQILSRRTKNNPCLIGEPGVGKTAVVEGLAQRIVAGDVPQALQGRTLMALDMGSLIAGAKYRGEFEDRLKAVIKEVTDSAGKIVLFIDEIHTIVGAGATGGAMDASNLLKPMLSRGELRCIGATTLDEYRKYIEKDPALERRFQQVYVDQPNVAQTVSILRGLRERYEVHHGVRISDSALVEAAVLSDRYIADRFLPDKAIDLVDEAAAKLKMEITSKPLALDEIDRKVLQLEMEKLSLTKNSDRAAAARLAALDAELDDLKEQQKVITGQWRKEKDDMGRVQDLKEEIERVNIEIAQAERTYDLNRAAELKYGTLHSLQQSLKAAEEALRQAEAHDGKKLLKEEVTESDIAEIISKWTGIPVSKLVESEREKLLHLADELHKRVIGQEAAVDAVADAIQRSRAGLADPNRPIASFMFLGPTGVGKTELAKALAQFLFNTEDAMVRIDMSEYMEKHSVSRLIGAPPGYVGYDEGGQLTEAVRRRPYAVILFDEVEKAHADVFNVLLQILDDGRVTDSQGRVVSFKNSIIILTSNLGSNSILELGTAAGDDAGSPAARNAIKNIVMASVRSHFRPEFINRIDEFIIFDPLSQDQIAHIVRLQAKRVAERLADKKIGLDLTESAVRHLAAIGFDPVYGARPVKRAVQQELETSIAKAMLRGEFVEDDTIVVEAEPNGGGLVLRHGPKLSSSGNGSGGAGALAGSGGRSGSTGRSGGSGNWRQQA

SEQ ID NO: 6797 - DNA, 2646 bp, Physcomitrella patens subsp. patens
  CDS (1)..(2646)
atgggaaggagtattgagcagcagagtcgcggaattgtcaccgcggtgtttgagaggtttacggagagagcgatcaagtcagtgatgttggcacaaagagaagccaaagctcttggtaaacgagaagttggaacggagcagctgttgctgggattgattgcggaagatagagggagtgaaggctacctcagttcaggcgttacgatcgatagggccagggaagccgtaaaggctttgttgaatgaatcggagggcagcaatttactcgggccagcaacggatgttccattctcccacggaagcaagagagtgtttgaagcggcacttgagcattcgaaaaagatgggacacaattacattgctccagagcacattgcgattgctctattggctgtggacgatggaggtgccagcaaggtccttgacaagttgggtgtgaagaaggggaaattacagtcagaggctgtagcgaagctgcagggtgagctagagaaggagggtcgtgcagcatcgtcatcagttgccatgccacaaaaggcagccgctggcggcaccccttcgaaacgtgaaaaaagtgcattgaatgacttctgcgttgacctaactgcaaaggccgcagaaggtaaggtagatccagtaattggccgcgaccaagaagtgcagcgagtggtacaaattcttgcccgtcgaacgaagaataatccaattcttctaggtgaacctggggtcgggaagactgcgattgccgagggtcttgcaatgcgaatatgtaaaggcgatgttcctgatttcttgatcggaaagcgggtgatgtcactggatatgggattgctcctagctggagccaaggaacgcggtgaaatggagacgcgggtgactagtctaattgaagagactcggtctgcagggaatgtaatcttactaattgatgaagtgcacacactggtggggtctggttcggttggaagaggaggtagcgcaggggcaggtttagacattgccaacctactaaagcctgctctagcgagaggggagcttcagtgtattggagcaacaactctggacgaacatcgcaagcacattgagaaagacaaagccctagcacgtcgcttccagccagtcatggttttggagccttcacaggaggacgctgtgaccatattgatggggttgcgcagtagatatgaagaacatcataggtgccacataaccagcgaagcagtggagactgccgtgtacttggcttctcggtatattgctgatcggttcttgcctgataaggctatcgaccttttggatgaagctggaagtcgagctcgaattaactcttttaggaagagaaaggagcgacaaactagtatcttgactaaatctccaagcgaatactggcgggagattcgtgctgtacaggcttcacaggaatcggtaagttcattttcatataggattaatccatgtggatacttttccagattaggttctattttagtttcggtttcaggaagtacggatgctcctggagaggacctacctgtggtggtcggaccaagtgaaatcgcggcagtggcatccatgtggtctggtattccggtggaacagttgacaaacgacgaacaaatcaaattaatgaacttagagaaacttctccagactcgcgttgtgggtcaagatgatgcggtaaatgcaatctcgcgggctgtgagaagggcacgtgtgggattgaaggatcctaatcggcctattgctgcaatgcttttctgtggtccaacaggagttggaaagacggagctcacgaaagctctggcccagcactactttggatcggaagaatccatgattcgattggacatgagtgagtacatggagaggcacaccgtgagtaagttggttggatctcctccaggttatgtaggatatggtgaaggtggtatactcactgaagccgtgcgtcggcgcccattcacagtaattcttatggacgaaatcgagaaagctcatcctgatgttttcaacatgctactacaaatatttgaagatggccatcttaccgattctcaggggagaaaggtgtcctttaagaatgttttgattgtgatgacatctaatataggttcgcaacaaatcgcaaagggaggtagtagccgaattgggttcacgtaccacaatcccgatgaagcagacggtggcaagtactcgcaattgaaggaacttgtcatggatgaactgaaaggttatttcagaccagagctgctgaacaggttggacgaagtggttgtgttcaggtcattggagaagtcgcaggtgcgtgctatcgtggacattatgcttgaggaaacgaagacgcggttgtctgcccggggactgaatctggaaatttctgaagcaatggtgaagctcatatgtgaccagggatatgatagaagttatggtgccaggcctttgagacgggcagtgatgagtttagttgaggacaatctcagcgaagcgttactgcagggcgagttcaaggacggggacactgctctaatagatattgatgagacagggaatccgaaggttctccgatacgagaaacccaatgtctgtgatcatggcctgtgcttgcctgagttgaagacggtgtctgtttcatcgccaccaagctga

SEQ ID NO: 6798 - protein, 881 aa, Physcomitrella patens subsp. patens
MGRSIEQQSRGIVTAVFERFTERAIKSVMLAQREAKALGKREVGTEQLLLGLIAEDRGSEGYLSSGVTIDRAREAVKALLNESEGSNLLGPATDVPFSHGSKRVFEAALEHSKKMGHNYIAPEHIAIALLAVDDGGASKVLDKLGVKKGKLQSEAVAKLQGELEKEGRAASSSVAMPQKAAAGGTPSKREKSALNDFCVDLTAKAAEGKVDPVIGRDQEVQRVVQILARRTKNNPILLGEPGVGKTAIAEGLAMRICKGDVPDFLIGKRVMSLDMGLLLAGAKERGEMETRVTSLIEETRSAGNVILLIDEVHTLVGSGSVGRGGSAGAGLDIANLLKPALARGELQCIGATTLDEHRKHIEKDKALARRFQPVMVLEPSQEDAVTILMGLRSRYEEHHRCHITSEAVETAVYLASRYIADRFLPDKAIDLLDEAGSRARINSFRKRKERQTSILTKSPSEYWREIRAVQASQESVSSFSYRINPCGYFSRLGSILVSVSGSTDAPGEDLPVVVGPSEIAAVASMWSGIPVEQLTNDEQIKLMNLEKLLQTRVVGQDDAVNAISRAVRRARVGLKDPNRPIAAMLFCGPTGVGKTELTKALAQHYFGSEESMIRLDMSEYMERHTVSKLVGSPPGYVGYGEGGILTEAVRRRPFTVILMDEIEKAHPDVFNMLLQIFEDGHLTDSQGRKVSFKNVLIVMTSNIGSQQIAKGGSSRIGFTYHNPDEADGGKYSQLKELVMDELKGYFRPELLNRLDEVVVFRSLEKSQVRAIVDIMLEETKTRLSARGLNLEISEAMVKLICDQGYDRSYGARPLRRAVMSLVEDNLSEALLQGEFKDGDTALIDIDETGNPKVLRYEKPNVCDHGLCLPELKTVSVSSPPS

SEQ ID NO: 6799 - DNA, 2802 bp, Physcomitrella patens subsp. patens
  CDS (1)..(2802)
atggcgcactctctgacgataccctcggtgggagcctcgcctgttggccagtttaatggcagtaggaaaagtaagaaacagggtgctgcgcgggcggcgtccatggggagacggaatgtggataagtctgcaagcatgtctgtggctaggtttcaatcgttttctggaatgcgcaagggttctgttgtggatgccttggttgtgaagcaagggaaggatttcaaatctgtggtggcgaactctaccgctgtgactggccattctcgcccatccagaggtgtcacgactgccatgtttgagcgtttcactgagaaggctatcaaggttatcatgttggcgcaggaagaagctaggcggcttgggcataattttgttggcactgagcaaattctgttggggctcatcggtgagggcactggtattgcggccaaagtgttgaaatccatgggagtgaacctcaaggaagctcgtgtggaggttgagaagatcatcggtcgtggaagtggttttgttgctgtcgagatccctttcacgcccagggccaagcgagtcctcgagctgtcattggaggaagcccggcagcttggtcacaattacatcggtacggagcatcttcttttggggttgctgcgagagggcgagggtgtagctgctcgagttctagagaatctcggggctgatcctagcaacattcgtactcaagtcattcgcatggttggtgagaacactgaagctgttggtgtgggaggtggtagcggcagcagtggcaacaagatgcccaccttagaagaatatggaacaaatttgactaaacttgctgaagagggaaagctcgacccagtcgtaggaagagttgcacaaatcgagcgagtgactcagatccttggacgtagaactaagaacaacccatgtctgatcggagaacctggtgttgggaaaactgctgttgccgaggggttggctcagagaattgcatccggggatgtgccggaaactatcgaaggcaagaaggttattactctcgacatgggattgttggttgctggaaccaagtacagaggagaattcgaggagaggctaaagaagttgatggaggagatcaaacaagcagatgatattatccttgttattgatgaggttcacacgctcattggtgctggtgcagccgagggtgctatcgacgctgcgaacatcttgaagcctgctctcgcccgtggtgaattgcagtgcattggagcaaccactctggatgagtacaggaagcatattgagaaggatcctgcattggagcgtcgcttccagcccgtgctggttccagagcctaccgttgaggaaaccatcgatattcttaagggattgagagagagatatgagatccatcacaaattgcgatacacagacgaggccctggttgcagcagcgcagctttcctatcaatacatcagcgatcgtttcttgcctgacaaggcaattgacttaattgacgaggcgggttctaaagtgaggctgaaacacgctcagctacccgaagaggcaagggagcttgataagcaactgcgtgctgttaccaaagagaaaaatgaagctgttcgtgggcaagatttcgagaaggctggagagttgagggacaaggagatggagttgaaggcccaaatttcggccttcattgagaagggtaaggagcaaatgaaggcagaaagtgaaactggcgacgttggtccaaccgtagaagagtctgatatccagcagatagtggctgcctggactggtattcccatggagaaggtttcgagtgacgagtctgaccgtcttttgaagatggaagatactctccacacccgagtcattggtcaggacgaagctgtgaaggccatcagtcgtgctatccgtagggcacgtgttggactgaagaatcccaaccgccctattgcgagtttcattttctctggtcctactggggttggaaagtcagagcttgctaaagctcttgcttcgtactacttcggttctgaggaagctatggttaggctcgacatgtccgagtttatggagaggcacaccgtatccaagcttatcggttctccacccggttacgttggttatagtgaaggaggccagttgaccgaagctgtgcgcaggaggccttacactgtggttctttttgatgagattgagaaagctcatcctgacgttttcaacatgatgcttcagattttagaagatgggcgcttgaccgacagcaagggtcgaactgtagattttaagaatactctcctcatcatgacttcaaatgtaggaagcagtgtcattgagaaaggaggaggcggcattggtttccagttggattacggtgagaaggattcaagttacaaccgcatcaagagccttgttaatgaggagttaaagcaatatttcaggcccgagtttttgaatagacttgatgagattattgtcttcaggcaactcaccaagttggaagtgaaggaaattgctgatatcatgttgaaggaggtcttcgagcgcctgaagaagaaggaaattgacttacaggtcactgagagatttagggatcgtgttgttgacgaaggctacagtcctagctatggtgctcggccattgaggcgagcgattatgaggcttctggaagatagcatggctgagcgcatgctttctggagaaattaaggagggagactctgctattattgatgtggatggtgatggtaatgtcacggttttgaatggtaccacaggtacttccacaaacacagctgtagaccaggcccctgccggtattgcctaa

SEQ ID NO: 6800 - protein, 933 aa, Physcomitrella patens subsp. patens
MAHSLTIPSVGASPVGQFNGSRKSKKQGAARAASMGRRNVDKSASMSVARFQSFSGMRKGSVVDALVVKQGKDFKSVVANSTAVTGHSRPSRGVTTAMFERFTEKAIKVIMLAQEEARRLGHNFVGTEQILLGLIGEGTGIAAKVLKSMGVNLKEARVEVEKIIGRGSGFVAVEIPFTPRAKRVLELSLEEARQLGHNYIGTEHLLLGLLREGEGVAARVLENLGADPSNIRTQVIRMVGENTEAVGVGGGSGSSGNKMPTLEEYGTNLTKLAEEGKLDPVVGRVAQIERVTQILGRRTKNNPCLIGEPGVGKTAVAEGLAQRIASGDVPETIEGKKVITLDMGLLVAGTKYRGEFEERLKKLMEEIKQADDIILVIDEVHTLIGAGAAEGAIDAANILKPALARGELQCIGATTLDEYRKHIEKDPALERRFQPVLVPEPTVEETIDILKGLRERYEIHHKLRYTDEALVAAAQLSYQYISDRFLPDKAIDLIDEAGSKVRLKHAQLPEEARELDKQLRAVTKEKNEAVRGQDFEKAGELRDKEMELKAQISAFIEKGKEQMKAESETGDVGPTVEESDIQQIVAAWTGIPMEKVSSDESDRLLKMEDTLHTRVIGQDEAVKAISRAIRRARVGLKNPNRPIASFIFSGPTGVGKSELAKALASYYFGSEEAMVRLDMSEFMERHTVSKLIGSPPGYVGYSEGGQLTEAVRRRPYTVVLFDEIEKAHPDVFNMMLQILEDGRLTDSKGRTVDFKNTLLIMTSNVGSSVIEKGGGGIGFQLDYGEKDSSYNRIKSLVNEELKQYFRPEFLNRLDEIIVFRQLTKLEVKEIADIMLKEVFERLKKKEIDLQVTERFRDRVVDEGYSPSYGARPLRRAIMRLLEDSMAERMLSGEIKEGDSAIIDVDGDGNVTVLNGTTGTSTNTAVDQAPAGIA

SEQ ID NO: 6801 - DNA, 2925 bp, Physcomitrella patens subsp. patens
  CDS (1)..(2925)
atggaagtccttgcaagcgcagtgaccatgcgcatttcagttctatcaccttctcccaccgatttctgcccaaacgttcataggaggtgtcaagcagcaccgtataggaaaagcacaggaggattcaactctgtcctcgcgcggcaccacgaaggtttgcggtcgtcgtctgcggtggatgtcttgcgacctttatctctatccgagggctttgacgtagctgttaattcgcacctggcaacggggagaagtaacggacagcagagtcgcggagtcgtcacggcagtattcgagaggtttaccgagagggcgatcaagtccgtgatgctggcgcaaagggaagccaaagcccttggaaaacgggaagtcggcacagagcaactgttgctggggttgatagcggaggatagaggcagcgaaggctacctcggctctggtgttacgattgagagagccagggaggccgtaaagagcttgttggatgaatccgatggcagcgatttgcttggaccagctacagatgttccattttctcatggaagcaagagagtgttcgaagcggcactggaacactctaaaaagatgggacataattatattgctccagagcacattgcgattgctctgttggccgtggatgatggaggtgctagcaatgtcctggacaaattgggtgtgaagaaggggaaattacagtcagaggctgtggcgaagctgcagggtgagctggagaaggaaggtcgtgcagcatcgtcatcggttgccatgccacagaaggcagccgctggcgccgccgcgtctacgcgcccatcttcaagaaaagaaaaaggggctttgcacgatttctgcgttgacattacggctcaagctgctgagggcaaaattgatccagtaattggtcgcgacaaagaagtgcagcgagtggttcaaatccttggccgacgaacgaagaataatccaatcctattgggagaacctggtgtcggaaagactgcaatcgcggagggactcgcgatgcgaatatgcaaaggcgatgtccctgattttctgattgataagcgggtgatgtcattggacatgggattgctgcttgctggagccaaggaacgtggtgaaatggagacacgggtgaccaatctaattgaagagactcgaactgcagggaatgtgattttactaattgatgaagtgcacacactagtgggctccggttcagtcggaagaggaggtagtgcaggggcaggtttggacattgctaacttgctgaaacctgcgctcgcaagaggagagcttcagcagtgtattggagcaactaccttagatgaacatcgcaagcatattgagaaagacaaggccctagcacgtcgcttccagccagtaatggtattagagccttcacaggaggatgcagtgactattttgatggggttgcgtagtagatatgaagaacaccacaaatgccacataaccagcgaggcagtggaggctgccgtgtacctagcctcccggtacattgctgaccggttcttgcccgataaagcaatcgaccttttggatgaagctggcagccgagctcggataaactcttttaggaagaggaaggagcggcaaactagcattttaaccaagtctcctagcgagatttggcaagagattcgtgctgtacaagcttcggaagcggatgtcctgacaggtgatccgtccagcctatcaacaacggaatcaagaattggggacatggacaatgaatcattatcagtgccagataatgacgctttggatgcgagcatcgtcagtgatgatgaggaacctgtggtcgtcggacctggtgaaattgcagcggtggcgtccatgtggtctggtataccggtggaacagttgacaagcgacgaacaaatgaaattaatgaatttggagaaatctctccagacccgtgttgtgggccaagacgatgctgtgaatgcaatctctagggctgtgcggagggcacgcgttggattgaaggatccaaaccggcctattgctgcgatgcttttctgtggtcctactggggttggaaagacggagcttaccaaagctctggcccagcactactttggatcggaagagtccatgattcgtttggacatgagcgagtacatggagaggcacacagtgagcaagctggttgggtctcctccagggtacgtaggatatggcgaaggtggtgtactcactgaggccgtgcgtcgacgtccgtttacagttattcttatggatgagatcgagaaagcccatccggatgtcttcaatatgctgcttcaaatctttgaagatggtcacctgaccgattcgcaggggagaaaggtttcctttaagaatgttctgattgtgatgacatctaacataggctcacagcaaattgctaaggggggcagtagcaaaatcgggtttatatactacaactccgacgaagcagatggtggaaaatactcacagttgaaagaacttgtgatggatgaactgaaaggctacttcaggccagagctgctgaacaggctggacgaagttgttgtgttcaggtcgttagagaaatctcaggtgcgagctattgtggacattatgctacaggaaacgaattcgcggttggctgctcgaggactaaatctggaagtctcggaagctatggtgaagttgatatgtgaccagggatatgatagaagctacggtgccaggcctttgaggcgggcagtgatgagtttagttgaggataacctcagcgaatcgttgctgcagggcgagttcaaggaaggggacacagctctgttagatattgatgagaccggaaatccgaaggtcttccggatagagaaacctgatgtctgtgaccatggcctgtgcttgcccgagttgaagacggtgtctatttcgtctcccacagactga

SEQ ID NO: 6802 - protein, 974 aa, Physcomitrella patens subsp. patens
MEVLASAVTMRISVLSPSPTDFCPNVHRRCQAAPYRKSTGGFNSVLARHHEGLRSSSAVDVLRPLSLSEGFDVAVNSHLATGRSNGQQSRGVVTAVFERFTERAIKSVMLAQREAKALGKREVGTEQLLLGLIAEDRGSEGYLGSGVTIERAREAVKSLLDESDGSDLLGPATDVPFSHGSKRVFEAALEHSKKMGHNYIAPEHIAIALLAVDDGGASNVLDKLGVKKGKLQSEAVAKLQGELEKEGRAASSSVAMPQKAAAGAAASTRPSSRKEKGALHDFCVDITAQAAEGKIDPVIGRDKEVQRVVQILGRRTKNNPILLGEPGVGKTAIAEGLAMRICKGDVPDFLIDKRVMSLDMGLLLAGAKERGEMETRVTNLIEETRTAGNVILLIDEVHTLVGSGSVGRGGSAGAGLDIANLLKPALARGELQQCIGATTLDEHRKHIEKDKALARRFQPVMVLEPSQEDAVTILMGLRSRYEEHHKCHITSEAVEAAVYLASRYIADRFLPDKAIDLLDEAGSRARINSFRKRKERQTSILTKSPSEIWQEIRAVQASEADVLTGDPSSLSTTESRIGDMDNESLSVPDNDALDASIVSDDEEPVVVGPGEIAAVASMWSGIPVEQLTSDEQMKLMNLEKSLQTRVVGQDDAVNAISRAVRRARVGLKDPNRPIAAMLFCGPTGVGKTELTKALAQHYFGSEESMIRLDMSEYMERHTVSKLVGSPPGYVGYGEGGVLTEAVRRRPFTVILMDEIEKAHPDVFNMLLQIFEDGHLTDSQGRKVSFKNVLIVMTSNIGSQQIAKGGSSKIGFIYYNSDEADGGKYSQLKELVMDELKGYFRPELLNRLDEVVVFRSLEKSQVRAIVDIMLQETNSRLAARGLNLEVSEAMVKLICDQGYDRSYGARPLRRAVMSLVEDNLSESLLQGEFKEGDTALLDIDETGNPKVFRIEKPDVCDHGLCLPELKTVSISSPTD

SEQ ID NO: 6803 - DNA, 2748 bp, Physcomitrella patens subsp. patens
  CDS (1)..(2748)
atgtccctgaatttgactgaacagattaatcagggtgaattcacggagatggcttggcaggcaatagttgcctctcccgatgttgcgaaagaaaacaagcaacaaattgtagagacagagcatttgatgaaagcattgttggagcaacgaaatggattggcgaggcgaattttttctaaagcgggcgtggataacacttctttgttgcaagcaactgaacgttttattcaaaggcaacctaaggtcctgggtgacacaagtgggtctatgcttggtcgggatttggagggattgattgagaaggcacggggtcatagaaaggattacggggattctttcgtgtctgttgagcatttggtcctggcatttactcaagataaacgctttgggcaacaactgtataaagatttccagttgagtgcgaagactttgaatgctgcaattcagtctattcgaggttctcaaaaggtgactgaccaagacccagagggtaggtacgaagctctggagaaatatggaaaggacttgactgaaatggcaagacagggaaaactagatcctgttattggacgagatgatgaaattcgacgctgcatccagattttatctcgtagaacgaagaacaacccagtattgatcggagaacctggtgtaggaaagacagccatttctgaaggtttggctcagcgtattgtgcaaggagatgtgccatcagctctgcttaatcgcaagctgatttcgctggatatgggatcgttgatagcaggtgctaaatatcgtggagaattcgaggacaggcttaaggctgtcctgaaggaggtaaccgattccgatggtcaaatcattttgtttattgatgaaatacatactgtagttggcgctggtgctaccagtggcgcaatggacgctgggaatttgctgaagccaatgttggggcgcggggagctgcgctgcatcggagcaactactctggacgagtaccggaagtacattgagaaggatcctgcactagaacgtcgcttccagcaagtctatgtggaccaaccttctgtcgaagatacagtgtctattttgagaggtcttcgcgaacgttatgaattgcatcacggagtgcggatttcggatagcgctttggtggagtctgcaatgttagctgatcgctacattgcggaccggtttctccctgacaaagcaatcgacctagtggatgaagctgccgcgaaactaaagatggaaatcacttcaaaaccaacagcacttgatgaaatagataggtctgtgctgaagttagaaatggagcggctgtctctgaaaagcgacacggataaagcatcacgcgaccggctggaccgacttgttactgagctggatcttttgaagcagaggcagaaggagttgacagatcaatgggaacatgagaagtctgtgatgactcggattcagtccatcaaagaagaggcaagtatacagttgaatgttgatagagtgaacctagaaattcaacaagcagagcgggattacgacctcaaccgagctgctgaattgaaatatggaagtcttacgactttgcaacgccagttagaagctgctgagaaggcgcttgatgagtatcaaaatagcggcaattctatgcttcgtgaagaagtgacaggaaacgatattgcagaagttgtgagcaaatggactggaattcccatttcgaaattgcagcagtcagagaaggagaagctcttgcatcttgatgatgagcttcacaagcgggtcgtaggtcaggatccagctgtgaaatccgttgctgaggccatccagcgttctagagctgggctctctgatcctaataaaccaattgccagcttcatgtttatgggacctacgggtgtggggaaaactgagttggccaaagctttggcgtcgtatctcttcaatactgaggaggctattgtgaggattgatatgagtgagtacatggagaaacatgctgtttctcggcttgtcggagcaccccctggatatgttggctatgaagagggtgggcaactcacagaggctgttcgaagaagaccatacgctgtgattcttttcgacgagatagaaaaggctcattctgacgtctttaacatctttcttcagatccttgatgatgggcgtgtgacggattcacagggcaggactgttagctttactaacactgtgatcataatgacttccaatgtggggtcacaatatgtccttaacagcgcagatagtatagctggcaacaacaaggaggtcgtatatgaagctatgagagctcgagtgatggaggctgcaaggaatacattccgaccagagtttatgaaccgtattgacgaatacatcgtcttccagcaactggatcgggatcaaatcagcagaatcgtgaaactacagttggaccgtgtgcagaagagactgatggacaagaagatcaccttgaaggtgacagagagtgccgtccagctcctcgcaagcttgggttacgaccccaactacggagcacggccagtgaagagggtaatccaacagagtgtagaaaatgagctagcacgttcgattttgagaggagacttcacggaagaggacacagttttggtcgacactgatctcacatctgtagctggaagcagtctcccacagcaaaaactctctttccgaaggttgcaggcggttgattccaaccaggcgacagactctgattccttcgcgtatgcagagggtcaagacaattga

SEQ ID NO: 6804 - protein, 915 aa, Physcomitrella patens subsp. patens
MSLNLTEQINQGEFTEMAWQAIVASPDVAKENKQQIVETEHLMKALLEQRNGLARRIFSKAGVDNTSLLQATERFIQRQPKVLGDTSGSMLGRDLEGLIEKARGHRKDYGDSFVSVEHLVLAFTQDKRFGQQLYKDFQLSAKTLNAAIQSIRGSQKVTDQDPEGRYEALEKYGKDLTEMARQGKLDPVIGRDDEIRRCIQILSRRTKNNPVLIGEPGVGKTAISEGLAQRIVQGDVPSALLNRKLISLDMGSLIAGAKYRGEFEDRLKAVLKEVTDSDGQIILFIDEIHTVVGAGATSGAMDAGNLLKPMLGRGELRCIGATTLDEYRKYIEKDPALERRFQQVYVDQPSVEDTVSILRGLRERYELHHGVRISDSALVESAMLADRYIADRFLPDKAIDLVDEAAAKLKMEITSKPTALDEIDRSVLKLEMERLSLKSDTDKASRDRLDRLVTELDLLKQRQKELTDQWEHEKSVMTRIQSIKEEASIQLNVDRVNLEIQQAERDYDLNRAAELKYGSLTTLQRQLEAAEKALDEYQNSGNSMLREEVTGNDIAEVVSKWTGIPISKLQQSEKEKLLHLDDELHKRVVGQDPAVKSVAEAIQRSRAGLSDPNKPIASFMFMGPTGVGKTELAKALASYLFNTEEAIVRIDMSEYMEKHAVSRLVGAPPGYVGYEEGGQLTEAVRRRPYAVILFDEIEKAHSDVFNIFLQILDDGRVTDSQGRTVSFTNTVIIMTSNVGSQYVLNSADSIAGNNKEVVYEAMRARVMEAARNTFRPEFMNRIDEYIVFQQLDRDQISRIVKLQLDRVQKRLMDKKITLKVTESAVQLLASLGYDPNYGARPVKRVIQQSVENELARSILRGDFTEEDTVLVDTDLTSVAGSSLPQQKLSFRRLQAVDSNQATDSDSFAYAEGQDN

SEQ ID NO: 6805 - DNA, 2511 bp, Physcomitrella patens subsp. patens
  CDS (1)..(2511)
atgttcgagcgtttcactgagaaagctattaaggttatcatgttggctcaggaggaagcaaggcgtctcgggcacaatttcgttggtactgaacaaattttgcttggccttattggtgagggtactggtattgctgcgaaagtgatgaagtccatgggagtgaaccttaaggaagctcgcgtggaagtagagaagattattgggcgcgggagcgggttcgtggctgttgagattcccttcacgcccagggccaagagagttctcgagctctcactcgaagaagctagacagcttggtcacaactatattggcacagagcatttgctgctggggctgctacgagagggagagggtgttgctgcccgagtgcttgagaaccttggcgctgaccccagcaacattcgaactcaggtgattcgaatggtaggcgaaaataccgaggctgttggtgtcggagctggcagcggcagcagtggtaacaagatgcccactctggaggaatacggaacgaatttaaccaaactcgcggaagagggaaagctagacccagttgttggaagagttgcacagatagagcgagtgactcaaatccttggtcgcagaaccaaaaacaacccgtgcctaattggagagcctggagttggaaaaactgctgttgccgaaggtttggcgcagagaattgcgtctggggacgtaccggagaccattgaaggaaagaaggttatcaccctcgacatggggctgctggttgccggaaccaagtacagaggagaatttgaggaaagactgaagaaactgatggaagaaattaaacaagcggacgatatcatccttgttattgatgaagtgcacaccctcattggtgctggtgccgccgagggtgctattgacgctgccaacatcttgaagccagctttagctcgcggtgaattacagtgcatcggagcaaccacacttgacgagtacaggaagcacattgagaaggatcctgcattggaacgtcggttccaacctgtgttagttccagagcctactgtagaggaaactattgaaattctcagaggattgagagaaagatacgagatccaccataaattgcgttacactgacgaggctttgattgcagcagcccagctatcttaccagtacatcagtgatcggtttttgcctgacaaggctattgatttgattgatgaggcgggttcgaaagtaaggctgaaacacgctcagctacccgaagaggcgaaggagcttgacaaggagttgcgtgccgttacgaaggagaagaatgaagctgtgcgtgggcaggattttgagaaggccggagaactaagggatcgcgagatggagctgaaggctcaaatatcggccttcattgagaaggacaaagagcagatgaaggcagagagtgaaaccggtgatgttggtcctactgtcgaagaatctgacattcagcagattgtgtctgcctggacaggcattcccgttgagaaggtctcaagtgatgaatctgaccgcttgttgaagatggaggatacacttcataatcgggttattggccaggatgaagcagtgaaggccatcagtcgtgctattcgcagagctcgtgttggacttaagaaccccaatcgtcccatcgctagtttcatcttttctggtcctactggtgtcggtaaatcggagcttgctaaaagtctcgcttcctactactttggttctgaagaagccatggttagacttgatatgtctgaatttatggagagacacactgtctccaaactcattggatctccaccaggttatgtgggttacagtgaaggaggacagctaacagaggctgtgcgcagaagaccatacactgtggttctttttgatgagattgagaaggcacatcctgatgttttcaatatgatgcttcagattttggaagacggaagattaaccgacagcaaagggcggactgtagatttcaagaatactcttctaattatgacttcaaacgtaggaagcagtgtaattgagaaaggtgggggtggtattggtttccaattggactacggcgaaaaggattctagctacaatcgcatcaagagcctcgttaatgaggagctgaagcagtactttaggcccgagtttttgaaccgattggatgaaatcattgttttcagacaactgactaaattggaagttaaggagatcgctgatattatgttgaaggaggtcttcgagcggttgaagaagaaggaaattgatttacaggtaactgagagattcagggatcgtgttgttgacgaaggctatagtcctagctatggagctcggccattgcgacgagcaatcatgaggctattggaagacagtatggcagaacgcatgctctctggagaaattaaggagggagactcagctatcatcgatgtagatggtgatggcaatgtcacagtgttaaatggcactacgggaactgcttccaaaacagatacagatatggcccctgctggtattgcttga

SEQ ID NO: 6806 - protein, 836 aa, Physcomitrella patens subsp. patens
MFERFTEKAIKVIMLAQEEARRLGHNFVGTEQILLGLIGEGTGIAAKVMKSMGVNLKEARVEVEKIIGRGSGFVAVEIPFTPRAKRVLELSLEEARQLGHNYIGTEHLLLGLLREGEGVAARVLENLGADPSNIRTQVIRMVGENTEAVGVGAGSGSSGNKMPTLEEYGTNLTKLAEEGKLDPVVGRVAQIERVTQILGRRTKNNPCLIGEPGVGKTAVAEGLAQRIASGDVPETIEGKKVITLDMGLLVAGTKYRGEFEERLKKLMEEIKQADDIILVIDEVHTLIGAGAAEGAIDAANILKPALARGELQCIGATTLDEYRKHIEKDPALERRFQPVLVPEPTVEETIEILRGLRERYEIHHKLRYTDEALIAAAQLSYQYISDRFLPDKAIDLIDEAGSKVRLKHAQLPEEAKELDKELRAVTKEKNEAVRGQDFEKAGELRDREMELKAQISAFIEKDKEQMKAESETGDVGPTVEESDIQQIVSAWTGIPVEKVSSDESDRLLKMEDTLHNRVIGQDEAVKAISRAIRRARVGLKNPNRPIASFIFSGPTGVGKSELAKSLASYYFGSEEAMVRLDMSEFMERHTVSKLIGSPPGYVGYSEGGQLTEAVRRRPYTVVLFDEIEKAHPDVFNMMLQILEDGRLTDSKGRTVDFKNTLLIMTSNVGSSVIEKGGGGIGFQLDYGEKDSSYNRIKSLVNEELKQYFRPEFLNRLDEIIVFRQLTKLEVKEIADIMLKEVFERLKKKEIDLQVTERFRDRVVDEGYSPSYGARPLRRAIMRLLEDSMAERMLSGEIKEGDSAIIDVDGDGNVTVLNGTTGTASKTDTDMAPAGIA

SEQ ID NO: 6807 - DNA, 2511 bp, Physcomitrella patens subsp. patens
  CDS (1)..(2511)
atgtttgagcgtttcactgagaaggctattaaggtcatcatgttgtcgcaggaggaggccagacgtctcgggcacaattttgttggtactgagcaaatcttgcttggtctcatcggtgagggtactggtattgctgccaaagtgttgaagtccatgggagtgaaccttaaagaagctcgtgtggaagtggagaagatcattggtcgggggagcggcttcgtggctgttgagattccctttacgcccagggccaaacgagtgctcgagctctcattagaggaagctaggcaacttggtcataattacattggtacagagcatttgcttctggggttgctacgagagggagaaggtgtggccgcccgagttcttgagaatcttggcgctgaccccagcaatattcgtactcaggtgattcgaatggttggcgagaatacagaggctgttggtgtcagatctggcagtggcagcagcgggaacaagatgcccaccctagaggagtatggaacgaatttgaccaaactcgctgaggagggaaagctggacccagtcgttgggaggatttcacagatagagcgagtaactcaaatccttggccgtagaaccaaaaataacccatgtcttattggagagcctggggttggaaaaactgctgttgccgaaggtctggctcagaggattgcatctggggatgtgcctgagacaattgagggcaagaacgttgttaccctggacatggggttgctggttgccggaacgaagtacagaggagaatttgaggagaggctgaagaaactgatggaagaaatcaaacaggcagacgatatcattctcgtaatcgatgaagtgcacacacttataggtgctggtgccgctgagggtgctatcgacgctgccaacatcttgaagccagctttggctcgtggtgaattacagtgcattggagcaactacgcttgatgagtatagaaagcacatcgagaaagatcctgcattagaacgtcgtttccagcctgtgttggttccagagcctaccgttgaggaaaccattgagatcctccgaggtttaagggagagatacgagattcatcataaattgcgttacacagatgaagctttgattgcagcagctcagctctcttaccaatatatcagtgatcggtttttacctgacaaagctatagacttaatcgatgaggcaggttctaaagttaggctgaaacatgctcagcttccggaagaggcaaaggagcttgataaggagttgcgtgccgttacgaaggagaaaaatgaagctgtccgtggacaggatttcgagaaggccggagaactgagggatcgcgagatggagttgaaggcccaaatttcagctttcattgagaaggataaagagaaggttaaggctgagagtgagactggtgatgttggtcctactgttgaagaagctgacattcagcaaattgtgtctgcgtggacaggtattcctgtagagaaggtctcaagtgatgagtctgatcgtctgttaaagatggaggatacccttcataatcgcgtcattggccaggatgaagccgtgaaggccattagtcgtgcaattcgcagagcacgtgttggacttaagaatcccaatcgtcccatagccagttttatcttctctggtcctactggagttggtaaatcggagcttgccaaaagccttgcgtcctactatttcggttctgaggaggctatggtcagacttgatatgtccgaatttatggaaagacacaccgtctccaaacttatcggttctccaccaggatacgtcggttacagtgaaggaggccaactgacagaggccgtacgaagaaggccctacaccgtggtcctttttgatgagattgagaaggcacatcctgatgttttcaacatgatgcttcagattttggaagacggacgcctgaccgacagcaaaggacggactgtagattttaagaacactcttctaattatgacttcaaatgtagggagtagtgttatcgagaaaggtggcggtggtattggtttccagttagactacggtgagaaggattccagctacaaccgcattaaaagccttgttaatgaggagctgaaacaatacttcagacctgagtttttgaacagacttgatgagattatcgtcttcaggcaattgaccaaattggaagttaaggagatcgccgacattatgttaaaggaagtctttgagcgtctgaaaaagaaagagatcgatttacaggtgactgagaggtttagggatcgtgttgttgaagaaggctacagtcctagctatggtgcccggccgctgcggcgagcaattatgaggctattggaagacagtatggcagagcgcatgctctctggagaaatcaaggagggggactcggctatcattgatgtggatggtgacggcaatgtcacagtattgaatggcaccacgggaacgtcctcaaaaacagacatagatgtgtcccctgctggaattgcctaa

SEQ ID NO: 6808 - protein, 836 aa, Physcomitrella patens subsp. patens
MFERFTEKAIKVIMLSQEEARRLGHNFVGTEQILLGLIGEGTGIAAKVLKSMGVNLKEARVEVEKIIGRGSGFVAVEIPFTPRAKRVLELSLEEARQLGHNYIGTEHLLLGLLREGEGVAARVLENLGADPSNIRTQVIRMVGENTEAVGVRSGSGSSGNKMPTLEEYGTNLTKLAEEGKLDPVVGRISQIERVTQILGRRTKNNPCLIGEPGVGKTAVAEGLAQRIASGDVPETIEGKNVVTLDMGLLVAGTKYRGEFEERLKKLMEEIKQADDIILVIDEVHTLIGAGAAEGAIDAANILKPALARGELQCIGATTLDEYRKHIEKDPALERRFQPVLVPEPTVEETIEILRGLRERYEIHHKLRYTDEALIAAAQLSYQYISDRFLPDKAIDLIDEAGSKVRLKHAQLPEEAKELDKELRAVTKEKNEAVRGQDFEKAGELRDREMELKAQISAFIEKDKEKVKAESETGDVGPTVEEADIQQIVSAWTGIPVEKVSSDESDRLLKMEDTLHNRVIGQDEAVKAISRAIRRARVGLKNPNRPIASFIFSGPTGVGKSELAKSLASYYFGSEEAMVRLDMSEFMERHTVSKLIGSPPGYVGYSEGGQLTEAVRRRPYTVVLFDEIEKAHPDVFNMMLQILEDGRLTDSKGRTVDFKNTLLIMTSNVGSSVIEKGGGGIGFQLDYGEKDSSYNRIKSLVNEELKQYFRPEFLNRLDEIIVFRQLTKLEVKEIADIMLKEVFERLKKKEIDLQVTERFRDRVVEEGYSPSYGARPLRRAIMRLLEDSMAERMLSGEIKEGDSAIIDVDGDGNVTVLNGTTGTSSKTDIDVSPAGIA

SEQ ID NO: 6809 - DNA, 2730 bp, Physcomitrella patens subsp. patens
  CDS (1)..(2730)
atgtcctcaatttgggctacacagattaatcagggcgaattcactgagatggcttggcaagcaattgtcgcctctcctgatgtcgcaaaagaaagcaagcaacaaattgtggagacagagcacttgatgaaggccttgctggagcagcgaaatggcctggcgaggcgaatttttgctaaagcaggcgtggataacacctctttgttgcaagcaactgagcgttttattcagagacaaccaaaggtcctgggtgacacaagtgggtctatgcttggacgagatttggagggattgatagagaaggcacgtggtcataagaaggattttggagattcttttgtctctgttgaacacttggtcctggcatacactcaggacaaacgatttggtcagcaactgttcaaagagttccagttaactgcgaagactttgagtgccgcaattcagtcaattcgaggatcacaaaaggttactgatcaagatccagaaggtagatacgaagctctagagaaatatggaaaggacttgactgaaatggcaagacagggcaaacttgaccctgtcatcggacgagacgatgaaattcgccgcgctattcaaattttgtctcgtagaacaaagaacaacccagtcctgatcggagaacccggcgttggaaagactgccatttctgaaggtctggctcagcggattgtacaaggagacgtgccatcagctttgctcaaccgcaagctgatttcgctggatatgggatcgttgatagcaggcgcaaagtatcgtggagagttcgaggacaggctcaaggcagtcttgaaggaggtcaccgactccgatggccagatcatcctgttcattgatgagatacacactgttgtcggtgctggtgctaccagcggtgcaatggacgccggaaatctgttaaagccaatgctgggccgcggagagctgcgctgcatcggagcaaccacattggacgagtaccgaaagtatatcgagaaggatcctgccctggaacgtcgcttccagcaagtctacgtggaccagccctcagtggaagacacgatatccattctgaggggccttcgcgaacgttacgaactgcaccacggagtgcggatctcggacagcgctttggtggagtccgccatgttagctgatcgctacattgccgatcggttcctcccggacaaagccatcgacctcgtggatgaagctgcggcgaagttgaagatggagatcacgtcgaaacccacagcacttgatgaaatagacaggtctgtgctgaagctggaaatggagaggctgtcactgaagaacgacacagacaaagcgtcgcgggaccggctcgatcgactggtcacggagctggaccttctgaagaagaagcagaaggagttgacagatcagtgggaacacgagaagtcagtgatgactcgcattcagtccatcaaagaggaggtggacagagtgaacctggaaatccaacaagcggagcgagattacgacctaaaccgagctgcggagttgaagtacggaagtctaatgacgttgcaacgccagttggacgctgcggagaaggctctggacgagtatcaaaacagtggaaattctatgcttcgggaggaagtgacaggaaacgacatcgcagaggtggtgagcaagtggactggaattcccatctcgaaactgcagcagtcagagcgggagaagctcttgcaccttgacgacgaactgcacaagcgcgtagtcggccaggacccagctgtgaagtccgtggcggaggccatccagcgttccagggcggggctttctgaccccaacaaaccgattgccagcttcatgtttatggggccaacaggtgtggggaagactgagctggccaaagctctggcgtcgtatctcttcaacaccgaggaggccatcgtgcggatcgacatgagcgagtacatggagaagcatgcggtttcgcggctggtgggagcaccgcctggatacgttggttatgaagagggagggcagctgacggaggcggttcggagaaggccatatgcagtgattctgttcgacgagatagagaaagctcactctgacgtgttcaatatcttccttcagatcctggacgatggacgcgtgacggattcccagggcaggaccgtcagtttcactaacacagttatcataatgacatccaacgtggggtctcattacgttctcaacagcgcggacagcatggccggcaacagcaaggaggtcatatatgaggcaatgagagctcgagtgatggaggccgcgagaaacacgttccgaccagagttcatgaaccgtatcgacgagtacatcgtgttccagcagctcgaccgcgaccagataagcaggattgtgagaattcagttggaccgtgtacagaagagattgtcagacaggaagatcacgctgaaggtgacggagagcgccatccaactgctggcaagtttggggtatgatcccaactacggagcacggccagtgaagagggtgatccaacagagtgtggagaacgagctggcgcgttcaatattgagaggagacttcaaagaggaggacacaatcctgatcgactccgatctgacatcggttgctggaagcagccttccgcaacagaaactgtctttccgaaggttgcagtcggtggattcgaaccaggcagcagatgcggatccctttgcgtacgcacaggggcaagagaattga

SEQ ID NO: 6810 - protein, 909 aa, Physcomitrella patens subsp. patens
MSSIWATQINQGEFTEMAWQAIVASPDVAKESKQQIVETEHLMKALLEQRNGLARRIFAKAGVDNTSLLQATERFIQRQPKVLGDTSGSMLGRDLEGLIEKARGHKKDFGDSFVSVEHLVLAYTQDKRFGQQLFKEFQLTAKTLSAAIQSIRGSQKVTDQDPEGRYEALEKYGKDLTEMARQGKLDPVIGRDDEIRRAIQILSRRTKNNPVLIGEPGVGKTAISEGLAQRIVQGDVPSALLNRKLISLDMGSLIAGAKYRGEFEDRLKAVLKEVTDSDGQIILFIDEIHTVVGAGATSGAMDAGNLLKPMLGRGELRCIGATTLDEYRKYIEKDPALERRFQQVYVDQPSVEDTISILRGLRERYELHHGVRISDSALVESAMLADRYIADRFLPDKAIDLVDEAAAKLKMEITSKPTALDEIDRSVLKLEMERLSLKNDTDKASRDRLDRLVTELDLLKKKQKELTDQWEHEKSVMTRIQSIKEEVDRVNLEIQQAERDYDLNRAAELKYGSLMTLQRQLDAAEKALDEYQNSGNSMLREEVTGNDIAEVVSKWTGIPISKLQQSEREKLLHLDDELHKRVVGQDPAVKSVAEAIQRSRAGLSDPNKPIASFMFMGPTGVGKTELAKALASYLFNTEEAIVRIDMSEYMEKHAVSRLVGAPPGYVGYEEGGQLTEAVRRRPYAVILFDEIEKAHSDVFNIFLQILDDGRVTDSQGRTVSFTNTVIIMTSNVGSHYVLNSADSMAGNSKEVIYEAMRARVMEAARNTFRPEFMNRIDEYIVFQQLDRDQISRIVRIQLDRVQKRLSDRKITLKVTESAIQLLASLGYDPNYGARPVKRVIQQSVENELARSILRGDFKEEDTILIDSDLTSVAGSSLPQQKLSFRRLQSVDSNQAADADPFAYAQGQEN

SEQ ID NO: 6811 - DNA, 2769 bp, Physcomitrella patens subsp. patens
  CDS (1)..(2769)
atggcgtcgatggcgcattctctgacgctcccgtctgtgggttcttcactcgttggccagctgaatgacagtgcgaagagtaagcgacggaccattgcgcaggcggcgtctaccggaagaaagaatttgaagaagtctgcgagtttgtccgtgtccggtttccaatccttttccggaatgcgcaaggcttccgccgttgatgctttgactgtcaagcaaggaaaggatttgaagtctgtagtggcgaaatctatggctgtggccggccattcccggccctctaggggcgtaacgtttgctatgtttgagcgtttcaccgagaaggccatcaaagttattatgctggctcaggaggaagctaggcggcttgggcacaattttgttggtaccgagcaaattcttttggggctcattggggagggtaccggtattgctgcgaaggttttgaaatcgatgggagtgaacctcaaggaagctcgtgtggaagtcgagaagatcattggtcggggaagtggtttcgttgccgttgagatcccctttacgcccagggccaagagggttcttgagctgtcgctggaagaagccaggcagcttggtcacaactacatcggcacagaacatttgcttctgggattgctgcgagagggagagggtgtggctgcccgagttctcgagaacctaggagctgaccctagcaatattcgcacacaggtcattcgcatggtcggtgagaacaatgaggctgttggcgtaggaggtggcagcggcagcggtagtaataagatgcccaccttggaagaatacgggacaaatttgactaaacttgctgaggagggaaagcttgatccagttgttggaagagttgctcagattgagcgagtgacccagattttgggccgtagaaccaagaacaatccatgtctgattggagagcctggtgtggggaaaacggccgtcgccgagggcctggctcagaggattgcatctggagatgtacccgagactattgaaggcaagaaggttatcactcttgatatgggtttattggttgctggaaccaagtacagaggagagtttgaggagaggttgaagaagttgatggaagagattaaacaagcagacgacattatcctcgttattgatgaggtgcacacgctcattggtgctggtgctgctgagggtgcgattgacgctgctaacatactgaaacccgctttagcccgaggtgaattacagtgtattggggcaaccactctggatgagtacagaaagcatattgaaaaggatcctgcattggagcgacgtttccagcccgttctggtgccagaacctaccgttgaagagaccatcgagatccttaagggtttgagggagagatatgaaattcaccacaagctgcgatacacagatgaggccttgattgcagcagcacagctgtcttaccaatacatcagtgaccgattcttgcctgacaaggcaattgatcttattgatgaagcgggttcgaaagtgaggctcaaacacgctcagctgcctgaagaggcaagggagctcgacaagcagctgcgtgctgttacaaaagagaaaaacgaagctgtccggggccaggactttgagaaggctggtgagttgagagataaggaaatggaattgaaggctcaaatttcagtcttcatcgagaagggtaaggagcaaatgaaagcagagagcgaaaccggcgatgttgggcctactgttgaagagtccgacatccagcagattgtggccgcctggactggcattcccatggagaaggtttcaagtgacgagtctgaccgtctattgaagatggaagatactcttcacaacagagttattggtcaggacgaagctgtgaaagctatcagtcgcgctattcgtagggcacgtgttgggctgaagaaccctaaccgccctattgccagtttcatcttctctggtcccaccggagtcggaaaatcagaacttgcaaaagctctggcttcctactacttcggttccgaagaagctatggtgaggcttgacatgtctgaatttatggaaagacatactgtctccaagcttatcggctctccacctggttacgtcggttacagtgaaggaggccagttgactgaagccgttcgcaggaggccttacactgtcgttctttttgatgagattgagaaggctcatcctgatgtcttcaacatgatgcttcagattttggaagatggacgcttgactgacagcaagggtcgaactgttgacttcaagaatactctactcatcatgacttcaaatgttggaagcagtgtcattgagaaaggtggaggtggtattggtttccagttggattatggtgagaaagactcgagctacaaccgcatcaagagtcttgttaatgaagagctaaagcagtatttcaggcccgagtttttaaacaggcttgacgagatcatcgtctttaggcaactcacaaagttagaagttaaggaaattgccgatatcatgttgaaggaagtcttcgagcgtctcaagaaaaaagagattgacttacaagttactgagagattcagggatcgggttgttgatgaaggctacagccctagttatggtgctcggccattgaggcgagctattatgaggcttctggaagatagcatggcggagcgcatgctttctggagaaatcaaggagggagattcagctattattgacgtggatagcgatgcaaattacaatgaagaatttgaggtagaaaaagattaa

SEQ ID NO: 6812 - protein, 922 aa, Physcomitrella patens subsp. patens
MASMAHSLTLPSVGSSLVGQLNDSAKSKRRTIAQAASTGRKNLKKSASLSVSGFQSFSGMRKASAVDALTVKQGKDLKSVVAKSMAVAGHSRPSRGVTFAMFERFTEKAIKVIMLAQEEARRLGHNFVGTEQILLGLIGEGTGIAAKVLKSMGVNLKEARVEVEKIIGRGSGFVAVEIPFTPRAKRVLELSLEEARQLGHNYIGTEHLLLGLLREGEGVAARVLENLGADPSNIRTQVIRMVGENNEAVGVGGGSGSGSNKMPTLEEYGTNLTKLAEEGKLDPVVGRVAQIERVTQILGRRTKNNPCLIGEPGVGKTAVAEGLAQRIASGDVPETIEGKKVITLDMGLLVAGTKYRGEFEERLKKLMEEIKQADDIILVIDEVHTLIGAGAAEGAIDAANILKPALARGELQCIGATTLDEYRKHIEKDPALERRFQPVLVPEPTVEETIEILKGLRERYEIHHKLRYTDEALIAAAQLSYQYISDRFLPDKAIDLIDEAGSKVRLKHAQLPEEARELDKQLRAVTKEKNEAVRGQDFEKAGELRDKEMELKAQISVFIEKGKEQMKAESETGDVGPTVEESDIQQIVAAWTGIPMEKVSSDESDRLLKMEDTLHNRVIGQDEAVKAISRAIRRARVGLKNPNRPIASFIFSGPTGVGKSELAKALASYYFGSEEAMVRLDMSEFMERHTVSKLIGSPPGYVGYSEGGQLTEAVRRRPYTVVLFDEIEKAHPDVFNMMLQILEDGRLTDSKGRTVDFKNTLLIMTSNVGSSVIEKGGGGIGFQLDYGEKDSSYNRIKSLVNEELKQYFRPEFLNRLDEIIVFRQLTKLEVKEIADIMLKEVFERLKKKEIDLQVTERFRDRVVDEGYSPSYGARPLRRAIMRLLEDSMAERMLSGEIKEGDSAIIDVDSDANYNEEFEVEKD

SEQ ID NO: 6813 - DNA, 2727 bp, Physcomitrella patens subsp. patens
  CDS (1)..(2727)
atgaatccggagaagtttacgcacaagacgaatgaggcgttggcagccgggcaagagcttgcgaccgaagccggccatgcgcagtacacgcccgtgcatttgactcttgctctgttgaacgataatgaaggattgttgcgccaggctattgccactgtgtcgggtggtgaccagacgatcaattctgttgagcgcgtgttgaagaacacgctgaagaaaattccatcacagagccctgctcctgatgcttcccctgcgaataatgcacttattaaatgcttaaagaaggcgcagagcttgcagaaatccagaggcgactcgcatctggctgtcgatcagctgatcttggcgctactcgaggatactcagattgcagattgctttaaagaggcgggtgtaagtgcaactagggtgaagagagagcttgaagctgtgagaggatcttctaagaaggttgataatgctaccggtgattctaattttcaagcattgaaaaagtatggacgagatttggtggaggatgctggcaagctggaccccgtcatcggtcgagatgacgaaatccggagagttgtgagaatcctgtctcgaaggactaagaataatcccgtgttgattggagagcctggtgtcgggaagacagctgtcgtggaaggcctcgcccaacgtattgtgagaggagatgtgccaagcaatttgttagaagtacgtctagtcgccttggatatgggagccttggttgcgggagccaaataccgaggtgaatttgaggaacgattgaaggcagtgctcaaggaagtggaggattctgatggcaaagttattcttttcattgatgaaattcatcttgttcttggagcagggcgtacggaaggatccatggatgcagccaatttgctgaagccaatgctggcccgaggacaactccgttgcattggggcgaccactttggatgaatacaggaagtatgtcgaaaaggatgcagcctttgaacggcggtttcagcaggtcatggtttcagaaccgagtatagcagacaccatcagtattttacgaggcctgaaggagcgatatgaagggcaccatggtgtccgtctcttagacagggcgttggttgttgcagcacaactctcgagcagatacattacgagcaggttcttgcctgacaaagcaattgacctcatagacgaagcatgtgctaacgtgcgtgtgcagctggatagtcaaccagaagagattgatgtcttggaaaggcgtagaattcagctggaggtggaggcgcatgctatggagaaagagaaggacaaagccagcaaggcgcgtcttgttgagatacgacaggaactccaaaatttggaggatcaattgagacctctgaaaatgaagtatcaaagagagaaggagagggtcgatgaactccggaagctgaagcagaagagagaagatcttcaagccagtttgctggatgcagaacgacggtatgatttggcaagggcagcagatcttaagtacggggctttagtggaggtggacaaggcaatccaaaaaatggaacagcaagagtctggagagaacactatgctcacggaatctgttggtccagagcatattgcggaggtcgttagtcggtggactggaattccggtgactaggttgggtcagaatgagaaggcccggcttttgggccttgctgatcgtctgcatcagcgggttgttggtcaagacgaggcagttcaggctgtcgcagaagcaattttacgatcacgggctggtctaggccgacagcagcaaccaactggatcctttctcttccttggcccaacgggtgttggtaaaactgagttggctaaggctttggctgagcagctctttgacaaagagaatcagcttgttcgcatggatatgtccgagtacatggagcagcactcagttgctcgtctgattggttccccacctgggtatgtgggacacgaggagggaggtcagcttacagaggcagtgcgaaggcgcccctacagtgttgttctttttgatgaagtggaaaaagcgcatccggcagttttcaacactctcttgcagttgctggatgatggtcgtctcactgatggccaaggccgtactgtggatttcaccaacactgtaatcatcatgacctctaacctgggggcagagcatttactcatgggtttgagtggtatgatgtccatggatattgccaaggaaaaagttttagaacaagttcgggtgcacttccgcccagaacttctcaatcggttggatgaaattgtagttttcgagccgctcaagcacgatcagctacgtaaggtggccaggatgcagatgaaggatgtcgccgtgcgacttgcagagcggggcgttgcattggctgtcaccgatgccgcccttgaccttgttttgacggagtcttacgatcctgtttatggtgcacgcccgctgcgaagatggttagaacgcaaagtggtaaccaacctatcaaggatgctgatcaacgatgaagtggatgacaattccaccgtcttcatagacgttaaacctggagagaacctactcacatatactgtggaacgcaacggtggtcttgtaaacagtgtcacggggaagaaggcagacattctcattgaagtaccgagagcagaacagcatgatctcaaaagaatgagggttgaagaaccagacagtgacttagatgatgagatggaagactaa

SEQ ID NO: 6814 - protein, 908 aa, Physcomitrella patens subsp. patens
MNPEKFTHKTNEALAAGQELATEAGHAQYTPVHLTLALLNDNEGLLRQAIATVSGGDQTINSVERVLKNTLKKIPSQSPAPDASPANNALIKCLKKAQSLQKSRGDSHLAVDQLILALLEDTQIADCFKEAGVSATRVKRELEAVRGSSKKVDNATGDSNFQALKKYGRDLVEDAGKLDPVIGRDDEIRRVVRILSRRTKNNPVLIGEPGVGKTAVVEGLAQRIVRGDVPSNLLEVRLVALDMGALVAGAKYRGEFEERLKAVLKEVEDSDGKVILFIDEIHLVLGAGRTEGSMDAANLLKPMLARGQLRCIGATTLDEYRKYVEKDAAFERRFQQVMVSEPSIADTISILRGLKERYEGHHGVRLLDRALVVAAQLSSRYITSRFLPDKAIDLIDEACANVRVQLDSQPEEIDVLERRRIQLEVEAHAMEKEKDKASKARLVEIRQELQNLEDQLRPLKMKYQREKERVDELRKLKQKREDLQASLLDAERRYDLARAADLKYGALVEVDKAIQKMEQQESGENTMLTESVGPEHIAEVVSRWTGIPVTRLGQNEKARLLGLADRLHQRVVGQDEAVQAVAEAILRSRAGLGRQQQPTGSFLFLGPTGVGKTELAKALAEQLFDKENQLVRMDMSEYMEQHSVARLIGSPPGYVGHEEGGQLTEAVRRRPYSVVLFDEVEKAHPAVFNTLLQLLDDGRLTDGQGRTVDFTNTVIIMTSNLGAEHLLMGLSGMMSMDIAKEKVLEQVRVHFRPELLNRLDEIVVFEPLKHDQLRKVARMQMKDVAVRLAERGVALAVTDAALDLVLTESYDPVYGARPLRRWLERKVVTNLSRMLINDEVDDNSTVFIDVKPGENLLTYTVERNGGLVNSVTGKKADILIEVPRAEQHDLKRMRVEEPDSDLDDEMED

SEQ ID NO: 6815 - DNA, 2727 bp, Coprinopsis cinerea okayama7#130
  CDS (1)..(2727)
atgtcctcaaactttgactttacagacaaggctcagcagacaatagccgactctattcagttggccaaagactattccaatgcccaagtaacgcccgcccatatcgcatttgtcctcgtaaatgagggtatgggggaggcaatgccaggtgcaccaacagcatctgcctcgtcccaacaggggctatttacctccgtgatacaacgtgcgggtggtgatccgattgccattcgtcgaggcattcagaaactcatcgtccgactaccccagcaaagcccaccgcccgatgaaaccagcttcagcggcactgctctcaaagtcctcagggaggcccagtcgctccaaaagaccatgcacgactcttacatcgctcaagaccacctccttctcgctttattgaaggattcatcaatagagggcattctgaaggagaacaacttgacccccgcctccctgaagactgccatcgagcaagcgcggggtaatcgtcgcgtcgaatccaagagtgctgagcagggcttcgatgccttgcagaagtacgctgttgacctcaccgctctcgctgaagagggaaagcttgaccctgttatcggccgcgataacgaaattcgccgtgccatccgtatcctgtgtcgaaggaccaagaacaaccccgttctcattggtgagccaggtgtcggtaagaccgccatcgccgaaggtctcgcacaacgtatagtcaagcgcgatgtccctgccagtctcatcgcccgactctattctctcgacatgggtgccctcatggccggtgcaaagtacaagggagagtacgaggagcgtatcaaatctgttctcaacgaggtcgagaaggcatcagaagagggcggtcctggcgtcatccttttcatcgacgaactccatctcatcatggccggacgaggcgcagaaggtggcggcatggacgctggtaaccttttcaagcctctcttggcccgcggcaagcttcgttgtatcggtgctaccaccctttccgagtaccgcaagtacatcgaaaccgaccccgctttggaacgacggttcgctcaggtcattgtcaacgaaccttcggttcccgagaccatcagcatccttcgtggtattcgtgagaagtacgaggttcatcacggtgtccgaatcctcgacggtgctttgatctcggctgctaccctcgctcatcgatacctcactcaacgacgacttcccgactctgccatcgacctggtcgacgaggcctgtgccaatgctcgagtgcagcgagaaacccagccggaagagatagacaaacttcagcgacgcaagctagaaatcgaggtcgaaatccacgctctcgaacgggagaaagatgctgctagcaaagaacgcctcaaggttgccaagaaaaacatctccgagattgaggaccagttgaaacctctcaaggctcactacgaagccgagaagcaacgtggcgatgagatcaaccaggttaggaggaagatcgacgaacttaaggccaaaattgaggatgcagagcgaaggtacgacctcgccaccgcatccgatttgcgatactacgccattcctgacctccaagcccgcttggagaagcttgagcagcagaaggctgccgaggctgctgaagggactggggcagacgttgttactcccgactccattgctgatatcgtcgccagatggaccaatattccggtaacccgtctggtcaccaccgagaaggagaagctgttgcgcatggagaagatcttgtcggagagtgttatcggccagcaggatgcagtcaagtctgtggccaatgctatccgcctgtctcgaagcggcctttccaacccgaacagacctatcgccagtttcttgatggctgggccttcgggaacaggtaagacgctcatggcaaagacgctcgccacaatcttgttcgactctcccgatgccatgattcgtatcgacgcctctgaatactccgagaagcattccatctcgcggctcattggctctcctcccggttatgtcggctatgaccaaggtggccaacttacagaatacgtgcgccgaaaaccatactccatcatcctcattgatgagattgagaaggcctgtcgggaattcgtcactatattcctacaagtccttgacgatggtcgcctgacggacggtcaaggtcgtgtggtggacatgaagaacactgtgattatcatgacctccaacttgggcgccgcctaccttcatgatatgccagaaggacccgtcttgccggagactcgctcgctggttatgggtgccataactgcgcatttccctcccgaattcataaaccgtatcgacgacatcattgtcttccgcgctctttcccacaaggacatcctcaagattgtcgaccttcgcctcaaggaggttgaagatcgcctggaagacaggaagattaaactcgaccttgatgccgattcgaagcagtacctcatgtccatgggctattcgacgcaattcggtgctcgtcctctaaaccgtgcgattcagagtgaattgctgaaccctctctctgtgcacttgctggctggccgagtgttgccaaacgagaccgtcaaagtccgcttcgatggaccccacaaccggttacaagtcattcccaaccacgagggcgagatgaaggaggaatggatggatgttgacacggacttggacgatggcatcgagattgaggagatggattaa

SEQ ID NO: 6816 - protein, 908 aa, Coprinopsis cinerea okayama7#130
MSSNFDFTDKAQQTIADSIQLAKDYSNAQVTPAHIAFVLVNEGMGEAMPGAPTASASSQQGLFTSVIQRAGGDPIAIRRGIQKLIVRLPQQSPPPDETSFSGTALKVLREAQSLQKTMHDSYIAQDHLLLALLKDSSIEGILKENNLTPASLKTAIEQARGNRRVESKSAEQGFDALQKYAVDLTALAEEGKLDPVIGRDNEIRRAIRILCRRTKNNPVLIGEPGVGKTAIAEGLAQRIVKRDVPASLIARLYSLDMGALMAGAKYKGEYEERIKSVLNEVEKASEEGGPGVILFIDELHLIMAGRGAEGGGMDAGNLFKPLLARGKLRCIGATTLSEYRKYIETDPALERRFAQVIVNEPSVPETISILRGIREKYEVHHGVRILDGALISAATLAHRYLTQRRLPDSAIDLVDEACANARVQRETQPEEIDKLQRRKLEIEVEIHALEREKDAASKERLKVAKKNISEIEDQLKPLKAHYEAEKQRGDEINQVRRKIDELKAKIEDAERRYDLATASDLRYYAIPDLQARLEKLEQQKAAEAAEGTGADVVTPDSIADIVARWTNIPVTRLVTTEKEKLLRMEKILSESVIGQQDAVKSVANAIRLSRSGLSNPNRPIASFLMAGPSGTGKTLMAKTLATILFDSPDAMIRIDASEYSEKHSISRLIGSPPGYVGYDQGGQLTEYVRRKPYSIILIDEIEKACREFVTIFLQVLDDGRLTDGQGRVVDMKNTVIIMTSNLGAAYLHDMPEGPVLPETRSLVMGAITAHFPPEFINRIDDIIVFRALSHKDILKIVDLRLKEVEDRLEDRKIKLDLDADSKQYLMSMGYSTQFGARPLNRAIQSELLNPLSVHLLAGRVLPNETVKVRFDGPHNRLQVIPNHEGEMKEEWMDVDTDLDDGIEIEEMD

SEQ ID NO: 6817 - DNA, 2421 bp, Magnaporthe grisea 70-15
  CDS (1)..(2421)
atgctattacgtagccaaattcacacttcatcacgccgcctcgcaggagttacatcccaaccacttctccgaggtcaatcgttaccaagagtagcggggctcagtgctcggctgccttcaccatcaaagaatgccattacattaactcactccggtgctcgccctcggcagttactacccattacaaccgttaggcattatgccaatggtcgaccgcatcctccaggcggcacccaccgcatgaacatgagcggcggggaggaggaaaagccggccctggaacagtacggcatagacctcaccgccaaggcgaaggagggaaagctggatcccgtcataggccgcgatggcgagatccaaaggactatccaagtgctgtctcgcaggaccaagaacaacccggtcttgatcggaaatgcaggaaccggaaagacggctatcctggagggcttggctctgcggattgttcggggtgatgtgccggagagtatcaaaaataagcgtgtcatcagtctggatctgggctcgcttatcgccggtgccaaattcaggggtgactttgaggaacgcttgaaaaaggtgctcacagaggttgagcaagccaacggacaggtcattctctttatcgacgagctccacacgttgcttgggctgggcaaggcagaagggtccatcgatgcctcaaatttgctgaagcctgctttgtctcgcggcgagctccaatgctgcggagccacaacgctgaacgagtaccgactcatcgaaaaggacgttgcactggctcgccgtttccagccaattctcgtcaacgagcctaccgtagaggataccatcagcattctgcgcggtattaaggacaagtacgaggttcaccatggagttcgaattactgatggtgccctcgttgcagctgctgcctactcgaaccgctatatcactgaccggttcctaccagacaaggccattgatcttatggacgaggcagccagctcgctcaggctgcaacaggaaagcaaaccggaggacataatgcgtctggatcaaaagatcatgaccattcaaatcgagctcgaatcactgcgcaaagagaaggatgtggccagccgcgaacgtcgcgagaaactggaatccgatctcaaaaagctgcaagatgaggtgaaggagctcaacgacaagtgggacaaggagcgctctgaaatcgatgccataaaacagacgcaggccgaacttgaccgggcacgcatcgaactcgaggtcgcccagcgtgagggcaacttcggtcgtgcctcggagctccgcttcggcgtcataccctcacttgaggccaagctgcctaaggaaggcgaggaagccaaaagcgatggcagcctcctccacgactccgtaactgccgatgatatcgccaacgtcgtctcccgcatcacgggcatccccgtctccaagctgacgtctggccacatcgagaaactggtgcacatggaggagacactccgagaggctgttcgcggtcaggacgaggccctacacgccgtcgccgacgcagtccgtctgcagcgtgcaggactcagcggggagaaccgccccacggcatccttcttcttccttggccctactggtgtcggtaagacggaactttgcaagaagcttgccgggttcctgttctcgacggaatcggccgtcgtccgcttcgacatgagcgagttccaggagaaacacaccatcagccgtctcatcggagctccgtcaggctacgttggctacgaggacgcaggccagctgaccgaggctgtgcgccgcaagccctacgccgtgctgctgtttgacgagtttgaaaaggcgcaccgcgacatctcggcgcttctgctgcaggtcctcgacgaagggttcctgactgacgcgcagggccacaaggtcgacttccgcaacaccataatcgtcttcacgtcgaacctgggcgccgacatactcgtcggtgccaacccggccgttccctacaaagaactcgccgatggcgccatcagcccagaggtcaagacggccgtcatggacgtggtgcagtcgcgatacccgcccgagttcctcaaccgcatcgacagcttcatcgtcttcaagcgcctctccctcgaggccctgcgtgacattgtcgacatcagactgaaagagttgcagggccgcctgactgataggcgcatcacgctcgaggcctcgggcgaggtaagggactggctcgccgagaagggctacgaccccaagtacggcgcaaggccgctcaacaggctcatcacggtcgagatcgccaacagcctcgcggataggatcatcaggggtgagctcaagagtggcgataccgcgctcgtgaggattaccgaggacaagagcgccttggaagtcgtcaagggggaggagaaggcggctcagtga

SEQ ID NO: 6818 - protein, 806 aa, Magnaporthe grisea 70-15
MLLRSQIHTSSRRLAGVTSQPLLRGQSLPRVAGLSARLPSPSKNAITLTHSGARPRQLLPITTVRHYANGRPHPPGGTHRMNMSGGEEEKPALEQYGIDLTAKAKEGKLDPVIGRDGEIQRTIQVLSRRTKNNPVLIGNAGTGKTAILEGLALRIVRGDVPESIKNKRVISLDLGSLIAGAKFRGDFEERLKKVLTEVEQANGQVILFIDELHTLLGLGKAEGSIDASNLLKPALSRGELQCCGATTLNEYRLIEKDVALARRFQPILVNEPTVEDTISILRGIKDKYEVHHGVRITDGALVAAAAYSNRYITDRFLPDKAIDLMDEAASSLRLQQESKPEDIMRLDQKIMTIQIELESLRKEKDVASRERREKLESDLKKLQDEVKELNDKWDKERSEIDAIKQTQAELDRARIELEVAQREGNFGRASELRFGVIPSLEAKLPKEGEEAKSDGSLLHDSVTADDIANVVSRITGIPVSKLTSGHIEKLVHMEETLREAVRGQDEALHAVADAVRLQRAGLSGENRPTASFFFLGPTGVGKTELCKKLAGFLFSTESAVVRFDMSEFQEKHTISRLIGAPSGYVGYEDAGQLTEAVRRKPYAVLLFDEFEKAHRDISALLLQVLDEGFLTDAQGHKVDFRNTIIVFTSNLGADILVGANPAVPYKELADGAISPEVKTAVMDVVQSRYPPEFLNRIDSFIVFKRLSLEALRDIVDIRLKELQGRLTDRRITLEASGEVRDWLAEKGYDPKYGARPLNRLITVEIANSLADRIIRGELKSGDTALVRITEDKSALEVVKGEEKAAQ

SEQ ID NO: 6819 - DNA, 2781 bp, Magnaporthe grisea 70-15
  CDS (1)..(2781)
atgaattcaaaaatggaattcacagatagggccaagaaggccatggaggacgccatggacctggcagaacaacacgcccactcccagcttctacccgtccaccttgcagtttctctcctggaccctcccccggatttgtccaaggaccagcagaaccctacacctggtgcttcacacactctcctgaggcaggtcgttgagcgagcccaaggtgaccctcagcttctcgacagggcgctgaaaaagaccctggttcggcttcccagccaagacccgcccccagagaatgtcaccatgtctccatcgttcaacaaccttatccgcaaggctatggaactgcagaaggtccagaaagactcattcattgcagtggaccacttgatttcagccttggccgaagacgttagcttccaaaattgtctcaaggaggccaatgttcccaaacacaagctcattcaggatgctgtccagaccatccgtggtaccaagagggtggattccaagacggcagacactgaggaagagcacgagaacctctcgaaattcaccattgacatgacggctatggcacgggaagggaaaatcgacccggtcatcggacgtgaggaggaaatccgcagggttgttcgaatcctctcgaggagaaccaagaacaaccccgtgctcatcggtgagcctggtgtaggaaagaccaccgtcgtcgagggtcttgcccaacgaatcgtcaatgccgacgtaccggacaacctggctgcctgcaagctcctttcattggacgtcggtgccttggtcgccgggagcaagtaccgtggagagttcgaggagagaatgaagggcgtcttgaaagaaatcgaggaggccaaggagatgattgtgctcttcgttgacgaaatccacttgctcatgggggctggctcctctggtgagggtggcatggatgctgccaatctcttgaagcccatgcttgctcgtggccagctgcactgtattggcgccacaaccctggctgagtaccgcaaatacatcgagaaggatgccgccttcgagcgtcgtttccagcaggttcttgtcaaggagcccacaatcaacgagaccatttctattctccgaggtctcaaggagaaatacgaggttcaccatggtgtgaccatcgcagacagcgccctggttgcttcagcgaaccttgcggcacgctacctcacaactcggcgcatgcctgactctgctgtggacctgatcgacgaggcagctgcggctgtgcgtgttgctcgtgaatctcaaccggaaataatcgattctcttgagcgcaagctacgacaactgaagatcgagattcacgcgctctcccgcgaaaaggacgaggcatctaagggtcggcttgctcttgcgaagcaggaggcgcaaaacgtggaggaggagctcaggcctcttcgcgaaaagtacgagagtgagaggaagcgtggcaaagatatccaggaggcgaagatgaagcttgaccagctcaaagtcaagatggaggatgctagcagaatgggcgatcatgcacgtgccgcagacctccagtactatgccatccctgagcaagaaaacgtcatcaagcagctcgagaaggacaaggctgctgccgatgctgctatcagcgctcaggcccagaccgatcacggtggttcaatgatcaccgatgttgttggacctgatcagatcaacgaaattgtgtcgagatggactggaatccccgtcacccgactcaagacatccgagaaagagaagcttatccagatggagaaggctctcggcaaactcgtcgtcggtcagaaggaggcggtgcaatcggtttcgaacgccatccgtctgcaacgctctggacttagcaacccgaaccagccaccgagcttcctattttgcggtccatcaggtactggtaagacgctgcttaccaaggcgcttgccgagttcctcttcgacgactcgaaggccatgatcaggctcgacatgtcggaataccaggagagacattcactcagccgcatgattggagctccgccaggatatgtcggtcatgacgcgggtggtcaactgactgaagcgcttcgccgcaagcccttctccatcctcctgtttgacgaggttgagaaggctgccaaggaggtcctgactgtactcctccagctcatggacgacggtcgcatcaccgatggccaaggacgtgttatcgacgctcgtaactgtatcgtcgtcatgacctccaacttgggtgcagagttcctcgctcgaccagctggcaaggacggcaagattgacccaacgacgcgcgagcttgtgatgaacgcgttgcgcaactacttcctgcccgagttcctgaaccgtatctcctcaaccgtcatattcaaccgtctcacacgtaaggaaattcgcaagatcgttgacttgcgcatttccgagatccagaagcgacttgcagacaataaccgcaacatcgccatatcggtgtcgaatgaagctaaagactacctgggcaacgctggctactcaccggcctatggtgctcgcccactggcccgccttattgagcaggaagttctcaacaagcttgctgtattgatcttgcgcggcagcattcaagatggcgaggtcgcgcgggtggagctcattgacaacaagatcgttgtcctatcaaatcactccagcagtgaaaatggtgacgatgtcgagatgattgattctgaggaggatgcagtggaagagcttatcagggacgacgatgatgagttgtttgactaa

SEQ ID NO: 6820 - protein, 926 aa, Magnaporthe grisea 70-15
MNSKMEFTDRAKKAMEDAMDLAEQHAHSQLLPVHLAVSLLDPPPDLSKDQQNPTPGASHTLLRQVVERAQGDPQLLDRALKKTLVRLPSQDPPPENVTMSPSFNNLIRKAMELQKVQKDSFIAVDHLISALAEDVSFQNCLKEANVPKHKLIQDAVQTIRGTKRVDSKTADTEEEHENLSKFTIDMTAMAREGKIDPVIGREEEIRRVVRILSRRTKNNPVLIGEPGVGKTTVVEGLAQRIVNADVPDNLAACKLLSLDVGALVAGSKYRGEFEERMKGVLKEIEEAKEMIVLFVDEIHLLMGAGSSGEGGMDAANLLKPMLARGQLHCIGATTLAEYRKYIEKDAAFERRFQQVLVKEPTINETISILRGLKEKYEVHHGVTIADSALVASANLAARYLTTRRMPDSAVDLIDEAAAAVRVARESQPEIIDSLERKLRQLKIEIHALSREKDEASKGRLALAKQEAQNVEEELRPLREKYESERKRGKDIQEAKMKLDQLKVKMEDASRMGDHARAADLQYYAIPEQENVIKQLEKDKAAADAAISAQAQTDHGGSMITDVVGPDQINEIVSRWTGIPVTRLKTSEKEKLIQMEKALGKLVVGQKEAVQSVSNAIRLQRSGLSNPNQPPSFLFCGPSGTGKTLLTKALAEFLFDDSKAMIRLDMSEYQERHSLSRMIGAPPGYVGHDAGGQLTEALRRKPFSILLFDEVEKAAKEVLTVLLQLMDDGRITDGQGRVIDARNCIVVMTSNLGAEFLARPAGKDGKIDPTTRELVMNALRNYFLPEFLNRISSTVIFNRLTRKEIRKIVDLRISEIQKRLADNNRNIAISVSNEAKDYLGNAGYSPAYGARPLARLIEQEVLNKLAVLILRGSIQDGEVARVELIDNKIVVLSNHSSSENGDDVEMIDSEEDAVEELIRDDDDELFD

SEQ ID NO: 6821 - DNA, 2331 bp, Gibberella zeae PH-1
  CDS (1)..(2331)
atggctgctagtgtccgggctcgatcagcctggccacttacaagagtactcgcaacacaacctttgaaaccaacatccctacgcttgataccaagtcttgccatcaggacatatgccaatggcagacctcatcccccaggcggtactcaccgcatgaatatgggtggtgaggaggagaagcctgctctggaacaatttggtatcgaccttactgcccgggccaaggatggtaagctggatcctgttattggaagagatgccgagattcagcgaacaatccaaattttgtcacgacgtaccaagaataacccagttctcatcggtaatgcgggaactggaaagacagcaattcttgagggtctcgctcttcgtattgttcgtggcgacgtccccgagagtgtcaagaacaagagggtcatcagtcttgatcttggctctctggttgccggtgccaagttcagaggagacttcgaagaaagactgaagaaggtcttgacagaggtcgagcaggctgagggagaagttattctattcatcgatgaactacacactctccttggcctcggaaaggccgaaggctccatcgatgcctcgaacctcttaaagcctgctttggcccgtggcgaacttcagtgctgtggtgcaacaacccttaacgagtatcgtcagattgaaaaagatgttgccctggcacgacgattccaacctatcattgtcagcgaaccatccgtggaggacacaataagtattctcagaggaatcaaagacaagtacgaagtccaccatggtgtccgcattacagacggcgcattggtggctgccgcaactttgtctaaccgctacatcaccgaccgattcttaccagacaaagctattgacctcatggacgaggcagccagtcatctcaagctgcagcacgagtccaagcctgaagacatcatgcgtcttgaccacaagatcatgaccattcagattgagcttgagagtttgaggaaggagtctgatgtggcaagcaaggagcgccgagagaagctcgaaaatgacctcaagaaattgaacgaggaaatttctgggctcaacgcgcgctgggagaaggagcgtgctgagatcgagtcggtcaagaagattcaagaggatctcgacaaggccaagtttgcgcttgagcaggctcagcgagaaggaaactttgggcgtgcctctgaactcagatttggtgtgattcccgaccttgaacagaagttgcccaaggagggagaagcccaagagtcaacctccagcgagactcttatccatgattcggtcagcccagacgacatcgccaatgtcgtctcccgtatcaccggcatccccgtgacaaagctcacttcaggccacatcgaaaagctggtccacatggaggactcactcagccaggcagtcaaaggacaagatgaagccatcaaggctgtttcagatgccgttcgtctccagcgagctggtctgagcggtgagaacaaacccttggcttccttcttcttcctaggccctaccggcgtgggtaaaacagagctttgtaagaagctggcaggatttttgttttcaacagagtctgcagttgttcgcttcgacatgtccgaattccaggagaagcacaccatctctcgacttattggtgcgccatctggttatgttggctacgaagatgccggccaactgactgaggcggttcgtcgcaagccttacgctgtccttctctttgacgagttcgagaaggcacaccgtgacatctctgccctgctcctccaggttcttgatgagggatatctcacagatgcccaaggccacaaggtcgacttcaagaacaccatcattgtcctgacgtccaacttgggtgccgacatcctcgttggccagaaccaccttcacccctatagcgaaacagctgacggtgagatcgacccatccgtccgcaaggccgtcatggatgttgtcgcctcagcttacccacccgaattcctcaaccgaatcgactccttcattgtcttcaagcgtctcgcccgcagcgctcttcgcgacatcgtggatatacgcctcaaggaactccaacaacgcctcgacgaccgccgcatcgtgctcaatgttcccagcgacgtaagagactggcttgcggagcgtggctacgatcccaaattcggtgcccgtcccttgaaccgactcatcaccaacgagatcggcaacggccttgcagacaagatcatcaagggccagctgaagatgggagagacggccgagatcaaggttcgcgaggacaaggaaggcttggacattgccatcaagtccaaggaggcctaa

SEQ ID NO: 6822 - protein, 776 aa, Gibberella zeae PH-1
MAASVRARSAWPLTRVLATQPLKPTSLRLIPSLAIRTYANGRPHPPGGTHRMNMGGEEEKPALEQFGIDLTARAKDGKLDPVIGRDAEIQRTIQILSRRTKNNPVLIGNAGTGKTAILEGLALRIVRGDVPESVKNKRVISLDLGSLVAGAKFRGDFEERLKKVLTEVEQAEGEVILFIDELHTLLGLGKAEGSIDASNLLKPALARGELQCCGATTLNEYRQIEKDVALARRFQPIIVSEPSVEDTISILRGIKDKYEVHHGVRITDGALVAAATLSNRYITDRFLPDKAIDLMDEAASHLKLQHESKPEDIMRLDHKIMTIQIELESLRKESDVASKERREKLENDLKKLNEEISGLNARWEKERAEIESVKKIQEDLDKAKFALEQAQREGNFGRASELRFGVIPDLEQKLPKEGEAQESTSSETLIHDSVSPDDIANVVSRITGIPVTKLTSGHIEKLVHMEDSLSQAVKGQDEAIKAVSDAVRLQRAGLSGENKPLASFFFLGPTGVGKTELCKKLAGFLFSTESAVVRFDMSEFQEKHTISRLIGAPSGYVGYEDAGQLTEAVRRKPYAVLLFDEFEKAHRDISALLLQVLDEGYLTDAQGHKVDFKNTIIVLTSNLGADILVGQNHLHPYSETADGEIDPSVRKAVMDVVASAYPPEFLNRIDSFIVFKRLARSALRDIVDIRLKELQQRLDDRRIVLNVPSDVRDWLAERGYDPKFGARPLNRLITNEIGNGLADKIIKGQLKMGETAEIKVREDKEGLDIAIKSKEA

SEQ ID NO: 6823 - DNA, 2727 bp, Candida glabrata CBS 138
  CDS (1)..(2727)
atgaacgacgaaacacagttcacagagagggcactgcatatccttacagttgcccagaagctagccactgaccaccagcatcctcagttgcaacctatccatttgcttgctgcttttattgagactcctgaggatgggtccgtggcgtacttacaaaacttgatcgagaaaggtcgctacgactacgatttgttcaagaagacagtgaacaaagcattggtgcgtgtgcctcagcagcatcctgcaccagcggaagtcacaccaagctatgccttgggtaaagtgatccaggacgcggtaaagatacagaagcaacaaaaggactcttttatcgcccaggatcatctgctattcgctttgttcaatgacgctagtataaaacaggtgttcaaggatgccggtgtcgatactgaggctgttaaacaacaggccttggaattgagaggtagccaaaggatagactccagaggtgccgacactaatacacccttggaatacctaggtaaatatgctatcgatatgacagaacaagccaggcaaggtaagctggaccctgtcatcggtagagaagaagaaatcagaagtaccatcagagtcttggctagaagaataaagtctaacccatgtctgatcggtgaacctggtatcggtaaaaccgccatcatcgaaggtgtcgctcaaagaatcatcgacgatgatgttccaaccattctacaaggttcaaagctgttcagtctggatctggctgctctaacggctggtgcaaagtacaaaggtgactttgaagagagattaaagggtgtgttgaaggaagtcgaggaatcaaagactttgattgtcttgttcattgatgaaattcacatgcttatgggaaatggtaaggatgatgctgccaacatcttgaagccagccttatccagaggacatttgaaggtgattggtgctacaaccaacaatgaatatagatctattgtcgaaaaagatggtgctttcgagagaagatttcaaaagatcgacgtccaggagccaacaattagacaaactgtcgctattttgagaggtctacaaccaaagtacgaaattcaccacggtgtcagaattttagatagtgctttggttactgcttctcagttggctaagcgttacttaccctacagaagattgccagattcagcaattgatctggtagatatttcatgtgcgggtgtcgctgtggcaagagactcaaagccagaagaacttgactctaaggaacgtcaactgcaattgctacaagttgaaataaaagctctagaaagagacaaggatgctgactgcaccactaaggacagattgaagcaggctaagaagagagaggcatctttgatcgaagaattagaaccattgagacaacgttacaacgaagaaagaaagggccatgaagagctaaccaaattgaagaagaagttagatgaattggaaaataaggctcttgatgccgagcgtagatatgatactgctactgccgctgatttgagatactttgctatcccagatatcaagaagaagattgacgacttagaaaaccaagttgccgaagaggaacagcgtgcgggtgctaattcaatgattcaaaacgttgtggactcggacactatatctgagacagccgcaagactgactggtattcctgtgaagaaactatcagaatctgagaatgagaagctaatccatatggaacgtgatctctcctcagaagttgttggtcagatggaggctgttaaggctgtgtccaacgctgtaagactttccagatctggcttagccaatcctagacaaccggcatcatttatgttccttggtttgtccggttctggtaagacagaactggccaagaagattgccggattcttattcaatgatgaaaacatgatgattagggttgattgttcggaattgagtgaaaagtactctgtatccaagttattaggtacaactgcaggttacgttggttacgaagagggtggtttcttaactaatcaactacaatacaagccatactcagttttgctatttgatgagatagaaaaagcacaccctgatgttttgactattttgttgcaaatgctagatgacggtagaattacttctggccagggtaagacgattgattgttccaactgtattgtcattatgacttccaaccttggtgcccaatatattaacttacagaaaggttccaagattatggatgaaaccaagactttggtaatggaagctgttaagcagcacttcagaccagagtttttgaacagaatctcctcaattgttgtattcaataaactatcaagaaaggcaatccacaagattgtagatattagattgaaagaaattgaagacagattcgagatgaatgataagcactacaagttagaactaactccagaagccaaggatttcctagcaaagtacggttattctgaagacatgggtgcccgtccattaaacagactaattcaaactgaaatcttgaataagatggctttaaggatcttaaagggagaaattcaagataaggaaactgttaaagttgtcttaaaggttggcaaggaacgtgggtctgctagtactgaagatgaggaagaaagtcttgatgtcctaccaaaccacgaggcaaccattgcaattgataacgacactatggatattgacgatgatgatgacgatgatgctgttgatgttgattaa

SEQ ID NO: 6824 - protein, 908 aa, Candida glabrata CBS 138
MNDETQFTERALHILTVAQKLATDHQHPQLQPIHLLAAFIETPEDGSVAYLQNLIEKGRYDYDLFKKTVNKALVRVPQQHPAPAEVTPSYALGKVIQDAVKIQKQQKDSFIAQDHLLFALFNDASIKQVFKDAGVDTEAVKQQALELRGSQRIDSRGADTNTPLEYLGKYAIDMTEQARQGKLDPVIGREEEIRSTIRVLARRIKSNPCLIGEPGIGKTAIIEGVAQRIIDDDVPTILQGSKLFSLDLAALTAGAKYKGDFEERLKGVLKEVEESKTLIVLFIDEIHMLMGNGKDDAANILKPALSRGHLKVIGATTNNEYRSIVEKDGAFERRFQKIDVQEPTIRQTVAILRGLQPKYEIHHGVRILDSALVTASQLAKRYLPYRRLPDSAIDLVDISCAGVAVARDSKPEELDSKERQLQLLQVEIKALERDKDADCTTKDRLKQAKKREASLIEELEPLRQRYNEERKGHEELTKLKKKLDELENKALDAERRYDTATAADLRYFAIPDIKKKIDDLENQVAEEEQRAGANSMIQNVVDSDTISETAARLTGIPVKKLSESENEKLIHMERDLSSEVVGQMEAVKAVSNAVRLSRSGLANPRQPASFMFLGLSGSGKTELAKKIAGFLFNDENMMIRVDCSELSEKYSVSKLLGTTAGYVGYEEGGFLTNQLQYKPYSVLLFDEIEKAHPDVLTILLQMLDDGRITSGQGKTIDCSNCIVIMTSNLGAQYINLQKGSKIMDETKTLVMEAVKQHFRPEFLNRISSIVVFNKLSRKAIHKIVDIRLKEIEDRFEMNDKHYKLELTPEAKDFLAKYGYSEDMGARPLNRLIQTEILNKMALRILKGEIQDKETVKVVLKVGKERGSASTEDEEESLDVLPNHEATIAIDNDTMDIDDDDDDDAVDVD

SEQ ID NO: 6825 - DNA, 2364 bp, Candida glabrata CBS 138
  CDS (1)..(2364)
atgttaagcagggtatgtaggtcgtcgttgaggaacagtgtagctagggtctcgcggtacgctggtccgagggctctggctctgtccatggttgtaagcgggaggcaggttagtggtagttggcaaacgtgtgcttatggtgtgcggtacatacatagttcgaggcctcggtatgtgcagatgcgtatgaatcccaatcaaggagagcctgagaagccgcctttggagcagtttggtactaatctgacgaagttggctagggatggtaagctggatcccgtgataggtcgtgacgaggagatctcgagggctatccagatcttatcgagaaggaccaagaacaacccggttctgatcgggagagctggtgtcggtaagactgcacttatcgatggcttggcgcaacggattgtcgctggtgaagtaccggagtcgttgaaggataaagaactagtggccttagatctgggtgctctgatcgctggtgcgaagtacagaggtgaattcgaagaaaggctgaagaaagtcctggaggacatagacaaagcagacgggaaagtgatagtgtttattgatgaggtccacatgctgcttggcctcgggaaaactgacggtagcatggatgcttccaatatattgaagccaaagttggcaagaggactaaggtgcatatctgccactacaatcgatgagttcaagataatcgagaaggatcctgctctgactaggagattccaacctatcttgctaaatgaaccttctgtgcaagatacaatctctatcttaagaggtctaaaggaaagatacgaagttcaccacggtgtcaggatcacggatactgctctggtgtccgctgctgtactatcaaacaggtacatcaacgatagattcttaccagataaggctatcgacctggtggatgaggcatgtgctgtgttgaggttacaacatgagtcaaagcccgatgagattcaaagattggatagggccattatgaaaattcaaattgaactagaatcattaaagaaagaaactgacccagtgtctattgaaaggaaagaagatctagaaaaagagctagaaaggaaaaatgaggaacttcaacgactaactaagatctgggaggaagaaaaagctgaaatagagtctattaagaactccaaagccgacttggagaaagctagaatcgaattggatagatgccaaagagaaggtgactatgcaaaggcgtccgagcttagatatgccaagatcccagctttagaagagaaagtgaaactcagcgaaactaaggactcaaataaggaaaacttactgcatgatgctgtcacttcagatgatatttcaaaagtcattgccaagatgacaggtattccaatggaaacagtattaaaaggagacaaagatagacttttatatatggaaaactccttgagagaaagagttgtaggtcaagacgaagctatcgaagctgtttcagatgcagtgagactacaaagagctggcctaacgagtgaaaagagaccaattgccagtttcatgtttctgggcccaactggtacaggtaagaccgaactaaccaaggcgcttgctgagttcctgttcgatgacgagtctaatgtaattagatttgatatgtccgagtttcaggaaaaacacactgtttcaaagttaataggtgcccctccaggatatgtattaagtgaatcaggtggtcaattaacggaggctgttaggcggaaaccttatgctgtcgttttgttcgatgaatttgaaaaggctcatccagatgtttgtaagattttgttgcaagtccttgacgagggtaagttgacagattcattgggacaccacgtcgatttccgtaataccataattgtcatgacttctaatattggtcaagatattttactatcagacacgaaattagatgacgaagggaagatcgatccatctacaagaaacgaagttatcgaagcgatgaaaagatcttatcctccagagttcattaatcgtattgatgacatcctagtgttcaatagattatccaagaaggtcctaagatcgattgtcgacatcagagccaaagaaattcaagaaagattgaacgataagcgtatgacgattgaaatatcggatactgctaaagaatggctgacagaacacggttatgaccaactatatggcgctagacctttgaatagattaattcatagaagaatattgaatcctatggcaacttatctattaaagggccaaatcaggaatggtgaaaccgtccaagtagatgttgaaaataaggaacttgttgttaaaagtaatcacgccgaaggagaaatcgtggatgaagaacctgagaaataa

SEQ ID NO: 6826 - protein, 787 aa, Candida glabrata CBS 138
MLSRVCRSSLRNSVARVSRYAGPRALALSMVVSGRQVSGSWQTCAYGVRYIHSSRPRYVQMRMNPNQGEPEKPPLEQFGTNLTKLARDGKLDPVIGRDEEISRAIQILSRRTKNNPVLIGRAGVGKTALIDGLAQRIVAGEVPESLKDKELVALDLGALIAGAKYRGEFEERLKKVLEDIDKADGKVIVFIDEVHMLLGLGKTDGSMDASNILKPKLARGLRCISATTIDEFKIIEKDPALTRRFQPILLNEPSVQDTISILRGLKERYEVHHGVRITDTALVSAAVLSNRYINDRFLPDKAIDLVDEACAVLRLQHESKPDEIQRLDRAIMKIQIELESLKKETDPVSIERKEDLEKELERKNEELQRLTKIWEEEKAEIESIKNSKADLEKARIELDRCQREGDYAKASELRYAKIPALEEKVKLSETKDSNKENLLHDAVTSDDISKVIAKMTGIPMETVLKGDKDRLLYMENSLRERVVGQDEAIEAVSDAVRLQRAGLTSEKRPIASFMFLGPTGTGKTELTKALAEFLFDDESNVIRFDMSEFQEKHTVSKLIGAPPGYVLSESGGQLTEAVRRKPYAVVLFDEFEKAHPDVCKILLQVLDEGKLTDSLGHHVDFRNTIIVMTSNIGQDILLSDTKLDDEGKIDPSTRNEVIEAMKRSYPPEFINRIDDILVFNRLSKKVLRSIVDIRAKEIQERLNDKRMTIEISDTAKEWLTEHGYDQLYGARPLNRLIHRRILNPMATYLLKGQIRNGETVQVDVENKELVVKSNHAEGEIVDEEPEK

SEQ ID NO: 6827 - DNA, 2478 bp, Kluyveromyces lactis NRRL Y-1140
  CDS (1)..(2478)
atgctaaggtctgctgaaaatttgaatcgtaagctaagtcggacgtcgctattaaagaacgttaaaatatatcaacctagtatatctgatgttgaacttggatgtacgtgccggtcttttagcagtttggttcaaaaaccaaaccaaactacagttggaataagccggggtaataaagttatatctggtttaaatattggtgctagaaggcccaatataagtagtataccgcccatttctactgcattcaatgtcgcttctgttcgtagctatgctaagaattataatttaaatttgaataaagatcaggagggtggagaatcagctttacaacagttcggtacgaatttaacggagttggctaaacaggggaaattagacccagtgattggtcgtgatcaggaaatatcgagagctatccaaattctttcgcgtagaaccaagaacaatccagtgttgatcggtagagccggtgtcggtaagactgcgttgattgatggtttagctcaaagaattgttgccaatgaagtgccagaatctttgaaagacaaagacttatacgctttggatttaagttcattggtcgctggtgctaagtaccgtggtgaattcgaggaaaggttgaagaacgttttggatgaaattgataagtccaatggtaagatcattgttttcatcgatgaagttcacatgttactaggcttgggtaagacagatggctctatggatgcttcgaatatcttgaaaccgcgtttggcaagagggttacgttgtatcagtgctaccacattggatgaattcaaaatcattgaaaaagaccctgccttgaccagaagatttcagcctatcatcttgaatgaaccttctgttcatgatacaatctcaatcttgagaggtctaaaggaaaagtatgaagtgcaccacggtgtaagaatcacagattcagccttagtttccgctgctgtgctatccaacagatacattaacgaccgtttcctcccagataaagctattgatttggtcgatgaagcatgtgctgttttacgtttgcaacacgagtcaaagcctgactccattcaagcaattgatcgggctgttatgacaatgcaaattgaattagaatccttgaagaaagaaactgatcccgtttctgttgaaagaagagaggaacttgaaaaggatttggaagtgaagaagaaagaattggagaggttgactgaaatttgggaaaccgaaaaatctgaattggattccatcaagactgccaaggaagatttagataagttgagaaccgaattggatatttgtcaaagagaaggtgattatgccaaggcttctgaactaagatatgccaagatccctgaattggaaagaaaagtagcactgaacagcaagaaggatactgaaaacaacttgttacatgactctgttacctctgatgacatttctaaagtcattgccaagatgacaggtattccaatggaaaccgttttgaaaggtgataaggacagattactatatatgcagaattcattaagagaaagagttgttggtcaagatgaagcaatcgatgctataagtgacgcagtgcgtttacaaagagctggattgaccagtgaaaagagacctattgctagtttcatgtttttgggacctactggtaccggtaagacagaattaactaaagctttggcagagtttttgtttgatgatgaatctaacgttatcagatttgatatgtctgaattccaggagaaacatacagtatcaagattaatcggtgcacctcccggttatgtgttaagtgaaagcggtggtcagttaactgaagccgtgagacgtaagccatatgctgttgtattatttgatgaattcgaaaaggctcatccagatgtttgtaaagtcttattgcaagtattggatgaaggtaaactaacagattctcaaggtcaccaagttgatttccgtaacaccattgttgttatgacatcgaacatcggccaagacattttgctgcatgataccgaattaggtgatgatggtaaggttagcaagaagactaagagaagcgtaattgaagctgttaaaaagaactatcctccagaatttgtcaatcgtattgatgatttgattgtctttaacagactatcaaaagaagttctccgttcaatcgtcgatattagactcaaggaaattcaagaaagattgaacgacaagcgtatgaccctaaatctaactgacgaagctaaggattggttaactgaaagaggttatgacccattgtacggtgctagacctttgaacagattgatccataaacaaatcctaaatccaatggctattcaattgctaaggggtcaattgagacacgaggagactgtaaatgtggttattgaagatagcaagttagtggttaaaccaaaccacgatcccgaatcaagtgaactcggaaatgacaagcaagctgatgttgagtaa

SEQ ID NO: 6828 - protein, 825 aa, Kluyveromyces lactis NRRL Y-1140
MLRSAENLNRKLSRTSLLKNVKIYQPSISDVELGCTCRSFSSLVQKPNQTTVGISRGNKVISGLNIGARRPNISSIPPISTAFNVASVRSYAKNYNLNLNKDQEGGESALQQFGTNLTELAKQGKLDPVIGRDQEISRAIQILSRRTKNNPVLIGRAGVGKTALIDGLAQRIVANEVPESLKDKDLYALDLSSLVAGAKYRGEFEERLKNVLDEIDKSNGKIIVFIDEVHMLLGLGKTDGSMDASNILKPRLARGLRCISATTLDEFKIIEKDPALTRRFQPIILNEPSVHDTISILRGLKEKYEVHHGVRITDSALVSAAVLSNRYINDRFLPDKAIDLVDEACAVLRLQHESKPDSIQAIDRAVMTMQIELESLKKETDPVSVERREELEKDLEVKKKELERLTEIWETEKSELDSIKTAKEDLDKLRTELDICQREGDYAKASELRYAKIPELERKVALNSKKDTENNLLHDSVTSDDISKVIAKMTGIPMETVLKGDKDRLLYMQNSLRERVVGQDEAIDAISDAVRLQRAGLTSEKRPIASFMFLGPTGTGKTELTKALAEFLFDDESNVIRFDMSEFQEKHTVSRLIGAPPGYVLSESGGQLTEAVRRKPYAVVLFDEFEKAHPDVCKVLLQVLDEGKLTDSQGHQVDFRNTIVVMTSNIGQDILLHDTELGDDGKVSKKTKRSVIEAVKKNYPPEFVNRIDDLIVFNRLSKEVLRSIVDIRLKEIQERLNDKRMTLNLTDEAKDWLTERGYDPLYGARPLNRLIHKQILNPMAIQLLRGQLRHEETVNVVIEDSKLVVKPNHDPESSELGNDKQADVE

SEQ ID NO: 6829 - DNA, 2700 bp, Kluyveromyces lactis NRRL Y-1140
  CDS (1)..(2700)
atgaacgacgaaacacaatttacaaataaggccaacgaaattatccgtttggcccagaaattggctcaggatcacagacatgctcagttacaaccaattcacttacttgctgcatttgttgagccaaacgaggatggttctgttggattcttacaaaacttggtggaattagcgaaatatgattatgaacctttgaaaagggccatcaacagaaacctagtcaggactccatctcagacgcccgcaccattagaaattcagccaagttatgctttcgggcaggtcttgaaagatacttcagaaattaggaaacagcaaaaagattcattcgtcggtcaagatcatatattgactgctttgttcaaagatgcaacaactcaaagcatttttaaggagtgttccattgacatagaatctgtgaagcagcagatgctcgaattgagaggcaatcaacgaattgattcaagagacgctgatacaaatgaaaaatgggaatatttgaagaagtatgcgatcgatatgactgaacaggctagagcaggtaagttggatcctgttatcggtagagaagaagaaattagaactgccatcactgttcttgctagaagaatcaagtcaaatccatgtttgatcggtgagccaggtattggtaagactgccattgtagaaggtgttgctcaaagaattatcgacgatgatgttccacaaattctacagggttgcaaattattttctttggatcttgctgcattgacggctggtgccaaatataaaggtgatttcgaggaaagattaaaaggtgtcttgaaagaaatcgaggaatcaaagactttaattatattattcatcgatgagattcatatgttgatgggccaaggtgtagatgattctgccaatgctgctaatattttgaaaccagccttatctcgtggtggcttgaaggtaattggtgccactaccactaacgaatatagatctttggtcgagaaggatggtgctttcgaaagaagattccagaagattgatgtccctgaaccaacgacaaggcaaacggtagctattttgagaggtttacagccaaagtatgaaatacatcatggtgttagaattctagatagtgccctagtgtctgcagctcaactagctaagaggtacttgccatacagaagattacctgattctgctattgacttggttgatatttcatgtgccggtgtcgctgttgctcgtgattctaagcccgaagaattagacaataaagagcgcgaattgcatttactacaggttgaaatcaaggcattagaaagagatgaagaaacggatccaacgacaaaagaaaggctacaacaagccagacaaaaggaagcttcattaattgaggaattggaaccaatgagacagcgttaccaacaggaagtggattctcatgaacaactaagacaagccaaaaagaagctcgatgaattggaaaacaaatgcatggatgccgaacgtcgttacgataatgctaccgcagctgatttgaaatactttgctattccggatatcaagaaacgtattgaggaattggaacaaaaagttgctgaagaagaatccagggaaggttctgaaacaatggtgaagaacgtggttaacagcgaggttattgccgagactgccgctagaatgaccggtattccagtgaataaactaactgaatctgaaaacacaaagttgatccatatggaacgtgagttatcgcaacaagttgtgggtcaaatggaggctgtgaaagccgtttctaacgctgtcagactttctagatctggtttgtctaaccctaatcaaccggcatctttcttattcctaggtttatctggttccggtaagactgaattagctaagaaagtcgcatccttcttgtttaatgatgaaaaagctatggtcagaatcgattgttcagaattgatggagaaacattcagtttcgaaattattaggtactactgccggttacattggttaccaagaaggtggtttcttaactaatcaattacagagaagaccatacagtgtgttgttatttgatgaagtcgaaaaggcccaccctgatgtcttgaccgttcttttgcaaatgttagatgacggcagaatcactagtggtcaaggtaagacaattgactgttcgaactgtattgtaattatgacttctaatttgggtgcccaatttatcaatgctcagactggatcaaaggttactgagggttccaaagagttggtgatgagtgccgttaaagcacatttcagaccagaattcttgaatagaatctcaagtatcgtggtattcaacaagctttctcacaaggccattcacaaaattgttgatatcagaatcaaagacttggagaagcaatttgcggataatgataagaattacaagatcaacgtttcaccaccagctcgggatttcttgaccaagaatggttactcggaggatatgggtgctaggccattgaacagattaattcaaaccgagattttgaacccaatggcaatccatatcttgaagggtgagatcaaagacaaagaaattgtcaatgtagaagtgggtgccgatggatctcatttagaagttttaccaaatcacccagcttcatcagaaattggtgatgaagacatggatttggacttggacgacgatgacgacttagacctagactga

SEQ ID NO: 6830 - protein, 899 aa, Kluyveromyces lactis NRRL Y-1140
MNDETQFTNKANEIIRLAQKLAQDHRHAQLQPIHLLAAFVEPNEDGSVGFLQNLVELAKYDYEPLKRAINRNLVRTPSQTPAPLEIQPSYAFGQVLKDTSEIRKQQKDSFVGQDHILTALFKDATTQSIFKECSIDIESVKQQMLELRGNQRIDSRDADTNEKWEYLKKYAIDMTEQARAGKLDPVIGREEEIRTAITVLARRIKSNPCLIGEPGIGKTAIVEGVAQRIIDDDVPQILQGCKLFSLDLAALTAGAKYKGDFEERLKGVLKEIEESKTLIILFIDEIHMLMGQGVDDSANAANILKPALSRGGLKVIGATTTNEYRSLVEKDGAFERRFQKIDVPEPTTRQTVAILRGLQPKYEIHHGVRILDSALVSAAQLAKRYLPYRRLPDSAIDLVDISCAGVAVARDSKPEELDNKERELHLLQVEIKALERDEETDPTTKERLQQARQKEASLIEELEPMRQRYQQEVDSHEQLRQAKKKLDELENKCMDAERRYDNATAADLKYFAIPDIKKRIEELEQKVAEEESREGSETMVKNVVNSEVIAETAARMTGIPVNKLTESENTKLIHMERELSQQVVGQMEAVKAVSNAVRLSRSGLSNPNQPASFLFLGLSGSGKTELAKKVASFLFNDEKAMVRIDCSELMEKHSVSKLLGTTAGYIGYQEGGFLTNQLQRRPYSVLLFDEVEKAHPDVLTVLLQMLDDGRITSGQGKTIDCSNCIVIMTSNLGAQFINAQTGSKVTEGSKELVMSAVKAHFRPEFLNRISSIVVFNKLSHKAIHKIVDIRIKDLEKQFADNDKNYKINVSPPARDFLTKNGYSEDMGARPLNRLIQTEILNPMAIHILKGEIKDKEIVNVEVGADGSHLEVLPNHPASSEIGDEDMDLDLDDDDDLDLD

SEQ ID NO: 6831 - DNA, 2703 bp, Debaryomyces hansenii CBS767
  CDS (1)..(2703)
atggataattcagaatttacggataacgcattgaggatcattacaaatgctactcagttagctaaagataatgctcacactcagttagctccattgcactttttagcagcaatggtaccaacggatgatgaaaattcgacacaatatcttaaaacattgattcaaaaggctagatatgaatggcctacatttgaaagaaatgtgaataagcacttagttagattgccatcacaaactcctgcaccagatgatattagacccagttatgctacaggccaagtgttggccaatgcaacaaaaataaaatcacaacagaaagatgattttgttgcacaagatcacttgttattggcattgttggatgatagttcgattaaagctattttcaaggaaagtggaattaacgttgatagcatcaagacacaggccatcgaattgagaggaagccagagaattgattcaagacaagctgactcctcgtcatcttatgaattcttgaacaagtactgtgaagacttcacagagaaggccagagaaggtaaaattgaccccgtgataggaagagaagaagaaataagaagggtcattagggtcttggccagaagaaccaaatcaaactctgttttgattggtgaacctggtgttggtaagacatctattgttgaaggggttgctcaaagaatcattgatggtgatgtgccaaatattttagccaattctcgtttatttgcattggatttgggtgctttgaccgcaggtgcaaagtacaaaggtgaatttgaagaaagaattaagggtgtcttgaatgatattgaaaaatcaaatgaaatgattattcttttcatagacgaaattcatatgttaatgggtgatggtaaatccgatgcagctaatttattaaagccaatgttggctagaggttctcttcattgtatcggtgcaaccacattcactgaataccgtaagtttatcgcaaaggatggtgctttcgaaagaaggttccaaaaaattgatgttcctgctagcactgttccagaaactgtcgctatattgagaggtttacaaccaagatatgaaatccatcacggtgttcgtattttggatagtgctttagttactgctgctcaattagcttcgaggtatttaacttacagaagtttgcctgattcagctgttgatcttatagatgaaactgcagctacggttgccgttgcaagagattctaagccagaagaattagatactttggaaagacagttgcatttaattgaagttgaaattaatgcattagaaagagatgttgaagctgatgcagattccaaagaccgtcttgaagttgctaaaagaaagaaggctgaattagaagaacaattaggtccattaagagaaagattcaaccaagaacgtgcgggccatgaagaattaattgcagcaaaacgtaagttagatgaactagaaatcaaggcactggacgctgaaagaagacatgatactgcaaccgctgctgatttgagatacttcgctattccagatgttgctaaacaaattgaagagttggaagtaaaggtagcagaagaagaacagtccttaggttcagaatcaatgttaaagaatgctgtcagtagtgaacaggttgctgaaactgccgcaagattaacaggtattccagtaacaaaattgtctcaagctgagaacactaagttgatcaatatggaaagggaattgtcttcagaggttgtcggtcaaagtaaggctgttaaggctgtctccaatgctatcagattaaaccgttcgggattagcgaacccaaatcaaccagcttctttcttgttcttaggtttatctggttcaggtaaaactgaattggctaagaaggttgctggattcttatttgcagatgaaagagctatgataagaattgactgttccgaattaggcgataaatggtctgcatctaagttgttaggtgcagctccagggtatgttggatacgaagagggtggtattttaaccgaagccttattacgtcgtccttactcggtgattttatttgacgaggtcgagaaagctgctcccgaagtcttaacaattttgttacaaattttggacgatggtagagtcacttcttcccaaggtaagttagtcaattgctccaattcaatcataattatgacatcgaacattggtgcagagtatatcaatgcctcaaagggccctacgattgacgacactacaaaaggattagtcatggatgctgttagggctaatttcaggcctgaattcttgaatcgtatttcaagcacagtcattttcaatagattgtcgaagaaggctatttctaagattgtcaagatcagattgaaagaaatacaagagagatttgcggccaatggtaaagctttagctttggaggtcgatgatgctgcattggaatacttgtgcaacaaaggttattctcccgatcttggtgcaagaccacttaaccgtcttatccaaagtgaaattttgaaccgtttggctgtcttattattaaagggtcaaatcaaggacaaggaagtagctagagttactttaggtcctaaaggcttggaagtcttaccaaaccatgaggcagaagatgaagatatggcagatgtccaagtcgacgactggaaagatagtgaagatgaagatgattacttagactcaactcctcttgactaa

SEQ ID NO: 6832 - protein, 900 aa, Debaryomyces hansenii CBS767
MDNSEFTDNALRIITNATQLAKDNAHTQLAPLHFLAAMVPTDDENSTQYLKTLIQKARYEWPTFERNVNKHLVRLPSQTPAPDDIRPSYATGQVLANATKIKSQQKDDFVAQDHLLLALLDDSSIKAIFKESGINVDSIKTQAIELRGSQRIDSRQADSSSSYEFLNKYCEDFTEKAREGKIDPVIGREEEIRRVIRVLARRTKSNSVLIGEPGVGKTSIVEGVAQRIIDGDVPNILANSRLFALDLGALTAGAKYKGEFEERIKGVLNDIEKSNEMIILFIDEIHMLMGDGKSDAANLLKPMLARGSLHCIGATTFTEYRKFIAKDGAFERRFQKIDVPASTVPETVAILRGLQPRYEIHHGVRILDSALVTAAQLASRYLTYRSLPDSAVDLIDETAATVAVARDSKPEELDTLERQLHLIEVEINALERDVEADADSKDRLEVAKRKKAELEEQLGPLRERFNQERAGHEELIAAKRKLDELEIKALDAERRHDTATAADLRYFAIPDVAKQIEELEVKVAEEEQSLGSESMLKNAVSSEQVAETAARLTGIPVTKLSQAENTKLINMERELSSEVVGQSKAVKAVSNAIRLNRSGLANPNQPASFLFLGLSGSGKTELAKKVAGFLFADERAMIRIDCSELGDKWSASKLLGAAPGYVGYEEGGILTEALLRRPYSVILFDEVEKAAPEVLTILLQILDDGRVTSSQGKLVNCSNSIIIMTSNIGAEYINASKGPTIDDTTKGLVMDAVRANFRPEFLNRISSTVIFNRLSKKAISKIVKIRLKEIQERFAANGKALALEVDDAALEYLCNKGYSPDLGARPLNRLIQSEILNRLAVLLLKGQIKDKEVARVTLGPKGLEVLPNHEAEDEDMADVQVDDWKDSEDEDDYLDSTPLD

SEQ ID NO: 6833 - DNA, 2406 bp, Debaryomyces hansenii CBS767
  CDS (1)..(2406)
atgttacgtacgagattaatcattcaaaatgtcagaagtagagccatttctcaagcatcacggaatattaatacggttagttctctaagtaccagacaaattcatgtacctgctatacaactgaaactgaattttggtatgaaaaatgggcttcaaggaatgaaatacaaacataatagctttggattgaatcatgttaaatttatgcattcaagtggcatcagaaaactccagatgtctatggataaggaaggtcaagatactaggccagcattggagaaatatggtacagatttgactcaattggcaaaggatggtaaactagatccagtgattggacgtgatgaagaaatacgtcgtacagttcaaattttatccagaagaacaaagaacaatcctgtgttgattggtaatgctggtacgggtaaaacggcagtaatggaaggtttggcacagagaatattgaagaatgaggttccagacagtatgaaagacaagcagataataacgttagacctatctggtatcattgcaggtgccaagtatagaggtgattttgaaggcaaattaaaacagatattaaaagaagttgaagagaaacaagggaaagtcatattattcatagatgaattgcatattttaatggggttaggtaaggctgaaggttcaattgatgcatcgaatttattgaaacctgctttggcaaggggaaagctttctctttgtggtgctacaaccattgaagaataccgcaagtatgttgaaaaggatgcagctcttgcaagaagattttctgctgttactgttaatgagccaacggttcaagacactatttcgatattacgtggtttgaaggaacgttatgaggtacatcatggtgtccgtatcactgatggtgcattagtgacctctgcactctattcgagtcgttatataactgaccgttttttgccagataaggctattgatttagttgatgaagcatgttctacattgagattgcaacatgaatctaagccggatgcgattgctcagttagaccgtcaaattatgactattcagattgaattagaatctttgagaaaagaagacgatcagttatcgttagatcgtaagactaaattggaagaagaattgaatgttaaaagtgctgaattgaaagactttactgaaaaatgggaatcagagaaaaagctgatagatgatgtcaagaatgcaaaaactgatttggaacaagctaaatttgatttagaacaatgccaaagagaaggcaattatggtaaggcttctgaattgcaatatgccaccatacccaaattagaggaacaattgaaggaattaactgataacgaaaagtctgttgaaggatctacattattgcatgattctgttacttctgatgacattgcaaatgtgatttctaaaatgacaggtatcccattgagtaacttaatgaaaggtgagaaggataagttattggatatggaagctacattgaaggataaagtcattggtcaggatgaagcaataaatgcagttgctgatgctgtgagattacagagagcaggtttaaccagtgacaagagaccgattgcttcatttatattcttgggaccaactggtactggtaagacagaattaacgaaatccttggcagaatttctatttcatgacaaatcgtcagttattaggtttgatatgtcagaattccaagaaaaacatacgatctctagattaatcggatcacctcctggttatgttggttatgaagaaagtggtgagttaacggaggcagtaagaagaaagccatattcagttatattgtttgatgagtttgagaaagcacacagtgatgtatccaaattattattacaagtccttgatgagggttcattaactgattcccatggtaagcatattgatttccgtaataccataatagtaatgacctcaaatattggtcaagagatattactaaatgataaggatacaagcgatgatggccacattagtgaaagtactaagacacaagttagtgacatgttaaagcattattatcctcctgaattcttaaatcgtctcgatgatgtcttaattttcaacagattgtctaagcaatctttgaaaaatattttgactatccgtttgaaagaaatcgatgaaagattggctgatagaagaatcaatttgtctttatctaatgaatccaaagacaagctttgcgaattaggttatgacccggtgtatggtgcaaggcctttaaatagagttttgcaaaagaaggtcttgaaccccctttccaaattgatgataaaaggacaaataagagaaggtgagacgatacttgttgatttaaaagacgatgaaatatatgttacaccaaatcacgaagaggatcatccttga

SEQ ID NO: 6834 - protein, 801 aa, Debaryomyces hansenii CBS767
MLRTRLIIQNVRSRAISQASRNINTVSSLSTRQIHVPAIQLKLNFGMKNGLQGMKYKHNSFGLNHVKFMHSSGIRKLQMSMDKEGQDTRPALEKYGTDLTQLAKDGKLDPVIGRDEEIRRTVQILSRRTKNNPVLIGNAGTGKTAVMEGLAQRILKNEVPDSMKDKQIITLDLSGIIAGAKYRGDFEGKLKQILKEVEEKQGKVILFIDELHILMGLGKAEGSIDASNLLKPALARGKLSLCGATTIEEYRKYVEKDAALARRFSAVTVNEPTVQDTISILRGLKERYEVHHGVRITDGALVTSALYSSRYITDRFLPDKAIDLVDEACSTLRLQHESKPDAIAQLDRQIMTIQIELESLRKEDDQLSLDRKTKLEEELNVKSAELKDFTEKWESEKKLIDDVKNAKTDLEQAKFDLEQCQREGNYGKASELQYATIPKLEEQLKELTDNEKSVEGSTLLHDSVTSDDIANVISKMTGIPLSNLMKGEKDKLLDMEATLKDKVIGQDEAINAVADAVRLQRAGLTSDKRPIASFIFLGPTGTGKTELTKSLAEFLFHDKSSVIRFDMSEFQEKHTISRLIGSPPGYVGYEESGELTEAVRRKPYSVILFDEFEKAHSDVSKLLLQVLDEGSLTDSHGKHIDFRNTIIVMTSNIGQEILLNDKDTSDDGHISESTKTQVSDMLKHYYPPEFLNRLDDVLIFNRLSKQSLKNILTIRLKEIDERLADRRINLSLSNESKDKLCELGYDPVYGARPLNRVLQKKVLNPLSKLMIKGQIREGETILVDLKDDEIYVTPNHEEDHP

SEQ ID NO: 6835 - DNA, 2664 bp, Yarrowia lipolytica CLIB122
  CDS (1)..(2664)
atgaacgaatcagaattcactgacagagctaacaagatcctcaaaacttccgtcgagctggcccagcagcaccagcagggcactctccagccaatccatcttctggctgccatgttcgatgcagaggacgatgcctctgatccttacatcaaggccgtcgtagagcgaggcaagtacgattgggaccagttcaagcgagccgtcaacaaggcacttgttcgactgcccagccaaagccctcctcccgacgagttgtcccagagccccgccttctccaaggtgctgcagaatgccatcaagtacaagcagcgacaaaaggacgagtacgtgggccaggaccacattctcatggcccttctcgatgactcctctattgagagcattctcaaggagtgcggtattaagaaggacgtcatggaggccaacatcacagccgtgcgaggaaagcgacgaattgactcgcgaaccgctgacggagccgacgagttcgagttcctcaacaagtatgccattgacatgaccaaacaggctcgagagggtaagattgaccctgtcattggccgagaggaggagatccgacgatgtatccgagtgctggcacgacgaaccaagtccaacccttgtctgattggtgatcccggtgtgggtaagacctcaattgtcgagggtgtcgcgcagcgaatcatcgacggcgatgtccccaacgttctggctaactgccagctcttctctctcgatctgggagctctcaaggctggtgccaagtaccagggagactttgaggagcgaatcaagggtgttctcaaggagattgaggactccaaggacatgatcatcctgttcatcgatgagatccatatgctcatgggtgatggaaagggtgatgctgccaacctgctcaagcccatgcttgctcgaggttccctccactgtatcggtgccaccaccaacgaagagtaccgaaagcacgttgagaaggatgccgcctttgagcgacgattccagaagatcgacgtgcgagagcctactattcgagagaccgtcgccattctgcgaggtatccagaacaagtacgagctgcatcacggagtccgaattctggactctgccctggtttctgctgctcagctggcttcccgatacctcacctaccgaaagctgcccgattcggccgtcgatctggtcgatgaggctgcagccgctgttgctgttgctcgagactctcgacccgagcatctggactccctggagcgagagcttgatctgctcatgatcgaggtcaaggctctggagcgagaccagcacgccgaccagggtaccaaggagcgtcttgatgccgcgaagcaccgagtggctgacattgaggaggagctcggacctctgcgagagacctttgagcgagagcgagcaggtcacgttgagcttaacaacctcaagcacaaggttgatgagctcgagaccaaggctctcgacgccgagcgacgacgagacacttccactgctgctgatctgcgatactttgccattccggatctgaagaagcgaattgttgagcttgaagaggagaatgccgctaaggagaagtccatgatcaaggacgttgttggcgccgaccaggtagctgagactgcggctcgactgactggtatccctgtcaccaagctgacccaggccgagaacaccaagctcatcaacatggagaaggtgctttctcgagaagttgttggccaacccgaggctgtcaaggccgtttccaacgcgatcagactgtctcgatcgggtcttgccaaccccaacgcccccgcttctttccttttccttggtctctccggttccggtaagactgagcttgccaagaagctggcaggtttcctgtttgctgacgagcaggccatgatccgaatcgactgttccgagctcatggacaagcactccggctccaagctgattggtgctgctcccggatacgttggatacgaggagggtggtattcttaccgaggccctgatccgaaagccctactccgttgtgttgttcgatgaggttgagaaggctgctcccgaggtgctcactgttcttctgcaggttcttgatgatggtcgagtgcgatcttccgccggaaaggtggtcaacgcatccaactgtatcattatcatgacttccaacctgggtgcggagttcatcaaccgatcgacctcgactaccattgaccagtccactcgagacctggtcatggaggctgtcaagggccacttccgacccgagtttctcaaccgaatcaccgctatggttgtcttcaaccggctgtctaagaagtccattcgacgaatcatcaacattcgtctccatgagatttcgaagcgattcgagcacaacaaccgaaacctcaaacttcatctcgatgaggacgccatggactacctggtggagaacggttacagccccgacctcggtgctcgacctctcaaccgactcatccagaacgaggttctcaacaagcttgctgtcatgcttctgaagcaccagattaaggacggcgaggaggtccgaatcatccgaggagacaagggtctggagattctgcccaaccatgacggcgagacggacatggagctggctgaagattcctacgatgactttgacgacgagatggatctcgactaa

SEQ ID NO: 6836 - protein, 887 aa, Yarrowia lipolytica CLIB122
MNESEFTDRANKILKTSVELAQQHQQGTLQPIHLLAAMFDAEDDASDPYIKAVVERGKYDWDQFKRAVNKALVRLPSQSPPPDELSQSPAFSKVLQNAIKYKQRQKDEYVGQDHILMALLDDSSIESILKECGIKKDVMEANITAVRGKRRIDSRTADGADEFEFLNKYAIDMTKQAREGKIDPVIGREEEIRRCIRVLARRTKSNPCLIGDPGVGKTSIVEGVAQRIIDGDVPNVLANCQLFSLDLGALKAGAKYQGDFEERIKGVLKEIEDSKDMIILFIDEIHMLMGDGKGDAANLLKPMLARGSLHCIGATTNEEYRKHVEKDAAFERRFQKIDVREPTIRETVAILRGIQNKYELHHGVRILDSALVSAAQLASRYLTYRKLPDSAVDLVDEAAAAVAVARDSRPEHLDSLERELDLLMIEVKALERDQHADQGTKERLDAAKHRVADIEEELGPLRETFERERAGHVELNNLKHKVDELETKALDAERRRDTSTAADLRYFAIPDLKKRIVELEEENAAKEKSMIKDVVGADQVAETAARLTGIPVTKLTQAENTKLINMEKVLSREVVGQPEAVKAVSNAIRLSRSGLANPNAPASFLFLGLSGSGKTELAKKLAGFLFADEQAMIRIDCSELMDKHSGSKLIGAAPGYVGYEEGGILTEALIRKPYSVVLFDEVEKAAPEVLTVLLQVLDDGRVRSSAGKVVNASNCIIIMTSNLGAEFINRSTSTTIDQSTRDLVMEAVKGHFRPEFLNRITAMVVFNRLSKKSIRRIINIRLHEISKRFEHNNRNLKLHLDEDAMDYLVENGYSPDLGARPLNRLIQNEVLNKLAVMLLKHQIKDGEEVRIIRGDKGLEILPNHDGETDMELAEDSYDDFDDEMDLD

SEQ ID NO: 6837 - DNA, 2349 bp, Yarrowia lipolytica CLIB122
  CDS (1)..(2349)
atgtttcgagtgaacgcaaagaacgtgcagcgattgagggcgcgacctctcgctcacgccagcacaaggacccaggtccagaccagagctttgagtactgctgttcgacctacgacctccgctactaccagctgctctacatggggcaccatcagaaccccgacgatgattcgggctccaggaagcctcggatcgccgagattcatcactatgacccagaaccccggtggcgaaaagtcgtacctggagtcgtacggagtggatctgtgcgaaaaggccaaggagggcaagctagatccggtgattggtcgagacgaggagatcaagcgaacgatccagattctgtctcgacgaacgaaaaacaaccccgcgctgattggtctggccggaaccggtaagaccgccatcatggagggtctggcccagcgaatcgtcaacggcgaggtgcccgagtccatgaagggcaagcgggtgatagctctggacgtggggggactcatttccggcgccaagtaccggggcgagttcgaggaacgtctcaagggcattctggaggagattgacaaggctgagggcgaggtgattctctttgtcgacgagttgcatctgctgctgggcctaggaaagggcgagggctcggttgacgcctccaacctgctcaagcccgctctgtcgcgaggtaagctgcagtgctgtggagccaccaccattgacgagtaccgaaagtacattgagaaggatgcggccctggctcgacgattccagtcggtcatggtcaacgagccctccgtggaagacgccatttccattctgcgaggtctcaaggagcggtacgaggtgcaccacggagtgcgactgaccgacgctgctctggtgactgccgccgtctactccaaccggtacatttccgaccggttcctccccgacaaggccattgatctggttgacgaggcttgttcggccctgcgacttcagcacgagtccaagcccgacgagctgcaggagctggagcgccagacggtgactctggagattgagctggagtcgctgcgagaggaggaggaccctctgtcggtggagcgacgaaagaaggtggaggagaagctcgaattcaagaagggcgagattgagcggctcaccaaggtgtgggaggacgaaaagcgggccattgaccagatcaaggagacccaaaagacccttgatggcgcccgaaccgatctcgacaccgccagacgaaccggcgactttgccgccgcctccaagatccagtaccaggacattcccgagctggagcggattctcaaggacgccgagtcctccgacgccggctcttcgtctcttttgcacgactctgtgacccccaatgacattgccaaggttgtttctcgaatgaccggcatccctacatcgtccatgatgaagggcgagaaggacaagctgctagatatggaggtgtgcatgaagtcacgtgttgtgggccaggacgaggccgtggacgctgtggctgacgcagtgcgactccaccgagccggtctcaccaaccagaagcgtccagtagcctcgttcatcttcctgggacccaccggtaccggtaagaccgagctgaccaagggtctggccgagtttctgtttgacgacgagaatgccatcattcggttcgatatgtccgagttccaggagcgacactccattgctcgactcattggttctccccccggctacgttggctacgaagagtctggagagctgaccgaaaaggtgcgacgaaagccctacgccgtggttctgtttgacgagtttgagaaggcccaccctgatgtgtccaagctgctgttgcaggtgctggatgagggtacgctgaccgactcgcagggccgaaaggtggactttaccaacaccattctggtcatgacctccaacattggccaggagtatctgatttcggactctcccgactccaagaagaaggtgattgaggcgctcaagtcgcactacgcccccgagttcatcaaccgaatcgacgagactctggtgttcaaccgactgaccaaggaggcgctgaccgagattatcgacatccggctgctcgaggtccaggctcgactcgaggacaagcgaatcacgctctttgtcgacgacgaggccaagcagttcctcgtcgaccacggctacgaccccatgtacggcgcccgacctctcaaccgactcatccagaagaaggtgctcaacccactggctctccatctgatccagggccgaacccgaaccggcgagaatgtgcacgtgactgttaaggacggcgacatttacgttcctgccaaccacgagactggagagattgaggagtga

SEQ ID NO: 6838 - protein, 782 aa, Yarrowia lipolytica CLIB122
MFRVNAKNVQRLRARPLAHASTRTQVQTRALSTAVRPTTSATTSCSTWGTIRTPTMIRAPGSLGSPRFITMTQNPGGEKSYLESYGVDLCEKAKEGKLDPVIGRDEEIKRTIQILSRRTKNNPALIGLAGTGKTAIMEGLAQRIVNGEVPESMKGKRVIALDVGGLISGAKYRGEFEERLKGILEEIDKAEGEVILFVDELHLLLGLGKGEGSVDASNLLKPALSRGKLQCCGATTIDEYRKYIEKDAALARRFQSVMVNEPSVEDAISILRGLKERYEVHHGVRLTDAALVTAAVYSNRYISDRFLPDKAIDLVDEACSALRLQHESKPDELQELERQTVTLEIELESLREEEDPLSVERRKKVEEKLEFKKGEIERLTKVWEDEKRAIDQIKETQKTLDGARTDLDTARRTGDFAAASKIQYQDIPELERILKDAESSDAGSSSLLHDSVTPNDIAKVVSRMTGIPTSSMMKGEKDKLLDMEVCMKSRVVGQDEAVDAVADAVRLHRAGLTNQKRPVASFIFLGPTGTGKTELTKGLAEFLFDDENAIIRFDMSEFQERHSIARLIGSPPGYVGYEESGELTEKVRRKPYAVVLFDEFEKAHPDVSKLLLQVLDEGTLTDSQGRKVDFTNTILVMTSNIGQEYLISDSPDSKKKVIEALKSHYAPEFINRIDETLVFNRLTKEALTEIIDIRLLEVQARLEDKRITLFVDDEAKQFLVDHGYDPMYGARPLNRLIQKKVLNPLALHLIQGRTRTGENVHVTVKDGDIYVPANHETGEIEE

SEQ ID NO: 6839 - DNA, 2784 bp, Aspergillus nidulans FGSC A4
  CDS (1)..(2784)
atgaacaccgacaagtacacagacaaggccaacaaggccttacaagatgcgctagaactcaccatcgaacactcgaacgccgaactataccctgttcacctcgcagttgctctccttgacccctcacaaaacgaagatgacgggccatcgctccacccctctcacggagattccacctctctcttccgccaagtcgttgaacgcgcgcatggtgacgttcagctcctccaccgtggtcttatgaaacggctcgtcaagcttccgagccaagaccctccgccagagactcgtagcatctctgcgcccttccgaaaagttctcacagctgcggccgatttgtccaaaacgcagaaggacagctacatcgccgtggatcatctgatccaagctgtatgccaggattcaaccgttcaagctgctctcaaagacgccaatgttccgaacgtcaagttgattgataatgctatccagcaaattcgaggtacaaggcgggtagattcgaagacggcagatgctgagagcgaaaatgaaaacctcaagaaattcacaatcgacatgacggcgctggcccgagagggtaaaattgatcctgttattggccgagaagaggagattcgtcgtgtgatccgtattctcagtcggcgaaccaagaacaacccggtactgatcggcgagcctggtgttggtaaaacaacaattgttgaaggactcgctcgtcggattgtcaatgcagacattccagctagtttgtctcagtgcaaacttctttctctcgatgtcggctcactggttgctggaagcaagtaccgcggcgaattcgaagagagattgaagggtgtcctcaaagagatcgaggagtccaaagaaacgatcgttctttttgtcgacgaaatccatcttctcatgggtgcaggcgctagcggcgagggtggaatggatgctgccaatttgttgaaacctatgcttgctcgcggacagctgcactgtattggagcaacgacgcttggtgaataccgaaagtacatcgagaaggatgccgcattcgaacgacgattccagcaagtgctcgttaaggagcccactgtctctgagaccatctcgattcttcgtggtttaaaggagaaatacgaggtccaccacggaagcgtgcgaattctcgatgccgctatcgtcaccgcagctacccttgctgcacggtatctcacggcccgtcgactgcctgattcggcggtcgatctcattgatgaggctgctgctgccgtcagggtagcccgcgaatccgaaccggaggctcttgataaccttgagcgtaagcatcgacagctccagatcgagattcatgctctcaagcgtgaaaaagatgaggcttccaaagcccgtcttcaggctgccgagcaggaagcggccaatgttattgaagagctgcggcctatgcgtcagaagtacgaaagtgaaaagcaacgtaacaaggccatccaggatgccaagactaaattggacaacctgaagaacaagcaagaggaagccgagcgatccggtgacaccgaaaccgcagcagatctgaaatattacgctattcctgagacccagcaacacattgaaatgctggagaagcaacgggctgaagctgatgaggagcgccgcaaccgtcagggcgatgctggagagccgctgctagctgatgaagtcggtcctgatcagattaacgagattgtcgctaggtggaccggaattcctgtgacaagactcaaaacctcagagaaggacaaactattggagatggaaaagcacctaggcaagatagttgttggccaaagggaggctgtgaagtctatctccgacgccattcgtctccaacggtctggcctcagcaaccctaattctcctccaagcttcctattctgcggtccgtccggtacgggtaaaacgctgcttaccaaagctttggcggagttcctctttgatgaccccaagtccatgatccggttcgatatgtccgagtatcaggagcggcactctcttagtcgcatgatcggcgcaccccctggctatgtcggccatgatgcaggcggccagctgactgagtcacttcgccgccgaccattctccatcctcctgttcgacgaggtcgaaaaggcagccaaggaggtgcttactgttctcctccagctcatggacgacggccgcatcactgacggccaaggcagagtcgtcgacgcccgcaactgcattgttgtgatgacatctaatctcggcgccgaatacctagcccgcccaacgaccaaggacggtaagatcgaccctcagacacgcgaactggtcatgggcgctctccgcaactacttcctccccgaatttctcaaccgtatctccagcatcgtcattttcaaccgcctcaccaagaaggaaatccgcaaaattgttgacctccggctcgatgaggtccagcgccgcctcgagcaaaatggccgcaacgtcgtcattgagtgtactgaagaggttaaggactatctcggccagtcaggctactcgccagcttatggtgcccgtccgctaggacgcatcatcgagcgcgaggtcctcaaccgcctcgccgtcctaattctgcgtggaagtatccaagacggtgaggttgctcgcgtagttatgcgcgatggccggattgacgttattcccaaccatgaaatggccattgatgaagaccaggacatgacagatgaggacgacttcgatgccatggccgaaatggaagacaacggcggagatatggatttgtacgagtaa

SEQ ID NO: 6840 - protein, 927 aa, Aspergillus nidulans FGSC A4
MNTDKYTDKANKALQDALELTIEHSNAELYPVHLAVALLDPSQNEDDGPSLHPSHGDSTSLFRQVVERAHGDVQLLHRGLMKRLVKLPSQDPPPETRSISAPFRKVLTAAADLSKTQKDSYIAVDHLIQAVCQDSTVQAALKDANVPNVKLIDNAIQQIRGTRRVDSKTADAESENENLKKFTIDMTALAREGKIDPVIGREEEIRRVIRILSRRTKNNPVLIGEPGVGKTTIVEGLARRIVNADIPASLSQCKLLSLDVGSLVAGSKYRGEFEERLKGVLKEIEESKETIVLFVDEIHLLMGAGASGEGGMDAANLLKPMLARGQLHCIGATTLGEYRKYIEKDAAFERRFQQVLVKEPTVSETISILRGLKEKYEVHHGSVRILDAAIVTAATLAARYLTARRLPDSAVDLIDEAAAAVRVARESEPEALDNLERKHRQLQIEIHALKREKDEASKARLQAAEQEAANVIEELRPMRQKYESEKQRNKAIQDAKTKLDNLKNKQEEAERSGDTETAADLKYYAIPETQQHIEMLEKQRAEADEERRNRQGDAGEPLLADEVGPDQINEIVARWTGIPVTRLKTSEKDKLLEMEKHLGKIVVGQREAVKSISDAIRLQRSGLSNPNSPPSFLFCGPSGTGKTLLTKALAEFLFDDPKSMIRFDMSEYQERHSLSRMIGAPPGYVGHDAGGQLTESLRRRPFSILLFDEVEKAAKEVLTVLLQLMDDGRITDGQGRVVDARNCIVVMTSNLGAEYLARPTTKDGKIDPQTRELVMGALRNYFLPEFLNRISSIVIFNRLTKKEIRKIVDLRLDEVQRRLEQNGRNVVIECTEEVKDYLGQSGYSPAYGARPLGRIIEREVLNRLAVLILRGSIQDGEVARVVMRDGRIDVIPNHEMAIDEDQDMTDEDDFDAMAEMEDNGGDMDLYE

SEQ ID NO: 6841 - DNA, 2403 bp, Aspergillus nidulans FGSC A4
  CDS (1)..(2403)
atggcgtcaaggctgcagttaagccgtagtcgattgctgcgcccatcaaacctcacgtacacaccttcgaaccgattagtgcgaccatgtccatcgttacgcatcctccctcgcgcgcggttaccctcactctcaacgaatattgccgcccctctatccagctctagcatcagaaactatgctagtggtcgaccgcaccctcccggtgggacgcatcggatgaatctgggcggcgagccggagaaggcagcattggaacagtatggcgtcgacttgacggccaaagccaaagccggcaagttggacccagtcatcggaagagactcagagattcatcggacaatccaagtgctatcgcggcggaccaagaacaatcctgtcctcatcggtgccgctggtactggaaaaaccgctgttttggaagggttggcgcaaagaatcgtgcaaggcgatgttccggagagcatcaaaggcaagcgcgtcattgctcttgaccttggatcacttattgctggagcaaaatttagaggtgactttgaagaacgattgaagtccgtcctcaaagaagttgaggaagctcaaggcggcgtcatcctgttcattgacgaacttcacactcttctcggacttgggaaagcagaaggaagtattgatgcgagcaatctgctgaagccagcactctcgcgtggcgaacttcaatgctgtggtgccaccaccttaaatgaataccgattgattgaaaaagacgttgctttggcaaggcggttccagcctattcaagtcggcgagccttctgtcgccgctactatctccattttacgtggtatcaaggacaaatacgaggtacaccatggtgtacgtattacggatggtgccttggttgctgctgcaacttatagcaaccggtacattaccgaccgattcctgcctgacaaggccatcgacctagtagacgaagccgcgtctgctttgcgtctgcagcaggagtctaagccagatatcatccgagagttggaccgtgatatcaccaccattcaaattgagctcgaatctcttcgcaaagaaacggacatcagcagtcgcgagagacgcgagaaacttgaagaagacctgaaagctaaacgggaggagtccagaaaattgacagaaatttgggaaaaggagaaggcggaaatcgagagtctcaaacgtactaaagaagagctagaacgcacccggtttgaactggagcaagcgcaaagagaaggaaactttgctaaggcaggagaactacgatactccaagatcccatcccttgaagcaaaactgccaaaggaaggagatgagcaaaaggatccacagtcaactcttatccatgactcggtcaccgctgatgacattggtgccgttgtttcacgaacaactggtatcccagtcagcaagctgatggctggagaagttgagaaactgatacacatggaagatacccttcggcagtctgttcgcggtcaggacgaagcgctgtcggctgtcgctaacgcagtccgtatgcaaagagcaggacttagtggcgaaaaccggccgctcgcgtctttcatgtttcttggtcctaccggtgttggtaagactgagctttgcaagaaaatggccgagttccttttctcgacggagaccgccgttgtacgattcgacatgagcgagtttcaagagaaacataccatcagccgcttaattggctctcctgctggatatgtcggctacgacgacgctggtcagctcactgaagctgtcagacggaagccgtatgccgttcttttgtttgacgaattcgagaaggctcatcgggatatctccgctctattgcttcaggttctagatgaaggcttcctcacagacgcgcagggtcacaaagtcgatttccggaatactcttattgttcttacgtctaaccttggcgccgaccttcttattggcgctgatcccattcattcgtccaaggcctcgactgatggggaaatcactccggagcttaaaaaggccgtcatggatgtcgttcagcaagcctatccgcctgagtttcttaaccgcatcgatgaattcattgttttcaagagactttcacgggaggctctgagggatattgttgatatcagaatcaaagagcttcagtcaagattggatgaccggcgtatgaccctccaagttgacgatgagatcaaggactggctctgcgaaaagggctacgaccctaaattcggtgcccggccgcttaaccgcttgatatcgaaagaaattggcaaccgcctggccgataaaatcatccgtggcgaggtcacatccggacagatggctcgtgtcgcattcaatgccaataacgatgggcttgaagttacagcggtcgcccagggcgaggaacaagcttaa

SEQ ID NO: 6842 - protein, 800 aa, Aspergillus nidulans FGSC A4
MASRLQLSRSRLLRPSNLTYTPSNRLVRPCPSLRILPRARLPSLSTNIAAPLSSSSIRNYASGRPHPPGGTHRMNLGGEPEKAALEQYGVDLTAKAKAGKLDPVIGRDSEIHRTIQVLSRRTKNNPVLIGAAGTGKTAVLEGLAQRIVQGDVPESIKGKRVIALDLGSLIAGAKFRGDFEERLKSVLKEVEEAQGGVILFIDELHTLLGLGKAEGSIDASNLLKPALSRGELQCCGATTLNEYRLIEKDVALARRFQPIQVGEPSVAATISILRGIKDKYEVHHGVRITDGALVAAATYSNRYITDRFLPDKAIDLVDEAASALRLQQESKPDIIRELDRDITTIQIELESLRKETDISSRERREKLEEDLKAKREESRKLTEIWEKEKAEIESLKRTKEELERTRFELEQAQREGNFAKAGELRYSKIPSLEAKLPKEGDEQKDPQSTLIHDSVTADDIGAVVSRTTGIPVSKLMAGEVEKLIHMEDTLRQSVRGQDEALSAVANAVRMQRAGLSGENRPLASFMFLGPTGVGKTELCKKMAEFLFSTETAVVRFDMSEFQEKHTISRLIGSPAGYVGYDDAGQLTEAVRRKPYAVLLFDEFEKAHRDISALLLQVLDEGFLTDAQGHKVDFRNTLIVLTSNLGADLLIGADPIHSSKASTDGEITPELKKAVMDVVQQAYPPEFLNRIDEFIVFKRLSREALRDIVDIRIKELQSRLDDRRMTLQVDDEIKDWLCEKGYDPKFGARPLNRLISKEIGNRLADKIIRGEVTSGQMARVAFNANNDGLEVTAVAQGEEQA

SEQ ID NO: 6843 - DNA, 2700 bp, Candida albicans SC5314
  CDS (1)..(2700): transl_table=12
atggaagattttacagataacgctatcaagattatcaataatgctactgaattggcaaaacaacaggccaattcgcaattgttaccccttcattttcttgctgcatttatcccatcagatgatactgaaggctcaacacagtatttgaaaacgttggtcaagagagcaagatacgaatggggcgatttcgaaagaatcgtgaacagacatttggttaaaataccatctcagaacccccctccagatgaaatacgaccaagctatcaagcaggccaggtgttaacgaaggccaacaaaatcaaacaacaacaaaaggactcatatgttgctcaggaccatattttgttggcgctcttggaggaccaatcaattaaagatattttcaaagaagctggtatgagtgttgacacaataaagacacaagctattgaattgagagggtcccaaaggattgactccagacaagctgattcgtcttcatcttatgaatttttgaacaagtattgtgaagattttaccgaaaaggctagggaaggtaagattgatcctgtaattggtagagaggaagaaattcgaagagtcatcagagttttggcaagaagaagcaaatcgaactcggtgttgattggtgatgctggtgttggtaagacttctattgttgaaggtgttgcacaaagaatagttgatggggacgttccaaatgttttggctggctcaagattatttgctcttgatttgggtgcattgactgcaggtgcaaaatacaagggtgagtttgaggaaagattgaaaggtgttttgaatgaaattgaaaaatccaaagagtttatcatcttgttcattgatgaaatccacatgttgatgggtgatggtaaatcagatgctgctaatttgttgaagccaatgttggccagaggtgcattacattgtattggtgctactacctttgctgaatacagaaagttcatttccaaagatggtgcatttgaaagaagattccaaaaaatcgatgttcctgccgccaccgtgcaagaaactgttgccattttaagaggtatccagcctaaatatgaaattcaccatggggtccgtatattggatagtgcattggtcactgctgctcagttggcttcaagatacttgacatacagagcattacctgattcagctgttgatcttgttgatgagagtgctgctgctgttgctgtggctagagactctaagccagaagagttggacactttggaaagacaattgcatttggtagatgtcgaaatcaatgcattagaaagagacaaagatgcagactctgcttccaaggaacgtttgaatttggccaaaaagaagaaagcagaattggaagaaaaaattggaccattgaacgagagatacagacaagaacgtgctagtcatgaacaattgactgctgccaaaagaaaattggatgaacttgagatcaaagctcaagatgctgaaagaagatacgatactgctactgctgctgacttgagatactttgctatcccagatatccagaagcaaattgaagagttagaagtcaaagttgctgaagaggaagcttctaatttggacagcttgttgaagaatgcagttggaccagaacaaatatgtgaaaccgctgctagattgactggtatccctgtcacgaaattgtcgcaagcagaaaacaataaattgatcaatatggaagcagaattgtcgaaagaagttgttggacaatcggaagctgtgaaggcagtctccaatgccatcagattaagaagatcgggtttggctaatcctaaccaaccaccatcctttttgtttttgggtctttctggttcgggtaagactgaattggctaagaagcttgctggttttctctttgcagacgaaaaggcaattattagaattgactgctctgaattgggagacaaatggtctgcttcaaaattgttgggtgctgctccaggttatgttggatatgaagaaggtggtatcttgactgagccattaatcagacggccatactctgtggtcttgttggatgaagttgaaaaagctgctcctgaagtgttgactgtgttgttacagattttggatgacggcagagttacctcttctcaaggtaagcttgttaactgctcgaatgccattttcataatgacgtctaatttgggtgcaaactacatcaatgccgccaagggaagcaagattgatgccaacacaaaggaacatgtaatggatgctgtgagagcacatttcagacctgaatttatcaaccgtatttccagtattgttgtgtttaacagattgtcgagaaaagccatttccaagattgtcaagatcaggttgtccgaaattgaaaacagattcactgctaatggtaaggctatacaattgaagctagatgatgatgccatggagtacttgtgcaagaatggatggtcacctgacttgggtgcaagaccattgaaccgcttgatccaaaacgagattttgaacaggttggctgtaatgttgttgaaagggcaaatccaagataaagaaactgctagagttgttcttggcgaaaaaggtttggagattttacctaaccatgaaccagaagatgtggaaatgaatgatgttgataactggcaagactcagaggatgaagatgatgacgaagccagattcacctcacctggacttgactaa

SEQ ID NO: 6844 - protein, 899 aa, Candida albicans SC5314
MEDFTDNAIKIINNATELAKQQANSQLLPLHFLAAFIPSDDTEGSTQYLKTLVKRARYEWGDFERIVNRHLVKIPSQNPPPDEIRPSYQAGQVLTKANKIKQQQKDSYVAQDHILLALLEDQSIKDIFKEAGMSVDTIKTQAIELRGSQRIDSRQADSSSSYEFLNKYCEDFTEKAREGKIDPVIGREEEIRRVIRVLARRSKSNSVLIGDAGVGKTSIVEGVAQRIVDGDVPNVLAGSRLFALDLGALTAGAKYKGEFEERLKGVLNEIEKSKEFIILFIDEIHMLMGDGKSDAANLLKPMLARGALHCIGATTFAEYRKFISKDGAFERRFQKIDVPAATVQETVAILRGIQPKYEIHHGVRILDSALVTAAQLASRYLTYRALPDSAVDLVDESAAAVAVARDSKPEELDTLERQLHLVDVEINALERDKDADSASKERLNLAKKKKAELEEKIGPLNERYRQERASHEQLTAAKRKLDELEIKAQDAERRYDTATAADLRYFAIPDIQKQIEELEVKVAEEEASNLDSLLKNAVGPEQICETAARLTGIPVTKLSQAENNKLINMEAELSKEVVGQSEAVKAVSNAIRLRRSGLANPNQPPSFLFLGLSGSGKTELAKKLAGFLFADEKAIIRIDCSELGDKWSASKLLGAAPGYVGYEEGGILTEPLIRRPYSVVLLDEVEKAAPEVLTVLLQILDDGRVTSSQGKLVNCSNAIFIMTSNLGANYINAAKGSKIDANTKEHVMDAVRAHFRPEFINRISSIVVFNRLSRKAISKIVKIRLSEIENRFTANGKAIQLKLDDDAMEYLCKNGWSPDLGARPLNRLIQNEILNRLAVMLLKGQIQDKETARVVLGEKGLEILPNHEPEDVEMNDVDNWQDSEDEDDDEARFTSPGLD

SEQ ID NO: 6845 - DNA, 2757 bp, Ustilago maydis 521
  CDS (1)..(2757)
atgtcgttcgagttcacagatcgcgcacagtcgtcggtctcggcagcgcttcagctcgccaaggaccactcgcatccacaagtgagccctgtgcatatcgccttggcactcttgaccgatgacacctctaactcgcaaggtgtccaatcgaccaacgaatcgagccagtcactcttcaagagcatctgctccaaggcaggtgtcgacatcaagatctttgaagacaagctccgcaccgcagttcgcaagattccgtcccaatccccacctcccgatgatattagcctctccaatcccgcgctcaaggtcctcaaagaagccgaaagccagaagagcacgcagcgagacgcgtacatcgcgcaagatcacatccttctagggctcatccaagacaacaccatcaagcaactgctcaaggaagcaggtctcgacaacgaacagcttatcaagaccgccatcactcaggcaagaggcggtcggcacattgatagcaagaacgcggaagcaggatatgacgctcttgcgaagtactgcaccgacctcacgcagctcgcagcagagggctctcttgatcccgtcatcggtcgtgatcaggagattcgacgagccgtccgagtgctctccaggaggacgaagaacaatgccgtgctcatcggcagtcctggtgttggtaagaccgccattgtcgaaggtcttgctcagcgtgtcgtcgaccgtgatgttccacccaaccttctgggtaaaatcctcagtctcgatgtcggcggcctcatggccggggccaagtaccgcggcgagtacgaggagcgtgtcaagtcggtgctcgccgacatcgaaaagatgaccgccgacggaaccccctgcattctctttatcgacgagatgcatcttctcatggctggccagggtagctcgggtggaggcatggacgctgccaatctactcaagcccatgcttgctcgtggtaagctccgcgtcattggctgcaccaccgccaacgagtacaggcagtacatcgagaaggatgcagccctagagcgacgattccaatcgatcctcgtcaacgaacctaccgtcgaggactgcatcgccattctccgtggtatccgcgacaagtatgaggtgcaccacggcgtccgcatccttgattccgccatcgtctctgccgcacagcttgccaagcgctacctcaccgatcgacgcctgcctgactcggccatcgacttggtcgacgaggcgtgtgccgatgtcagggtttcgagagaaacagtccctgaagaggtcgataagctcgagcgaaagcgtctccagctcgagatcgccgtacacgcactttcgcgagagaaggacgcgcaatccaagcagtcgctcgaggagaccaagaagcagatccaggccatcgacgacgagctcgctcccatcaaggcggctttcgaagcgcagaaggccaagggtgaagagatcaacacggttcgacgcaagatggaggaggtgcgtgccaagattgccgaagctgagcgtcgctacgatctcgccaccgcctctgatctcaagttttacgcgctgcccgatctcgaggccaagctgaatcagctgcaggctgccgaacgtaagcgcgaggaggaaggtctcaactcggacaataacgctgtcaccgccgactcgatcgccgcgattgtctcgcgctggacaggcatccccgtgtcgcgcatgctcgagtccgaaaagaacaagttgctgcgtctcgaacgcacgctcgccaaggaggtcattggtcaggacgaggcagtcaagagcgttgcgcaggccatccgactgtcgcgctccggtcttgctgacgccaatcgtcctatcgcctcgttcctctttgctggatcttccggttccggcaagacgctgctgagccgtacgcttgccaagtgcatgttcgactcggccgacgccatggtgaggatcgactgcagcgagttttccgagaagcactcgatctcacgtctgatcggtgcgccgcctggctacgtgggacacgaagaaggtggcgtgctgacggaagcggtacgtcgcaagccgttcagcattgtgctactggatgagatcgaaaaggcagcgcgcgagttcattcagctcttcctcggtgtgctcgacgagggtcgtttgcaggacagccagggccggcaggtgtcgttccgcaacacgattatcatcatgacgtccaaccttggctcggcgtacatcaacgagtcggaggtcgaagagatgacagatgctacgcgccaactggtgatgaacagcatcaaagctgcgatgccgaccgagtttgtcaaccgaatcgacagcatcgtggtgttcagcaagctttcgcgtcgcaacgttaagtcgatcgtcgatgttcgactgcgcgagatcgagcagcgcatccaggcgaacggaggcaagtccaagttggtgctcgacgatgcggccaaggactttttggtctcgatcggcttttcgcctaccatgggcgctcgtccgctcaaccgtgcgattcagcaggagctgctctcgcctctgtcgatcctgatcctgtccggcaggatcaacattaaagacgatgccgagatccgcgttcagttcgatccgcacaggaacgggttggtcgtgctgcctaaccacgagggcaatgcgaatggtgtcgaggacgagcccatgtcggacgacgacgatgacctcgatgactatgggcatgccaagatcgaagaagatccgctcgactga

SEQ ID NO: 6846 - protein, 918 aa, Ustilago maydis 521
MSFEFTDRAQSSVSAALQLAKDHSHPQVSPVHIALALLTDDTSNSQGVQSTNESSQSLFKSICSKAGVDIKIFEDKLRTAVRKIPSQSPPPDDISLSNPALKVLKEAESQKSTQRDAYIAQDHILLGLIQDNTIKQLLKEAGLDNEQLIKTAITQARGGRHIDSKNAEAGYDALAKYCTDLTQLAAEGSLDPVIGRDQEIRRAVRVLSRRTKNNAVLIGSPGVGKTAIVEGLAQRVVDRDVPPNLLGKILSLDVGGLMAGAKYRGEYEERVKSVLADIEKMTADGTPCILFIDEMHLLMAGQGSSGGGMDAANLLKPMLARGKLRVIGCTTANEYRQYIEKDAALERRFQSILVNEPTVEDCIAILRGIRDKYEVHHGVRILDSAIVSAAQLAKRYLTDRRLPDSAIDLVDEACADVRVSRETVPEEVDKLERKRLQLEIAVHALSREKDAQSKQSLEETKKQIQAIDDELAPIKAAFEAQKAKGEEINTVRRKMEEVRAKIAEAERRYDLATASDLKFYALPDLEAKLNQLQAAERKREEEGLNSDNNAVTADSIAAIVSRWTGIPVSRMLESEKNKLLRLERTLAKEVIGQDEAVKSVAQAIRLSRSGLADANRPIASFLFAGSSGSGKTLLSRTLAKCMFDSADAMVRIDCSEFSEKHSISRLIGAPPGYVGHEEGGVLTEAVRRKPFSIVLLDEIEKAAREFIQLFLGVLDEGRLQDSQGRQVSFRNTIIIMTSNLGSAYINESEVEEMTDATRQLVMNSIKAAMPTEFVNRIDSIVVFSKLSRRNVKSIVDVRLREIEQRIQANGGKSKLVLDDAAKDFLVSIGFSPTMGARPLNRAIQQELLSPLSILILSGRINIKDDAEIRVQFDPHRNGLVVLPNHEGNANGVEDEPMSDDDDDLDDYGHAKIEEDPLD

SEQ ID NO: 6847 - DNA, 2505 bp, Cryptococcus neoformans var. neoformans B-3501A
  CDS (1)..(2505)
atgctcgcacgaaaacatctcataagaacagcacgcctatctatcccacgcccttcagtcgccacccgcgccgtcgctttaggatttgtccgtacctatgcccaaggtcctccacgtcctccgcccggcggcccaggtggtccacccggtggcggctttggcggaatgcgctttcccgggggaggcatgatgggccagcaacctgaaaagggcgagacactgaagcagttctccatcgaccttactaagctggcaagggatggcaaactcgaccctaccattggaagagacgaggagattagaaggactatccagattttgagtaggagaactaaaagtaacccggtattgcttggtcttcccggtgttggaaagactgcgatcttggaaggactggctacgcggattgtgaataaggaggtgccagagtcattacatggcaaacgtctattaactctcgacttgtcatcacttatggccggtaccggcgttcgaggagaatttgaatctcgatttaagtcactcctcaaagatattgaggaagaagagggcaacgttattgtctttatcgacgagctccatacacttctcaaccttggtaaagctgaaggctctcttgatgctggtaacatgatcaagcctgccctcgcccgtggtcttcagcttgttggcgccactacacttgacgagtaccgcaagtctattgaaaaggacgcagctcttcaacgacgtttccaacccatcatgattaacgagcctagtgttgagtcgaccatttcaattctgcgaggtttaaagtcaagatttgaagtacactttggtgtgcagatagccgactctgccttagttactgccgccgtctattcagacagatatatctctgatagattccttccagataaggccattgaccttgtcgatgaagcctcatctgccctcaaactcgcccaagaatcacgacctaccgaacttgaaaagctcgatcgagaaattgtcactcttgagattgagagagaatccctcaagaatgaagaggaccctttttcagtcagtcggatggagaaagtagaaaaggaattggaggagaagaagcaagaacaacgacgtctggcggatctttgggctcaggaaagagaacgtgtagcggagatcaagggaattaaggaacagattgagcaggccaacgttgatttggaaaatgcgcagagaaatggggagtttgaaaaggcgtccaaattgagattctcgacaattccccagctgcaggccaagttacccaaggctcaggcagagttgaaatcggaaaatgaagaagaacctggtatggccgtccgtgatagggtgacaagtgaggatatcgcagttgtggttgccaagtcgactggtattcctgttgccaatctcctcaagggcgagcgtgaacgtcttgtacatatggaagaatctctcaaacaacgcgtcgttggccaagatcaggtcattcacgccgtggctgatgccgtccgactttctcgagcgggtcttcaagcgcctacccgacctcttgcttcattcttgttcctcggtcctactggtgtaggtaagactgaacttacgaagagtcttgccgagtttttatttgccgatgaaaagagggctttgatccaactcaacatgtctgaattccacgataaacacactgtatcccggcttatcggtgcgactgccgggtttgtcggctatgaagaaggtggtcagttgactgaagccgtccgccgtcgaccatacgctgtcgtagtatttgacgagattgaaaaggcacaccctgatgttgccaacattctcctgcagatccttgatgaaggttgtttgaccgacggtcagggtagactggtcaatttcaagaacacgattatctgtttgacttccaatcttggatcagaagcgctctatgagcctgacgcgactcatcccgatgggtccattaccgaagccacccgggcctctattctctcccatgttggtcgcttcttccgtcctgagctggtcaatcgtctcgacgaacttctcatcttcaacaagcttccgccttccgtcatccttgatattgtttctcttcgactcagtgagcttcagtctagacttgatggacgacgtatcactttggaagtaagtgatgacgcgagagcttggctggcgaagaagggattctctgaagaatatggcgcgcgggctgttggaagggttgtaagagatcaagtgatcagcaaggtggctggcagattgttggatggtacgatcaaggatggagacattattaatattaggttggaaggggagagactggaaatctcgagtgcgcctaatcccaacattcctcatccctctcaagaaggtggcgatcatattagtccgtctgccagaggagcgtctacagaggcagagtctaggccattgaatatcctcgaggacggggtggaggaggaaggggatgaagatatcccgagaaggacggtttattactaa

SEQ ID NO: 6848 - protein, 834 aa, Cryptococcus neoformans var. neoformans B-3501A
MLARKHLIRTARLSIPRPSVATRAVALGFVRTYAQGPPRPPPGGPGGPPGGGFGGMRFPGGGMMGQQPEKGETLKQFSIDLTKLARDGKLDPTIGRDEEIRRTIQILSRRTKSNPVLLGLPGVGKTAILEGLATRIVNKEVPESLHGKRLLTLDLSSLMAGTGVRGEFESRFKSLLKDIEEEEGNVIVFIDELHTLLNLGKAEGSLDAGNMIKPALARGLQLVGATTLDEYRKSIEKDAALQRRFQPIMINEPSVESTISILRGLKSRFEVHFGVQIADSALVTAAVYSDRYISDRFLPDKAIDLVDEASSALKLAQESRPTELEKLDREIVTLEIERESLKNEEDPFSVSRMEKVEKELEEKKQEQRRLADLWAQERERVAEIKGIKEQIEQANVDLENAQRNGEFEKASKLRFSTIPQLQAKLPKAQAELKSENEEEPGMAVRDRVTSEDIAVVVAKSTGIPVANLLKGERERLVHMEESLKQRVVGQDQVIHAVADAVRLSRAGLQAPTRPLASFLFLGPTGVGKTELTKSLAEFLFADEKRALIQLNMSEFHDKHTVSRLIGATAGFVGYEEGGQLTEAVRRRPYAVVVFDEIEKAHPDVANILLQILDEGCLTDGQGRLVNFKNTIICLTSNLGSEALYEPDATHPDGSITEATRASILSHVGRFFRPELVNRLDELLIFNKLPPSVILDIVSLRLSELQSRLDGRRITLEVSDDARAWLAKKGFSEEYGARAVGRVVRDQVISKVAGRLLDGTIKDGDIINIRLEGERLEISSAPNPNIPHPSQEGGDHISPSARGASTEAESRPLNILEDGVEEEGDEDIPRRTVYY

SEQ ID NO: 6849 - DNA, 2697 bp, Cryptococcus neoformans var. neoformans B-3501A
  CDS (1)..(2697)
atggacaactttacagacaagtcctcagaggtcttgaaggccgccctcgacaaagcggcggagatggcgaacgctcaagttcacccattacatcttatatccgtcctctgggaggaaccaaaccagccttctagtggccctgaccagcccactttactcaaagccgctcttgaacatgttggcggtaatcccacccttttcaaccgtgctctcatgcacaagataaaccgattacccgttgtcgaccctcctccatcaccccctctgccccttgccaactccttcaatgctgttatacgggaagctcagaaattgcagaaggaccaaaatgaccagtttgtcgctgtcgaccaccttctcctcgcgttgcttcgcaccgatgcctccgatatgaaggagttgttgagaggtacgggtgctgagccgagagccctggaagcagagatcaagagaaaaagaggtggaaggaaggtcgacagcaaaggtgctgagggacagttcgatgctcttaataaatactgcgtggatcttaccgctctagcagagcaaggtaagcttgaccctgtgatcggtcgagacaacgaaatccgccgtgttattcgaattctctccaggcgcaccaagggtaaccctgtcctcattggggagcctggtgtgggtaagacggccattgccgaaggtcttgcccagcgaattgtcgaccgagatgtcccggcaagcttgatcagtcgtctacttgcccttgacatgggtgctctgatggctggcgccaagtacaagggcgaatacgaggagcgtgtcaaggccgttctcagcgaggttgaaaagtctggggatgaaggcacgcagattatcctctttattgatgaaattcacctgattatggccgggaaagattcaagcggcggtatggacgctgccaacttactcaaaccaatgttggctcgagggaagctcaaggtcattggtgctactactctgaacgagtaccgagaatacatcgagaaggattctgcctttgagcgtcgattcgctcaagtcatagttgacgaaccttctgttccagacaccgttgcaattatgcgtggtattcgcgaaaaatatgaaacacatcatggtgtccgtatcatggactctgcccttgtccttgctgcccaacttgccaaacaatatcttacagcacgacgcttgccagactctgccatcgatcttctcgacgaagcagccagtgctgtcaaggttgcccgcgaaacccgcccggaagccattgacgagcttgaacgcaaaaagcttggtttagaggtcgagatccatgcccttgagcgagagaaggacgaggcctccaaggaaagattggaagtagctaaaaaggctatcgccgacttggaagacaagctggggcctttgaaacgggaatatgagaacgacaagcatctgggagatcagattcatgagctgaggaggaagattgatgagctgcgaaccaaggctgatgaggcagaaagaaggtacgaccttgctacagctgccgacattcgataccactctattccccaacgtgaacaaaagcttcaagagttggagcagaaagaagctgagaagggttcgggtcagcaagtcgctccagagatgattgctgaggttgtggctcggtggactggagttcccgtgtcccgattggtcgaaaccgaaaaggccaaactcctccgccttgagaaattgatctccaaaaaggtcattggtcaaccagaggcggtcaagtctgtcgctaacgccattcggctcaatcgatccggccttggtaatcagaatcgccccattgcctcattcttgctagttggtccatctggtaccggcaaaacattgcttgccaagacattggcgggtgttatgttcaacagcgaggatgcaatggttcgtatcgatgcttccgagtactctgagaagcatgccatctcgcgtctcattggtgccggtcctggatacgtcgggcatgaggctggtggccagctgactgaggctgtcaggcgcaagccgtactccctcatcctcattgacgagatcgaaaaggcagcgcgcgaattccaccagctcttcctgcaagttctcgatgatggtcgtcttaccgatggcaaaggccgggtagttgacttccgcaacactatcgtcatgatgacttccaatgtcggctctatgtatctcaatgagcacccctcggagggagcagtcgatcctgctgttcgtgccaaggtcaatggggctatcgctaagactttccctccggagttcatcaacagaattgacgacatcattctataccgatcattgagcagagcggacattaggaaggtcgttgatgttagattgaaggaaattcagcaaaggttgttggataacaacaggaaaatcaagcttgatgtcgatgatccttcctgcgagtggttggctcaagctggatactctccgacgtacggtgctcgacccatggctcgtcttatccagaccgaaattctcaatcctctctcgcgactcttgctccaagggcgtgtgcgagacggtgaagttgcccacatcacggtcgaccttcggaagaacaggttggttgtgattcccaaccatgaacccgacgttatccagccggatgatagtgaagatgaggatgattcaatggatattgaggtggaagaaatggattaa

SEQ ID NO: 6850 - protein, 898 aa, Cryptococcus neoformans var. neoformans B-3501A
MDNFTDKSSEVLKAALDKAAEMANAQVHPLHLISVLWEEPNQPSSGPDQPTLLKAALEHVGGNPTLFNRALMHKINRLPVVDPPPSPPLPLANSFNAVIREAQKLQKDQNDQFVAVDHLLLALLRTDASDMKELLRGTGAEPRALEAEIKRKRGGRKVDSKGAEGQFDALNKYCVDLTALAEQGKLDPVIGRDNEIRRVIRILSRRTKGNPVLIGEPGVGKTAIAEGLAQRIVDRDVPASLISRLLALDMGALMAGAKYKGEYEERVKAVLSEVEKSGDEGTQIILFIDEIHLIMAGKDSSGGMDAANLLKPMLARGKLKVIGATTLNEYREYIEKDSAFERRFAQVIVDEPSVPDTVAIMRGIREKYETHHGVRIMDSALVLAAQLAKQYLTARRLPDSAIDLLDEAASAVKVARETRPEAIDELERKKLGLEVEIHALEREKDEASKERLEVAKKAIADLEDKLGPLKREYENDKHLGDQIHELRRKIDELRTKADEAERRYDLATAADIRYHSIPQREQKLQELEQKEAEKGSGQQVAPEMIAEVVARWTGVPVSRLVETEKAKLLRLEKLISKKVIGQPEAVKSVANAIRLNRSGLGNQNRPIASFLLVGPSGTGKTLLAKTLAGVMFNSEDAMVRIDASEYSEKHAISRLIGAGPGYVGHEAGGQLTEAVRRKPYSLILIDEIEKAAREFHQLFLQVLDDGRLTDGKGRVVDFRNTIVMMTSNVGSMYLNEHPSEGAVDPAVRAKVNGAIAKTFPPEFINRIDDIILYRSLSRADIRKVVDVRLKEIQQRLLDNNRKIKLDVDDPSCEWLAQAGYSPTYGARPMARLIQTEILNPLSRLLLQGRVRDGEVAHITVDLRKNRLVVIPNHEPDVIQPDDSEDEDDSMDIEVEEMD

SEQ ID NO: 6851 - DNA, 2592 bp, Prochlorococcus marinus str. NATL1A
  CDS (1)..(2592): transl_table=11
atgaaggtaaatcctgatgatttcactaacattgcttggcaagggattattgatgcaaaagatttagcattaactgaaaaacatcagactttagagacagaacatcttttttggtcccttctaaagaaaaatgaaatagcaataaaaataatagaaagatcaggcggagtaataaaaaatctactcacagaaatagagaatttcataaagaaccaaccaaaaatgctacaggcccaagaatctattttctttggcaaaaatatatctttatcaatttcaagagcaaaaaacattcaacaatctttcaaagatgattttatttcaagcgaacatttagtgatttccctatttgatgacgagagaatttgtaataggttatttggacaaaatcatgtcgacaaaaacagccttcttgaggctataaatgttcttagaggtgacaaaaaagtgacccagaaaaatgctgagaatagctacgaagctcttcaaaagtacggattagaccttacttctgccgccagagatggaaaattagatcctgtaattggaagagatgaggagatacgaagaacgattcaaatactaagccgcagaaccaaaaataatcctgtgttaattggagaagctggcgttggcaaaacagcaattattgagggtttagcacaaagaattatcaacggtgatgttcctacagctcttgagaaccgtcaactaatttctttagacatgggggcactaatagcaggtgcaaaatttcgtggtgaatttgaagagagacttaagtcagttcttaaaaatgtcacagattcagaagggaaaataattttgttcatcgatgaaatacatactgtcgtcggagcaggagcgagtggtggagctatggacgctagcaatctcctaaaaccaatgcttgctagaggtgaactgagatgcattggagcaacaaccataaatgaacatagagaaaattttgagaaagaccctgcgctggaaagaagatttcagcaaatacttgtaaaacaaccctcagtccaagatacaatttcgatcttacgtggactaaaagaaagatatgaagtccatcatggtgttcgtatctctgataacgctctaatagctgcggcgatattgagcgatagatatataccagagaggtttttacctgacaaagcaattgatctaatagatgaatcagcctcacgtttaaagatggaaataacatcaaaaccagaagaaattgacgagattgatagaaaaatcatccaacttgagatggagaaattatctttagaaggtgagtcagacacatcaagtaaagagagattagaattaattactacagaactagcattgctaacaaaaaatcaaattgaagtaacaaaaaaatggaaacaagaaaaagaatcaatcgaagaaatttcaacacttaaagaagacattgagaaagtacaactagaaatagaaaaagcaaaaagaaattatgacctaaatagagctgctgaacttgaatacggcacccttgtgaattatcaacaaaatttaaaatctaaagaacttaatctaaaaaattccactgaaaatgcggaaaaatcacttttgagagaagaggttttagccgatgatgtagctgaaataattgcaaagtggacatctattcccgttaaaagattggctcaaactgaaattgaaaaattactcaatcttgaatctcagcttcaaaaaagagttattggtcaagataaagccgttcaatcaatatcttctgcgatacaaagatctaggacaggacttagtgatccaagcagaccaatcgcaagttttttatttttaggaccgacaggcgtggggaagacagaattgtccaaggctttggcttctcaactttttgatagtgaaaatgccttaatcagaatagacatgtctgaatatatggaaaagcactctataagtcgcttaattggcgctcctcctggttacgttggttacgaagcaggtgggcaattaacagaagcaatcagaagaaaaccttattgcgttttgctcttcgatgaaattgaaaaagcacataaagatgttttcaatgtattgcttcagatacttgacgaaggccgagtaactgatggacaaggtagaacaacaaatttcaaaaacactattattattctcacaagtaatttaggaagcgaattaatctctgataatgatgtaactaatgatccgtcgacaaatatagatgaacttattaatcaagagctgaaatcaaatttcaggcctgagttcctaaacagacttgatgaaataattaattttgaaccactaaaaaaagaaacactacttaaagtagtcgatttacaattaaaccgtttaagagaaaggttagaagctaaaggaatcgagcttgaaattaatgatgatgtcctatctttgattactgaacttggatacaacccaagctatggtgctaggcccttaaaaagagttattcaaaaagaattagaaagtgaaatagcaaaatatattcttaaaggcaaatataaagaaggaagcactataaagattgagagtaaagaatcaaaattaattttccactaa

SEQ ID NO: 6852 - protein, 863 aa, Prochlorococcus marinus str. NATL1A
MKVNPDDFTNIAWQGIIDAKDLALTEKHQTLETEHLFWSLLKKNEIAIKIIERSGGVIKNLLTEIENFIKNQPKMLQAQESIFFGKNISLSISRAKNIQQSFKDDFISSEHLVISLFDDERICNRLFGQNHVDKNSLLEAINVLRGDKKVTQKNAENSYEALQKYGLDLTSAARDGKLDPVIGRDEEIRRTIQILSRRTKNNPVLIGEAGVGKTAIIEGLAQRIINGDVPTALENRQLISLDMGALIAGAKFRGEFEERLKSVLKNVTDSEGKIILFIDEIHTVVGAGASGGAMDASNLLKPMLARGELRCIGATTINEHRENFEKDPALERRFQQILVKQPSVQDTISILRGLKERYEVHHGVRISDNALIAAAILSDRYIPERFLPDKAIDLIDESASRLKMEITSKPEEIDEIDRKIIQLEMEKLSLEGESDTSSKERLELITTELALLTKNQIEVTKKWKQEKESIEEISTLKEDIEKVQLEIEKAKRNYDLNRAAELEYGTLVNYQQNLKSKELNLKNSTENAEKSLLREEVLADDVAEIIAKWTSIPVKRLAQTEIEKLLNLESQLQKRVIGQDKAVQSISSAIQRSRTGLSDPSRPIASFLFLGPTGVGKTELSKALASQLFDSENALIRIDMSEYMEKHSISRLIGAPPGYVGYEAGGQLTEAIRRKPYCVLLFDEIEKAHKDVFNVLLQILDEGRVTDGQGRTTNFKNTIIILTSNLGSELISDNDVTNDPSTNIDELINQELKSNFRPEFLNRLDEIINFEPLKKETLLKVVDLQLNRLRERLEAKGIELEINDDVLSLITELGYNPSYGARPLKRVIQKELESEIAKYILKGKYKEGSTIKIESKESKLIFH

SEQ ID NO: 6853 - DNA, 2592 bp, Prochlorococcus marinus str. MIT 9303
  CDS (1)..(2592): transl_table=11
atgcaacctacggcggatcaatttaccgaaaaaggctgggcagcaatcgttttggcccaacaacttgcccagcaacgcaagcaccagcaactggaaacagagcatttgttgttgtcactgctagagcaaaatgctttggcaggaagaatcctagaaaaagcaggtgtgtcgatcggcaacttgcaaacagccgtggaggcacacctgcatgaacagcccactctgcaggcagcgccagactctgtctatctgggcaaaggagtcaatgatctgctcgatcaagctgataaacataagcaagcttttggcgatggtttcatctcaattgaacatctgttacttgcattggccggggacaatcgttgcggccgcaagctgctcaatcaagcgggcgtggatgcgggcaaactaaaggttgcaattgacgcggtacgcggaaaccagaaggtgaccgatcagaacccagaaggaacttacgaatctctcgaaaaatatggcagagacctgactgctgctgctcgcgaaggcaaactcgaccctgtcatcggaagggacgatgagattcgacgcacgattcagattcttagtaggcgcaccaaaaacaaccctgtcctcattggggagccaggggtgggaaaaaccgcaattgttgaaggcctcgcacaacggattgttaatggcgatgtacctgcagcccttcagaacagacagttaatcgcccttgatatgggtgctttgattgcaggggcaaaatatcgaggtgaattcgaagagcgactcaaggcagtgctcaaagaagttaccgcctctgaaggacaaatcgtactttttattgatgaaatccataccgttgtaggagctggagctaccggtggggcaatggatgccagcaatctgcttaagccaatgctggctcgaggggaactgcgctgcattggtgcaacgaccctcgatgagcaccgacagcacatcgaaaaagaccccgctttagaaagaagattccagcaagtgcttgtggatcaacccaccgtgcaagacacgatctccatcctgcgtggtctcaaagaacgctacgaagtgcatcatggtgtgcgcattgctgataacgccctggttgctgcagctgtgctcagtagccgatatattgccgatcgttttttgccagataaagccatcgatttgatggatgaatctgctgcacgactaaaaatggaaatcacctccaagccggaggaaatcgatgaaatcgatcgcaagattgtgcagctcgagatggagaagctttccttaggacgtgagtccgactccgttagtaaggaaagattggaaaaactagaacgcgagcttgctgaattagcagagcaacaaagtgcgctcaatgcacagtggcaacaagaaaaaggtgcgattgacgacctttcttcgctcaaagaagaaatcgaaagggtgcaattgcaagttgagcaagccaagcgcagctacgacctcaacaaagcagctgaactggagtacggaactctggcgggattgcagaaacaactcagcgagaaagaaactgccctggcccaagatggagaggcaggcgataaatcactgctgcgagaggaggttacggaagacgatattgctgatgtcatcgctaaatggaccgggattcctgtcgccaagcttgtgcagtcggaaatggaaaagctgctgggacttgaagcagaactccaccaacgtgtgattggccaagaacaggctgtgcaagctgttgcggatgcgattcagcgttctagggcaggtttaagtgatcccaaccgcccgatcgcaagttttttatttctaggccccactggtgtaggtaaaacggagctatccaaggcattggcctctcaactgtttgacagcgaggcggctttggtgcgaatcgatatgtctgagtatatggagaagcacagtgtaagcagactgatcggggcacccccgggttatgtcggctatgaggctggtggacagctcaccgaagccgtacgcagacgcccttatgcggtaatcctgttcgatgaagtggagaaggcacacccagatgtgttcaatgtgatgttacagatcctcgatgatggacgtgttaccgatggtcagggtcgcacagttgattttacaaatacggtgctaattcttaccagtaatattggcagccagtcgattctcgacttgggaggcgatgatagtcaatacggggaaatggagcgtcgagttcatgatgctttgcacgctcattttaggcctgagtttctcaaccgcctggatgaaacaatcatctttcatagcctcaggcgcgaggaactgcgtcagatcgttgcccttcaggtcaatcggctgcgtgagcgtcttggcgatcgcaagcttggcctagagatcagtgatacagcagctgattggctcgctaatgctggctatgaccctgtttatggggccagacccctcaagcgagcgatccaacgcgagcttgaaactccaatagccaaaagtatcctggctggcttttatggagatagtcagattgtgcatgtggatgtggacgaggagcgtctgagctttcgataa

SEQ ID NO: 6854 - protein, 863 aa, Prochlorococcus marinus str. MIT 9303
MQPTADQFTEKGWAAIVLAQQLAQQRKHQQLETEHLLLSLLEQNALAGRILEKAGVSIGNLQTAVEAHLHEQPTLQAAPDSVYLGKGVNDLLDQADKHKQAFGDGFISIEHLLLALAGDNRCGRKLLNQAGVDAGKLKVAIDAVRGNQKVTDQNPEGTYESLEKYGRDLTAAAREGKLDPVIGRDDEIRRTIQILSRRTKNNPVLIGEPGVGKTAIVEGLAQRIVNGDVPAALQNRQLIALDMGALIAGAKYRGEFEERLKAVLKEVTASEGQIVLFIDEIHTVVGAGATGGAMDASNLLKPMLARGELRCIGATTLDEHRQHIEKDPALERRFQQVLVDQPTVQDTISILRGLKERYEVHHGVRIADNALVAAAVLSSRYIADRFLPDKAIDLMDESAARLKMEITSKPEEIDEIDRKIVQLEMEKLSLGRESDSVSKERLEKLERELAELAEQQSALNAQWQQEKGAIDDLSSLKEEIERVQLQVEQAKRSYDLNKAAELEYGTLAGLQKQLSEKETALAQDGEAGDKSLLREEVTEDDIADVIAKWTGIPVAKLVQSEMEKLLGLEAELHQRVIGQEQAVQAVADAIQRSRAGLSDPNRPIASFLFLGPTGVGKTELSKALASQLFDSEAALVRIDMSEYMEKHSVSRLIGAPPGYVGYEAGGQLTEAVRRRPYAVILFDEVEKAHPDVFNVMLQILDDGRVTDGQGRTVDFTNTVLILTSNIGSQSILDLGGDDSQYGEMERRVHDALHAHFRPEFLNRLDETIIFHSLRREELRQIVALQVNRLRERLGDRKLGLEISDTAADWLANAGYDPVYGARPLKRAIQRELETPIAKSILAGFYGDSQIVHVDVDEERLSFR

SEQ ID NO: 6855 - DNA, 2595 bp, Clostridium difficile 630
  CDS (1)..(2595): transl_table=11
atggacgtagaaaaaatgactttaagagttcaaaaaagtttaaatgaggcttataacgaagcagtaaaaaatcataaccaacaagtagatgtaattcatcttttctcagcacttattaatcaagaggatggattgataccaaatataatcgaaaaaatgaatatatcaattgattctttgagaaatactgtaaactttgaaattgataagcttccaaaggtatatggagaaggtgctgactcacaaggagtatcagctactagaaaaataaatgaggtgcttataaaggcagagagtatttctaaagaatttaaagattcatatataagtgtagagcatgttatgcttgcaatgatggaaacagaatcaaaatcagctgttggtaaaatattaaaacaatataatataaataagaatgactttttaaatattttatcacaagtgagaggtagtcaaagagtagaaacacaagacccagaaggcacatatgatgcacttgctagatatggaacaaacttagtagatttagccaagaaaaataaattagaccctgtaattgggagagatgaagaaataagaaggattataagaattttatcaagaagaacaaaaaataatcctgtattgattggtgagccaggtgtaggtaaaactgcaattgtagaagggttagcagagagaatagtaagaggagacgtcccagaaggtttaaaagataagattgtattctcacttgatatgggagctttaattgctggtgcaaaatatagaggtgaatttgaagaaagattaaaggcagttttaaaagaagttcaaagttctgatggaaaaattatactgtttatagatgagattcatactattgttggagctggtaaaacagaaggttcaatggatgcaggtaatcttattaaacctatgcttgcaagaggtgaattgaactgtattggtgcaactacttttgatgaatatagaaagtatatagaaaaagataaggctcttgaaagacgttttcagcctgtaattgcagaagaacctactgttgaagatacaatatctatacttagaggtttaaaagaaagatttgagatacatcatggagtaagaatacatgataatgctattgtagcagcagcaaaactttctcatagatatatacaagatagatttttaccagataaagcaattgatttaattgatgaagctggagctatgattcgtagtgaaatagattcattgccaacagaattagatgttgttagaagaaagttatttacattagaaactgaaagagaagcattacttaaagaaaatgatgataaaagtaaatcaagattggatgatattcaaaaagaaatagcagagttaaaatctaaaaatgatgaaatgacagcaaaatatgaaaaagaaaagagtcaaatattagatattaaaaacttaaaggctcaattagacgaagctaaaggtaaagctgaaaagtatgaaagagaatatgatttcaacaaagcagcagaggttaaatatggggaaatacctaagttagaagaacaaataaagcagtacgaagaaaatatgaatgatggttctgaaaattctcttttaaaagaagaagttactgaagaagaaatatctagcattgtatcaaagtggacaggtataccagtaactaaactagttgaaggagaaagagaaaaattacttaaactagaagatgaacttcataaaagagttattggacaagatgaagcagttacagcagtttcaaatgcagtaatacgtgcaagagcaggattaaaagatgaaagaaaaccaattggttcatttattttcttaggccctacaggtgttggtaaaactgaacttgcaaaaactcttgctagaaatttattcgatagtgaagataatataataagaatagatatgtctgaatacatggaaaaacatgctgtatcaagactagttggacctcctccagggtacgtgggatatgaagagggtggtcaacttacagaagcagttagacgtgctccttattctgtaatactatttgatgagatagaaaaagcacatgaggatgtatttaacatgttcttacagatattagatgatggtagacttactgataataaaggtaagacagtagactttaaaaatactcttataataatgacttctaatataggaagtaattatctattagaagcaggaggaaatataacagagactactaacaatttagtaatgaatgaaatgaagcatagatttaaacctgagtttttaaacagagtagatgatattataatgtttaagcctttagaccaagaaaatatcaagaaaattatagatatatttatgaaagatttaaaaaatagattaaaagaaaaagatattactattgaagttacaaattcagcaaaagatgttatggtgagagaaggatatgaccctgtatatggagcaagacctcttaagagatatataggaaatacattagaaactataattgcaaagaaacttattgctggagatgtgtataatggatgtactatagttatagatggaaaagatgaaaatattgaagttttagttaaataa

SEQ ID NO: 6856 - protein, 864 aa, Clostridium difficile 630
MDVEKMTLRVQKSLNEAYNEAVKNHNQQVDVIHLFSALINQEDGLIPNIIEKMNISIDSLRNTVNFEIDKLPKVYGEGADSQGVSATRKINEVLIKAESISKEFKDSYISVEHVMLAMMETESKSAVGKILKQYNINKNDFLNILSQVRGSQRVETQDPEGTYDALARYGTNLVDLAKKNKLDPVIGRDEEIRRIIRILSRRTKNNPVLIGEPGVGKTAIVEGLAERIVRGDVPEGLKDKIVFSLDMGALIAGAKYRGEFEERLKAVLKEVQSSDGKIILFIDEIHTIVGAGKTEGSMDAGNLIKPMLARGELNCIGATTFDEYRKYIEKDKALERRFQPVIAEEPTVEDTISILRGLKERFEIHHGVRIHDNAIVAAAKLSHRYIQDRFLPDKAIDLIDEAGAMIRSEIDSLPTELDVVRRKLFTLETEREALLKENDDKSKSRLDDIQKEIAELKSKNDEMTAKYEKEKSQILDIKNLKAQLDEAKGKAEKYEREYDFNKAAEVKYGEIPKLEEQIKQYEENMNDGSENSLLKEEVTEEEISSIVSKWTGIPVTKLVEGEREKLLKLEDELHKRVIGQDEAVTAVSNAVIRARAGLKDERKPIGSFIFLGPTGVGKTELAKTLARNLFDSEDNIIRIDMSEYMEKHAVSRLVGPPPGYVGYEEGGQLTEAVRRAPYSVILFDEIEKAHEDVFNMFLQILDDGRLTDNKGKTVDFKNTLIIMTSNIGSNYLLEAGGNITETTNNLVMNEMKHRFKPEFLNRVDDIIMFKPLDQENIKKIIDIFMKDLKNRLKEKDITIEVTNSAKDVMVREGYDPVYGARPLKRYIGNTLETIIAKKLIAGDVYNGCTIVIDGKDENIEVLVK

SEQ ID NO: 6857 - DNA, 2583 bp, Herminiimonas arsenicoxydans
  CDS (1)..(2583): transl_table=11
atgcgtctcgataaattgaccaccaagttgcaagaagccctcgccgatgcccagagccatgcagtcggcaacgataaccaatacatagaaccagtccacgtacttgtcgcactgctgagccaggacgacagcagcacgcgctcgttgctgcaacgcgcgggggccaacatcaatggcatggtgacagcgctgaaaagtgcactggagcgcctgcccaaagtctcaggcactggtggccaggtgcagatcagccgtgatctgactgcgctcctgaatctggcggacaaagaatcgcagatgcacggcgacgagttcatcgccacggaaatgcttttgctggcactgaccgaagacaagtccgaggccggcaagatcgcgcgcgagaacggtttgacgcgcaaggcgctgcaagccgcgatcaaggcggtgcgcggcagctcgaaagtcgattccgccgaaggcgaaggccagcgcgaagcgctcaaaaaatacacgatggacctgaccgagcgcgcacgtatcggcaagctcgatccggtcatcggccgcgatgatgaaatccgccgcaccatccagatcctgcaacgtcgctccaaaaacaatccggtattgatcggtgaaccaggcgtgggcaaaaccgccatcgttgaaggtttggcacaacgcatcgtcaacggcgaagtgcctgaaagcctcaagggaaaacgcgtgctgtcgcttgacatggcatcgctgctggcgggcgccaaatatcgcggcgagtttgaagaacgcctgaaagcggtgttgaccgaacttgcggaggacgaaggccagaccattgtcttcatcgacgaaatgcatacgctggtgggagccggcaaggcagaaggcgcaatggatgccggcaatatgctcaagccggcattggcgcgtggcgaactgcactgcgtcggcgcgaccacgctggacgaataccgcaaatacatcgagaaagatgccgcgctggaacgccgctttcaaaaagtgctcgtggatgagccaacggtggaagcgactatcgccatcctgcgcggcctgcaggaaaaatacgaagtccatcatggtgtcgacatcacggatccggccatcgtcgctgccgcagaactgtcgcatcgctacattaccgaccgctttctgcctgacaaggcgattgacctgatcgatgaagcggcggccaagatcaagatcgagatcgattccaagccggaagtcatggatcggctggatagacgcgtcattcaactgaagatagaacgcgaagcgatcaggaaagagaaagacgaagcatcgcaaaaacgtctggccctgattgaagaggaaatcgaaaaactcgggcgtgaatatgccgatctggaagaaatctggaaagccgagaaatccgctgcgcaaggcagccagcacatcaaggaagcgatagagaaagcccgtctgcagatggaagaagccacgcgtcaaagcgactggcagcgtgtgtctgaactgcagtacaaaacactgccggaactggaagcgcaactgaagaatgctgtcactggcgaagccagcgcaggcaaaccgcaactcgtacgcacccaggtcggtgcggaagaaatcgccgaagttgtttcgcgcgcaaccggtattcctgtttcgcgcatgatgcagggcgaacgcgagaagctgctgcagatggaagacgcattgcacaagcgcgtggtcggtcagcatgaagcaattgttgccgtgtcggatgcgattcgtcgttcgcgcgcgggtctcggcgatccggatcgtccttacggctccttcatgttcctcggcccaaccggtgtcggtaaaaccgagttgtgcaaggcgctggcttccttcctgttcgatacagaagattcgctggtccgcatcgacatgagcgaattcatggagaagcattcggtggcccgcctgatcggtgcgccgccgggttatgtcggctatgaagaaggcggctatctgaccgaagccgtgcggcgcaaaccgtactgcgtgatcctgctcgacgaaatcgagaaggcgcatcccgatgtgttcaacgtcctgctgcaagtgctggacgatggccgcatgacggatggacaaggccgtaccgtcgacttcaagaacaccgtcatcgtgatgacatcgaatctgggttcgcacaagattcaggcgatggaaggcaacgagccggcattgatcaagatggcggtgatggcggaagtgcagtcgcatttccgtcccgaattcatcaaccgtatcgacgagatcgtggtgttccacgcgcttgatgagaaaaacatcggcgcgattgccaagatccagctgcacacgctggaacaacgtctggcacgtatggatatgtctatggatgtatcggaagatgcattgcagaaaatcgcagaagccggcttcgatcctgtgtatggcgcacgtccgttgaagcgtgcgattcagcagcagattgaaaatcccttgtccaaggcgatcctggaaggaaagttcgggcccaaggatgtgatttcggttgatgtgaaaaatggcgaactggagttcgccaaagcgcagtaa

SEQ ID NO: 6858 - protein, 860 aa, Herminiimonas arsenicoxydans
MRLDKLTTKLQEALADAQSHAVGNDNQYIEPVHVLVALLSQDDSSTRSLLQRAGANINGMVTALKSALERLPKVSGTGGQVQISRDLTALLNLADKESQMHGDEFIATEMLLLALTEDKSEAGKIARENGLTRKALQAAIKAVRGSSKVDSAEGEGQREALKKYTMDLTERARIGKLDPVIGRDDEIRRTIQILQRRSKNNPVLIGEPGVGKTAIVEGLAQRIVNGEVPESLKGKRVLSLDMASLLAGAKYRGEFEERLKAVLTELAEDEGQTIVFIDEMHTLVGAGKAEGAMDAGNMLKPALARGELHCVGATTLDEYRKYIEKDAALERRFQKVLVDEPTVEATIAILRGLQEKYEVHHGVDITDPAIVAAAELSHRYITDRFLPDKAIDLIDEAAAKIKIEIDSKPEVMDRLDRRVIQLKIEREAIRKEKDEASQKRLALIEEEIEKLGREYADLEEIWKAEKSAAQGSQHIKEAIEKARLQMEEATRQSDWQRVSELQYKTLPELEAQLKNAVTGEASAGKPQLVRTQVGAEEIAEVVSRATGIPVSRMMQGEREKLLQMEDALHKRVVGQHEAIVAVSDAIRRSRAGLGDPDRPYGSFMFLGPTGVGKTELCKALASFLFDTEDSLVRIDMSEFMEKHSVARLIGAPPGYVGYEEGGYLTEAVRRKPYCVILLDEIEKAHPDVFNVLLQVLDDGRMTDGQGRTVDFKNTVIVMTSNLGSHKIQAMEGNEPALIKMAVMAEVQSHFRPEFINRIDEIVVFHALDEKNIGAIAKIQLHTLEQRLARMDMSMDVSEDALQKIAEAGFDPVYGARPLKRAIQQQIENPLSKAILEGKFGPKDVISVDVKNGELEFAKAQ

SEQ ID NO: 6859 - DNA, 2598 bp, Burkholderia vietnamiensis G4
  CDS (1)..(2598): transl_table=11
atgagaatcgacaagctaaccaccaagttccaggaagcgctcgcggacgcccagagcctcgccgccggccgcgacaatcaatacatcgaacccgtgcacgtgctggcggcgctggtcgcgcagcaggacggctcggcgcgttcgctgatgtcgcgggcgggcgtacacgtgcaggcgctgcaaggcgcgctcaatgaagcgatcgcgcgcctgccgcaggtgacgggcaccggcggcgacatccagatcggccgtgaactggccgggctgctgaaccaggccgacaaggaagcgcagaagctgaacgacacgttcatcgcgagcgagatgttcctgctcgccgtctccgacgacaagggcgaagccggcaagctcgcgcgccagcacggcctcacgcgcaaggcgctcgaagccgcgatcgccgcggtgcgcggcggctcgcaggtgcacagccaggacgcggaaagccagcgcgaggcgctgaagaaatacacggtcgacctgaccgagcgcgcgcgtgccggcaagctcgatccggtgatcggccgcgacgacgaaatccgccgctcgatccagatcctgcagcgccgcaccaagaacaacccggtgctgatcggcgagccgggcgtcggcaagaccgcgatcgtcgaagggctcgcgcaacggatcgtcaacggcgaagtgccggagacgctgaagggcaagcgcgtgctgtcgctcgacatggccgcgctgctcgccggcgcgaagtatcgcggcgagttcgaggagcgcctgaagtccgtgctcaacgacatcgcgaaggacgaaggccagacgatcgtgttcatcgacgagatccacacgatggtcggcgcgggcaaggccgaaggcgcgatggatgcgggcaacatgctgaagccggcgctgtcgcgcggcgagctgcactgcatcggcgcgaccacgctcgacgaataccgcaagtacatcgagaaggacgccgcgctcgaacgccgcttccagaaggtgctggtcgacgagccgagcgtcgaggcgaccatcgcgatcctgcgcgggctgcaggaaaagtacgagctgcaccacggcgtcgacatcaccgacccggcgatcgtcgcggcggccgagctgtcgcatcggtacatcaccgaccggttcctgccggacaaggcgatcgacctgatcgacgaggccgcgtcgaagatcaagatggaaatcgattcgaagcccgaagagatggacaagctcgatcgccggctgatccagctgaagatcgaacgcgaggccgtgaagaaggagcaggacgaggcgtcgcaaaagcgcctgcagctgatcgaggaagagatcgagcggctcggtcgcgaatacgcggacctcgaggaaatctggactgccgagaaggcagcggtgcagggcagcgcgcagctcaaggaagagatcgagaaggtgcgtgccgacatcgtgcgtctgcagcgtgaaggcaagctggagaaggtcgccgaactgcagtacggcaagctgccgcagctcgagtcgcaactgaagcaggtcacgcaggccgaagcgcaggagcagcacgcgccgacgcgtccgcgtctgctgcgcacgcaggtcggcgcggaagaaatcgcggaggtcgtgtcgcgtgccaccgggattccggtgtcgcggatgatgcagggcgaacgcgagaagctgctgcacatcgaggaaaagctgcacgagcgcgtggtcggccaggacgaggcgatcagcgcggtggccgatgcgatccgccgctcgcgcgcggggctcgccgatccgaaccgtccgtacggctcgttcctgttcctcgggccgaccggcgtgggcaagaccgagctgtgcaaggcgctggcgtcgttcctgttcgactcggaagagcatctgatccggatcgacatgagcgagttcatggagaagcacagcgtcgcccgcctgatcggcgcgccgccgggctatgtcggctacgaggaaggcggctacctgacggaagccgtgcgccgcaagccgtacagcgtgatcctgctcgacgagatcgagaaggcgcatccggacgtgttcaacgtgctgctgcaggtgctcgacgacggccgcatgaccgacgggcagggtcgcacggtcgacttcaagaacacggtgatcgtgatgacgtcgaacctcggctcgcaggtgatccagtcgctgaccggctcgccgcaggaagagatcaaggatgcggtgtggatcgaggtgaagcagcacttccgccccgagttcctgaaccggatcgacgacgtcgtcgtgttccatgcgctcgatcgcagcaacatcgaatcgatcgcgaagatccagctcgcccgcctgcacgaccggctcgcgaagctcgacatggcgctcgacgtgtcgccggcggcgctcgagcagatcggcaaggtcggctacgacccgctgttcggcgcgcggccgctgaagcgcgcgatccagcaggagatcgagaacccggtcgcgaagctgatcctcgcgggccgcttcggtccgaaggacgtgatcccggtcgacgtcagcgacggccagttcgtgttcgatcgcgtcgtgcactga

SEQ ID NO: 6860 - protein, 865 aa, Burkholderia vietnamiensis G4
MRIDKLTTKFQEALADAQSLAAGRDNQYIEPVHVLAALVAQQDGSARSLMSRAGVHVQALQGALNEAIARLPQVTGTGGDIQIGRELAGLLNQADKEAQKLNDTFIASEMFLLAVSDDKGEAGKLARQHGLTRKALEAAIAAVRGGSQVHSQDAESQREALKKYTVDLTERARAGKLDPVIGRDDEIRRSIQILQRRTKNNPVLIGEPGVGKTAIVEGLAQRIVNGEVPETLKGKRVLSLDMAALLAGAKYRGEFEERLKSVLNDIAKDEGQTIVFIDEIHTMVGAGKAEGAMDAGNMLKPALSRGELHCIGATTLDEYRKYIEKDAALERRFQKVLVDEPSVEATIAILRGLQEKYELHHGVDITDPAIVAAAELSHRYITDRFLPDKAIDLIDEAASKIKMEIDSKPEEMDKLDRRLIQLKIEREAVKKEQDEASQKRLQLIEEEIERLGREYADLEEIWTAEKAAVQGSAQLKEEIEKVRADIVRLQREGKLEKVAELQYGKLPQLESQLKQVTQAEAQEQHAPTRPRLLRTQVGAEEIAEVVSRATGIPVSRMMQGEREKLLHIEEKLHERVVGQDEAISAVADAIRRSRAGLADPNRPYGSFLFLGPTGVGKTELCKALASFLFDSEEHLIRIDMSEFMEKHSVARLIGAPPGYVGYEEGGYLTEAVRRKPYSVILLDEIEKAHPDVFNVLLQVLDDGRMTDGQGRTVDFKNTVIVMTSNLGSQVIQSLTGSPQEEIKDAVWIEVKQHFRPEFLNRIDDVVVFHALDRSNIESIAKIQLARLHDRLAKLDMALDVSPAALEQIGKVGYDPLFGARPLKRAIQQEIENPVAKLILAGRFGPKDVIPVDVSDGQFVFDRVVH

SEQ ID NO: 6861 - DNA, 2640 bp, Bradyrhizobium sp. ORS278
  CDS (1)..(2640): transl_table=11
atgaatatcgacaaatataccgagcgcgcgcggggcttcattcaatcggcgcagtctctggcggtgcgcgacggccatcagcagttctcgccgctgcatctcctgaaagtcctgctcgacgacagcgagggactcgcgggcggtctgatcgaccgcgccggcggcaattcgcgcgcgatcctgaaagcaaccgaggacgcgctcggcaagatgccgaaagtgtcgggcagcggcgccgggcagatctacctgtccccggaattggcgcgcgccttcgacgcggcggaaaaggcggccgagaaggccggcgacagtttcgtcaccgtcgagcggctgctgctcgggctgacgctcgacgccaagagcgagaccggaagcattctcgccaagggcggcgtcaccgcgcagaacctcaacgccgcgatcgagagcttgcgcaaggggcgcacggccgactcggcgaccgccgagaacgcctatgatgcgctgaagaaatatgcccgcgacctgacccaggcggcgcgcgacggcaagctcgatccggtgatcggccgcgacgaggagattcgccgcaccattcaagttctctcccggcgcaccaagaacaatcccgtgctgatcggcgagcccggcgtcggcaagaccgcgatcgtcgagggcctcgcgctgcgcatcgtcaatggtgatgtgccggagagcctgaaggacaagcggctgctgtcgctcgatctcggcgcgctgattgcgggtgccaaatatcgcggcgagttcgaggagcggctgaaggccgtgctgcaggaggtgacggcggccgaaggcaccttcgtgctgttcatcgacgagatgcacaccctgatcggcgccggcaaggctgacggcgcgatggatgcgtcgaacctgctcaagcctgcgctcgcgcgcggcgagctgcactgcatcggcgcgaccacgctcgacgagtatcagaagcatgtcgagaaggacgcagccctcgcccgccgcttccagccggtctacgtcaccgagcccacggtcgaggacaccatctcgatcctgcgcggcctgaaggacaaatacgagcagcatcacggcgtgcgcatcaccgatagcgcgctggtggcctcggccaccttgtcgaaccgctacatcaccgaccgcttcctgcccgacaaggccatcgacctgatggacgaggcggcggcgcggctgaagatgcaggtcgactcgaagcccgaggagctcgactcgctggatcgcgagatcatccggctcaagatcgaacaggaggccttgaagaaggagagcgatctcggctccaagacgaggctgcaggcgctggagaaggagctcgccgatcttgaggagaagtcggcctcgctgaccgcgaagtggagcgccgagaaggacaagctgtcgaacgcgcagaagctcaagagcgagctggacggcttgcgcatcgagctcgccaacgcgcagcgccgcggcgagtaccagaaggcgggcgagctggcctatggccgcatccccgagctggagaagcggctcgccgacatcgaggccaaggagaccagcggcgagatgatggaggaggcggtcaccgccaaccacatcgcgcaggtggtctcgcgctggaccggcgtgccggtcgacaagatgctcgagggcgagaaggacaagctcttgcggatggaagactcgctaggcaaacgtgtcgtcggccaattcgaggccgtgcatgcggtcgcgaccgccgtgcggcgctcgcgcgcgggcctgcaggatccgaaccggccgatgggctcgttcatgttcttaggccccaccggcgtcggcaagaccgagctgaccaaggcgctcgccgagtatctgttcaacgacgagaccgcgatggtccggctcgacatgtccgagtacatggagaagcactcggtgtcgcggctgatcggcgcgcctcccggctatgtcggctatgacgagggcggggcgctgacggaagccgtgcggcgccggccgtaccaggtcgtgctgttcgacgagatcgagaaggcgcatccggacgtgttcaacgtgctgctgcaggtgctcgacgacggccgcctgaccgatggccagggccgcaccgtcgacttccgcaacacgctgatcatcatgacttcgaatctcggctccgagttcctggtcaatcagcccgagggcgaggatacgtccgaggtgcgcgagctggtgatgggcacggtgcgcgggcatttccggcccgagttcctcaaccgcgtcgacgagatcatcctgttccaccggctgcagaagagcgagatgggacggatcgtcgagatccagttctcgcggcttcagaagctcctggaggagcgcaagatcacgctctcgctcgacggcgacgcgcgcgactggctcgccgccaagggctgggacccggcctatggcgcgcgtccgctgaagcgggtgatccagcgcagcgtgcaggatccgctcgccgagatgatcctcgccggcgacatcaaggatggcgacaaggtcgccatctcctcggaaggcaacgtgctgaccttcaacggcaaggcgcatcgcaccgcggagatcgcgacgttcgaggcgccgatcccgaagcgcaagctgaactga

SEQ ID NO: 6862 - protein, 879 aa, Bradyrhizobium sp. ORS278
MNIDKYTERARGFIQSAQSLAVRDGHQQFSPLHLLKVLLDDSEGLAGGLIDRAGGNSRAILKATEDALGKMPKVSGSGAGQIYLSPELARAFDAAEKAAEKAGDSFVTVERLLLGLTLDAKSETGSILAKGGVTAQNLNAAIESLRKGRTADSATAENAYDALKKYARDLTQAARDGKLDPVIGRDEEIRRTIQVLSRRTKNNPVLIGEPGVGKTAIVEGLALRIVNGDVPESLKDKRLLSLDLGALIAGAKYRGEFEERLKAVLQEVTAAEGTFVLFIDEMHTLIGAGKADGAMDASNLLKPALARGELHCIGATTLDEYQKHVEKDAALARRFQPVYVTEPTVEDTISILRGLKDKYEQHHGVRITDSALVASATLSNRYITDRFLPDKAIDLMDEAAARLKMQVDSKPEELDSLDREIIRLKIEQEALKKESDLGSKTRLQALEKELADLEEKSASLTAKWSAEKDKLSNAQKLKSELDGLRIELANAQRRGEYQKAGELAYGRIPELEKRLADIEAKETSGEMMEEAVTANHIAQVVSRWTGVPVDKMLEGEKDKLLRMEDSLGKRVVGQFEAVHAVATAVRRSRAGLQDPNRPMGSFMFLGPTGVGKTELTKALAEYLFNDETAMVRLDMSEYMEKHSVSRLIGAPPGYVGYDEGGALTEAVRRRPYQVVLFDEIEKAHPDVFNVLLQVLDDGRLTDGQGRTVDFRNTLIIMTSNLGSEFLVNQPEGEDTSEVRELVMGTVRGHFRPEFLNRVDEIILFHRLQKSEMGRIVEIQFSRLQKLLEERKITLSLDGDARDWLAAKGWDPAYGARPLKRVIQRSVQDPLAEMILAGDIKDGDKVAISSEGNVLTFNGKAHRTAEIATFEAPIPKRKLN

SEQ ID NO: 6863 - DNA, 2574 bp, Dichelobacter nodosus VCS1703A
  CDS (1)..(2574): transl_table=11
atgcaaatgagtaaaaaatttacagcacgttttcaagaagctttatcggcggcgcaatcgctcgccgtgggcaaagatcacgcatatattgagccgctgcatattttttcggcactactcgatcaagaaggcagcagcattattgcgattgtgcaacgcgcgggcgcgcaaatcggcgcgcttcggcaagcggtgatgcaggcgttggaacgtttaccgcgggtgaaaaatcccacgggtgatgtcaatatttcgccggaaagtatgcggttattgaatttatgcgataaatacgcgcaacaaaatggcgatgaatatatttcttccgagctctttttgcgcgcggtttatgatgcaaaaggggatttggagcaattgttgcgtgccaacggtttggaaaaagcggcggtggtggcagcaattgatgcggtgcgcggcggcgaggcggtgacagatgaatacgctgaagataaacgcggtgcattgaaaaaatataccttagatgttacgcagcgcgcgttagatggcaaaatcgatcccgtcattggtcgcgatgaggaaattcgccgcgcgatgcaaattcttcaacgtcgtagtaaaaataatcccgtattgattggcgagccgggcgtcggtaaaacggcaattgtggaaggtttggcgcaaagaatcgcggatcgcgctgtgccggaaagtttaaaaggtaaacgtttgttatctttagatttagcggcgttattagccggcacgaaataccgcggtgaatttgaagaacggctaaaagccgttttagatgaaatcacgaaagccgatgggcaaattattttatttatcgatgaaattcataccatggttggcgcgggcaaaagtgaaggttctttagatgccggcaatatgctcaaaccagcgcttgcgcgcggcgatttgcattgcattggtgcaacgactttggacgaatatcgtcaatatatggaaaaagatgcggcgctggaacggcgttttcaaaaggtgatcgttgatgaacccagcgttgaagatacgattgcgattttgcgcggtttgcaggaacgttatgaagtgcatcacggcattaatattacggatccggcgttggtggcagcggcgcagttgtcgcatcgttatatcagcggacgaaaattgcccgataaagctatcgatttgatggacgaagccgcggcgcaaattcgcatggaattggatagtaaaccggaagtgatggataaaattgatcggcggttgattcaattgcaaatcgaacgtatggcgctggaaaaagaaaccgatgcggcgtcgaaaagacgtttgagcgatttagaagcagaaattgccgcgcaagaaaaagaatatgccgatttagaagagatttggttggcagaaaaagcgggaacgcagggcgccgccgaaattaaggagcaattagataaattacgcgtggaattggaagcggcaaaacggcgcggcgattttgcgcgcgcgagcgaaattcaatatggtttgattccggcaaaagaaaagcaattgcttgaaaatgaacaacaaacggaacaacgtccgcatcgtttaatgcgtaataaagtgaccgctgaagaaatcgcggaaatcgtttcccgttggacggggattccggttgccaaaatgatggaaggcgaaaaagagcgtttattgcatttggaaacggtattaaatgaacgcgtggtaggacaaaaaacggcagttgaagcggttgccaacgcgattcggcgcaatcgcgcgggattatctgacccaaaacgtccaattggttcttttttatttttgggcccgacgggtgttggtaaaactgaattatgccgtactttggcgcaatttttgtttgatagtgaagaaaatatggtgcgcatcgatatgagcgaattcatggaaaaacatagtgttgcgcgtttaattggggcgcctccgggttatgttggctatgatcaaggcggttatttaacggaagccgtgcggcgcaaaccgtatagcgtggtgttatttgatgaggtggaaaaagcgcatagcgatgtttttaatacgttattgcaggttttagatgaaggtcgtttgactgatggacaaggtagaacggtcgattttcgtcacacggtgattattatgacctccaatttgggctccgatatgattcaattgctggcggagaaatcgtatgaagagatgaaatcggcagtgatggagattgtgatggcgcatttccgccccgaatttattaatcgtattgatgaagcgattgtgtttcacggtttggcaaagacgcatatgtatcgcattgcgcaaattcaattggaacgtttgcggcaacgtttgcaaacgcgcgaattactgttaagcgttgaagaagatgcgattaatcaattggttgaattgggttatgatccgctttttggcgcccgaccgttgaaacgtgcgattcaaaatcatattgaaaatcctttggcgcaggcgttgttagcaggacaatatttgccgcaaagtacaattacgattggttttgatggcacaaattttactttccactga

SEQ ID NO: 6864 - protein, 857 aa, Dichelobacter nodosus VCS1703A
MQMSKKFTARFQEALSAAQSLAVGKDHAYIEPLHIFSALLDQEGSSIIAIVQRAGAQIGALRQAVMQALERLPRVKNPTGDVNISPESMRLLNLCDKYAQQNGDEYISSELFLRAVYDAKGDLEQLLRANGLEKAAVVAAIDAVRGGEAVTDEYAEDKRGALKKYTLDVTQRALDGKIDPVIGRDEEIRRAMQILQRRSKNNPVLIGEPGVGKTAIVEGLAQRIADRAVPESLKGKRLLSLDLAALLAGTKYRGEFEERLKAVLDEITKADGQIILFIDEIHTMVGAGKSEGSLDAGNMLKPALARGDLHCIGATTLDEYRQYMEKDAALERRFQKVIVDEPSVEDTIAILRGLQERYEVHHGINITDPALVAAAQLSHRYISGRKLPDKAIDLMDEAAAQIRMELDSKPEVMDKIDRRLIQLQIERMALEKETDAASKRRLSDLEAEIAAQEKEYADLEEIWLAEKAGTQGAAEIKEQLDKLRVELEAAKRRGDFARASEIQYGLIPAKEKQLLENEQQTEQRPHRLMRNKVTAEEIAEIVSRWTGIPVAKMMEGEKERLLHLETVLNERVVGQKTAVEAVANAIRRNRAGLSDPKRPIGSFLFLGPTGVGKTELCRTLAQFLFDSEENMVRIDMSEFMEKHSVARLIGAPPGYVGYDQGGYLTEAVRRKPYSVVLFDEVEKAHSDVFNTLLQVLDEGRLTDGQGRTVDFRHTVIIMTSNLGSDMIQLLAEKSYEEMKSAVMEIVMAHFRPEFINRIDEAIVFHGLAKTHMYRIAQIQLERLRQRLQTRELLLSVEEDAINQLVELGYDPLFGARPLKRAIQNHIENPLAQALLAGQYLPQSTITIGFDGTNFTFH

SEQ ID NO: 6865 - DNA, 2574 bp, Klebsiella pneumoniae subsp. pneumoniae MGH 78578
  CDS (1)..(2574): transl_table=11
atgcgtctggatcgtcttaccaataaattccagcttgctcttgccgatgcccagtcgctcgcactcgggcacgacaaccaattcatcgaacctcttcatttaatgagcgccttgctgaatcaggaagggggatcggtacgtcctttattaacctcggcgggcgtgaatgccgggaaactgcgcactgacatcgaacaggccttgagccgtttaccgcaggtggaaggcaccggcggcgatgtgcaaccttctcaggatttagtgcggatcctcaacctttgcgacaagctggcgcaaaagaaaaaggacaactttatttcgtcggaactgttcgttctggcggcgcttgaatcgcgcggtacgctgaccgaccttttaaaatccgccggagcaacaaccgccaacgtgactcaggcgattgaacaaatgcgcggaggtgaaagcgtgaacgatcagggtgccgaagaccaacgtcaggcattgaagaaatttaccgtcgatctgaccgagcgagccgagcagggcaagctggatccggtgatcggccgtgatgaagagattcgccgtaccattcaggtactgcagcgtcgtaccaaaaacaacccggtgctgatcggtgaacccggggtgggtaaaacggcaatcgtcgaaggcctggcgcagcgtatcgtcaacggcgaagtaccagaagggctgaaaggccgtcgggtattggcgctggatatgggggcgctggtggccggggcgaaataccgcggtgagtttgaagagcgtctgaaaggcgtgctgaccgacctgtccaaacaggaaggcaacgtcattctgtttatcgacgaactgcataccatggttggcgctggtaaagccgacggcgcgatggatgcgggtaacatgctgaagccggcgctggcgcgtggtgaactgcactgcgtcggggcgacgacgcttgatgaataccgtcagtacatcgaaaaagacgccgcgctggaacgtcgcttccagaaagtgttcgttgccgagccttcggtagaagataccatcgcgattctgcgcggtctgaaagaacgttatgagctgcaccaccacgtgcagatcactgacccggctatcgtggcggcggcgaccttatcgcatcgctatattgccgaccgtcagctgccggataaagccatcgacctcatcgatgaggcggcatccagcatccgtatgcagattgactccaaaccggaagagctggaccgtctcgatcggcgtattatccagctgaaactggaacagcaggcgctgaagaaagagtctgatgaggcgagcctgaagcgtctcgatatgctcaacgaggagctggcggataaagaacggcagtactcggtgctggaagaagagtggaaagcggaaaaagcgtcgctctccggcacccagaccatcaaagctgagctggagcaggcgaaaatcgccatcgaacaggcgcgccgcgtcggcgatctggcgcggatgtccgagctgcagtatggcaaaattccggaactggagaaacagctggcggctgccactcagtccgaagggaaaaccatgcgtctgctgcgtaataaagtgacggatgctgaaatcgccgaagtgctggctcgctggaccggtatcccggtctcccgcatgatggaaagcgagcgtgacaaactgctgcgtatggagcaggagctgcatcatcgggtgattggccaggatgaggcggttgaagcggtatccaacgccattcgccgcagccgcgccgggctgtccgatccgaaccggccgattggttcgttcctgttcctcggtccaaccggggtcggtaaaaccgagctgtgtaaaacgctggctaactttatgttcgacagcgacgacgcaatggtgcgtatcgatatgtccgagtttatggagaaacattccgtctcgcgtctggtcggtgcgcctccgggatacgtcggctatgaagagggcggttacctgaccgaggcggtgcgccgtcgtccttattccgtcatcctgctggatgaagtggaaaaagcgcacccggatgtgttcaacattctgctgcaggtactcgacgacgggcgtctcaccgacgggcaggggagaacggtcgacttccgtaatacggtagtcatcatgacctcgaacctcggttccgatctgattcaggaacggttcggcgagctggactacggacatatgaaggacctggtgctgggggtagtcagccagaacttccgtccggagttcatcaaccgtatcgacgaagtggtggtcttccatccgctgggcgagaaacatattgcctctattgcccagatccagctgcagcgtctgtataaacgtctggaagagcgcggatatgaagtgcagatgtccgatgaggcgctgaagctgctgagcgccaacggttacgatccggtatacggcgcgcggccattgaaacgtgctattcagcagcagattgagaacccgttagcccagcagatcctttccggtgagctggttccgggtaaaaccatcgagctggtagtaaaagacgaccgcattgtggcagtgcagtaa

SEQ ID NO: 6866 - protein, 857 aa, Klebsiella pneumoniae subsp. pneumoniae MGH 78578
MRLDRLTNKFQLALADAQSLALGHDNQFIEPLHLMSALLNQEGGSVRPLLTSAGVNAGKLRTDIEQALSRLPQVEGTGGDVQPSQDLVRILNLCDKLAQKKKDNFISSELFVLAALESRGTLTDLLKSAGATTANVTQAIEQMRGGESVNDQGAEDQRQALKKFTVDLTERAEQGKLDPVIGRDEEIRRTIQVLQRRTKNNPVLIGEPGVGKTAIVEGLAQRIVNGEVPEGLKGRRVLALDMGALVAGAKYRGEFEERLKGVLTDLSKQEGNVILFIDELHTMVGAGKADGAMDAGNMLKPALARGELHCVGATTLDEYRQYIEKDAALERRFQKVFVAEPSVEDTIAILRGLKERYELHHHVQITDPAIVAAATLSHRYIADRQLPDKAIDLIDEAASSIRMQIDSKPEELDRLDRRIIQLKLEQQALKKESDEASLKRLDMLNEELADKERQYSVLEEEWKAEKASLSGTQTIKAELEQAKIAIEQARRVGDLARMSELQYGKIPELEKQLAAATQSEGKTMRLLRNKVTDAEIAEVLARWTGIPVSRMMESERDKLLRMEQELHHRVIGQDEAVEAVSNAIRRSRAGLSDPNRPIGSFLFLGPTGVGKTELCKTLANFMFDSDDAMVRIDMSEFMEKHSVSRLVGAPPGYVGYEEGGYLTEAVRRRPYSVILLDEVEKAHPDVFNILLQVLDDGRLTDGQGRTVDFRNTVVIMTSNLGSDLIQERFGELDYGHMKDLVLGVVSQNFRPEFINRIDEVVVFHPLGEKHIASIAQIQLQRLYKRLEERGYEVQMSDEALKLLSANGYDPVYGARPLKRAIQQQIENPLAQQILSGELVPGKTIELVVKDDRIVAVQ

SEQ ID NO: 6867 - DNA, 2637 bp, Kineococcus radiotolerans SRS30216
  CDS (1)..(2637): transl_table=11
gtggacctcaagctcaccacccgcgcccaggaggccctggccgacgccgtcgggcgcgccacgtccgccgggcacgcgcaggtcgaacccctccacgtcctcgccgccctgctcgggcaggacaacggcgtcgccggtcacctgctcgccgccctcggggccgaccaggccctcctcacccgccggatcgacggcgcgctctcctcgctgcccagcgcctccggctccaacgtcagccagccccagctctcccgccccgccctgcagctcatgcaggccgccggggacgaggcccgcgccctcgacgacgcctacgtctccaccgagcacctgctcctcggggccgccgcctccccctccgccgccggcgaggccctgcgcgccgtcggcgccacccgcgacgccctcctcgactccctgcccaccgtgcgcggcggcgccaaggtcacctcccccgaccccgagggcacctaccggtcgctggagaagtacggcgtcgacctcaccgagcaggcccgccagggccgcctcgaccccgtcatcggccgcgacgccgagatccgccgcgtcgtgcaggtgctctcgcggcgcaccaagaacaaccccgtcctcatcggggaacccggcgtcggcaagaccgccgtcgtcgagggcctcgcccagcgcatcgtcgccggcgacgtccccgagtccctgcgcggcaagcggctgatctccctcgacctcgccagcatggtcgccggggcgaagtaccgcggcgagttcgaggaacgcctcaaggccgtcctgcaggagatccaggactccgacgggcaggtcgtcaccttcatcgacgagctgcacaccgtcgtcggcgccggcgccggcgaaggcgccatggacgcgggcaacatgctcaagcccatgctcgcccgcggccagctccgcctcgtcggggcgaccaccctcgacgagtaccgcgagcgcatcgagaaggaccccgccctcgaacgccgcttccagcaggtcttcgtcggtgaaccctcggtgcccgacaccatcggcatcctgcgcgggctgcgcgagcgctacgaggcccaccacaaggtcgcgatctccgacgccgccctcgtcgccgccgcgaccctgtccgaccgctacatcagcggccggcagctgcccgacaaggccatcgacctcgtcgacgaggccgcgtcccggctgcgcatggagatcgactcctcgcccgtcgagatcgacgagctccgccgcgccgtggaccggatgaggatggaggagctcgccctcagcaaggaggaggacgccgccagccgcaaccgcctggagaccctgcgcgcccagctcgccgacaagcaggagcagctcaccgccctcaccgcgcgctgggagcaggagaaggccggcctcaaccgggtcggcgacctcaagcaccaggtcgacgagctgcgctcgcaggccgagcgcctgcagcgcgagggcgacctcgggcgggccagcgagatcctctacggccgcatccccgcgctggaggcggaactgcgccaggcccaggccgccgagcaggacgcccccgcccaggccccgatggtcgccgacgaggtcggccccgacgacatcgccgaggtcatcgccggctggacgggcatccccgccggccggatcctcgagggcgagaccgagaagctgctgcgcatggaggagttcctcggcgcccgcctcatcggccagaccaccgcggtgcaggcggtctccgacgccgtccggcgctcgcgggccggggtcaacgaccccgaccgccccaccggctcgttcctcttcctcggccccaccggcgtcggcaagacggaactcgcgaaggcgctcgcggacttcctcttcgacgacgagcgggccatggtccgcatcgacatgagcgagtactccgagaagcacgccgtcgcccgcctcgtcggggcccctccgggctacgtcggctacgaggagggcggccagctcaccgaggccgtccggcgccggccctactccgtcgtgctgctcgacgaggtggagaaggcccacccggaggtgttcgacatcctcctgcaggtcctcgacgacgggcgcctgaccgacggccagggccgcacggtggacttccgcaacgtcatcctggtgctgacctcgaacctcgggtcgcagtacctggtcgacccggagctctcgcaggccaccaagcacgacgccgtcatgaccgcggtccgggcgaacttcaagccggagttcctcaaccgcctcgacgacgtcgtcgtgttcgacccgctgtccacgcaggagctgtcccggatcgtcgagatccaggtgcagcgcctcgccgaccgcctcgccgaccgccgcttcgtcctcgacgtctccgacgccgcgaaggactggctggccctcaccggctacgaccccgcctacggggcgcggccgctgcgccggctggtgcagcgcgagatcggcgacaagctcgcccgcgcgatcctctccggggaggtccgcgacggcgacaccgtcgaggtcgacgtcgcccgcggcagcttcgacctggacgacccggcctcggccgggacgaacggcctcgtcgtccggcgggcggagacggcgctgaccgtctga

SEQ ID NO: 6868 - protein, 878 aa, Kineococcus radiotolerans SRS30216
MDLKLTTRAQEALADAVGRATSAGHAQVEPLHVLAALLGQDNGVAGHLLAALGADQALLTRRIDGALSSLPSASGSNVSQPQLSRPALQLMQAAGDEARALDDAYVSTEHLLLGAAASPSAAGEALRAVGATRDALLDSLPTVRGGAKVTSPDPEGTYRSLEKYGVDLTEQARQGRLDPVIGRDAEIRRVVQVLSRRTKNNPVLIGEPGVGKTAVVEGLAQRIVAGDVPESLRGKRLISLDLASMVAGAKYRGEFEERLKAVLQEIQDSDGQVVTFIDELHTVVGAGAGEGAMDAGNMLKPMLARGQLRLVGATTLDEYRERIEKDPALERRFQQVFVGEPSVPDTIGILRGLRERYEAHHKVAISDAALVAAATLSDRYISGRQLPDKAIDLVDEAASRLRMEIDSSPVEIDELRRAVDRMRMEELALSKEEDAASRNRLETLRAQLADKQEQLTALTARWEQEKAGLNRVGDLKHQVDELRSQAERLQREGDLGRASEILYGRIPALEAELRQAQAAEQDAPAQAPMVADEVGPDDIAEVIAGWTGIPAGRILEGETEKLLRMEEFLGARLIGQTTAVQAVSDAVRRSRAGVNDPDRPTGSFLFLGPTGVGKTELAKALADFLFDDERAMVRIDMSEYSEKHAVARLVGAPPGYVGYEEGGQLTEAVRRRPYSVVLLDEVEKAHPEVFDILLQVLDDGRLTDGQGRTVDFRNVILVLTSNLGSQYLVDPELSQATKHDAVMTAVRANFKPEFLNRLDDVVVFDPLSTQELSRIVEIQVQRLADRLADRRFVLDVSDAAKDWLALTGYDPAYGARPLRRLVQREIGDKLARAILSGEVRDGDTVEVDVARGSFDLDDPASAGTNGLVVRRAETALTV

SEQ ID NO: 6869 - DNA, 2640 bp, Xanthobacter autotrophicus Py2
  CDS (1)..(2640): transl_table=11
atgaattttgagatctataccgagcgcgcgcgcggcttcgtccagtcggcccagtcgctggcgacccgggagggtaaccagcagttcacgcccgagcacctgctcaaggtgctgatggacgatcccgaaggcctgtgctcgggcctgatccagcgcgcgggcggcaatctcgtgctggtgcgggccgaggtcgaagcggcgctgaagaagctgccgaaggtggaaggcggctccggccaggtctatctcagccagcagctggccaaggtgttcgagaccgccgagcaggcggccaagaaggcgggcgacggctatgtcaccgtcgagcggatgctgctcgccctgaccatcgagaaggacaccgaggcgggccgcatcctggtgaaggccggcgtgacgccgcagaccctgaatgcggccatcgaggccctgcgcaagggccgcactgcggacagcgctaccgccgagaatgcctatgacgccctgaagaaatacgcccgcgacctcacccaggccgtgcgggacggcaagctcgacccggtcattggccgcgacgaggagatccgccgcaccatccaggtgctggcgcgccgcaccaagaacaatcccgtgctcatcggcgagcccggtgtcggcaagaccgccatcgtggagggccttgcccgccgcatcgtggacggcgacgtgccggagagcctgaagaacaagagcctgctggccctcgacatgggctccctcatcgccggcgcgaaatatcgcggcgagttcgaggagcgcctgaagagcgtgctctccgaggtggagagcgcggaaggcggcatcatcctgttcatcgacgagatgcacaccctggtcggcgccggcaagaccgacggcgccatggatgcctccaacctcttgaagccggcgctggcccgcggcgagctgcactgcgtcggcgcgaccacgctggatgaatatcgcaagcacgtggagaaggacgcagccctggcccgtcgcttccagcccgtcttcgtctccgagcccacggtggaggataccgtctccatcctgcgcgggctgaaggagaagtacgagctgcaccacggcgtgcgcatcaccgattcggcgctggtgtcggcggcggtcctgtccaaccgctacatcaccgaccgcttcctgcccgacaaggccatcgacctgatggacgaggcggcttcccgcctgcgcatgcaggtggattcgaagcccgaggagctggacagtctcgatcgcgagatcatgcgccgcaagatcgagcaggaggccctcaagaaggagaccgacaccgcctccaaggaccgcctgaagcggtccgagaaggagttggccgaccttgaggagaaggcttccgtcctcacctccaagtggaaggcggagaaggagaagctgggcgccgcgaccacgctgaagtcgaagctcgaccaggcgcgggcggatctggccaccgcgcagcggcagggcgaataccagaaggccggcgagctgacctattcggtcatccccgagcttgagaagaagctcgccgaggtcgagaaggcgggcgcagccgggcagatggtggaagaggcggtgacgccgaaccacatcgccggcgtcgtctcgcgctggaccggcgtgccggtggacaagatgctggaaggcgagcgcgagaagctcttgcgcatggagctggagctggccaagcgcgtggtgggccagtcggaggcggtggccgccgtctccactgccgtgcgtcgcgcccgcgccggcctccaggacccgaaccggcccatcggctcgttcctgttcctcggccccaccggcgtcggcaagaccgagctgaccaaggcgctcgccgaattcctgttcgacgacgagaccgccatggtccgcatcgacatgtcggaatacatggagaagcactccgtgagccgcctcatcggcgcgcctcccggctatgtgggctatgacgagggcggtgccctcaccgaggcggtccgccgccggccctaccaggtggtgctgttcgacgaggtggagaaggcccatccggacgtgttcaatgtcctcctgcaggtgctcgacgacgggcgcctcacggacgggcaggggcgcacggtggacttccgcaatgtgcttatcgtcatgacctccaacctcggcgccgaattcctcgccgacccgcgccagcccatgggcttcaaggtgccgggccacgagggagagaccgtggtgtcggacgaggaggcctacgatatggtgatgggggcggtgcggcgtcatttccgccccgaattcatcaaccgcatcgacgagatcgtcatgttccaccgcctgaagcgggagcagatggactccatcgtggacatccagatgggccggctgcgcaagctgctggaggatcgcaagatcaccatcgagctgtcccccgaggcgcgggccttcctcgccgagaagggttacgacccggcctatggcgcgcgtcccctgaagcgcaccatccagaagctggtgcaggacccgctggccgagaagatcctcgccggcaccgtcctggacggcgcaacggtgaaggtgggcctggacaacggccagcttaccttcgcgggagaggcggcgccggtggaccaggccgcctga

SEQ ID NO: 6870 - protein, 879 aa, Xanthobacter autotrophicus Py2
MNFEIYTERARGFVQSAQSLATREGNQQFTPEHLLKVLMDDPEGLCSGLIQRAGGNLVLVRAEVEAALKKLPKVEGGSGQVYLSQQLAKVFETAEQAAKKAGDGYVTVERMLLALTIEKDTEAGRILVKAGVTPQTLNAAIEALRKGRTADSATAENAYDALKKYARDLTQAVRDGKLDPVIGRDEEIRRTIQVLARRTKNNPVLIGEPGVGKTAIVEGLARRIVDGDVPESLKNKSLLALDMGSLIAGAKYRGEFEERLKSVLSEVESAEGGIILFIDEMHTLVGAGKTDGAMDASNLLKPALARGELHCVGATTLDEYRKHVEKDAALARRFQPVFVSEPTVEDTVSILRGLKEKYELHHGVRITDSALVSAAVLSNRYITDRFLPDKAIDLMDEAASRLRMQVDSKPEELDSLDREIMRRKIEQEALKKETDTASKDRLKRSEKELADLEEKASVLTSKWKAEKEKLGAATTLKSKLDQARADLATAQRQGEYQKAGELTYSVIPELEKKLAEVEKAGAAGQMVEEAVTPNHIAGVVSRWTGVPVDKMLEGEREKLLRMELELAKRVVGQSEAVAAVSTAVRRARAGLQDPNRPIGSFLFLGPTGVGKTELTKALAEFLFDDETAMVRIDMSEYMEKHSVSRLIGAPPGYVGYDEGGALTEAVRRRPYQVVLFDEVEKAHPDVFNVLLQVLDDGRLTDGQGRTVDFRNVLIVMTSNLGAEFLADPRQPMGFKVPGHEGETVVSDEEAYDMVMGAVRRHFRPEFINRIDEIVMFHRLKREQMDSIVDIQMGRLRKLLEDRKITIELSPEARAFLAEKGYDPAYGARPLKRTIQKLVQDPLAEKILAGTVLDGATVKVGLDNGQLTFAGEAAPVDQAA

SEQ ID NO: 6871 - DNA, 2577 bp, Rickettsia akari str. Hartford
  CDS (1)..(2577): transl_table=11
atgaatattgataaatttactgcacatgctaaatcagtgatagctcgtagccaatcgattgctgctaaaaacgatcatcagcaaatattatctttgcatttattatctagtcttttaagtgaagaaacaggtataattcgaaccattattaataataccggcggtaatataaacttattagaagatcaagtgcagctagcactaaataaaatcccaaaagttcaggttgagggagtgggacaagtttattcttctgctgaagctcttaaagttttagaaaaagctagtaacattgctaaagacagtggggatagctttgtaaccatagagcgtatatttgaagcattaacttatgataatactatagccggtaaaattttaacgaataatggaattaatagtaaaaaattagcagcagttattttacagcttcgtaaaggcaaaaaagcagataccgaatcagcagaaaatagttacgatgctctaaagaaatatggcagagatgtgacagagcttgccgaaagcggtaagcttgacccgataatcggacgtgatgaagaaataagaagaacagtgcaggtactatcacgacgtatgaaaaataaccctgtattgatcggcgagcccggagtcggtaaaactgctataatagaggggcttgcacaacgtatatttagtaaggacgtacctgagtcgcttatgaattgccgtattattgagcttgatattggagcattaatagcaggtgctaaatatcgaggtgaatttgaggagcgtcttaaagcagtacttagtgaaatcaaagactcaagcggtgaaattattttatttatcgatgaattgcatctattagtcggtacgggaaaaaccgacggtgctatggatgcctcgaatttactaaagccaatgcttgctcgtggtgagctgcactgtatcggtgctactactctagacgaatatcgtaaatatatcgagaaagatgcagcacttgctcgccgtttccagcctgtttacgtgagtgagccgacggttgaggatactatatcaatacttagaggcattaaagaaaaatacgagctgcatcatgcagtgcgaatttccgatagtgcgatagtttcagcagcgacgttatcaaaccgttatattaccgatcgttatttacctgataaagctatcgatttgattgatgaagcttgtagccgtatgaaaatagaattgtcaagtaagcctgaagagctggacgagctagatcgccgtattattcagataaaaattgagcttgcagcacttaaaaaagaaaatgacgagcattctaaaaagaaaattacacatttaaccgaggaactcgaaaaattagaatctaaatcatatgatatgaacgctaaatggcatgcagaaaagtctaaactacagcaagcccaaaaacttaaagaagagttagaacgagcaagaatcaatctagagcgtgccgagcgtgactctaatctcgctaaagctagtgagctaaaatatggaattatacctgagattatgaaaaagattcaggaagccgaaagtatggataataaagggctattaaaagaaattgtatcggaaagcgatatagcaagtattatctctcgtatcactggtattccaattgatacgatgctatcaagtgagcgtgagcgtctacttgtgatggagaagaaactacgtgaatcggtcataggacaagatgaagcaattaaaggggtcagtgatgcagttagaagatcacgtgcaggtattcaggatattaaccgccctcttggttcatttttattcttaggacagacaggagttggtaaaactgagcttaccaaagccttagccggttttctttttgatgaccgtaacgcgatacttcgtatagatatgtcggaatatatggagaagcacgctatttctcgtctgataggagctcctccaggctatataggatatgatcaaggtggagtgctaacagaggcagtaagacgccgcccatatcaggtaatattatttgatgaggttgaaaaagcccaccacgatatatttaatattatgctgcaaatacttgatgaaggaagattaaccgatagtcagggtatcacagttgattttaaaaatactattatagttttaacttctaatttaggtgctgagatactcattaatcagaaagaggacgaagatacatataaagtaaaagatgaggttatggaatatgtaaaagaagtatttaagccggagtttcttaataggttagatgaaattatattattccatcggctaaatcataatgatattcatgatatagttaagatacagcttggaagcttaaaaaaaattttgctacaacaaaatattattcttgaatttgatgaatctgctttaaattatttagccgaaaaaggctatgatcgaagttttggagcaagacccttaaaacgccttatccagagggaaatacaaaataatttagccaagatgattttagcaggcgaaataagtagcggtaatatcgtgaaaataggtagagaaaaggaagagctaaggataaagataattgattaa

SEQ ID NO: 6872 - protein, 858 aa, Rickettsia akari str. Hartford
MNIDKFTAHAKSVIARSQSIAAKNDHQQILSLHLLSSLLSEETGIIRTIINNTGGNINLLEDQVQLALNKIPKVQVEGVGQVYSSAEALKVLEKASNIAKDSGDSFVTIERIFEALTYDNTIAGKILTNNGINSKKLAAVILQLRKGKKADTESAENSYDALKKYGRDVTELAESGKLDPIIGRDEEIRRTVQVLSRRMKNNPVLIGEPGVGKTAIIEGLAQRIFSKDVPESLMNCRIIELDIGALIAGAKYRGEFEERLKAVLSEIKDSSGEIILFIDELHLLVGTGKTDGAMDASNLLKPMLARGELHCIGATTLDEYRKYIEKDAALARRFQPVYVSEPTVEDTISILRGIKEKYELHHAVRISDSAIVSAATLSNRYITDRYLPDKAIDLIDEACSRMKIELSSKPEELDELDRRIIQIKIELAALKKENDEHSKKKITHLTEELEKLESKSYDMNAKWHAEKSKLQQAQKLKEELERARINLERAERDSNLAKASELKYGIIPEIMKKIQEAESMDNKGLLKEIVSESDIASIISRITGIPIDTMLSSERERLLVMEKKLRESVIGQDEAIKGVSDAVRRSRAGIQDINRPLGSFLFLGQTGVGKTELTKALAGFLFDDRNAILRIDMSEYMEKHAISRLIGAPPGYIGYDQGGVLTEAVRRRPYQVILFDEVEKAHHDIFNIMLQILDEGRLTDSQGITVDFKNTIIVLTSNLGAEILINQKEDEDTYKVKDEVMEYVKEVFKPEFLNRLDEIILFHRLNHNDIHDIVKIQLGSLKKILLQQNIILEFDESALNYLAEKGYDRSFGARPLKRLIQREIQNNLAKMILAGEISSGNIVKIGREKEELRIKIID

SEQ ID NO: 6873 - DNA, 2589 bp, Desulfococcus oleovorans Hxd3
  CDS (1)..(2589): transl_table=11
atgcgttttgataaactcaccataaaagcacaggaactgttgcaggcggcccagtccgatgccggcgcccggggtcaccagcagatcgaacccgagcacctgctttttgccatgctggaggagaataccggtatcgtggcctccatgctgggtaaacacggcgcgtccgtggacgccgtccgccgggacacggccgaagccctggaggccatgccaaagatttccggcgcggccgccgaggtttatatctcccggcgggcaaaggcggtcctggatgtcgcctttgctcaggccgcgtccatgaaggacgagtatgtgagcgtggaccacctctttctcgccctgctggatgaaaaggggggcaaggccgcctccatcttaaagcagcacggtgtcaccaaagacgccatgctaaaggccctgctcgacattcggggcaatcagcgggtaacagaccagaacccggaagaaaaatacaaagcccttgaaaagtacagccgggatcttactgaactggcccggcagggcaagctggacccggtcatcggccgggacgaggagattcgccgcattgtccaggtgctctcccgccggaccaagaacaatccggtgcttatcggcgagccgggcgtgggtaaaaccgccattgtcgaggggctggcccagcgcatcgtggccggagatgtatcagagggcctgaaaaacaagcgcatcgtggctctggatatggcttccctgatcgcgggcgccaagtaccggggcgagtttgaagatcggctcaaggccgtgctcaaggaagtggagcgggccgagggcagcatcatcctgttcattgatgagctgcacaccctggtgggcgccggtgccagcgaaggggccatggacgcctccaacatgcttaagccggccctggcccgggggtcgctgcggtgcgtgggcgccaccaccctggacgaataccgcaagtacattgaaaaagacgcggccctggagcggcggtttcagccggtgtttaccggtgagcccgacgtgaccgacaccatctccattttgcggggattaaaagaaaagtacgaggtgcatcacggggtcaagataaaggacgccgccctggtggcggcggccaccctgtccgaccgctacatcaccgaccggtttctgccggacaaggccatcgacctggtggatgagtgcgcctccaagatgcgtatcgaaattgacagcatgccggccgagattgacgagattcaccgaaagatcgttcagtccgaaattgaaaaagaggccctgaaaaaagagtcggacaaagaatccaggaaacggctgggcgccctggaagaggaattggcccggctcaaggaggaccatgccgaactaaaagcccactgggaccgggaaaagggcatgatccagaccattcggggcattaaaaaggagatcgaggagctgggcgtggcccagcagcaggccgagcgccagggcgactttgcaaaagccgccgagattcgatacggcaagagtgtggaactcaacaaaaaactggaagcaaccgaaaaagagctggccgcgtttcaggccgacaaaaaaatgctcaaggaagaggtggacgccgaagacattgccgaggtggtgtcccggtggaccggcattccggtcagcaagatgatggagggcgaacgggaaaagctggtgcacatggaagatcggctggccctgcgcgtggtggggcaaaacgaggccgtatccgctgtgtccgacgcggtgcgccggtcccggtccgggcttcaggaccccaaccggcccatcggttcctttatctttctgggtcccaccggcgtgggcaagaccgagctggccaaggccctggccgagtttctgttcgacagtgagcaggtgatccgggtcgacatgtccgaatacatggaaaagcacgccgtggcccgtctcatcggcgcgcctccgggatacgtggggtatgaagagggcgggtacctcaccgaaagcgtgcggcgaaggccctattccgtggtcctgtttgatgagatcgaaaaggcccatccggatgtgtttaacatccttttacaactgctcgacgacggccgcatgaccgacggccacggccggaccgtggatttcaagaacaccatcgtgatcatgacctccaacgtcggcagccacttgatccaggagatgtcccgggccaacgaagaccccgaccaggtcaaagagcagatcaccgacgtgctgcgccagaacttcaagcccgagttcttgaaccgcatcgacgaaatcatcgtgttccataacctggaccgggaccagatcgcgaaaattgtggaaatccaggtgcagcggctgggaaagcgtacggccgaacggggcgtttccattgtgctgtccgacgcggccaaacggtttatcgcggaaaagggctacgacccggtgtacggtgcccggcccttgaagcgcatgattcagaagcacattgaaaacccgctggccatggagatattaaaaggcaacattccggaaaacagcaccatttccgtggatgtggaaggcgacgggattgtcttcaggcaggcgtag

SEQ ID NO: 6874 - protein, 862 aa, Desulfococcus oleovorans Hxd3
MRFDKLTIKAQELLQAAQSDAGARGHQQIEPEHLLFAMLEENTGIVASMLGKHGASVDAVRRDTAEALEAMPKISGAAAEVYISRRAKAVLDVAFAQAASMKDEYVSVDHLFLALLDEKGGKAASILKQHGVTKDAMLKALLDIRGNQRVTDQNPEEKYKALEKYSRDLTELARQGKLDPVIGRDEEIRRIVQVLSRRTKNNPVLIGEPGVGKTAIVEGLAQRIVAGDVSEGLKNKRIVALDMASLIAGAKYRGEFEDRLKAVLKEVERAEGSIILFIDELHTLVGAGASEGAMDASNMLKPALARGSLRCVGATTLDEYRKYIEKDAALERRFQPVFTGEPDVTDTISILRGLKEKYEVHHGVKIKDAALVAAATLSDRYITDRFLPDKAIDLVDECASKMRIEIDSMPAEIDEIHRKIVQSEIEKEALKKESDKESRKRLGALEEELARLKEDHAELKAHWDREKGMIQTIRGIKKEIEELGVAQQQAERQGDFAKAAEIRYGKSVELNKKLEATEKELAAFQADKKMLKEEVDAEDIAEVVSRWTGIPVSKMMEGEREKLVHMEDRLALRVVGQNEAVSAVSDAVRRSRSGLQDPNRPIGSFIFLGPTGVGKTELAKALAEFLFDSEQVIRVDMSEYMEKHAVARLIGAPPGYVGYEEGGYLTESVRRRPYSVVLFDEIEKAHPDVFNILLQLLDDGRMTDGHGRTVDFKNTIVIMTSNVGSHLIQEMSRANEDPDQVKEQITDVLRQNFKPEFLNRIDEIIVFHNLDRDQIAKIVEIQVQRLGKRTAERGVSIVLSDAAKRFIAEKGYDPVYGARPLKRMIQKHIENPLAMEILKGNIPENSTISVDVEGDGIVFRQA

SEQ ID NO: 6875 - DNA, 2592 bp, Prochlorococcus marinus str. MIT 9211
  CDS (1)..(2592): transl_table=11
atgcaagcttccccggaaaattttactgagaatgcatggaattcaatcttattagcccaaagtcatgctcaagaaaataacaatcaatacattgagacagagcacttactgctttctttaatagaaaagagtgatttttgccagaaagttcttaataaagccggctgcgaaatagataaggttatttctgatttaaatgatttcattaaaaatcaacccaaaatgaagtctcgccctgaaacattatttgttggtcaaggcttaaatgtaatcatttcaaaggccgaagataagagacttgaatggaaagatgactatatatctgttgagcatctattgctaacgcttaccaatgacaaaagatgctgtaaagatattctttcaagggcgaatatagaagagaagaacctaaattcaaagatagtgtcaatgcgtgggagccaaggtgtgaccgataaaaaccctgagaacaaatatgaatccctagaaaaatatggaagagacttaacctcagcagccaaagaggggaaactggaccctgttattggaagagatgatgaaattcgacgcactattcaaatccttagtagacgaaccaaaaacaatccggtattaattggtgagccaggagtcggaaaaacggcgatagtggaaggccttgctcaacgaataatcaatggagatgtcccatcggctttgcaaaatcgtcagctaattgctctggatatgggcgctctaatcgccggtgctaaatatcgtggtgagtttgaagaaagactaaaggctgtactcaaggaaataacttcttcagatggtcaaataatactttttatcgacgagatacatactgttgtaggcgctggagctacaggaggatcgatggatgcgagcaacttattaaaaccaatgcttgcgagaggtgagctcaggtgcataggtgctacaacacttaatgagcatcgccagcatttcgagaaagatcctgcattagaaagaaggtttcaacaagtactcataagccagccttccgtagaagatactgtctcaatcttacgaggactaaaagaaaggtatgaagtgcatcatggcgtaagaatctcagataatgccttagtcgcagcagcaacattaagcaatagatatatagctgacagattccttccagataaagctattgatttaattgatgaatcagcttccaaattaaagatggaaataacctccaagccagaggaattagatgaaattgacaggaggatacttcagctgcaaatggagaaattttctctaaaaagagagtcagatataacaagtaaaaacagacttttgataatagaagaagagctaaaatcctttaaaaataagcaatcagaacttaataaccaatggcagaaggaaaaggattcaattagtgagctttcactaataaaggaggagatcgagaaagtacaattccagatagatcaatcaaaaagaaattatgacttaaacaaagctgctgagcttgaatttggtgttatatcacaattacaaagtaaattatcagagaaagaagatctacttagagaagaaaatagctccagagaaaagcctcttttaagagaggaagttaccgaagatgatattgctgaagtaatctctaaatggacccatattccagttaaaaagctcgtaaaatctgaagtagaaaagatactagatcttgaagagaagttgaacagaaaagtaattggtcagccaaaagcaattaaaagtatcacagaggcgatacaacgatccagaacaggcctaagtgatccatacagaccaatagccaccttcctattccttggccctacaggagtaggaaaaactgaattaactaaatcattagcacaagaattatttgatagtgaaaaatctattattcgaattgacatgtctgagtatatggaaaaacattctattagtagactaataggagcccctccaggctatatagggtatgaatctggtggacaattatctgaggctgttagaagaagaccctactctgtcatattatttgacgaagttgaaaaggctcaccctgaaatatttaatttaatgcttcagatttttgatgaaggaagagtaactgacaaccaaggaaggactattaactttaccaacactattattatcctaacaagtaatattggcagtcaatcaataatagaattatgtgggcaacactcaaattatgataggattacagaagtagtaaataaggaattaaagaatcactttaggcctgaatttcttaatagaatcgatgaatcaataatatttaatagcttaaccaagaaagatctaaatgaaataatactaattcaactagagagaatcaaacaaaggcttttagataaaggcctagatctaaaaatagaccaacaagctatttcatggctatcagaaaaaggttacgaccctagttatggagccaggcctctaaaaagaacaattcaaaatgaactagaaacaccaattgcacgaaagattctaatgaataattatgcaaaaaataaagctataaatgtagaaataaaagggggagaactaaatataagttag

SEQ ID NO: 6876 - protein, 863 aa, Prochlorococcus marinus str. MIT 9211
MQASPENFTENAWNSILLAQSHAQENNNQYIETEHLLLSLIEKSDFCQKVLNKAGCEIDKVISDLNDFIKNQPKMKSRPETLFVGQGLNVIISKAEDKRLEWKDDYISVEHLLLTLTNDKRCCKDILSRANIEEKNLNSKIVSMRGSQGVTDKNPENKYESLEKYGRDLTSAAKEGKLDPVIGRDDEIRRTIQILSRRTKNNPVLIGEPGVGKTAIVEGLAQRIINGDVPSALQNRQLIALDMGALIAGAKYRGEFEERLKAVLKEITSSDGQIILFIDEIHTVVGAGATGGSMDASNLLKPMLARGELRCIGATTLNEHRQHFEKDPALERRFQQVLISQPSVEDTVSILRGLKERYEVHHGVRISDNALVAAATLSNRYIADRFLPDKAIDLIDESASKLKMEITSKPEELDEIDRRILQLQMEKFSLKRESDITSKNRLLIIEEELKSFKNKQSELNNQWQKEKDSISELSLIKEEIEKVQFQIDQSKRNYDLNKAAELEFGVISQLQSKLSEKEDLLREENSSREKPLLREEVTEDDIAEVISKWTHIPVKKLVKSEVEKILDLEEKLNRKVIGQPKAIKSITEAIQRSRTGLSDPYRPIATFLFLGPTGVGKTELTKSLAQELFDSEKSIIRIDMSEYMEKHSISRLIGAPPGYIGYESGGQLSEAVRRRPYSVILFDEVEKAHPEIFNLMLQIFDEGRVTDNQGRTINFTNTIIILTSNIGSQSIIELCGQHSNYDRITEVVNKELKNHFRPEFLNRIDESIIFNSLTKKDLNEIILIQLERIKQRLLDKGLDLKIDQQAISWLSEKGYDPSYGARPLKRTIQNELETPIARKILMNNYAKNKAINVEIKGGELNIS

SEQ ID NO: 6877 - DNA, 2586 bp, Salmonella enterica subsp. arizonae serovar 62:z4,z23:--
  CDS (1)..(2586): transl_table=11
atgggaggagttatgcgtctggatcgtcttactaacaaattccagcttgctcttgccgatgcccagtcgcttgcgctggggcacgacaaccaattcatcgaacctcttcatttaatgagcgccttgctgaatcaggaagggggatcggtacgtcctttattaacgtctgccggcattaatgctggccagttgcgcaccgccatcgatcaggcgctgagccgtttaccgcaggtggaaggcaccggcggcgacgtacagccttcttcggaactagtacgcgtactgaacctttgcgacaagctggcgcaaaaacggggggacaattttatttcgtcagagttgtttgttctggcggcgcttgagtctcgcggaacgctaaccgatctgctgaaatcagccggtgcgaccaccgccaatattactcaggcaattgaacagatgcgcggaggtgaaagtgtgaacgatcaaggggctgaagaccaacgtcaggccttgaaaaaatataccgtcgatctgaccgagcgggctgaacaaggcaagcttgacccggtgattggtcgtgatgaagaaattcgccgtaccattcaggtactgcaacgtcggactaaaaacaacccggtattgatcggtgaaccgggcgtcggtaaaaccgctattgttgaaggactggctcagcgcattattaatggagaggtccccgaaggcttaaaaggccgccgcgtactagcgcttgatatgggcgcgctggtagccggggcgaaataccgcggtgagtttgaagaacgtctgaagggcgtattgaacgatctcgccaaacaggaaggtaatgtcatcctgtttatcgacgaattgcacaccatggtgggcgccggtaaagccgatggcgcgatggatgccgggaacatgctgaaaccggcgcttgcgcgcggggagctgcactgtgtgggcgccactacgctggatgagtatcgtcagtacatcgaaaaagatgccgctcttgagcgtcgtttccagaaagtgtttgtggccgagccaagcgttgaagataccatcgccattctgcgtggtttaaaagagcgttacgaactgcaccaccatgtgcagatcaccgacccggcgattgtcgcggcagcaacgctttctcaccgttacattgccgaccgccagttgccggataaggctattgacctcattgatgaagcggcatccagcattcgtatgcagattgactccaagccggaggaactggacagactcgaccgccgcattatccagcttaaactggagcagcaggcgctaatgaaagagtctgacgaggcgagcaaaaaacgtctcgatatgctgaatgaagaactggacgataaagagcgtcagtactctgagttagaagaagagtggaaagcggaaaaagcgtcactctctggtacgcaaactattaaagcagagctggagcaggcgaagatcgccattgagcaggcgcgtcgtgttggcgacctggcgcggatgtccgaactgcaatacggcaaaattccggagctggaaaaacaactggaagctgctacccagtctgaaggcaaaactatgcgtctgttgcgtaacaaagtgacggatgcggaaattgccgaagtgctggcgcgctggaccggtattccggttgccagaatgctggaaggtgagcgtgagaaactgctgcgtatggagcaggaactgcacagccgtgtgattgggcagaatgaagccgttgaggcggtatcgaatgctatccgtcgcagccgcgcggggctgtccgatccaaaccgtccgattggctcgttcctgttcctcgggccaaccggggtcggtaaaaccgaactgtgtaaagcgctggctaactttatgttcgacagcgacgacgcgatggtgcgtatcgacatgtctgagtttatggagaaacactccgtgtctcgtctggtcggggcgcctccgggatatgtcggctatgaagaaggcggttatttgacggaagcggtacgccgtcgtccttattccgtcatcttgctggatgaagtggaaaaagcgcatccggatgtctttaacattctgttgcaggtgttggacgatggccgtctgaccgacggacaggggagaacggtcgacttccgaaatacggtagttattatgacctctaacctcggttccgatctcattcaggagcgttttggcgaactggattacggtcggatgaaagagatggtgctgggtgtagttggccacaacttccgtccggaattcatcaaccgtatcgatgaagtggtggtattccatccgttaggtgaacaacacattgctgctattgctcagatacagttgcagcgtttgtacaaacgtctggaagagcgtggttatgaaatccatatctccgacgaggcgctgaaactgttgagcgccaacggttacgatccggtctacggggcgcgtccgttaaaacgtgctattcaacagcagatcgaaaacccactggcgcagcaaatcctgtctggtgaactggttcctggcaaagtgattcgccttgaagccagtgatgatcgtattgtggcagtgcagtaa

SEQ ID NO: 6878 - protein, 861 aa, Salmonella enterica subsp. arizonae serovar 62:z4,z23:--
MGGVMRLDRLTNKFQLALADAQSLALGHDNQFIEPLHLMSALLNQEGGSVRPLLTSAGINAGQLRTAIDQALSRLPQVEGTGGDVQPSSELVRVLNLCDKLAQKRGDNFISSELFVLAALESRGTLTDLLKSAGATTANITQAIEQMRGGESVNDQGAEDQRQALKKYTVDLTERAEQGKLDPVIGRDEEIRRTIQVLQRRTKNNPVLIGEPGVGKTAIVEGLAQRIINGEVPEGLKGRRVLALDMGALVAGAKYRGEFEERLKGVLNDLAKQEGNVILFIDELHTMVGAGKADGAMDAGNMLKPALARGELHCVGATTLDEYRQYIEKDAALERRFQKVFVAEPSVEDTIAILRGLKERYELHHHVQITDPAIVAAATLSHRYIADRQLPDKAIDLIDEAASSIRMQIDSKPEELDRLDRRIIQLKLEQQALMKESDEASKKRLDMLNEELDDKERQYSELEEEWKAEKASLSGTQTIKAELEQAKIAIEQARRVGDLARMSELQYGKIPELEKQLEAATQSEGKTMRLLRNKVTDAEIAEVLARWTGIPVARMLEGEREKLLRMEQELHSRVIGQNEAVEAVSNAIRRSRAGLSDPNRPIGSFLFLGPTGVGKTELCKALANFMFDSDDAMVRIDMSEFMEKHSVSRLVGAPPGYVGYEEGGYLTEAVRRRPYSVILLDEVEKAHPDVFNILLQVLDDGRLTDGQGRTVDFRNTVVIMTSNLGSDLIQERFGELDYGRMKEMVLGVVGHNFRPEFINRIDEVVVFHPLGEQHIAAIAQIQLQRLYKRLEERGYEIHISDEALKLLSANGYDPVYGARPLKRAIQQQIENPLAQQILSGELVPGKVIRLEASDDRIVAVQ

SEQ ID NO: 6879 - DNA, 2463 bp, Salmonella enterica subsp. enterica serovar Paratyphi B str. SPB7
  CDS (1)..(2463): transl_table=11
ttgctgaaccaggaagggggatcgatacgtcctttattaacctccgccggcattaatgctggccagttgcgcaccgctatcgatcaggcgctgagccgtttaccgcaggtggaaggcaccggcggcgacgtacagccttcttcggaactggtacgcgtactgaacctttgcgacaagctggcgcaaaaacggggagacaattttatttcgtcagagctgtttgttctggcggcgcttgagtctcgcggcacgttaaccgatctgctgaaatcagccggtgcgaccacggccaatatcactcaggcaattgaacagatgcgcggaggtgaaagcgtgaacgatcaaggggctgaagaccaacgtcaggccttgaaaaaatataccgtcgatctgaccgagcgggctgaacaaggtaagcttgacccggtaattggtcgtgatgaagaaattcgccgtaccattcaggtactgcaacgtcgtactaaaaacaacccggtgttaatcggtgagccaggggtcggtaaaacggcaattgttgaaggactggcgcaacgtattatcaacggtgaagtaccggaaggcctgaaaggccgtcgcgtgctggcgctggatatgggcgcgctggtggccggggcgaaatatcgcggcgaatttgaagagcgtctgaaaggcgtgctgaacgatctggcgaaacaggaaggcaacgtcatcctgtttatcgacgagctgcacaccatggttggcgcaggtaaagctgatggcgccatggatgccggtaacatgctgaaaccggcgctggcgcgtggggaactgcactgtgtgggcgccaccacgctggacgaatatcgtcagtacatcgaaaaagacgcggcgctggaacgccgattccagaaagtgttcgtggcagagccgtcggtggaagacaccattgcgattttgcgtggcctgaaagaacgttacgagctgcaccaccatgtgcagatcactgacccggcgattgtggcggcggcaacattgtctcatcgctatatcgccgaccgtcagttgccggataaagctatcgacctcatcgatgaagcggcatccagcattcgtatgcagattgactctaagccggaggagctggacaggctcgaccgccgtattattcagctcaaactggaacagcaggcgttgatgaaagagtctgacgaggcgagtaaaaaacgtctcgatatgctcaacgaagaactggacgacaaagagcgccagtattctgagctggaagaagagtggaaagcggaaaaagcgtcgctctctggtacgcaaactattaaagcggagctggagcaggcgaagattgccatcgagcaggcgcgccgcgttggcgacctggcgcgaatgtctgaattgcagtacggcaaaattccggagctggaaaaacagttggaagccgcgacccagtcggaaggtaaaaccatgcgtctgttacgtaacaaagtaacggatgcggaaattgccgaagtgctggcgcgctggaccggtattccggttgccagaatgctggaaggcgaacgtgaaaaactgttgcgtatggaacaagagttacacagccgtgtgatcgggcagaatgaagccgttgaagcagtatcgaacgccatacgtcgtagccgcgcggggctgtccgatccgaaccgtccgattggttccttcctgttccttgggccgacgggggtcggtaaaaccgaactgtgtaaagcgctggctaactttatgttcgacagcgacgacgcgatggtgcgtatcgatatgtccgagtttatggagaaacactccgtgtctcgtttggtcggggcgcctccgggatatgtcggctatgaagaaggcggttatttgacggaagcggtacgccgtcgtccttattccgtcatcttgttggatgaagtagaaaaagcgcatccggatgtattcaacattctgttgcaggtgctggacgacggtcggctgactgacgggcaggggagaacggtcgacttccgtaatacggtggtcattatgacttctaacctcggttccgatctcattcaggagcgctttggcgaactggattacggtcgaatgaaagagatggtgctgggtgtggttagccaaaacttccgtccggaatttatcaaccgtattgatgaagttgtggtattccatccgttaggtgaacaacacatcgcttctattgctcagatccagctgcagcgtctgtacaaacgtctggaagaacgtggttatgaaatccatatctccgacgaggcgctgaaactgttgagcgccaacggttacgatccagtctacggggcgcgtccgttaaaacgtgctattcaacagcagatcgaaaacccactggcgcagcaaatcctgtctggtgaactggttcctggcaaagtgattcgccttgaagccaatgatgatcgtattgtggcagtgcagtaa

SEQ ID NO: 6880 - protein, 820 aa, Salmonella enterica subsp. enterica serovar Paratyphi B str. SPB7
MLNQEGGSIRPLLTSAGINAGQLRTAIDQALSRLPQVEGTGGDVQPSSELVRVLNLCDKLAQKRGDNFISSELFVLAALESRGTLTDLLKSAGATTANITQAIEQMRGGESVNDQGAEDQRQALKKYTVDLTERAEQGKLDPVIGRDEEIRRTIQVLQRRTKNNPVLIGEPGVGKTAIVEGLAQRIINGEVPEGLKGRRVLALDMGALVAGAKYRGEFEERLKGVLNDLAKQEGNVILFIDELHTMVGAGKADGAMDAGNMLKPALARGELHCVGATTLDEYRQYIEKDAALERRFQKVFVAEPSVEDTIAILRGLKERYELHHHVQITDPAIVAAATLSHRYIADRQLPDKAIDLIDEAASSIRMQIDSKPEELDRLDRRIIQLKLEQQALMKESDEASKKRLDMLNEELDDKERQYSELEEEWKAEKASLSGTQTIKAELEQAKIAIEQARRVGDLARMSELQYGKIPELEKQLEAATQSEGKTMRLLRNKVTDAEIAEVLARWTGIPVARMLEGEREKLLRMEQELHSRVIGQNEAVEAVSNAIRRSRAGLSDPNRPIGSFLFLGPTGVGKTELCKALANFMFDSDDAMVRIDMSEFMEKHSVSRLVGAPPGYVGYEEGGYLTEAVRRRPYSVILLDEVEKAHPDVFNILLQVLDDGRLTDGQGRTVDFRNTVVIMTSNLGSDLIQERFGELDYGRMKEMVLGVVSQNFRPEFINRIDEVVVFHPLGEQHIASIAQIQLQRLYKRLEERGYEIHISDEALKLLSANGYDPVYGARPLKRAIQQQIENPLAQQILSGELVPGKVIRLEANDDRIVAVQ

SEQ ID NO: 6881 - DNA, 2565 bp, Pseudomonas putida GB-1
  CDS (1)..(2565): transl_table=11
atgcgaatagaccgtttgaccagcaagctgcaacttgcaatatccgatgcccagtccctggccgttggcatggaccaccctgccatcgagcccgtgcacctggtacaggcgctgcttgaacaacagggcggctccatcaagcctctgctgatgcaggtaggcttcgacatcaacagcctgcgccaagggctggtgaaagagctcgaccaactgccgaaaatccagaaccccaccggcgatgtgaacatgtcgcaggacctggcgcgcctgctcaaccaggccgaccgcctggcccagcagaagggtgaccagttcatttccagcgaactggtactgctggccgccatggacgagaacagcaaactcggcaaactgctgctgagccagggcgtgaccaagaaagccctggaaaacgccatcaacaacctgcgcggcggcgcggcagtgaatgacgccaacgccgaggaatcgcgccaggccctggacaagtacaccgtcgacctgaccaagcgtgccgaagaaggcaagctggacccggtgatcggccgtgacgatgaaatccgccgtaccgtgcaggtactgcaacgccgtaccaagaacaacccggtgctgatcggtgagcctggcgtgggtaaaaccgccatcgccgagggcctggcccagcgcatcatcaatggtgaagtgccagacggcctcaagggcaagcgcctgctggcgctggacatgggggcgctgattgccggtgccaaataccgcggcgagttcgaagagcgtctgaaaggcctgctgaacgagctgtccaagcaggaaggccagatcatcctgttcatcgacgaactgcacaccatggtcggcgctggcaaaggcgagggcgccatggacgccggcaacatgctcaagccggccctggcccgcggcgagttgcactgcgtcggtgccactacgctgaacgagtatcgccagttcatcgagaaggacgccgccctggagcgccgtttccagaaggtgctggtagaggagccgagcgaggaagacaccatcgccatcctgcgtggcctgaaagagcgctatgaagtgcaccacaaggtggccatcaccgacggtgcaattatcgctgcggccaagctcagccatcgctacatcactgaccgccagttgccggacaaggccattgacctgatcgacgaagcggccagccgtatccgtatggagatcgactccaagccggaagtgctcgaccgccttgatcgccgcctgatccagttgaaggtggagtcgcaggcgctgaagaaagaagaagacgaagcggcaaaaaaacgcctggagaagctgaccgaggaaatcgagcggctggagcgtgagtattccgacctggaggaaatctgggcctcggaaaaagccgaagtgcagggctcggcgcagatccagcaaaagatcgagcaggctcgccaggagctggaaaccgcccgtcgcaaaggcgacctgagccgcatggccgaactgcagtacggggtgatcccggacttggagcgcagcctgcagatggtcgaccagcacggcaagaccgagaaccagttgctgcgcaacaaggtgaccgaggaagaaattgccgaagtggtgtcgaagtggaccggtattcccgtggccaagatgctcgaaggcgagcgtgagaagctgctgaagatggaagcgttgctgcaccagcgcgtgatcggtcagggcgaggcggtaaccgccgtggcgaacgccgtgcgccgctcgcgtgccgggctgtccgacccgaaccggccaagtggttcgttcctgttcctcggccctaccggcgtgggcaagaccgaactgtgcaaggcgctggccgagttcctgttcgacaccgaagaggcgatggtgcgcatcgacatgtccgagttcatggagaagcactccgtggctcgcctgattggtgcaccgccaggctatgtaggttatgaagagggcggctacctgaccgaggctgtacggcgcaagccatactcggtggtgctgctggacgaggtggagaaggcccacccggatgtgttcaacgtactgctgcaggtgctggaagacggccgcctgactgacagtcatgggcgcaccgtggacttccgcaacaccgtgatcgtgatgacttccaacctgggctcggcgcagattcaggagctggtgggtgaccgcgaggcgcaacgtgcggcggtgatggatgcggtgggtgcgcacttccgtccggagttcatcaaccgcatcgacgaagtggtggtgtttgagccactgggccgtgagcagatcgccggcattaccgagattcagctgggccgcctgcgcagccgtctgctggagcgcgaactgtcgctgagcttgagcccggacgcgttggacaagctgattgccgtgggttacgaccctgtatacggcgcacggccgctgaagcgggcaatccagcgctggatcgaaaacccattggcgcagctgatcctggcaggcaagtttgtgccgggtgcggcgattaccgccaaggtggaaggcgacgaaatcgtctttggctaa

SEQ ID NO: 6882 - protein, 854 aa, Pseudomonas putida GB-1
MRIDRLTSKLQLAISDAQSLAVGMDHPAIEPVHLVQALLEQQGGSIKPLLMQVGFDINSLRQGLVKELDQLPKIQNPTGDVNMSQDLARLLNQADRLAQQKGDQFISSELVLLAAMDENSKLGKLLLSQGVTKKALENAINNLRGGAAVNDANAEESRQALDKYTVDLTKRAEEGKLDPVIGRDDEIRRTVQVLQRRTKNNPVLIGEPGVGKTAIAEGLAQRIINGEVPDGLKGKRLLALDMGALIAGAKYRGEFEERLKGLLNELSKQEGQIILFIDELHTMVGAGKGEGAMDAGNMLKPALARGELHCVGATTLNEYRQFIEKDAALERRFQKVLVEEPSEEDTIAILRGLKERYEVHHKVAITDGAIIAAAKLSHRYITDRQLPDKAIDLIDEAASRIRMEIDSKPEVLDRLDRRLIQLKVESQALKKEEDEAAKKRLEKLTEEIERLEREYSDLEEIWASEKAEVQGSAQIQQKIEQARQELETARRKGDLSRMAELQYGVIPDLERSLQMVDQHGKTENQLLRNKVTEEEIAEVVSKWTGIPVAKMLEGEREKLLKMEALLHQRVIGQGEAVTAVANAVRRSRAGLSDPNRPSGSFLFLGPTGVGKTELCKALAEFLFDTEEAMVRIDMSEFMEKHSVARLIGAPPGYVGYEEGGYLTEAVRRKPYSVVLLDEVEKAHPDVFNVLLQVLEDGRLTDSHGRTVDFRNTVIVMTSNLGSAQIQELVGDREAQRAAVMDAVGAHFRPEFINRIDEVVVFEPLGREQIAGITEIQLGRLRSRLLERELSLSLSPDALDKLIAVGYDPVYGARPLKRAIQRWIENPLAQLILAGKFVPGAAITAKVEGDEIVFG

SEQ ID NO: 6883 - DNA, 2547 bp, Mycobacterium abscessus
  CDS (1)..(2547): transl_table=11
gtggactcgttcaatccgaccacgaagactcaggccgcgctgaccgctgccctccaggcagcgaccacggcaggcaatcccgaaatccgtccggctcacctattagtggcactgctcggccagaccgacggcatcgccgcgccgcttctgcaggccgtgggcgtcgatccggtgtccgtacgcaacgaagcgcaggctatcgccgatcgacttccgcaggtcagcaacgccagcgccaatccgcagctctcgcgtgactcgattgccgccgtgacggcggcacagcatctggccaccgagctcaatgacgactatgtgtcgaccgagcacttgctggtcggcctggcgaccggagactccgatatcgccaagctcctcgtcaatcacggtgccacgccgcaggcgctgcgcgatgccttcgtccaggtgcgcggtagcggccgggtcaccagccccgaacccgaggcgacattccaggcgctggagaagtactccaccgacctgactgcccgggcccgtgagggcaagcttgacccggtgatcgggcgcgataccgaaatccggcgcgtggtacaggttttgagccgtcgcaccaagaacaacccggtgctgatcggtgagcccggtgtcggcaagaccgccatcgtggaaggtctggcgcagcgcatcgtggccggtgacgtgcccgagagcctgcggggcaagaccgtcatctcgctggacctgggttccatggtggcgggcgccaagtaccgcggcgagttcgaggagcggctcaaggctgtcctcgatgagatcaagaactctgcgggacaactgattacgttcatcgatgagctgcacaccatcgtgggcgcgggcgcgaccggtgagtcggcgatggatgccggcaacatgatcaagcccatgttggcccgcggtgagctgcgtctggtcggcgcgaccacactcgacgagtaccgcaagtacatcgagaaggacgccgccctggagcgccgtttccagcaggtgctggtcggcgagccctcggtagaggacaccatcggcattctgcgcggcatcaaggaacgctacgagatccaccacggcgtccggatcaccgactcggcgctggtggccgcggcgaccttgtcggatcgctacatcacctcgcgcttcctgccggataaggccatcgacctggtcgacgaggccgcatcccggctgcgcatggagatcgactcgcggcccgtcgagatcgacgaggtggagcgggtggtccgtcgtcttgagatcgaagagatggcgctgtccaaggaagaggacgaagcgtccaagcagcggttggagaagctgcgcgtcgagctcgccgacaagaaggagcggctcgccgagctcaccgcgcggtggcagaacgagaagagttcgatcgatgccgtccgcgatctcaaggagcagctggaaaccctcaagggcgaatccgaccgcgccgagcgcgacggagatctgggcaaggccgccgagctgcgctacggtcgcatcccagagctggaaaagcaactggagcaagcactcccgggtctggatcacgatggcaatgtcatgctcaaggaggaggtcagtcccgacgacgtcgccgatgtggtgtcggcatggaccggcattcctaccgggcgtctcatggagggcgagacagccaagttgttgcgcatggaggacgagctgggcaagcgcgtcgtcgggcagaagaaggccgtcgaggctgtttcggatgccgtgcgtcgtgcgcgagccggtgtcgccgaccccaaccgtcccaccggatcgttcctgttcctgggacccaccggtgtcggtaagaccgaactggccaaggcgctggcggacttcctgttcgatgacgagcacgccatggtgcgtatcgacatgtccgagtacggcgaaaagcattcggtcgcacgacttgtcggtgcaccacccggatacgtcggatatgacgcgggcggccagctgaccgaagcggtgcggcgacgcccgtacacggtggtgctgttcgatgaggtcgaaaaggcgcacccggacgtgttcgatgtgctgctgcaggtgctcgacgagggacgtctcaccgacggccagggccgcacggtggacttccggaacaccatcttgatcctcacctccaacctgggggctggcggttccgaagagcaggtgatggcggcggtgcgcgcgaagttcaagccggaattcatcaaccggctcgacgatgtgctcatcttcgatggcctcaaccccgaggagctggtgcagatcgtcgacatccagctgggacagctgcagaagcggctggcgcaacgccggctgacactcgaagtgtccgcgcccgccaagaagtggctggcagcccgcggtttcgacccgatttacggggcccggccgttacgccgactggtgcagcagtccatcggtgaccagctggccaagcagctgctggcgggtgaggtacacgacggtgatgtcgtgccggtgaacgtgagcgcggacggcgaatcgctcattctgggataa

SEQ ID NO: 6884 - protein, 848 aa, Mycobacterium abscessus
MDSFNPTTKTQAALTAALQAATTAGNPEIRPAHLLVALLGQTDGIAAPLLQAVGVDPVSVRNEAQAIADRLPQVSNASANPQLSRDSIAAVTAAQHLATELNDDYVSTEHLLVGLATGDSDIAKLLVNHGATPQALRDAFVQVRGSGRVTSPEPEATFQALEKYSTDLTARAREGKLDPVIGRDTEIRRVVQVLSRRTKNNPVLIGEPGVGKTAIVEGLAQRIVAGDVPESLRGKTVISLDLGSMVAGAKYRGEFEERLKAVLDEIKNSAGQLITFIDELHTIVGAGATGESAMDAGNMIKPMLARGELRLVGATTLDEYRKYIEKDAALERRFQQVLVGEPSVEDTIGILRGIKERYEIHHGVRITDSALVAAATLSDRYITSRFLPDKAIDLVDEAASRLRMEIDSRPVEIDEVERVVRRLEIEEMALSKEEDEASKQRLEKLRVELADKKERLAELTARWQNEKSSIDAVRDLKEQLETLKGESDRAERDGDLGKAAELRYGRIPELEKQLEQALPGLDHDGNVMLKEEVSPDDVADVVSAWTGIPTGRLMEGETAKLLRMEDELGKRVVGQKKAVEAVSDAVRRARAGVADPNRPTGSFLFLGPTGVGKTELAKALADFLFDDEHAMVRIDMSEYGEKHSVARLVGAPPGYVGYDAGGQLTEAVRRRPYTVVLFDEVEKAHPDVFDVLLQVLDEGRLTDGQGRTVDFRNTILILTSNLGAGGSEEQVMAAVRAKFKPEFINRLDDVLIFDGLNPEELVQIVDIQLGQLQKRLAQRRLTLEVSAPAKKWLAARGFDPIYGARPLRRLVQQSIGDQLAKQLLAGEVHDGDVVPVNVSADGESLILG

SEQ ID NO: 6885 - DNA, 2511 bp, Clavibacter michiganensis subsp. sepedonicus
  CDS (1)..(2511): transl_table=11
atgttcgagagattcaccgaccgcgctcgtcgcgtcgtcgtcctggcccaagaagaggccaagatgctcaaccacaactacatcgggaccgagcacatcctgctcggactcatccacgagggcgaaggcgtggccgccaaggccctggagtcgctcggcatctccctcgatgccgtccgcgaacaggtccaggacatcatcggccagggccagcagcagcccacgggtcacatcccgttcacgccgcgcgcgaagaaggtcctggagctgtcgctccgcgaggccctccagctcggccacaactacatcggcaccgagcacatcctgctcggcctgatccgcgagggcgagggcgtcgccgcccaggtgctcgtcaagctcggcgccgacctcaaccgcgtgcgccagcaggtcatccagctcctgtccggataccagggcaaggaggcggtcgccgtcggcggcgaggcgcagcagagccagcaggctggctccacggtcctcgaccagttcgggcgcaacctcacgcaggcggcgcgcgacggcaagctcgaccccgtcatcggccgcgagaaggagatcgagcgcgtgatgcagatcctgtcgcgccgctccaagaacaaccccgtcctcatcggcgagcccggcgtcggcaagaccgccgtcgtcgagggcctggcgcaggccatcgtcaagggcgacgtcccggagacgctgaaggacaagcagctctacacgctcgacctcggctcgctcatcgccgggtcccgctaccggggcgacttcgaggagcgcctcaagaaggtcaccaaggagatccgcacgcgcggcgacatcatcaccttcatcgacgagatccacaccctcgtcggcgcgggcgccgccgagggcgcgatcgacgcggccagcatcctcaagccgctcctcgcgcgcggcgagctgcagaccatcggcgccaccacgctggatgagtaccgcaagcacttcgagaaggacgcggccctcgagcgccgcttccagcccatccaggtgcaggagccctcgctgccccacaccatcaacatcctcaagggcctgcgcgaccgctacgaggcgttccacaaggtgtccatcaccgatggcgccatcgtctcggccgcgaacctggcggaccgctacatcgcggaccgcttcctgcccgacaaggccatcgacctgatcgacgaggccggcgcgcgcctgcgcctctcgatcctgtcggcgccaccggagctccgcgagttcgacgagcgcatctccacggtccgcgtggccaaggagaccgccatcgaggaccaggacttcgagaaggccgcgagcctgcgcgacgaggagaagaacctcctgggcgagcgcctccggctcgagaagcagtggcgctcgggcgacgtccgcaccaccgccgaggtcgacgagggcctgatcgccgaggtcctggcccaggccacgggcatccccgtgttcaagctcacggaggaggagtcctcgcgcctcgtcttcatggagaaggccctgcaccagcgggtcatcggccaggaggaggccatctcggccctgtccaagaccatccgccgcacccgcgccgggctgaaggacccccgtcgtccctcggggtcgttcatcttcgccggccccacgggcgtcggcaagacggagctcgcgaaggcgctggcggagttcctcttcgacgacgaggacgccctcatctcgctcgacatgagcgagtacggcgagaagcacaccgtgagccgcctcttcggcgcccctcccggattcgtcggcttcgaggagggcggccagctcaccgagaaggtgcgccgcaagccgttctccgtggtgctcttcgacgagatcgagaaggcccacccggacatcttcaactcgctgctccagatcctggaggagggacgcctgacggatggccagggccgcgtggtcgacttcaagaacacggtcatcatcatgaccaccaacctcggcaccaaggacatcacgggcgccccggtcgggttccaggtcgagaacaacgccgcgaactcctacgagcgcatgaagggcaaggtcagcgaggagctgaagaagaacttcaagcccgagttcctcaaccgcgtggacgacaccatcgtgttcccgcagctgtcgaagcccgagctgctccagatcgtcgacctgttcgtgaagcgcctgtcggaccgcatgatggaccgcgacctcacgatcacgctcgagaccgccgcgaaggagcgcctcatcgaggtcggcttcgacccgtcgctcggcgcgcggcccctccgccgcgcggtgcagcacgagatcgaggaccgcctgtcggagcgcatcctgcagggcgagctcaacgcgggcgaccacgtgcacgtggactacgtggacgaccagttcacgttcgtcaccacgcagcgcgagggcatctcggtcgcggccgggatcggcacggggaccggcacgccggacctcgccatcaccagcgagtag

SEQ ID NO: 6886 - protein, 836 aa, Clavibacter michiganensis subsp. sepedonicus
MFERFTDRARRVVVLAQEEAKMLNHNYIGTEHILLGLIHEGEGVAAKALESLGISLDAVREQVQDIIGQGQQQPTGHIPFTPRAKKVLELSLREALQLGHNYIGTEHILLGLIREGEGVAAQVLVKLGADLNRVRQQVIQLLSGYQGKEAVAVGGEAQQSQQAGSTVLDQFGRNLTQAARDGKLDPVIGREKEIERVMQILSRRSKNNPVLIGEPGVGKTAVVEGLAQAIVKGDVPETLKDKQLYTLDLGSLIAGSRYRGDFEERLKKVTKEIRTRGDIITFIDEIHTLVGAGAAEGAIDAASILKPLLARGELQTIGATTLDEYRKHFEKDAALERRFQPIQVQEPSLPHTINILKGLRDRYEAFHKVSITDGAIVSAANLADRYIADRFLPDKAIDLIDEAGARLRLSILSAPPELREFDERISTVRVAKETAIEDQDFEKAASLRDEEKNLLGERLRLEKQWRSGDVRTTAEVDEGLIAEVLAQATGIPVFKLTEEESSRLVFMEKALHQRVIGQEEAISALSKTIRRTRAGLKDPRRPSGSFIFAGPTGVGKTELAKALAEFLFDDEDALISLDMSEYGEKHTVSRLFGAPPGFVGFEEGGQLTEKVRRKPFSVVLFDEIEKAHPDIFNSLLQILEEGRLTDGQGRVVDFKNTVIIMTTNLGTKDITGAPVGFQVENNAANSYERMKGKVSEELKKNFKPEFLNRVDDTIVFPQLSKPELLQIVDLFVKRLSDRMMDRDLTITLETAAKERLIEVGFDPSLGARPLRRAVQHEIEDRLSERILQGELNAGDHVHVDYVDDQFTFVTTQREGISVAAGIGTGTGTPDLAITSE

SEQ ID NO: 6887 - DNA, 2940 bp, Synechococcus sp. PCC 7002
  CDS (1)..(2940): transl_table=11
atgcagcccaccgattccagcaaattcaccgaacaagcttgggatgcgatcgtcaagtcacaggagatcgcccgtcgctacagacaccaaaatcttgaggtggaacatctactcttgtcattgctagaacaggagcaggaacagggattggcccaaacgattttgacccagacaggtgtcgatgggatcaggctccagcagcaattagaacggtttgcccagcagcagcccaaattaatgcggggtgatcagctctatctcggtcaaggtttagacgtgatgttagaccgggccgaggcctgtcgcaatagttggcaggatgattttatttctgttgagcatttgctggtgggctttgcggaggatgatcgcattgggcggcgatcgctgaaaagttttaacctcgacccccaggatctcgaactcaaaatcaaagaactcaaaggtagccaaaaggtcaccgcccagaaccaagaagagagtggcagttcctatggtggtagtcctctaagtaaatatggccgcgatctcaccgaacaggccaaggacggcaaacttgatccagtgattgggcgggatgatgagattcggcgcgtgattcaggtgctttctcggcgctcgaaaaataatccggttttaattggggaaccaggggttgggaaaacggcgatcgccgaaggtttagcccaacgaatcgtcaatggcgacgtgcccgaatccctgaaaaatcggcagttgatgtccctcgatatgggttccctcattgccggcgcaaaataccggggcgaatttgaagcccgtctgcggtctgtgcttaaagaagtgacccagtccgacggacaaattattctctttattgatgaagtccacaccgttgttggcgcaggttctgctaatggctcgatggatgcggggaatttactcaaaccgatgttggcacggggcgaattgcgctgtattggggcgaccaccctcgacgaattccgcaaacatatcgaaaaagatcccgccctcgaacggcgtttccagcaagttttagtccaacagcccaccgtggaagataccgtttccattctgcggggcttaaaagaacgctatgaactgcaccacggcgtcaatattaccgactccgccctcgttgccgctgccaccctctccaaccgttacatcaccgaccgttttctccccgataaggcgatcgatctagtagacgaagccgccgccaaactgaaaatggagattacctccaaacccgttgaactcgaagccatcgatcgccgcttaatgcaactccagatggagcaactctccctcaagggtgaagaacaactcggcaccacttcccccgcctatctcgcctctaaggaacgtttagaccgcatcgacgaagaaatcaaaagcctagaagttcaacaaaaggatctttcttcccaatggcttgccgagaaaaatctcattgacgaaattaattccctcaaggaagaggaagaacaactgcgcctccaggtggagcaagccgaacgggcctatgacctcaacaaagcggctcagttgaaatatggtcgtttagaagggttacaggcagaactgagcgaaaaagaagcgaaactgctggaaatccaagcggctggggatgccatgttacgggagcaggtcacggaagccgatatcgccgaaattgttgcccgttggacggggattcccgtgaatcgtctgatggaatcggaacggcaaaaactcctgcaactcgaaggtcatttacatgaacgggtgatcggtcaacaggaagctgtggaagctgtctcagcggcaattcgtcgcgcccgggctgggatgaaggatcccagtcgcccgattggttcgtttatgtttatgggaccgaccggagtcgggaaaacagaattagcgcgggccttagctgccttcctttttgatagtgaagaggcgatggtgcgcattgacatgtccgaatacatggaaaaacatgctgtatcccgtttgattggtgcccctcccggttatgtgggctatgaggagggggggcagctgtcggaggcggtgcggcgtcgtccctattcggtggtgctgctggatgaggtcgagaaagcccataaggatgtattcaatattctcttgcaggtgttggatgacggccggattacggattcccaaggacgggtggtggacttccgcaatacaatcattgtgatgacgagcaatatcggcagtgaatttatcctcagtttgtcgggggatgatgccaactatgacaagatgcgggacaaggtgacaggggcgttacggaaaaatttccgcccggaatttttgaaccgcattgacgaactgattattttccatactttgaagcgggatgagttgcgcgaaattgtcaaactgcaaatccatcgcatcgaaaaactattggccgaccaaaaaattacgttatcgcttacggatgcggccctcgatcatgtggtggaagcgggttatgacccgacctttggggcaagacctttaaaacgggcaatccagcgggaactagaaaatcctatcgctaaccgcatcttagaaacagacttcatggaaggcgatcgcattttggtcgattgcgtcgagggtgccttggtttttgatcggcagcgacccgaacgagaagtgccagaggtgatttcggaagaggcgatcgccccagcaccggaagagcaacccacagaaccagaagaggcatccataacagaaacagaaatccttcctgtcgtcgcaccggatgaaattgtggttgcagaggctgaactcgatgaacccgatgatcaatggtttggtgccgatgagccagagcaaacagccaatggcgtagaatacccgaccagagaaacaaatcctccagcctatgttggtgctgattctgactcagaagaaaattggttagattctatctag

SEQ ID NO: 6888 - protein, 979 aa, Synechococcus sp. PCC 7002
MQPTDSSKFTEQAWDAIVKSQEIARRYRHQNLEVEHLLLSLLEQEQEQGLAQTILTQTGVDGIRLQQQLERFAQQQPKLMRGDQLYLGQGLDVMLDRAEACRNSWQDDFISVEHLLVGFAEDDRIGRRSLKSFNLDPQDLELKIKELKGSQKVTAQNQEESGSSYGGSPLSKYGRDLTEQAKDGKLDPVIGRDDEIRRVIQVLSRRSKNNPVLIGEPGVGKTAIAEGLAQRIVNGDVPESLKNRQLMSLDMGSLIAGAKYRGEFEARLRSVLKEVTQSDGQIILFIDEVHTVVGAGSANGSMDAGNLLKPMLARGELRCIGATTLDEFRKHIEKDPALERRFQQVLVQQPTVEDTVSILRGLKERYELHHGVNITDSALVAAATLSNRYITDRFLPDKAIDLVDEAAAKLKMEITSKPVELEAIDRRLMQLQMEQLSLKGEEQLGTTSPAYLASKERLDRIDEEIKSLEVQQKDLSSQWLAEKNLIDEINSLKEEEEQLRLQVEQAERAYDLNKAAQLKYGRLEGLQAELSEKEAKLLEIQAAGDAMLREQVTEADIAEIVARWTGIPVNRLMESERQKLLQLEGHLHERVIGQQEAVEAVSAAIRRARAGMKDPSRPIGSFMFMGPTGVGKTELARALAAFLFDSEEAMVRIDMSEYMEKHAVSRLIGAPPGYVGYEEGGQLSEAVRRRPYSVVLLDEVEKAHKDVFNILLQVLDDGRITDSQGRVVDFRNTIIVMTSNIGSEFILSLSGDDANYDKMRDKVTGALRKNFRPEFLNRIDELIIFHTLKRDELREIVKLQIHRIEKLLADQKITLSLTDAALDHVVEAGYDPTFGARPLKRAIQRELENPIANRILETDFMEGDRILVDCVEGALVFDRQRPEREVPEVISEEAIAPAPEEQPTEPEEASITETEILPVVAPDEIVVAEAELDEPDDQWFGADEPEQTANGVEYPTRETNPPAYVGADSDSEENWLDSI

SEQ ID NO: 6889 - DNA, 2595 bp, Synechococcus sp. PCC 7002
  CDS (1)..(2595): transl_table=11
atgcaacccactaacccgaatcaatttaccgaaaaagcctggcaggcgatcgcccaaacgccggacattgccaaacaaaatcagcagcagcagatcgaatctgaacatctgctacaggcactgttagagcaagacggcctcgcgaaaagtatttttaccaaagcggagattcccctctcaacattgcgagaccgcaccgcaacctttattgcccagcaaccgaaaatatcccaaccgagcgaatcggtttatttaggccggagtttagacctccttttagaccgcgccgatcaacaccgaaaatcctttggggatgactttatttccgttgaacatttaatcttgagctatgccaaagatgaccgttttggcaaaaatctctacaaagaatttgacctcacagaaaataaattaaagacgatcattacgcaaattcgaggtaatcaaaaggtgaccgaccaaaacccggaagggaaatacgaatccttagaaaaatatggccgtgatttaacgagtctcgcccgcaacggcaaactagacccggtcattggtcgcgatgatgaaattcgccgcacgattcaaattctctcccgccgcacgaaaaataatccggttttgatcggggaaccaggggtcgggaaaacggcgatcgccgaaggattagcccagcggatcgttaaccgtgatgtccccgaatccctaaaagatcgcaccctaatcgccttggatatggggtcgctcattgctggggcaaaatatcgtggtgaatttgaagaacgcctcaaagctgttttaaaagaagtcaccgattccgaagggcagatcattctctttattgacgaaatccacaccgttgtcggcgctggggcgacccagggggcaatggatgccgggaacctgcttaaacccatgctcgcccggggtgaactgcgttgtattggcgcgacgaccctcgatgaataccgtaaatacatcgaaaaagatgcggccctagaacggcgcttccagtcggtgatggtcaacgaacccaatgtggtcgataccatctcgattctgcggggtctgaaggaacgctacgaagtgcaccacggggtcaaaatcgccgatacagccctcgttgctgccgcgatgctctccaaccgttacattagcgatcgctttttaccggacaaggccattgatctggtggacgaagccgccgccaaactgaagatggagatcacctccaagccagaagaactggatgaaattgaccggaaaattctccagttggaaatggaaaaactctccatccaaaaggaaaaagatgaagtttcccttgagcgactcgccaagctggaaaaagaactggccaattttaaggaagagcagtcccaactcaacgcccagtggcaatcggaaaaagaatttatcgacaaaattcgctttcttaaggaggaaatcgataaaaccaacctagaaattcaacaggccgaacgcaattatgacctcaataaggcggcagagttgcgctacgggaagttgacggaactgcaacaaaaaatcaaagatatcgagagcaatctcgcggcccaacaggtaactggagaatctctgctacgggaagaagtgatcgagtcggatatcgctgaaatcatttcaaaatggacaggtatcccgattagtaaattaatcgaatcggaaaaagaaaagctgctccacctcgaagcagaactccaccgtcgggttgtcggccaagaagaagccgttaccgccgttgccgaagcgatccagcgatcgcgcgccggactcgccgatcccaaccgtcctacggcgagctttattttcctggggccgacgggggtcgggaaaacagaactcgccaaagccctcgcccaatttctctttgataccgaagaagccctcgtgcggatcgatatgtccgaatacatggagaaacacgccgtttcccgtttaatgggagcgcctccaggctatgtgggctatgaagaagggggccagttaacggaagcaattcgccgccgtccctactcggtgattctctttgatgaaattgaaaaggcccacgccgatgtgtttaatgtgatgctgcaaatcctggatgatggccgtttgaccgattcccaggggcggacagtggactttaaaaacacggtgatcatcatgaccagtaatatcggttcccaatttattctcgatattgccggggatgatgcccgttacgaggaaatgcgcaatcgggtaatggaggcgatgaatgcgaacttccggccggaatttctcaaccgcatcgatgaactgattattttccatggtctacaaaaagatcaactgcgttctattgttcaacttcaggtgaatcgcctcgccgaacgcctcgcggaacagaagatcagcattcaactcaccccagaagcctatgatttcattgctgaggtgggttataacccggtctatggtgcgagacccctcaagcgggccgtccagaaatatgtcgaaacggcgatcgccaaagggatcctcaagggtgaatttaaagcaggcagtgccattacagtcgatgtgaaagatgaacgtttgacttttcgtatttaa

SEQ ID NO: 6890 - protein, 864 aa, Synechococcus sp. PCC 7002
MQPTNPNQFTEKAWQAIAQTPDIAKQNQQQQIESEHLLQALLEQDGLAKSIFTKAEIPLSTLRDRTATFIAQQPKISQPSESVYLGRSLDLLLDRADQHRKSFGDDFISVEHLILSYAKDDRFGKNLYKEFDLTENKLKTIITQIRGNQKVTDQNPEGKYESLEKYGRDLTSLARNGKLDPVIGRDDEIRRTIQILSRRTKNNPVLIGEPGVGKTAIAEGLAQRIVNRDVPESLKDRTLIALDMGSLIAGAKYRGEFEERLKAVLKEVTDSEGQIILFIDEIHTVVGAGATQGAMDAGNLLKPMLARGELRCIGATTLDEYRKYIEKDAALERRFQSVMVNEPNVVDTISILRGLKERYEVHHGVKIADTALVAAAMLSNRYISDRFLPDKAIDLVDEAAAKLKMEITSKPEELDEIDRKILQLEMEKLSIQKEKDEVSLERLAKLEKELANFKEEQSQLNAQWQSEKEFIDKIRFLKEEIDKTNLEIQQAERNYDLNKAAELRYGKLTELQQKIKDIESNLAAQQVTGESLLREEVIESDIAEIISKWTGIPISKLIESEKEKLLHLEAELHRRVVGQEEAVTAVAEAIQRSRAGLADPNRPTASFIFLGPTGVGKTELAKALAQFLFDTEEALVRIDMSEYMEKHAVSRLMGAPPGYVGYEEGGQLTEAIRRRPYSVILFDEIEKAHADVFNVMLQILDDGRLTDSQGRTVDFKNTVIIMTSNIGSQFILDIAGDDARYEEMRNRVMEAMNANFRPEFLNRIDELIIFHGLQKDQLRSIVQLQVNRLAERLAEQKISIQLTPEAYDFIAEVGYNPVYGARPLKRAVQKYVETAIAKGILKGEFKAGSAITVDVKDERLTFRI

SEQ ID NO: 6891 - DNA, 2379 bp, Thermotoga sp. RQ2
  CDS (1)..(2379): transl_table=11
atgagaaacctgaacgacaagatgaaggatattttcgagaggagcgtggaggatatcaaagaaagaaatcagaacctgctcagaccagaacacattcttcttcagattctttacgatgaaaacgaggccacgaaggtactgaaagatctcaatgtaaacgtggaggaagtgattactgagctggaggactacatcgattcccagtacgggatatactacggattctccgatcaggtctatgtatcgaaagaactttcttacatcctggagctagcgagaaaggaagccaggcttttcaagcagaaggatataggtcctcttcacttccttctgggactgctgagagatggttccacgcacgctgcccgtgtcctgaagaagtacggcgttgactacgaaaaagtgcttcagacggttaaggagcacgaagaagaatacgcagttgagcagtcaccactcacggcttttgcaaccgatctcacaaaattggcaaaagaaggaaaagtgggtcccatcataggaagagacaaggaaatcgagcgcgtgatagagattctcatgagaaaaaccaagaacaacccaattctcatcggtgatccgggtgttggaaaaaccgccattgtggaaggtctcgcacagagaatcgttgaaggaaaagttcctgatcctctaaaggatgtgcgcatactgatggtagatctcggaaggatgatagcggggaccaaatacaggggagaattcgaagaaaggttgaaatcattcctcgatgaagtgatgaaacagaaagaaaaaacgattctcttcatcgacgagatacacactctggttggtgctggcgcagccgaaggagcgatggacgctgccaacatgttgaaaccggcccttgctcgcggtgaaatacgcgtcataggtgcaaccacgctggatgagtacagaaaacacatagaaaaagataaagcgctcgcgagaagattccagccggtgatggtgagagaaccgagtgtggaagagaccatagagattttgaaggggttgaagaaagtctacgaggagcaccacaaagtgaagatagaggacgaagcgatagaggcagctgccaagctctcagcgagatacataacggacagattcttgccagacaaggcgattgacctgctggatgaggcggcagcgagagtgagactcagtgctacaaaacaggaaaaggatgaaacgaagcttcgcgagctcgaggaaaaaataaaagagcttgaaacgaaaatcgatgagctcactataagatctcagtacaaagaagcggctgatctcaagaaagaactcttcaagctcaaaaatgagtatgaagctttgaagagtgggaaaccggttgtcacagcggaaaaaatagcagaagtggttgaatcctggtctggtgttccagtttccagaatcgttgaatctgaaaaggaaaagcttctgaagctcgaagagataatccaccagaggctcgtggaccaggaggaagcggttaaggtagtggccgatgccatcaggaaggcaagggctggaataaaagatcctaacaggccagttggtaccttcctctttcttggaccaacgggtgttggtaagactgagctcgcaaagacactcgctgaagtgctctttggaagcgaaaacgcactcatacgaatcgacatgaccgaatacatggaaaagcacgctgtctccaagctgataggagcacctccgggatacgttggttacgaggaaggtggtcaactgaccgaagccgtaagaagaagaccgtacagtgtcatactgctcgatgagattgaaaaagcgcatccggatgtgttcaacatactgcttcagataatggacgatggaagactcacagacagcaaaggaaacgttgttgatttcaagaacacgatcatcatcatgacaagtaacatagcaagtgatctgatactgaactacgttaaagaaggaaagagctttgatgagattgaagaaagagtcagagaagagctgaaacactacttcagacccgagttcataaacaggatagaccatgtcgttgtcttcaaaccgctcacaaaagaacacatgaaacagatcgtggaaataatgatcagaagactcgaaacgcggttgaaggacaagaatataaaactcacgatcactgaagcggcgaaagaatacctcgcagaaaaaggatacgatccaacgttcggtgcaagaccgctgaggcggctgatagaaagggaaatcgaaacaccactcgcaagaatgatcatagcaggtgaggtgcaggaaggtcagacggtgagagtggattacaacggtgaaaaactgatcctcgaagttgccagagaactcgagaaggttcagtaa

SEQ ID NO: 6892 - protein, 792 aa, Thermotoga sp. RQ2
MRNLNDKMKDIFERSVEDIKERNQNLLRPEHILLQILYDENEATKVLKDLNVNVEEVITELEDYIDSQYGIYYGFSDQVYVSKELSYILELARKEARLFKQKDIGPLHFLLGLLRDGSTHAARVLKKYGVDYEKVLQTVKEHEEEYAVEQSPLTAFATDLTKLAKEGKVGPIIGRDKEIERVIEILMRKTKNNPILIGDPGVGKTAIVEGLAQRIVEGKVPDPLKDVRILMVDLGRMIAGTKYRGEFEERLKSFLDEVMKQKEKTILFIDEIHTLVGAGAAEGAMDAANMLKPALARGEIRVIGATTLDEYRKHIEKDKALARRFQPVMVREPSVEETIEILKGLKKVYEEHHKVKIEDEAIEAAAKLSARYITDRFLPDKAIDLLDEAAARVRLSATKQEKDETKLRELEEKIKELETKIDELTIRSQYKEAADLKKELFKLKNEYEALKSGKPVVTAEKIAEVVESWSGVPVSRIVESEKEKLLKLEEIIHQRLVDQEEAVKVVADAIRKARAGIKDPNRPVGTFLFLGPTGVGKTELAKTLAEVLFGSENALIRIDMTEYMEKHAVSKLIGAPPGYVGYEEGGQLTEAVRRRPYSVILLDEIEKAHPDVFNILLQIMDDGRLTDSKGNVVDFKNTIIIMTSNIASDLILNYVKEGKSFDEIEERVREELKHYFRPEFINRIDHVVVFKPLTKEHMKQIVEIMIRRLETRLKDKNIKLTITEAAKEYLAEKGYDPTFGARPLRRLIEREIETPLARMIIAGEVQEGQTVRVDYNGEKLILEVARELEKVQ

SEQ ID NO: 6893 - DNA, 2571 bp, Haemophilus somnus 2336
  CDS (1)..(2571): transl_table=11
atgaacatagataaacttacgactaaatttcaacaagctattgctgaagctcaatctttagccataggaaaagaccatcaatttattgaaccagttcatttaatgaccgcacttttaaatcagcaagatggttcaatcccgccattattaacagcaagtgggggaaatttagcattattgcataatgacttagctgcagaattgagccgtttaccacaagtttcggggaataatggggatattcaggtttccagaagtttggtcaaattattaaatttatgcgacaaactggcacaacaacggcaagataaatttatttcctctgaattatttttattagcaattcttgaagataaaggtgctttaagtgaaagtttgaaaaagtgcggtataaaacaagaaaatttactacaagccattgataaattgcgaggaggcgaaaaagtgaatgaacaaggtgcggaagaaaatcgtcaggcattagaaaaatatactattgatttaactgcacgggcagaaagtggaaaattggatcctgttatcgggcgtgatgaagaaattcgccgtgccattcaggttttacaacgtcgtacaaaaaataatccagtattaattggggaaccgggtgtaggtaaaacagcgattgtggaagggttggcacaacgtatcgtaaacggtgaagtacctgaaggcttaaaaggaaaacgtgttctttctctggatatgggagcgttaattgcgggagccaaatatcgtggtgaatttgaagagcgtttaaaagcggttctcaaagaattagctcaagaagaagggcgtgtgattttatttattgatgaaattcacactatggtaggtgcgggaaaaactgacggggcaatggatgcgggaaatttgttaaagccaagtttagctcgtggtgaactgcattgtgtaggtgcaacaactttagatgaatatcgtcaatatattgaaaaagatgccgcacttgaacgccgtttccaaaaggtatttgttggtgagccgacagttgaagatacgattgccattttacgtgggttaaaagagcggtatgaaattcatcaccatgtgcaaattaccgatccggcaattgttgcggcagcgaccctttctcatcgttatatttccgatcgtcaattaccagataaagctattgatttaattgatgaggcagcctcaagtattcgtatggaaattgatagtaagccacaacctttagatagattagaacgccgtattattcaattaaaattggaacaacaagcgttacaaaaagaagatgatgaagcaagtcgcaagcgtttggatcttcttgaggaagagcttggtgaaaaagaacgtgaatatgcggagttggaagacgtttggaaggcggaaaaagccgcactttcgggtgctcaacacatcaaggcagagctggacaatgccaaaattcaaatggagcaagctcgccgaatcagtgattttgcgaaaatgtctgagttgcagtatggtcgtattcctgagctggaaaaacagcttgcacaagctgaaagtgcggaaggaaaagagatgactttattgcgaaatcgtgttaccgatgaggaaatcgctgaagtgctttcacgtgcgacaggcattcctgttgcaaaaatgatggagggcgaaaaagataaattattgcgtatggaacaagaattgcataagcgtgttgtaggacaatcagaggcggttgttgctgtcgcaaatgctattcgtcgtagtcgtgccggattatctgatccaaatcgtcctattggctcattcttgttcttaggaccaacgggcgtagggaaaacggaactgtgtaaaaccttggcgaattttatgtttgatgacgaaaatgcaatggtgcgtattgatatgtccgaatttatggaaaaacatagcgtttcacgtttagtcggtgcacctccgggctatgtcggttatgaagaaggcggttatttaaccgaagcggtacgtcgtcgtccatattctgtgattttgcttgatgaagtggaaaaagcccatagcgatgtctttaatattttattgcaagtgctagatgatggacgtttaaccgatggacagggcagaacggttgattttcgtaatactgtagtgattatgacttcaaatttaggctctgatttaattcaaggcaataaagagttggattataatgctatgaaagaggttgttatgtcagttgtagggcaacatttccgacctgaattcatcaaccgtattgatgaaactgtggtattccatccattagctaaagaaaatattcgtgccattgccactattcaattacaacgcttagtgaaacgtatggaaactcatggttatcagcttgaatttaccgatgcgactttagattttatcggtgaagttggctacgatgtgatttacggtgcaagaccattaaaacgtgccattcaacaagaaattgaaaatccattagcacaacaaatcttatccggacaattattaccgggtaaaaaagtcattgtggattatgttgatgggaaggttgttgcaaaacagtag

SEQ ID NO: 6894 - protein, 856 aa, Haemophilus somnus 2336
MNIDKLTTKFQQAIAEAQSLAIGKDHQFIEPVHLMTALLNQQDGSIPPLLTASGGNLALLHNDLAAELSRLPQVSGNNGDIQVSRSLVKLLNLCDKLAQQRQDKFISSELFLLAILEDKGALSESLKKCGIKQENLLQAIDKLRGGEKVNEQGAEENRQALEKYTIDLTARAESGKLDPVIGRDEEIRRAIQVLQRRTKNNPVLIGEPGVGKTAIVEGLAQRIVNGEVPEGLKGKRVLSLDMGALIAGAKYRGEFEERLKAVLKELAQEEGRVILFIDEIHTMVGAGKTDGAMDAGNLLKPSLARGELHCVGATTLDEYRQYIEKDAALERRFQKVFVGEPTVEDTIAILRGLKERYEIHHHVQITDPAIVAAATLSHRYISDRQLPDKAIDLIDEAASSIRMEIDSKPQPLDRLERRIIQLKLEQQALQKEDDEASRKRLDLLEEELGEKEREYAELEDVWKAEKAALSGAQHIKAELDNAKIQMEQARRISDFAKMSELQYGRIPELEKQLAQAESAEGKEMTLLRNRVTDEEIAEVLSRATGIPVAKMMEGEKDKLLRMEQELHKRVVGQSEAVVAVANAIRRSRAGLSDPNRPIGSFLFLGPTGVGKTELCKTLANFMFDDENAMVRIDMSEFMEKHSVSRLVGAPPGYVGYEEGGYLTEAVRRRPYSVILLDEVEKAHSDVFNILLQVLDDGRLTDGQGRTVDFRNTVVIMTSNLGSDLIQGNKELDYNAMKEVVMSVVGQHFRPEFINRIDETVVFHPLAKENIRAIATIQLQRLVKRMETHGYQLEFTDATLDFIGEVGYDVIYGARPLKRAIQQEIENPLAQQILSGQLLPGKKVIVDYVDGKVVAKQ

SEQ ID NO: 6895 - DNA, 2619 bp, Cyanothece sp. ATCC 51142
  CDS (1)..(2619): transl_table=11
atgcaaccaactaatcctaatcaatttacagaaaaagcctgggaagcgatcgtgcgaaccccagatattgctaaacaaaatagtcagcaacaaattgaaagtgaacacttaatgaagtctctgactgaacaagagggactcgctacaagcatcttcaataaagctaatattagtgttccaaaattacgcgatcgaactgaagaatttattcgtcgtcaaccgaaagtctcgaaccctggagagtccgtctatttaggtcgtagtttagacagtttacttgacagaagtgagacgtttcgcaaagaatttgaagatgactatatttccattgaacatttactcttagcctacagtaaagatgatcgttttggtaaaaatttgttcaaggaatttggtctaagtgaaaacaacttaaaagagattattaaacaagtgagaggaaatcaaaaagtgaccgatcaaaatcctgaaaataaatacgaagccttagaaaaatatggacgagatttaactcaattagccagagaaggtaaacttgatccggtgattggtagggatgatgaaattcgccgaaccattcaaatattgtcccgtagaaccaaaaataatcccgttttaattggggaacctggcgtgggtaaaacggcaattgttgaaggtttggcacaacgaattattaacagagatgtccctgaatctttgcgggatagaaagttaattgctttggatatgggttcacttattgctggggcaaaatatcgcggagaatttgaagaaagattgaaagctgttttaaaagaagtcactgattctcaaggcaatattatcctctttattgatgaaattcataccgttgtgggtgccggtgccactcaaggggctatggatgcagggaacctattaaaacctatgttagcacggggagaattgcgctgtattggggcaacaacccttgatgaatatcgtaaatatattgagaaggatgcagccctcgaaagacgttttcaagaggtattagtcaatgaaccgaatgtagtggatacgatttccattttacggggactcaaagagcgttatgaagtccatcatggggttaaaattgctgacactgcactcgttgcagcagccatgttatctaaccgttatattagcgatcgcttcttaccggataaggccattgatttggtagacgaatcagccgctaaattaaagatggaaatcacctctaaacccgaagaattagacgaagttgatcgtaagattctgcagttagaaatggaacgcttatccttacaaaaagaagaggatcaagtttcccgtgaacgcctagaaaaactagaaaaagaattagctgatctcaaagaagaacaatctcaactcaatgcccaatggcaagcagaaaaagaagtcattgatcagattcgtgaactcaaagaaacgattgatcaagtcaacttagaaattcaacaagctgaacgagattatgaccttaataaagctgctgaattacgctatggcaaactaacagatttacagcgacaagttaaagagttagaaagcaaaattgaagaacgacaaaccacaggtaaaactttattaagggaggaagttatcgagtcagatattgctgagattatctctaaatggacaggaatacctatcagtaaattagtggaatctgagaaggaaaaactattacatttagaggacgaattacacgagagagtgattggacaagaagaggctgttaccgccgtttcagaagctatacagcgttctcgtgccggactttctgatcccaatcgtcctaccgctagtttcattttcttgggacccacgggtgtcggtaaaacagaattagccaaagccttagcgaagaatctttttgataccgaagaagcgatcgttcgtatcgatatgtccgagtatatggagaagcatagcgtatcccgtttaattggtgcgcctccagggtatgtaggctacgatgaaggaggacaattaacggaagccattcgtcgtcgtccctactcagtcattctctttgacgagatagaaaaagcccacggtgatgtcttcaacatcatgttacaaattctcgacgatggacgcttaacagactctcaaggtcgggtagtagatttcaaaaatactatcattatcatgaccagtaatatcggttctcaatacattttagatgtggctggagacgatagtcattatgacgaaatgcgttcccgtgtcatggacgcaatgcgtaataatttccgtcctgaatttctcaatcgtatcgacgaaattatcatcttccatagcttagaaaaagaacaactgcgagaaattgttaagctacaaattcaactcctcagaagtcgtttagaagaccaaaaaatgtccctgaaattagctgatgtggccttagattttgttgctgatatcggttatgatccggtatatggtgcaagacctttaaaacgggcggttcaacggtacttagaaacccctatcgctaagtcaattttaaggggagaattcaaaccaggtgacactatctttgctgatgttgaagatgaaagattaacctttaaacgtctaccatctgagatggtaacagtttaa

SEQ ID NO: 6896 - protein, 872 aa, Cyanothece sp. ATCC 51142
MQPTNPNQFTEKAWEAIVRTPDIAKQNSQQQIESEHLMKSLTEQEGLATSIFNKANISVPKLRDRTEEFIRRQPKVSNPGESVYLGRSLDSLLDRSETFRKEFEDDYISIEHLLLAYSKDDRFGKNLFKEFGLSENNLKEIIKQVRGNQKVTDQNPENKYEALEKYGRDLTQLAREGKLDPVIGRDDEIRRTIQILSRRTKNNPVLIGEPGVGKTAIVEGLAQRIINRDVPESLRDRKLIALDMGSLIAGAKYRGEFEERLKAVLKEVTDSQGNIILFIDEIHTVVGAGATQGAMDAGNLLKPMLARGELRCIGATTLDEYRKYIEKDAALERRFQEVLVNEPNVVDTISILRGLKERYEVHHGVKIADTALVAAAMLSNRYISDRFLPDKAIDLVDESAAKLKMEITSKPEELDEVDRKILQLEMERLSLQKEEDQVSRERLEKLEKELADLKEEQSQLNAQWQAEKEVIDQIRELKETIDQVNLEIQQAERDYDLNKAAELRYGKLTDLQRQVKELESKIEERQTTGKTLLREEVIESDIAEIISKWTGIPISKLVESEKEKLLHLEDELHERVIGQEEAVTAVSEAIQRSRAGLSDPNRPTASFIFLGPTGVGKTELAKALAKNLFDTEEAIVRIDMSEYMEKHSVSRLIGAPPGYVGYDEGGQLTEAIRRRPYSVILFDEIEKAHGDVFNIMLQILDDGRLTDSQGRVVDFKNTIIIMTSNIGSQYILDVAGDDSHYDEMRSRVMDAMRNNFRPEFLNRIDEIIIFHSLEKEQLREIVKLQIQLLRSRLEDQKMSLKLADVALDFVADIGYDPVYGARPLKRAVQRYLETPIAKSILRGEFKPGDTIFADVEDERLTFKRLPSEMVTV

SEQ ID NO: 6897 - DNA, 2667 bp, Cyanothece sp. ATCC 51142
  CDS (1)..(2667): transl_table=11
atgcaacctactgactctgaaaagttcaccgaacaagcctgggatgctatcgtaaaatcgcaagaagtcgcccgacgcttcaaaaatcaaaatttagaagttgaacacgtcatcttagcccttctagaacaagaaaaaggcttaactttgcggattttagaacgtgcagatattgatatccctcggttgctgcaacaggttgaaacctttaccaaccgacaagcgaaatttgtcaccgtcgatcaactatacttaggccgtagtttagatgtattactggatcgggctgaagcttcccgtgaaagttgggatgataagtttatttcggtagaacatttatgggtggggtttgcagaagatgaacgcattggacggcgttgtttacgcagttttaaccttgatcctcaagacttagaacaggccataaaatcagttagaggaagccaaaaagttaccgaacaagatcaagaagatcgttacgaagcattggacaaatatggtcgggatctcacggaagcagcaagagaaggtaagttagatcccgttattggtagagatgaagagataagacgcattattcaagttttatcccgtcgttctaagaataatcccgttttaataggggaacccggtgtagggaaaacagcgatcgccgaaggattggcacaacgcataattaacggagatgtgccagaatctctcaaaaatcgtcaattaatttccttagatatgggtagcttagtggcaggcgcaaaatatcggggagagtttgaagaacgcctacgaactgtcatgcgagaagttaccaactccgatggtcacattatcctatttatcgatgaactccataccgtagtaggaactgggtcacgggaaggtagttcgatggatgcaggaaacctcttaaaacccatgttagcacggggagaattgcgctgtatcggtgcaaccaccctcgatgagtaccgcaagcatattgagaaagatcccgccttagaacggcgttttcagcaggtttatgtcaaacagcctacggtcgaagataccatttctattctacgaggactcaaagaacgctatgaagtgcatcacggggtgaaaataaccgactctgcgttagtcgctgcggccactttgtcccatcgttatatcactgatagatttttacccgataaagcgatcgatcttgtagacgaagctgctgcaaaattgaagatggaaattacgtctaagccggtcgaattagaagacgtagatcgtcgtttgatgcagctacaaatggaaaaactttccttagaaggagaagaaaccagaaccggaataatggttgataaagcctcaaaagaacggttacaaaaaatagaacaagaaattaaagaattagaagagattcatgaaactttaggtcaacaatggcaatctgaaaaacagatgctagaagaaatcaatgctttaaaagaagaagaagaacagttaagagtacaaattgaacaagcagaacgagcttatgatcttaataaagcagctcaattaaagtatggtagattagaaggattacaaagggatttagaagccaaagaaacaaaattaattgaaatacaatcccaaggagaaaccctcttaagagaacaagttaccgactccgatatcgccgaaattgtagcaggatggtcgggtattcctgttaaccgtttattagggtcagaacggcaaaaattattagaattagaaggacatttacatcaacaagttatcggccaagaggaggcggttgccgccgttgccgcagctattcgtcgcgcccgggccggaatgaaagacccctctcgtcccattggttcctttttattcatgggacctactggtgtaggaaagacagaattagcgagagcattagctgcctttctctttgactctcaagatgccatgattcgcattgatatgtccgaatacatggaaaaacacgccgtttctcggttaattggtgcgcctcctggatatgtgggttacgatcaagggggacagttatccgaagcagtacgccgtcgtccctattccgttgtgcttttagatgaagtagaaaaggcacacgttgacgtttttaacattttattacaagtgcttgacgatggacggattaccgattctcagggtcgtgtcgtcgatttccgcaacgctatcatcgtcatgaccagtaatattggtagcgaatatattttaaatttagcaggggatgatgataattatgaggctatgcgtaagaaagttttacaagcattgcggaagcattttcgccctgaatttttgaatcgtattgatgatttaattatcttccataccctcaagaaacaacaactcagacgtattgttaccctgcaacttaagcgcattgaacggttactaaaagagcaaaatattaacatagaattgagcgatgctgcccttgattatatcgtcaattctggttatgatcctgtgtatggtgctagacctttaaaacgggcaattcaacgggaattagaaaatcctattgctaccaaaatattagaattaacctttgattctggggatacgatttttattgattgtaaagataataaattactgtttgataagaagcaagataatgaagaagttcccagtgttgaggttgaagtcgtttcttaa

SEQ ID NO: 6898 - protein, 888 aa, Cyanothece sp. ATCC 51142
MQPTDSEKFTEQAWDAIVKSQEVARRFKNQNLEVEHVILALLEQEKGLTLRILERADIDIPRLLQQVETFTNRQAKFVTVDQLYLGRSLDVLLDRAEASRESWDDKFISVEHLWVGFAEDERIGRRCLRSFNLDPQDLEQAIKSVRGSQKVTEQDQEDRYEALDKYGRDLTEAAREGKLDPVIGRDEEIRRIIQVLSRRSKNNPVLIGEPGVGKTAIAEGLAQRIINGDVPESLKNRQLISLDMGSLVAGAKYRGEFEERLRTVMREVTNSDGHIILFIDELHTVVGTGSREGSSMDAGNLLKPMLARGELRCIGATTLDEYRKHIEKDPALERRFQQVYVKQPTVEDTISILRGLKERYEVHHGVKITDSALVAAATLSHRYITDRFLPDKAIDLVDEAAAKLKMEITSKPVELEDVDRRLMQLQMEKLSLEGEETRTGIMVDKASKERLQKIEQEIKELEEIHETLGQQWQSEKQMLEEINALKEEEEQLRVQIEQAERAYDLNKAAQLKYGRLEGLQRDLEAKETKLIEIQSQGETLLREQVTDSDIAEIVAGWSGIPVNRLLGSERQKLLELEGHLHQQVIGQEEAVAAVAAAIRRARAGMKDPSRPIGSFLFMGPTGVGKTELARALAAFLFDSQDAMIRIDMSEYMEKHAVSRLIGAPPGYVGYDQGGQLSEAVRRRPYSVVLLDEVEKAHVDVFNILLQVLDDGRITDSQGRVVDFRNAIIVMTSNIGSEYILNLAGDDDNYEAMRKKVLQALRKHFRPEFLNRIDDLIIFHTLKKQQLRRIVTLQLKRIERLLKEQNINIELSDAALDYIVNSGYDPVYGARPLKRAIQRELENPIATKILELTFDSGDTIFIDCKDNKLLFDKKQDNEEVPSVEVEVVS

SEQ ID NO: 6899 - DNA, 2574 bp, Exiguobacterium sibiricum 255-15
  CDS (1)..(2574): transl_table=11
atggatttcgaaaaattaacggaccgggcacatgaagccatcgtatcggcacaagccattgccaaacagcgtcgacacagtgagattacagagtggcacttgttgctggctttgctttcacaagaagaaggcattgcacggattgtttttgagaaactcgatcaacggatcgaccagttggagacgggcgtcaatgaagcactcggacggttaccggcgctcggtcaatcttcgacgccgcgaatcagcaactccttattgcaggtgttgacggaagcagaaaccgaagcccgtttgatgcaagacgattacgtttctgtcgagcacttattgttaggtcttgtgaaacaatccagtccggcgacacaatatttgcggaacgagggagtaactgaacaggtcttacgggaagcaatcatcgaaatgcggggcaaccgcaaagtaacgactaaaaatccggaagcgactttcgacgtcttgaagaaatatggccgcgatcttgtcgcagacttccggtccgggaaaaccgatccggtcatcggacgagatgacgagatccgtcgtgtcatccggattctcagccggaaaacgaaaaataatccggtcttgatcggggaaccgggtgtcgggaaaaccgcaatcgtcgaaggtctggcgcaacggattgtccggggagatgtcccggaaagtctgaaaaacaaacagttgttcagtctcgatatgagtacgcttgtcgcgggtgcaaaataccgcggagagtttgaggaacgtcttcaggcggtcttaaatgaagttaaggaagcagaaggacagattctgttgttcatcgacgaattgcacacgattgtcggtgccgggaagaccgaaggcgcgatggatgccggaaacatgctgaaaccgatgcttgcccgcggagagctgcactgtatcggtgcgacgactttagatgaataccggaagtacatcgaaaaagatcctgcacttgaacgccgcttccaacaagtgctggtcgcggaaccagatgtcgaagatacgatttcgattttacgtggtctgaaagaacggtttgaaatccatcatggtgtccggattcatgataatgccctggttgcggcagccatcctgtcagaccggtacatcacggaccgtttcatgcccgataaagccattgatttagtcgatgaagcgtgtgcgatgattcggaccgatatggaatcgatgccggcggaactggattcactcgtccgccgtgtcatgcaacttgaaatcgaagaagccgcactgaaaaaagaaaccgatgaagcatcccggaaacgactcgagaccctgcaacaggaactcagttctgtccgggaagacgaaagtgcgctccggacacgatgggaacgcgagaaagacagttcccaaaatgtccagcagttgcgggcagatcttgaaaaagcaaaactggctcttcaggaagctgaaggacggtatgatttgaatacagcctcggaaatcaaatacggacagattccggcacttgaaaatcagttgaaagtggcggaagaatcagcggaacacgtcgcgcatgaactcgtccgggaagccgtgacggacgaagagatttccgatatcgtgtcgaagtggacgggaattcccgtcagccgtctcgcacaaggggaacgcgaaaagttactgtatttagaagatacgttgcatgaacgtgtttttggtcaggatgaagcagtccggctggtctcggatgctgtcatccgggcgcgtgcaggaatcaaagatccgaatcgtccaatcggttcgttcctgttccttggaccgacaggagtcgggaaaacggagcttgcgaaagctcttgcagccgccatgtttgacagtgaagaacacatcgtccggattgatatgtccgagtatatggagaaacacaacgtttcccgccttgtcggagcacctcccggttatgtcggttatgaagaaggcggtcaattaacagaagccgtccgtcggagtccgtattcggtgctgttgtttgacgaaatcgaaaaagcacacggggacgtcttcaatatcttacttcaagtactggacgacggccgtttgaccgatgcgcaaggacgggtggtcgatttcaagaacacgattgtcatcatgacatcgaacattggatcgcatattttactcgaagcagcaaaagacggtgatattgatgcggccgaagaagaagcggtccgccaagaactgaaaaagtatttccggccggaattcctgaaccggattgatgacacgattctgttccatcctctccaccgggcggaaatcgaacggatcatcgacaaggccgtcagcaagatggcagaacgtctgtcaggtcgtgaaattacgattgatgtcacagaagcggcgaaaacgttaattttcaatgaagcgtttgaaccacagtacggtgcccgtccgattaaccggtatatccagcggacgattgaaacgaaactggcacgggctctgattagtggatccatccaggatggttcgcatgtggcaatcgatacagacggtacagaactcgttatccgctaa

SEQ ID NO: 6900 - protein, 857 aa, Exiguobacterium sibiricum 255-15
MDFEKLTDRAHEAIVSAQAIAKQRRHSEITEWHLLLALLSQEEGIARIVFEKLDQRIDQLETGVNEALGRLPALGQSSTPRISNSLLQVLTEAETEARLMQDDYVSVEHLLLGLVKQSSPATQYLRNEGVTEQVLREAIIEMRGNRKVTTKNPEATFDVLKKYGRDLVADFRSGKTDPVIGRDDEIRRVIRILSRKTKNNPVLIGEPGVGKTAIVEGLAQRIVRGDVPESLKNKQLFSLDMSTLVAGAKYRGEFEERLQAVLNEVKEAEGQILLFIDELHTIVGAGKTEGAMDAGNMLKPMLARGELHCIGATTLDEYRKYIEKDPALERRFQQVLVAEPDVEDTISILRGLKERFEIHHGVRIHDNALVAAAILSDRYITDRFMPDKAIDLVDEACAMIRTDMESMPAELDSLVRRVMQLEIEEAALKKETDEASRKRLETLQQELSSVREDESALRTRWEREKDSSQNVQQLRADLEKAKLALQEAEGRYDLNTASEIKYGQIPALENQLKVAEESAEHVAHELVREAVTDEEISDIVSKWTGIPVSRLAQGEREKLLYLEDTLHERVFGQDEAVRLVSDAVIRARAGIKDPNRPIGSFLFLGPTGVGKTELAKALAAAMFDSEEHIVRIDMSEYMEKHNVSRLVGAPPGYVGYEEGGQLTEAVRRSPYSVLLFDEIEKAHGDVFNILLQVLDDGRLTDAQGRVVDFKNTIVIMTSNIGSHILLEAAKDGDIDAAEEEAVRQELKKYFRPEFLNRIDDTILFHPLHRAEIERIIDKAVSKMAERLSGREITIDVTEAAKTLIFNEAFEPQYGARPINRYIQRTIETKLARALISGSIQDGSHVAIDTDGTELVIR

SEQ ID NO: 6901 - DNA, 2547 bp, Mycobacterium marinum M
  CDS (1)..(2547): transl_table=11
gtggattctttcaacccgaccaccaagacgcaggcggccctgacgtcggctctgcaggcggcttcggctgccggcaatcccgaaattcggccggcgcatctgctgatggccctgttgacgcaggccgatggcatcgccgcgccgctgctcgaggccgttggcgtcgaccccgccaccatccgcaccgaggcgcagcgcctagttgaccggttgccgcaggccagtggggccagcacgcagccgcagttatcccgcgagtcactggccgccatcaccaccgcccagcaactggctaccgagatggacgacgagtacgtctccaccgagcacgtgctggtcgggctggccaccggcgactccgaggtcgccaagctattgaccgggcacggagcctcgccgcaggctctgcgcgaggcgttcgtcaaggtacgcggtagcgcccgggtgaccagccccgaaccggaagcgacgtaccaggcgctggagaaatactcgaccgacctgaccgcgcgggcccgtgaaggaaagctcgacccggtgatcgggcgagacaacgagattcgccgcgtggtgcaggtcctgtcgcggcgcaccaagaacaacccggtgctcatcggtgaacccggcgtcggcaagaccgcgatcgtggagggtctggcccagcgcatcgtggccggcgacgtcccagagagtctgcgtgacaagacgatcgtcgcgctggacctcggctcgatggtggccggctcgaagtaccggggtgaattcgaggagcggctcaaggccgtcctcgacgacatcaagaactcggccgggcagatcatcaccttcatcgacgagctgcacaccatcgtcggtgccggcgcgaccggtgaaggtgcgatggacgccggcaacatgatcaagcccatgctggcccgcggcgagctccggttggtcggtgccaccacgctcgacgagtaccgcaagcacatcgagaaggacgccgcactggaacgccgcttccagcaggtgtacgtcggtgagccctcggcggaggacaccatcggcattctgcgcggactcaaggaccgctacgaggtgcatcatggcgtccggatcaccgactccgcgctggtggccgccgcgacgctgtccgaccgctacatcaccgcgcggttcctgccggacaaggccatcgacctcgttgacgaggctgccagccggctgcggatggaaatcgattcgcgccccgtcgagatcgacgaggtcgagcggctggtgcgccggctggagatcgaagaaatggcgctgtccaaggaagaggacgacgcctccaaagatcggctggaaaagctgcgcgccgagctggccgacaagaaagaagagctggcagaactcacgaccagatggcagaacgagaagaactccatcgagatcgtccgcgagctcaaagagcagttggacgccctgcgtggggaatccgagcgcgctgagcgcgatggtgacctggccaaggcagccgagctgcgctacgggcgcataccggagatggagaagaagctcgacgctgccgtgccgcacgcgcaagcccgcgagcaggtgatgctcaaggaagaggtcggtcccgacgacatcgccgaggtggtgtcggcatggaccggcattcccgccggacgcatgctcgaaggcgagacggccaagctgctgcggatggaagacgagctgggccaccgcgtcatcgggcagaagaaggcggtgcaggccgtctctgacgccgtgcggcgctctcgggccggggtcgccgaccccaaccggccgaccggctcgttcatgttcctcggccccaccggtgtcggcaagaccgagctggccaaggcgctggcggagttcttgttcgacgacgagcgcgcgatggtgcgcatcgacatgagcgagtacggcgagaagcactcggtggcccgcctcgtcggtgcccctcccggctacatcggttacgaccagggcggtcagctgaccgaggcggtgcggcggcgtccctacacggtgatcctgttcgacgagatcgagaaggcccacccggacgtgttcgacgtgctgctgcaggttctcgacgagggccggctgaccgacgggcagggccgtacggtcgacttccgcaacaccatcctgatcttgacgtccaatctcgggtcgggcggcaccccggaccaggtgatggcggcggtgcgggcggccttcaagccggagttcatcaaccggctcgacgatgtgctgatcttcgacgccctcaaccccgacgaactggtgcagatcgtcgacatccagctccaacagttggacaagcggctggcccagcgtcgtctgcaactcgaggtgtcgctgccggccaaggaatggctggcgcagcgcggattcgaccccgtgtacggcgcccgcccgttgcgccggttggtgcaacaggcgatcggcgaccagttggccaagatgctgctggccggtcaggtgcacgacggcgacacggtgccggtcaatgtcagcgccgacggcgaatcgctggtcctcggttaa

SEQ ID NO: 6902 - protein, 848 aa, Mycobacterium marinum M
MDSFNPTTKTQAALTSALQAASAAGNPEIRPAHLLMALLTQADGIAAPLLEAVGVDPATIRTEAQRLVDRLPQASGASTQPQLSRESLAAITTAQQLATEMDDEYVSTEHVLVGLATGDSEVAKLLTGHGASPQALREAFVKVRGSARVTSPEPEATYQALEKYSTDLTARAREGKLDPVIGRDNEIRRVVQVLSRRTKNNPVLIGEPGVGKTAIVEGLAQRIVAGDVPESLRDKTIVALDLGSMVAGSKYRGEFEERLKAVLDDIKNSAGQIITFIDELHTIVGAGATGEGAMDAGNMIKPMLARGELRLVGATTLDEYRKHIEKDAALERRFQQVYVGEPSAEDTIGILRGLKDRYEVHHGVRITDSALVAAATLSDRYITARFLPDKAIDLVDEAASRLRMEIDSRPVEIDEVERLVRRLEIEEMALSKEEDDASKDRLEKLRAELADKKEELAELTTRWQNEKNSIEIVRELKEQLDALRGESERAERDGDLAKAAELRYGRIPEMEKKLDAAVPHAQAREQVMLKEEVGPDDIAEVVSAWTGIPAGRMLEGETAKLLRMEDELGHRVIGQKKAVQAVSDAVRRSRAGVADPNRPTGSFMFLGPTGVGKTELAKALAEFLFDDERAMVRIDMSEYGEKHSVARLVGAPPGYIGYDQGGQLTEAVRRRPYTVILFDEIEKAHPDVFDVLLQVLDEGRLTDGQGRTVDFRNTILILTSNLGSGGTPDQVMAAVRAAFKPEFINRLDDVLIFDALNPDELVQIVDIQLQQLDKRLAQRRLQLEVSLPAKEWLAQRGFDPVYGARPLRRLVQQAIGDQLAKMLLAGQVHDGDTVPVNVSADGESLVLG

SEQ ID NO: 6903 - DNA, 2643 bp, Nostoc punctiforme PCC 73102
  CDS (1)..(2643): transl_table=11
atgcaaccaacaaatcccgagcaatttaccgaaaaagcctgggaagcccttgttcgtactcccgaaattgccaaacagtttcagcatcagcagattgagagcgaacatttgatgctagcgctactggaacaggaaggactcgccagttctattttcaacaaagccggggtaaatgttcaaaaactacacgagcgcactatcgacttcatcaaccgtcagcccaaagtatcgggggctagcagtggttcggtatacatcggacacagtttagagaggctgctcgatcgcgccgaacaataccgcaaagagtttggtgatgaatatatttctattgaacatttaatacttgcctttgccaaagacgatcgctttggtaaagggttgtttcaagaatttggactggatgaaaaaaaactccgcaacatcattcaacagattcgagggagtcaaaaagtgacagatcaaaacccggaagttaaatatgaagcgctagaaaaatacgggcgcgatttaacccaattggcacatgagggcatactcgacccagtgattggacgagatgaagaaattcgccgcacgattcaaatcctttctcgtcggactaaaaataaccccgtgctgattggtgaacccggtgtcggtaaaacggcaattgtagaaggattagcgcagcgcattgtcagtggtgatgtcccggaatcattgcgcgttggcatagccggccgtaggcatcgcaaactaatagctttagacatgggtgcgttaattgccggagccaaataccggggagaatttgaagaacgcctgaaagctgtcttaaaagaaatccaagaagcacagggacaaatcgtcttgttcattgacgaaattcacactgtagttggtgcgggtgcaacgcaaggatcgatggatgctagcaacttgctcaagccgatgctcgctcgcggcgaactgcgctgtattggtgccaccacgctagatgaataccgcaagtacattgaaaaagatgcggctttggaacgtcgttttcagcaggtatatgtcgatcagcccagtgtggaagataccatctcaattctgcgcggtttgaaagagcgctacgagttacaccacggcgtgaagatttctgatagtgcgttagttgcggcagctactctgtctgcgagatatattagcgatcgcttcctacccgacaaagctattgatttggtggatgaagctgcggctaaactaaaaatggaaattacttccaaaccagaagaattagacgaaatcgatcgcaaaattctgcaactggaaatggagcggctgtcactgcaaaaagaaacagacagtgcttccagagagcgtttagaacggctggagagagaacttgcagagttaaaagaacgccaagatgccctcaatgctcaatggcaagcagagaagcaaatcatcgatcgcattcgccaaattagacaagagattgagcgtgtcaatgtagaaattcagcaagccgaacgcgattacgacctcaaccgggcagcagaattgaaatacagcaaactcactgagctgcaacgacaactaaaagaagccgaagcgcgactagcccaaatccagactagcggtaaatctctgttgcgcgaagaagtcaccgaagctgacattgccgaaattatctccaagtggacgggtattccggtgagcagactggttgaatcggaaatgcaaaaactcttgcatctggaagaagagctacataaacgtgtgattggtcaggacgaagctgtaagagctgttgccgatgcaattcaacgttcccgtgctgggttggcagacccgaatcgtcccattgctagctttattttcttaggcccgaccggggtgggaaaaacagaactggcaaaagctttagcggaatatctgtttgataccgaagatgcactggtgcggatcgatatgtccgaatacatggagaaacacgctgttgcccgtctcatcggtgcgcctccaggttacgtgggctatgaagaaggcggacaactcaccgaagcgattcgccgccgaccttattctgtaattctgtttgacgaaattgagaaagctcatcctgatgtattcaacgtcctgctgcaaatcctggatgatggtcgcctaactgattctcagggacgcacagtagattttaaaaatacgatcgcgattatgaccagcaatattggttcaatatacattttggatgtggcaggagacgatagcaagtacgaacaaatgcgcgatcgcgtcatggaagcagtgcgagaaagtttccgccccgaattcctcaaccgcattgatgaaatcattattttccacagcttgcggaaggacgagttgcgcgaaattgtcaaactacaagtgcagcgtttagaggagcgactgcgcgagcgtaaactctcgctcaaaatctccgaccaggctctcgattggattgttcaggtcggttatgacccagtttacggtgctcgtcccctgaagcgggcgattcagcgagaactagaaactccgattgccaaagcgattctacgcggcgagttccacgaaggtgacacaatctacgtccatgtggaacacgaacgactggtgttgaagcgcttatcacctgaactggtcaatgcttag

SEQ ID NO: 6904 - protein, 880 aa, Nostoc punctiforme PCC 73102
MQPTNPEQFTEKAWEALVRTPEIAKQFQHQQIESEHLMLALLEQEGLASSIFNKAGVNVQKLHERTIDFINRQPKVSGASSGSVYIGHSLERLLDRAEQYRKEFGDEYISIEHLILAFAKDDRFGKGLFQEFGLDEKKLRNIIQQIRGSQKVTDQNPEVKYEALEKYGRDLTQLAHEGILDPVIGRDEEIRRTIQILSRRTKNNPVLIGEPGVGKTAIVEGLAQRIVSGDVPESLRVGIAGRRHRKLIALDMGALIAGAKYRGEFEERLKAVLKEIQEAQGQIVLFIDEIHTVVGAGATQGSMDASNLLKPMLARGELRCIGATTLDEYRKYIEKDAALERRFQQVYVDQPSVEDTISILRGLKERYELHHGVKISDSALVAAATLSARYISDRFLPDKAIDLVDEAAAKLKMEITSKPEELDEIDRKILQLEMERLSLQKETDSASRERLERLERELAELKERQDALNAQWQAEKQIIDRIRQIRQEIERVNVEIQQAERDYDLNRAAELKYSKLTELQRQLKEAEARLAQIQTSGKSLLREEVTEADIAEIISKWTGIPVSRLVESEMQKLLHLEEELHKRVIGQDEAVRAVADAIQRSRAGLADPNRPIASFIFLGPTGVGKTELAKALAEYLFDTEDALVRIDMSEYMEKHAVARLIGAPPGYVGYEEGGQLTEAIRRRPYSVILFDEIEKAHPDVFNVLLQILDDGRLTDSQGRTVDFKNTIAIMTSNIGSIYILDVAGDDSKYEQMRDRVMEAVRESFRPEFLNRIDEIIIFHSLRKDELREIVKLQVQRLEERLRERKLSLKISDQALDWIVQVGYDPVYGARPLKRAIQRELETPIAKAILRGEFHEGDTIYVHVEHERLVLKRLSPELVNA

SEQ ID NO: 6905 - DNA, 2640 bp, Nostoc punctiforme PCC 73102
  CDS (1)..(2640): transl_table=11
atgcaacctacagatccgaataaatttactgataaagcctgggaagcaattgttaaatctcaggatatagtccgtgcttatcaacaacagcaactagatgttgaacatttaattattgccctgttagaagaacccactagtctagcaatacgtatcctggctcgatctgaggtcgatccaatccgctttcaacagcagctagaagcctttatccaacgtcagcccaaagttggtaaaagcgatcagctttatcttagccgtagtttagatgttttactagataaagctgaggaagctagagtcaggatgaaagactcctacatttccgtagaacatatacttttggcttttgctgaagacgatcgcattggacgaaagatcctcaaaagctttagtgcggacgcagctaaactagaagctactatcaaagccgttcgcggtagccaaaaagtaacagatcaaagcccagaatcgcgctatgaagctttacaaaaatttggcagagatttgacagaacaggcaaaagctggaaaactcgacccggtaattgggcgagatgacgaaattcggcgggtaattcaagtattgtctcgtcggagcaaaaataaccccgtcttgattggtgaacctggggtaggtaaaactgcgatcgcagaagctttggcacaacggatggtaaacggtgacgttcccgaatctctgaaaaaccgccaactgatctctttagacatcggtagtttaattgctggggcaaaattgcgaggagaatttgaagaacgtttgaaagctgtcctcaaagaagttatggactctaacgggcaaattgtcctgtttatcgacgaactacataccgtagtcggtacgggttccagccaacaaggggcaatggatgccggaaatttgctcaaaccaatgctggcgcggggagaactgcgttgtattggtgcaactaccctcgacgagttccgcaaacacattgagaaagacgctgccctagaacgccgctttcagcaagtatttgtcgatcagccaagtgtggaaaatactatttccattctgcgggggttgaaagaacgctatgaagtgcatcacaacgtcaaaatttctgattcggctttggtagcagcagcaaccctgtcagcacgttatattagcgatcgcttcttaccagataaagcaatagatttggtggatgaagccgcagcacagttgaaaatggagattacctccaaaccagcagaattggaaaccatcgatcgccgcctcatgcagttagaaatggaaaagctgtcattagctggcgaagaaaagggtactccccaaacaaaagagcgtttggagcgcattgagcaagaaatcgccaatttaactgaaaaacagcaaatatttaatgagcaatggcaaggtgaaaagcagatattggaggcgataagcgccttaaagaaagaagaagatgcgctgcgagtgcaaattgaacaggcggaacgcgcttatgacctaaataaagctgcccaactgaaatatggcaaattggaaggagtacagcacgagcgcgaagctaaagaagccagccttttagaaattcaaaaccaaggttccacgttgctgcgagaacaagtcactgaagctgatattgcggaaatcgtcgccaaatggacaggaattcccgttaatcgcctgttggaatcggaacggcaaaaattactgcaactagaaagtcatttgcatcaacgagtcattgggcaagaagaggctgtagaagcggtagcagcagccattcgccgcgcccgtgcggggatgaaagacccctcccgtcccattggttcatttttgttcatgggccccacaggtgtgggcaaaaccgaactcgcccgtgctttagctcagtttctctttgattctgatgatgccttggtgcgcttagatatgtctgagtatatggaaaaacactcagtttctcggttagtgggagcgcctccaggatacgtaggctatgaagaaggcggtcaactttccgaggcggttcgccgccgtccctactcagtggtgctgctggatgaagtggaaaaagcgcaccccgatgtgttcaatattttgttgcaggtgttagatgatgggagaattactgactctcaggggagaacggtagattttcgtaacagcgttattgtaatgaccagtaacataggtagcgaacacattttagatgtgtctggtgattctcagtatgaaacgatgcggaagcgggtaatggaaggtttgcgatcgcatttccgcccagaatttctcaaccgcgttgatgatattattctcttccataccctaaatcgcacggaaatgcggcaaatcatccgtattcaactcaagcgagtagaaaatctcctacgagagcaaaaaatcttctttgagatatcccaagcagcctgcgatcaccttgtcgaatcaggctatgacccagtttatggtgcgcgtccactcaaacgcgcaattcagcgagaagtagaaaaccccctcgccaccaagttattggaaaatacttttatctctggagacacgattctcattgacaaaaatgaaaatggtctgtcttttagtaaaaaagtgctggtgaaggtgtcagtaccacagattgctacatag

SEQ ID NO: 6906 - protein, 879 aa, Nostoc punctiforme PCC 73102
MQPTDPNKFTDKAWEAIVKSQDIVRAYQQQQLDVEHLIIALLEEPTSLAIRILARSEVDPIRFQQQLEAFIQRQPKVGKSDQLYLSRSLDVLLDKAEEARVRMKDSYISVEHILLAFAEDDRIGRKILKSFSADAAKLEATIKAVRGSQKVTDQSPESRYEALQKFGRDLTEQAKAGKLDPVIGRDDEIRRVIQVLSRRSKNNPVLIGEPGVGKTAIAEALAQRMVNGDVPESLKNRQLISLDIGSLIAGAKLRGEFEERLKAVLKEVMDSNGQIVLFIDELHTVVGTGSSQQGAMDAGNLLKPMLARGELRCIGATTLDEFRKHIEKDAALERRFQQVFVDQPSVENTISILRGLKERYEVHHNVKISDSALVAAATLSARYISDRFLPDKAIDLVDEAAAQLKMEITSKPAELETIDRRLMQLEMEKLSLAGEEKGTPQTKERLERIEQEIANLTEKQQIFNEQWQGEKQILEAISALKKEEDALRVQIEQAERAYDLNKAAQLKYGKLEGVQHEREAKEASLLEIQNQGSTLLREQVTEADIAEIVAKWTGIPVNRLLESERQKLLQLESHLHQRVIGQEEAVEAVAAAIRRARAGMKDPSRPIGSFLFMGPTGVGKTELARALAQFLFDSDDALVRLDMSEYMEKHSVSRLVGAPPGYVGYEEGGQLSEAVRRRPYSVVLLDEVEKAHPDVFNILLQVLDDGRITDSQGRTVDFRNSVIVMTSNIGSEHILDVSGDSQYETMRKRVMEGLRSHFRPEFLNRVDDIILFHTLNRTEMRQIIRIQLKRVENLLREQKIFFEISQAACDHLVESGYDPVYGARPLKRAIQREVENPLATKLLENTFISGDTILIDKNENGLSFSKKVLVKVSVPQIAT

SEQ ID NO: 6907 - DNA, 2619 bp, Nostoc punctiforme PCC 73102
  CDS (1)..(2619): transl_table=11
atgcaacctactaatcctaaccaatttacagaaaaagcctgggaagcgatcgcccatacccccgatattgttaaacaatatcaacaacagcaaattgaaagcgaacacctgatgaaggcgttgctagaacaagatggtctagcaactgggattctcaccaaagcgggtgttaacctccaaaaactgcgcgatcgcactgaacaattttttcaacgtcagccaaaagtatctggtactagcagttctgtttacttgggacgcagcttagatacacttctagaccgggcagacgtgtatcgcaaagagtttcaagatgaatatatttcaattgaacacttattgctggcttacgctaaagatgaccgctttggcaaagctttattccaagaattcggtttagacgaaggcaaactaaaagatattattaaacaagttcgggggagccaaaaagtgaccgaccaaaatccagaaggcaaatacgaagcactggaaaaatacgggcgtgacctcacagaagccgcgcgtaaaggtcaactcgatccagtgattgggcgggatgatgagattcgccgcactgtccaaattctgtctcgccgcaccaagaataatcctgtgctaattggtgaaccgggtgttggtaaaactgctatcgctgaaggattagcacagcgtattattgcaggtgatgtaccccagtccctcaaagaccgcaagctaatttctttagatatgggtgctttgattgcgggggcaaaattccggggtgaatttgaagaacgcctgaaagcagtattaaaagaagttactgaatctggcggcaatattgttttatttattgatgaaattcacaccgttgttggcgctggtgcaacccaaggcgcgatggatgcgggtaacttgttaaaaccgatgttggcgcggggtgaattgcgctgtattggggcgacaactctagatgaataccgcaaacatatcgaaaaggatgccgcactagaaagacgcttccagcaggtttatgtcgatcaacctagtgtagaagatagtatttcgattttgcgcgggttgagagaacgttatgaaaaccaccacggggtaaaaatttctgatagtgctttggtcgccgccgccgtattgtcgagtcgatatattagcgatcgcttcttacctgataaagccattgacttggtagacgaagccgccgccagattaaaaatggagatcacctccaaaccagaagaactcgacgaaattgatcgcaagattctgcaattggaaatggagaagctatcgctgcaaaaagaaagcgatgccgcttctcgtgaacgtctagaaagactagaaaaagaaattgccgatctcaaagaagaacaaagaaccctaaatactcaatggcaatctgaaaaagatatcattgacaaaattcaatccgttaaaaaagagattgaacgggtcaatttagagattcagcaagcagaacgcgattacgaccttaaccgagctgcggagttgaaatacggtaatttaactagtttgcatcgtcagttggaagcagtagaagctgaattggcaagtgcccaaagaagtggaaaatcactattacgggaagaagtcacagaagctgatattgctgaaattatttctaaatggacaggaattcccatcagcaagctggtggaatctgagaaagagaaactactgcatttagaagatgaactacaccaccgtgtgattggacaagaagaagcagtcacagccgtagcggatgcaattcagcgatcgcgcgctggactggccgatcccaatcgtcccatcgctagctttattttccttgggcctacgggtgtgggtaaaaccgagttggcgaaagcgctggcgggctatatgttcgatagcgaagatgcgctggtgcgaatcgatatgtcggaatatatggagaaacacgccgtctcccgtttaatcggtgcgcctccaggatatgtgggttacgaagaaggcggacaactaacagaagcgattcgccgccgtccttactcagtgattctctttgacgaaatcgagaaagcacaccctgatgtttttaatatcttcttgcaaattctcgatgatggtcgcgtcactgatgctcaaggtcataaggtggacttcaagaatgctattattatcatgactagcaacatcggttcgcaatacattcttgatgtcgctggggataatgctcactacgacgaaatgcgccgtcgagtcatggaagcgatgcggaatagcttccgtccagaattcctcaaccggattgacgaaatcatcatcttccacggtttagataagaaggaattgcggcagattgtgctgttgcaagtacaaagattacgccaaagattggccgatcgcaaaatatccctcaagctctcagatgctgcacttgactttttagcagaagtaggatatgacccagtttatggggcgcgtccactgaaacgggcgattcagcgagagctagaaactcaaattgccaaagccatcttgcgcggtgaattcaccgatggcaacaccatctttgtagatgtgcaaaatgagcgtctttcttttagtcgcttacctgctgaggtgtttaccagctaa

SEQ ID NO: 6908 - protein, 872 aa, Nostoc punctiforme PCC 73102
MQPTNPNQFTEKAWEAIAHTPDIVKQYQQQQIESEHLMKALLEQDGLATGILTKAGVNLQKLRDRTEQFFQRQPKVSGTSSSVYLGRSLDTLLDRADVYRKEFQDEYISIEHLLLAYAKDDRFGKALFQEFGLDEGKLKDIIKQVRGSQKVTDQNPEGKYEALEKYGRDLTEAARKGQLDPVIGRDDEIRRTVQILSRRTKNNPVLIGEPGVGKTAIAEGLAQRIIAGDVPQSLKDRKLISLDMGALIAGAKFRGEFEERLKAVLKEVTESGGNIVLFIDEIHTVVGAGATQGAMDAGNLLKPMLARGELRCIGATTLDEYRKHIEKDAALERRFQQVYVDQPSVEDSISILRGLRERYENHHGVKISDSALVAAAVLSSRYISDRFLPDKAIDLVDEAAARLKMEITSKPEELDEIDRKILQLEMEKLSLQKESDAASRERLERLEKEIADLKEEQRTLNTQWQSEKDIIDKIQSVKKEIERVNLEIQQAERDYDLNRAAELKYGNLTSLHRQLEAVEAELASAQRSGKSLLREEVTEADIAEIISKWTGIPISKLVESEKEKLLHLEDELHHRVIGQEEAVTAVADAIQRSRAGLADPNRPIASFIFLGPTGVGKTELAKALAGYMFDSEDALVRIDMSEYMEKHAVSRLIGAPPGYVGYEEGGQLTEAIRRRPYSVILFDEIEKAHPDVFNIFLQILDDGRVTDAQGHKVDFKNAIIIMTSNIGSQYILDVAGDNAHYDEMRRRVMEAMRNSFRPEFLNRIDEIIIFHGLDKKELRQIVLLQVQRLRQRLADRKISLKLSDAALDFLAEVGYDPVYGARPLKRAIQRELETQIAKAILRGEFTDGNTIFVDVQNERLSFSRLPAEVFTS

SEQ ID NO: 6909 - DNA, 2640 bp, Bartonella quintana str. Toulouse
  CDS (1)..(2640): transl_table=11
atgaacctggaaaaatacagtgaacggcttcaaggttttctacaaacagcacaaaacaaagctctctcttctgatcatcagcagtttatgcctgagcatttgcttaaggtgttgttagaggattctcaaggtttggctgcctctttgatccaaagagctggcggtgatttatcccttattcaaaaggcgctcaaagaagccctcgatgttttgccaaaagtgcagggcggaaatgggcaactctatctctcccagccgttggcaaaagtcttcgatatggcagaagatcttgcacaaaaagcaggtgaccaatttgtaaccgtggagcgcttgttgcaagcacttatcatggaaaaaactgcaaaaacagctgatattttaacaacagcaggattgaccccacaagccctcaatcaggctattaatgccctgcgtaaaggaaaaaaagcaacgaccccccatgccgaaagccagtatgatgctttgcaaaaatatgcctgtaatctgacaaaaaatgcacgcgaagggaaacttgatcctgttattggacgcgaagaggaaattcgccgcactattcaggttctctcacgacgcaccaaaaataatcccgtgctgatcggtgaacccggtgtgggaaaaactgccatcgttgaaggtttggtattgcgtatcattaatggtgatgtccctgaaactttgcgcgataaacaactctatgcactcgatatgggagcgcttatcgctggcgccaaatatcgcggtgaattcgaagaacgcctcaaagctgtccttgctgaagtgcaggccgaaaacgggcaaatcattctctttattgatgagttgcacaatctcgttggggctggaaaatccgatggccctatggatgcttctaacttgctaaaacccgctcttgcacgcggagaactccattgtgtgggcgcgacgacccttgatgaatatcgcaaatatgtcgaaaaagatgccgctttagcgcgccgcttccaacccgtttttgtgcctgaaccaacccttgacgatacaatctctatcttgcgcggcattaaagaaaaatacgaacaacatcacaaagtacgtttggcagacagtgctttgatcgctgcagctcgactgtctaatcgttatattactgatcgttttttgcccgataaagccattgatcttattgatgaagccgcggcgcggttgcgcatgcaagtcgattcgaaacctgaagaactcgatgctatcgatcggcgaatcttacagttgaaaatcgaacgtgaagccttgaaaacagatgtggagccaacagcaaaagaacgtctgaaaatcgtgcaagatgaactcaatacattggaacaaaaatctaccgaaatgacaacggcttggcaggccgaaaaacaaaaattaggacatgccgccgatttgaaaaaacaacttgatgaagcacgtaatgctttggctatcgcacagcgtaatggacaattccaaaaagccggagaacttgcttatagtgttattcctgagcttgaaaaacaattgagcgtggctgaaaatgatgaccaacaaaatcatctcgtcgaggaaactgtcactgctgaacatgttgcgcgcatcgtttcacgctggactggtattcccattgatcgtatgctcgaggcagagcgagaggcacttttacgtatggaagatgaaattagcacgcgtgtggtgggacaaggcgaagccgttcaagctatttcccgcgccgtacggcgtgcacgcgccgggctgcaagatccaaatcgtcctatcggttcttttatgtttctcggtcctaccggtgtgggaaaaactgagttaaccaaagcgctcgctattttcctctttcaagaccaaaacgcaatgttgcgcattgatatgtctgaatatatggaaaaacacgccggtgcacgcctgattggcgctccgcccggatatgtcggatatgaagaagggggagtgctgactgaagctgttcgcagaagaccctatcaggtcattctgttcgacgaaattgaaaaagcccatcccgatatttttaatctcttgctgcaagtgcttgatgaaggacgattgactgatagccagggacgaaccgtcgattttcgcaataccttgcttattatgacctcaaatcttggtgctgaatttttaactgcactgcctgaaggacaaacaaccgatcaggcaaaaaatgatgtcatgaatgtcgtaaaagctgctttccgtcccgaatttcttaaccgtattgatgagattatcctttttcagagattacaacgtcaggatatggaagcaatcgtcgatatccagatacagcacttgcaaaatttgctcaatgaacgcaaaataaccttgcatatcgaaccagaagtacggcaattccttgcccataaaggctatgatcccctttatggtgcgcgacctctcaaacgcattatccaaaaagaaattcaagatcctctcgcggaaaatatcttatttggaaaaatttatgatgaaacaaccgtgacaatcgcaaaagaaggtgatcggctagtctttctgccagcaacccaagaaacacccaatggcgctgaaaaaaatgacagtgagaacagaaaaaagttgacaaggtaa

SEQ ID NO: 6910 - protein, 879 aa, Bartonella quintana str. Toulouse
MNLEKYSERLQGFLQTAQNKALSSDHQQFMPEHLLKVLLEDSQGLAASLIQRAGGDLSLIQKALKEALDVLPKVQGGNGQLYLSQPLAKVFDMAEDLAQKAGDQFVTVERLLQALIMEKTAKTADILTTAGLTPQALNQAINALRKGKKATTPHAESQYDALQKYACNLTKNAREGKLDPVIGREEEIRRTIQVLSRRTKNNPVLIGEPGVGKTAIVEGLVLRIINGDVPETLRDKQLYALDMGALIAGAKYRGEFEERLKAVLAEVQAENGQIILFIDELHNLVGAGKSDGPMDASNLLKPALARGELHCVGATTLDEYRKYVEKDAALARRFQPVFVPEPTLDDTISILRGIKEKYEQHHKVRLADSALIAAARLSNRYITDRFLPDKAIDLIDEAAARLRMQVDSKPEELDAIDRRILQLKIEREALKTDVEPTAKERLKIVQDELNTLEQKSTEMTTAWQAEKQKLGHAADLKKQLDEARNALAIAQRNGQFQKAGELAYSVIPELEKQLSVAENDDQQNHLVEETVTAEHVARIVSRWTGIPIDRMLEAEREALLRMEDEISTRVVGQGEAVQAISRAVRRARAGLQDPNRPIGSFMFLGPTGVGKTELTKALAIFLFQDQNAMLRIDMSEYMEKHAGARLIGAPPGYVGYEEGGVLTEAVRRRPYQVILFDEIEKAHPDIFNLLLQVLDEGRLTDSQGRTVDFRNTLLIMTSNLGAEFLTALPEGQTTDQAKNDVMNVVKAAFRPEFLNRIDEIILFQRLQRQDMEAIVDIQIQHLQNLLNERKITLHIEPEVRQFLAHKGYDPLYGARPLKRIIQKEIQDPLAENILFGKIYDETTVTIAKEGDRLVFLPATQETPNGAEKNDSENRKKLTR

SEQ ID NO: 6911 - DNA, 2580 bp, Bartonella henselae str. Houston-1
  CDS (1)..(2580): transl_table=11
atgaatctggaaaaatatagcgaacggttgcaaggctttttacaaacagcacaaaataaggctctctcttctgatcatcaacaatttatgccagaacatttcctcaaagtgttgttagaggattctcaaggattggccgcatcattgatccaaaaagctggcggtgatctctctcttattcaaaaagcgctcgaagaagcgctcgatgctttgccaaaagtgcaaggcggaaatgggcaactttatctctcgcagccgttggcaaaagtcttcactctagcagaagatctcgcacataaagctggggatcagtttgtaaccgtcgagcgtgtgctgcaagcgcttatcatggaaaaaactgcaaaaacagccgatattctcacaaaagcaggtctgactccgcaagcactcaatcaagccattaacgctttgcgtaaaggaaaaacggctacaagtcctcatgccgaaagccaatatgatgctttgcaaaaatatgcacgcgatcttacaaaagatgcacgggaaggaaaacttgatcctgttattggacgtgaagaagaaattcgccgcactattcaggtgctctcacggcgtaccaaaaataatcccgtgctcattggtgaaccaggtgtcggaaaaacggcaattgttgaagggttagcactgcgtattgttaatggcgatgtgccagaaactttgcgcgataaacggctctatgcactcgatatgggagcacttatcgctggtgcaaaatatcgcggcgaattcgaagaacgtcttaaagcagtgctggctgaggtgcaagccgaaaatgggcagatcattctctttattgatgaattgcataatctggttggtgctggaaaatccgatggtcctatggatgcttccaatttgctaaaacccgctcttgcgcgcggagaactccattgtgtgggggcaacaacacttgatgaatatcgcaaatatgtcgaaaaagatgctgctcttgcacggcgcttccaacccgtctttgtgcctgaaccaacccttgaggatacaatctctatcttgcgcggcattaaagaaaaatatgaacaacatcataaagtgcgtttggcagacagcgccttaattgctgcagcccgtttgtctaaccgttatattactgatcgtttcttgccagataaagccattgatcttatcgatgaagcagcggcacggttgcgtatgcaagtcgattcaaaacccgaagaactcgatgcacttgatcggagaatcttacagttgaaaatcgaacgtgaagcgttgaaaaccgatgtagagccaacagcaaaagagcgtctgaaaaccgtgcaagctgaactcgaaacattggaacaacaatcgagagaaatgacaaccgcttggcaggctgaaaaacaaaaattaggacatgctgcggatttgaaaaaacagctcgaagaagcacgcaatgctttggctattgcacagcgtgatggacaattccaaaaagccggagaactcgcttatagcgtcattccgcagctcgaaaaacaattgagcatagctgaaaatgatgatcagcaaaatcatctcgttgaagaaactgttaccgctgaacatgtggcccggattgtttctcgatggaccggagttcctgttgatcgtatgcttgaggcagaacgagaggcgctcctgcgtatggaagacgaaattagcaaacgtgtggttggacagggtgaagctgtgcaagctgtttcccgcgctgtacgccgtgcgcgtgccggcctgcaagaccctaatcgccccatcggctcctttatgtttcttggtcctaccggtgtgggaaaaaccgaattaaccaaagcgcttgcggcttttctctttcaagatcaaaatgctatgttgcgcatcgatatgtcggaatatatggaaaaacatgccggtgcacgcttgattggggcaccgcccggatatgtcggatatgaagaagggggagtgctaactgaagccgtgcggcgaagaccttatcaggtcattttgttcgatgagattgaaaaagcccatcccgatatttttaatctcttgctgcaggtgcttgatgaagggcgcttgacagatagccagggacgtactgtcgattttcgcaataccttactgattatgacctcaaatttgggagcggaatttttaaccgccttgccagaaggacaaacgaccgatcaggcaaaaaatgatgtcatgaatgttgtaaaagcggcttttcgtcccgaatttcttaatcgtattgatgaggttattctctttcagagattacaacgtagcgacatggaagctatcgttgatatccagatacaacatttgcaaaatttgctcaatgaacgcaaaataactttgcatatcgaaccagaggttcggcaattccttggcgataagggctatgatcctctctatggcgcgcggcctctcaaacgcattatccaaagagaaattcaagatccactggcagaaaacatcttgtttggaaaaattcatgatgagatggcggtgacaattgcaaaagaaggagagcatttgacttttttgcctgaaaattaa

SEQ ID NO: 6912 - protein, 859 aa, Bartonella henselae str. Houston-1
MNLEKYSERLQGFLQTAQNKALSSDHQQFMPEHFLKVLLEDSQGLAASLIQKAGGDLSLIQKALEEALDALPKVQGGNGQLYLSQPLAKVFTLAEDLAHKAGDQFVTVERVLQALIMEKTAKTADILTKAGLTPQALNQAINALRKGKTATSPHAESQYDALQKYARDLTKDAREGKLDPVIGREEEIRRTIQVLSRRTKNNPVLIGEPGVGKTAIVEGLALRIVNGDVPETLRDKRLYALDMGALIAGAKYRGEFEERLKAVLAEVQAENGQIILFIDELHNLVGAGKSDGPMDASNLLKPALARGELHCVGATTLDEYRKYVEKDAALARRFQPVFVPEPTLEDTISILRGIKEKYEQHHKVRLADSALIAAARLSNRYITDRFLPDKAIDLIDEAAARLRMQVDSKPEELDALDRRILQLKIEREALKTDVEPTAKERLKTVQAELETLEQQSREMTTAWQAEKQKLGHAADLKKQLEEARNALAIAQRDGQFQKAGELAYSVIPQLEKQLSIAENDDQQNHLVEETVTAEHVARIVSRWTGVPVDRMLEAEREALLRMEDEISKRVVGQGEAVQAVSRAVRRARAGLQDPNRPIGSFMFLGPTGVGKTELTKALAAFLFQDQNAMLRIDMSEYMEKHAGARLIGAPPGYVGYEEGGVLTEAVRRRPYQVILFDEIEKAHPDIFNLLLQVLDEGRLTDSQGRTVDFRNTLLIMTSNLGAEFLTALPEGQTTDQAKNDVMNVVKAAFRPEFLNRIDEVILFQRLQRSDMEAIVDIQIQHLQNLLNERKITLHIEPEVRQFLGDKGYDPLYGARPLKRIIQREIQDPLAENILFGKIHDEMAVTIAKEGEHLTFLPEN

SEQ ID NO: 6913 - DNA, 2601 bp, Bacillus thuringiensis serovar konkukian str. 97-27
  CDS (1)..(2601): transl_table=11
atggacttaaatcaaatgacaacaaaaacacaagaggcgattatgagtgcccaatctttagcggtatctcatcaccatcaagaagtagatactgttcatctcttgtttacattattagaagagcaagatgcgctagcagtacgtatttttcaaaaaatgaatgtcgatatagaagcattaaaacaaggcgtagaaaatttaattaagaaaaagccttccgtaacgggaagcggtgcagaagcagggaaattatatataacaggtgctctgcaacaactgcttgtaagagcaggaaaagaagcagagaaattgcaagatgattacatttcagttgaacatgtattgcttgcttttactgaagaaaaaggcgatataagccaattattcacaagatttcatattacgaaagacaacttattacagtctttaatgacagttcgggggaatcaaagagtgactagccaaaatccagaagcaacttatgaagcgttagaaaaatatggtcgtgatttagtggcggaagtgaaagcagggaaaattgaccctgttatcggccgcgatagtgaaattcgccgcgtaatccgcattctttcacgtaaaacgaaaaacaaccctgttttaattggggaaccaggtgttggtaaaacagcaatcgttgaagggttagcacagcgtattgtgaagaaggatgtacctgaaggattaaaagatagaacaatctttgcattagatatgagtgcgcttgtagctggagcgaaattccgcggtgagttcgaagagcgtttgcaagctgtattaaatgaaattaaaaagagtgaaggtcgcattttactattcattgatgaacttcacacaatcgtcggcgctggtaaaacagaaggtgcgatggatgcagggaatatgttaaaaccgatgcttgcgcgtggtgaactgcattgtatcggggcgacaacactagatgaatatcgtaaatatattgagaaagatccagcactagaaagacgtttccaacaagtattagcagaagaaccaactgttgaagatacaatttccattttacgtggtttaaaagagcgttttgaaatttatcacggtgtaaatattcatgaccgcgcaattgtagcagcatcagttttatcagatcgatatatttcagatcgtttcttaccggataaagcaattgatcttgttgacgaagcgtgcgcaacaattcgtacagaaattgattctatgccgacagaattagatgaagtaacgcgccgcattatgcagctagaaattgaagaagcggctcttggaaaagagaaggactttggtagccaagaacgcctcaaaacattgcaacgtgaattatcggatttaaaagaagtggcaagtagcatgagagcgaaatgggagaaagaaaaagaagatattcacaaagttcgtgacttacgtgaacatttagagcgtttgcgccgtgaattagaagaagcagaaggtaattacgatttaaatagagcagcggaacttcgccacggaaaaattcctgcaattgaaaaagagttaaaagaagcagaagaaatgggcgcaaataataaacaagaaaatcgtttattacgtgaggaagtaagtgaagaagagattgctgatattgtttcacgctggactggtattcctgtcgcaaaactcgttgaaggtgaacgtgagaaattattacgcttagagcaaattttatcagaacgtgttatcggacaagaggaagcggtaagcctagtatcagatgcagttcttcgtgcgcgcgctggtattaaagacccgaaccgtccaattggttccttcatcttcttaggaccgactggtgttggtaaaacagaacttgcaaaaacgttagcgcagtctttatttgatagtgaagagcaaatgattcgtatcgatatgtctgagtatatggagaaacacgctgtgtcacgcttaattggtgcgcctcctggatatgttggatatgaagagggcggtcaattaacagaagcagtaagacgtaaaccgtattccgttattttattagacgaaatcgaaaaagcgcatccagaagtattcaatattttattacaaatgttagatgacggacgcattacagattcgcaagggcgtacagtagactttaaaaacacagttattattatgacttcaaatattgggtctgctcatttattagatggattagaagaagatggctccattaaagaagaatcaagagaacttgtaatgggacaattgagaggacatttccgaccagagttcttaaaccgcgtcgacgaaattattttattcaaacctcttacaacgaatgaaattaaaggtattgttgataaaattgtaaaagaattacaagttcgtttagctgaccgtcatattacggtacaattaacagaagcagcgaaagaatttgttgtagaagctggctttgatccgatgtatggagctcgcccattaaaacgatacgtacagcgtcaagttgagacgaaattagcgagagaattaattgcaggtacgattactgacaatagtcatgtagtggttgatgtagaaaataacgaattagtcgttcatgtgaaataa

SEQ ID NO: 6914 - protein, 866 aa, Bacillus thuringiensis serovar konkukian str. 97-27
MDLNQMTTKTQEAIMSAQSLAVSHHHQEVDTVHLLFTLLEEQDALAVRIFQKMNVDIEALKQGVENLIKKKPSVTGSGAEAGKLYITGALQQLLVRAGKEAEKLQDDYISVEHVLLAFTEEKGDISQLFTRFHITKDNLLQSLMTVRGNQRVTSQNPEATYEALEKYGRDLVAEVKAGKIDPVIGRDSEIRRVIRILSRKTKNNPVLIGEPGVGKTAIVEGLAQRIVKKDVPEGLKDRTIFALDMSALVAGAKFRGEFEERLQAVLNEIKKSEGRILLFIDELHTIVGAGKTEGAMDAGNMLKPMLARGELHCIGATTLDEYRKYIEKDPALERRFQQVLAEEPTVEDTISILRGLKERFEIYHGVNIHDRAIVAASVLSDRYISDRFLPDKAIDLVDEACATIRTEIDSMPTELDEVTRRIMQLEIEEAALGKEKDFGSQERLKTLQRELSDLKEVASSMRAKWEKEKEDIHKVRDLREHLERLRRELEEAEGNYDLNRAAELRHGKIPAIEKELKEAEEMGANNKQENRLLREEVSEEEIADIVSRWTGIPVAKLVEGEREKLLRLEQILSERVIGQEEAVSLVSDAVLRARAGIKDPNRPIGSFIFLGPTGVGKTELAKTLAQSLFDSEEQMIRIDMSEYMEKHAVSRLIGAPPGYVGYEEGGQLTEAVRRKPYSVILLDEIEKAHPEVFNILLQMLDDGRITDSQGRTVDFKNTVIIMTSNIGSAHLLDGLEEDGSIKEESRELVMGQLRGHFRPEFLNRVDEIILFKPLTTNEIKGIVDKIVKELQVRLADRHITVQLTEAAKEFVVEAGFDPMYGARPLKRYVQRQVETKLARELIAGTITDNSHVVVDVENNELVVHVK

SEQ ID NO: 6915 - DNA, 2580 bp, Acinetobacter sp. ADP1
  CDS (1)..(2580): transl_table=11
atgcgttttgaaaaatttacaaatcggttgcaacaggtgctatctgatgcacaatcacttgcaacaggcaaagatcatactgcgattgatggtctacatattcttgcaaccatgctcgaagagccatctaacttaagtttattgcaacaagctggtgcacgtttaccagagttgaaacagaagcttgaacaagcgctcaaagatgcaccgactattactaatccgacaggtgatgtcaatctaaatcctgaagcggtaaaagtattaaatctggcggatcgccatgctcaaaaggcaggggatgaatttttgtctacagattgggtactgttggcattaaccgaaacaggtagtaccaaaagtttattaaatagcgtaggtgtaactacagataccttgcgcaaagtcattgaatctattcgaggcaacgataaagttatgagtaataatcacgaagatcaacgtgactcattaaacaaatataccatcgatctgactgagcgagctttggcaggtaaacttgatcctgtgattgggcgtgatgatgagattcgccgtaccattcaggtactttcacgtcgtaccaagaataaccctgttctgataggtgagcctggggttggtaaaaccgcgattgtagaaggcttggcacagcgtattgtgaatggtgaggtgccagaaagcttaaaaaataaacgcgtattgtcactcgatttaggttcactacttgcaggtgcaaaatatcgcggtgagtttgaagagcgtttaaaagcagtactcaatgatttggccaaacaagatggtcaggtaattttatttattgatgagttacatactttagttggtgcaggtaaatccgatggtgccatggatgcaggtaacatgctcaaacctgctttggcacgtggtgagttgcgttgtgtcggggcgacaactttagatgagtatcgccaatatattgaaaaagatgctgcgttagaacgtcgtttccagaaagtattggttgatgagccaagtgtagaagataccatcgctattttgcgtggtttgaaagaacgttacgaagtgcatcatggtgtaaaaattctcgactctgcgattattgctgctgcgaaaatgtcgcaccgctatattacagatcgtcagttgccagataaagccattgatttgattgatgaggcggcttcacgtatcaagatggagctagattcaaaaccagaagcactggatcgtttggagcgaagaatcattcagctcaaaatgcagcttgaagcagttaaaaaagatgaagatctaggaagtaaagccgaggttaaacatctggaagagcagatttctatcgttcaaaaagaatataacgatatggaagaggtctggcgtgcagaaaaggccttggttgaaggcacgaaagacgcacaggtcaagctcgatcaagcccgtattgcatttgaaaaagcgcaacgtgaaggtgatttggcagaggctgcacgtttacaatatggtgtgattcctgagttacaaaagcagcttgagcaagatgaagtggctgaagaaaatgaagagccaaaactattgcgaaataaagtcacagataatgaaattgctgaagtggtgagtgctgcgacagggattccagtggctaaaatgttgcagggtgaacgtgaaaaacttttacaaatggaaagctttttgcataaccgtgtagttggacaagatgaggctgtcattgcggtttcgaatgctgtgcgtcgttctcgtgcgggcttgtcggatccaaatcgtccaagtggttcattcttattccttgggccaacaggtgtcggtaaaactgaattaaccaaagcactggcaaacttcttgtttgatagtgacgatgccatgattcggattgacatgagtgaatttatggaaaaacactcggtgagtcgcttggtgggtgcacctccaggttatgtgggctatgaagaaggtggtgtgttaaccgaagcggtacgccgtaaaccatatagcgtggtactatttgatgaggttgaaaaagcgcatcccgatgtttttaacattttactacaggtgctcgatgatggtcgtctgactgattcacaaggtcgggtcattgactttaaaaatactgtgattgtgatgacctcaaacctcggatcacaagatgtacgtgagctgggtgaaggtgcgactgatgatgaggtacgtgcagtggtgatgtctgcggtgagtcaacatttccgtccagagtttatcaatcgaattgatgaactggtagtattccactcgttacaaaaatcgcaaattcgtggtatcgccgatattcaattggatcgtttacgttcacgtttggccgagcgtgacattggtttgaatattgatgatagtgcctttgatattctgattgatgctggtttcgatcctgtctatggtgcacgtcctttgaaacgcgcaatccagcaacaggttgaaaatacattagcccagaaaattctggcaggtgatttccagccaggagataacatcatcatcaaaggtgatcatggtgacttggtgtttgataaattaaaactgagttaa

SEQ ID NO: 6916 - protein, 859 aa, Acinetobacter sp. ADP1
MRFEKFTNRLQQVLSDAQSLATGKDHTAIDGLHILATMLEEPSNLSLLQQAGARLPELKQKLEQALKDAPTITNPTGDVNLNPEAVKVLNLADRHAQKAGDEFLSTDWVLLALTETGSTKSLLNSVGVTTDTLRKVIESIRGNDKVMSNNHEDQRDSLNKYTIDLTERALAGKLDPVIGRDDEIRRTIQVLSRRTKNNPVLIGEPGVGKTAIVEGLAQRIVNGEVPESLKNKRVLSLDLGSLLAGAKYRGEFEERLKAVLNDLAKQDGQVILFIDELHTLVGAGKSDGAMDAGNMLKPALARGELRCVGATTLDEYRQYIEKDAALERRFQKVLVDEPSVEDTIAILRGLKERYEVHHGVKILDSAIIAAAKMSHRYITDRQLPDKAIDLIDEAASRIKMELDSKPEALDRLERRIIQLKMQLEAVKKDEDLGSKAEVKHLEEQISIVQKEYNDMEEVWRAEKALVEGTKDAQVKLDQARIAFEKAQREGDLAEAARLQYGVIPELQKQLEQDEVAEENEEPKLLRNKVTDNEIAEVVSAATGIPVAKMLQGEREKLLQMESFLHNRVVGQDEAVIAVSNAVRRSRAGLSDPNRPSGSFLFLGPTGVGKTELTKALANFLFDSDDAMIRIDMSEFMEKHSVSRLVGAPPGYVGYEEGGVLTEAVRRKPYSVVLFDEVEKAHPDVFNILLQVLDDGRLTDSQGRVIDFKNTVIVMTSNLGSQDVRELGEGATDDEVRAVVMSAVSQHFRPEFINRIDELVVFHSLQKSQIRGIADIQLDRLRSRLAERDIGLNIDDSAFDILIDAGFDPVYGARPLKRAIQQQVENTLAQKILAGDFQPGDNIIIKGDHGDLVFDKLKLS

SEQ ID NO: 6917 - DNA, 2577 bp, Pectobacterium atrosepticum SCRI1043
  CDS (1)..(2577): transl_table=11
atgcgtctggatcgtcttaccaacaaattccaacttgctcttgctgatgcccagtctctttcccttgggcgtgatcaccagtttattgaaccacttcatttgatgagcgctttgcttcatcaggccggaggaactgttggtccacttctgactgtcgcaggagccaatcttaatcacctgaaagccgaaatcgaccaagcaatcacgcgtttgcctcaggttgaaggtaccgatggtgatgtccaaccttcgaacgagttagtccgcgcattgaatatgtgcgacaaactcgcgcaaaagcgtggtgatacctttatttcctcagaacttttcgtgcttgctgctttggagtctcgcggcacgctgggggatatattgaaaaaggcgggtgtcacgcagcaaggtgtaacaaacgcgattgatcaagtgagaggaggagatcaagtgaacgatcagggggctgaagatcagcgccaggcattaaaaaaattcacaattgacctcacggaacgtgcggaacaaggcaagctcgacccggttatcgggcgtgatgaagagattcgccgtactattcaggtcctacaacgtcggaccaaaaataacccggtattaattggtgagcccggcgtggggaaaaccgcgatagtagaagggttagcccagcgcatcgttaatggcgaagtgcctgaaggcctgaaaaacaagcgcgtactttcgctggatatgggggcactggtggctggtgccaaatatcgtggtgagtttgaagaacgtttgaaaggtgtactcaacgatctgtctaaacaggaaggtaatgtcattctgtttattgatgagctccatacgatggtgggagcgggtaaagccgatggcgcgatggatgccggcaatatgctaaaacccgcgctggctcgcggtgaactgcattgcgttggggcgacgacgctggatgaatatcgtcaatatattgaaaaggacgccgcgcttgagcgtcgtttccagaaagtgtttgtcgcggaaccgaccgttgaagacacgattgcgattctgcgtgggctgaaagagcgttatgaattgcatcatcatgtgcaaattactgacccggcgattgttgcggcggcaatgttgtcccatcggtatatttcggatcgtaagctaccggataaagccattgacctgattgatgaggcggcatccagtattcgtattcagattgattcaaaaccagagcctctcgatcggcttgagcgccgaatcatccagttaaagctggagcaacaggctctgaagaaagaatctgatgaagccagtcaaaagcggcttgagttactaagtacggaacttgaccaaaaagagcgtgaatattcccgacaagacgaagagtggaaagcggaaaaagcgtcactcacgggaacgcagaatattaaggcctctttagagcaagcgaaaatttcgttggaacaggctcgacgtcagggagacctggggagaatgtctgagttgcaatacggcaaaatccccgagttagagaagcagttggcagctgcaacgcagcaggaaggaaaaacggtgcatttgctgcgtaatcgagtcacagatgttgaaatcgctgatgtgctggcacgctggactggaattcctgtttctcgcatgctggagggcgagaaagaaaaattattgcgaatggaggatgaactgcatcagcgagtgatcgggcagaacgaagccgttgaggcggtagcgaattctattcgtcgcagccgggcagggttatccgatcctaatcgtccgattggttcgttcctgttccttggaccaacgggtgtggggaaaactgaactctgcaaaacgctggcaacttttctcttcgacagtgacgacgctatggtgcgtattgatatgtccgaatttatggagaaacactcggtttcacgtctggtcggtgcgcctcctggatatgtcggttacgaagaagggggatatctgactgaagcggtacgccgtcgcccttattcggtcattttgctagatgagatcgaaaaggcacaccctgatgtgttcaatattctgcttcaggtattggatgatggtcgccttactgatggtcaggggagaacggtcgacttccgcaatacagtggtcatcatgacgtcaaacttgggatctgaccttattcaggaacgttttggtgagcgtagctataccgaaatgagagatatggttcttgacgtcgttagccatagcttccgtcctgaatttattaatcgtatcgatgaagtcgtcgtattccatcccctgggaagggcgcatattacgtcgatcgcacaaattcagcttcagagactgtacaagcgtcttgaagagcgtggatatagtgtcacgatcacggatgccgctttagatatgctcggagaggtcggattcgatcctgtctatggtgctcgtccgcttaaaagggcgatacagcaactgatagagaatccactcgctcagcagatattagggggggaactgatacccggtaagcggatcacattagatgttgaaggtgaacagatagtcgcacggcaagaataa

SEQ ID NO: 6918 - protein, 858 aa, Pectobacterium atrosepticum SCRI1043
MRLDRLTNKFQLALADAQSLSLGRDHQFIEPLHLMSALLHQAGGTVGPLLTVAGANLNHLKAEIDQAITRLPQVEGTDGDVQPSNELVRALNMCDKLAQKRGDTFISSELFVLAALESRGTLGDILKKAGVTQQGVTNAIDQVRGGDQVNDQGAEDQRQALKKFTIDLTERAEQGKLDPVIGRDEEIRRTIQVLQRRTKNNPVLIGEPGVGKTAIVEGLAQRIVNGEVPEGLKNKRVLSLDMGALVAGAKYRGEFEERLKGVLNDLSKQEGNVILFIDELHTMVGAGKADGAMDAGNMLKPALARGELHCVGATTLDEYRQYIEKDAALERRFQKVFVAEPTVEDTIAILRGLKERYELHHHVQITDPAIVAAAMLSHRYISDRKLPDKAIDLIDEAASSIRIQIDSKPEPLDRLERRIIQLKLEQQALKKESDEASQKRLELLSTELDQKEREYSRQDEEWKAEKASLTGTQNIKASLEQAKISLEQARRQGDLGRMSELQYGKIPELEKQLAAATQQEGKTVHLLRNRVTDVEIADVLARWTGIPVSRMLEGEKEKLLRMEDELHQRVIGQNEAVEAVANSIRRSRAGLSDPNRPIGSFLFLGPTGVGKTELCKTLATFLFDSDDAMVRIDMSEFMEKHSVSRLVGAPPGYVGYEEGGYLTEAVRRRPYSVILLDEIEKAHPDVFNILLQVLDDGRLTDGQGRTVDFRNTVVIMTSNLGSDLIQERFGERSYTEMRDMVLDVVSHSFRPEFINRIDEVVVFHPLGRAHITSIAQIQLQRLYKRLEERGYSVTITDAALDMLGEVGFDPVYGARPLKRAIQQLIENPLAQQILGGELIPGKRITLDVEGEQIVARQE

SEQ ID NO: 6919 - DNA, 2574 bp, Propionibacterium acnes KPA171202
  CDS (1)..(2574): transl_table=11
atggacaccaatctcaccacgatgagccgtgacgcggtcaccgccgctactcggcatgcgttggcccacgggaacccatccgtggagccctcgcatcttcttcacgcactgttcacgatcccagacaacactgtcagtccgttggtagctggcttggggattgatcctcagcaggtcgacgccgtcgctaccgcagcgatgcgctcccttccgtcaagtaccggcgcctcagtagctcagccgcagctgtccggggccttcgcccgagtcatcgccgacgcgcagaaccgtgccgaggccatgggcgattccttcgtcgctaccgagcatcttcttatttcgctgacggcggttccctccgacgtccagaacggcctggcagggctcggcctcaagcccgactccctcgcggcggccttcaatgaaggtcgtggagaccgtcgtgtcacctccgaggagtccgagggaggcgaatcggctctcgccaagtactccgtcgatctcaccgagcgcgcccgtgccggcaagctcgaccccgtcattggtcgtgaccaggagattcgccgcgtcgtccaggtgttggcgcgacgcactaagaacaacccggtccttatcggtgaaccgggggtcggcaagactgccgtcgtcgaggggttggctcagcgcgtcgtcgccggggacgttcccgactctctcaaagggcgtcgcgtcgtctctttggatctgtcctccatggttgccggggctaaataccgcggcgagtttgaggagcgcctcaaggccgtcctcaacgagatcaaggaggccgaggggcagatcattacctttatcgatgagctgcacaccgtcgtcggcgccggggcttccggagagggagcaatggacgctggcaatatgctcaagccgatgctggcccgtggcgagctgcgaatgatcggtgccactaccctcgacgagtaccgcgagcatattgagaaggacccagctctggagcgtcgtttccagcaggtctttgtcggtgaaccgtcggttgaggacactattgccatcctgcgcggcttgcgagagcgctacgaggcccaccacaaggtgcgtattactgacggagcccttgtcgcggccgccagcttgtctcaccggtacatcaccgcccgtcagcttcctgacaaggccattgaccttatcgacgaggctgcgtctcggctgcgcatggagattgactcctctccggaggagatcgacaccctgcgccgtgaagtcgaccgcatgaagatggagatcttcgccgtcgagaaggaggacgacccggccagccagcagcgcctaacgaggttgcgcgctgacatggctgacaaggaggagaccctgcgcggcctggagtcgcgctgggaggctgagaaggctggtctcaacaaggtcggtgagctcaagacaaggattgacgagttgcggactgcggccgacaagtaccagcgcgagggcgacttcgggcgagcgtccgagatcctctacggtcagattcccggccttgagaaggagatggaggctgctgccaaggctgaggaggagaccccacggatggtgtccgaggaggtcggtacctccgacattgccgaggttgtttcctcgtggaccggcatccccgtggggcggatgatgcaaggcgagcaggagaagctgctccatatggaggagcggctgcacgaacgtcttattggtcaggatcgagctgtcaagaccgtctcggatgcggtgcgtcgctcccgggccggaatcagcgacccgaaccgtccgactggctcgttcctcttcctgggccccacgggcgtcggcaagaccgagttggccaagtccctggcggagttcctcttcgacgacgagaccgctctggtgcgtattgacatgagtgagtacatggagaagcactccgtctcacgtctggtcggtgcccctccgggttacatcggttacgaagagggcggtcagcttaccgaagctgtgcggcgtcgcccctactcggttatcttgctcgacgaggtggaaaaggctcattccgacgtctttaacattttgttgcaggtgctcgacgacggtcgtctgactgacggccaaggacgcacggtggatttccgcaacaccattttggtcttgacgagcaatctgggtagccaattcctgtcagacgcgagccttgatgaccatgctaagcgtgaggccgtcatgggggcggtgcgtcaggcgtttcgacccgagttcctgaatcgactcgacgatgtggtcatgttcgacccgttgtcgatggccgatctgggacggatcgtcgagacgaacctggctaagctcaattcacggctggccgagcggcgcatcaccattgccgtgaccgacgccggtaaggactggctggccatggcgggtttcgacccgatctacggtgcccgaccactgcgtcgcctgatgcagaccaccatcgatgatcagctggctcgcaaggtgttgtctgggcaagtgcaggagggcgatacggcgacctttgacatcaacgaggccggtgacggtttggtgattctctga

SEQ ID NO: 6920 - protein, 857 aa, Propionibacterium acnes KPA171202
MDTNLTTMSRDAVTAATRHALAHGNPSVEPSHLLHALFTIPDNTVSPLVAGLGIDPQQVDAVATAAMRSLPSSTGASVAQPQLSGAFARVIADAQNRAEAMGDSFVATEHLLISLTAVPSDVQNGLAGLGLKPDSLAAAFNEGRGDRRVTSEESEGGESALAKYSVDLTERARAGKLDPVIGRDQEIRRVVQVLARRTKNNPVLIGEPGVGKTAVVEGLAQRVVAGDVPDSLKGRRVVSLDLSSMVAGAKYRGEFEERLKAVLNEIKEAEGQIITFIDELHTVVGAGASGEGAMDAGNMLKPMLARGELRMIGATTLDEYREHIEKDPALERRFQQVFVGEPSVEDTIAILRGLRERYEAHHKVRITDGALVAAASLSHRYITARQLPDKAIDLIDEAASRLRMEIDSSPEEIDTLRREVDRMKMEIFAVEKEDDPASQQRLTRLRADMADKEETLRGLESRWEAEKAGLNKVGELKTRIDELRTAADKYQREGDFGRASEILYGQIPGLEKEMEAAAKAEEETPRMVSEEVGTSDIAEVVSSWTGIPVGRMMQGEQEKLLHMEERLHERLIGQDRAVKTVSDAVRRSRAGISDPNRPTGSFLFLGPTGVGKTELAKSLAEFLFDDETALVRIDMSEYMEKHSVSRLVGAPPGYIGYEEGGQLTEAVRRRPYSVILLDEVEKAHSDVFNILLQVLDDGRLTDGQGRTVDFRNTILVLTSNLGSQFLSDASLDDHAKREAVMGAVRQAFRPEFLNRLDDVVMFDPLSMADLGRIVETNLAKLNSRLAERRITIAVTDAGKDWLAMAGFDPIYGARPLRRLMQTTIDDQLARKVLSGQVQEGDTATFDINEAGDGLVIL

SEQ ID NO: 6921 - DNA, 2607 bp, Desulfotalea psychrophila LSv54
  CDS (1)..(2607): transl_table=11
atgcaacttgataagtttacccttaagtctcaggaggccgttcaggccgcccagcagcaggcaagacagatggggcatcaggaaattcatctcagccatctagtccttgccatactgcaacaaaccgacagcattattattcccgttctcaaaaaaatgggtgttcagccgcatatgttagaggtggctttgcaggaggcccttgctgctatacctaaggtctccggcagtggagcgggccaggtctacgcctctcaggccctgactaccctctttgactcggccagtgatattgcctcatccatgcaggacgattttgtcagtatggaacatattttccttgccgccctacgggtaaaaaaagatgctgttgcagatgtttttaaaagaaatcaggtgagtgaaaaacagttccttcaggccctgatggatattaggggtaatcaaagggttactgatcaatctcctgaagagaaatttcaggctctgcaaaaatatgccgataatcttaccgatagggcaaaacagggcaagattgatcctgtcattggtcgtgacgaagagatacgtagggttattcaggttctttctagacgtaccaagaataatcctattctcataggtgaaccgggtgttggtaagactgccatcgttgagggactggcccaacggattgttgacgatgatattcccaccaccctgaagaataagcaggttgttaccctggatatgggcgctcttattgccggagcgaagtatcggggtgaatttgaagaccgtcttaaggcggtgcttaaagaggtggagaagcaggcggggaatatcattctctttattgatgagcttcataccattgtcggggccggtgcctcggagggatcaatggatgcctccaatatgctaaaacctgccctggctcggggggagttgcactgcgtaggtgccaccactctcaacgaatataagaagtacattgaaaaagacaccgcccttgaacgaaggttccaacccgttcttgtccaggaacccagtgttgaggataccgtggctatcctccgtgggattaaggagaagtatgagatacaccatggtgtccgtattcaggatgcggccaccgttgcggcggtaaccctttctaatcgttatattgcagatcgttttctccccgataaggccattgacctcatcgatgaggcggcttcgcaactgcggattgagatagattctatgccaacggagattgatcagctccaacgcaaatgtatgaagcttgagatagagcaggaggctttgaagaaggagaaggattcagcctctatctccaggcttcaggagagtaagaagcaactcgctgatctcagtgatgagcttaaaggactcatgggccagtggaatattgaaagggagaccattgccggtatctcctcgataaaagaggaaattgatgctgcccaggcagaagaacagctggcggaacgggcaggagatttgcagaaagttgcccagatacgttaccaaaagcttccggggcttggagagaagttggtgaaggcgcaagctgagttgagcaccatgcagcaggataagatgattctcaaagaggaggtcgggccagaggatattgcctccattgtcagcaaatggacaggaattcctgtggataaacttcttcagggagagcgtgataagcttgtgcatgcagaagatgatctggcaaaacgtgttgtaggtcaaagggatgctattgttgcagtggcaaatgctgtgcgcagatctcgggcgggcctgcaaaacccaaataggcctcttggttcctttctctttttgggccccaccggtgtcggcaagaccgagcttgccaaatctcttgccgactttctctttgaagatgagcaggccatgattcgggtggacatgtctgagtatatggagaggcacgctgtctcccggctgatcggagctcctcccggctatgttggttatgatgagggtggctatctcaccgaggctattcggcgcagaccttatgccgttattcttttggatgaaattgaaaaggcccatccagatgtattcaatattcttttgcaaatactggacgatggtcgactcaccgatggtaaggggcgtacggttgattttcgtaacaccatcctcattatgacctctaatataggtggagagcaaattctggagatggttcaggctggaaaaggggccgcggatatgtacgaacagataaataccatgctgcagtctcgctttaaaccggagtttcttaataggattgatgacagcattatctttaatccgctgagtcgtgaggatatgctcagtattcttgatattcagcttataggtttggcaggtcgtcttctcgaaagagatattgttttacaggtagagaaaaatgccaaggagctccttgttgccagaggatacgacagggcctatggcgctcggcccttgaaacggtcaatccagcgttatcttgaagaccccctggccttgacgattctggcgggggagataaagacgcctgcaaaattggtcgtaggtcttgaaaatggtgaattgcttatgcgctgggctgagttaacagagtaa

SEQ ID NO: 6922 - protein, 868 aa, Desulfotalea psychrophila LSv54
MQLDKFTLKSQEAVQAAQQQARQMGHQEIHLSHLVLAILQQTDSIIIPVLKKMGVQPHMLEVALQEALAAIPKVSGSGAGQVYASQALTTLFDSASDIASSMQDDFVSMEHIFLAALRVKKDAVADVFKRNQVSEKQFLQALMDIRGNQRVTDQSPEEKFQALQKYADNLTDRAKQGKIDPVIGRDEEIRRVIQVLSRRTKNNPILIGEPGVGKTAIVEGLAQRIVDDDIPTTLKNKQVVTLDMGALIAGAKYRGEFEDRLKAVLKEVEKQAGNIILFIDELHTIVGAGASEGSMDASNMLKPALARGELHCVGATTLNEYKKYIEKDTALERRFQPVLVQEPSVEDTVAILRGIKEKYEIHHGVRIQDAATVAAVTLSNRYIADRFLPDKAIDLIDEAASQLRIEIDSMPTEIDQLQRKCMKLEIEQEALKKEKDSASISRLQESKKQLADLSDELKGLMGQWNIERETIAGISSIKEEIDAAQAEEQLAERAGDLQKVAQIRYQKLPGLGEKLVKAQAELSTMQQDKMILKEEVGPEDIASIVSKWTGIPVDKLLQGERDKLVHAEDDLAKRVVGQRDAIVAVANAVRRSRAGLQNPNRPLGSFLFLGPTGVGKTELAKSLADFLFEDEQAMIRVDMSEYMERHAVSRLIGAPPGYVGYDEGGYLTEAIRRRPYAVILLDEIEKAHPDVFNILLQILDDGRLTDGKGRTVDFRNTILIMTSNIGGEQILEMVQAGKGAADMYEQINTMLQSRFKPEFLNRIDDSIIFNPLSREDMLSILDIQLIGLAGRLLERDIVLQVEKNAKELLVARGYDRAYGARPLKRSIQRYLEDPLALTILAGEIKTPAKLVVGLENGELLMRWAELTE

SEQ ID NO: 6923 - DNA, 2502 bp, Symbiobacterium thermophilum IAM 14863
  CDS (1)..(2502): transl_table=11
atgttcagccgctacacggaacgggctcagcgggtcatcgtgctggcccaggatgaggctcggcgtttgaattacgactacgtcggcacagagcatctgctcctgggactgattcgcgagggcgagggcatcgccgccaaggcgctccagtcgctgggcatccagctggagcaggtgcgggccgaggtcgagaagatgatcggcaagggctccgcctcgtcccggggtgagatcggcttcacgcccagggccaagaaggtgatggtggagctggccatcgaagaggcgcggctcctggggcataactacgtgggcacggagcacatcctgctcggcctcatccgggagggcgagggcgtggctgcccaggtgctgcagaacctgggggcggacctggagcgggtgcgcaaccaggtgatccacctgctcggcggggtgccccatccgcccgccggctcctccatgccgggatcggccaaggtcaaggggcccaagaccagcacctccacgctggaccagttcggccgcgacctgaatcagatggcccgcgacggcaagctggatccggtcatcggccgggagaaggagatcgagcgggtcatccagattctcacccgacgcaccaagaacaacccggtgctgatcggcgagcccggcgtgggcaagaccgccatcgccgagggcctggcccagcgcatcgtcgacggccgggtgccggagatcctgaaggacaagcgggtcgtcgccctggacctggcctcgctggtcgcgggctccaaataccggggcgagtttgaggagcggctcaagaaggtgctggaggagatccgcaacgccggcaacgtcatcctcttcatcgacgaactgcacaccatcatcggcgccggcgcagcggagggcgcgatcgacgcgtccaacatcctgaagccggccctggcccgcggcgagttgcaggccatcggcgcgaccaccatcgacgagtaccgcaagtacgtggagaaggacgcggccctggagcgccgcttccagccggtgatggtcgaggagccgagccccgaggacgccatccagatcctgaaggggctgcgcgaccggtacgaggcccaccaccgggtcgagatcaccgacgccgcgatcgaggccgcagtgcggctctccgaccgctacgtcaccgaccggttcctgcccgacaaggccgtcgacctgatcgacgaggccgcctcccgcgtccggctctccaccttcgtggcaccgcccaacctgaaggagctggaggataagctggaggaggtgcgcaaggagaaggaggccgccgtccaggggcaggagttcgagaaggccgcgcgcctccgggacaaggagaccaagctgaaggaggagctggagcggcagaagaacgagtggcagcagaagaaggtcacggcgaagtgcgtcgtgaacgaggaggacatcgccaccatcgtctctcagtggacgggcatccccgcgacaaagctgacgatggacgagtcccagcggctgctcaacctggagaaggtgctgcacgagaaggtggtcggccaggacgaggcggtggcggcggtggcccgggccatccggcgggcccgcgccggcctgaaggatccgaagcggcccatcggctccttcatcttcctgggcccgacgggcacgggcaagacccacctggccaaggccctggcggaggcgctcttcggcgacgaggacgcgatggtccgcatcgacatgtccgagtatatggagcggcacaccacctcccggctggtgggcgcgccgcccgggtacgtggggtacgaggagggcggtcagctgaccgaggccgtccggcgccggccgtactgcgtcgtgctgctggatgagatcgagaaggcgcatcccgaggtcttcaacatcctgctgcaggtgctggaggacggccggctgaccgaggccaagggccgcaccgtggacttccgcaacaccgtgatcatcatgacctccaacgcgggcgcccaggccatccagggcgacaagaagctgggcttcaccgtccaggaggacgagaaggagcggtacgagcggatgaagtcccgggtcatggacgaggtcaagcggctcttccggcccgagttcctcaaccggctcgacgagatcatcatcttccacagcctgaccaaggatcacctgaaggagatcgtgcggctggaggtcaagaaggtggctgaccggctgaaggagcagggcgtggagctgaccctttccgactccgccctggagaagctggtcgcggaaggttacgacgagaagttcggcgcccgcccgctgcgccgggccatccagcggctggtggaggacccgctctccgaggagatgctccggcagccgttcaagtacggcgagcaggtgtacgtggacaccgacgcggaaggcaagatcgtcttcaagcgcaccgagccctccgccgagtcggtgggcgtcggcagcggcgagaccacgcaggcttag

SEQ ID NO: 6924 - protein, 833 aa, Symbiobacterium thermophilum IAM 14863
MFSRYTERAQRVIVLAQDEARRLNYDYVGTEHLLLGLIREGEGIAAKALQSLGIQLEQVRAEVEKMIGKGSASSRGEIGFTPRAKKVMVELAIEEARLLGHNYVGTEHILLGLIREGEGVAAQVLQNLGADLERVRNQVIHLLGGVPHPPAGSSMPGSAKVKGPKTSTSTLDQFGRDLNQMARDGKLDPVIGREKEIERVIQILTRRTKNNPVLIGEPGVGKTAIAEGLAQRIVDGRVPEILKDKRVVALDLASLVAGSKYRGEFEERLKKVLEEIRNAGNVILFIDELHTIIGAGAAEGAIDASNILKPALARGELQAIGATTIDEYRKYVEKDAALERRFQPVMVEEPSPEDAIQILKGLRDRYEAHHRVEITDAAIEAAVRLSDRYVTDRFLPDKAVDLIDEAASRVRLSTFVAPPNLKELEDKLEEVRKEKEAAVQGQEFEKAARLRDKETKLKEELERQKNEWQQKKVTAKCVVNEEDIATIVSQWTGIPATKLTMDESQRLLNLEKVLHEKVVGQDEAVAAVARAIRRARAGLKDPKRPIGSFIFLGPTGTGKTHLAKALAEALFGDEDAMVRIDMSEYMERHTTSRLVGAPPGYVGYEEGGQLTEAVRRRPYCVVLLDEIEKAHPEVFNILLQVLEDGRLTEAKGRTVDFRNTVIIMTSNAGAQAIQGDKKLGFTVQEDEKERYERMKSRVMDEVKRLFRPEFLNRLDEIIIFHSLTKDHLKEIVRLEVKKVADRLKEQGVELTLSDSALEKLVAEGYDEKFGARPLRRAIQRLVEDPLSEEMLRQPFKYGEQVYVDTDAEGKIVFKRTEPSAESVGVGSGETTQA

SEQ ID NO: 6925 - DNA, 2601 bp, Bacillus cereus E33L
  CDS (1)..(2601): transl_table=11
atggacttaaatcaaatgacaacaaaaacacaagaggcgattatgagtgcccaatctttagcggtatctcatcaccatcaagaagtagatactgttcatctcttgtttacattattagaagagcaagatgggctagcagtacgtatttttcaaaaaatgaatgtcgatatagaagcattaaaacaaggcgtagaaaatttaattaagaaaaagccttccgtaacgggaagcggtgcagaagcaggtaaattatatataacaggtgccctgcaacaactgctagtaagagcaggaaaagaagcagagaaattgcaagatgattacatttcagtggaacatgtattacttgcttttactgaagaaaaaggagatataagccaattatttacaagatttcatattacgaaagacaacttattacagtctttaatgacagttcgggggaatcaaagagtgactagtcaaaatccagaagcaacttatgaagcgttagaaaaatatggtcgtgatttagtggcggaagtgaaagcagggaaaattgatcctgttatcggccgcgatagtgaaattcgccgcgtaatccgcattctttcacgtaaaacgaaaaacaaccctgttttaattggtgagccaggtgttggtaaaacagcaatcgttgaagggttagcacagcgtattgtgaagaaggatgtacctgaaggattaaaagatagaacaatctttgcgttagatatgagtgcgcttgtagctggtgcgaaattccgcggtgagttcgaagagcgtttgcaagctgtattaaatgaaattaaaaagagtgaaggtcgcattttactattcattgatgaacttcacacaatcgtcggcgctggaaaaacagaaggtgcgatggatgcagggaatatgttaaaaccgatgcttgcgcgtggtgaactgcattgtatcggggcgacaacactagatgaatatcgtaaatatattgagaaagatccagcactagaaagacgtttccaacaagtattagcagaagaaccaactgttgaagatacaatttctattttacgtggtttaaaagagcgttttgaaatttatcacggtgtaaatattcatgaccgcgcaattgtagcagcatcagttttatcagatcgatatatttcagatcgtttcttaccggataaagcaattgatcttgttgacgaagcgtgcgcaacaattcgtacagaaattgattctatgccgacagaattagatgaagtaacgcgccgcattatgcagctagaaattgaagaagcggctcttggaaaagagaaggactttggtagccaagaacgcctcaaaacattgcaacgtgaattatcggatttaaaagaagtggcaagtagcatgagagcgaaatgggagaaagaaaaagaagatattcacaaagttcgtgacttacgtgaacatttagagcgtctgcgccgtgaattagaagaagcagaaggtaattacgatttaaatagagcagcggaacttcgccacggaaaaattcctgcaattgaaaaagagttaaaagaagcagaagaaatgggcgcaaataataaacaagaaaatcgtttattacgtgaggaagtaagtgaagaagagatcgctgagattgtttcacgctggactggtattcctgtcgcaaaactcgttgaaggtgaacgtgagaaattattacgcttagagcaaattttatcagaacgtgttatcggacaagaggaagcggtaagcctagtatcagatgcagttcttcgcgcgcgcgctggtattaaagatccgaaccgtccaattggttccttcatcttcttaggaccgacgggggttggtaaaacagagcttgccaaaacgttagcgcagtctttatttgatagtgaagagcaaatgattcgtatcgatatgtctgagtatatggagaaacacgctgtctcacgcttaattggtgcgcctcctggatatgttggatatgaagagggcggtcaattaacagaagcggtaagacgtaaaccgtattccgttattttgttagacgaaatcgaaaaagcacatccagaagtattcaacattttattacaaatgttagatgacggtcgcattacagattcgcaaggacgtacagtagactttaaaaacacggttattattatgacttcaaatattggatctgctcatttattagatggattagaagaagatggctccattaaagaggaatcaagagagcttgttatggggcaattaagaggacatttccgaccagagtttttaaaccgtgtcgacgaaattattttattcaaacctcttacaacgaatgaaattaaaggtattgttgataaaattgtaaaagaattacaaggtcgcttagctgaccgtcatattacggtacaattaacagaagcagcgaaagaatttgttgtagaagccggatttgatccgatgtatggagctcgtccattaaaacgatacgtacagcgtcaagttgagacgaaattagcgagagaattaattgcaggtacgattactgacaatagtcatgtagtggttgatgtagaaaataacgaattagtcgttcatgtgaattaa

SEQ ID NO: 6926 - protein, 866 aa, Bacillus cereus E33L
MDLNQMTTKTQEAIMSAQSLAVSHHHQEVDTVHLLFTLLEEQDGLAVRIFQKMNVDIEALKQGVENLIKKKPSVTGSGAEAGKLYITGALQQLLVRAGKEAEKLQDDYISVEHVLLAFTEEKGDISQLFTRFHITKDNLLQSLMTVRGNQRVTSQNPEATYEALEKYGRDLVAEVKAGKIDPVIGRDSEIRRVIRILSRKTKNNPVLIGEPGVGKTAIVEGLAQRIVKKDVPEGLKDRTIFALDMSALVAGAKFRGEFEERLQAVLNEIKKSEGRILLFIDELHTIVGAGKTEGAMDAGNMLKPMLARGELHCIGATTLDEYRKYIEKDPALERRFQQVLAEEPTVEDTISILRGLKERFEIYHGVNIHDRAIVAASVLSDRYISDRFLPDKAIDLVDEACATIRTEIDSMPTELDEVTRRIMQLEIEEAALGKEKDFGSQERLKTLQRELSDLKEVASSMRAKWEKEKEDIHKVRDLREHLERLRRELEEAEGNYDLNRAAELRHGKIPAIEKELKEAEEMGANNKQENRLLREEVSEEEIAEIVSRWTGIPVAKLVEGEREKLLRLEQILSERVIGQEEAVSLVSDAVLRARAGIKDPNRPIGSFIFLGPTGVGKTELAKTLAQSLFDSEEQMIRIDMSEYMEKHAVSRLIGAPPGYVGYEEGGQLTEAVRRKPYSVILLDEIEKAHPEVFNILLQMLDDGRITDSQGRTVDFKNTVIIMTSNIGSAHLLDGLEEDGSIKEESRELVMGQLRGHFRPEFLNRVDEIILFKPLTTNEIKGIVDKIVKELQGRLADRHITVQLTEAAKEFVVEAGFDPMYGARPLKRYVQRQVETKLARELIAGTITDNSHVVVDVENNELVVHVN

SEQ ID NO: 6927 - DNA, 2571 bp, Mannheimia succiniciproducens MBEL55E
  CDS (1)..(2571): transl_table=11
atgaatatcgaaaaatttaccacaaaattccaacaggcattggccgaagcgcagtcattagcattgggaaaggataatcagtatatcgagccggttcatgtgctgagcgccttgattaatcagcaagacggttcggtggcgccgattttgacttccgccggcgtgaatgtcggggcgttgaaagcggaattaaatagtgaaatcaataaattgccgcaggtttccggcaacggcggagatgtgcagatttcccgtcagctactgaatttattgaatttgtgcgacaaaattgcacagcgcaacaatgataaatttatttcatcggaattatttttactggccgcattggaagaaaaaggcagccttggcgatttacttaaaaagtgcggtgcaaaaaaagaaagtttagaacaagcgattaaaaccattcgtgggggacaaagcgtgaatgatcaaaatgcggaagaaagccgtcaggctcttgaaaaatatactattgacttaaccgagcgggcggaaagcggcaagcttgacccggtaatcggtcgtgatgaagaaattcgtcgtgcaatccaggtgttacaacgccgtactaaaaataacccggtgttgatcggtgagcccggtgtaggtaaaaccgctatcgtagaagggttggctcaacgtatcgtaaacggcgaagtgccggaagggttgaaaggcaaacgcgtactttcccttgatatgggtgctttaattgccggggcaaaataccgcggcgaatttgaagaacgtttgaaagcggtattaaaagagctggcgcaagaagaaggcaaggtgattttgtttatcgatgaaattcacaccatggtaggagccggtaaaaccgacggcgctatggatgcgggcaacttattaaaaccgtctcttgcccgtggcgaattgcattgcgtaggggcgacgactttagacgaatatcgtcaatacatcgaaaaagacgccgcacttgaacgccgtttccaaaaagtatttgtagatgaaccgacagtggaagacaccattgccattctgcgcggtttgaaagagcgttatgagctgcaccatcacgtgcaaattaccgacccggcaatcgtagcggcggcaacgctttctcatcgctatatttccgatcgtcaattaccggataaagcgatcgatctgattgatgaagcggcatccagcattcgtatggaaatcgattccaaacctgagccgttagatcgtttggatcgtcgtattattcaattaaaacttgaacaacaggcattgaagaaagaagaagacgaagcaagccgcaagcgtttggatatgcttgaaaaagaattaagcgaaaaagaacgggaatatgcggagctggaagaagtctggaaaagtgaaaaagccgccctttccggcacgcaacatattaaagccgagcttgaaagcgcccgtacgcaaatggaacaggcacgtcgcgccggcgatttgaataaaatgtccgaattgcaatacggcacgattccggcattggaaaaacaacttgcagcggcagatagcgcagaaggcaaggaaatgagtctgttgcgtaaccgcgtgaccgacgaagaaatcgcccaggtactttcccgcgcaaccggtattccggtttcccgcatgatggaaggcgaaaaagaaaaattattgcgtatggaagaggaattacataaacgcgttatcgggcaaggtgaagcggtggaagcggtggcgaacgccattcgtcgtagccgtgcggggctttccgacccgaaccgtccgattggctccttcctgtttttagggcctaccggggtgggtaaaaccgagctttgtaaaacgctggcgaactttatgttcgacgatgaaaacgccatggtgcgtatcgatatgtccgagtttatggaaaaacacagcgtatcccgtttggtgggggctcctccgggttatgtgggttatgaagaaggcggttatttaaccgaagcggtgcgccgccgtccgtattccgtgattttattggatgaagtggaaaaagcccatcacgacgtattcaatattttattgcaagtattggatgacgggcgtttaaccgacggacagggcagaaccgtagatttccgcaataccgtggtgattatgacatcaaacttaggatcggatttaattcaggaaaataaagatcttggttatgaaggcatgaaggaaatcgtgatgtcggtggtcggccaacatttccgtccggaattcatcaaccgtattgatgaaaccgtggtattccatccgttagcgaaagaaaacatcaaggcgattgcacaaatccaattagcccgcttaaccaaacgtatggagcaacacggttatgcaattaactttagcgaaaccttgttggattttatcagcgaagtcggttacgatccggtttacggagcaagaccgctcaaacgcgcaattcagcaggaaatcgaaaatccgttggcacaacaaattttgtccggcaaattattaccggcaaaacctgttaccgtggattacgaagacggcaaagtggttgcgaaacagtaa

SEQ ID NO: 6928 - protein, 856 aa, Mannheimia succiniciproducens MBEL55E
MNIEKFTTKFQQALAEAQSLALGKDNQYIEPVHVLSALINQQDGSVAPILTSAGVNVGALKAELNSEINKLPQVSGNGGDVQISRQLLNLLNLCDKIAQRNNDKFISSELFLLAALEEKGSLGDLLKKCGAKKESLEQAIKTIRGGQSVNDQNAEESRQALEKYTIDLTERAESGKLDPVIGRDEEIRRAIQVLQRRTKNNPVLIGEPGVGKTAIVEGLAQRIVNGEVPEGLKGKRVLSLDMGALIAGAKYRGEFEERLKAVLKELAQEEGKVILFIDEIHTMVGAGKTDGAMDAGNLLKPSLARGELHCVGATTLDEYRQYIEKDAALERRFQKVFVDEPTVEDTIAILRGLKERYELHHHVQITDPAIVAAATLSHRYISDRQLPDKAIDLIDEAASSIRMEIDSKPEPLDRLDRRIIQLKLEQQALKKEEDEASRKRLDMLEKELSEKEREYAELEEVWKSEKAALSGTQHIKAELESARTQMEQARRAGDLNKMSELQYGTIPALEKQLAAADSAEGKEMSLLRNRVTDEEIAQVLSRATGIPVSRMMEGEKEKLLRMEEELHKRVIGQGEAVEAVANAIRRSRAGLSDPNRPIGSFLFLGPTGVGKTELCKTLANFMFDDENAMVRIDMSEFMEKHSVSRLVGAPPGYVGYEEGGYLTEAVRRRPYSVILLDEVEKAHHDVFNILLQVLDDGRLTDGQGRTVDFRNTVVIMTSNLGSDLIQENKDLGYEGMKEIVMSVVGQHFRPEFINRIDETVVFHPLAKENIKAIAQIQLARLTKRMEQHGYAINFSETLLDFISEVGYDPVYGARPLKRAIQQEIENPLAQQILSGKLLPAKPVTVDYEDGKVVAKQ

SEQ ID NO: 6929 - DNA, 2577 bp, Legionella pneumophila subsp. pneumophila str. Philadelphia 1
  CDS (1)..(2577): transl_table=11
atgcgaatggacaaactaacatcaaagtttcaaatggcacttgcagatgcccaatccctggctttaggtagagacaatggatttatagaaccagaacatttaatgaaggccttgcttgatcagcaaggtggaagttgcagacctcttctcagtaaagcgggtgttaatataccactattaagaactttaattgaccaagctctggataaactacctaaagtatcaggcaccggaggagatattcacatatctaatgcattgaatagactacttaacctgactgacaaattatcgcaacaaagaaaagataactttatttcaagcgagctttttatattagcagcgataaatgaggatagtaaccttgcaaaaatacttaaacaagccgggggtgacaacaaagcaattgaaaaagcaattgatgagttaagaggtggagaaacggttaatgatccaaatgcagaggaacagcgacaagcccttgaaaaatatacactggatctgactgaacgtgccgagcaaggaaaattggatccagttattggacgagatgatgaaatcagacgcaccatccaggtattgcaaagaagaactaaaaataaccctgtattaataggtgaacctggtgttggtaaaacagccatagtagaaggtttggcacaacgaattattaatggtgaagtacctgaaggattaaagaataaacgcttactggcgctggacatgggtgccttgatcgcaggtgcaaaatatcgtggagagtttgaagaacgcttaaaaggggtgcttaatgatttggcaaaacaagagggtcaaatcatattatttattgatgaattacacactatggttggcgctggcaaggctgaaggagctatggatgccgggaatatgctcaagccagcattagctagaggtgaattgcattgcattggggctacgacattagacgaataccgacaatacattgaaaaggatgctgcccttgaacgacgttttcaaaaagtactggtcgatgaacccagtgtggaagacactatcgctatattaaggggacttaaggaacgttatgaagttcaccatggagttgaaattacagatcccgctttggttgctgcagcaacgctatcccatcgttacatcagcgaccgtcaactacctgataaagccattgatttaattgacgaggccgccagcttaatccggatggaaattgattcaaaaccagaaagtatggataaactggaacgacgcttgattcagctaaaaatcgagcgtgaagcattgaaaaaggaaaatgacgaagcatctaaaaaaagacttgttgatttacaaaaaagtatcgatgaattagagcaaaattattcagacttagaagaaatttggaaagctgaaaaagcgaccatgcaagggtccactcaaatcaaagaggcacttgagcaagccaaactggaaatggaaactgcaaggagagcaggagatttaagtcgtatgtccgaattacaatatggacgtatacccgagttggaaaaaagattaagccaagtctcttccgttgatgctatggaaacaaagttggtacgcaataaagtcaccgaagatgagatcgcagaagttgtttcaaaatggacaggaatcccagtatctaaaatgatggaaggagaaaaggaaaaactgctgaaaatggaagaagctttgcacagtagactcattggccagaatgaagcggtggatgctgtttctaatgccataagacggtcacgcgcaggcctgtctgatcctaatcgtccaattggttcatttctttttctggggccaactggtgtgggaaaaactgaactatgtaaagcacttgcttcttttctttttgatacggaagaggcgatggtgcgcattgatatgtctgaatttatggaaaaacactctgttgcgcgcttaatcggagcgcctcctggctatgtaggatatgaggagggtggctatttaactgaagcagtcagacgcagaccctattctgttatcttacttgatgaagtagaaaaagctcatacagatgtatttaatattctgcttcaagtgatggatgatggccgtctaacagatggtcagggacgtactgttgactttaggaataccgttattgttatgacctctaatctgggatctcaactcattcaggaaatgagcagcaaatttaattacgatgagattaaggctgcggtaatggatttagtcagccaacatttcaggcctgaatttatcaacagaattgatgaatcggtggtattccattccctgacaaaagaacaaattgcaaaaattgcagcaatccagattaactatttacatcatcggctgaaacaacaaaatatcactattgaagtcacaagtgaggctttatctcatttggctgaagcaggttttgacccggtctatggtgcccgccccctaaaacgtactattcagcaaaaattagagaatccactagctcaatcattattgactggaaaatttaaatccggggataccattattgtatcttataaagatggagtaatggaattttacaagcaatga

SEQ ID NO: 6930 - protein, 858 aa, Legionella pneumophila subsp. pneumophila str. Philadelphia 1
MRMDKLTSKFQMALADAQSLALGRDNGFIEPEHLMKALLDQQGGSCRPLLSKAGVNIPLLRTLIDQALDKLPKVSGTGGDIHISNALNRLLNLTDKLSQQRKDNFISSELFILAAINEDSNLAKILKQAGGDNKAIEKAIDELRGGETVNDPNAEEQRQALEKYTLDLTERAEQGKLDPVIGRDDEIRRTIQVLQRRTKNNPVLIGEPGVGKTAIVEGLAQRIINGEVPEGLKNKRLLALDMGALIAGAKYRGEFEERLKGVLNDLAKQEGQIILFIDELHTMVGAGKAEGAMDAGNMLKPALARGELHCIGATTLDEYRQYIEKDAALERRFQKVLVDEPSVEDTIAILRGLKERYEVHHGVEITDPALVAAATLSHRYISDRQLPDKAIDLIDEAASLIRMEIDSKPESMDKLERRLIQLKIEREALKKENDEASKKRLVDLQKSIDELEQNYSDLEEIWKAEKATMQGSTQIKEALEQAKLEMETARRAGDLSRMSELQYGRIPELEKRLSQVSSVDAMETKLVRNKVTEDEIAEVVSKWTGIPVSKMMEGEKEKLLKMEEALHSRLIGQNEAVDAVSNAIRRSRAGLSDPNRPIGSFLFLGPTGVGKTELCKALASFLFDTEEAMVRIDMSEFMEKHSVARLIGAPPGYVGYEEGGYLTEAVRRRPYSVILLDEVEKAHTDVFNILLQVMDDGRLTDGQGRTVDFRNTVIVMTSNLGSQLIQEMSSKFNYDEIKAAVMDLVSQHFRPEFINRIDESVVFHSLTKEQIAKIAAIQINYLHHRLKQQNITIEVTSEALSHLAEAGFDPVYGARPLKRTIQQKLENPLAQSLLTGKFKSGDTIIVSYKDGVMEFYKQ

SEQ ID NO: 6931 - DNA, 2631 bp, Burkholderia pseudomallei K96243
  CDS (1)..(2631): transl_table=11
ttggttgctattcgcaaattggaggtctcattcatgagaatcgacaagctcaccaccaaattccaagaggcgctctcggatgcgcagagtctcgccgccgggcgcgacaaccagtacatcgaacccgtccacgtgctggccgcgctcgtcgcgcagcaggacggctccgcgcgctcgctgctgtcgcgtgcgggcgtgcacatccaggcgttgcaaggcgcgcttaacgaagcgatctcgcgcctgccgcaggtgacgggtacgggcggcgacatccaggtcggccgtgaactcgcgggcctgctgaaccaggccgacaaggaagcgcagaaactgaacgacacgttcgtcgcgagcgagatgttcctgctcgcggtggccgacgacaagggcgaagccggcaagctcgcgcgccagcacggcctcacgcgccgcgcgctcgaatccgcgatcgccgcggtgcgcggcggctcgcaggtgcacagccaggatgccgagagccagcgcgaggcgctgaagaaatacacggtcgatctgaccgagcgcgcgcgcgcgggcaagctcgatccggtgatcggccgcgacgacgagattcgccgctcgatccagatcctgcagcgccgcacgaagaacaatccggtgctgatcggtgagccgggcgtcggcaagaccgcgatcgtcgaagggctcgcgcagcggatcgtcaacggcgaggtgcccgagacgctgaagaacaagcgcgtgctgtcgctcgacatggcggcgctgctcgccggcgcgaagtatcgcggcgagttcgaggagcgcctgaaggcggtgctcaacgacatcgcgaaggacgagggccgcacgatcgtcttcatcgacgagatccatacgatggtcggtgcgggcaaggccgaaggcgcgatggacgcgggcaacatgctcaagcccgcgctgtcgcgcggcgagctgcactgcatcggcgcgacgacgctcgacgaataccgcaagtacatcgagaaggatgccgcgctcgagcgccgcttccagaaggtgctcgtcgacgagccgagcgtcgaggcgacgatcgcgatcctgcgcgggctgcaggagaagtacgaactgcatcacggcgtcgagatcaccgatccggcgatcgtcgccgcggcggaactctcgcaccgctacatcaccgaccgcttcctgcccgacaaggcaatcgatctgattgacgaggccgcgtcgaggatcaagatggaaatcgattcgaagcccgaagaaatggacaagctcgatcgccgtctgatccagttgaagatcgagcgcgaagcggtgaagaaggagccggacgaagcgtcgcagaagcgtcttgcgctgatcgaggaggaaatcgagcggctcgggcgcgaatacgcggatctcgacgagatctggacggccgagaaggcagccgtgcagggcagtgcgcaactgaaggaagagatcgacaaggtgcgtgccgacattgcgcgcctgcagcgcgaaggcaagctcgagaaggtcgccgagctgcagtacggcaagctgccgcaactcgaggcgcggctcaagcaggtcacgcaggccgaggagagcgagcagcacaatccgacgcggccgcgcctgctgcgaacgcaggtcggcgcggaggaaattgccgaggtcgtctcgcgcgcgacgggcattccggtgtcgcggatgatgcagggcgagcgcgagaagctgctgcacatcgaagagaagctgcatgagcgcgtggtcggccagaacgaggcgatcgacgcggtcgccgacgcgatccgccgctcgcgcgcgggcctcgccgatccgaaccgtccgtacggctcgttcctgttcctcggcccgacgggcgtgggcaagaccgagctgtgcaaggcgctcgccggcttcctgttcgattcggaagagcatctgatccgcatcgacatgagcgagttcatggagaagcacagcgtcgcgcggctgatcggcgcgccgcccggctacgtcggctatgaggaaggcggctatctgaccgaagccgtgcgtcgcaagccgtacagcgtgatcctgctcgatgagatcgagaaggcgcacccggacgtgttcaacgtgctgctgcaggtgctcgacgacggccggatgacggacgggcaggggcgcaccgtcgacttcaagaacaccgtgatcgtgatgacgtcgaatctcggctcgcagctgatccagtcgatgtcgggctcgccgcaggaagagatcaaggatgcggtgtgggtcgaggtcaagcagcacttccgccccgagttcctgaaccggatcgacgacgtcgtcgtgttccactcgctcgaccgcggcaacatccaggcgatcgcgaagattcagctcgcgcgtctgcacgaccggctcgcgaagctcgacatggcgctcgacgtgtcggaggccgcgctcgagcagatcggcaaggtcggctacgatccgctgttcggtgcgcggccgctcaagcgcgcgatccagcaggagatcgagaatccggtcgcgaagctgatcctcgcgggccgcttcgggccgaaggacgtgattccggtcgacatgcaggacggcaggttcgtgttcgagcgcgtcgtgcattga

SEQ ID NO: 6932 - protein, 876 aa, Burkholderia pseudomallei K96243
MVAIRKLEVSFMRIDKLTTKFQEALSDAQSLAAGRDNQYIEPVHVLAALVAQQDGSARSLLSRAGVHIQALQGALNEAISRLPQVTGTGGDIQVGRELAGLLNQADKEAQKLNDTFVASEMFLLAVADDKGEAGKLARQHGLTRRALESAIAAVRGGSQVHSQDAESQREALKKYTVDLTERARAGKLDPVIGRDDEIRRSIQILQRRTKNNPVLIGEPGVGKTAIVEGLAQRIVNGEVPETLKNKRVLSLDMAALLAGAKYRGEFEERLKAVLNDIAKDEGRTIVFIDEIHTMVGAGKAEGAMDAGNMLKPALSRGELHCIGATTLDEYRKYIEKDAALERRFQKVLVDEPSVEATIAILRGLQEKYELHHGVEITDPAIVAAAELSHRYITDRFLPDKAIDLIDEAASRIKMEIDSKPEEMDKLDRRLIQLKIEREAVKKEPDEASQKRLALIEEEIERLGREYADLDEIWTAEKAAVQGSAQLKEEIDKVRADIARLQREGKLEKVAELQYGKLPQLEARLKQVTQAEESEQHNPTRPRLLRTQVGAEEIAEVVSRATGIPVSRMMQGEREKLLHIEEKLHERVVGQNEAIDAVADAIRRSRAGLADPNRPYGSFLFLGPTGVGKTELCKALAGFLFDSEEHLIRIDMSEFMEKHSVARLIGAPPGYVGYEEGGYLTEAVRRKPYSVILLDEIEKAHPDVFNVLLQVLDDGRMTDGQGRTVDFKNTVIVMTSNLGSQLIQSMSGSPQEEIKDAVWVEVKQHFRPEFLNRIDDVVVFHSLDRGNIQAIAKIQLARLHDRLAKLDMALDVSEAALEQIGKVGYDPLFGARPLKRAIQQEIENPVAKLILAGRFGPKDVIPVDMQDGRFVFERVVH

SEQ ID NO: 6933 - DNA, 2580 bp, Methylococcus capsulatus str. Bath
  CDS (1)..(2580): transl_table=11
atgcgaatggacaaactgaccagcaaatttcaggcggccctcgccgatgcccagagcctggcgctcggacgtgatcatcagttcatcgaagcggtgcacgtgatgtcggcgctgctcgatcaggaaggcagtacggtgcggccgctgctgattcaggccggagccgacgtgccccaactgcagcaggccttgggtgcggcgctggagcgtctgccggtggtggaaggcgtcggcggggacgtgcagatttcggccgagctgtcgcgggtgctgaacctgaccgacaaactcgcccagaaacgcggtgaccagttcatcaccagcgagatgttcgtgctggcggcgctggaatcgcgcggcgaacttgccgagctcctgcgcaaggccggcttgaccaaggaagccttggaacacgcgatccaggcgatgcgtggcggccaggcggcggatgatccgaacgtggaggaccagcgtcaggccttacagaaatacactatcgatctgaccgagcgtgccgaacgcggcaagctcgatccggtgatcggccgggacgacgaaatccgcaggaccattcaggtgctgcagcggcgcaccaagaacaatccggtgctgatcggcgaaccgggcgtgggcaagacggccatcgtcgagggattggcccagcgcatcgtcaacggtgaagtgccggaaggcgtcaagggcaagcgcctgctggctctggacatggcggggctgatcgccggggcgaagttccgtggtgagttcgaggagcggctgaagggcgtcctcaatgacatcgccaagcaggaaggccgcgtcatcctgttcatcgacgagttgcatacgatggtcggcgccggcaaggcggaaggggccatggatgccggcaacatgctcaagccggcactggcgcgcggggaattgcactgcatcggggccaccacgctggacgaataccgcaaatacatagaaaaggatgcggcgctggaacggcgcttccagaaggtgctggtggatgagccgaccgtcgaggacaccattgccattctgcggggcctgaaagaacgctacgaggtccatcacggcgtcaccatcaccgatccggcgatcgtggccgccgccacgctgtcgcaccgttacatcaccgaccgccagttgccggataaggccatcgacctggtggacgaggccgccagccgcatccgcatggagatcgattccaagccggaggaaatggaccggctcgaccgccgtctgatccagctccggatcgaacgcgaagctttgaagaaagagaccgacgaggcatcgaagaagcggctggaggcactggaaggcgagatcggcaagctggaaaaggaatacgccgatctggaggagatctggaagagcgaaaaggcccggctctccggcgccgccagcatcaaggaggaactggaaaaggcccggctcgacctggacaacgccaagcgcagcggcgatctgacccgcgccggccagatccagtatgaacggatcccggctttggaaaaacggctggccgtggccgaagccggtgaggatagcgagttccgcctgctgcgcaacaaggtcaccgacgaggaaatcgccgaggtcgtttccaaatggaccggaattccggtggcgaagatgctcgagggtgagcgtgagaaacttttgcacatggaggagaacctgagccggcgggtggttggccaacaggaggcgattaccgcagtggccaacgccatacgccggtcccgcgcgggtctggccgatcccaaccggccgaatggatcattcctgttcctggggccgaccggcgtgggcaagaccgaattgtgcaaggcgctggccgaattcctgttcgacaccgacgaggcgatggtacgcatcgacatgtcggaattcatggaaaagcattcggtcgcccgcctgatcggggcaccgcccggctatgtcgggtacgaagagggcggttatctcaccgaggccgtgcggcgcaagccctattccgtgatcctgctggacgaagtcgaaaaggcccatccggacgtcttcaacgtcttgctgcaggtgctggacgatggccgcctcaccgatggccatggccgtactgtggatttccgcaatgcggtggtggtgatgacctccaacctgggctccaatcgcatccaggagttggcgggggaggcgcattacgccgagatgaaggccgaggtcatggaaatcgtgggtcagtatttccggccggagttcatcaaccgcatcgacgaggcggtggtgttccatcccttggggcgggagcagatccgcgccatcgcccggctccaggtccgccatctccaggaacgcctggaggcgcgcgaactgtccctcgtggtatcggatgctgcgctggacctgctcggcgaggccggattcgacccggtctatggggcgaggccgctgaagcggaccattcagcaggaactggaaaatcctctggcgctggacatactcgccggccgcttcgcagccggcgacgtgatcggggtggatgtcgagaacggaaagctgcaattctcccggatgggctga

SEQ ID NO: 6934 - protein, 859 aa, Methylococcus capsulatus str. Bath
MRMDKLTSKFQAALADAQSLALGRDHQFIEAVHVMSALLDQEGSTVRPLLIQAGADVPQLQQALGAALERLPVVEGVGGDVQISAELSRVLNLTDKLAQKRGDQFITSEMFVLAALESRGELAELLRKAGLTKEALEHAIQAMRGGQAADDPNVEDQRQALQKYTIDLTERAERGKLDPVIGRDDEIRRTIQVLQRRTKNNPVLIGEPGVGKTAIVEGLAQRIVNGEVPEGVKGKRLLALDMAGLIAGAKFRGEFEERLKGVLNDIAKQEGRVILFIDELHTMVGAGKAEGAMDAGNMLKPALARGELHCIGATTLDEYRKYIEKDAALERRFQKVLVDEPTVEDTIAILRGLKERYEVHHGVTITDPAIVAAATLSHRYITDRQLPDKAIDLVDEAASRIRMEIDSKPEEMDRLDRRLIQLRIEREALKKETDEASKKRLEALEGEIGKLEKEYADLEEIWKSEKARLSGAASIKEELEKARLDLDNAKRSGDLTRAGQIQYERIPALEKRLAVAEAGEDSEFRLLRNKVTDEEIAEVVSKWTGIPVAKMLEGEREKLLHMEENLSRRVVGQQEAITAVANAIRRSRAGLADPNRPNGSFLFLGPTGVGKTELCKALAEFLFDTDEAMVRIDMSEFMEKHSVARLIGAPPGYVGYEEGGYLTEAVRRKPYSVILLDEVEKAHPDVFNVLLQVLDDGRLTDGHGRTVDFRNAVVVMTSNLGSNRIQELAGEAHYAEMKAEVMEIVGQYFRPEFINRIDEAVVFHPLGREQIRAIARLQVRHLQERLEARELSLVVSDAALDLLGEAGFDPVYGARPLKRTIQQELENPLALDILAGRFAAGDVIGVDVENGKLQFSRMG

SEQ ID NO: 6935 - DNA, 2619 bp, Anaplasma marginale str. St. Maries
  CDS (1)..(2619): transl_table=11
atggatctaaacaagttcaccgaaaaggcaaagggtttcataatgaacgcgcaaatgttcgcggtatcctccgggcaccagtctttgcttccagagcatctactaaatgtaatgctggaagaggaaaatgacatggtcggcaacttaatatcctcatgtggggccgaggtgagcaagatcactggcgctctgtcaaccatgctgagtaagctgccggtagtaagtggctcaggaagcgggcatttaagcctctccagagagatggcaaagattttagacgaagcagcgagtttggcaaagcgcaaccaagatgtgtacgtaacggcagagcggcttctgcaggctcttgttgttgtggaaagcagcgtgtcaagaatgctgctaaatgagggagtaacaacgcagaagcttaacgccttaatcgaaagaatgcgcgacggagtgagggccgaaagcgaaaacgcggaacagcaatttgacgcattgaggaagtatacccaagatctgaccgaactggccgcaaaaggtaagatggatccagtaattggcaggagtgacgaaactaggcggctgattcaagtcttatcccgcaggactaaaaacaacccagcattgatcggagaacccggggtgggaaagagcgcaatcgtagaggggctagtccaggctatgatttccggcaacgttcctatgtggctgcgtgacgcgaaagttctcgccttggatttagcttcactcatagccggaacgaagtacagaggggagtttgaagagaggttgaaggccgtaataacaaaaatagtcgcctcaaacggcaaaatcatactattcattgatgagttgcacatgctagtaggggcgggagcaacaggcggttctatggatgcatctaacatattaaagcctgttcttgccagaggggaaatacgctgtattggcgcaaccacgctggatgagtatcgcgaacatatagaaaaagaccccgcactcgcgcgaagatttcagcccgtattcgtcgcagaaccaaccactggtgatacaatttccatactaaggggcctaaaggagaaatatgagctccatcatggtataagaatcaccgacagcgcaatcgttgctgccgcaacactgtctaaccgttacattactgacaggttcctgccagacaaagccatagatttaatagatgaggccgcaagccgcgcaagaatcgaaatagatagtaaacccgaaattatagacagcatagaccgaaggataatgcaactcaagatagagtcagaagttttgaaaaacgaaaaaaacgaggcgtctcagcagcgtcttgcggttattaatgcggagctcaatgagctgagttcagaagctgcagatttaaacagcaagtggcaggctgaaaagatcaaaatctcaaaaatgcaagagctgactgagaagctcgacggggcgcgtatcgagctcgaacaggcccaaaggtctggcaacctatctcgggctggggagctaatgtatggagtaataccatcgctagagcaggaattgaaacagcatgaagaagtagctggcactatgctgaggaaggaaataggagtaaacgacattgcggcaatagtttcacggtggaccggcattcccgtagaaaacgtgatgaatagcgaaaaagaaaagctgctcaatatggaggcagaaataggtaaaagcgttatagggcaggaaagcgcggtcagggcggtgagtaacgcggttagaagatctagagcgggagtgcaagatgcacagaaacccatggggtcatttttattcctaggcccaacaggtgtcgggaagaccgagctcaccaaggcgctaagcgagtttttgtttgactccaggtctgcattgctgcggtttgatatgtctgagttcatggaaaagcattcggtcgcaaagctgataggcgcgccaccaggatatgtggggtatgagcagggtggaatgctgacagaagcagtaaggcgaaggccgtatcaggtggtgttgtttgacgagatagagaaggcgcacccagacatctttaacatattgctgcaagtccttgatgagggcagactaacagacagcaagggcaagttggtagacttcaaaaatacgatattggtgttaacatcaaacattggacaggaaattctggtaaatggtgccacaggcgaaagcgcagaagtcacgcgccagaaggtgcttgaggtgctaaacatgcatttccgcccagagtttttgaataggcttgatgatatcatcatattcaacaggctagccaaagaacatatagggcgcatagtcgacgttcagatgtcctacctgcaaaaaataattagtgacaagggcctcaccataactcttctgccagaggcgaaatcctggatagcagagcgcggttatgatgtaacctacggagcgcgccctctcaagcgtctcatacaacacaatatacaagaccagctggcagagttgctgctctccggcaaagtaagcgctggggatagcttagagggatttgtgttggatggggccctagcgatacggcggaaggaaacgcccaccacgcgcgcagaatccggagcaaacagttacagcccgtag

SEQ ID NO: 6936 - protein, 872 aa, Anaplasma marginale str. St. Maries
MDLNKFTEKAKGFIMNAQMFAVSSGHQSLLPEHLLNVMLEEENDMVGNLISSCGAEVSKITGALSTMLSKLPVVSGSGSGHLSLSREMAKILDEAASLAKRNQDVYVTAERLLQALVVVESSVSRMLLNEGVTTQKLNALIERMRDGVRAESENAEQQFDALRKYTQDLTELAAKGKMDPVIGRSDETRRLIQVLSRRTKNNPALIGEPGVGKSAIVEGLVQAMISGNVPMWLRDAKVLALDLASLIAGTKYRGEFEERLKAVITKIVASNGKIILFIDELHMLVGAGATGGSMDASNILKPVLARGEIRCIGATTLDEYREHIEKDPALARRFQPVFVAEPTTGDTISILRGLKEKYELHHGIRITDSAIVAAATLSNRYITDRFLPDKAIDLIDEAASRARIEIDSKPEIIDSIDRRIMQLKIESEVLKNEKNEASQQRLAVINAELNELSSEAADLNSKWQAEKIKISKMQELTEKLDGARIELEQAQRSGNLSRAGELMYGVIPSLEQELKQHEEVAGTMLRKEIGVNDIAAIVSRWTGIPVENVMNSEKEKLLNMEAEIGKSVIGQESAVRAVSNAVRRSRAGVQDAQKPMGSFLFLGPTGVGKTELTKALSEFLFDSRSALLRFDMSEFMEKHSVAKLIGAPPGYVGYEQGGMLTEAVRRRPYQVVLFDEIEKAHPDIFNILLQVLDEGRLTDSKGKLVDFKNTILVLTSNIGQEILVNGATGESAEVTRQKVLEVLNMHFRPEFLNRLDDIIIFNRLAKEHIGRIVDVQMSYLQKIISDKGLTITLLPEAKSWIAERGYDVTYGARPLKRLIQHNIQDQLAELLLSGKVSAGDSLEGFVLDGALAIRRKETPTTRAESGANSYSP

SEQ ID NO: 6937 - DNA, 2583 bp, Azoarcus sp. EbN1
  CDS (1)..(2583): transl_table=11
atgcgcttcgacaagctcacgacgaagttccagcaggctctctccgatgcccagagcatcgcagtcggcaacgaccagcagttcatcgaaccccagcacctgctgctggcgatgctcggccaggaggatgccggcatcgtctcgctgctgcagcgtgccggcgtcaacgtgccgccgctcaaggctgcgctcgacaaggcgctgacgcggctgccgaaggtcgaagggcacggcggcgaggtgcagatcgggcgcgacctttcgaatctcctgaatatcgccgatcgcgaagcgcagaagcgcggcgaccagtttatcgccagcgagatgttcttgctcgcgctcgctgaggacaagggcgagaccgggcgcctgctgaaggagcacggcctgtcgcgcaagccgcttgaagcggcgatcaccgcggtgcgaggcggctccggcgtcggcagccaggatgccgaaggacagcgcgaagcgctcaacaagtactgtctcgatctcaccgatcgcgcgcgagcgggcaagctcgatccggtgatcgggcgcgacgacgagatccgccgcgcgatccagatcctgcagcgccgcacgaagaacaatccggtgctgatcggcgagccgggggtaggcaagaccgcgatcgtcgaaggcctcgcgcagcgtatcgtcaatgacgaggttcccgagacgctcaagggcaagcgcgtgctgtcgctcgacatggcggcgctgctcgcgggggcgaaataccgcggcgaattcgaggaacggctcaaggccgtgctgaaggagatcgcgcaggaagaagggcggatcatcgtcttcatcgacgagctgcacacgatggtcggcgccggcaaggccgaaggcgcgatcgacgccggcaacatgctgaagccggcgcttgcgcgcggcgagctgcactgcatcggcgcgacgacgctcgacgaatatcgcaagtacatcgaaaaggatgccgcgctcgaacggcgcttccagaaagtgctggtggacgagccgagcgtggagtcgacgatcgcgatcctgcgcggcctgcaggaaaaatacgaactgcaccacggcgtcgacatcaccgacccggcgatcgtcgccgcagcggagctgtcgcatcgctacatcaccgaccggttcctgcccgacaaggcgatcgacctgatcgacgaggccgcggcgcgaatcaagatggagatcgactcaaagccggaagtcatggacaagctcgagcgtcgcctgatccagctcaagatcgagcaggaagcggtgaagcgggaaaccgacgaggcgtcgcagaagcgtctcgtgctgatccgcgacgagatcgacaagctcgagcgcgaatacgcgaacctcgacgaaatctggcgctcggagaaggcgagcgtgcagggcagccagcacatcaaggaagagatcgaggcgctgcgcacgcagatggccgagatgcagcggaagggccagtacgacaagctcgccgagctgcagtacggcaagctcccgcagctcgaggcgcagctgaaggcggccgaatcggccggcagcggcgagcgcaagttcaagctgttgcgcaccgaggtcggcaccgaggagatcgccgaagtcgtgtcgcgcgcgacgggcattccggtcagcaagatgatgcagggcgagcgcgagaagctgctgaagatggaagagcggctgcaccagcgcgtcgtcggccaggacgaggcggtgcggctcgtcgcggatgcgatccgccgctcgcgcgccggcctttcggacgagaaccgcccgtacggctcgttcctgttcctgggcccgaccggcgtcggcaagaccgagctctgcaagacgctcgccgagttcctgttcgattcggaagagcacctgatccgcatcgacatgagcgaattcatggaaaagcactcggttgcccgcctcatcggcgccccgccgggctatgtgggctatgaggaaggtggctacctgacggagcaggtgcgccgcaagccctacagcgtgatcctcttcgacgaggtggagaaggcgcacccggacgtgttcaacgtgctgctgcaggtgctcgacgacggccgcatgacagacgggcagggacgcaccgtcgacttcaagaacaccgtcatcgtcatgacatcgaacctcggcagccagatgatccagcaaatggcaggcgatgatcatcaagtcatcaagcttgccgtgatggccgaagtcaagacctacttccgtccggagttcgtcaaccgcatcgacgaggtcgtcgtgttccacgcgctcgacgagaagcacatcgcgagcatcgcgcgcatccagctccagtacctcgacaagcggctggcgcggctggacatgtcgatggaggtatcggacgcggcgcttgcggagcttgcgtcggccggtttcgatccggtgttcggcgcgcgcccgctcaagcgcgcgatccaggagcgcatcgaaaatccgctcgcgaaggcgatcctggaagggcagttcggcgcaaaggacaaggtgctcgtcgatgtcgaaggcgggcggatagtctttgcgaagggcgactga

SEQ ID NO: 6938 - protein, 860 aa, Azoarcus sp. EbN1
MRFDKLTTKFQQALSDAQSIAVGNDQQFIEPQHLLLAMLGQEDAGIVSLLQRAGVNVPPLKAALDKALTRLPKVEGHGGEVQIGRDLSNLLNIADREAQKRGDQFIASEMFLLALAEDKGETGRLLKEHGLSRKPLEAAITAVRGGSGVGSQDAEGQREALNKYCLDLTDRARAGKLDPVIGRDDEIRRAIQILQRRTKNNPVLIGEPGVGKTAIVEGLAQRIVNDEVPETLKGKRVLSLDMAALLAGAKYRGEFEERLKAVLKEIAQEEGRIIVFIDELHTMVGAGKAEGAIDAGNMLKPALARGELHCIGATTLDEYRKYIEKDAALERRFQKVLVDEPSVESTIAILRGLQEKYELHHGVDITDPAIVAAAELSHRYITDRFLPDKAIDLIDEAAARIKMEIDSKPEVMDKLERRLIQLKIEQEAVKRETDEASQKRLVLIRDEIDKLEREYANLDEIWRSEKASVQGSQHIKEEIEALRTQMAEMQRKGQYDKLAELQYGKLPQLEAQLKAAESAGSGERKFKLLRTEVGTEEIAEVVSRATGIPVSKMMQGEREKLLKMEERLHQRVVGQDEAVRLVADAIRRSRAGLSDENRPYGSFLFLGPTGVGKTELCKTLAEFLFDSEEHLIRIDMSEFMEKHSVARLIGAPPGYVGYEEGGYLTEQVRRKPYSVILFDEVEKAHPDVFNVLLQVLDDGRMTDGQGRTVDFKNTVIVMTSNLGSQMIQQMAGDDHQVIKLAVMAEVKTYFRPEFVNRIDEVVVFHALDEKHIASIARIQLQYLDKRLARLDMSMEVSDAALAELASAGFDPVFGARPLKRAIQERIENPLAKAILEGQFGAKDKVLVDVEGGRIVFAKGD

SEQ ID NO: 6939 - DNA, 2619 bp, Silicibacter pomeroyi DSS-3
  CDS (1)..(2619): transl_table=11
atggacttgtctaagttcaccgagcgggcacgtggattcgtgcaggcggcgcagaccattgctctgcgcgaagggcatcagcggctggcgcccgaacatattctcaaggcattgatggatgacgatcaggggcttgcaagcaacctgattgcgcgcgcgggcggcgcatccaaacgggtggtcgaggcgctggacgtggcgttgtccaagatcccaaaggtcagcggcgacgcggcccaggtctatctggacggccagaccgtcaaggtgctggacgaggccgagaaggtcgccaagaaggcaggcgacagttttgtcccggtcgagcgcgtgctgatggcgctttgcatggtgaaatccaaggccaaagaggcgctggatgccggcgaggtgactgcgcagaagctgaacgaagcgatcaacgatatccgcaagggccgcaccgccgactccgcgagcgccgaagagggctatgacgcgctcaagaaatacgcgcgcgacctgaccgaggccgcagccgaaggtaagatcgacccgatcatcgggcgtgacgaggaaatccgccgctcgatgcaggtgctgagccgccggaccaagaacaacccggtgctgatcggtgaacccggcgtgggtaagaccgctatcgccgaaggcatggcgctgcgcatcgtcaatggcgatgtgcccgaatccttgcgcgacaagaagctccttgcgctcgacatgggcgcgctgattgccggtgcgaaatatcgcggtgagttcgaagagcggctcaaggccgtgctgaccgaggtcaccgaggccgcgggcgagatcatccttttcatcgacgagatgcacacgcttgtgggtgccggtaaatccgacggagcgatggacgcggccaacctgatcaaaccggcgctggcgcggggcgagctgcactgcatcggcgccaccacgctggatgaataccgcaaatacgtggaaaaggacgcggccctggcccgccggttccagccggttctggtcgaagagccgaccgtcgaggacacgatcagtatcctgcgcggtatcaaggagaaatacgagctgcaccacggcgtcgatatttctgactcagccctggtggctgcggcgacgctgtcgcatcgctatatcaccgaccggttcctgccagacaaggccatcgacctgatggacgaggcagccagccgtttgcggatggaggtcgacagcaagcccgaggcgctggaccagctggaccgtcagatcctgcaattgcagatcgaggaagaggcgctgaagaaagagaacgacgccgcctcgcaggaccggcttgccacgctgcaaaaggaccttgccgagttgcaggagaaatccgccgagatgaccgctcagtggcaggcatcgcgggacaagatgaacgcggcgcaatccgtcaaggaacagctcgaacgcgcccgtgccgaactggagattgccaagcgcgaaggcaacctggcccgagctggtgaactcagctacggcatcatccccgagcttgaaaaacagcgggaagaagccgaagccggagaggataccggtctcaaggccgaagaggtcgtgcgccccgaacagatcgcggcggtggtcgaacgctggaccggcatcccgacctcgaagatgcttgaaggcgagcgcgagaaactgctgcggatggaggacgagctgcacaagcgcgtcatcggtcagggtacggcggtgacggcagttgccaatgcggtgcgccgggcgcgcgcgggtctgaatgacgagaaccgcccgctgggctcgttcctgttccttggccccaccggcgtcggtaagaccgagctgaccaaggcggtggccaactatctctttgacgacgacaatgcgatggtgcgcatcgacatgtccgagttcatggagaaacacgcggttgcccgtctgatcggcgcgcctccgggctatgtcggttatgacgagggcggggtgctgaccgaggcggtccgccgccgtccctatcaggtggtgctgttcgacgaggtcgaaaaggcgcatccggatgtgttcaacgtgctgttgcaggtgctggacgatggtgtgctgaccgatggtcagggccgcaccgtcgacttcaagcagacgctgatcgtgctgacctcgaaccttgggtcccaggcgctcagccaattgcccgaaggcgccgacagcgcccaggcccggcgcgatgtgatggatgcggtcagggcccatttccggcccgagttcctgaaccggcttgacgagacgatcatctttgaccggctcaagcgggccgatatggacgggatcgtgacgatccagctgggtcgtctggccaagcgcctggcgcagcgcaagatcgtgctggagctcgacgagcccgcgcgcaaatggctggccgatgcggggtacgatccggtctatggcgcccgcccgctgaagcgcgttatccagcgcgacctgcaaaacccgctggccgaaaagctgctggccggcgagatcaaggacggcgacacggtggcgatcaccgcgcgcgaagaaggactggtcatcggcgaccgtgtcgtcagttcgagccggccgcgcccggatgatgctgtcgtgcattga

SEQ ID NO: 6940 - protein, 872 aa, Silicibacter pomeroyi DSS-3
MDLSKFTERARGFVQAAQTIALREGHQRLAPEHILKALMDDDQGLASNLIARAGGASKRVVEALDVALSKIPKVSGDAAQVYLDGQTVKVLDEAEKVAKKAGDSFVPVERVLMALCMVKSKAKEALDAGEVTAQKLNEAINDIRKGRTADSASAEEGYDALKKYARDLTEAAAEGKIDPIIGRDEEIRRSMQVLSRRTKNNPVLIGEPGVGKTAIAEGMALRIVNGDVPESLRDKKLLALDMGALIAGAKYRGEFEERLKAVLTEVTEAAGEIILFIDEMHTLVGAGKSDGAMDAANLIKPALARGELHCIGATTLDEYRKYVEKDAALARRFQPVLVEEPTVEDTISILRGIKEKYELHHGVDISDSALVAAATLSHRYITDRFLPDKAIDLMDEAASRLRMEVDSKPEALDQLDRQILQLQIEEEALKKENDAASQDRLATLQKDLAELQEKSAEMTAQWQASRDKMNAAQSVKEQLERARAELEIAKREGNLARAGELSYGIIPELEKQREEAEAGEDTGLKAEEVVRPEQIAAVVERWTGIPTSKMLEGEREKLLRMEDELHKRVIGQGTAVTAVANAVRRARAGLNDENRPLGSFLFLGPTGVGKTELTKAVANYLFDDDNAMVRIDMSEFMEKHAVARLIGAPPGYVGYDEGGVLTEAVRRRPYQVVLFDEVEKAHPDVFNVLLQVLDDGVLTDGQGRTVDFKQTLIVLTSNLGSQALSQLPEGADSAQARRDVMDAVRAHFRPEFLNRLDETIIFDRLKRADMDGIVTIQLGRLAKRLAQRKIVLELDEPARKWLADAGYDPVYGARPLKRVIQRDLQNPLAEKLLAGEIKDGDTVAITAREEGLVIGDRVVSSSRPRPDDAVVH

SEQ ID NO: 6941 - DNA, 2652 bp, Synechococcus elongatus PCC 6301
  CDS (1)..(2652): transl_table=11
atgggttcatcgctggaacttctcaccatgcaaccgacgaatcccaatcaatttactgaaaaagcctgggaagcgatcgttcgcacaactgatgttgcgaaacaagctcagcatcagcaaattgaatcagaacatctgtttttggccttgcttcaaggaccagggctggctctgaatatcctcaagaaagcagggttagaagcggcacaactacagcagtttacagagcggtttattgcccgccagccaaaggtgagtgggggtaatcagtcggtttatctggggcgatcgctcgatcaactcctcgatcaggcggatcagtttcgcaaggactttggggatgaatttatttcggttgagcacctcatcctcagctttccccgcgattcccgttttgggcgcttgctcagtcaagaattcaaggttgacgagaagcagctccgtcagattattcaacagattcgaggcagccaaaaagtgactgatcaaaaccctgaaggtaaatacgaagccctcgaaaaatatgggcgtgacctgactgaaatggcgcgtcgtggcaagctcgatcccgtcattggccgcgatgatgaaatccgtcgcactattcagattctcagtcggcgcaccaagaataatccggtcttgattggcgagcctggggttggcaaaactgcgatcgcagaaggattagcccagcggattattaatggtgatgtcccgcaatccctcaaggatcggcggctgattgctttggacatgggtgccttaattgcaggtgctaaattccggggtgagtttgaagaacgcctgaaagcagtcctcaaggaagtcactgactctgaaggcatcattatcctctttattgatgagattcatacggtggttggtgctggagcggtccaaggctccatggatgctggcaacttactgaagccgatgctggcgcggggagaattgcgctgtattggggcaaccacactagatgaatatcgccaatatattgagaaggatgcggctcttgaacgacgcttccaacaggtctttgtcgatcaacctacggtagaagatacgatctcgattttgcgtggcttaaaagagcgctatgaagtgcatcatggcgtccgtatttctgacaacgctcttgtcgctgctgctgtcctctcgacccgctacatcagcgatcgcttcttgccagataaggcgattgatttagtcgatgagtcggcggctcgactcaagatggaaatcacttcaaagccagaagaattagatgagatcgatcgcaagattctccagctcgaaatggaacgactctccttgcaaaaagagagtgatcttgcctcacaggaacgtctgcaacggctagaaaaagagttggccgacctaaaagaagagcagcggagtttaagcagtcaatggcaagctgaaaaggatgttattactgatatccaatccgtcaaggaagagattgatcaggttaacttgctaatgcaacaggctgagcgagattacgacctgaacaaagcagctgagctgaagtacggcaaactgacagaactgcagcgcaagctcaacgaaatggagggcggtttagcgacgacccacaccagtggcaagtctctgctgcgcgaagaagtgacagaggttgacattgctgaaatcatctctaagtggacggggattcctgtcagcaagctggttgagtcagagatgcaaaagctcctcaatctcgatgaagaactgcatcaacgggtgattggccaagaagaagcggtttctgctgtcgcggatgcaattcagcgatcgcgagctgggttgtctgatccgaaacgcccgatcgcgagcttcatcttcttgggccctacaggggttggtaaaaccgagttggccaaagccctagctgcctatctcttcgacactgaagacgcgatgattcgcattgatatgtcggagtacatggagaaacacgcggtttcgcggctaatcggcgcgcctccgggctacgtcggctatgacgaaggcggccaactcacggaagcggtgcggcggcgtccctattccgtcatcctctttgatgagattgagaaggcccatccagatgtcttcaacgtcatgttgcagattctcgatgatggtcgagtcaccgatagccgcggccgaacagtggacttcaagaatacaatcttgattttgaccagcaatatcggttcgcaatacattctcgatgtggctggcgatgacagccgctacgaagaaatgcggagccgtgtcaccgaagcactgcgggctaatttccgaccggaatttctgaatcgggtcgatgagacaatcatcttccacagcctgcgcaaggatcagttgcagcagattgtgcggattcaactgcatcgccttgaagaacgattgagcgatcgcaaattatcgctgtcgatgagtccagaagcgatcgatttcttggttgagattggttttgatcccgtctatggagctcgtccgctcaaacgagtcattcagcgagagttggaaactgcgatcgctaaggcgatcctcagggggcaattcagtgatggcgacacgattcaagttgctgtggagaatgaacgactcgtctttaaggcgatcgcaactccaactgcggttcccctgagctaa

SEQ ID NO: 6942 - protein, 883 aa, Synechococcus elongatus PCC 6301
MGSSLELLTMQPTNPNQFTEKAWEAIVRTTDVAKQAQHQQIESEHLFLALLQGPGLALNILKKAGLEAAQLQQFTERFIARQPKVSGGNQSVYLGRSLDQLLDQADQFRKDFGDEFISVEHLILSFPRDSRFGRLLSQEFKVDEKQLRQIIQQIRGSQKVTDQNPEGKYEALEKYGRDLTEMARRGKLDPVIGRDDEIRRTIQILSRRTKNNPVLIGEPGVGKTAIAEGLAQRIINGDVPQSLKDRRLIALDMGALIAGAKFRGEFEERLKAVLKEVTDSEGIIILFIDEIHTVVGAGAVQGSMDAGNLLKPMLARGELRCIGATTLDEYRQYIEKDAALERRFQQVFVDQPTVEDTISILRGLKERYEVHHGVRISDNALVAAAVLSTRYISDRFLPDKAIDLVDESAARLKMEITSKPEELDEIDRKILQLEMERLSLQKESDLASQERLQRLEKELADLKEEQRSLSSQWQAEKDVITDIQSVKEEIDQVNLLMQQAERDYDLNKAAELKYGKLTELQRKLNEMEGGLATTHTSGKSLLREEVTEVDIAEIISKWTGIPVSKLVESEMQKLLNLDEELHQRVIGQEEAVSAVADAIQRSRAGLSDPKRPIASFIFLGPTGVGKTELAKALAAYLFDTEDAMIRIDMSEYMEKHAVSRLIGAPPGYVGYDEGGQLTEAVRRRPYSVILFDEIEKAHPDVFNVMLQILDDGRVTDSRGRTVDFKNTILILTSNIGSQYILDVAGDDSRYEEMRSRVTEALRANFRPEFLNRVDETIIFHSLRKDQLQQIVRIQLHRLEERLSDRKLSLSMSPEAIDFLVEIGFDPVYGARPLKRVIQRELETAIAKAILRGQFSDGDTIQVAVENERLVFKAIATPTAVPLS

SEQ ID NO: 6943 - DNA, 2574 bp, Campylobacter jejuni RM1221
  CDS (1)..(2574): transl_table=11
atggcaaatatacaagattttttaactgataatatgctttcaaaccttgaaagtgcagcatctttagctatacattctaaaaatactgaagtcgtacctttgcaccttttatgggctttaagcgtagatagtacaagtattttaaatcaaattttaaataaattaaatatttctaaagaagccttagaacttgaaattaaaagcagaatttcaaaacttgcaacgagttcaaatgtaaaccgtgaaaatatacgcttttccaatgaacttataaattcattagaaaatgctaaaggattaatgagtgctaatggagatagttatttaagtgtggatacttggcttataagtgaaagtcaaaaaagtcctattaaagaaattttggcgcaatttttagatttaagagaatttcaaaaagagcttgaaagtctaagagcgggacgaaaaatggatagcaaaacaagcgatgaaactttagatagcttaaataaatttggtatagatttaaccttaaaggcaagcgagggtaaacttgatcctgttataggcagagaagaagaaatcgaacgtttgatgcaaattttaatacgcaaaaccaaaaacaaccctatacttttaggtgaaccaggcgtaggaaaaacagctatagtagaagctttagcacaaagaattattaaaaaagatgttccaaaatctttgcaaaataaaaaagtcatcgctcttgatatgagtgctttaattgcaggtgcaaaatacagaggagaatttgaagatagattaaaagctgtggttaatgaagtgataaaaagtgaaaatatcattctttttatcgatgaaattcacactatagtaggagctggagcgagtgaaggcagcatggatgcggcaaatattttaaaacctgctcttgcaagaggtgaactccataccataggcgcaactactttaaaagaatatcgtaaatattttgaaaaagatgcagccttgcaacgccgttttcaacctgtaaatgtaggtgagccaagtgttaatgaggctttggctatgttaaggggtataaaagaaaagcttgaaattcatcataatgtaaccataaatgatagtgctttagtagccgcagctaaactttcaaagcgttatataacagatcgttttttacctgataaggccattgatttaatcgatgaagctgcagctgaactaaaaatgcaaattgaaagcgaaccaagttctttaagaaaagtacgcaaagatatagaaactttagaagttgaaaatgaagctttaaaaatggaaaatgatgaaaaaaatcaaaaaagactcgatgaaatcgcaaaagaactagctaatttaaaagaaaaacaaaatgccctaaattcacagtttgaaaatgaaaaaagtgtttttgatggcataagtgctaagaaaaaagaaattgatctgcttaaaaatgaagcttctttggctaaagctagaggtgaatttcaaaaagcagccgagctagagtatggaaaaattccaagtcttgaaaaagaagtagaaattttagaagataaatggaaaaaaatgagtgaaaatggagttttacttaaaaatcaagtggatgaggatttggttgctggaattttaagcaaatggacgggtattagcgtgcaaaaaatgttaacttctgaaaaacaaaaattcttagaagtggaaaaacatttaaaagaaagtgtcataggacaagataaggccttaagtgctttagctagagccattaaacgtaataaagcggggcttaatgcggacaataaacctataggaagctttttatttttagggccaacaggggtaggaaaaacacaatcggctaaagctttggcaaaatttttatttgatgatgaaaaagcaatgattcgctttgatatgagtgaatttatggaaaaacatagtgtttcaagactcttaggtgcgcctccaggatatataggacatgaagaaggtggagagcttactgaagccgtacgaagaaaaccttatagcgtgcttttgtttgatgaagttgaaaaagcacataaagatgtatttaatgtgcttttagggattttagatgatagtagagcaaccgatagtaaaggtgtaacagtggattttaaaaataccattatcattttaacttctaatatcgcctcaagcgccattatgaatttaagcggaaaagaacaagaagatgcggtaaaaaatgagttaaaaaatttctttaaacctgagtttttaaaccgtttagatgatattatcacctttaatccacttggaaaagatgaagcttatgaaatagtcaagcttttatttaaagatttacaaatgagcttagaaaacaagggaataaaagcaagtttaagcgaaaatgcagcccttttaatcgctaaagatggttttgaccctgattttggtgctagacctttaagaagagctatttatgatcttatagaagataaattaagcgatatgatacttgctgatgaacttcatgaaaatgatagcattatcattgatgcaaaagatgatgaaataatcatcaaaaaagcttaa

SEQ ID NO: 6944 - protein, 857 aa, Campylobacter jejuni RM1221
MANIQDFLTDNMLSNLESAASLAIHSKNTEVVPLHLLWALSVDSTSILNQILNKLNISKEALELEIKSRISKLATSSNVNRENIRFSNELINSLENAKGLMSANGDSYLSVDTWLISESQKSPIKEILAQFLDLREFQKELESLRAGRKMDSKTSDETLDSLNKFGIDLTLKASEGKLDPVIGREEEIERLMQILIRKTKNNPILLGEPGVGKTAIVEALAQRIIKKDVPKSLQNKKVIALDMSALIAGAKYRGEFEDRLKAVVNEVIKSENIILFIDEIHTIVGAGASEGSMDAANILKPALARGELHTIGATTLKEYRKYFEKDAALQRRFQPVNVGEPSVNEALAMLRGIKEKLEIHHNVTINDSALVAAAKLSKRYITDRFLPDKAIDLIDEAAAELKMQIESEPSSLRKVRKDIETLEVENEALKMENDEKNQKRLDEIAKELANLKEKQNALNSQFENEKSVFDGISAKKKEIDLLKNEASLAKARGEFQKAAELEYGKIPSLEKEVEILEDKWKKMSENGVLLKNQVDEDLVAGILSKWTGISVQKMLTSEKQKFLEVEKHLKESVIGQDKALSALARAIKRNKAGLNADNKPIGSFLFLGPTGVGKTQSAKALAKFLFDDEKAMIRFDMSEFMEKHSVSRLLGAPPGYIGHEEGGELTEAVRRKPYSVLLFDEVEKAHKDVFNVLLGILDDSRATDSKGVTVDFKNTIIILTSNIASSAIMNLSGKEQEDAVKNELKNFFKPEFLNRLDDIITFNPLGKDEAYEIVKLLFKDLQMSLENKGIKASLSENAALLIAKDGFDPDFGARPLRRAIYDLIEDKLSDMILADELHENDSIIIDAKDDEIIIKKA

SEQ ID NO: 6945 - DNA, 2580 bp, Ehrlichia ruminantium str. Welgevonden
  CDS (1)..(2580): transl_table=11
atggatttaaataaatttactgatatatcaaagaatttcatagtgcaagcgcaaacttcagctgttgcattagggcatcagtctttagtacctgagcatttacttaaggtaatgttggatgataaagatgagatagttgaagttttgcttacttcttgtgggtgtaatgtagagacgttacgtaatgatgttatatcggctttaaataaattaccagttgtaagtggtccaggtagtggtcatatacatttatcaaaggaaatggcgcaagttttacaagaggctgttaatcttgcaaaaagacatcaggactcttatgttactgttgaaagattactgcaagctctgacaataataaaggacagtaatgtttctaggatattaattgcacatggtgtgactcctcagaagttggagtcattaatagtaaacatgcgtaatggtgctagagctgatagtgtaaattctgagcaaaagtttaatgcactaaaaaaatatgctaaagatgtgactgaagttgctagagcaggaaaattagatccagtaattggaagagatgaggaaattagacgtacaatacaggtattattgagaagaacaaaaaataatcctgtattaattggagagcctggtgttggtaaaacagcaattattgaagggttagcacataagatagtgaagggagatgttccaattgggttgcgagatatgagaataatgtcattagatcttggtatgcttgttgctgggactaaatatagaggtgaatttgaagaaaggttgaaagctgtagttaatgaaattgtttcttcaaatggtagtattatattattcattgatgagttacatacattagttggtgctggtgcaacagatggagcaatggatgcatcaaatttgttgaagccagcattagctagaggtgaaatacattgtataggtgcaacaacattggatgaatatagaaagcatatagaaaaagatgtagcacttgctagaagatttcaaactatatttatttctgagccaacttgtgatgatacaatttctatgttacgtgggttaaaggaaagatatgaaggacatcatggtatagatattcctgacagatcgataattgctgctgtagctttatcgcagcgttatattacggataggtatttaccagataaagctatagaccttattgatgaagcagcgagtcgtgcgagaatggagattgatagtaaacctgaggttattgataagttagatagaaagataatgcagctaaaaatcgagataggagtattagaaaaagaaagtgatgaatcctcaaaacagaggttaatgaagttaaaagatgaactagaaaaactaaatgttcagtctgctgagctaagtagtaaatggcaagcggaaaaaatgaaaatgtcaaagatgaaagcatgtaaggaaaagcttgatattgctagaagtgatttagaaagagcacaaagatctggtgatttggcaaaagctggtgagttaatgtatggtgtaataccagaaattgagaaagagttaaaagaacatgaaaaatttacaagtagcctttttaagaaggaaattacagaacatgacatagcaagtattgtatcaaaatggactggtattcctattgagaacataatgagtagtgaaagagaaaaactactgcgtatggaggaggagataggcaaaacagttattggtcaggatagtgctgtaaaagcagtaagtgatgctgtcaggagatcacgtgcaggggtacaggatgcacagaaaccattggggtcttttttatttcttgggccaactggagtaggtaaaactgagttggttaaaacattagctgagtttttattttgtgataagtctgcacttttaagatttgacatgtcagaatttatggaaaagcatgctgtttcacgattaataggagctcctccaggatatgttggatatgaccaaggtggtgcattaactgaagctgtgaggagaaggccttatcaagtaatattatttgatgaaattgaaaaagcacatggagatattttcaatattttattgcaagtattagatgaaggaagattgactgataatcatggtaagttagtggatttccgtaatacaatactggtattaacttcaaatttagggcaagaaatattaatgaacaatgaatctggaaatatcaatgaagagtcagttaaagagtctgttactaatgtgttgcgtagtcattttcggccagaatttttaaatagattggatgaaattattatatttcataggttaactaaagaacatattgaaagaattattgatgtgcaattttctatattacaaaaaattgttgctcaaagaaaattagagattactttatcttcagatgcaaaaacatggttgataaataatggctatgatcctttatatggggcaagacctttaaagaggttaatacaacagcaaatacagaataacttggcaaaattaatacttgctaatcaggtagctgaaggtaataaattaagggtagatttattagatgataatcttgttattcataagattagttaa

SEQ ID NO: 6946 - protein, 859 aa, Ehrlichia ruminantium str. Welgevonden
MDLNKFTDISKNFIVQAQTSAVALGHQSLVPEHLLKVMLDDKDEIVEVLLTSCGCNVETLRNDVISALNKLPVVSGPGSGHIHLSKEMAQVLQEAVNLAKRHQDSYVTVERLLQALTIIKDSNVSRILIAHGVTPQKLESLIVNMRNGARADSVNSEQKFNALKKYAKDVTEVARAGKLDPVIGRDEEIRRTIQVLLRRTKNNPVLIGEPGVGKTAIIEGLAHKIVKGDVPIGLRDMRIMSLDLGMLVAGTKYRGEFEERLKAVVNEIVSSNGSIILFIDELHTLVGAGATDGAMDASNLLKPALARGEIHCIGATTLDEYRKHIEKDVALARRFQTIFISEPTCDDTISMLRGLKERYEGHHGIDIPDRSIIAAVALSQRYITDRYLPDKAIDLIDEAASRARMEIDSKPEVIDKLDRKIMQLKIEIGVLEKESDESSKQRLMKLKDELEKLNVQSAELSSKWQAEKMKMSKMKACKEKLDIARSDLERAQRSGDLAKAGELMYGVIPEIEKELKEHEKFTSSLFKKEITEHDIASIVSKWTGIPIENIMSSEREKLLRMEEEIGKTVIGQDSAVKAVSDAVRRSRAGVQDAQKPLGSFLFLGPTGVGKTELVKTLAEFLFCDKSALLRFDMSEFMEKHAVSRLIGAPPGYVGYDQGGALTEAVRRRPYQVILFDEIEKAHGDIFNILLQVLDEGRLTDNHGKLVDFRNTILVLTSNLGQEILMNNESGNINEESVKESVTNVLRSHFRPEFLNRLDEIIIFHRLTKEHIERIIDVQFSILQKIVAQRKLEITLSSDAKTWLINNGYDPLYGARPLKRLIQQQIQNNLAKLILANQVAEGNKLRVDLLDDNLVIHKIS

SEQ ID NO: 6947 - DNA, 2439 bp, Dehalococcoides ethenogenes 195
  CDS (1)..(2439): transl_table=11
gtgagacaggaaaaatttaccgaacaagcccaggaagccctcagtgcttcacagatgctggtgcaggaataccagcacagccaatgggacgttgaacatgtgctgctggcccttatccgtcaggaaaaggggctggtgggtgaaatactaaaagaacttaaagtaagctcagaggaaataaccaagcagctggtggactctttaaagcgttcgcccaaagcggtaggcggcaatatccagatataccccaccccccgtattataaacctgctgcaaaccgccaacaacgaagcagagcgcctgcgggacgagtttatcggcacggaacatttgctggtggccattgccggagatacccagggagaatctgcccgaattttgaagcagtttggtattgaccaggaaaaagtttattccgccctccaaaaaatacggggcggacacagggtgaccgatgccagagccgaaagcaaataccgggcactggccaaatacagccgcgaccttaccgaactggccaaacagggcaaaatagacccggtaataggccgtgaccaggaaatccgccgggttatgcaaatactctcccgccgcaccaaaaacaacccggtgattgtgggtgaagcgggcgtgggcaaaactgccattgccgaaggggttgcccagaaaattgcggataatgacgtacccgaatccctgcgtgaccgcaaggtaatggccctggatatgggcgctctggttgccggaagcaagttccgcggagagtttgaagaacgcctcaaagcggtcatggacgaggtgcgccaatccgccggagagattatccttttcatagacgaaatccataccgtagtcggggcgggagcggctgagggagctatagatgcctcaaatatgctcaaaccggctttggccagaggtgaacttcagacaataggggctaccactctggatgactaccgcaaatatattgagaaagataccgctctggagcgccgtttccagccggtgtttgtagacgagcctacagttgaacagactattgaaatattaaagggcatcagacccaaatacgaagcccaccataaactgaaaataactgacgccgctctggaggcagccgccagactgtccagccgctatataaccgaacgccagctgccggacaaggcgatagaccttattgacgaggcagccagtaaactccggctggacagcgaaagcgccccgccggaagtaaaaaaactggaagatgaactccgccaggcaggcattgaggaagaggccgcctcccagcttcaggaatacgaaaaagcggctgaactcaaggctgaaaagatgcgtcttgaggaaaaattcaacactgcccgcgaggattggctgaaacaggagaaaatagccgaagaagtaaccgccgaacagattaccaccttggtttcgtctatgaccggcataccggtcagccagatgctggaaggtgaggcttccaaactgctgaatatggaagaccgcatccacgagcgtatggtagaccaggaggaagcggtaaaagccgtagccgaagctatccgccgcagccgggccggtcttaaagacccgcgccgtcccatcggcagctttttgttcttaggcccgaccggggttggcaaaaccgaacttgcccgcagcttagcctggtttttgtttgatgacgaaaccgccatggtcaggctggacatgtccgaatatcaggaaaaacacactgtttcccgtctggtaggtgctccccccggatacgtgggctacgacgaaggcgggcagctgactgaactggttcgccgccgcccgtaccgggttatcctgctggacgaaattgaaaaagcccacccggatgtatacaacaccctgctccagctgctggatgacggccgcctgacagacgggcagggcagaacggtggactttaaaaacacggttatcattatgacctccaacgcaggcatagaaactatcaaacgcgaatctgccctgggttttgccgtcaggactgatgactccaaaacccgccatgacggctatgaacgcatgaaagacaaggtcatggccgaggttaaaaagaccttccgcccggagtttatcaaccgggtagacgaaataattgtcttccatgagctggccgaagaacagatacgccagatagtggatttcataataaaagatgtttccaaacggcttgaagaacgcaaactcaagctggagctgaccgatgccgccaaaggctggctggccaaggtgggttatgacccggcctttggtgccagaccccttcgcagggccattgaaagatacatagaaagcccgctggctgacaagctgcttcgcaatgagttcagcgaaaatgctacaatactggtggacaaggcggatgaagccctgagtttcagccagaaggccgcctga

SEQ ID NO: 6948 - protein, 812 aa, Dehalococcoides ethenogenes 195
MRQEKFTEQAQEALSASQMLVQEYQHSQWDVEHVLLALIRQEKGLVGEILKELKVSSEEITKQLVDSLKRSPKAVGGNIQIYPTPRIINLLQTANNEAERLRDEFIGTEHLLVAIAGDTQGESARILKQFGIDQEKVYSALQKIRGGHRVTDARAESKYRALAKYSRDLTELAKQGKIDPVIGRDQEIRRVMQILSRRTKNNPVIVGEAGVGKTAIAEGVAQKIADNDVPESLRDRKVMALDMGALVAGSKFRGEFEERLKAVMDEVRQSAGEIILFIDEIHTVVGAGAAEGAIDASNMLKPALARGELQTIGATTLDDYRKYIEKDTALERRFQPVFVDEPTVEQTIEILKGIRPKYEAHHKLKITDAALEAAARLSSRYITERQLPDKAIDLIDEAASKLRLDSESAPPEVKKLEDELRQAGIEEEAASQLQEYEKAAELKAEKMRLEEKFNTAREDWLKQEKIAEEVTAEQITTLVSSMTGIPVSQMLEGEASKLLNMEDRIHERMVDQEEAVKAVAEAIRRSRAGLKDPRRPIGSFLFLGPTGVGKTELARSLAWFLFDDETAMVRLDMSEYQEKHTVSRLVGAPPGYVGYDEGGQLTELVRRRPYRVILLDEIEKAHPDVYNTLLQLLDDGRLTDGQGRTVDFKNTVIIMTSNAGIETIKRESALGFAVRTDDSKTRHDGYERMKDKVMAEVKKTFRPEFINRVDEIIVFHELAEEQIRQIVDFIIKDVSKRLEERKLKLELTDAAKGWLAKVGYDPAFGARPLRRAIERYIESPLADKLLRNEFSENATILVDKADEALSFSQKAA

SEQ ID NO: 6949 - DNA, 2592 bp, Ehrlichia ruminantium str. Welgevonden
  CDS (1)..(2592): transl_table=11
atgaagttagttatggatttaaataaatttactgatatatcaaagaatttcatagtgcaagcgcaaacttcagctgttgcattagggcatcagtctttagtacctgagcatttacttaaggtaatgttggatgataaagatgagatagttgaagttttgcttacttcttgtgggtgtaatgtagagacgttacgtaatgatgttatatcggctttaaataaattaccagttgtaagtggtccaggtagtggtcatatacatttatcaaaggaaatggcgcaagttttacaagaggctgttaatcttgcaaaaagacatcaggactcttatgttactgttgaaagattactgcaagctctgacaataataaaggacagtaatgtttctaggatattaattgcacatggtgtgactcctcagaagttggagtcattaatagtaaacatgcgtaatggtgctagagctgatagtgtaaattctgagcaaaagtttaatgcactaaaaaaatatgctaaagatgtgactgaagttgctagagcaggaaaattagatccagtaattggaagagatgaggaaattagacgtacaatacaggtattattgagaagaacaaaaaataatcctgtattaattggagagcctggtgttggtaaaacagcaattattgaagggttagcacataagatagtgaagggagatgttccaattgggttgcgagatatgagaataatgtcattagatcttggtatgcttgttgctgggactaaatatagaggtgaatttgaagaaaggttgaaagctgtagttaatgaaattgtttcttcaaatggtagtattatattattcattgatgagttacatacattagttggtgctggtgcaacagatggagcaatggatgcatcaaatttgttgaagccagcattagctagaggtgaaatacattgtataggtgcaacaacattggatgaatatagaaagcatatagaaaaagatgtagcacttgctagaagatttcaaactatatttatttctgagccaacttgtgatgatacaatttctatgttacgtgggttaaaggaaagatatgaaggacatcatggtatagatattcctgacagatcgataattgctgctgtagctttatcgcagcgttatattacggataggtatttaccagataaagctatagaccttattgatgaagcagcgagtcgtgcgagaatggagattgatagtaaacctgaggttattgataagttagatagaaagataatgcagctaaaaatcgagataggagtattagaaaaagaaagtgatgaatcctcaaaacagaggttaatgaagttaaaagatgaactagaaaaactaaatgttcagtctgctgagctaagtagtaaatggcaagcggaaaaaatgaaaatgtcaaagatgaaagcatgtaaggaaaagcttgatattgctagaagtgatttagaaagagcacaaagatctggtgatttggcaaaagctggtgagttaatgtatggtgtaataccagaaattgagaaagagttaaaagaacatgaaaaatttacaagtagcctttttaagaaggaaattacagaacatgacatagcaagtattgtatcaaaatggactggtattcctattgagaacataatgagtagtgaaagagaaaaactactgcgtatggaggaggagataggcaaaacagttattggtcaggatagtgctgtaaaagcagtaagtgatgctgtcaggagatcacgtgcaggggtacaggatgcacagaaaccattggggtcttttttatttcttgggccaactggagtaggtaaaactgagttggttaaaacattagctgagtttttattttgtgataagtctgcacttttaagatttgacatgtcagaatttatggaaaagcatgctgtttcacgattaataggagctcctccaggatatgttggatatgaccaaggtggtgcattaactgaagctgtgaggagaaggccttatcaagtaatattatttgatgaaattgaaaaagcacatggagatattttcaatattttattgcaagtattagatgaaggaagattgactgataatcatggtaagttagtggatttccgtaatacaatactggtattaacttcaaatttagggcaagaaatattaatgaacaatgaatctggaaatatcaatgaagagtcagttaaagagtctgttactaatgtgttgcgtagtcattttcggccagaatttttaaatagattggatgaaattattatatttcataggttaactaaagaacatattgaaagaattattgatgtgcaattttctatattacaaaaaattgttgctcaaagaaaattagagattactttatcttcagatgcaaaaacatggttgataaataatggctatgatcctttatatggggcaagacctttaaagaggttaatacaacagcaaatacagaataacttggcaaaattaatacttgctaatcaggtagctgaaggtaataaattaagggtagatttattagatgataatcttgttattcataagattagttaa

SEQ ID NO: 6950 - protein, 863 aa, Ehrlichia ruminantium str. Welgevonden
MKLVMDLNKFTDISKNFIVQAQTSAVALGHQSLVPEHLLKVMLDDKDEIVEVLLTSCGCNVETLRNDVISALNKLPVVSGPGSGHIHLSKEMAQVLQEAVNLAKRHQDSYVTVERLLQALTIIKDSNVSRILIAHGVTPQKLESLIVNMRNGARADSVNSEQKFNALKKYAKDVTEVARAGKLDPVIGRDEEIRRTIQVLLRRTKNNPVLIGEPGVGKTAIIEGLAHKIVKGDVPIGLRDMRIMSLDLGMLVAGTKYRGEFEERLKAVVNEIVSSNGSIILFIDELHTLVGAGATDGAMDASNLLKPALARGEIHCIGATTLDEYRKHIEKDVALARRFQTIFISEPTCDDTISMLRGLKERYEGHHGIDIPDRSIIAAVALSQRYITDRYLPDKAIDLIDEAASRARMEIDSKPEVIDKLDRKIMQLKIEIGVLEKESDESSKQRLMKLKDELEKLNVQSAELSSKWQAEKMKMSKMKACKEKLDIARSDLERAQRSGDLAKAGELMYGVIPEIEKELKEHEKFTSSLFKKEITEHDIASIVSKWTGIPIENIMSSEREKLLRMEEEIGKTVIGQDSAVKAVSDAVRRSRAGVQDAQKPLGSFLFLGPTGVGKTELVKTLAEFLFCDKSALLRFDMSEFMEKHAVSRLIGAPPGYVGYDQGGALTEAVRRRPYQVILFDEIEKAHGDIFNILLQVLDEGRLTDNHGKLVDFRNTILVLTSNLGQEILMNNESGNINEESVKESVTNVLRSHFRPEFLNRLDEIIIFHRLTKEHIERIIDVQFSILQKIVAQRKLEITLSSDAKTWLINNGYDPLYGARPLKRLIQQQIQNNLAKLILANQVAEGNKLRVDLLDDNLVIHKIS

SEQ ID NO: 6951 - DNA, 2580 bp, Neisseria gonorrhoeae FA 1090
  CDS (1)..(2580): transl_table=11
atgcgatacgacaaattaaccgccaaattccaacaagcccttgcagaagctcagagtttggcgttggctgcggacagcagctatctggaagcaggtttcgtactgaaagccctgcttgacgaccaaaacagcggagctgccgcgctcttggctcatgcgggcgtgaacgtgccgcaggttaaacagcgtttgcagcagcatttgaacagcctgccgaaagtgtccggacaaggtggtgagattctgcccagccgcgaattgcaggcggtgttgaacctgatggacaaagcggcaaccaaacgcggcgatgcctatatcgccagcgaacttttcctgctcgccttggtgcagcagaacgatgcggccggcaaaatcttgaaagaagccggtgcgaccgaacaaaatatcaatgccgcgatcgatgcggtacgaggcggacaaaacgtgaacgatgcgaatgccgaagaccaacgcgatgctttgaaaaaatacacgctcgatctgacccaacgcgcccgagacggtaagctcgaccccgttatcggtcgtgatgatgaaatccgtcgcgcgattcaggtgctgcaacgccgcaccaaaaacaaccccgtgctgattggcgaacccggtgtgggtaaaaccgccatcgtcgaaggtttggcgcaacgcatcgtcaacggcgaagtacctgaatccctgcgtaacaaacgcctgctggttttggatttggcggctttgattgccggtgcgaaataccgtggcgaatttgaagaacgcttgaaaggcgtattgaacgatttggcgaaagacgacggcaacaccctgattttcatcgatgaaatccatactttggtcggcgcgggcaaaaccgacggcgcgatggacgcgggcaatatgttgaaaccggccttggcgcggggcgaactgcactgtatcggtgcgactactttggacgaataccgccaatacatcgaaaaagacgcggcactcgaacgccgtttccaaaaagtattggttggcgaacccagcgtggaagacaccatcgctatcctgcgcggtttgcaggaacgttacgaaatccaccacggcatcgatattaccgaccctgctatcgttgccgcagcggagttgagcgaccgctacattaccgaccgcttcctgcccgacaaggcgattgatttgattgacgaagctgccagccgtgtcaagatggaaaaagaaaccaaaccggaagctatggacaaaatcgaccgccgtttgattcagcttcggatggaaaaggcgcacgttgaaaaagaaaaagacgatgccagcaaaaaacgtttggaactgatagacgaggaaatcgacggcttgcaaaaagaatacgccgatttggacgaaatctggaaagccgaaaaagcgatttcagacggtgctgccaatattaagaaacaaattgacgaagtcaaaattaaaatcgaacaggcaaaacggcaaggcgatttggcactggcttcaaaattgatgtatgaagatttggagcatttggaaaaacagcgtgcagccgccgaacgggcagatacggacagcacaaaaccggcaaacaaactcttgcgtaataatgtcggcgcggaggaaatcgcagaagtggtttcccgtatgaccggcatccccgtgtcaaaaatgatggaaggcgaacgcgacaaactgctaaagatggaagaagtattgcaccgccgcgtagtcggtcaaaacgaagccgtgcgcgccgtgtccgatgccatccgccgcagccgctccggccttgccgatccgaacaaaccttacggcagcttcctgttcttaggcccgaccggtgtgggtaagaccgagttgtgcaaagctttggcaggcttcctgttcgacagcgaagaccacctcatccgcatcgacatgtccgaatacatggaaaaacacgccgttgcccgcttaatcggcgcgcctccgggttatgtcggatacgaagagggcggctacctgaccgaacaagtccgccgcaaaccgtacagcgtgattcttttggacgaagtggaaaaagcccatcccgacgtattcaacatcctgctgcaagtattggatgacggtcgtttgaccgacggacaaggcaggacggtagattttaaaaataccgtgattgtgatgacttccaacatcggcagccagcacatccaacaaatgggcacgcaggactacgaagcggtgaaagaagttgtgatggaggatgtgaaagaacatttccgtccggaaatgatcaaccgcatcgacgaagtggtcgtgttccatggcttggatcaggccaatatccgcagtattgcgaaaatccagctcaaaggtttggaaaaacgtttggaaaaacaaaacctgcgcctgactgtttccgatgccgctctggacatcatcgccaaagccggtttcgacccgatttacggcgcacgtccgctcaaacgcgcgatccaatcggaaatcgaaaacccgctggccaaagccctgcttgccggaaactatgcgcccgaaagcgaaatcaaggtagaagccgacggcgacagactgaaatttgcctga

SEQ ID NO: 6952 - protein, 859 aa, Neisseria gonorrhoeae FA 1090
MRYDKLTAKFQQALAEAQSLALAADSSYLEAGFVLKALLDDQNSGAAALLAHAGVNVPQVKQRLQQHLNSLPKVSGQGGEILPSRELQAVLNLMDKAATKRGDAYIASELFLLALVQQNDAAGKILKEAGATEQNINAAIDAVRGGQNVNDANAEDQRDALKKYTLDLTQRARDGKLDPVIGRDDEIRRAIQVLQRRTKNNPVLIGEPGVGKTAIVEGLAQRIVNGEVPESLRNKRLLVLDLAALIAGAKYRGEFEERLKGVLNDLAKDDGNTLIFIDEIHTLVGAGKTDGAMDAGNMLKPALARGELHCIGATTLDEYRQYIEKDAALERRFQKVLVGEPSVEDTIAILRGLQERYEIHHGIDITDPAIVAAAELSDRYITDRFLPDKAIDLIDEAASRVKMEKETKPEAMDKIDRRLIQLRMEKAHVEKEKDDASKKRLELIDEEIDGLQKEYADLDEIWKAEKAISDGAANIKKQIDEVKIKIEQAKRQGDLALASKLMYEDLEHLEKQRAAAERADTDSTKPANKLLRNNVGAEEIAEVVSRMTGIPVSKMMEGERDKLLKMEEVLHRRVVGQNEAVRAVSDAIRRSRSGLADPNKPYGSFLFLGPTGVGKTELCKALAGFLFDSEDHLIRIDMSEYMEKHAVARLIGAPPGYVGYEEGGYLTEQVRRKPYSVILLDEVEKAHPDVFNILLQVLDDGRLTDGQGRTVDFKNTVIVMTSNIGSQHIQQMGTQDYEAVKEVVMEDVKEHFRPEMINRIDEVVVFHGLDQANIRSIAKIQLKGLEKRLEKQNLRLTVSDAALDIIAKAGFDPIYGARPLKRAIQSEIENPLAKALLAGNYAPESEIKVEADGDRLKFA

SEQ ID NO: 6953 - DNA, 2589 bp, Bacteroides fragilis NCTC 9343
  CDS (1)..(2589): transl_table=11
atgaactttaacaattttaccattaaatctcaggaagctgtacaagaggctattaacctggcacaaagtcgggggcaacaagccatcgaaacggctcatatcctgtatggagtgatgaaggtaggcgaaaatgtgactaactttatctttcagaagttaggactgaacggacaacaaatctccctcgtactcgataagcagatcgactctttcccaaaagtttccggcggagaaccttacttgagtagggaagcgaacgaagtctttcaaaaagcaacgcagtactccaaggagatgggcgatgagtttgtttcattggaacatcttttgctggctttactgacagtaaagagcacggtatctaccatcctgaaagatgcaggaatgaccgaaaaagaattgcgtggtgccatcagtgaattgagaaaaggagaaaaggtgacctctcagtccagtgaagataattaccagtcactggaaaaatatgccattaacttaaatgaagcagcccgtagcggtaaactcgaccctgtgatcggacgtgatgaagaaatccgacgggtacttcagattttaagtcgacgtacaaaaaacaatcctatactaataggtgaaccgggtaccggtaaaacagctattgttgagggattggcacaccgtattcttcggggtgatgttcctgaaaacctgaaaaataaacaggtatactcacttgatatgggcgcactcgttgcaggagctaaatataaaggagaatttgaggaacgactgaaatcggtagtgaatgaggtgaagaaatcagaaggtaatatcatattattcattgatgaaatccatactttggtaggggcaggaaaaggagaaggtgctatggacgcagctaatattctgaaacctgcacttgcccgtggagaactacgctctatcggtgctaccactctcgacgaatatcagaaatattttgaaaaagataaagctttggaacgtcgtttccaaatagtacaggtagatgaaccagacaatctgagcacaatatctatcttacgtggattaaaagaacggtatgaaaatcaccatcacgtacgtatcaaagatgatgcaatcattgctgccgtagaattaagcagccggtacatcactgaccgttttttacccgataaagcaattgacctgatggacgaagctgccgcaaaacttcgcatggaggtggattctgtccctgaaggattagatgaaatctcacgaaagattaaacagctggagattgagcgagaagctataaaacgggaaaatgatgaaccgaaattacagacaatcggcaaagaattggctgaattgaaagaacaggaaaagtcatataaagcaaaatggcaaagcgagaaaagcctgatggatataatccagcagaacaaagttgaaatagaaaatcttaaattcgaagctgacaaggcagaacgtgagggaaactatggcaaagttgcagagattcgctatggcaaattgcaggaactgcataaggaaattgaagatacccagaaaaaattgcacgaaatgcaaggggatacagccatgataaaagaagaggtggatgctgaagacatcgctgacgtagtatcccgctggaccggaattcctgtaagcaaaatgatgcagagtgaaaaggacaaattgctccaccttgaagaagaattacatcagcgtgttatcggacaagacgaggctatcgcagctgtgtctgatgctgtacgccgcagccgtgcaggcttacaggatcccaaacgacctattggttccttcatcttcctgggcactacaggagttggtaaaaccgaacttgccaaagcgcttgccgaatttctgtttgacgatgaaacgatgatgacccgtatcgacatgagcgaataccaggagaagcacagcgtttcgcgtttagttggagcgcctccgggatatgtaggatatgacgaaggcggacaattgacagaggcgatccgtcgcaaaccctattctgtagtattgtttgatgaaatcgagaaagcacatccggatgtatttaatatcttgttgcaggtactcgatgacggacggttgacagataacaaaggccgtgtggtaaactttaaaaatacaatcatcattatgacctctaatatgggtagcagctacatacagagccagatggaaaaactgaacggcgccaacaacgaggaagtagtggaagaaaccaagaaagaggtaatgaacatgttaaagaaaaccatccgtccggaattcctaaaccgtatcgatgagactatcatgttcctgccattaacagaaaaagacataaaacagattgtcttgttacagattaagagcgtacaaaagatgcttgccggtaatggaatagaactagaactgacagatgcggctttggatttcctctcacaggtcggctatgatccggaattcggtgcacgtcctgtaaaaagggctattcagagatatttactcaacgatctatcgaaaaaattattggcacaggaagtagaccgtagtaaagcaatcattgtagatgcacaaggagacggattagttttccgtaactaa

SEQ ID NO: 6954 - protein, 862 aa, Bacteroides fragilis NCTC 9343
MNFNNFTIKSQEAVQEAINLAQSRGQQAIETAHILYGVMKVGENVTNFIFQKLGLNGQQISLVLDKQIDSFPKVSGGEPYLSREANEVFQKATQYSKEMGDEFVSLEHLLLALLTVKSTVSTILKDAGMTEKELRGAISELRKGEKVTSQSSEDNYQSLEKYAINLNEAARSGKLDPVIGRDEEIRRVLQILSRRTKNNPILIGEPGTGKTAIVEGLAHRILRGDVPENLKNKQVYSLDMGALVAGAKYKGEFEERLKSVVNEVKKSEGNIILFIDEIHTLVGAGKGEGAMDAANILKPALARGELRSIGATTLDEYQKYFEKDKALERRFQIVQVDEPDNLSTISILRGLKERYENHHHVRIKDDAIIAAVELSSRYITDRFLPDKAIDLMDEAAAKLRMEVDSVPEGLDEISRKIKQLEIEREAIKRENDEPKLQTIGKELAELKEQEKSYKAKWQSEKSLMDIIQQNKVEIENLKFEADKAEREGNYGKVAEIRYGKLQELHKEIEDTQKKLHEMQGDTAMIKEEVDAEDIADVVSRWTGIPVSKMMQSEKDKLLHLEEELHQRVIGQDEAIAAVSDAVRRSRAGLQDPKRPIGSFIFLGTTGVGKTELAKALAEFLFDDETMMTRIDMSEYQEKHSVSRLVGAPPGYVGYDEGGQLTEAIRRKPYSVVLFDEIEKAHPDVFNILLQVLDDGRLTDNKGRVVNFKNTIIIMTSNMGSSYIQSQMEKLNGANNEEVVEETKKEVMNMLKKTIRPEFLNRIDETIMFLPLTEKDIKQIVLLQIKSVQKMLAGNGIELELTDAALDFLSQVGYDPEFGARPVKRAIQRYLLNDLSKKLLAQEVDRSKAIIVDAQGDGLVFRN

SEQ ID NO: 6955 - DNA, 2595 bp, Chlamydophila abortus S26/3
  CDS (1)..(2595): transl_table=11
atggataagatatcggatgcagtaagcgaagctctagaaaaggcttttgagctcgcgaaatcacaaaaaaatccttacgtaagcgaaaaccatttccttaaatgtctattagaaaatactgaatcactattttatttaattattaaagagattcaaagcaatcctaaattgctgatttctgcagtcgataaggctctatcgttagaaccttcagttgttgaaggagacgctatgccgaaaccttcttcagggctgcaaagtttacttctagatgccaaacatgaggcaaaagatctcggagatacttacctttctggagatcatgtattattagctttttggaaatccaacaaggagccgtttgcttcttggaaaaacacggtaaaaatatccttagacgatcttaaaaaactcattattaatataaggcgtggcaatcgtatggactctcctagtgcggaaaataatctccggggcctagaaaagtattgtaagaacttaactttattagcgaaagaagggaagctggatcctgtcattggcagagatgaagaaattcgtcgtacagtgcaagtgctatcacgaagaacgaagaataaccccatgctgataggtgaaccaggagtagggaaaacagcaatagcggaaggcttggctttacgcatagttcaaggcgatattcccgaaagcttaaaaggtaaacatctttatgttttagatatgggggcattaatcgcgggagcaaaatatcgcggggaatttgaagaacgcttaaaaagtgtgcttaaagatgtagaatctgtggatggggaaagtattttatttattgatgaggtgcatactctcgtaggtgctggagctaccgacggagctatggatgctgcaaatttattaaaacccgctttagctcgggggactttgcattgcattggggcgactactctgaatgaatatcaaaagtatattgaaaaagatgccgcgttagaacggcgtttccaacccatttttgtcaccgagccttccttagaagatgctgtatttattcttcgtggtctccgtgagaagtatgaaattttccatggcgtacgtattactgagggagcattaaatgctgccgtgcttctttcttatagatatattcctgatcgtttccttcctgataaagcgatcgatcttattgatgaagctgctagtttaattcgtatgcaaattggtagtttacctctacctatcgatgaaaaagaacgcgagctcgcagcattgattgttaaacaagaagctataaaacgcgaaaaagctcctgcctatcaagaagaggctgaagctatgcaacagtctatagatcagctgaaagaagaacttgcagtgttacgactacgttgggacgaggaaaaaaaacttatttccggtctgaaagaaaaaaagaattctttagaaaacatgaagttttctgaagaagaagcagaacgtattgccgattacaatcgcgttgcggagttgcgctacagcttgatccctgctcttgaagaagaaatccgtcatgatgaagaagcattaaatcaaagggatcatcgtttgcttcaagaagaggtagacgagcgtcttattgctcaagtagtcgcaaattggacaggcattcctgtgcaaaagatgttagaaggtgaagcagaaaaacttcttgttttagaagaatccttggaagaacgtgttgtgggtcaaccgtttgctatttctgcggtaagtgattctatacgtgcggcgcgtgttggactgagtgatccccaacgtcctttgggggtattcctatttttaggccctacaggagttggaaaaacagagctcgctaaagctctcgcggatcttttgtttaataaagaagaggctatggtacgcttcgatatgaccgaatatatggaaaagcattccgtgtccaagttgatcggatcgcctccaggttatgtaggttatgaagaaggcggaagcctgtccgaagctttacgtcgaagaccgtattctgttgtactcttcgatgaaatcgaaaaagcagatagggaagtttttaatattcttttgcagatttttgatgagggcatccttacagatagtaagaaacgtaaggtaaattgcaaaaatgctttattcattatgacttcgaatataggttctcaagaactcgccgattactgcgcgaaaaagggaagtgaagtcagtaaggagacagtgttgtcggtagtttctccaacattacggaaatacttcagtcctgagttcatcaatcgtattgatgacattcttccttttattcctttaagtaccgaagatattgtaaaaatcgtcggcattcagatgcgtagggttgcccaacgcatgttagaaagacgagtcacgttaacatgggatgattctgttatactctatctcagtgagcaggggtatgatagtgcttttggagcacgacctttaaaacggttaattcagcagaaggtagttacactattatcgaaagctttacttaaaggtgatattaaagcagatacttctatagagttaacgatgtccaaagatatcatactgtttaaaaaagttagcggttaa

SEQ ID NO: 6956 - protein, 864 aa, Chlamydophila abortus S26/3
MDKISDAVSEALEKAFELAKSQKNPYVSENHFLKCLLENTESLFYLIIKEIQSNPKLLISAVDKALSLEPSVVEGDAMPKPSSGLQSLLLDAKHEAKDLGDTYLSGDHVLLAFWKSNKEPFASWKNTVKISLDDLKKLIINIRRGNRMDSPSAENNLRGLEKYCKNLTLLAKEGKLDPVIGRDEEIRRTVQVLSRRTKNNPMLIGEPGVGKTAIAEGLALRIVQGDIPESLKGKHLYVLDMGALIAGAKYRGEFEERLKSVLKDVESVDGESILFIDEVHTLVGAGATDGAMDAANLLKPALARGTLHCIGATTLNEYQKYIEKDAALERRFQPIFVTEPSLEDAVFILRGLREKYEIFHGVRITEGALNAAVLLSYRYIPDRFLPDKAIDLIDEAASLIRMQIGSLPLPIDEKERELAALIVKQEAIKREKAPAYQEEAEAMQQSIDQLKEELAVLRLRWDEEKKLISGLKEKKNSLENMKFSEEEAERIADYNRVAELRYSLIPALEEEIRHDEEALNQRDHRLLQEEVDERLIAQVVANWTGIPVQKMLEGEAEKLLVLEESLEERVVGQPFAISAVSDSIRAARVGLSDPQRPLGVFLFLGPTGVGKTELAKALADLLFNKEEAMVRFDMTEYMEKHSVSKLIGSPPGYVGYEEGGSLSEALRRRPYSVVLFDEIEKADREVFNILLQIFDEGILTDSKKRKVNCKNALFIMTSNIGSQELADYCAKKGSEVSKETVLSVVSPTLRKYFSPEFINRIDDILPFIPLSTEDIVKIVGIQMRRVAQRMLERRVTLTWDDSVILYLSEQGYDSAFGARPLKRLIQQKVVTLLSKALLKGDIKADTSIELTMSKDIILFKKVSG

SEQ ID NO: 6957 - DNA, 2778 bp, Corynebacterium glutamicum ATCC 13032
  CDS (1)..(2778): transl_table=11
atgttcgagaggtttaccgatcgtgcacgccgcgtgattgtgctcgcgcaggaagaggcgcgcatgctcaaccacaattacatcggcacggagcacattctcctcggcctcattcacgagggcgagggcgttgcagccaaggctttggaatccatgggaatttccctggacgccgtccgccaggaagtcgaagagattatcggccagggctcccagcccaccaccggccacattccttttactccacgtgccaagaaggtcctggagctcagcctccgcgaaggcctacaaatgggacacaagtacatcggtactgagttcctgcttctcggtttgatccgtgagggcgagggcgttgctgcccaggtcctggtcaagcttggtgctgatctgccacgcgtgcgtcagcaagttattcagcttctctccggctacgaaggtggccagggcggatccccagagggcggccagggcgcccctactggcggtgacgctgttggtgcaggagctgctcctggcggtcgtccatcttcgggcagcccaggcgagcgttctacctctttggtccttgaccagttcggccgcaacctcacccaggctgcaaaggacggcaagctggatccagttgttggtcgcgataaggaaatcgagcgcatcatgcaggtgctctcccgtcgtaccaagaacaacccagttcttattggtgagccaggtgttggtaagaccgcagttgttgaaggtcttgcactagacattgttaacggcaaggttccagagaccctcaaggacaagcaggtttactcccttgacttaggttccctggttgcaggttcccgttaccgcggtgacttcgaagagcgactgaagaaggtcctcaaggagattaaccagcgcggcgacatcatcctgtttatcgatgagatccacaccctcgtgggtgcaggtgcagcagaaggcgcaatcgacgctgcctccctgcttaagccaaagcttgcccgcggtgaactgcagaccattggtgcaaccaccctggatgagtaccgtaagcacattgaaaaggacgcagctcttgagcgtcgtttccagccagtgcaggttccagagccttcggttgatctcaccgttgagatcttgaagggtctgcgcgaccgctacgaagctcaccaccgcgtatccatcaccgatggtgctcttactgcagcagctcagcttgctgatcgctacatcaacgaccgcttcttgccagataaggccgttgacctcatcgatgaggctggcgcccgcatgcgcatcaagcgcatgaccgcaccttcctccctccgcgaggttgatgagcgtatcgctgatgttcgccgtgagaaggaagcagcgatcgatgctcaggactttgagaaggcagcaggtcttcgcgataaggagcgcaagctcggcgaagagcgttcagagaaggaaaagcagtggcgctccggcgacctcgaggacatcgctgaggttggcgaagagcagatcgcagaagtactggccaactggactggtattcctgtcttcaagctcaccgaagctgaatcttcacgcctgctcaacatggaagaagagttgcacaagcgcatcatcggacaggatgaagctgtcaaggctgtctcccgtgcgatccgtcgtacccgtgcaggtctgaaggatcctaagcgtccttccggctccttcatcttcgctggtccatccggcgttggtaagaccgagctgtccaaggctctcgcaggattcctcttcggtgacgatgattccctcatccaaatcgacatgggtgagttccacgaccgcttcaccgcgtcccgacttttcggtgcccctccgggatacgttggctacgaagaaggtggccagctgaccgagaaggttcgccgtaagccattctccgttgtgcttttcgacgaaatcgagaaggcccacaaggagatctacaacaccttgctgcaggtgttggaagatggtcgccttaccgatggtcagggacgcatcgtggacttcaagaacaccgtcctgatcttcacctccaacctgggcaccgctgacatctccaaggctgttggcctgggcttctccggatcctccgagactgacagcgatgctcagtacgaccgcatgaagaacaaggtccacgacgagctgaagaagcacttccgccctgagttcctgaaccgtattgatgagatcgtggtcttccaccagctcaccaaggatcagatcgttcagatggtcgaccttcttatcggtcgcgtttccaacgcactggctgagaaggacatgagcatcgaactgactgagaaggccaaggacctcctggctaaccgaggcttcgatccagttctgggtgcacgaccattgcgtcgcaccatccagcgcgaaattgaagaccagatgtccgagaagatcctcttcggtgaaatcggcgcaggcgagatcgtcaccgttgacgtcgaaggctgggacggcgagtccaaggacaccgaccgtgcgaagttcaccttcacaccacgtccaaagccaatgccagaaggtaagttctctgagatctctgtcgaggctgcggaagcaattcaagatgtagattctgcagctgacggcgatgtcccagaaaccgattcactttccgacattgaccttgaaacccttgaaaagtttgaggaagatgtagaaaacggcaccgacattgatcaggtgtccggtgactactacggcaccgatgatcagggaggcactgctccaagcaaggagtag

SEQ ID NO: 6958 - protein, 925 aa, Corynebacterium glutamicum ATCC 13032
MFERFTDRARRVIVLAQEEARMLNHNYIGTEHILLGLIHEGEGVAAKALESMGISLDAVRQEVEEIIGQGSQPTTGHIPFTPRAKKVLELSLREGLQMGHKYIGTEFLLLGLIREGEGVAAQVLVKLGADLPRVRQQVIQLLSGYEGGQGGSPEGGQGAPTGGDAVGAGAAPGGRPSSGSPGERSTSLVLDQFGRNLTQAAKDGKLDPVVGRDKEIERIMQVLSRRTKNNPVLIGEPGVGKTAVVEGLALDIVNGKVPETLKDKQVYSLDLGSLVAGSRYRGDFEERLKKVLKEINQRGDIILFIDEIHTLVGAGAAEGAIDAASLLKPKLARGELQTIGATTLDEYRKHIEKDAALERRFQPVQVPEPSVDLTVEILKGLRDRYEAHHRVSITDGALTAAAQLADRYINDRFLPDKAVDLIDEAGARMRIKRMTAPSSLREVDERIADVRREKEAAIDAQDFEKAAGLRDKERKLGEERSEKEKQWRSGDLEDIAEVGEEQIAEVLANWTGIPVFKLTEAESSRLLNMEEELHKRIIGQDEAVKAVSRAIRRTRAGLKDPKRPSGSFIFAGPSGVGKTELSKALAGFLFGDDDSLIQIDMGEFHDRFTASRLFGAPPGYVGYEEGGQLTEKVRRKPFSVVLFDEIEKAHKEIYNTLLQVLEDGRLTDGQGRIVDFKNTVLIFTSNLGTADISKAVGLGFSGSSETDSDAQYDRMKNKVHDELKKHFRPEFLNRIDEIVVFHQLTKDQIVQMVDLLIGRVSNALAEKDMSIELTEKAKDLLANRGFDPVLGARPLRRTIQREIEDQMSEKILFGEIGAGEIVTVDVEGWDGESKDTDRAKFTFTPRPKPMPEGKFSEISVEAAEAIQDVDSAADGDVPETDSLSDIDLETLEKFEEDVENGTDIDQVSGDYYGTDDQGGTAPSKE

SEQ ID NO: 6959 - DNA, 2565 bp, Pseudomonas syringae pv. syringae B728a
  CDS (1)..(2565): transl_table=11
atgcgtatcgacagattgaccagtaaattacagttagcgttatccgattcacagtcgctggccgttggcctcgaccatcccgccatcgaacctgcgcacttgatgcaggcgctgcttgagcagcagggcggttccatcaagcctctgctgttgcaggtaggcttcgacatcaacagcctgcgcaaggaactgagcgcagagctggaccgcctgccaaaaatccagaacccgaccggcgacgtcaacatgtcgcaggatctggcgcgcctgctcaaccaggctgaccgtctggcgcagcagaaaggcgaccagttcatttccagcgagctggtgctgctcgcggcaatggacgagaacagcaagctcggcaaattgttgctggggcagggcgtcagcaagaaggccctggaaaacgccatcaacaacctgcgcggcgaaggtgccgtgaatgacccgaacgtcgaagagtcgcgtcaggcgctggacaaatacaccgtcgacctgaccaagcgtgccgaagagggcaaactcgacccggtgatcggacgtgatgacgagattcgtcgcaccattcaggtcctgcagcggcgcaccaagaacaacccggtgttgatcggcgaacctggtgtgggcaagaccgccattgccgagggcctggcgcagcgcatcatcaatggcgaagtgccggatggcctgcgcggcaagcgcttgctgtcgctggacatgggcgcgttgattgccggtgccaagtaccgtggcgagttcgaagagcgcctcaaatcgctgctcaacgaactgtccaagcaggaaggccagatcatcctgttcatcgacgagttgcacaccatggtcggcgccggcaagggcgaaggctcgatggacgctggcaacatgctcaaacctgcgctggcgcgcggcgagctgcattgtgtgggggctaccacgctcaacgagtaccgccaatatatagagaaggatgcggcgcttgagcgtcgattccagaaagtcctggtcgacgagccaagtgaagaagacaccatcgcgatcctgcgtggcctcaaagagcgctacgaagtgcaccacaaggttgccatcaccgacggcgcgatcatcgcggcggccaagctgagccatcgctatatcaccgaccgccagttgccggacaaggccatcgacctgatcgacgaagcggccagccgtattcgcatggagatcgactccaagcctgaagtgctcgaccgccttgaacgtcgcctgatccagctgaaagtagaagctcaggcgctcaagaaggaaaaggacgaggcggcgatcaagcgtctggaaaaactccagggtgaaatcgagcgtcttgagcttgagtacgcggatcttgaagagatctggacctcggaaaaagccgaggtcaccggctcggcacagatccagcagaaaatcgaacagtctcgtcaggagctggaagccgctcgccgccgtggcgatctgaaccgcatggcggagttgcagtacgggatcattcccgacctggaacgcagcctgcaaatggtcgaccagcacggcaagccggaaaaccagttgctgcgcagcaaggtgaccgaggaagaaattgccgaggtcgtgtcgaagtggaccggtatcccggtgtcgaagatgctcgaaggcgagcgcgacaagctgttgcgcatggaaaccctgctgcacaaccgggtgatcggccaggaagaagcggtggtcgcggtctccaatgccgtgcgtcgttcgcgtgccgggctttccgaccctaatcgtccgagcggatcgttcatgttcctcggcccgaccggcgtgggcaagaccgagctgtgcaaggcgctggccgagttcctgttcgacaccgaagaggcaatggtgcgtatcgacatgtccgagttcatggagaaacattccgtggctcgcctgatcggtgcgccgccaggctacgtcggttacgaagagggcggctacctgaccgaagccgtgcgtcgcaaaccgtattcgctgattctgctcgacgaagtcgagaaggcgcattccgacgtgttcaacatcctcttgcaggtgcttgaagacggacgcttgactgacagccacgggcgtacggtggacttccgcaataccgtgatcgtcatgacctccaacctgggctcggcgcagatccaggaactggtcggtgatcgtgaggcgcagcgtgctgcggtaatggatgcggtcggtacgcacttccgtccggagttcgttaaccggatcgacgaagtggtgatcttcgaaccgctggcgcgtgaccagattgccggtatcaccgacatccagctgggccgcctgcgcaagcgtctggccgagcgcgagctgtcgatgaccctgagccccgaagcgctggacaagctgatcgcggttggttacgacccggtctatggcgcacggccgctgaagcgggcgattcagcgctggatcgagaacccgctggcgcagatgatcctctcgggcagcttcatgcccggcacgaccattaccggcaaggtggtcgacgacgagatcacgtttgtctga

SEQ ID NO: 6960 - protein, 854 aa, Pseudomonas syringae pv. syringae B728a
MRIDRLTSKLQLALSDSQSLAVGLDHPAIEPAHLMQALLEQQGGSIKPLLLQVGFDINSLRKELSAELDRLPKIQNPTGDVNMSQDLARLLNQADRLAQQKGDQFISSELVLLAAMDENSKLGKLLLGQGVSKKALENAINNLRGEGAVNDPNVEESRQALDKYTVDLTKRAEEGKLDPVIGRDDEIRRTIQVLQRRTKNNPVLIGEPGVGKTAIAEGLAQRIINGEVPDGLRGKRLLSLDMGALIAGAKYRGEFEERLKSLLNELSKQEGQIILFIDELHTMVGAGKGEGSMDAGNMLKPALARGELHCVGATTLNEYRQYIEKDAALERRFQKVLVDEPSEEDTIAILRGLKERYEVHHKVAITDGAIIAAAKLSHRYITDRQLPDKAIDLIDEAASRIRMEIDSKPEVLDRLERRLIQLKVEAQALKKEKDEAAIKRLEKLQGEIERLELEYADLEEIWTSEKAEVTGSAQIQQKIEQSRQELEAARRRGDLNRMAELQYGIIPDLERSLQMVDQHGKPENQLLRSKVTEEEIAEVVSKWTGIPVSKMLEGERDKLLRMETLLHNRVIGQEEAVVAVSNAVRRSRAGLSDPNRPSGSFMFLGPTGVGKTELCKALAEFLFDTEEAMVRIDMSEFMEKHSVARLIGAPPGYVGYEEGGYLTEAVRRKPYSLILLDEVEKAHSDVFNILLQVLEDGRLTDSHGRTVDFRNTVIVMTSNLGSAQIQELVGDREAQRAAVMDAVGTHFRPEFVNRIDEVVIFEPLARDQIAGITDIQLGRLRKRLAERELSMTLSPEALDKLIAVGYDPVYGARPLKRAIQRWIENPLAQMILSGSFMPGTTITGKVVDDEITFV

SEQ ID NO: 6961 - DNA, 2571 bp, Haemophilus influenzae 86-028NP
  CDS (1)..(2571): transl_table=11
atgaacattgaaaaatttacgacaaaattccaagaagcgttaagcgaagcacaatcacttgctatcggaaaagacaatcaatttattgaacccgtgcatttattgaccgcacttttaaatcaacagggcggctctattgcgccaattttgacagcaagtggcgtaaatgtggctttattgcgtaatgaattaaagacagaactaaataaattgccgcaagtgattggcaatggtggagatgtacaactttcacgccagcttattaatttacttaatctatgcgataaattcgcacagcaaaaccaagataaatttatttcgagcgaattgtttttgcttgcagctttagaagaacgaggaacgatcagcgatattttgaaaaagtgcggtgcgaaaaaagaacaaatttcgcaagctattcagcacattagagggggacaaaacgtgaacgatcaaaatgcagaagaaagcagacaagctcttgaaaaatatacgattgatttaaccgctcgtgcagaaagtggcaaacttgatcctgtaattgggcgtgatgaagaaattcgtcgagccattcaagtattacaacgtcgtaccaaaaataaccctgtgttaattggtgaaccaggtgtagggaaaacggcgattgtcgaaggcttggcacagcgtatcgtaaacggcgaagtgccagaaggtttgaaaaataaacgtgtgctttcattagatatgggcgcattgattgctggtgcaaaatatcgcggagaatttgaagaacgtttaaaagcggtgctcaatgaactttctaaagaagaaggtcgcgtgatcctctttattgatgaaattcatactatggtcggcgcgggtaaaaccgatggtgcgatggatgcgggtaacttattaaaaccaagtttagcgcgcggtgaattacattgcgtgggtgcaacaacgttagacgaatatcgtcaatatatcgaaaaagatgccgcacttgagcgccgtttccaaaaagtatttgtggacgaaccaagtgtagaagataccattgctatcttacgtggtttgaaagaacgctatgaaattcatcatcacgtggatattactgaccctgcgattgtcgctgccgcaacgctttcacatcgttatatttccgatcgtcaattgccggataaagccattgatttgatcgatgaagcggcgtctagcattcgtatggaaatagattctaaacctgaaccgcttgatcgccttgaacgtcgaattatccaattaaaattggaacaacaggcattacaaaaagaagaagacgaagcaagtcgcaaacgtttagaaatgttagagaaagaattggctgaaaaagaacgtgaatacgccgaacttgaagaagtatggaaatctgaaaaagcaacgctttctggctctcaacatattaaacaagaattagatactgcaaaaaccgaactagaacaagctcgtcgcgcgggtgatttagcgaaaatgtcagagttgcaatatggacgcatccctgctcttgaaaagcaactcgagcaagctgaaaccagcgaaggaaaagaaatgacgcttttacgctatcgtgtcacggatgaagaaatcgcagaagtgctttctaaagccacaggtattcctgtatccaaaatgatggaaggcgagaaagaaaaactcttgcgcatggaagatgaactacataaacgagtgattggtcaagaagaagcagttgatgcggtagcaaacgcgattcgtcgtagtcgtgctggtctttccgatcctaatcgcccaattggttcattcttgttcctagggccaacaggtgtgggtaaaacagagctttgcaaaactttggctaaattcttgtttgatagtgaagatgcgatggtgcgcattgatatgtcagagtttatggaaaagcacagtgtctctcgtttagtgggtgcgcctccaggctatgtcggctatgaagaaggcggttatttaactgaggctgttcgtcgtcgtccatattcagtgatcttattagatgaagttgaaaaagcccatgcggatgtattcaatatcttattacaagtattggatgatggtcgtttaactgacgggcaaggtcgtactgtggacttccgtaatacggtggtaattatgacctctaacttgggttctgatttaatccaaggtaacaaagacgaaagctatagcgaaatgaaagccttagtgatgtcagtggtaagccaacatttccgtcccgaattcatcaaccgtattgacgaaactgtggtattccatccgcttggtaaagagaatattcgtgcgattgcaagtatccaattagaacgcttagcaaaacgtatggaaactcgtggctatgaattagtgtttaccgacgctttattagatttcattggtgaagtggggtatgacccaatttatggtgcacgtccattgaaacgtgctattcaacaagagatcgaaaacagcttggcacaacaaattctatctggtgcgttattacctggtaaggttgttaccattgattacgccaacgcagaagttcaagctagacaatag

SEQ ID NO: 6962 - protein, 856 aa, Haemophilus influenzae 86-028NP
MNIEKFTTKFQEALSEAQSLAIGKDNQFIEPVHLLTALLNQQGGSIAPILTASGVNVALLRNELKTELNKLPQVIGNGGDVQLSRQLINLLNLCDKFAQQNQDKFISSELFLLAALEERGTISDILKKCGAKKEQISQAIQHIRGGQNVNDQNAEESRQALEKYTIDLTARAESGKLDPVIGRDEEIRRAIQVLQRRTKNNPVLIGEPGVGKTAIVEGLAQRIVNGEVPEGLKNKRVLSLDMGALIAGAKYRGEFEERLKAVLNELSKEEGRVILFIDEIHTMVGAGKTDGAMDAGNLLKPSLARGELHCVGATTLDEYRQYIEKDAALERRFQKVFVDEPSVEDTIAILRGLKERYEIHHHVDITDPAIVAAATLSHRYISDRQLPDKAIDLIDEAASSIRMEIDSKPEPLDRLERRIIQLKLEQQALQKEEDEASRKRLEMLEKELAEKEREYAELEEVWKSEKATLSGSQHIKQELDTAKTELEQARRAGDLAKMSELQYGRIPALEKQLEQAETSEGKEMTLLRYRVTDEEIAEVLSKATGIPVSKMMEGEKEKLLRMEDELHKRVIGQEEAVDAVANAIRRSRAGLSDPNRPIGSFLFLGPTGVGKTELCKTLAKFLFDSEDAMVRIDMSEFMEKHSVSRLVGAPPGYVGYEEGGYLTEAVRRRPYSVILLDEVEKAHADVFNILLQVLDDGRLTDGQGRTVDFRNTVVIMTSNLGSDLIQGNKDESYSEMKALVMSVVSQHFRPEFINRIDETVVFHPLGKENIRAIASIQLERLAKRMETRGYELVFTDALLDFIGEVGYDPIYGARPLKRAIQQEIENSLAQQILSGALLPGKVVTIDYANAEVQARQ

SEQ ID NO: 6963 - DNA, 2565 bp, Pseudomonas fluorescens Pf-5
  CDS (1)..(2565): transl_table=11
atgcgtatagaccgattaaccagcaaattgcagctggccttatccgattctcaatctctggcggttggcctcgatcatccggccattgaaccggcgcacctgatgcaggcgctgctggaacagcagggcggctcgatcaagcctctgctgatgcaggtgggcttcgacgtcaacagcctgcgcaaggaactgagcaaagagctcgaccaactgccgaaaatccagaaccccactggcgacgtcaacatgtcccaggatctggcgcgcctgctcaaccaggccgaccgcctggcgcagcagaaaggcgaccagttcatctccagcgagctggtgctactggccgccatggatgagaacagcaaactcggcaaattgttgctgggccagggcgtgagcaagaaagccctggagaacgctatcaacaacctgcgtggcggtgaggcggtgaatgacgccaacgtcgaagagtcgcgccaggccctggacaagtacaccgtcgacctgaccaagcgcgccgaagacggcaagcttgatccggtaatcggccgtgacgacgaaattcgccggaccatccaggtgctgcaacgccggaccaagaacaacccggtgctgattggtgaaccaggcgtgggtaagaccgccatcgccgaaggcctggcccagcggatcatcaacggcgaagtgcccgatggcctcaaaggcaagcgcttgctgtccctggacatgggcgccttgatcgccggtgccaaataccgtggcgagttcgaagaacgcctgaagtctttgcttaatgaactgtcgaagcaggaagggcagatcatcctgttcatcgatgagctgcacaccatggtcggcgctggtaaaggcgaaggctcgatggatgcgggcaatatgctcaagccggccctggcccgtggcgagctgcactgcgtgggcgccaccacgctcaacgaataccgccaatatatagagaaggacgcagccctcgagcggcgcttccagaaagtgttggtggatgagccgagcgaggaagacaccattgctatcctgcgcggcctgaaagagcgctatgaggtgcaccacaaggtggcgatcaccgacggcgcgatcattgccgcggccaagctcagccatcgttacatcactgaccggcaactgccggacaaggccatcgacctgatcgacgaggccgccagccgcatccgcatggagatcgactctaagccggaagtgctggaccgtctggagcggcgcctgattcagctcaaggttgaatcccaggccctgaagaaagaagacgacgaggccgcgatcaagcgcctggaaaaactccaggaagagattgtccgcctggagcgtgaatacgctgacctggaagaagtctggacctcggagaaagccgaagtgcagggttctgcgcagatccagcagaagatcgagcagtcgcgccaggaactggaagcggcgcgtcgtaaaggcgatctcaatcgtatggccgagctgcagtacggggtgatcccggacctggagcgcagcctgcagatggtcgaccagcacggccacagcgagaaccagttgctgcgcagcaaggttaccgaggaagagattgccgaagtggtgtccaagtggaccggcattccagtgtcgaaaatgcttgaaggcgagcgcgacaagctgctgaagatggaaagcctgctgcacgagcgggtgattggccagaacgaagccgtggtggcggtggccaacgctgtgcgccgttcccgagccgggttgtccgacccgaaccggcccagcggttcgttcatgttcctcggcccgaccggcgtgggtaagaccgaactgtgcaaggccctggcggaattcctcttcgataccgaagaggccatggtgcggatcgacatgtccgagttcatggagaaacattccgtggctcgcctgatcggtgcgccaccaggctatgtcggttatgaagagggcggttacctgaccgaagccgtgcgtcgcaagccgtactcggtgattctgctggacgaagtcgagaaggcgcacccggatgtgttcaacatcctgctgcaggtcctggaagatggccgtctgacggacagccacgggcgtaccgtggattttcgcaatacggtgatcgtcatgacctccaacctggggtcggcgcagatccaggaactggtaggggatcgcgaggcacaacgtgcggcggtgatggacgcggtgtccacccacttccggccggagttcatcaaccgggtcgacgaagtggtgatcttcgagcctctggcacgtgatcagatcgccggcatcacgcagatccagttgggtcgcctgcgcagtcgcctggcggagcgcgagctgagcctggaactgagcgacgaggccttggacaagctgatcgctgtgggttacgacccggtgtatggcgcacggccgctgaaacgggcgatccagcgctggatcgagaacccgttggcgcagttgatcctctccggcggtttcctgccgggagccacggttaccgcctcggtgcaggacgacgaaatcgtcttcgcctga

SEQ ID NO: 6964 - protein, 854 aa, Pseudomonas fluorescens Pf-5
MRIDRLTSKLQLALSDSQSLAVGLDHPAIEPAHLMQALLEQQGGSIKPLLMQVGFDVNSLRKELSKELDQLPKIQNPTGDVNMSQDLARLLNQADRLAQQKGDQFISSELVLLAAMDENSKLGKLLLGQGVSKKALENAINNLRGGEAVNDANVEESRQALDKYTVDLTKRAEDGKLDPVIGRDDEIRRTIQVLQRRTKNNPVLIGEPGVGKTAIAEGLAQRIINGEVPDGLKGKRLLSLDMGALIAGAKYRGEFEERLKSLLNELSKQEGQIILFIDELHTMVGAGKGEGSMDAGNMLKPALARGELHCVGATTLNEYRQYIEKDAALERRFQKVLVDEPSEEDTIAILRGLKERYEVHHKVAITDGAIIAAAKLSHRYITDRQLPDKAIDLIDEAASRIRMEIDSKPEVLDRLERRLIQLKVESQALKKEDDEAAIKRLEKLQEEIVRLEREYADLEEVWTSEKAEVQGSAQIQQKIEQSRQELEAARRKGDLNRMAELQYGVIPDLERSLQMVDQHGHSENQLLRSKVTEEEIAEVVSKWTGIPVSKMLEGERDKLLKMESLLHERVIGQNEAVVAVANAVRRSRAGLSDPNRPSGSFMFLGPTGVGKTELCKALAEFLFDTEEAMVRIDMSEFMEKHSVARLIGAPPGYVGYEEGGYLTEAVRRKPYSVILLDEVEKAHPDVFNILLQVLEDGRLTDSHGRTVDFRNTVIVMTSNLGSAQIQELVGDREAQRAAVMDAVSTHFRPEFINRVDEVVIFEPLARDQIAGITQIQLGRLRSRLAERELSLELSDEALDKLIAVGYDPVYGARPLKRAIQRWIENPLAQLILSGGFLPGATVTASVQDDEIVFA

SEQ ID NO: 6965 - DNA, 2598 bp, Psychrobacter arcticus 273-4
  CDS (1)..(2598): transl_table=11
atgagatttgaaaagtttactcaaaaactgcaatctgcgatacaagaggcacaaagtctggcgttagggcgtgaccataccggtattgatccggtgcacctgcttgcagtcttgctgcaagatgagtctaacttgtctatctgccaacaagcaggcgcgtctattcctgcgttaaaaaatggcgtggcaaaggcattagataaccaagcaacgatttcggagccgacaggtgatgtcaatcttaatccaaactcggttaagattttgaatttggcagatcgccaagcgcaaaaagaaggcgatgattttatcgcgactgaatgggtgatgttggcacttgctgagcaaggcgataccaaaaaaatatttgaaagtgctggcgttacagccaataaattaaaagcggtgattgagcaattgcgcggcgatgatactgtgaataatcaaaatgcagaagatcagcgtgatgcccttaataaatacaccattaacttaactgagcaagcagagcttggtaagcttgatccggtgattggtcgtgacgaagagattcgacgtactatccaagtgttgtcacgccgtaccaaaaacaatcctgtgctcatcggtgagccaggtgttggtaaaacggctattgtagaaggcttggcacaaaaaatcatcaatggtgatgtaccagaaggtttacgtcgtaaagaagtgctgtcgttggacttaggtgctttgattgctggtgcaaaattccgtggtgagtttgaagagcgtctcaaagcggtactcagtgacttatcgaagcaagaaggtaacgttatcttatttatcgatgagctacatacgctagttggggcaggtaaggcggatggtgcgatggacgccggtaatatgctaaaaccagcgcttgcacgtggtgagctgcattgcgtcggtgcgactactttagatgaatatcgtaagtatattgaaaaagatgcggcgcttgagcgtcgtttccaaaaagtattggttgatgagccgacggttgaagataccattgcgattttacgtggactaaaagagcgttatgagctgcatcatggggtcgatatccaagacagcgccatcattgcggctgctcgtatgagtcatcgttatatcactgatcgcaagctgccggataaagccattgacttgattgatgaagctgcgagtcgcttacgtatggagatggacagcaaacctgagtcactaggtaagctcgatagtcgtttgatacagctaaaaatgcagcgtgaagtgctcaaaaatgaagaagacgcgggcgcgcaagcagagcgtaaagtgcttgatgcacaaattgaagagctggaaaaagagtacgccgatcttaacgagatttggcaagcagaaaaagctttggttaaaggcagtcagcagttaaaagacgagctggacaaagcccgtattgcttatgataaagccagccgcgaaggcgattatgagaccatgagcaagctgcagtatgagacgataccgcagttagagcgccgtatccatgaatctgatttggcagagcaaaaagagcagactggtgaaaatagtggtgtaaaactgctgcgtaacaaagtcacggacaatgaaatcgccgaagtcgttgctgcagcgacgggtattccagttagtaaaatgctgcaaggcgaacgtgacaagatgctggcgatggaagaaaacctccatgagcgcgtcatcggtcaagatgaagcggtcgaagcagtagccaatgcagtacgccgtagccgtgctggcttgtctgatccaaaccgtccttcaggctcgttcttgtttttagggcctacgggtgtcggtaaaacagagctgaccaaatcgttggcgaacttcttgtttgattcagaagatgctatcgtccgtatcgatatgagtgagtacatggagaagcatagcgtcagccgtttggtgggcgcgcctccaggttatgtgggctatgaagaaggtggtgctttgacggaggcggtacgccgtaagccttatagtgtgattttgtttgatgaagttgaaaaagcgcatcctgatgtgtttaatatcttgctacaagtattggacgatggtcgcttgacggattcacaaggtcgcgtggtagacttcaaaaacaccgtcattattatgaccagtaacttgggttcgcacaaaatccaagaaatggttggcgagagctatgaagatatcaaagctgaggtgatggattcggttggacagcatttccgcccagagtttgtcaaccgtatcgatgagatcgtggtattccatccgctaggtatgtcacagatggctggtattgctgcgattcagttgaaccgcttgcgtcagcgtctatatgagcgtgagttggatatcgagttatcggcagatgcgatgaacaaactggttgcagttggctatgatcctgtttatggtgcgcgtccacttaaacgtgcgatccaacaagagattgaaaacccattatcattgaaattgctggcaggtgattttgtcgctggtgatatcatcaaagtcgatgtcggtgctgatgacaaactgacctttgataagcttagaatgagctaa

SEQ ID NO: 6966 - protein, 865 aa, Psychrobacter arcticus 273-4
MRFEKFTQKLQSAIQEAQSLALGRDHTGIDPVHLLAVLLQDESNLSICQQAGASIPALKNGVAKALDNQATISEPTGDVNLNPNSVKILNLADRQAQKEGDDFIATEWVMLALAEQGDTKKIFESAGVTANKLKAVIEQLRGDDTVNNQNAEDQRDALNKYTINLTEQAELGKLDPVIGRDEEIRRTIQVLSRRTKNNPVLIGEPGVGKTAIVEGLAQKIINGDVPEGLRRKEVLSLDLGALIAGAKFRGEFEERLKAVLSDLSKQEGNVILFIDELHTLVGAGKADGAMDAGNMLKPALARGELHCVGATTLDEYRKYIEKDAALERRFQKVLVDEPTVEDTIAILRGLKERYELHHGVDIQDSAIIAAARMSHRYITDRKLPDKAIDLIDEAASRLRMEMDSKPESLGKLDSRLIQLKMQREVLKNEEDAGAQAERKVLDAQIEELEKEYADLNEIWQAEKALVKGSQQLKDELDKARIAYDKASREGDYETMSKLQYETIPQLERRIHESDLAEQKEQTGENSGVKLLRNKVTDNEIAEVVAAATGIPVSKMLQGERDKMLAMEENLHERVIGQDEAVEAVANAVRRSRAGLSDPNRPSGSFLFLGPTGVGKTELTKSLANFLFDSEDAIVRIDMSEYMEKHSVSRLVGAPPGYVGYEEGGALTEAVRRKPYSVILFDEVEKAHPDVFNILLQVLDDGRLTDSQGRVVDFKNTVIIMTSNLGSHKIQEMVGESYEDIKAEVMDSVGQHFRPEFVNRIDEIVVFHPLGMSQMAGIAAIQLNRLRQRLYERELDIELSADAMNKLVAVGYDPVYGARPLKRAIQQEIENPLSLKLLAGDFVAGDIIKVDVGADDKLTFDKLRMS

SEQ ID NO: 6967 - DNA, 2586 bp, Colwellia psychrerythraea 34H
  CDS (1)..(2586): transl_table=11
atgcgattagatcgttttacccaatcatttcaagaatccattgccgatgcgcaatcacttgcccttggcaaagaccatcagttcattgaacccgttcatttaatgatggcgttattgaatcaaaacggcaattctatcattgcgttattgaagagtgcaggtattgatgtgcgctctttacgtcagaaactagatgaagcgttaagctcattagcacaagtgcaagacagcgctggcgatgtacaactatcagcagcttcagggcgaattttaaatctttgcgataagcatgcgcaaaaaatgtcagataaattcatttcctcagagatgtttttactcgcggttatcgatgataaaggtcctttaggtcaaatcctggccgaattaggcgcaaaccagcaacggataaagtcggcaatcgatcatgtacgaggtggtgaaaatgttgacgatcaaaatgcagaagatgttcgccaggccctaaataaatatacggttgatttaacagaacttgctgagcatggaaaacttgatcctgttatcggtcgagatgatgagatccgccgcactttgcaagtattacaacgacgtactaaaaacaatccagtactcatagggcaacccggtgttggtaaaactgccattgttgaaggtttagctcagcgcattgtgaataatgaagtgcctgaaggcttgaaaaataagcgagttttgtcactagatatgggatctcttgttgcaggagcaaaatatcgaggtgaatttgaagagcgtttaaaagctgttttaaatgaattgtcaaaagaagaagggcaagtcattctctttattgatgaattgcacactatggtcggtgctggaaagtcagatggtgctatggatgccggtaatatgttaaaaccagcattagcacgtggtgatttacattgtgtgggggccactacgcttgatgaatatcgaaagtatattgaaaaagatgctgcacttgaacgacgttttcaaaaagtactggtagaagagccaagtgtggaagataccattgcaattttacgtggtttaaaagaacgttatgaactgcatcattcggtaaatattaccgatccagctattgtcgctgccgcaacattatcccatcgctatatcagtgatcgacaattaccggataaagcgattgatcttattgacgaggccgcctcaagtattcgtttacagatggactccaaaccagaagatttagatagactcgaacgacggttaatacagttaaagcttgagcaaagagcattagaaaaggatgaagatgaggctaccatcaagcgtttggcaatcatttctcaacaaatttctgaaaagcagaaaaagtatgatgagttagatgaagtttggaccactgaaaaagcagcgctttatggcgctcatacgataaaagaagaacttgaacaagcacgaatagaacttgaagcggcaagacgaactggcgatttaaatcgcatgtctgagctgcagtatggaaaattaccagagctagaaaagcaattagatttagcaagccaagctgaaatgcaagaaatgactttattagccaataaagttactgaagttgaaatcgccgatgttcttagtcgcgcaaccggtattcctgttgctaaaatgttggagcaagagcgtgataaattattacatatggaagataacctacaccaaaatgtaattggtcaacatgaagcagtaacctcagtgtctaatgcgattagacgatcccgtgctggtttaagcgatcctaatcagccaattggttcatttttattcttaggcccaacgggtgttggtaaaacggagttaactaaagcgcttgcagagtttttatttgactcacaagatgctttaattcgtgttgatatgtcagagtttatggaaaaacactcggtcgcacgtctagtgggagctcctcctggttatgttggttatgaagagggtggttatctaaccgaagcagtacgcagaaaaccttactcagtcatcttacttgatgagatagaaaaagctcacccggatgtctttaatattttattacaagtcttagatgatggcagattaactgatgggcaaggcagaacagtagattttaaaaacactgttatcatcatgacctcaaatattggctctgacattattcaagagttagctggtgaaagtcagtatcaccagatgaaagaagaagtaatgaatacattaggtcagcattttaaacctgagtttattaatcgtgtcgatgagtcagtagtattccatccattggttgctgaacaaatcaagaaaattgcaaaaatacaaattgaagcgttagcagaccgattaatcgagcaagagctaaatttaactataaatgaagaagcactttcactcatttctgcggcgggattcgacccaatattcggtgcgagaccactgaaacgagcaatacagcaaggtgttgaaaacccattagcccaaaaaatactcggtaatgaatttactaaaggctgtattattgaagtgagtgttgtagaaggacaattagctttttctgctaaatcacctcattga

SEQ ID NO: 6968 - protein, 861 aa, Colwellia psychrerythraea 34H
MRLDRFTQSFQESIADAQSLALGKDHQFIEPVHLMMALLNQNGNSIIALLKSAGIDVRSLRQKLDEALSSLAQVQDSAGDVQLSAASGRILNLCDKHAQKMSDKFISSEMFLLAVIDDKGPLGQILAELGANQQRIKSAIDHVRGGENVDDQNAEDVRQALNKYTVDLTELAEHGKLDPVIGRDDEIRRTLQVLQRRTKNNPVLIGQPGVGKTAIVEGLAQRIVNNEVPEGLKNKRVLSLDMGSLVAGAKYRGEFEERLKAVLNELSKEEGQVILFIDELHTMVGAGKSDGAMDAGNMLKPALARGDLHCVGATTLDEYRKYIEKDAALERRFQKVLVEEPSVEDTIAILRGLKERYELHHSVNITDPAIVAAATLSHRYISDRQLPDKAIDLIDEAASSIRLQMDSKPEDLDRLERRLIQLKLEQRALEKDEDEATIKRLAIISQQISEKQKKYDELDEVWTTEKAALYGAHTIKEELEQARIELEAARRTGDLNRMSELQYGKLPELEKQLDLASQAEMQEMTLLANKVTEVEIADVLSRATGIPVAKMLEQERDKLLHMEDNLHQNVIGQHEAVTSVSNAIRRSRAGLSDPNQPIGSFLFLGPTGVGKTELTKALAEFLFDSQDALIRVDMSEFMEKHSVARLVGAPPGYVGYEEGGYLTEAVRRKPYSVILLDEIEKAHPDVFNILLQVLDDGRLTDGQGRTVDFKNTVIIMTSNIGSDIIQELAGESQYHQMKEEVMNTLGQHFKPEFINRVDESVVFHPLVAEQIKKIAKIQIEALADRLIEQELNLTINEEALSLISAAGFDPIFGARPLKRAIQQGVENPLAQKILGNEFTKGCIIEVSVVEGQLAFSAKSPH

SEQ ID NO: 6969 - DNA, 2565 bp, Pseudomonas syringae pv. phaseolicola 1448A
  CDS (1)..(2565): transl_table=11
atgcgtatcgacagattgaccagtaaattacagttagcgttatccgattcccagtcgctggccgttggcctcgaccatcccgccatcgaacctgcgcacttgatgcaggcgctgcttgagcagcagggcggttccatcaagcctctgctgttgcaggtaggcttcgacatcaacagcttgcgcaaggaactgagcgcagagctggaccgactgccaaaaatccagaaccccactggcgacgtcaacatgtcgcaggatcttgcgcgcctgcttaaccaggccgaccgtctggcacagcagaaaggcgatcaattcatttccagcgagctggtgctgctcgcggcaatggacgagaacagcaagctcggcaaattgttgctggggcagggcgtcagcaagaaagctctggaaaatgccatcaacaacctgcgcggcgaaggtgccgtgaatgaccctaacgtcgaagagtcgcgtcaggcgttggacaagtacaccgtcgacctgaccaagcgtgccgaagagggcaagctcgacccggtgatcggtcgtgatgacgagattcgtcgcaccattcaggtcctgcaacgccgtaccaagaacaacccggtgctgatcggtgagcctggcgtgggtaaaaccgctatcgccgaaggcctggcgcaacgcatcatcaacggcgaagtgccggatggcctgcgcggcaaacgcttgctgtcgctggacatgggcgcattgattgcaggtgccaagtaccgtggtgagttcgaagagcgcctgaaatcgctgctcaacgaactgtccaagcaggaaggccagatcatcctgttcatcgacgaactgcacaccatggtcggcgccggcaaaggcgaaggctcgatggacgctggcaatatgctcaagcctgcgctggctcgcggcgagctgcattgtgtcggtgccaccacgctcaacgagtaccgccaatatatagagaaggacgctgcgcttgagcgtcgtttccagaaagtgctggtggacgagccgagcgaagaagacaccatcgcaatcctgcgtggcctgaaagagcgctatgaagtgcaccacaaggtcgccattactgacggtgcgatcatcgccgcggccaagctgagccatcgctatatcaccgatcgccagttgcccgacaaggccatcgacctgatcgacgaagcggccagccgcattcgtatggagatcgattccaagcctgaagtgcttgatcgtcttgagcgtcgcctgatccagctgaaagtggaagctcaggcgctcaagaaggaaaaggatgaagcggctatcaagcgcttggaaaaactccaggaagaagtggtgcgccttgagaaggaatacgccgatctcgaagaaatctggacctcggaaaaagctgaagtaacgggctctgcacagatccagcagaaaatagagcagtcccgtcaggaactggaagcggcgcgtcgtcgtggcgacctgaaccgcatggccgagttgcagtacgggatcattccggacctggaacgcagcctgcaaatggtcgatcagcacggcaaacccgagaaccaattgctgcgcagcaaagtgaccgaggaagaaattgccgaagtcgtgtcaaagtggaccggtattcccgtgtcgaaaatgctggaaggcgagcgcgagaagctgttgcgcatggaaaccctgctgcacaaccgggtaatcggtcaggaagaagcggtggtcgcggtctccaatgccgtacgtcgttcgcgtgcagggctttccgacccgaatcgtccaagcggttcgttcatgttcctcggtccgaccggtgtgggtaagaccgaactctgcaaggcgcttgccgaattcctgttcgataccgaagaggcgatggtgcgtatcgatatgtccgagttcatggagaaacattccgtggctcgtctgatcggcgcaccaccgggctatgtcggttacgaagagggcggctacctgaccgaagctgtgcgtcgcaagccgtactcgctgatcctgctcgatgaggtcgagaaggcacattccgacgtgttcaacatcctgttgcaggtgcttgaagacgggcgcctgactgacagccacgggcggacggtggacttccgcaataccgtgatcgtcatgacctccaacctgggctcggcccagatccaggaactggtcggtgatcgtgaggcgcaacgtgctgcggtgatggatgcggtgggtacgcacttccgtccggaatttgtgaaccggattgacgaagtggtgatcttcgaaccgctggcgcgtgaccagatcgccggtatcaccgatatccagctgggccgcctgcgcaagcgtctggctgagcgcgagctggcgctgaccctgagccccgaggcgctggacaagctgattgccgtcggttacgacccggtctatggagcacggccgctgaagcgggcgatccagcgctggatcgagaacccgctggcacagatgatcctctcgggcagcttcatgcccggtaccaccatcaccggcaaggtggtcgacgacgagatcgtgtttgcctga

SEQ ID NO: 6970 - protein, 854 aa, Pseudomonas syringae pv. phaseolicola 1448A
MRIDRLTSKLQLALSDSQSLAVGLDHPAIEPAHLMQALLEQQGGSIKPLLLQVGFDINSLRKELSAELDRLPKIQNPTGDVNMSQDLARLLNQADRLAQQKGDQFISSELVLLAAMDENSKLGKLLLGQGVSKKALENAINNLRGEGAVNDPNVEESRQALDKYTVDLTKRAEEGKLDPVIGRDDEIRRTIQVLQRRTKNNPVLIGEPGVGKTAIAEGLAQRIINGEVPDGLRGKRLLSLDMGALIAGAKYRGEFEERLKSLLNELSKQEGQIILFIDELHTMVGAGKGEGSMDAGNMLKPALARGELHCVGATTLNEYRQYIEKDAALERRFQKVLVDEPSEEDTIAILRGLKERYEVHHKVAITDGAIIAAAKLSHRYITDRQLPDKAIDLIDEAASRIRMEIDSKPEVLDRLERRLIQLKVEAQALKKEKDEAAIKRLEKLQEEVVRLEKEYADLEEIWTSEKAEVTGSAQIQQKIEQSRQELEAARRRGDLNRMAELQYGIIPDLERSLQMVDQHGKPENQLLRSKVTEEEIAEVVSKWTGIPVSKMLEGEREKLLRMETLLHNRVIGQEEAVVAVSNAVRRSRAGLSDPNRPSGSFMFLGPTGVGKTELCKALAEFLFDTEEAMVRIDMSEFMEKHSVARLIGAPPGYVGYEEGGYLTEAVRRKPYSLILLDEVEKAHSDVFNILLQVLEDGRLTDSHGRTVDFRNTVIVMTSNLGSAQIQELVGDREAQRAAVMDAVGTHFRPEFVNRIDEVVIFEPLARDQIAGITDIQLGRLRKRLAERELALTLSPEALDKLIAVGYDPVYGARPLKRAIQRWIENPLAQMILSGSFMPGTTITGKVVDDEIVFA

SEQ ID NO: 6971 - DNA, 2592 bp, Dechloromonas aromatica RCB
  CDS (1)..(2592): transl_table=11
atgcgccttgataagtttacgaccaaatttcagcagtctttagccgatgcccaaagtctggccattggcggcgaccagcaattcatcgaaccgcagcacctgctgctcgccctgatcaatcaggatgacggcggaacgacctcgttgctgtcgcgcgccggtgttaacgtacccggcctgaagcgcgatcttgaacaggcgctgacccgtttgccacaagtccagggccacggcggtgatgtctccattggccgcgacctgaacaacctgctcaatctgaccgacaaggaagctcagaagcgtggcgaccagttcatcgccagcgagatgttcctgctcgccttgtgcgacgacaagaacgaaaccggccgcattgccaagcagcatggcttttcccgcaagtccatcgaagcggcgatcatggccgtgcgtggtggacagggggtcgattctcaggaagctgaaggtcagcgcgaatcgctgaagaaatactgcatcgatctgaccgaacgcgccgctcaggggaaactcgacccggtcatcggtcgcgacgatgaaatccgccgcgctatccagatcctgcagcgccgcaccaagaacaacccggtgctgatcggcgagccgggtgttggcaagacggccatcgtcgaggggttggcccagcgtatcgtcaatgaagaagtgccggaaaccctgaagggcaagaaggtgctggtcctcgatatggccggcctgctggccggggccaagtatcgcggtgaattcgaggagcgcctgaaagccgtgctcaaggaagtggcgcaggacgaaggtcgcatcatcctgttcatcgacgaactgcacaccatggtcggcgccggtaaggctgaaggtgccatcgacgcgggcaacatgctgaaaccagcattggcgcgtggcgaactgcactgcatcggtgcgacgacactgaacgaataccgcaaatatatcgagaaggacgccgcgctggagcgtcgtttccagaaggtgctggtcgaggagccgagcgtcgaatcgaccatcgccatcctgcgcggcctgcaggaaaagtacgagctgcaccacggcgtcgatatcaccgacccggccatcgttgctgccgccgagttgtcgcaccgctacatcaccgaccgcttcctgccggacaaggcgatcgacctgatcgacgaagctgcggcccgcatcaagatggaaatcgattccaagccggaagtgatggacaagctggatcgtcgcatcatccagctcaagatcgagcgcgaggcggtcaagaaagaaaaggacgaggcttccaagaagcgatttggcctgatcgaagaggaaatcgccaagctgaccaaggaatactccgacctggaagaggtttggaaagccgagaagtccgctgtgcttggttctgcccagatcaaggaagaaatcgatcatctgaaggctgacatcgcccgcctgcagcgcgaaggcaaactaggcgaagtggccgaactgcaatacggcaagctgccacagctggaagcgcagttgaaggctgccgagaaagctggcgagggcgaaggtcgaaagaacaagctgctgcgcacgcaggttggcgccgaggaaatcgccgaggtggtctcccgtgccacgggtattccggtcagcaagatgatgcagggcgagcgcgagaagctgctcaacatggaagaccggctgcacaagcgcgtcgtcggtcaggatgaagcggtgcgcctggtgggcgacgccattcgtcgttcgcgggccggtctgtccgatcccaaccgtccgtacggatccttcctgttccttggcccgaccggtgtcggcaaaaccgagctgtgcaaggcgctggccgagttcatgttcgacgccgaagaccacctgatccgcatcgacatgagcgagttcatggagaagcactcggtcgcccgcctgatcggcgcgccgccgggctacgttggctacgaagagggcggttacctgaccgaagccgtgcgtcgcaagccgtacagcgtgatcctgctcgatgaggtcgagaaggcccacccggatgtcttcaacgtgctgctgcaggtgctcgacgatggccggatgaccgatggccaggggcgcacggtggacttcaagaacaccgtgatcgtgatgacctccaacctcggcagccagatgatccagcagatgtcaggcgacgactacggcgtgatcaaggtcgcggtgatggccgaggtcaagaactacttccggccggagttcatcaaccggattgacgaagtggtggtcttccatgcgctggacgaaaagcatatcgccggcatcgcgaagattcagctaggctatctcgaaaagcgcctggcccagctcgaaatgggcatcgtggttgaagacagcgcactggccgaactggcgcaggccgggttcgacccggtgttcggggcacgtccgctcaagcgggcgatccagcagcagatcgagaatccgctggccaaggccatcctggaagggaagtttggcgccaaggatacgatcaatgttagctgcgatcctgccaccggcggcatcatgcgcttcagcaaggcctga

SEQ ID NO: 6972 - protein, 863 aa, Dechloromonas aromatica RCB
MRLDKFTTKFQQSLADAQSLAIGGDQQFIEPQHLLLALINQDDGGTTSLLSRAGVNVPGLKRDLEQALTRLPQVQGHGGDVSIGRDLNNLLNLTDKEAQKRGDQFIASEMFLLALCDDKNETGRIAKQHGFSRKSIEAAIMAVRGGQGVDSQEAEGQRESLKKYCIDLTERAAQGKLDPVIGRDDEIRRAIQILQRRTKNNPVLIGEPGVGKTAIVEGLAQRIVNEEVPETLKGKKVLVLDMAGLLAGAKYRGEFEERLKAVLKEVAQDEGRIILFIDELHTMVGAGKAEGAIDAGNMLKPALARGELHCIGATTLNEYRKYIEKDAALERRFQKVLVEEPSVESTIAILRGLQEKYELHHGVDITDPAIVAAAELSHRYITDRFLPDKAIDLIDEAAARIKMEIDSKPEVMDKLDRRIIQLKIEREAVKKEKDEASKKRFGLIEEEIAKLTKEYSDLEEVWKAEKSAVLGSAQIKEEIDHLKADIARLQREGKLGEVAELQYGKLPQLEAQLKAAEKAGEGEGRKNKLLRTQVGAEEIAEVVSRATGIPVSKMMQGEREKLLNMEDRLHKRVVGQDEAVRLVGDAIRRSRAGLSDPNRPYGSFLFLGPTGVGKTELCKALAEFMFDAEDHLIRIDMSEFMEKHSVARLIGAPPGYVGYEEGGYLTEAVRRKPYSVILLDEVEKAHPDVFNVLLQVLDDGRMTDGQGRTVDFKNTVIVMTSNLGSQMIQQMSGDDYGVIKVAVMAEVKNYFRPEFINRIDEVVVFHALDEKHIAGIAKIQLGYLEKRLAQLEMGIVVEDSALAELAQAGFDPVFGARPLKRAIQQQIENPLAKAILEGKFGAKDTINVSCDPATGGIMRFSKA

SEQ ID NO: 6973 - DNA, 2604 bp, Thermobifida fusca YX
  CDS (1)..(2604): transl_table=11
atggattataagctcaccaggaagagtcaggaggcgttgtccgcggcaatccggagggcaaccgcggacggtaacccccaggtcgaaccggtgcacctgctgtctgccctgatcggccaggctgaaggagtcgtccggcccctgctcaaagaggtgggggccgatccaggcaggctcagcaccaaggtggaagaggagatcgcccgactgcctcgcgcgtcggggagtacggtcaacgcgccggcgagctcccggcagctcatcatttcgctgaacacggcggcccagcgcgccaagcagatggaggacgagtacgtctccaccgagcacctgctggtcgggctggccgcggacggggggacggcagccaccctgctgcgggaggcaggcgcgacaccggaagcgctgctggacgcgttcagccgggtgcggggcagcgcccgtgtcacttcggagaccccggaagacacctaccaggcgctcgagaagtacggggtggacctcacccagcgggcccgcgaaggcaaactggacccggttatcggcagagacgcggagatccgccgggtgatccaggtgctgtcccggcgcaccaagaacaacccggtgctcattggtgaaccgggtgtcggcaagaccgcggtggtcgagggcctcgcccagcgtattgtcgccggcgacgtccccgagtcgctgcgcgacaagcggctgatctcgctggacttgcccgcgatggtggcgggtgccaagtaccggggcgagttcgaggagcggctcaaagcggtcctcaacgagatcaagcagagcgaagggcagatcatcacgttcatcgacgagctgcacaccgtggtcggcgcgggtgcggccgagggggcgatggacgcgggcaacatgctcaagcccatgctggcccgaggcgaactgcgcatggtcggggcgaccacgctcgacgagtaccgcgaacgcatcgagaaggacccggcgctggagcggcggttccagcaggtgatggtgaacgagccgtccgcggccgacacgatcgcgatcctgcgcggcctcaagggccgttacgaggcgcaccacaaggtgcagatcgccgactcggcgctggtggcggcggcgaccctgtccgaccggtacatcactgcccggttcctgccggacaaggccatcgacttgatcgacgaggcagcatcccggctgcgcatggagatcgactcccagccggtggagatcgacgaactgcagcgcgtggtcgaccggctcaagatggaggagatggcgttgagcaaggagtccgacgccgcctccaagcagcggctggaacggctgcgcgccgacctcgccgacaaggaggagcagctcaatgcgctcatcgcccgctgggagcaggagaaggccgggctcaaccgggtcggtgagctcaaggagaagctggatgagctgcggggccaggccgaacgcgcccagcgcgacggcgacttcgaggaagcctcccggttgatgtacggggagatcccgcaactggagcggcagttggaggaggctctctccgaggaagactcggccgagcacgctaccatggtcaaggaggaggtcggcgccgacgacgtggccgatgtggtgtcgtcgtggaccggtatccccgtggggcggctcatggagggggagagcgccaagctgctccggatggaggaggagatcggaaagcgcctgatcgggcagcggcgcgctgtggccgccgtctccgatgcggtgcggcgggcccgcgcggggatctccgaccctgaccggccgaccggctccttcctgttcctcggccccaccggcgtgggtaagacggagctggcgaaggcgctcgccgagttcctgttcgacgacgagcgcgcgattgtgcgcctcgacatgagcgagtactccgagaagcactcggtggcccgactggtcggtgcgccccccggctacgtcggctacgaggagggcggccagctcaccgaggcggtgcggcggcgcccctacacggtggtgctgctcgacgaggtggagaaggcccacatcgaggtcttcgacaccctgctgcaggtcttggacgacgggcggctcaccgacgggcagggccgccaggtggacttccgcaacacgctgctgatcctgacctccaacctggggtcgcagttcctcatcgaccccacgctggacgacgcccagcggcacgagaaggtcatgcaggtggtgcggaacaccttcaaaccggagttcttgaaccggttggacgacgtgatcgtgttcgacgcgctgtccaccgacgacctgaccaagatcgtcgacctgcaggtggatcggctggcccggcggctggcggaccggaggctcaagctggaggtcactccggctgcccgcgagtggctggcgctggccggctacgacccggtctacggtgcgcgtccgctgcggcggctggtgcagaccgcgatcggcgacccgctggcccgggaactgctggcgggcaacctcgttgagggcgacacagtccgggtggatgtggacgagtccaaggattcgttgacagtgggtccggtgaaggagcccgcgtccgccgcataa

SEQ ID NO: 6974 - protein, 867 aa, Thermobifida fusca YX
MDYKLTRKSQEALSAAIRRATADGNPQVEPVHLLSALIGQAEGVVRPLLKEVGADPGRLSTKVEEEIARLPRASGSTVNAPASSRQLIISLNTAAQRAKQMEDEYVSTEHLLVGLAADGGTAATLLREAGATPEALLDAFSRVRGSARVTSETPEDTYQALEKYGVDLTQRAREGKLDPVIGRDAEIRRVIQVLSRRTKNNPVLIGEPGVGKTAVVEGLAQRIVAGDVPESLRDKRLISLDLPAMVAGAKYRGEFEERLKAVLNEIKQSEGQIITFIDELHTVVGAGAAEGAMDAGNMLKPMLARGELRMVGATTLDEYRERIEKDPALERRFQQVMVNEPSAADTIAILRGLKGRYEAHHKVQIADSALVAAATLSDRYITARFLPDKAIDLIDEAASRLRMEIDSQPVEIDELQRVVDRLKMEEMALSKESDAASKQRLERLRADLADKEEQLNALIARWEQEKAGLNRVGELKEKLDELRGQAERAQRDGDFEEASRLMYGEIPQLERQLEEALSEEDSAEHATMVKEEVGADDVADVVSSWTGIPVGRLMEGESAKLLRMEEEIGKRLIGQRRAVAAVSDAVRRARAGISDPDRPTGSFLFLGPTGVGKTELAKALAEFLFDDERAIVRLDMSEYSEKHSVARLVGAPPGYVGYEEGGQLTEAVRRRPYTVVLLDEVEKAHIEVFDTLLQVLDDGRLTDGQGRQVDFRNTLLILTSNLGSQFLIDPTLDDAQRHEKVMQVVRNTFKPEFLNRLDDVIVFDALSTDDLTKIVDLQVDRLARRLADRRLKLEVTPAAREWLALAGYDPVYGARPLRRLVQTAIGDPLARELLAGNLVEGDTVRVDVDESKDSLTVGPVKEPASAA

SEQ ID NO: 6975 - DNA, 2589 bp, Ralstonia eutropha JMP134
  CDS (1)..(2589): transl_table=11
atgcgtcttgacaaactgactacccggttccaggaagcgctggctgatgcgcaaagcctggcactggccaatgacaaccaatacatcgaaccgcagcacctgctgcgtgcgctgattgcgcagaacgacggcgcagccaaggcgctgctgcagcgcgccggcgtcaacgtgaacggcttgcagaccgcgctggatgcggccatcaagcgtctgccgcaagtgcagggcaccagcgaggtccaggtgggccgcgatctggtcaatctgcttaacgccgccgagaaagaatccatcaagcgcggcgaccagttcatcgccagcgagctgttcctgcttgccgtgtcggaagacaaaggcgaggccgggcgcattgcgcgcgagaacgggctgaaccgcaagccattggaagcggccatccaggccgtgcgcggcggcgatgccgtcaatagcgccgacgccgaaacgcagcgtgaggcgctcaagaagtacaccatcgacctgaccgagcgcgctcgaatgggcaagctcgacccggtgatcggccgcgacgacgagattcgacgtgcgattcagatcctgcagcgccgcaccaagaacaacccggtcctgatcggcgagccgggcgtgggcaagaccgcgatcgtcgaaggcctcgcgcagcgcatcgtcaacggcgaagtgcccgaaagcctgaagaacaagcgcgtgctggtgctcgacatggccggcctgctggctggcgccaagtaccgcggcgagttcgaggaacgcctgaaggccgtgctgaacgatgtggccaaggatgaaggccagaccatcgtctttatcgacgagatccacaccatggtcggcgccggcaaggctgaaggcgcgatcgacgcgggcaacatgctcaagccggcgctggcgcgcggcgagctgcactgcatcggcgcgaccacgctggacgagtaccgcaagtacatcgaaaaggacgccgcgctcgagcgccgtttccagaaagtgctggtcgatgagccgagcgtggaggcgaccatcgccatcctgcgcggcttgcaggaaaagtatgagctgcaccatggcgttgaaatcaccgacccggccatcgtcgctgcggcggagctgtcgcatcgctatatcaccgaccgcttcctgcccgacaaggccatcgacctgatcgacgaggcggctgcgcgcatcaagatggaaatcgactccaagccggaggcgatggacaagctcgagcgccgcaccatccagctcaagatcgaacgcgaggcggtcaagaaagagaccgacgaagcgtcgctcaagcgcctggacctgatcgagcaggagatcacgcgcctggaaaaggagtatgcggatctcgacgagatctggaaggccgaaaagggcgccgctcagggtacggctgcgctgaaggaagagatcgagaaggtcaagctggagatcgccaagctgcagcgcgaaggcaagctcgacaaggtggcggaactgcagtacggcaagctgccgggcctggagggcaaactcaaggctgcgaccgacgccgaagcgagcgagcagaagcagcccaacaagctgttgcgcacgcaagtcggtgccgaggaaatcgccgaagtggtgagccgcgcgacgggcatcccggtatcgaagatgatgcagggcgagcgcgagaagctgctcaagatggaagaccgactgcacaaccgcgtggtgggccaggacgaagccgtgcggctggtgtccgatgccatccgccgttcgcgtgcgggcctcgcggacgagaacaagccgtatggctcgttcctgttcctgggaccgaccggtgtcggcaagaccgaactgtgcaaggccctggccgagttcctgttcgattcggaagagcacctgatccgcatcgacatgagcgagttcatggagaagcacagcgtgagccgcctgatcggcgcgccgccgggatatgtcggatatgaagagggtggttacctgaccgaagccgtgcgccgcaagccgtacagcgtggtgctgctcgacgaagtcgagaaggcacacccggacgttttcaacgtgctgctgcaggtgctggacgatggccgcctgaccgatggccagggacgtacggtggacttcaagaacaccgtgatcgtgatgacgtccaacctcggttcgcagatcatccagtcgatggtgggcgagccgcaggaagcggtgaagggcgcggtatggcaggaggtgcgcacgcatttccggcccgagttcctgaaccggatcgacgaagtcgtggtgttccacgcactcgaccagaagaacatcgagtcgatcgcgcgcatccagctgcaacgcctgcagggtcgcctggcccgcatggacatgacgctggaggtcagcgaactggcgctggagaagatcgcgagcgcgggttacgacccggtgttcggggcccgtccgctcaagcgggcgatccagcagcagatcgaaaacccggtggcacgtgccatcctggaaggaaagtttgctgcgaaggatgtggtgccggtggactatgccgatggggcgtttgtgatcggtggagttgcccagtaa

SEQ ID NO: 6976 - protein, 862 aa, Ralstonia eutropha JMP134
MRLDKLTTRFQEALADAQSLALANDNQYIEPQHLLRALIAQNDGAAKALLQRAGVNVNGLQTALDAAIKRLPQVQGTSEVQVGRDLVNLLNAAEKESIKRGDQFIASELFLLAVSEDKGEAGRIARENGLNRKPLEAAIQAVRGGDAVNSADAETQREALKKYTIDLTERARMGKLDPVIGRDDEIRRAIQILQRRTKNNPVLIGEPGVGKTAIVEGLAQRIVNGEVPESLKNKRVLVLDMAGLLAGAKYRGEFEERLKAVLNDVAKDEGQTIVFIDEIHTMVGAGKAEGAIDAGNMLKPALARGELHCIGATTLDEYRKYIEKDAALERRFQKVLVDEPSVEATIAILRGLQEKYELHHGVEITDPAIVAAAELSHRYITDRFLPDKAIDLIDEAAARIKMEIDSKPEAMDKLERRTIQLKIEREAVKKETDEASLKRLDLIEQEITRLEKEYADLDEIWKAEKGAAQGTAALKEEIEKVKLEIAKLQREGKLDKVAELQYGKLPGLEGKLKAATDAEASEQKQPNKLLRTQVGAEEIAEVVSRATGIPVSKMMQGEREKLLKMEDRLHNRVVGQDEAVRLVSDAIRRSRAGLADENKPYGSFLFLGPTGVGKTELCKALAEFLFDSEEHLIRIDMSEFMEKHSVSRLIGAPPGYVGYEEGGYLTEAVRRKPYSVVLLDEVEKAHPDVFNVLLQVLDDGRLTDGQGRTVDFKNTVIVMTSNLGSQIIQSMVGEPQEAVKGAVWQEVRTHFRPEFLNRIDEVVVFHALDQKNIESIARIQLQRLQGRLARMDMTLEVSELALEKIASAGYDPVFGARPLKRAIQQQIENPVARAILEGKFAAKDVVPVDYADGAFVIGGVAQ

SEQ ID NO: 6977 - DNA, 2574 bp, Ehrlichia canis str. Jake
  CDS (1)..(2574): transl_table=11
atggatctcaataaatttactgatgtgtcaaagaatttgataatgcaatcgcagactgcagcagttgcattaggccatcaatctttggtaccggaacatttgctgaaagtaatgttggatgaaaaggatgaacttgttgaattattgttgacttcatgtgggtgtgatattgataagatatacaatgatgtaaagctttctttgaataaattacctgttgtaagtgggagtggaagcggtcatatacatttatcaagagaaatggcacaagttttagaagaagcagttagtttagcgaaaaggaatcaagatacttatgttactgtagagagattattgcaggctcttgcgatagttaaagatagtaatgtttgtaagatattaagtgcacatggagtaactccagtaaagttggagtcattaatattgaatatgcgtaatggaactaaagctgatagtgttaactctgagcagaaatttaatgctctaaaaaaatatgctaaagatattactgaggctgctatggctggaaaacttgatccagtgattggaagagatgaagaaattagacgtacgatgcaggttttatcacgtaggacaaaaaataatcctgtattgattggagatcctggagttggtaagacagcaattattgaaggattagcacaacgtgttgtaataggcgatgttcctgttggattaagaaatacaaaaattatggcattggatcttggaatgcttgttgctggtacaaagtatcgaggtgagtttgaagaaagattaaaagctgtgattaatgaaatagtagcatctaatggtgcggttatattatttattgatgaattgcatactttagttggtgcaggtgctactgatggtgcgatggatgcatctaatctattgaaaccagccttagcaaggggtgagatacattgtataggtgcaacaacattagatgagtatagacagcatatagaaaaagatgcagcattagctagaagatttcaacctgtatttatttctgaacctactgttaatgatactatatctattttacgtggcttaaaggaaaaatacgaaatacaccatggaattaggattatggatagtgcgataattgcagcgtcaactttatcaaaccgttatatcactgatagatttttaccagataaggctatcgatttaattgatgaagcagcgagtcgtgcaagaatagaaattgatagtaagcctgaagtaattgatgagttggataggaaaattattcaattaaaaattgaggcaggagttttagagaaggagaatactgaatcttcgaaacagcgtttagtaaagttaaatgaggagttagataagttaaatattcaggcagctgagttaaatagtaaatggcaagctgaaaaaataaagatattaaaaatgcaggaatgtgcagaaaagttggataatgcgagaagcgatttagaaaaagctcagaggtctggtaatttggcaaaagctggtgaattaatgtacggaattatacctgagcttgaaaaggaattaaaaaaatgtgagaagcctagtagtaacatgttaaaaagggaagttacagaagatgatatagcaaatattgtgtcaagatggacaggtatccctattgaaaacatgatgagtagtgaaagagaaaaattactacggatggaagaggagataggaaaaacagttattgggcaagaaagtgccattaaagcagtaagtgatgctgttagaagatcacgtgcaggtgtacaagatgctaataaacctttaggatcttttttatttcttgggcctactggtgtaggaaaaacagaattagttaagacattagctgaatttttattctgtgatagatctgctcttttaaggtttgatatgtcagagtttatggaaaagcatgctgtatctagattaataggtgcacctccagggtatgtaggatatgatcaaggaggtatgttaactgaagctgttagaagaaggccttatcaagtaatactttttgatgaaatagaaaaagcacatggtgatatttttaatattttgttgcaagtattagatgaggggcgcctaacagataatcatggtaaattggttgatttccgtaatacaatattagttttaacatcaaacttaggacaggagatattaatcaatactgaagaagatgttgatgaagattcaataaagcaatctatgactagtgtattacaacatcattttcgtccagaatttctcaataggttagatgaaattattatattccataaattaactaaagcacatatagagaaaattatagatgtacaattttctatattgcaaaaaattgttgcacagaaaaaattagaaattagtttgtctttaagagcgaaatcttggttaatagataatggttatgattctttatatggtgcaaggcctttaaaaagattaatacaacaaagaatacaaaatagtttagcaaagttaattcttgcaaatcaagttaatgaagggaataaacttgaagtagatgtatcaggtgatgatttagtgattaataagctgtag

SEQ ID NO: 6978 - protein, 857 aa, Ehrlichia canis str. Jake
MDLNKFTDVSKNLIMQSQTAAVALGHQSLVPEHLLKVMLDEKDELVELLLTSCGCDIDKIYNDVKLSLNKLPVVSGSGSGHIHLSREMAQVLEEAVSLAKRNQDTYVTVERLLQALAIVKDSNVCKILSAHGVTPVKLESLILNMRNGTKADSVNSEQKFNALKKYAKDITEAAMAGKLDPVIGRDEEIRRTMQVLSRRTKNNPVLIGDPGVGKTAIIEGLAQRVVIGDVPVGLRNTKIMALDLGMLVAGTKYRGEFEERLKAVINEIVASNGAVILFIDELHTLVGAGATDGAMDASNLLKPALARGEIHCIGATTLDEYRQHIEKDAALARRFQPVFISEPTVNDTISILRGLKEKYEIHHGIRIMDSAIIAASTLSNRYITDRFLPDKAIDLIDEAASRARIEIDSKPEVIDELDRKIIQLKIEAGVLEKENTESSKQRLVKLNEELDKLNIQAAELNSKWQAEKIKILKMQECAEKLDNARSDLEKAQRSGNLAKAGELMYGIIPELEKELKKCEKPSSNMLKREVTEDDIANIVSRWTGIPIENMMSSEREKLLRMEEEIGKTVIGQESAIKAVSDAVRRSRAGVQDANKPLGSFLFLGPTGVGKTELVKTLAEFLFCDRSALLRFDMSEFMEKHAVSRLIGAPPGYVGYDQGGMLTEAVRRRPYQVILFDEIEKAHGDIFNILLQVLDEGRLTDNHGKLVDFRNTILVLTSNLGQEILINTEEDVDEDSIKQSMTSVLQHHFRPEFLNRLDEIIIFHKLTKAHIEKIIDVQFSILQKIVAQKKLEISLSLRAKSWLIDNGYDSLYGARPLKRLIQQRIQNSLAKLILANQVNEGNKLEVDVSGDDLVINKL

SEQ ID NO: 6979 - DNA, 2580 bp, Thiobacillus denitrificans ATCC 25259
  CDS (1)..(2580): transl_table=11
atgcgttttgacaagctcaccacccagttccagcaggcgctttccgacgcgcaaagcctggccgtcggcggcgaccacgcctacatcgagccgcagcacctgctgctcgccctgctcaaccaggagggcggcggcgcggggtcgatcctcggccgcgccggcgtccaggtcccggcgctcaaggccgcgttgacccaggcattgacgcgcctgcccaaggtgcaggggcagggcggcgaggtcagcatctcgcgcgacctcaacaacctgctcaacctgaccgacaaggaggcgatgaagcgcaacgacgcctacatcgcatcggagcttttcctgctcgccgcgctcgacgacaaaggcgagaccgggcgcctgctgaaacagcacggcgcgcagaagaccgcgctggaacaggccatccaggccgtgcgcggcggcgagaacgtgcagtcgcaggaagccgaaggccagcgcgaagcgctcgccaaatacaccctcgacctcacgcagcgcgcgcgtgacggcaagctcgacccggtcatcgggcgcgacgacgagattcgccgctcgatccagatcctgcagcgccgcaccaagaacaaccccgtgctgatcggcgaacccggcgtcggcaagaccgcgatcgtcgaaggtctcgcgcagcgcatcgtcaacgacgaggtgccggaaacgctcaagggcaagaaggtgctggtgctcgacctcgccgcgctgctcgccggcgcgaaataccgcggcgaattcgaggagcgcctgaaggccgtgctcaaggagctcgcgatggaccccggccgctacatcgtcttcctcgacgaaatccacacgctcgtcggggccggcaaggccgaaggcgcgatcgacgccggcaacatgctgaagcccgcgctcgcgcggggcgaactgcacctgatcggcgcgaccacgctcgacgaataccgcaagtacatcgagaaggacgccgcgctcgagcgccgcttccagaaggtcatggtcgacgagcccagcgtcgaatcgacgatcgcgatcctgcgcggcctgcaggagcgctacgaactgcaccacggcgtcgacatcaccgacccggcgatcgtcgccgcggccgaactctcgcatcgctacatcaccgaccgtttcctgcccgacaaggcgatcgacctgatcgacgaggccgccgcgcggatcaagatggaaatcgactccaagcccgaggtcatggacaaactcgaccgccgcatcatccagctcaagatcgagcgcgaggcggtcaagaaggagaccgacgaggcctcgaaaaagcggctcggcctgctcgaagacgagatcgacaagctcggccgcgaatacgccgacctcgaagaggtgtggaagtcggagaaggcccaggtccagggctccgcgcatctcaaggaagagatcgacaagctgcgcggcgagatggccgacctgcagcgccagggcaagctcgacaaggtcgccgagatccagtacggcaagctgccgcagctcgaggcgcagctcaagcacgccgaagccagcggcgagaagcctgtgttcaagctcctgcgcaccgaggtcggcgccgaagagatcgccgaggtcgtctcccgcgcgaccggcatcccggtctcgaagatgatgcagggcgagcgcgacaagctcatgcacatggaagaccacctgcacggccgcgtcgtcggccaggacgaagccgtggccgtcgtctccgacgcgatccgccgttcacgcgcggggctttccgaccccaaccggccgctcggctcctttctgttcctgggccccacgggcgtcggcaagaccgagttgtgcaagacgctcgccgaatacctgttcgattccgccgagcacatggtgcgcatcgacatgagcgaattcatggagaagcactcggtcgcgcgcctgatcggcgcgccgcccggctacgtcggctacgaagagggcggctacctgaccgaagccgtgcgccgcaagccgtacagcgtgatcctcatggacgaaatcgagaaggcccaccccgacgtcttcaacgtgctcctgcaggtgctcgacgacggccggctcaccgacggccagggccgcaccgtcgacttccgcaacaccgtgatcgtcatgacgtccaacctcggcagccagatgatccagcagatgtcgggcgacgactaccaggtcgtcaagctcgccgtactcggcgaagtgaagtcctacttccgccccgagttcatcaaccgcatcgatgaggtcgtcgtcttccacgcgctctcggagtcgaacatcgcgagcatcgcgcgcatccagctcaaggcgctcgaagcgcgcctcgccgcgatggagatgaagctcgacgtcaccgacgccgcgctcgccgaaatcgccaaggccggcttcgaccccgtctacggcgcgcggccgctcaagcgtgcgatccagagcgagctcgaaaacgcgctggctaaggaaatcctgtccggacgcttcgcggccaaggacacgatccgggtcgacgcggtggatgggaagttcagctttgagaaggcggcgtaa

SEQ ID NO: 6980 - protein, 859 aa, Thiobacillus denitrificans ATCC 25259
MRFDKLTTQFQQALSDAQSLAVGGDHAYIEPQHLLLALLNQEGGGAGSILGRAGVQVPALKAALTQALTRLPKVQGQGGEVSISRDLNNLLNLTDKEAMKRNDAYIASELFLLAALDDKGETGRLLKQHGAQKTALEQAIQAVRGGENVQSQEAEGQREALAKYTLDLTQRARDGKLDPVIGRDDEIRRSIQILQRRTKNNPVLIGEPGVGKTAIVEGLAQRIVNDEVPETLKGKKVLVLDLAALLAGAKYRGEFEERLKAVLKELAMDPGRYIVFLDEIHTLVGAGKAEGAIDAGNMLKPALARGELHLIGATTLDEYRKYIEKDAALERRFQKVMVDEPSVESTIAILRGLQERYELHHGVDITDPAIVAAAELSHRYITDRFLPDKAIDLIDEAAARIKMEIDSKPEVMDKLDRRIIQLKIEREAVKKETDEASKKRLGLLEDEIDKLGREYADLEEVWKSEKAQVQGSAHLKEEIDKLRGEMADLQRQGKLDKVAEIQYGKLPQLEAQLKHAEASGEKPVFKLLRTEVGAEEIAEVVSRATGIPVSKMMQGERDKLMHMEDHLHGRVVGQDEAVAVVSDAIRRSRAGLSDPNRPLGSFLFLGPTGVGKTELCKTLAEYLFDSAEHMVRIDMSEFMEKHSVARLIGAPPGYVGYEEGGYLTEAVRRKPYSVILMDEIEKAHPDVFNVLLQVLDDGRLTDGQGRTVDFRNTVIVMTSNLGSQMIQQMSGDDYQVVKLAVLGEVKSYFRPEFINRIDEVVVFHALSESNIASIARIQLKALEARLAAMEMKLDVTDAALAEIAKAGFDPVYGARPLKRAIQSELENALAKEILSGRFAAKDTIRVDAVDGKFSFEKAA

SEQ ID NO: 6981 - DNA, 2622 bp, Anabaena variabilis ATCC 29413
  CDS (1)..(2622): transl_table=11
atgcaaccaaccaatcccgagcaatttaccgaaaaagcctgggaagcccttgttcgtactcccgaaattgccaagcagtttcagcatcagcagattgagagcgaacatttgatgctagcgctactggaacaggaaggactcgccagttctattttcaacaaagccggggtaaatgttcaaaaactacacgagcgcactatcgacttcatcaaccgtcagcccaaagtatcgggggctagcagtggttcggtatacatcggacacagtttagagaggctgctcgatcgcgccgaacaataccgcaaagagtttggtgatgaatatatttctattgaacatttaatacttgcctttgccaaagacgatcgctttggtaaagggttgtttcaagaatttggactggatgaaaaaaaactccgcaacatcattcaacagattcgagggagtcaaaaagtgacagatcaaaacccagaagttaaatatgaagcgctagaaaaatacggacgcaatttaacccaattggcacgtgaaggcatactcgacccagtgattggacgagatgaagaaattcgccgcacgattcaaatcctttctcgtcggactaaaaataatcccgtgctgattggtgaacccggtgtcggtaaaacagcaattgtagaaggattagcgcagcgcattgtcagtggtgatgtcccggaatcattgcgcgatcgcaaactaatagctttagacatgggtgcgttaattgccggagccaaataccggggagaatttgaagaacgcctgaaagctgtcttaaaagaaatccaagaagcacagggacaaatcgtcttgttcattgacgaaattcacactgtagttggtgcgggtgcaacgcaaggatcgatggatgctagcaacttgctcaagccgatgctcgctcgcggcgaattgcgctgtattggtgccaccacgctagatgaataccgcaagtacattgaaaaagatgcggctttggaacgtcgttttcagcaggtgtatgtcgatcagcccagtgtggaagataccatctcaattctgcgcggtttgaaagagcgctacgagttacaccacggcgtgaagatttctgatagtgcgttagttgcggcagctactctgtctgcgagatatattagcgatcgcttcctacccgacaaagctattgatttggtggatgaagctgcggctaaactaaaaatggaaattacttctaaaccagaagaattagacgaaattgatcgcaaaattctgcaactggaaatggagcggctgtcactgcaaaaagaaacagacagtgcttccagagagcgtttagaacggctggagagagaacttgcagagttaaaagaacgccaagatgccctcaatgctcaatggcaagcagagaagcaaatcatcgatcgcattcgccaaattagacaagagattgagcgtgtcaacgtagaaattcagcaagccgaacgcgattacgacctcaaccgggcagcagaactgaaatacagcaaactcactgagctgcaacgacaactagaagaagccgaagcgcgactagctcaaatccagactagcggtaaatctctgttgcgcgaagaagtcaccgaagctgacattgacgaaattatctccaagtggacgggtattccggtgagcagactggttgaatcggaaatgcaaaaacttttgcatctggaagaagagctacataaacgtgtgattggtcaggacgaagctgtaagagctgttgctgatgcaattcaacgttcccgtgctgggttggcagacccgaatcgtcccattgctagctttattttcttaggcccgaccggggtgggaaaaacagaactggcaaaagctttagcggtatatctgtttgataccgaagatgcactggtgcggatcgatatgtccgaatacatggagaaacacactgttgcccgtctcatcggtgcgcctccaggttacgtgggctatgaagaaggcggacaactcaccgaagcgattcgccgccgaccttattctgtaattctgtttgacgaaattgagaaagctcatcctgatgtattcaacgtcctgctgcaaatcctggatgatggtcgcctaactgattctcagggacgcacagtagattttaaaaatacgatcgcgattatgaccagcaatattggttcaatatacattttggatgtggcaggagacgatagcaagtacgaacaaatgcgcgatcgcgtcatggaagcagtgcgagaaagtttccgccccgaattcctcaaccgcattgatgaaatcattatcttccatagcttgcggaaggacgagttgcgcgaaattgtcaaactacaagtgcagcgtttagaggagcgactgcgcgagcgtaaactctcgctcaaaatctccgacgaggctctcaattggattgttcaggtcggttatgacccagtttacggtgctcgtcccctgaagcgggcgattcagcgagaactagaaactccgattgccaaagcgattctacgcggcgagttccacgaaggcgacacaatctacgtccatgtggaacacgaacgactggtgttgaagcgcttatcacctgaactggtcaatgcttag

SEQ ID NO: 6982 - protein, 873 aa, Anabaena variabilis ATCC 29413
MQPTNPEQFTEKAWEALVRTPEIAKQFQHQQIESEHLMLALLEQEGLASSIFNKAGVNVQKLHERTIDFINRQPKVSGASSGSVYIGHSLERLLDRAEQYRKEFGDEYISIEHLILAFAKDDRFGKGLFQEFGLDEKKLRNIIQQIRGSQKVTDQNPEVKYEALEKYGRNLTQLAREGILDPVIGRDEEIRRTIQILSRRTKNNPVLIGEPGVGKTAIVEGLAQRIVSGDVPESLRDRKLIALDMGALIAGAKYRGEFEERLKAVLKEIQEAQGQIVLFIDEIHTVVGAGATQGSMDASNLLKPMLARGELRCIGATTLDEYRKYIEKDAALERRFQQVYVDQPSVEDTISILRGLKERYELHHGVKISDSALVAAATLSARYISDRFLPDKAIDLVDEAAAKLKMEITSKPEELDEIDRKILQLEMERLSLQKETDSASRERLERLERELAELKERQDALNAQWQAEKQIIDRIRQIRQEIERVNVEIQQAERDYDLNRAAELKYSKLTELQRQLEEAEARLAQIQTSGKSLLREEVTEADIDEIISKWTGIPVSRLVESEMQKLLHLEEELHKRVIGQDEAVRAVADAIQRSRAGLADPNRPIASFIFLGPTGVGKTELAKALAVYLFDTEDALVRIDMSEYMEKHTVARLIGAPPGYVGYEEGGQLTEAIRRRPYSVILFDEIEKAHPDVFNVLLQILDDGRLTDSQGRTVDFKNTIAIMTSNIGSIYILDVAGDDSKYEQMRDRVMEAVRESFRPEFLNRIDEIIIFHSLRKDELREIVKLQVQRLEERLRERKLSLKISDEALNWIVQVGYDPVYGARPLKRAIQRELETPIAKAILRGEFHEGDTIYVHVEHERLVLKRLSPELVNA

SEQ ID NO: 6983 - DNA, 2631 bp, Anabaena variabilis ATCC 29413
  CDS (1)..(2631): transl_table=11
atgcagcctacagatcctaataaatttactgataaagcctgggaagtaattgtcaaatctcaggatatagttcgggcatatcaacaacaacagctagatgttgaacatttaattctggctctgatagaagatcctactagtttagctgtgcggattttgggtcgtgcagaaattgacccgattcgcttacaacagcaattagaagcttttacccagcgtcaaccgaaagtaggcaaaagtgaccaactttacctcggtcgcagcttggatgttatgctcgatcgcgccgaggaaattcgggagcgaatgaaggatggctacatctctgtagaacatatacttttagcttttgtggatgatgaacgtgttggtaggaaggtcctcaaaggctttagtgtagacagtgccaagatagaagcgagtatcaaggctgttcgtggtagccaaaaagtgacagaccaaaatccagaatctcgttatgaagccttacagaaatttggtagggatttgacagaacaggcaaaatctggaaaattagacccagttattggacgagatgacgaaattcgccgggtaattcaggtgttatctcgccggagcaaaaataatcccgtcttgattggtgaacctggggttggtaagacagcgatcgccgaagctttggcacagcgtatagttaatggagatgtcccggaatctctaaaaaaccgtcaattaatctctttagatatcgggagtttgattgctggggcaaaatatcgaggcgaatttgaagaccgattaaaagccgtcctcagggaagttacggaatccaacggtaatattgttttatttattgatgaactacataccgtcgtaggtactggttctaaccaacaaggagcaatggatgcgggtaacttgctcaaacccatgctggcgcgcggagaactgcggtgtattggggcgacgaccttagatgagtttcgcaagttcatcgaaaaagatgcagccttagaacggcgttttcaacaagtgtacgtagaccaaccaagtgtagaaaatacgatttctattctgcgggggttgaaggaacgctacgaagtccaccataatgtgaaaatctctgactctgcactggtagccgcagcaactttatcagcacgttatattgctgaccgctttctaccagataaagccattgatttagtcgatgaagccgccgcccaattaaaaatggagattacctccaaaccagcagacttggaagccattgaccgccgtttgatgcagctagaaatggaaaagctgtccttggcgggagaggagaaagttgcagcaccaactaaggaacgtttagagcgaattgagctagaaatcaccaatttaaccgaaaagcagcaagatttaaacaaccaatggcaaggtgaaaagcaggtattagaagctattagtctgttaaagaaagaagaagacgctttaagggtgcagattgagcaagcagaacgcgcctatgatttgaataaagcggcgcagttgaagtatggcaaactggaaggagtacagcgcgatcgcgaagctaaagaagcaaaactcttagaattacaaagccaaggttctaccctgttgcgtgaacaagtcaccgaagccgacatcgccgaaatcgtcgccaagtggacaggtatccctgtaaatcgcctgttggaatcagaacggcaaaaactcctacaactagaaagtcacttacatcaacgggttatcggccagcaagaagcagtggaagcagtttccgccgccattcgccgcgcccgcgctgggatgaaagaccccaatcgccccatcggctcattcttattcatggggccgacaggggtaggtaaaaccgaactcgcccgcgctttagcccagttcctcttcgactccgatgatgctttagtgcgcttagatatgtccgagtacatggaaaaacactcagtctctcgcttagtcggcgcacctcctggttatgtaggctacgaagaaggtggacaactttcggaagcagtccgccgccatccttattctgtagtgttattggatgaagtagagaaagcccaccccgatgtgtttaatattttattgcaagtgctggatgatggcagaattactgattcccaaggtagaacagtagattttcgcaacaccgtcattgtcatgaccagtaacatcggtagcgaatatatcttagatgtgtctggtgacgataccaagtatgacacaatgcagaatcgggtcatggatgccttgcgatcgcacttccgccccgaatttctcaaccgcgttgatgatacaatcctcttccatgccctcagtcgtagcgaaatgagccacatcatccgtattcaactcaaacgggtggaaagtctcctgagagaacaaaaaatctcctttgaaatctccgccgccgcctgtgatttcctagtagaaaaaggctatgacccagtttacggcgcacgccccctcaaacgagccatccagcgagaaatcgaaaaccccctcgccaccaagatattagaaaacacctttatctccggtgacaccatttacatagaccaaggcgaaaatggtttaagtttcactaataaagcaccagtaaaagtttccatcccctaa

SEQ ID NO: 6984 - protein, 876 aa, Anabaena variabilis ATCC 29413
MQPTDPNKFTDKAWEVIVKSQDIVRAYQQQQLDVEHLILALIEDPTSLAVRILGRAEIDPIRLQQQLEAFTQRQPKVGKSDQLYLGRSLDVMLDRAEEIRERMKDGYISVEHILLAFVDDERVGRKVLKGFSVDSAKIEASIKAVRGSQKVTDQNPESRYEALQKFGRDLTEQAKSGKLDPVIGRDDEIRRVIQVLSRRSKNNPVLIGEPGVGKTAIAEALAQRIVNGDVPESLKNRQLISLDIGSLIAGAKYRGEFEDRLKAVLREVTESNGNIVLFIDELHTVVGTGSNQQGAMDAGNLLKPMLARGELRCIGATTLDEFRKFIEKDAALERRFQQVYVDQPSVENTISILRGLKERYEVHHNVKISDSALVAAATLSARYIADRFLPDKAIDLVDEAAAQLKMEITSKPADLEAIDRRLMQLEMEKLSLAGEEKVAAPTKERLERIELEITNLTEKQQDLNNQWQGEKQVLEAISLLKKEEDALRVQIEQAERAYDLNKAAQLKYGKLEGVQRDREAKEAKLLELQSQGSTLLREQVTEADIAEIVAKWTGIPVNRLLESERQKLLQLESHLHQRVIGQQEAVEAVSAAIRRARAGMKDPNRPIGSFLFMGPTGVGKTELARALAQFLFDSDDALVRLDMSEYMEKHSVSRLVGAPPGYVGYEEGGQLSEAVRRHPYSVVLLDEVEKAHPDVFNILLQVLDDGRITDSQGRTVDFRNTVIVMTSNIGSEYILDVSGDDTKYDTMQNRVMDALRSHFRPEFLNRVDDTILFHALSRSEMSHIIRIQLKRVESLLREQKISFEISAAACDFLVEKGYDPVYGARPLKRAIQREIENPLATKILENTFISGDTIYIDQGENGLSFTNKAPVKVSIP

SEQ ID NO: 6985 - DNA, 2619 bp, Anabaena variabilis ATCC 29413
  CDS (1)..(2619): transl_table=11
atgcaacctactaatcccaaccaatttacagaaaaagcctgggaagcgatcgcccacactcctgagattgctaaacagcatcaacagcagcagatagaaagcgaacatctgatgaaggcgctactggaacaagatggtttggccagtgggattttgaccaaagcaggtgtgaacttacaaaaaattggcgatcgcactgaacaatacatccagcgccaaccgaaagtctcaggtaacagcacctcagtctacctggggcggagtctggatacactgttagacagagcagaagcacatcgtaaagattttaaagacgaatatatttctattgaacatttattactggcttaccctaaagacgatcgcttcggcaaaggtttattccaagaattcgctttagacgaaggcaagctcaaaaatattattaaacaagttcgtgggagccaaacagtgactgaccaaaatccagaaggcaaataccaatcactggaaaaatacgggcgtgacctcacagaagcagcccggaaaggtcaacttgatccagtcattgggcgtgatgatgagattcggcgtaccatccaaattctgtctcgccgcaccaaaaataaccctgtgttgattggtgaaccgggtgtaggtaaaacagcgatcgctgaaggtttggcacagcgtatcgtggctggtgacgtaccccaatctctcaaagaccgcaagctaatctccttagatatgggggcgatgattgctggggcaaaattccgaggagaatttgaagaacgtctgaaggcggtattaaaagaagtcaccgaatccggcggcaatatagttttatttattgatgaaattcatactgttgtcggtgcgggtgcaactcaaggcgcgatggatgccggaaacttgttaaaacccatgttggcgcggggtgaattgcgctgtattggggcgacaactttggatgaataccgcaaatatatcgaaaaagatgcggccttagaaagacgcttccaacaggtttacgtagaccagcccagtgttgaagataccatttctattttacgtggcttgaaggaacggtatgaagtccaccacggggtaaaaatttctgatagttccttagtagctgccgctacgttgtccagtcgttatattagcgatcgcttcctcccagataaagccattgacttggtagacgaagccgccgctagactgaaaatggaaattacttctaagccagaagaacttgatgaaatcgaccggaagattctgcaattagagatggaaaagctatctctgcaaaaagaaagtgatgcagcttcccgcgaacgcctggaaagactagaaaaagaattagcagatctcaaggaagaacaaagaaccctcaatactcaatggcaatcggaaaaagatgtcattaataaacttcagtctgttaaggaagagattgacaaagttaacttagaaattcagcaagcagaaagagactacgacctcaaccgcgccgccgaattgaagtatggaaagttaaccgacttgcaccggagactggaagcaacagaacgggaattgtcacaaacccaaggcacgggtaaatccctgttgcgagaagaagtcaccgaagccgacattgcggaaattatttctaagtggacaggaatccccatcagtaaattagtggaatcggagaaagaaaaactactgcacttagaagatgaactccatcaccgggtaattgggcaagatgaagccgtcacagccgtcgccgatgccattcagcgatcgcgtgctggtttggctgatcctaatcgtcccattgctagttttgttttcctggggccgacaggtgtaggtaaaactgaactggcgaaggcgctagcgtcatatatgttcgacaccgaggaagcaatggtgcggattgatatgtcggaatatatggagaaacacgccgtttctcggttaattggtgcgcctccagggtatgtaggttacgaagaagggggacaactcacagaagccatccgtcgccgtccttatgctgtgattctcttcgacgaaatcgagaaagcccacccggacgtatttaatattttcctgcaaatcctcgatgatggtcgcgttaccgatgcccaaggtcatacagtggacttcaagaacacgattattatcatgaccagtaacatcggttcccagtacattctcgatatagctggggataactcacgctacgatgaaatgcgccatcgggtgatggaagcaatgcgaaatagtttccgtcctgagttcctcaaccggattgatgaggtaattatcttccacggtttagataagaaagaattgcggcaaattgtccagttgcaagtggaaaggttaaaggcaagattaggcgatcgcaaaatatctctccggctctccgatgctgcactagactttttggcagaagttggatacgacccagtatttggggcgcgtccactgaagcgggcgattcagcgcgagttagaaacgcaaatcgctaaggcgattttacgcggtgaatttaacgatggggacacgatttttgtcgatgtgcagaatgaaaggttgtcttttagtcgcttacctgttgaggtgtttagtagttaa

SEQ ID NO: 6986 - protein, 872 aa, Anabaena variabilis ATCC 29413
MQPTNPNQFTEKAWEAIAHTPEIAKQHQQQQIESEHLMKALLEQDGLASGILTKAGVNLQKIGDRTEQYIQRQPKVSGNSTSVYLGRSLDTLLDRAEAHRKDFKDEYISIEHLLLAYPKDDRFGKGLFQEFALDEGKLKNIIKQVRGSQTVTDQNPEGKYQSLEKYGRDLTEAARKGQLDPVIGRDDEIRRTIQILSRRTKNNPVLIGEPGVGKTAIAEGLAQRIVAGDVPQSLKDRKLISLDMGAMIAGAKFRGEFEERLKAVLKEVTESGGNIVLFIDEIHTVVGAGATQGAMDAGNLLKPMLARGELRCIGATTLDEYRKYIEKDAALERRFQQVYVDQPSVEDTISILRGLKERYEVHHGVKISDSSLVAAATLSSRYISDRFLPDKAIDLVDEAAARLKMEITSKPEELDEIDRKILQLEMEKLSLQKESDAASRERLERLEKELADLKEEQRTLNTQWQSEKDVINKLQSVKEEIDKVNLEIQQAERDYDLNRAAELKYGKLTDLHRRLEATERELSQTQGTGKSLLREEVTEADIAEIISKWTGIPISKLVESEKEKLLHLEDELHHRVIGQDEAVTAVADAIQRSRAGLADPNRPIASFVFLGPTGVGKTELAKALASYMFDTEEAMVRIDMSEYMEKHAVSRLIGAPPGYVGYEEGGQLTEAIRRRPYAVILFDEIEKAHPDVFNIFLQILDDGRVTDAQGHTVDFKNTIIIMTSNIGSQYILDIAGDNSRYDEMRHRVMEAMRNSFRPEFLNRIDEVIIFHGLDKKELRQIVQLQVERLKARLGDRKISLRLSDAALDFLAEVGYDPVFGARPLKRAIQRELETQIAKAILRGEFNDGDTIFVDVQNERLSFSRLPVEVFSS

SEQ ID NO: 6987 - DNA, 2565 bp, Pseudomonas fluorescens PfO-1
  CDS (1)..(2565): transl_table=11
atgcgtatagaccgtttaaccagcaaattgcagttggcgttgtccgatgcccaatccctggctgttggccacgatcatcctgccatcgagccggcgcatttgatgcaggccatgcttgaacagcagggtggttcgatcaaacccctgttgatgcaggtgggcttcgacgtcaacagcttgcgtaaagagctgaccaaagagctcgatcaattaccgaaaatccagaatccgaccggcgacgtcaacatgtcgcaggatctggcgcgtctgctcaaccaggccgatcgtctggcccagcagaagggcgatcagttcatttccagcgagctggtgctgctcgccgcgatggacgagaacagcaagctcgggaagttgctgctcggccagggcgtgagcaaaaaggctctggaaaatgcaatcaacaacctgcgcggtggcgaggcggtcaacgacgccaaccacgaagagtcgcgtcaggcactggataagtacaccgtcgacctgaccaaacgcgccgaagaaggcaagcttgacccggtgatcggccgtgacgacgagatccgtcgcaccattcaggtgctgcaacgccgtaccaagaacaacccggtgctgatcggcgagcctggcgtgggtaaaaccgcgattgccgaaggtctggcccagcgcatcatcaatggtgaagtgccggacggcctgcgcggcaagcgtctgctgtccctcgatatgggggcgctgattgccggtgccaagtatcgcggcgagtttgaagagcgcctgaaagcgctgctcaacgagctgtcgaagcaggaagggcagatcattctgttcatcgacgaactgcacaccatggtcggcgccggcaagggcgaaggctcgatggacgccggcaacatgcttaaaccggccctggcccgtggtgagctgcattgcgtcggcgcgaccacgctcaacgagtaccgccaatatatagagaaggacgcggccctcgagcgacgcttccagaaagtgctggtggacgagccgagcgaagaggacaccatcgcgatcctgcgtggcctcaaggagcgttacgaggttcaccacaaggtggcgatcaccgacggcgcgatcatcgcggcggccaagctcagccatcgctacatcactgaccggcagctgccggacaaggcgatcgacctgatcgacgaggcggccagccgcatccgcatggagatcgactccaagccggaagtgctggatcgtcttgagcggcgcctgattcaactgaaggtggaatctcaggcactgaagaaagaaagtgacgacgcggcgaagaaacgtctggagaaactccaggaagaaatcgatcgccacgagcgtgagtactccgatctggaagaaatctggaactcggaaaaagccgaggtgcagggctctgcgcagattcagcagaagatcgaacagtcccgtcaggagctggaagccgcgcgccgtaaaggcgacctgaaccgcatggccgagttgcagtatggggtgatcccggatctggaacgcagcctgcaaatggtcgaccagcacggcaagagcgaaaaccagttgctgcgcagcaaggtgaccgaagaggaaatcgccgaagtcgtttcgaagtggaccggtattccggtgtcgaaaatgctcgaaggcgaacgcgacaagctgatgaagatggaaagcctgttgcatcaacgcgtgatcggccaggacgaagcggtggtggcagtagccaacgcggtgcggcgttcccgtgccgggttgtccgacccgaaccgcccgagcggctcgttcatgttcctcggcccgaccggtgtcggtaaaaccgagctgtgcaaggcgctggccgaattcctcttcgatacggaagaggcgatggtgcgaatcgacatgtccgagttcatggagaaacattccgtggcacggttgatcggggcaccaccgggctacgtcggctacgaagagggtggttacctgaccgaagcggtacggcgcaagccttactcggtgatcctgctggacgaagtcgagaaggcgcatccggacgtgttcaacatcctgctgcaagtgctggaggacggacgtctgaccgacagccatggccgcacggtggacttccgcaataccgtgatcgtcatgacctccaatctcggttcgatgcagatccaggaactggtcggtgatcgtgaagcacaacgggcagcggtgatggatgcgatttccacccacttccgtccggagttcatcaaccgcgttgacgaagtggtgatcttcgagccattggcgcgggatcagatcgcgggcatcaccgagatccagctgggccgtctgcgcaaccgtctggccgagcgcgagctgaagctggaactgagccctgaggcgatggacaagctgattgccgtcggttacgacccggtctatggcgcacggccgctgaagcgggcgatccagcgctggatcgagaacccgttggcgcagttgatcctgtcgggacgcttcatgccgggcgagaccgcaaccggtgtggtggagaacgacgagatcacgttcaactga

SEQ ID NO: 6988 - protein, 854 aa, Pseudomonas fluorescens PfO-1
MRIDRLTSKLQLALSDAQSLAVGHDHPAIEPAHLMQAMLEQQGGSIKPLLMQVGFDVNSLRKELTKELDQLPKIQNPTGDVNMSQDLARLLNQADRLAQQKGDQFISSELVLLAAMDENSKLGKLLLGQGVSKKALENAINNLRGGEAVNDANHEESRQALDKYTVDLTKRAEEGKLDPVIGRDDEIRRTIQVLQRRTKNNPVLIGEPGVGKTAIAEGLAQRIINGEVPDGLRGKRLLSLDMGALIAGAKYRGEFEERLKALLNELSKQEGQIILFIDELHTMVGAGKGEGSMDAGNMLKPALARGELHCVGATTLNEYRQYIEKDAALERRFQKVLVDEPSEEDTIAILRGLKERYEVHHKVAITDGAIIAAAKLSHRYITDRQLPDKAIDLIDEAASRIRMEIDSKPEVLDRLERRLIQLKVESQALKKESDDAAKKRLEKLQEEIDRHEREYSDLEEIWNSEKAEVQGSAQIQQKIEQSRQELEAARRKGDLNRMAELQYGVIPDLERSLQMVDQHGKSENQLLRSKVTEEEIAEVVSKWTGIPVSKMLEGERDKLMKMESLLHQRVIGQDEAVVAVANAVRRSRAGLSDPNRPSGSFMFLGPTGVGKTELCKALAEFLFDTEEAMVRIDMSEFMEKHSVARLIGAPPGYVGYEEGGYLTEAVRRKPYSVILLDEVEKAHPDVFNILLQVLEDGRLTDSHGRTVDFRNTVIVMTSNLGSMQIQELVGDREAQRAAVMDAISTHFRPEFINRVDEVVIFEPLARDQIAGITEIQLGRLRNRLAERELKLELSPEAMDKLIAVGYDPVYGARPLKRAIQRWIENPLAQLILSGRFMPGETATGVVENDEITFN

SEQ ID NO: 6989 - DNA, 2613 bp, Rhodobacter sphaeroides 2.4.1
  CDS (1)..(2613): transl_table=11
atgaacctcgagaagttcacggagcggtcgcgcgggttccttcaggccgcgcagacgatcgcgatgcgggaaagccaccagcggctggcgtccgaacatctgctgaaggccctgatggacgacgatcaggggctggcctcgaacctgatccgccgatcgggcggcgagcctgcgcgcgtggccgagacggtcgagctgaccatcgccaagctgcccaaggtgtcgggcgatgcgcagcccttcatggacccgggcctcgtccgcgtgctggacgaggcggagaagctcgcgaagaaggcgggcgacagtttcgtgccggtggagcgcatcctgatggcgctggccatggtcgcgtcgaaggccaaggacgcgctggatgcgggtgcggtgacggcgcagaagctgaatgccgcgatcaacgacatccgcaaggggcgcaccgccgacacggcctcggccgaggaaggctatgacgccctgaagaaatatgcccgcgacctgacgcaggccgcgcgggacggcaagatcgacccgatcatcggccgcgacgacgagatccggcgcgccatgcaggtgctgagccggcgcaccaagaacaacccggtgttgatcggcgagcccggcgtcggcaagaccgccatcgccgagggcctcgccctgcgcatcgtgaatggcgacgtgcccgagagcctgaagaacaagcgcctgctgtcgctcgacatgggggcgctgatcgcgggcgcgaaataccgcggcgagttcgaggagcggctgaaggccgtgctgaacgaggtgacctcggctgcgggcgagatcatcctctttatcgacgagatgcacacgctggtaggcgcgggcaaatccgaaggcgcgatggatgcggccaacctcatcaagccggcgctggcgcggggcgagctgcactgcatcggcgctacgacgctggatgagtatcgcaagcatgtggagaaggacgcggcgctggcgcggcgcttccagcccttgatggtcgaggagccgacggtcgaggatacgatctcgatcctgcgcggcatcaaggagaagtacgagctgcaccacggggtgaagatcgcagacgccgctctcgtggccgcggcgacgctctcgcaccgctacatcaccgaccgcttcctgcccgacaaggccatcgacctcgtggacgaggcggcgagccgcctgcggatggaggtcgattcgaagcccgaggaactcgacgcgctggatcggcagatcctgcaagcgcagatcgaggcggaggcgctgaagaaggaggacgacgcggcgtcgaaggaccggctggcgaagctcgagaaggaactctcgggcatgaccgaacgcgccgccgagatgacggcgcagtggcaggccgagcgcgacaagctcgaggccgcacgcgatctgaaggagcagctggaccgggcccgggccgagctcgagcaggtcaagcgcgagggcaacctcgcccgcgcaggcgagctgtcctacggggtcattcctcagatcgagaagaagctcgaggaagccgaagcgcgcgagggcgatctcctcgtctcggaagccgtgcggccggagcagatcgccgaggtcgtggagcgctggaccggcatcccgacctcgaagatgctcgagggcgagcgcgagaaacttctcaagatggaggaggagctcggccgccgggtgatcgggcagcgcgccgcgctgcgggcggtggccaatgccgtgcggcgggcgcgcgcggggctgaacgacgagcggcggcctctgggcagcttcctcttccttggcccgacgggcgtcggcaagaccgagctgacgaaggcggtggccgaatatctcttcgacgacgaccaggcgatggtccgcatcgacatgtcggagttcatggagaagcactcggtcgcccggctgatcggcgcgcctccgggctatgtgggctacgatgagggcggggtgctgaccgaggccgtgcggcgccgtccctatcaggtcgtgctgttcgacgaggtcgagaaggctcacccggaggtgttcaacgtgctcctgcaggtgctcgacgacggggtcctgaccgacgggcagggccggacggtggacttcaagcagacgctcatcatcctgacctcgaacctcggggcctacgccttgagccagctgccggaaggggccgatcccgcgcctgcccgcgcggcggtgatggaggcggtgcgcggacatttccggcccgagttcctgaaccggctcgacgagatggtgatcttcgaccgcctgtcgcgagacgacatgggccagatcgtcgagatccagctcgggctcctcggcaagcggctggccacccgcaagatcgggctcgagctcgatgcggcggcgaaacagtggctcgccgacgagggctacgatccggtctatggcgcgcgtccgctgaagcgcgtgatccagcgccatctgcaggatccgctggccgagatgatcctcgcgggcgacgtgctcgacgggtcggtcgtgcaggtcagtgccggtgccgacgggctcatcatcggcgaccgggtctcctcgtcgcggcgcgagcggccgcaggacgccgtggtccactga

SEQ ID NO: 6990 - protein, 870 aa, Rhodobacter sphaeroides 2.4.1
MNLEKFTERSRGFLQAAQTIAMRESHQRLASEHLLKALMDDDQGLASNLIRRSGGEPARVAETVELTIAKLPKVSGDAQPFMDPGLVRVLDEAEKLAKKAGDSFVPVERILMALAMVASKAKDALDAGAVTAQKLNAAINDIRKGRTADTASAEEGYDALKKYARDLTQAARDGKIDPIIGRDDEIRRAMQVLSRRTKNNPVLIGEPGVGKTAIAEGLALRIVNGDVPESLKNKRLLSLDMGALIAGAKYRGEFEERLKAVLNEVTSAAGEIILFIDEMHTLVGAGKSEGAMDAANLIKPALARGELHCIGATTLDEYRKHVEKDAALARRFQPLMVEEPTVEDTISILRGIKEKYELHHGVKIADAALVAAATLSHRYITDRFLPDKAIDLVDEAASRLRMEVDSKPEELDALDRQILQAQIEAEALKKEDDAASKDRLAKLEKELSGMTERAAEMTAQWQAERDKLEAARDLKEQLDRARAELEQVKREGNLARAGELSYGVIPQIEKKLEEAEAREGDLLVSEAVRPEQIAEVVERWTGIPTSKMLEGEREKLLKMEEELGRRVIGQRAALRAVANAVRRARAGLNDERRPLGSFLFLGPTGVGKTELTKAVAEYLFDDDQAMVRIDMSEFMEKHSVARLIGAPPGYVGYDEGGVLTEAVRRRPYQVVLFDEVEKAHPEVFNVLLQVLDDGVLTDGQGRTVDFKQTLIILTSNLGAYALSQLPEGADPAPARAAVMEAVRGHFRPEFLNRLDEMVIFDRLSRDDMGQIVEIQLGLLGKRLATRKIGLELDAAAKQWLADEGYDPVYGARPLKRVIQRHLQDPLAEMILAGDVLDGSVVQVSAGADGLIIGDRVSSSRRERPQDAVVH

SEQ ID NO: 6991 - DNA, 2598 bp, Burkholderia sp. 383
  CDS (1)..(2598): transl_table=11
atgagaatcgacaagctcaccaccaagttccaggaagcactcgcggatgcgcaaagcctcgcagcaggccgcgacaatcaatacatcgaacccgttcacgttctcgcggcgctggtcgcgcagcaggacggttccgcccgctcgctgatgtcgcgcgcgggcgttcacattcaggcgctgcaaggcgcgctgaacgaagccatctcgcgcctgccgcaagtgacgggcacgggcggcgacatccagatcggccgtgaactctccgggctgctgaaccaggccgacaaggaagcgcagaagctcaacgacacgttcatcgcgagcgagatgttcctgctcgccgtgtccgacgacaagggcgacgccggcaagctcgcgcgccagcacggcctcacgcgcaaggcgctggaagccgcgatcgccgcggtgcgcggcggctcgcaggtgcacagccaggacgccgaaagtcagcgcgaggcactgaagaaatacacggtcgacctgaccgagcgcgcccgggcgggcaagctcgatccggtgatcggccgcgacgacgaaatccgccgttcgatccagatcctgcagcgccgcaccaagaacaacccggtgctgatcggcgagccgggtgtcggcaagacggcgatcgtcgaagggctcgcgcagcggatcgtcaacggcgaagtgcccgagacgctcaagggcaagcgcgtgctgtcgctcgacatggccgcactgctcgccggcgcgaagtatcgcggcgaattcgaggagcgcctgaaggcggtgctcaacgacatcgcgaaggatgaaggccagacgatcgtcttcatcgacgaaatccacacgatggtcggtgcaggcaaggccgaaggcgcgatggatgcgggcaacatgctgaagccggcgctgtcgcgcggcgagctgcattgcatcggcgcgaccacgctcgacgaataccgcaagtacatcgagaaggatgccgcgctcgagcgccgcttccagaaggtgctcgtcgacgagccgagcgtcgaggcgacgatcgcgatcctgcgcgggctgcaggagaagtacgaactgcaccacggcgtcgacatcaccgacccggcgatcgtcgccgcggccgagctgtcgcaccgctacatcaccgatcgcttcctgccggacaaggccatcgacctgatcgacgaagccgcttcgaagatcaagatggaaatcgattcgaagcccgaagagatggacaagctcgatcgtcgtctgatccagctgaagatcgagcgcgaagccgtgaagaaggagcaggacgaagcgtcgcagaagcgcctgcagctgatcgaggaagagatcgaacgcctcggccgcgagtacgcggatctggaagagatctggaccgccgagaaggccgcggtgcagggcagcgcacagctgaaggaagagatcgagaaggtgcgtgcggacatcgcacggctgcagcgtgacggcaagctggagaaggttgccgagctgcagtacggcaagctgccgcagctcgaggcgcaactgaagcaggtcacgcaggccgaagagcaggagcagcacaacccgacgcgtccgcgcctgctgcgcacgcaggtcggcgccgaggaaatcgcggaagtcgtgtcgcgttcgaccgggattccggtgtcgcgaatgatgcagggcgaacgcgagaagctgctgcacatcgaggaaaagctgcatgagcgcgtggtcggccagcacgaggcgatcagtgcggtggccgacgcgatccgccgttcgcgcgcgggtctcgccgatccgaaccgtccgtacggctcgttcctgttcctcggcccgacgggtgtcggcaagaccgagctgtgcaaggcgctggcgtcgttcctgttcgattcggaagagcacctgatccgcatcgacatgagcgagttcatggagaagcacagcgtcgcgcggctgatcggcgcgccgccgggctatgtcggctacgaggaaggcggctacctgacggaagccgtgcgtcgcaagccgtacagcgtgatcctgctcgacgagatcgagaaggcgcatccggacgtgttcaacgtgctgctgcaggtgcttgacgacggccgcatgacggacgggcaggggcgcacggtcgacttcaagaacacggtgatcgtgatgacgtcgaacctcggctcgcaggtgatccaggcgatgacgggtgcgccgcaggaagagatcaaggatgccgtgtggctcgaggtgaagcagcatttccgccccgagttcctgaaccggatcgacgacgtcgtcgtgttccatgcgctcgaccgcagcaacatcgagtcgatcgcgaagatccagctcgcacgcctgcacgaccggcttgcgaagctcgacatggcgctcgacgtgtcggaagcggcgctcgaacagatcggcaaggtcggctacgatccgctgttcggtgcgcgtccgctgaagcgcgcgatccagcaggagatcgagaacccggtcgcgaagctcatcctcgcgggccgcttcggtccgaaggatgtgattccggtcgatatccacgacggcaagttcgtgttcgaccgcgtcgttcactga

SEQ ID NO: 6992 - protein, 865 aa, Burkholderia sp. 383
MRIDKLTTKFQEALADAQSLAAGRDNQYIEPVHVLAALVAQQDGSARSLMSRAGVHIQALQGALNEAISRLPQVTGTGGDIQIGRELSGLLNQADKEAQKLNDTFIASEMFLLAVSDDKGDAGKLARQHGLTRKALEAAIAAVRGGSQVHSQDAESQREALKKYTVDLTERARAGKLDPVIGRDDEIRRSIQILQRRTKNNPVLIGEPGVGKTAIVEGLAQRIVNGEVPETLKGKRVLSLDMAALLAGAKYRGEFEERLKAVLNDIAKDEGQTIVFIDEIHTMVGAGKAEGAMDAGNMLKPALSRGELHCIGATTLDEYRKYIEKDAALERRFQKVLVDEPSVEATIAILRGLQEKYELHHGVDITDPAIVAAAELSHRYITDRFLPDKAIDLIDEAASKIKMEIDSKPEEMDKLDRRLIQLKIEREAVKKEQDEASQKRLQLIEEEIERLGREYADLEEIWTAEKAAVQGSAQLKEEIEKVRADIARLQRDGKLEKVAELQYGKLPQLEAQLKQVTQAEEQEQHNPTRPRLLRTQVGAEEIAEVVSRSTGIPVSRMMQGEREKLLHIEEKLHERVVGQHEAISAVADAIRRSRAGLADPNRPYGSFLFLGPTGVGKTELCKALASFLFDSEEHLIRIDMSEFMEKHSVARLIGAPPGYVGYEEGGYLTEAVRRKPYSVILLDEIEKAHPDVFNVLLQVLDDGRMTDGQGRTVDFKNTVIVMTSNLGSQVIQAMTGAPQEEIKDAVWLEVKQHFRPEFLNRIDDVVVFHALDRSNIESIAKIQLARLHDRLAKLDMALDVSEAALEQIGKVGYDPLFGARPLKRAIQQEIENPVAKLILAGRFGPKDVIPVDIHDGKFVFDRVVH

SEQ ID NO: 6993 - DNA, 2589 bp, Synechococcus sp. CC9605
  CDS (1)..(2589): transl_table=11
atgcaacccacggcggaacagttcacagaacaagcctgggccgccatcatcgccgcccagcaactggcgcagagcgccaagcatcagcaactggaaacggagcatctgctgcttgcgctgttgcagcagaacgggctggctggacgcattctcagcaaagcaggggtcgatgttggcaatttccaggcggccatcgacagccatctcaggcagcagcccagtcttggctctccaccggaatcggtgtttctgggacgctccctgaacagctgcctggatcgcgccgaaacagcccgcgatggattcagtgacagctacatcgccatcgaacatctgttgctggccctggccgacgatcaacgctgcggcaggcaactgctcagccaagcgggcgttgacaccagcaaactcaacgaagccattacagccgtgcgaggcaaccagacggtgaccgatcaaaacccggaagggacctatgaatcgcttgagaagtacggacgggacctgacggccgccgcccgtgacggaaagctggacccagtgatcggtcgcgacgaggagatccgtcgcaccatccagatcctcagccggcgcaccaaaaacaaccccgtgctgatcggcgaaccaggggtgggaaagaccgccattgttgagggactggcgcagcgcatcgtcaacggtgatgtgccccaggccttgcagaaccgtcagctcatcgccctcgacatgggagccctgatcgccggtgcgaaatatcgcggtgagttcgaggaacggctcaaagctgtactcaaggaggtcactgcctcggaaggccagatcgtgctgttcatcgatgaaatccacacggtggtgggcgctggagccaccggtggagccatggatgccagcaatctgctcaagccgatgctggcccggggggaactgcgctgcattggcgccaccaccctcgacgagcaccgccagcacatcgaaaaagatcctgccctggagcgacgcttccagcaggtgctggtggatcaacccacggtggaagacacgatttcgatcctgcggggtctgaaagagcgttatgaggtgcatcacggtgtgcgcattgccgacagtgccttggtggcagcggctgtgttgagcagccgctacatcgccgaccgctttctgccggacaaagcgatcgatctggtggatgaatcagctgctcgcctgaaaatggagatcacctccaaaccggaggagatcgatgaaatcgatcgcaagatcctgcagctggagatggagaagctctccctgggccgtgaatccgacagtgccagccaggagcggctgcaacggatcgagcgggaactggcagacctgggcgaacagcaaagttcccttaatgcccagtggcagcaggagaaaggcgcgatcgatgagctgtcgtcgctcaaggaagagatcgaacgggtgcagctgcaggtggaacaggccaaacgcagctacgacctcaacaaagcggcggaactggaatacggcaccctggcctcgctgcagaagcagttgctcgaacaggaaacccagattgcctcagaggagcctggcgagaaaggcttgctgcgggaagaggtgagtgaagacgacatcgccgaggtgatcgccaagtggaccggaatcccagtggcgcggctggtgcagagcgaaatggagaagctgctgcagctggaggatgacctgcatcagcgggtgatcggccagcacaaggccgtcaccgccgtcgcggatgcaattcaacgctccagggctggcctgagcgacccgaatcgtccgatcgccagcttcctgttcctcggccccaccggtgtgggcaagacggaactctccaaggcgctcgccaaccggctgttcgacagcgacgacgccatggtgcgcatcgacatgtcggagtacatggagaagcacaccgtgagccgtttgatcggggcacctcccggctacgtggggtatgaggccggtggccagctcaccgaagcggtgcgtcgtcggccttatgccgtgatcctgttcgacgaggtggagaaagcccacccggatgtcttcaacgtaatgctgcagatcctcgatgacggccgtgtcaccgatgggcagggccgcaccgtggacttcaccaacaccgtgctgattctcaccagcaacatcggcagccagtcgatcctggagctggccggcgatcccgagcagcatcgagcaacagaaagccgggtgaatgaggctctcagggcccatttccggccggaattcctcaatcgcctcgacgatcagatcatcttccacagcctcaggcgggcggaactgcgccagatcgtcaccctccaggtggaacgtctgcgccagcggctggctgagcgcaagctggagctcagcctgagcgatggggctgccgactggcttgccagtgccggatatgaccccgtctacggggcccgaccactgaagcgggctgtgcaacgggaactggagactcccattgccaagctgatcctttccgggcgactgggcgagaacagtgccatcgcagttgacgtcgatggagagcagctctcaatcggatga

SEQ ID NO: 6994 - protein, 862 aa, Synechococcus sp. CC9605
MQPTAEQFTEQAWAAIIAAQQLAQSAKHQQLETEHLLLALLQQNGLAGRILSKAGVDVGNFQAAIDSHLRQQPSLGSPPESVFLGRSLNSCLDRAETARDGFSDSYIAIEHLLLALADDQRCGRQLLSQAGVDTSKLNEAITAVRGNQTVTDQNPEGTYESLEKYGRDLTAAARDGKLDPVIGRDEEIRRTIQILSRRTKNNPVLIGEPGVGKTAIVEGLAQRIVNGDVPQALQNRQLIALDMGALIAGAKYRGEFEERLKAVLKEVTASEGQIVLFIDEIHTVVGAGATGGAMDASNLLKPMLARGELRCIGATTLDEHRQHIEKDPALERRFQQVLVDQPTVEDTISILRGLKERYEVHHGVRIADSALVAAAVLSSRYIADRFLPDKAIDLVDESAARLKMEITSKPEEIDEIDRKILQLEMEKLSLGRESDSASQERLQRIERELADLGEQQSSLNAQWQQEKGAIDELSSLKEEIERVQLQVEQAKRSYDLNKAAELEYGTLASLQKQLLEQETQIASEEPGEKGLLREEVSEDDIAEVIAKWTGIPVARLVQSEMEKLLQLEDDLHQRVIGQHKAVTAVADAIQRSRAGLSDPNRPIASFLFLGPTGVGKTELSKALANRLFDSDDAMVRIDMSEYMEKHTVSRLIGAPPGYVGYEAGGQLTEAVRRRPYAVILFDEVEKAHPDVFNVMLQILDDGRVTDGQGRTVDFTNTVLILTSNIGSQSILELAGDPEQHRATESRVNEALRAHFRPEFLNRLDDQIIFHSLRRAELRQIVTLQVERLRQRLAERKLELSLSDGAADWLASAGYDPVYGARPLKRAVQRELETPIAKLILSGRLGENSAIAVDVDGEQLSIG

SEQ ID NO: 6995 - DNA, 2595 bp, Geobacter metallireducens GS-15
  CDS (1)..(2595): transl_table=11
atgattcgacccgaaaaaatgaccataaagacccaggaggccctggccggcgcccagcagctcgccgcgcggcagggaaacggcaccatcgaaccggaacatctcctcgcagcgctcctcgagcaggaaggggggcttgtggccccgatcctccagaaggtgggagccgcgcctgcctccctgcggagctccgttgacgcgctccttaaaaagctcccccaggtgagcggcgccacggcccaggcctacctctcgccctctctgaaccggattctcgacggggcccagcgggaagccgatgccatgaaggacgagttcgtctccaccgagcaccttctcctcggcttcttcgccgacaaacagtgcgcggcaactcgggcgcttctcgatggcggcgccacccgcgagaacgtgctggcggcgctcgtggagatccgcggcggcgagcgggtcaccgatcagagccccgaggacaagtaccaggctctgaccaagtacgcccgggacctgaccgacctggcccgccaggggaagcttgacccggttatcggccgggatgatgaaatccggcgggtgctgcaggtcctgtcccggcgcaccaagaacaacccggtcctcatcggtgagccgggggtggggaagaccgccatcgtggaggggctcgcccagcggattgtctcgggggacgtgccggaatccctgaaggataagcgcctcgtggccctcgacatgggggccctcatcgccggcgccaagtatcggggggagttcgaggagcggctcaaggcggttatcaaggaggtggccaagtccgagggaaaggtgatcctcttcattgacgagctccacaccctggtgggggccggagccgccgagggggccatggacgcctccaacatgctcaagccggccttggcccggggggagctccactgcatcggcgccaccaccctcaacgagtaccgcaagtacatcgagaaggacgcggccctggagcggcgcttccagcaggtctacaccggcgagccgagcgtggaggacaccattgccatcctccgggggctcaaggagaagtacgagacctaccacggcatccggatcaaggacagcgccatcatcgccgccgccacgctttcggaccgctacatcaccgaccgcttcctccccgacaaggccatcgacctcatcgacgaggccgcctcgcgcctgaggatcgagattgactccatgccaaccgagatcgacgaggtggagcggaagatcatccaactggagatcgagaagcaggcgcttttgcgggagcaggacccccacgccctggagcgtctccagaagctgactgacgagctgaacgggctccaggcccaagcggcggagctgaaggcccactggcggcaggagaaggaaattatcaagggactcagcgaactgaagcagcagcttgaggagaggaaagagcaggcgaagaaggccgagcgggaggggaacctggcccgtaccgcggagatccgctatggagagattcctgccatcgagaaggaaatggaggagaagaagcagcaactggaggcgctccagaaggaagggaagatgctccccgaagaggttgatggcgaactggtggctgaaatcgtctcccgctggactggtgttccggtctcacgcatgatggagggggaggcggacaagctcgtgcacatggaggagcggctcaagacccgcgtggtgggccagaacgacgccctgctgctggtggccaacgccatccgccgcgcccggtcggggctctcggaccccaaccgccccatcggctccttcctcttcctgggccccaccggggtcgggaagaccgaaaccgccaaggccctggccgagttcctcttcaacgacgaccaggccattgtccggatcgacatgagcgagtaccaggaaaaacacaccgtggcccggctcatcggtgcgccccccggctacgtcggctacgaggagggggggcagctcacggaagcggtcaagcgccgcccctactccatcgtccttttcgacgaaatcgagaaggcccatgccgaggtgttcaacgtcctcctccaggtgctcgatgacggccggctcaccgacggccaggggcggacagtggatttccgcaatacggtcatcatcatgacgagcaacctgggctcccagtggatccagcagtatggcgccagcgactacacccgcatgaagcagatggtgaccgagaccctgcgggagagcttcaaacccgagttcctgaaccggatcgacgaggtggtcatctaccacgcgctgccgctcgagcggatcaagcagatcatcgacatccagatccaagggctgaagaagcgcctcgccgagcggcacatcaccctggagatcaccgacaaggcacgggaatacctggcccaggaggggtacgatccagcctacggagcacggcccctcaagcgggcgatccagcgcaaggttcaggaccccctggccctcatgctcctcgaagggaagttccgggagggggacaccatccgggccgacctctcccatggcggagaagggctcgtcattacgaaaaaataa

SEQ ID NO: 6996 - protein, 864 aa, Geobacter metallireducens GS-15
MIRPEKMTIKTQEALAGAQQLAARQGNGTIEPEHLLAALLEQEGGLVAPILQKVGAAPASLRSSVDALLKKLPQVSGATAQAYLSPSLNRILDGAQREADAMKDEFVSTEHLLLGFFADKQCAATRALLDGGATRENVLAALVEIRGGERVTDQSPEDKYQALTKYARDLTDLARQGKLDPVIGRDDEIRRVLQVLSRRTKNNPVLIGEPGVGKTAIVEGLAQRIVSGDVPESLKDKRLVALDMGALIAGAKYRGEFEERLKAVIKEVAKSEGKVILFIDELHTLVGAGAAEGAMDASNMLKPALARGELHCIGATTLNEYRKYIEKDAALERRFQQVYTGEPSVEDTIAILRGLKEKYETYHGIRIKDSAIIAAATLSDRYITDRFLPDKAIDLIDEAASRLRIEIDSMPTEIDEVERKIIQLEIEKQALLREQDPHALERLQKLTDELNGLQAQAAELKAHWRQEKEIIKGLSELKQQLEERKEQAKKAEREGNLARTAEIRYGEIPAIEKEMEEKKQQLEALQKEGKMLPEEVDGELVAEIVSRWTGVPVSRMMEGEADKLVHMEERLKTRVVGQNDALLLVANAIRRARSGLSDPNRPIGSFLFLGPTGVGKTETAKALAEFLFNDDQAIVRIDMSEYQEKHTVARLIGAPPGYVGYEEGGQLTEAVKRRPYSIVLFDEIEKAHAEVFNVLLQVLDDGRLTDGQGRTVDFRNTVIIMTSNLGSQWIQQYGASDYTRMKQMVTETLRESFKPEFLNRIDEVVIYHALPLERIKQIIDIQIQGLKKRLAERHITLEITDKAREYLAQEGYDPAYGARPLKRAIQRKVQDPLALMLLEGKFREGDTIRADLSHGGEGLVITKK

SEQ ID NO: 6997 - DNA, 2592 bp, Desulfovibrio desulfuricans subsp. desulfuricans str. G20
  CDS (1)..(2592): transl_table=11
atggatataagcaagtttactgaaaaatcgcagcaggctctgggcgaagcgcagaatgtggctgtgcgggcaggccatcaggaggttgatgtcgagcatcttgcgctcgcgctggtggtgcaggagcatgggattgttccccgtctgctggacaaggcgggagtgcgcccccaagcttttgccgcggctgtcgaggcggaactgggcagaaagcctgctgtaagcggtccgggttcggcgcaggggcagatttttgtcacgcagcggcttaacaggctgcttgtaaaagcgcaggattccgcccgtcgcctgcaggacgagtacgtcagtgtggaacatattttctgcgccatggctgaagaaccagcctcaagcccggtgggcagagtgtttgctcagttcgggctgacacaggaaaagctgctgggcgtactgactcaggtccgcggtgcacagcgcgtaacgtcatccaaccctgaagatacctatgaagccctcagccgttacggtcgagatcttgtggaggaggcgcgcaagggcaagcttgatccggtgattggccgtgatgccgagataaggcgcacggtacgcattctttcgcggcgcacaaaaaacaaccctgtgctcatcggcgaggccggagtgggtaaaaccgccattgttgaggggctggcacaccgcatactcaacggtgacgtacccgaaagtctgcgcgacaagagcctttttgcactggatatgggggcgcttattgcaggcgccaaatatcgcggagagtttgaggaacgcctgaaagcggtgctgaaagaggttgagcaggccgagggccgcataatcatgttcatagacgaactgcataccattgtgggggccggcaagacggacggcgccatggatgcgggcaacctgctcaaacccatgcttgcacgcggcgaactgcattgcatcggggccacaacgctggatgaataccgcaagtatatagaaaaggatccggcactggaacgccgttttcagcctctggtggtggatgagcctacggtggaagataccatttcgattctccgcggtctcaaggagcggttcgaggtgcaccacggggtacgcatcagtgactccgcactggtggaggctgtcacgctttccaacaggtatattgccgacaggcagcttccggacaaagccattgaccttatcgacgaggccgctgcgcttatcaggaccgaaattgattcgctgcccgctgaactggacgaagccaaccgtaagatcatgcagctggaaattgaacgtgaagctttgcggcgtgagacggatgcggcgtctcgtgaacggctgcaaaagctggagaatgagctggctgaactgcgcgaggtacaggcgggactgaatacccagtgggaacgcgaaaagggttctatagacagcgtgcgcgcgcttaaggaagacattgagcgcacgcggcgtcagatagaggaggcggaacgcaattacgatcttaaccgtgctgcggagctgaagtattcagtgctgcacgatctggaaaaacgtcttgcggcaaccgagggcggcggcgaaaacggcccgcggctgctgaaggaggaagtaggtccggatgatgtggcagagatagtagcccgctggacaggaattcccgtgacgcgtctgcttgaatcggaaagggaaaagctgctccgtctgcccgatgtgctgcatcagcgggttgtggggcaggatgtggcggtagatgccgtggcagaagcggtgctgcgctcgcgcgccgggctgtccgaccctgcgagacccatcggttctttcattttcctcggacccaccggagtgggaaaaaccgagctgtgcaagacccttgcgcaggcgctttttgatactgaagataatattgtccggctggacatgagtgaatacatggaaaaacataccgtggcacgccttatcggagcgcctcccgggtatgtgggttatgacgatggcgggcagctgaccgaagcggtgcgtcgcaaaccgtatagtgttgtgctttttgatgaaattgaaaaagcgcatcctgatgtgtttaatgtgctgctgcaactgctggacgacggcagactgacggacagtcacggccggacagtggatttcaaaaacactatcatcatcatgacctccaacataggtgccccgctcatgctggacggcatttcgccgcagggcgaatttaccgaaggagtggaagacagggtgcttgaagaactccggcggcatttcagaccggaatttctcaacagggttgatgagatagtgctcttcaagcctcttatgcttgaacagatcatgcatattgtcgatctgctcatgcagcgcctgctggggcgccttgccgaacgcaaaatccgcgtgagcctgacggacaaggcgaaacggttcgttgccgagtccgcatacgatcccgtatacggagcgcgtccgctgaagaggtacctgcagcagcgccttgaaactccgctggcccgcaggataattgccggagaactgcgtgacggacagcaggtgaccgtggataccgacggtcatacgctgttttttgaataa

SEQ ID NO: 6998 - protein, 863 aa, Desulfovibrio desulfuricans subsp. desulfuricans str. G20
MDISKFTEKSQQALGEAQNVAVRAGHQEVDVEHLALALVVQEHGIVPRLLDKAGVRPQAFAAAVEAELGRKPAVSGPGSAQGQIFVTQRLNRLLVKAQDSARRLQDEYVSVEHIFCAMAEEPASSPVGRVFAQFGLTQEKLLGVLTQVRGAQRVTSSNPEDTYEALSRYGRDLVEEARKGKLDPVIGRDAEIRRTVRILSRRTKNNPVLIGEAGVGKTAIVEGLAHRILNGDVPESLRDKSLFALDMGALIAGAKYRGEFEERLKAVLKEVEQAEGRIIMFIDELHTIVGAGKTDGAMDAGNLLKPMLARGELHCIGATTLDEYRKYIEKDPALERRFQPLVVDEPTVEDTISILRGLKERFEVHHGVRISDSALVEAVTLSNRYIADRQLPDKAIDLIDEAAALIRTEIDSLPAELDEANRKIMQLEIEREALRRETDAASRERLQKLENELAELREVQAGLNTQWEREKGSIDSVRALKEDIERTRRQIEEAERNYDLNRAAELKYSVLHDLEKRLAATEGGGENGPRLLKEEVGPDDVAEIVARWTGIPVTRLLESEREKLLRLPDVLHQRVVGQDVAVDAVAEAVLRSRAGLSDPARPIGSFIFLGPTGVGKTELCKTLAQALFDTEDNIVRLDMSEYMEKHTVARLIGAPPGYVGYDDGGQLTEAVRRKPYSVVLFDEIEKAHPDVFNVLLQLLDDGRLTDSHGRTVDFKNTIIIMTSNIGAPLMLDGISPQGEFTEGVEDRVLEELRRHFRPEFLNRVDEIVLFKPLMLEQIMHIVDLLMQRLLGRLAERKIRVSLTDKAKRFVAESAYDPVYGARPLKRYLQQRLETPLARRIIAGELRDGQQVTVDTDGHTLFFE

SEQ ID NO: 6999 - DNA, 2652 bp, Synechococcus elongatus PCC 7942
  CDS (1)..(2652): transl_table=11
atgggttcatcgctggaacttctcaccatgcaaccgacgaatcccaatcaatttactgaaaaagcctgggaagcgatcgttcgcacaactgatgttgcgaaacaagctcagcatcagcaaattgaatcagaacatctgtttttggccttgcttcaagaaccagggctggctctgaatatcctcaagaaagcagggttagaagcggcacaactacagcagtttacagagcggtttattgcccgccagccaaaggtgagtgggggtaatcagtcggtttatctggggcgatcgctcgatcaactcctcgatcaggcggatcagtttcgcaaggactttggggatgaatttatttcggttgagcacctcatcctcagctttccccgcgattcccgttttgggcgcttgctcagtcaagaattcaaggttgacgagaagcagctccgtcagattattcaacagattcgaggcagccaaaaagtgactgatcaaaaccctgaaggtaaatacgaagccctcgaaaaatatgggcgtgacctgactgaaatggcgcgtcgtggcaagctcgatcccgtcattggccgcgatgatgaaatccgtcgcactattcagattctcagtcggcgcaccaagaataatccggtcttgattggcgagcctggggttggcaaaactgcgatcgcagaaggattagcccagcggattattaatggtgatgtcccgcaatccctcaaggatcggcggctgattgctttggacatgggtgccttaattgcaggtgctaaattccggggtgagtttgaagaacgcctgaaagcagtcctcaaggaagtcactgactctgaaggcatcattatcctctttattgatgagattcatacggtggttggtgctggagcggtccaaggctccatggatgctggcaacttactgaagccgatgctggcgcggggagaattgcgctgtattggggcaaccacactagatgaatatcgccaatatattgagaaggatgcggctcttgaacgacgcttccaacaggtctttgtcgatcaacctacggtagaagatacgatctcgattttgcgtggcttaaaagagcgctatgaagtgcatcatggcgtccgtatttctgacaacgctcttgtcgctgctgctgtcctctcgacccgctacatcagcgatcgcttcttgccagataaggcgattgatttagtcgatgagtcggcggctcgactcaagatggaaatcacttcaaagccagaagaattagatgagatcgatcgcaagattctccagctcgaaatggaacgactctccttgcaaaaagagagtgatcttgcctcacaggaacgtctgcaacggctagaaaaagagttggccgacctaaaagaagagcagcggagtttaagcagtcaatggcaagctgaaaaggatgttattactgatatccaatccgtcaaggaagagattgatcaggttaacttgctaattcaacaggcagagcgagattacgacctgaacaaagcagctgagctgaagtacggcaaactgacagaactgcagcgcaagctcaacgaaatggagggcggtttagcgacgacccacaccagtggcaagtctctgctgcgcgaagaagtgacagaggttgacattgctgaaatcatctctaagtggacggggattcctgtcagcaagctggttgagtcagagatgcaaaagctcctcaatctcgatgaagaactgcatcaacgggtgattggccaagaagaagcggtttctgctgtcgcggatgcaattcagcgatcgcgagctgggttgtctgatccgaaacgcccgatcgcgagcttcatcttcttgggccctacaggggttggtaaaaccgagttggccaaagccctagctgcctatctcttcgacactgaagacgcgatgattcgcattgatatgtcggagtacatggagaaacacgcggtttcgcggctaatcggcgcgcctccgggctacgtcggctatgacgaaggcggccaactcacggaagcggtgcggcggcgtccctattccgtcatcctctttgatgagattgagaaggcccatccagatgtcttcaacgtcatgttgcagattctcgatgatggtcgagtcaccgatagccgcggccgaacagtggacttcaagaatacaatcttgattttgaccagcaatatcggttcgcaatacattctcgatgtggctggcgatgacagccgctacgaagaaatgcggagccgtgtcaccgaagcactgcgggctaatttccgaccggaatttctgaatcgggtcgatgagacaatcatcttccacagcctgcgcaaggatcagttgcagcagattgtgcggattcaactgcatcgccttgaagaacgattgagcgatcgcaaattatcgctgtcgatgagtccagaagcgatcgatttcttggttgagattggttttgatcccgtctatggagctcgtccgctcaaacgagtcattcagcgagagttggaaactgcgatcgctaaggcgatcctcagggggcaattcagtgatggcgacacgattcaagttgctgtggagaatgaacgactcgtctttaaggcgatcgcaactccaactgcggttcccctgagctaa

SEQ ID NO: 7000 - protein, 883 aa, Synechococcus elongatus PCC 7942
MGSSLELLTMQPTNPNQFTEKAWEAIVRTTDVAKQAQHQQIESEHLFLALLQEPGLALNILKKAGLEAAQLQQFTERFIARQPKVSGGNQSVYLGRSLDQLLDQADQFRKDFGDEFISVEHLILSFPRDSRFGRLLSQEFKVDEKQLRQIIQQIRGSQKVTDQNPEGKYEALEKYGRDLTEMARRGKLDPVIGRDDEIRRTIQILSRRTKNNPVLIGEPGVGKTAIAEGLAQRIINGDVPQSLKDRRLIALDMGALIAGAKFRGEFEERLKAVLKEVTDSEGIIILFIDEIHTVVGAGAVQGSMDAGNLLKPMLARGELRCIGATTLDEYRQYIEKDAALERRFQQVFVDQPTVEDTISILRGLKERYEVHHGVRISDNALVAAAVLSTRYISDRFLPDKAIDLVDESAARLKMEITSKPEELDEIDRKILQLEMERLSLQKESDLASQERLQRLEKELADLKEEQRSLSSQWQAEKDVITDIQSVKEEIDQVNLLIQQAERDYDLNKAAELKYGKLTELQRKLNEMEGGLATTHTSGKSLLREEVTEVDIAEIISKWTGIPVSKLVESEMQKLLNLDEELHQRVIGQEEAVSAVADAIQRSRAGLSDPKRPIASFIFLGPTGVGKTELAKALAAYLFDTEDAMIRIDMSEYMEKHAVSRLIGAPPGYVGYDEGGQLTEAVRRRPYSVILFDEIEKAHPDVFNVMLQILDDGRVTDSRGRTVDFKNTILILTSNIGSQYILDVAGDDSRYEEMRSRVTEALRANFRPEFLNRVDETIIFHSLRKDQLQQIVRIQLHRLEERLSDRKLSLSMSPEAIDFLVEIGFDPVYGARPLKRVIQRELETAIAKAILRGQFSDGDTIQVAVENERLVFKAIATPTAVPLS

SEQ ID NO: 7001 - DNA, 2613 bp, Rhodospirillum rubrum ATCC 11170
  CDS (1)..(2613): transl_table=11
atggatcccgaaaaactgacggatcggtcgaagggctttctgcaggcggctcagaccatcgccctgcgcgaaacccaccagcaggtgacgcccgagcatctgctcaaggccctgcttgatgataaagaaggattggcggccaatttgattcgcgccgctggcggtgacccgctgcgcgcccaggaggcggtcaaccgcgaagtcgacaaactgcccaaggtgcaaggcgcccagcagatgtattgggcccagtcgctggcccgggtgatcgatcaggcgacgcgcatggccgaaaaggccggcgatagcttcgtgaccgtggagcgcttgctgatcgccctggcgatggccgccgagaccccggccaagcgcatcctcgccgaggccggcgccacgccccagggcctcaacaaggcggtcgaagacctgcgcaagggccgcaaggccgatagcgccggggcggaatcccaatatgacgccctgaagaaatacgcccgcgacctgaccgaggcggcgcgcgagggcaagcttgacccggtgatcggccgcgacgaggaaatccgccgcaccatccaggtgctcagccgccgcaccaagaacaacccggtgctgatcggcgagcccggtgtcggcaagacggcgatcatcgagggtctggccctgcgcatcgtcaatggcgacgttcccgaaagcctgcagaacaagaagctgatggcccttgaccttggcgccatggtcgccggcgccaagttccgtggcgagttcgaggaacgcctgaaggcgatgctgaccgaggtgtcggcggccgagggcgagatcatcttgttcatcgacgagatgcacaccctgatcggcgccggggccggggagggggcgatggacgcctcgaacctgctcaagccggccttggcgcgcggcgatctgcattgcgttggcgcgaccacgctcaatgaataccgcaagcatgtggaaaaggacgcggccctggcccggcgtttccagccggttttcgtctccgagccgggtgtggccgataccatttcgatcctgcgcggcatcaaggagaagtacgagctgcaccacggggtgcgcatcgccgataacgccctggtcgccgccgccaccttgtccaaccgctatatcaccgaccgcttcctgcccgataaggccatcgacctgatggacgaggcggcaagccgcctgcgcatggaggtcgacagcaagcccgaggccctggacgagcttgatcgccgcatcatccagctgaaaatcgagcgcgaggccctgcgcaaggaaaaggacatcgcctcggaggcccgtcttagcgatctggaaaaggaactggccgatctggaaagccagtcggcgaccctgaccgaggactggaagcgcgaaaaggaaggtctggccggatcgacgcgcatcaaggagcaattggagcaggcgcgcggtgatcttgatatcgccaaacgccaagccaattgggcgcgggcgggcgagttggaatatggcgtcatccccgatctcgaacgccgtttgggcgaggtcgaatccggtgatggcctcgcccatcgccagggtggcaagctggtcaacgaggtggtgaccgccgagaccatcgcttcggtggtgtcgcgctggaccggcattcccgttgacaagatgctggcgggcgaacgcgaaaagctgctgggcatggaaaaggttctggcttcaagggtggtcggccagcgcgaggcggtggtggccgtttccaacgccgtccgccgctcgcgggccggcttgcaagatcccaaccggccgatggggtcgttcctgttcctcggccccaccggcgtgggcaagaccgaactgaccaaggccctggccgccttcctgttcgacgacgagcaggcgatggtgcgcatcgacatgtccgaatacatggaaaagcacgcggtttcccggctgatcggcgcgcctccgggctatgtcggctatgacgagggcggggctttgaccgaggcggtgcggcgccggccctatcaggtgatcttgtttgacgaggtcgagaaggcccatcccgatgtgttcaacgtgcttctgcaggtgcttgacgacggccgcttgaccgatggccagggccgcaccgtcgatttccgcaataccctgatcgtgctgacctcgaacctgggggccgatatcctggccaaccagcccgagggcgatgattcaggcgcggtgcgcggcgcggtgatggagatggtgcgcgccgccttccgccccgagttcctgaaccgccttgacgagatcttgctgttccatcgcctgttccgcgagaacatggccgggatcgtgtcgatccagcttggccgtttggccgaccggctgcgcgatcgcaagatgacccttgatctggacgacgcggcgcgcgactggctggccgagcgcggctatgacccggtctatggcgcccggccgcttaagcgggtgatccagcgctctttggaaaatccgctggccaccctggtgcttgatggccggatcaaggatggcgatgtcatccgcattaccgttgaaggaggcaaactggtggtcaatggcgaagcgttgtctttggacaccgccgcatga

SEQ ID NO: 7002 - protein, 870 aa, Rhodospirillum rubrum ATCC 11170
MDPEKLTDRSKGFLQAAQTIALRETHQQVTPEHLLKALLDDKEGLAANLIRAAGGDPLRAQEAVNREVDKLPKVQGAQQMYWAQSLARVIDQATRMAEKAGDSFVTVERLLIALAMAAETPAKRILAEAGATPQGLNKAVEDLRKGRKADSAGAESQYDALKKYARDLTEAAREGKLDPVIGRDEEIRRTIQVLSRRTKNNPVLIGEPGVGKTAIIEGLALRIVNGDVPESLQNKKLMALDLGAMVAGAKFRGEFEERLKAMLTEVSAAEGEIILFIDEMHTLIGAGAGEGAMDASNLLKPALARGDLHCVGATTLNEYRKHVEKDAALARRFQPVFVSEPGVADTISILRGIKEKYELHHGVRIADNALVAAATLSNRYITDRFLPDKAIDLMDEAASRLRMEVDSKPEALDELDRRIIQLKIEREALRKEKDIASEARLSDLEKELADLESQSATLTEDWKREKEGLAGSTRIKEQLEQARGDLDIAKRQANWARAGELEYGVIPDLERRLGEVESGDGLAHRQGGKLVNEVVTAETIASVVSRWTGIPVDKMLAGEREKLLGMEKVLASRVVGQREAVVAVSNAVRRSRAGLQDPNRPMGSFLFLGPTGVGKTELTKALAAFLFDDEQAMVRIDMSEYMEKHAVSRLIGAPPGYVGYDEGGALTEAVRRRPYQVILFDEVEKAHPDVFNVLLQVLDDGRLTDGQGRTVDFRNTLIVLTSNLGADILANQPEGDDSGAVRGAVMEMVRAAFRPEFLNRLDEILLFHRLFRENMAGIVSIQLGRLADRLRDRKMTLDLDDAARDWLAERGYDPVYGARPLKRVIQRSLENPLATLVLDGRIKDGDVIRITVEGGKLVVNGEALSLDTAA

SEQ ID NO: 7003 - DNA, 2523 bp, Moorella thermoacetica ATCC 39073
  CDS (1)..(2523): transl_table=11
atggcacgttttaccgaaagagcgaaccgggtcctgcgcctggcccaggaagaagccctggccctgcgtcacccggccataggcaccgaacatatcctgctggggatcttacgggagggcgacagcgtcgccgcccgcgccctgaccaatctgggagttaacatcaaagccgtccgcgaagaggtccgcaaggtcatccggccgggcgaagccgtcgtcggcggcgagttgggcctgaccccgcgggcgaaaagggtcctggagctggccaacgaggaagcccggcgccagggggtcaactacgtcggcaccgagcacctccttttaggcctgctggaggaaggtgagggcctggcggcccaggtcctgggcggcctgggcttaagccccgagaagatccgcgagcaggtaatcgccctgctgggaggggccggccagccccagaccggcggctggaccgtcctcttcggcaacctgcccttcggcatggcggctttccccgggggcatgggcttccaggcccagggtatgcccgcgggggccaagatgcaggagcggcggcccgggcagacgcccaccctggaccagttcagccgggacctcacccgcctggcccgggaagacaaactcgacccggtagtcggccgggagaaagagattgagcgggtcgtccagatcttaagccgccggaccaagaacaacccggtcctcatcggcgacccgggcgtgggcaagacggccatcgtcgagggcctggcccagaagatcgtccagaaccaggtgccggaggtcctgcgggacaaacgggtggtggccctggatatgtccggcatggtggccggcaccaagtaccggggcgagttcgaagagcgctttaaaaaggtcatggacgaggtccgggctgccggcaacgtcatcctctttatcgacgagctccacaccctcatcggcgccggggccgccgagggggccatcgacgccgccaacatcttaaaacccgccctggcccggggcgaactccagaccatcggcgccaccaccatcgacgagtaccgcaagcacatcgagcgggacgccgccctggagcgccgcttccaggccgtcatggtggaagagcccacggtggaggaaaccatcgccatcctgaagggcctgcgggaccggtatgaagcccatcaccgggtcaagatcaccgatgaggccctggaggccgccgcccggctctccgaccgctacatcaccgaccgctacctgccggataaagccatcgacctggtggacgaggccggctcccgggtgcgcctcaaagtctacacggcccccgacgacgtaaagaagctggaggcccgcctggaagagctcgagaaagaaaaagccgcggccgtcaacgcccaggagtttgaaaaggccgccaccctgcgggatgaagagaagaaaatcaaagaagagctggaagccaaaaagggcgagtggcagaaggaaaagggcctggagaaatccgtggtcacgccggaggacatcgcccagatcgtctccagctggacggggatccccgttacccagctcgcccaggaggagagcgagcggctgctgcacctggaggacgtcctgcaccagcgggtcatcggccaggacgaggccgtccacgccgtggcccgggccgtgcgccgcgcccgggcgggcctcaaagaccccaagcggcccatcggctccttcatcttcctgggacccaccggcgtcggcaagacggagctcgcccgggccctggccgaggccctcttcggcgacgaagacgccatggtccgcttcgacatgtccgagtacatggagaagcacaccgtctcccggctggtgggcgccccgcccggctacgtcggctacgaggagagcggccagctgacggaggccgtccggcgccggccctacagcgtcgtcctcttcgacgagatcgaaaaggcccacccggacatctttaacgtcctgctccaggtcctggacgacggccggctcaccgacgccaagggccgcacggtggacttccgcaacacggtgattatcatgacctccaatatcggcgccagcaccatcaagcgggagagcctgggcttcaaggcctccaccagcgaagtggcggccgagtcttacgacaagatgaagaagcacatcctggaagaactgcggcggaccttccggcccgagttcttaaaccgcatcgacgacctcatcgtcttccatgccctctccagggacgacatccggaagatagtcgacctgatgctggccgaactaaaccgccgcctggaggacaacaacctctccgtcgaggtaaccgacgaggccaaagatatcctggtccgggagggcttcgacgaggcctacggcgcccggcccctgcgccgcgccatccagaccctcatcgaagaccagctctccgacgagatgctggccggcaaatttaaacccggcgacaaggtccgggccgtcgcccgggacggcaagatcgccctggaaaaggcggcttaa

SEQ ID NO: 7004 - protein, 840 aa, Moorella thermoacetica ATCC 39073
MARFTERANRVLRLAQEEALALRHPAIGTEHILLGILREGDSVAARALTNLGVNIKAVREEVRKVIRPGEAVVGGELGLTPRAKRVLELANEEARRQGVNYVGTEHLLLGLLEEGEGLAAQVLGGLGLSPEKIREQVIALLGGAGQPQTGGWTVLFGNLPFGMAAFPGGMGFQAQGMPAGAKMQERRPGQTPTLDQFSRDLTRLAREDKLDPVVGREKEIERVVQILSRRTKNNPVLIGDPGVGKTAIVEGLAQKIVQNQVPEVLRDKRVVALDMSGMVAGTKYRGEFEERFKKVMDEVRAAGNVILFIDELHTLIGAGAAEGAIDAANILKPALARGELQTIGATTIDEYRKHIERDAALERRFQAVMVEEPTVEETIAILKGLRDRYEAHHRVKITDEALEAAARLSDRYITDRYLPDKAIDLVDEAGSRVRLKVYTAPDDVKKLEARLEELEKEKAAAVNAQEFEKAATLRDEEKKIKEELEAKKGEWQKEKGLEKSVVTPEDIAQIVSSWTGIPVTQLAQEESERLLHLEDVLHQRVIGQDEAVHAVARAVRRARAGLKDPKRPIGSFIFLGPTGVGKTELARALAEALFGDEDAMVRFDMSEYMEKHTVSRLVGAPPGYVGYEESGQLTEAVRRRPYSVVLFDEIEKAHPDIFNVLLQVLDDGRLTDAKGRTVDFRNTVIIMTSNIGASTIKRESLGFKASTSEVAAESYDKMKKHILEELRRTFRPEFLNRIDDLIVFHALSRDDIRKIVDLMLAELNRRLEDNNLSVEVTDEAKDILVREGFDEAYGARPLRRAIQTLIEDQLSDEMLAGKFKPGDKVRAVARDGKIALEKAA

SEQ ID NO: 7005 - DNA, 2598 bp, Burkholderia thailandensis E264
  CDS (1)..(2598): transl_table=11
atgagaatcgacaagctcaccaccaagttccaagaagcgctttcggatgcgcagagtcttgccgccgggcgcgacaaccaatacatcgaacccgttcacgtgctggccgcgctgatcgcgcagcaggacggctccgcgcgctcgctgctgtcgcgcgcgggcgtgcacatccaggcgctgcaaggcgcgctcaatgaagcgatctcgcgcttgccgcaggtgacgggcacgggcggcgacatccaggtcggccgcgagctcgcgggcctgctgaaccaggccgacaaggaagcgcagaagctcaacgacacgttcatcgcgagcgaaatgttcctgctcgccgtggctgacgacaagggtgaagccggcaagctcgcgcgccagcacggcctcacgcgccgcgcgctcgaatccgcgatcgccgcggtgcgcggcggctcgcaggtgcacagccaggatgccgagagccagcgcgaggcgctgaagaagtacacggtcgacctgaccgagcgcgcgcgcgcgggcaagcttgaccccgtgatcggccgcgacgacgagattcgccgttcgatccagatcctgcagcgccgcacgaagaacaacccggtgctgatcggcgagccgggcgtcggcaagaccgcgatcgtcgaagggctcgcgcagcgcatcgtcaacggcgaagtgcccgagacgctgaagaacaagcgcgtgctgtcgctcgacatggcggcgctgctcgccggcgcgaagtatcgcggcgagttcgaggagcgcctgaaggcggtgctcaacgacatcgcgaaggatgaaggccgtacgatcgtcttcatcgacgagattcacacgatggtgggcgcgggcaaggccgaaggcgcgatggacgcgggcaacatgctcaagccggcgctctcgcgcggcgagctgcactgcatcggcgcgacgacgctcgacgaatatcgcaagtacatcgagaaggacgccgcgctcgagcgccgcttccagaaggtgctcgtcgacgagccgagcgtcgaggcgacgatcgcgatcctgcgcgggctgcaggagaagtacgagctgcatcacggcgtcgagatcaccgatccggcgatcgtcgccgcggcggagctgtcgcatcgctacatcaccgaccgtttcctgcccgacaaggcgatcgacctgatcgacgaggccgcgtcgaagatcaagatggaaatcgattcgaagcccgaagaaatggacaggctcgatcggcgtctgatccagttgaagatcgagcgcgaagcggtgaagaaggagcaggacgaagcgtcgcaaaagcgtctcgcgctgatcgaggaggaaatcgagcggctcggccgccagtacgcggatctcgaagagatctggacggcggagaaggcggccgtgcagggcagcgcgcagctgaaggaggagatcgacaaggtgcgcgccgacatcgcgcggttgcagcgcgaaggcaagctcgagaaggtcgcggagctgcagtacggcaagctgccgcagctcgaggcgcgcctgaagcaggtcacgcaggcggaggaaagcgaacagcacaatccgacccggccgcgcctgttgcgcacgcaggtcggcgcggaggaaatcgccgaggtcgtctcgcgtgcaaccggcattccggtgtcgcggatgatgcaaggcgagcgcgagaaactgctgcacatcgaagagaagctgcatgagcgcgtcgttggccagaacgaggcgatcgacgcggttgccgacgcgatccgccgctcgcgcgcgggcctcgccgatccgaaccgcccgtacggctcgttcctgttcctcggcccgacgggcgtcggcaagaccgagctgtgcaaggcgctcgccggcttcctgttcgattcggaagagcacctgattcgcatcgacatgagcgagttcatggaaaagcacagcgtcgcgcggctgatcggcgcgccgcccggctacgtcggctacgaggagggcggctacctgacggaagccgtgcgccgcaagccgtacagcgtgatcctgctcgacgagatcgagaaggcgcacccggacgtgttcaacgtgctgctgcaggtgctcgacgacggccggatgacggacgggcaggggcgcaccgtcgacttcaagaacacggtgatcgtgatgacgtcgaacctcggctcgcaactgatccagtcgatgtcgggctcgtctcaggaagagatcaaggacgcggtgtgggtcgaggtcaagcagcacttccgtcccgagttcctgaaccggatcgacgatgtcgtcgtgttccactcgctcgaccgcagcaacatccaggcgatcgcgaagattcagctcgcgcgcctgcacgaccggctcgcgaagctcgaaatggcgctcgacgtgtccgaggccgcgctcgagcagatcggcaaggtcggctacgatccgctgttcggcgcgcggccgctcaagcgcgcgatccagcaggagatcgagaacccggtcgcgaagctcatcctcgcgggccgcttcggaccgaaggacgtgattccggtcgacgtgcaggacggcaagttcgtgttcgagcgcgtcgtgcactga

SEQ ID NO: 7006 - protein, 865 aa, Burkholderia thailandensis E264
MRIDKLTTKFQEALSDAQSLAAGRDNQYIEPVHVLAALIAQQDGSARSLLSRAGVHIQALQGALNEAISRLPQVTGTGGDIQVGRELAGLLNQADKEAQKLNDTFIASEMFLLAVADDKGEAGKLARQHGLTRRALESAIAAVRGGSQVHSQDAESQREALKKYTVDLTERARAGKLDPVIGRDDEIRRSIQILQRRTKNNPVLIGEPGVGKTAIVEGLAQRIVNGEVPETLKNKRVLSLDMAALLAGAKYRGEFEERLKAVLNDIAKDEGRTIVFIDEIHTMVGAGKAEGAMDAGNMLKPALSRGELHCIGATTLDEYRKYIEKDAALERRFQKVLVDEPSVEATIAILRGLQEKYELHHGVEITDPAIVAAAELSHRYITDRFLPDKAIDLIDEAASKIKMEIDSKPEEMDRLDRRLIQLKIEREAVKKEQDEASQKRLALIEEEIERLGRQYADLEEIWTAEKAAVQGSAQLKEEIDKVRADIARLQREGKLEKVAELQYGKLPQLEARLKQVTQAEESEQHNPTRPRLLRTQVGAEEIAEVVSRATGIPVSRMMQGEREKLLHIEEKLHERVVGQNEAIDAVADAIRRSRAGLADPNRPYGSFLFLGPTGVGKTELCKALAGFLFDSEEHLIRIDMSEFMEKHSVARLIGAPPGYVGYEEGGYLTEAVRRKPYSVILLDEIEKAHPDVFNVLLQVLDDGRMTDGQGRTVDFKNTVIVMTSNLGSQLIQSMSGSSQEEIKDAVWVEVKQHFRPEFLNRIDDVVVFHSLDRSNIQAIAKIQLARLHDRLAKLEMALDVSEAALEQIGKVGYDPLFGARPLKRAIQQEIENPVAKLILAGRFGPKDVIPVDVQDGKFVFERVVH

SEQ ID NO: 7007 - DNA, 2625 bp, Syntrophus aciditrophicus SB
  CDS (1)..(2625): transl_table=11
atgattatgaggaatcaacgcggaggagaaattatgcgttttgacaaatttaccttgaaagtactggaaggccttcaggaagcccagaccctggccggaaactacggtcatcatggcatcgatgttgagcatctcctgctggcttttatcgcccagccggaaggcattgtgggcaatatcctgaaaaaactgggcacggagccggcacagatagaaaaggaaattaaaaaagttgtggagcggctgccccgtatttcgggtccgattcagtcttatatcacccccagactgaataaaatcctggataacgccatgacggaagcagcccatctcaacgatgagtatgtcagcgccgaacatgtgctgatagccatggccaacgaaaaggaaggggaggcctcgcgcatcctccgctctgccggagtgacgcgggacaatatcttcaaggttctcgtggaaatccggggaacccagaggatcacggatcccaatcccgaagaaaaatatgaggccttgaagcggtatgccaaagatttcaatgaacttgcccgcaaaggggcgtttgaccccgtcatcggcaggaacgatgaaattcggagaatcatgcaggttctttcccggcggaccaagaacaatcccgttctcatcggtgaacccggtgttggaaagacggcgatcgttgaagggctcgcccagcgcatcgtaaatggcgatgtcccggaaagcctgaagaacaaacgggtcatcggtctggatatcggagcactggtagccggagccaagtatcgcggcgaattcgaggaccgtctcaaggctgtcctgaaggaagtcaccgacgcgcagggcgagatcatcctcttcatcgatgaaatccatacggtcgtcggcgccggagcagcggaagggtccgtggatgcatccaacatgctgaagccggccctcgctcgaggcgagttacgctgtgtcggggcgacaaccctgaacgaatacagaaagcatatagaaaaagatcccgcgctggaacggcgctttcagcccatactggtcagggagcccaccgtggaagacaccatcgccatcctccggggattgaaggaacggtatgaaatccatcacggcgtccggatcaaggattccgccatcgtcgcggcggcaacgctctctaatcgctacatcagtgatcgttttcttcccgacaaggctgtggacctggtggatgaggcggcatcccgcctgaggatcgaactggacagcctgccggcggaaatcgatgttctggagagaaaggctattcaactggagatcgagcgtcagtccctgaaaaatgaaacggaccggacatcccttgaaaggagagagaagatcgaacgggaacttgccgatctgcgggaatccatgaacagcatgaaactccactggtctgaggaaaaggaggtcataaaaagaatccagacgatcaagagtgatctcgaaaacttcaagaatgaagaacaaaatgccatgcgggaaggcaatctggcccgggctgcggaaatccgctacgggaaactggtggaattgaaccgggcgcttgaagaagaacagaatcgacttaaagaaatccagaaggacagcaagatgctgaaagaagaagtggatgccgaggatgtagcggaagtcgtcgccaactggaccggcattcccgtcgcccggatgatggaaagcgacatccagaagctgattcacatggaagaccggctcaagcagcgtgtgatcggacaggatgaaggcattcacgcggtttccgccgccctgcgtcgggcacgttccgggctccaggatcccaaccggcctatcggctcctttattttccttggccccaccggcgtgggcaagaccgagctggccagggcgctcgcggaattcatgttcgataatgaacaggccatgatccgcatcgatatgtcggaatacatggaaaagcattccgtcgcccgcctgatcggcgcgcctcccggatacgttggttatgacgaaggcggctatctcacggaagctgtccgccgtcgaccctatgcggttctgctgttcgacgaaatcgaaaaggcccatcccgatgtcttcaacatcctgctgcagatccttgacgacggccgcctgacggatggccacgggagaacggtcgatttcaagaacacgatcgtgattctgacttcaaacgttggaagccagtggattcaggacattaccctgacagctgaggagaagcgcctgaggaccatggaaattctgcgggccactttcaagcctgaatttctgaatcgaatcgatgacatcatcatcttccgctcactgaccatgacggatctcgaacggattatcgcgattcagatcggtctgattcagaaacggcttatggatcggaagctcttccttgaattgacagaaaaggccaaaaattatatatcccaggaaggttacagcccggtgtacggcgcgagaccgttgaagcgggccctccaaaagatgcttctcgacaatctctccatgaaaattctggaaggcgcctttgttgaaggagatcatattctcgcggacatcgatgaccggggcgaaatcaattttacaaagaaaagcggaagctaa

SEQ ID NO: 7008 - protein, 874 aa, Syntrophus aciditrophicus SB
MIMRNQRGGEIMRFDKFTLKVLEGLQEAQTLAGNYGHHGIDVEHLLLAFIAQPEGIVGNILKKLGTEPAQIEKEIKKVVERLPRISGPIQSYITPRLNKILDNAMTEAAHLNDEYVSAEHVLIAMANEKEGEASRILRSAGVTRDNIFKVLVEIRGTQRITDPNPEEKYEALKRYAKDFNELARKGAFDPVIGRNDEIRRIMQVLSRRTKNNPVLIGEPGVGKTAIVEGLAQRIVNGDVPESLKNKRVIGLDIGALVAGAKYRGEFEDRLKAVLKEVTDAQGEIILFIDEIHTVVGAGAAEGSVDASNMLKPALARGELRCVGATTLNEYRKHIEKDPALERRFQPILVREPTVEDTIAILRGLKERYEIHHGVRIKDSAIVAAATLSNRYISDRFLPDKAVDLVDEAASRLRIELDSLPAEIDVLERKAIQLEIERQSLKNETDRTSLERREKIERELADLRESMNSMKLHWSEEKEVIKRIQTIKSDLENFKNEEQNAMREGNLARAAEIRYGKLVELNRALEEEQNRLKEIQKDSKMLKEEVDAEDVAEVVANWTGIPVARMMESDIQKLIHMEDRLKQRVIGQDEGIHAVSAALRRARSGLQDPNRPIGSFIFLGPTGVGKTELARALAEFMFDNEQAMIRIDMSEYMEKHSVARLIGAPPGYVGYDEGGYLTEAVRRRPYAVLLFDEIEKAHPDVFNILLQILDDGRLTDGHGRTVDFKNTIVILTSNVGSQWIQDITLTAEEKRLRTMEILRATFKPEFLNRIDDIIIFRSLTMTDLERIIAIQIGLIQKRLMDRKLFLELTEKAKNYISQEGYSPVYGARPLKRALQKMLLDNLSMKILEGAFVEGDHILADIDDRGEINFTKKSGS

SEQ ID NO: 7009 - DNA, 2610 bp, Frankia sp. CcI3
  CDS (1)..(2610): transl_table=11
atgaacgctgaacgcctcaccgcccggtcgcaggaggcactctccgcagcgatcagtcgagccaccgccgacgggtcacccctcgtcgaccccctccacctgctcaacgccctgctcgaagcgtccgacggggtcggcgcggcactgctggcgtccgcgggcacctcggtcgacacggtgcgctcccgagccgaggccgcggtgacgcggctgccccgcgcgacgggcctgagcgtgtccccgccgcagctgtcccgccagctcatcgcggtgctgaacaacgccgagcggcaggccggtcagctgggtgacgaatacacttcggtcgagcatctggtcgtggcactcgccgaggaggggggcgaggccgggcggatcctcacctccgccggcgccacgcccgacgcgctgcgcggcgccttcgagaaggtgcgcggcggcgcccggcgggtgaccagccgggacccggagggctcctaccgcgcgttggagaagtactccatcgacctcaccgagcgtgcgcagcagggcaagctggacccggtgatcggccgcgacgccgagatccgccgcgtcatccaggtgctgtcgcggcggacgaagaacaacccggtcctcatcggcgagcccggggtcggcaagacggccatcgtcgaagggctcgcgctgcgggtcgtcgcgggtgacgtgcccgagtcgctgcgcggccggcgcatcgtctcgctcgacctcggttcgatggttgccggctccaagctgcgcggcgagttcgaggagcggctgacctctgtcctcaacgagatccgcgaggccgagggtcagatcatcaccttcatcgacgagctgcacaccgtcgtcggcgccggtgcggcggaaggagcgatggacgccggcaacatgctcaagccgatgctcgcccgcggcgagctgcgcatgatcggcgccaccaccctggaggagtaccgcacccggatcgagaaggacccggcgctggagcgtcgcttccagccggtcctcgtcggcgagccgacggtcgaggacaccatcggcatcctgcgcgggctcaaggaacgctacgaggtgcaccacggcgtgcgcatcaccgacaccgcgctggtcgccgcggccaccctgtccgaccgctacgtcaccgcgcgcttcctgccggacaaggcgatcgacctggtcgacgaggccgcgtcccggctccgcatggagatcgacagccggccggtggcgatcgacgaactcgaacgcgccgtgcgccgcctggagatcgaggacatggcgctgtccaaggagaacgacgaggcctcccgcgagcggcgggggcgcctgcagcgcgagctcgccgaccggcgtgaggagctgtcgagcctgacggcccgctggcaccgggagaaggattcgatctccgaggttcagaagatcaaggaggagctggagaacgcgcggcgcgccgtggagctcgccgagcgcgacctcgacctcgccaaggccggggagctgcggtacggcaccatcccgacgttggagaagcggctgtcggcggcaaccgacgcgctggccggcgcggactcccccggtggggcgatgctcaacgaggaggtcggcccggacgacgtcgccgaggtcgtcgccgcctggaccgggatcccggccggtcgcctcctcgaaggcgagacggcgaagctgctgcgtatggagtccgcgctgcacgcgcgggtcatcggccaggacgacgcggtgcgggccgtctccgacgcggtccgccgggccagggccgggatcgccgacccggaccggccgaccggctccttcctcttcctcgggcccaccggggtcgggaagaccgagctcgcgaaggcgctcgccgatttcctcttcgacgacgagcgggcgatcgtgcgcatcgacatgagcgagtatgccgagaagcactcggtggcccgtctgatcggcgccccacccgggtacgtcgggttcgagtccggcggtcagctcaccgaggcgatccgccgccggccatacagtgtcatcctgttggacgaggtcgagaaggcccatccggacgtctttgacgtcctgctgcaggttctcgacgacgggcggctcaccgacggccagggccgcacggtggacttccgcaacacgatcctcatcctgacctcgaacctcgggtcgcagttcatcgcggaccccacgctcagcccgcaggtgcgccgcgagtcggtgatggtcgccgtgcgcgacgccttcaagccggagttcctcaaccgcctcgacgacgtcctcgtcttcgaccagctgggccgggacgagctgacccgcatcgtcgatctccagctcgatcggctgcgggcccggctgctcgaccggaggatcaccctcaacgtcaccgacgccgccaagggatggctctccgacgtcggctacgacccggtgttcggggcccgtccgctgcggcggctggtccagacggcgatcggcgaccagctcgccaaggaactgctcggcgggcagatccgggacggcgacgaggtgctcgtcaacaccgcgccggaccgctcgggtctgacggtcaaggccgccaccgtcaagtccctctga

SEQ ID NO: 7010 - protein, 869 aa, Frankia sp. CcI3
MNAERLTARSQEALSAAISRATADGSPLVDPLHLLNALLEASDGVGAALLASAGTSVDTVRSRAEAAVTRLPRATGLSVSPPQLSRQLIAVLNNAERQAGQLGDEYTSVEHLVVALAEEGGEAGRILTSAGATPDALRGAFEKVRGGARRVTSRDPEGSYRALEKYSIDLTERAQQGKLDPVIGRDAEIRRVIQVLSRRTKNNPVLIGEPGVGKTAIVEGLALRVVAGDVPESLRGRRIVSLDLGSMVAGSKLRGEFEERLTSVLNEIREAEGQIITFIDELHTVVGAGAAEGAMDAGNMLKPMLARGELRMIGATTLEEYRTRIEKDPALERRFQPVLVGEPTVEDTIGILRGLKERYEVHHGVRITDTALVAAATLSDRYVTARFLPDKAIDLVDEAASRLRMEIDSRPVAIDELERAVRRLEIEDMALSKENDEASRERRGRLQRELADRREELSSLTARWHREKDSISEVQKIKEELENARRAVELAERDLDLAKAGELRYGTIPTLEKRLSAATDALAGADSPGGAMLNEEVGPDDVAEVVAAWTGIPAGRLLEGETAKLLRMESALHARVIGQDDAVRAVSDAVRRARAGIADPDRPTGSFLFLGPTGVGKTELAKALADFLFDDERAIVRIDMSEYAEKHSVARLIGAPPGYVGFESGGQLTEAIRRRPYSVILLDEVEKAHPDVFDVLLQVLDDGRLTDGQGRTVDFRNTILILTSNLGSQFIADPTLSPQVRRESVMVAVRDAFKPEFLNRLDDVLVFDQLGRDELTRIVDLQLDRLRARLLDRRITLNVTDAAKGWLSDVGYDPVFGARPLRRLVQTAIGDQLAKELLGGQIRDGDEVLVNTAPDRSGLTVKAATVKSL

SEQ ID NO: 7011 - DNA, 2580 bp, Novosphingobium aromaticivorans DSM 12444
  CDS (1)..(2580): transl_table=11
atgaacctcgagaaattcaccgaccgcgccaagggcttcctgcaggccgcgcagaccgttgcgatccgcatgaaccaccagcggatcacgcccgaccacatcctcaaggccctgctggaagacagcgagggcatggccagtggcctgatccagcgcgcgggcggcaatgccgccctggcgcagaccgaagtcgacaaggcgctggcgaagatcccggcggtgtccggttcgggtgcccaggcgacgccggggctcgacaacgatgccgtgcgcgtgctcgattccgccgagcagatcgcggccaagtccaacgacagcttcgtcaccgtcgagcgcatgctcgtcgcgctgacgctcgccaccacgacgtcggcggggcaggcgctcaaggccgcgaacgtgaccgcgcaggcgctggaagcggcgatcacgcagcttcgcggcggtcgcacggcggacagcgcgagcgcggaaaacgcctatgacgcgatgaagaagtacgcgcgcgacctgaccgaggcggcgcgcgagggcaagctcgacccggtgatcggccgtgacgaggagatccgccgcaccgtgcagatcctcgcccggcgcaccaagaacaacccggcgctgatcggcgagccgggcgttggcaagaccgcgatcgccgaaggcctcgcgctgcgcatcgccaatggcgacgtgccggattcgctgaaggaccgccgcctcatggcgctcgacatgggttcgctcattgccggtgcgaagtatcgcggcgagttcgaggagcgcctgaaggccgtgctcgacgaggtgaagggcgcggaaggcgagatcatcctgttcatcgacgagatgcacaccctgatcggggcgggcaagagcgagggcgcgatggacgcgggcaacctgctcaagccagccctggcgcgcggcgaactgcactgcatcggcgcgacgacgctggacgagtaccagaagtacgtcgagaaggaccccgcgctgcagcggcggttccagccggtattcgtgggcgagccgaccgtcgaggacacgatcagcatcctgcgcggcatcaaggacaagtacgagctgcaccacggcgtacgcattgccgacaatgcgatcgtggctgcggcgacgctttcgaaccgctacatctccgaccgcttcctgcccgacaaggccatcgacctgatggacgaggcggcgagccgcatccgcatggaagtggaaagcaagcccgaggaaatcgagaagctcgaccggcgcatcatccagatgaagatcgaggagatggcgcttgcgaaggagaccgaccaggcgtcgaaggaccggctggcgaccctgcgcgaggaactggcgaaccaggagcagcaatcggccgagctgaccacccgctggcagaacgagcgcgacaagatcgccgccgagggcaaggtcaaggaagcgctggatgcggcgcgcagcgagctggaggtggcgcagcgcaacggcgacctggcgaaggccggcgagcttgcctatggccgcattcccgagcttgagcggcaactggccgaagcgcagggcgtgagccagaacgcgatgctgcgcgaggaagtgaccgccgaggacatcgccgccgtcgtcagcaagtggaccggcgtgcccgtcgaccggatgatggaaggcgagcgcgagaagctgctgcacatggaagaggcgctgggcaagcgcgtgattggtcagaaggatgcggtgctggccgtgtccaaggccgtccgccgggcccgcgcggggcttcaggacccgaaccgtccgctgggcagcttcctgttcctgggccccacgggcgtgggcaagaccgagctgaccaaggcgctggcgggcttcctgttcgacgacgacaacgcgatggtgcgcatcgacatgtccgagttcatggaaaagcactccgtcagccggctgatcggcgcgcctccgggctatgtcggttacgatgaaggcggcgttctgaccgaagcaatccgcaggcggccctaccaggtcgtgctgttcgacgaggtcgagaaggcgcactcggacgtgttcaatgtgctgttgcaggtgctcgacgacgggcgcctgaccgatgggcagggccgcgtggtggacttcaccaacacgctgatcatcctgaccagcaacctcggcagccagtacctcgccaatctggaggaggggcaggacgtgcagagcgtcgagccgcaagtcatggacgtcgtgcgcgctcatttccggcccgagttcctcaaccgtctggacgagatcatcctgttccaccggctgggccacgaacacatggcgccgatcgtcgacatccaggtgggccgcgtggcgaacctgctcaaggatcgcaagatcgtgctcgacctcaccgacgcggccaagcgctggctgggacgggtcggctacgacccggtctatggcgctcgtccgttgaagcgggccgtgcagcggtacttgcaggacccgctggccgaaaagctgctgggcggcgaagtgcccgatggcagcacggtgcggatcgacgagggcgatggggccctgagcttcgtgatcgcatga

SEQ ID NO: 7012 - protein, 859 aa, Novosphingobium aromaticivorans DSM 12444
MNLEKFTDRAKGFLQAAQTVAIRMNHQRITPDHILKALLEDSEGMASGLIQRAGGNAALAQTEVDKALAKIPAVSGSGAQATPGLDNDAVRVLDSAEQIAAKSNDSFVTVERMLVALTLATTTSAGQALKAANVTAQALEAAITQLRGGRTADSASAENAYDAMKKYARDLTEAAREGKLDPVIGRDEEIRRTVQILARRTKNNPALIGEPGVGKTAIAEGLALRIANGDVPDSLKDRRLMALDMGSLIAGAKYRGEFEERLKAVLDEVKGAEGEIILFIDEMHTLIGAGKSEGAMDAGNLLKPALARGELHCIGATTLDEYQKYVEKDPALQRRFQPVFVGEPTVEDTISILRGIKDKYELHHGVRIADNAIVAAATLSNRYISDRFLPDKAIDLMDEAASRIRMEVESKPEEIEKLDRRIIQMKIEEMALAKETDQASKDRLATLREELANQEQQSAELTTRWQNERDKIAAEGKVKEALDAARSELEVAQRNGDLAKAGELAYGRIPELERQLAEAQGVSQNAMLREEVTAEDIAAVVSKWTGVPVDRMMEGEREKLLHMEEALGKRVIGQKDAVLAVSKAVRRARAGLQDPNRPLGSFLFLGPTGVGKTELTKALAGFLFDDDNAMVRIDMSEFMEKHSVSRLIGAPPGYVGYDEGGVLTEAIRRRPYQVVLFDEVEKAHSDVFNVLLQVLDDGRLTDGQGRVVDFTNTLIILTSNLGSQYLANLEEGQDVQSVEPQVMDVVRAHFRPEFLNRLDEIILFHRLGHEHMAPIVDIQVGRVANLLKDRKIVLDLTDAAKRWLGRVGYDPVYGARPLKRAVQRYLQDPLAEKLLGGEVPDGSTVRIDEGDGALSFVIA

SEQ ID NO: 7013 - DNA, 2610 bp, Staphylococcus aureus subsp. aureus NCTC 8325
  CDS (1)..(2610): transl_table=11
atggatataaataaaatgacatatgctgttcaaagtgctttacaacaagcagttgaactgagtcagcaacataaattacaaaatatagaaattgaggcaattttaagcgctgccttaaatgaaagtgaaagcttatataaaagtattttagaacgagtaaatattgaggtagatcaattaaacaaagcttatgaagacaaactaaacacgtatgcatctgtagaaggtgacaatatacaatatggtcaatatattagccaacaagcaaaccaattgataactaaggctgaatcatacatgaaagaatatgaagatgaatatatttcaatggagcatattttacgttcggcaatggacattgatcaaacaacaaaacattatataaataataaagtagaagttatcaaagaaattattaaaaaagtaagagggggaaatcacgtgacatcacaaaatccagaagttaattacgaagcattagctaaatatggccgcgacttagtagaagaagttagacaaggtaaaatggatcctgttataggaagagatgaagaaattcgaaatacgattcgtattttaagtcgtaaaactaaaaacaaccctgtgctcattggtgaaccaggtgttggtaaaactgcaattgttgaaggattagcgcaacgtatagttaagaaagatgtgccagaatcattattagataaaactgtttttgagttagatttaagcgcattagtagcgggcgctaaatatcgtggtgaatttgaagagagattaaaagcagtcctaaaagaagttaaagagtctgatggtagaattatattatttattgatgaaatccatatgcttgtaggtgctggtaaaacagatggtgccatggatgcaggcaacatgctaaaaccaatgttagcacgaggagagttacattgtattggtgcaacaactttaaatgaatatcgagaatatattgaaaaagattcggcattagagcgtcgtttccaaaaagtagcagttagtgagcctgatgttgaagatacaatttcaattttacgtggtttaaaagaacgatatgaagtgtatcatggtgtgcgtattcaagatagagccttagttgctgccgctgaattgtctgatcgttacatcactgatcgttttttaccagataaagcgattgatttagttgaccaagcatgtgcaacaattcgtacggaaatgggatcaaatccaactgaattggatcaagttaatagacgtgtcatgcaattagaaattgaagaaagcgcacttaaaaatgaatctgacaatgcgagcaaacagagattacaagaactacaagaagagcttgccaatgaaaaagagaaacaagcagcacttcaatctcgtgtagaatcagaaaaagaaaaaatagcaaatttacaagaaaaacgtgcgcaactagatgaaagtagacaagcgttggaagatgcacaaacaaataacaatttagaaaaagctgctgaactacaatatggaacaattcctcaattggaaaaagaacttagagaattagaggataatttccaagatgagcaaggtgaagatacagatcgaatgattcgtgaagttgtaacagacgaagaaattggcgatattgtcagccaatggacaggcataccagtttcaaaattagttgaaacagaacgtgaaaaattacttcacttaagtgacatcttgcataaacgtgttgtaggtcaagataaagcggttgacctggtttcagatgcagtagttagagcaagagcaggtattaaagatccaaacagacctattggtagtttcttattcctaggtccaactggagtaggtaaaactgaattagctaaatcattagctgcatcattatttgattctgaaaaacatatgattcgtattgatatgagtgaatatatggaaaaacatgcagtatcaagattgataggggcacctccaggatatattggacatgatgaagggggtcaattaactgaagcggttcgtcgtaatccatactcagttattttattagatgaggttgaaaaagcgcatactgacgtctttaatgtattattgcaaattttagatgaaggccgtttaactgattctaaaggacgtagcgttgattttaaaaatactattattattatgacaagtaatattggatctcaagttttattagaaaacgtaaaagagactggtgaaattacagaatcaacagaaaaagctgttatgacaagtttaaatgcatatttcaaaccagaaattttgaatcgtatggatgatatcgtattatttaaaccattatctattgatgacatgagtatgattgtagataaaatcttaacgcaattaaatataagattattagaacaacgaatctcaattgaagtttctgatgatgctaaagcttggctaggtcaagaagcttatgaacctcaatacggtgcaagaccattaaaacgttttgtacaacgccaaattgaaacaccattagcacgtatgatgattaaagagggattcccagaaggtacaacgattaaagttaatttaaattcagacaataacttaacgtttaatgttgaaaaaattcatgaataa

SEQ ID NO: 7014 - protein, 869 aa, Staphylococcus aureus subsp. aureus NCTC 8325
MDINKMTYAVQSALQQAVELSQQHKLQNIEIEAILSAALNESESLYKSILERVNIEVDQLNKAYEDKLNTYASVEGDNIQYGQYISQQANQLITKAESYMKEYEDEYISMEHILRSAMDIDQTTKHYINNKVEVIKEIIKKVRGGNHVTSQNPEVNYEALAKYGRDLVEEVRQGKMDPVIGRDEEIRNTIRILSRKTKNNPVLIGEPGVGKTAIVEGLAQRIVKKDVPESLLDKTVFELDLSALVAGAKYRGEFEERLKAVLKEVKESDGRIILFIDEIHMLVGAGKTDGAMDAGNMLKPMLARGELHCIGATTLNEYREYIEKDSALERRFQKVAVSEPDVEDTISILRGLKERYEVYHGVRIQDRALVAAAELSDRYITDRFLPDKAIDLVDQACATIRTEMGSNPTELDQVNRRVMQLEIEESALKNESDNASKQRLQELQEELANEKEKQAALQSRVESEKEKIANLQEKRAQLDESRQALEDAQTNNNLEKAAELQYGTIPQLEKELRELEDNFQDEQGEDTDRMIREVVTDEEIGDIVSQWTGIPVSKLVETEREKLLHLSDILHKRVVGQDKAVDLVSDAVVRARAGIKDPNRPIGSFLFLGPTGVGKTELAKSLAASLFDSEKHMIRIDMSEYMEKHAVSRLIGAPPGYIGHDEGGQLTEAVRRNPYSVILLDEVEKAHTDVFNVLLQILDEGRLTDSKGRSVDFKNTIIIMTSNIGSQVLLENVKETGEITESTEKAVMTSLNAYFKPEILNRMDDIVLFKPLSIDDMSMIVDKILTQLNIRLLEQRISIEVSDDAKAWLGQEAYEPQYGARPLKRFVQRQIETPLARMMIKEGFPEGTTIKVNLNSDNNLTFNVEKIHE

SEQ ID NO: 7015 - DNA, 2580 bp, Anaplasma phagocytophilum HZ
  CDS (1)..(2580): transl_table=11
atggacttgaataagtttactgaaaaggccagaagcttcgtgatgcaggcacaggtgtttgccatatcttcaggacatcagtttcttttgcctgaacacttactgaaggtaatgttagatgaaaaaggcagtttgactgaaaaccttatatcaatgtcatcctgcaatgcaggcataaacgagattcgcgacgcactcgtacaacatctgagcaaattgccagtagttagcggatctagcagcggacaactaaatctctcaagagaattggctcaggttctggaagaagcaagcaacattgctaaaagaaacggcgatgcgtacatctctgctgaaaggttgttacaagcactcgtagtggttaacagcaacgtttcaagagtgctaataaatgctggagttactgctacaaaactcaatactctaatagaaaaaatgcgcgaaggagacaaagcggatagcgaaaccgcggaacaaaaattcgatgctctgagaaagtttacgcaagacctcacagaactcgctactgaaggtaaaatggaccctgtaatcggtagaagtgatgaaactagacgcctcatacaagtgctctcacgcagaacaaaaaacaatcctgccctaattggtgaacctggcgtaggtaagagtgctatcgtagaagggttagtgcaatcaatagtttccggaaatgtccccatagggctgcaaggcgccaaggtattatcgctagatttagctgcattggttgcgggcactaagtatcgtggtgaatttgaagagcgtcttaaagccgtactatcaaaaattatcctatctagcggtaaaatcatactgtttatagatgagttacacatgctggtaggcgctggatctactggtgattccatggatgcctctaacatattgaaaccagttcttgcgcggggtgaactacgctgtattggtgcaacaactctagatgagtatagagaacatatagaaaaagatcctgctctcgctaggagatttcaaccagtatttgtggcagaacccagcattaacgatactatctcaatactaagagggattaaggaaaaatatgagctgcaccacggtattaggatcactgacagcgctatagtagcagcagcaaacttatctagcagatacatacctgacagatttttacctgacaaggcaattgacttaatagatgaagctgcaagtagagcaaggatcgaaattgatagcaagccagaaataatagacagtattgatcgtcaggtaatgcagctaaaaatagagtctgaagcactgaaaaacgaaaatactgaggcatcaaagcagcgcttagaggagattagccgggaattgcaaagcctaagttccgaagctgctgatttaaacagccaatggcacgctgaaaaagcaaagatctcaaaaatgcacgagctaacagaatccctcgatagtgcccgtatagaattagagcagtcacaaagactgggcaatctttccagggcaggagaattaatgtacggaatcattccatccttagaagcagaactgaagaaacatgaagaaatcgcagggacgctcctcaggaaggaaataaaagcaaatgatatagcggcaatcgtagaaaggtggactggtattccagtggatagcgttatgaatagtgaaaaggaaaagctattacacatggaagaagagctcaagaagacagtaataggacaggatagtgctgtagcagctgtgagtaatgcagttcggagatcacgtgctggagtacaagatgctcaaagacctatgggttccttcttatttctaggtcctactggcgtgggcaaaacagaactcacgaaagctctaagcaagttcctattcgactcaagttctgctctactgcgcttcgatatgtcggagtttatggaaaaacattctgtggcaaaactgataggagcgcctcctggatacgtgggatatgaacaaggtggactactgactgaagccgttcgcaggagaccgtatcaggtgatattgttcgatgaaatagaaaaagcccacgcagatatcttcaatttgctcttacaagtcctagacgaaggaagattgacagacagccgtgggaatttagtaaacttcaaaaatacgatactagtgctaacgtcaaacataggtcaggacatactaataaatagcacggaggacagtaatgatcctgtagtacggaaaaccgtgttggaaatgctgcgcctatcctttcgtccagaatttctgaaccggcttgatgagatcatgatattcaatagactgactcaggaacatatagagcatattgtggatgtacagatatcgaatctacaaaaaattatcagcgacaaaggcattacaatttctctgcatcaaggagcaaaatcgtggctcgttaagcatgggtatgatgtagcatgtggagcacgcctattaaaacgtctaatacagcaacacattcaaaatcaacttgcatgcttattgctaggagacaaaataacagaaggtagcaagcttgtggtatttgaagaaaataattctctagttatcaaagaggctacataa

SEQ ID NO: 7016 - protein, 859 aa, Anaplasma phagocytophilum HZ
MDLNKFTEKARSFVMQAQVFAISSGHQFLLPEHLLKVMLDEKGSLTENLISMSSCNAGINEIRDALVQHLSKLPVVSGSSSGQLNLSRELAQVLEEASNIAKRNGDAYISAERLLQALVVVNSNVSRVLINAGVTATKLNTLIEKMREGDKADSETAEQKFDALRKFTQDLTELATEGKMDPVIGRSDETRRLIQVLSRRTKNNPALIGEPGVGKSAIVEGLVQSIVSGNVPIGLQGAKVLSLDLAALVAGTKYRGEFEERLKAVLSKIILSSGKIILFIDELHMLVGAGSTGDSMDASNILKPVLARGELRCIGATTLDEYREHIEKDPALARRFQPVFVAEPSINDTISILRGIKEKYELHHGIRITDSAIVAAANLSSRYIPDRFLPDKAIDLIDEAASRARIEIDSKPEIIDSIDRQVMQLKIESEALKNENTEASKQRLEEISRELQSLSSEAADLNSQWHAEKAKISKMHELTESLDSARIELEQSQRLGNLSRAGELMYGIIPSLEAELKKHEEIAGTLLRKEIKANDIAAIVERWTGIPVDSVMNSEKEKLLHMEEELKKTVIGQDSAVAAVSNAVRRSRAGVQDAQRPMGSFLFLGPTGVGKTELTKALSKFLFDSSSALLRFDMSEFMEKHSVAKLIGAPPGYVGYEQGGLLTEAVRRRPYQVILFDEIEKAHADIFNLLLQVLDEGRLTDSRGNLVNFKNTILVLTSNIGQDILINSTEDSNDPVVRKTVLEMLRLSFRPEFLNRLDEIMIFNRLTQEHIEHIVDVQISNLQKIISDKGITISLHQGAKSWLVKHGYDVACGARLLKRLIQQHIQNQLACLLLGDKITEGSKLVVFEENNSLVIKEAT

SEQ ID NO: 7017 - DNA, 2565 bp, Neorickettsia sennetsu str. Miyayama
  CDS (1)..(2565): transl_table=11
atgcggttcgacaaatttacagataattcagcgtcaatcattcaaagcgcgcagctagatgcggtaagcatggggcatcagacgcttacatcgcttcacatacttagggcgctgctgaagaataccaatggtattgtcacccaactactagaacaatgcggcgcaaatttagacgtgattctaaatagcgtagaactgacactgagaaagctaccatccgtgagtggccaaggtgcaggacacattcatctaacgccggatgcagcacagacaatacagacatcaattgaaatagctggaaggtcacaagacagtttcgtcactgtagaaagactcttgcaaggtgtagcagcaacagaatctgaagcatctaaaattctaaaggaacaaggtgtagacgcagcaaagttgcaacaaatcattgacgcaaataggggaagtaggagagctgattctgcaaatgcggagaacaacttcaacgctcttagacgctatacaaaagacctaactgagattgcacgctcgggaaaacttgacccggttatcggcagagacgaagaaatccggagggtgatgcaggtcttgtctagacgaacaaaaaataatccggtactcattggtgatccaggcgttggcaagacggcagtagttgaaggtcttgcaatgcggatggtcgcaaaagatgttccacaaaatttggcaagcgcttctctactttcacttgacttaggtgcactaatagcaggttcaaagtacagaggtgaattcgaggaaagattaaaatcagtaatcaacgaacttgcagattctgggggtagcgtcattctttttatagatgagctccacacactcgtaggtgcgggtgcaacagaaggtgcaatggacgcctcgaatttactaaaaccagcacttgcacgcggggaaatacactgcgtaggtgcaactacactggaagagtacaagaaacacatagaaaaggatgccgcactagcgaggagatttcagccgattttcgttggacaacccacagaagaggataccatttcaatactgcgcggcataaaagagaagtatgaagtccaccacggaataagaattgctgatagcgcagttgtctccgcagcagttctctcaaatcggtatatcacagacagattcctcccagataaggccatagacttaatggacgaggctgcaagtaagatcaggattgaatctgacagtaagcctgaggtaatagatgaactcgacaggaaaatcatacaactaaaaatagaagcagaagcactgaaaaaagaaaaggatgctaattctatcggcagattggaaaaaataaagcaggatctagaaggtcttgaaaaaaaacaagcggatctcgaaagctcctggcaagctgaaaagtcaaagcttaaagagatacaaaaattgaaagaggaactcaacgaagcacggtattcactggagattgcacagagaaatggtgatcttgcaaccgcaggaaagatcctatacggcaccattccagccttggaaaatagattggtcaatgaagaaaaacaagtaggcggtacactcctaaaaagagaggtcacagaggacgacatagcaaacattgttgccaaatggacaggaattcctgttgaaaaaatgatggggagtgaacaacaaagacttttaaagatagaagatgaattgaaaaaacacgtcataggacaagatgaagccgtagaagcagtcagcagtgcggtaaaacgctctagagctggcgtccaggatgcaaatcgtccgcttggatctttcatgtttttaggttcaacaggcgttggaaaaacagagctcagcaaagcactagcaaagttcctgttcgataatgaaacagcactgcttcgcattgatatgtccgaatatatggaaaaacatgccgtagcacgattgataggtgcacctcctggatatgtcgggtatgaggaaggtggaatacttactgaagcagtaagacggcgtccatatcaggtaatcttattcgacgaagtggaaaaagcacatcatgatgtgttcaatatattgcttcaagtattagacgagggcagactaaccgatactcaaggccatgtcgttgattttaaaaatacaatattaattcttacatcaaacctgggatcggatgttttatcggaagttacacaaatcaccgaggttgagaaaactaaaataatggaaatagtcaggcaattcttccgtcctgagtttttgaaccgtcttgacgagatccttttcttcaatcgcttgagcaaagaaaacatagaaaagatactggagattcaattgcataaactacaggaacgcataaaaaccaagaaccttcacctttcttttactcacgaagccaagaggtggatatgtgaacaggggtatcatccagtatacggtgctcgaccattaaaacgcgtgattcagcaatacgtttataatccactagcacaagcaatcctctcgggtagcctgcctgaaaatggcaaaattatattcgataaaattggtaacaagctagaaatccagtattag

SEQ ID NO: 7018 - protein, 854 aa, Neorickettsia sennetsu str. Miyayama
MRFDKFTDNSASIIQSAQLDAVSMGHQTLTSLHILRALLKNTNGIVTQLLEQCGANLDVILNSVELTLRKLPSVSGQGAGHIHLTPDAAQTIQTSIEIAGRSQDSFVTVERLLQGVAATESEASKILKEQGVDAAKLQQIIDANRGSRRADSANAENNFNALRRYTKDLTEIARSGKLDPVIGRDEEIRRVMQVLSRRTKNNPVLIGDPGVGKTAVVEGLAMRMVAKDVPQNLASASLLSLDLGALIAGSKYRGEFEERLKSVINELADSGGSVILFIDELHTLVGAGATEGAMDASNLLKPALARGEIHCVGATTLEEYKKHIEKDAALARRFQPIFVGQPTEEDTISILRGIKEKYEVHHGIRIADSAVVSAAVLSNRYITDRFLPDKAIDLMDEAASKIRIESDSKPEVIDELDRKIIQLKIEAEALKKEKDANSIGRLEKIKQDLEGLEKKQADLESSWQAEKSKLKEIQKLKEELNEARYSLEIAQRNGDLATAGKILYGTIPALENRLVNEEKQVGGTLLKREVTEDDIANIVAKWTGIPVEKMMGSEQQRLLKIEDELKKHVIGQDEAVEAVSSAVKRSRAGVQDANRPLGSFMFLGSTGVGKTELSKALAKFLFDNETALLRIDMSEYMEKHAVARLIGAPPGYVGYEEGGILTEAVRRRPYQVILFDEVEKAHHDVFNILLQVLDEGRLTDTQGHVVDFKNTILILTSNLGSDVLSEVTQITEVEKTKIMEIVRQFFRPEFLNRLDEILFFNRLSKENIEKILEIQLHKLQERIKTKNLHLSFTHEAKRWICEQGYHPVYGARPLKRVIQQYVYNPLAQAILSGSLPENGKIIFDKIGNKLEIQY

SEQ ID NO: 7019 - DNA, 2574 bp, Ehrlichia chaffeensis str. Arkansas
  CDS (1)..(2574): transl_table=11
atggatctcaatcaatttactgatatgtcaaagaatttaataatgcaggcgcaaactacagcaattgcatcagggcatcaatctttgataccagagcatttacttaaagtaatgttagatactaaagatgagcttattgagctgttgctgacttcatgtggatgtgatattgataagatatacagtgatataaaactctccttaagtaaattacctgttgtaagtggaagtggtagtggtcatatacatttatcaaaagaaatggctcaggttttagaagaagctattagtttagcaaaaaggaatcaggatacttatgtaactgtggagagattattacaagctcttgcagttgttaaagacactagtgtttacaagatactacttgcacatggagtaactcctgttaagttagaatcactaatacttaatatgcgtaatggatctaaggctgatactattaatgctgaacataaatttaatgctctgaaaaaatatgctaaagatattacagaatctgccatggctgggaaacttgatccagttattggaagagatgaagagattagacgtacaatgcaagttttatcacgcagaacaaagaataatcctgtattaattggagaacctggagttggtaagacagcaattattgaaggattggcacagcgtattgtggtaggtgatgttcctgttggactaagaaatgcaaaaataatggcactggatcttggaatgcttgttgctggaacaaaatatagaggggaatttgaggaaagattaaaatatgtaattaatgaaatagtggcgtcaaatggtgcggttatattgtttattgatgaattacacacattagttggagctggtgctacagatggtgcaatggatgcatcgaacttgttaaaacctgctttagcaaggggtgaaatacattgtataggagcaacaacattggatgaatataggcaacacatagaaaaagatgctgcattggctagaaggtttcaacctgtgtttgtttctgaatctactgttaatgatactatctctattttgcgtggattgaaagaaaaatatgaagtacaccatggtattaggattatggatagtgcgattattgctgcttcaactttgtcaaatcgttatattacagataggtttttaccagataaagctatagatctaattgatgaagcagcaagtcgtgtaagaatagagattgatagtaaacctgaggtaattgacgaattagatagaaaaattattcaattgaagattgaggctggagttttagaaaaagaaaatactgaatcttcaaaacagcgtttagcccaattaagtgaagaattgaataaattaagtattcaagcaacagaattaaatagtaagtggcaggctgagaaaatgaagatattaaaaatgcaagaatgtgtggaaaagttagataatgcaagaaatgatttagaaaaagctcaaaggtctggtaatttggcaaaagctggcgaattgatgtatggaattatcccagaacttgaaaaagagttaaaaaaatgtgaaaaacctagtagtaacatgttgaaaagggaagtgactgaaagtgatatagcaagtattgtatcacggtggacaggtattcctattgaaaacatgatgagcagtgaaaaagaaaaattgctgcgtatggaagaagagatagggaaaacagtcattggtcaagaaagtgctattaaagcagtaagtgatgctgttagaagatcgcgtgcaggagtacaagatgccaataaaccattaggatcttttttattccttggacctactggagtaggaaaaacagaattagtaaaaacattagctgaatttttattttgtgataaatctgctttattgaggtttgatatgtctgagtttatggaaaagcatgctgtatctcggttaataggtgctcctccaggatatgtaggatatgatcaaggtggtatgttgactgaatctgtgaggaggagaccttatcaagttatactttttgatgaaatagagaaagcacatggagatatttttaatattttattgcaagtattagatgagggacggttaactgataaccatggtaaattggttgattttcgtaatacaatactggttttaacatcaaacttaggacaagaaatactgattaataataaggaagatgttgatggagagtcagtaaaaaaatctataactagtgtgttacaacatcattttcggccagaatttttaaacagattagatgaaattattgtatttcatagattaactaaggaacatatagagaaaattatagatgtacaattttctctgttacagaaaattgttgctcaaaaagagttagagattagtttatcttcggaggcaaaatcttggttgatgaataatggctatgattcgttatatggggcaagacctttgaaaagattaatacaacaaaaaatacaaaatagtttagcaaagttaatacttgcaaatcaagttagtaagggagataagctagaagtagttttgttgaatgacgatttaattattaataagttatag

SEQ ID NO: 7020 - protein, 857 aa, Ehrlichia chaffeensis str. Arkansas
MDLNQFTDMSKNLIMQAQTTAIASGHQSLIPEHLLKVMLDTKDELIELLLTSCGCDIDKIYSDIKLSLSKLPVVSGSGSGHIHLSKEMAQVLEEAISLAKRNQDTYVTVERLLQALAVVKDTSVYKILLAHGVTPVKLESLILNMRNGSKADTINAEHKFNALKKYAKDITESAMAGKLDPVIGRDEEIRRTMQVLSRRTKNNPVLIGEPGVGKTAIIEGLAQRIVVGDVPVGLRNAKIMALDLGMLVAGTKYRGEFEERLKYVINEIVASNGAVILFIDELHTLVGAGATDGAMDASNLLKPALARGEIHCIGATTLDEYRQHIEKDAALARRFQPVFVSESTVNDTISILRGLKEKYEVHHGIRIMDSAIIAASTLSNRYITDRFLPDKAIDLIDEAASRVRIEIDSKPEVIDELDRKIIQLKIEAGVLEKENTESSKQRLAQLSEELNKLSIQATELNSKWQAEKMKILKMQECVEKLDNARNDLEKAQRSGNLAKAGELMYGIIPELEKELKKCEKPSSNMLKREVTESDIASIVSRWTGIPIENMMSSEKEKLLRMEEEIGKTVIGQESAIKAVSDAVRRSRAGVQDANKPLGSFLFLGPTGVGKTELVKTLAEFLFCDKSALLRFDMSEFMEKHAVSRLIGAPPGYVGYDQGGMLTESVRRRPYQVILFDEIEKAHGDIFNILLQVLDEGRLTDNHGKLVDFRNTILVLTSNLGQEILINNKEDVDGESVKKSITSVLQHHFRPEFLNRLDEIIVFHRLTKEHIEKIIDVQFSLLQKIVAQKELEISLSSEAKSWLMNNGYDSLYGARPLKRLIQQKIQNSLAKLILANQVSKGDKLEVVLLNDDLIINKL

SEQ ID NO: 7021 - DNA, 2595 bp, Desulfitobacterium hafniense Y51
  CDS (1)..(2595): transl_table=11
atgtcttttgatacgaaccgctttacccaaaaatctcaggaggccattattcaagcgcaaacgatggcggagcgtaatggcaacagccaagtggagcctgagcacttgcttttagctctcctggaacagggagagggggtcgttccccaagtcctgaccaagcttgatatcccggtgggggctttggttcaaaaagtacgccaggaggtcaaccgcctcccgcgcatgatgggagctaatgttcagctgaccatctccccccgtctgcggacggtgttggtctcggctcatgatgagatggagacctttaaggatgactatgtaagcaccgagcatcttttgctggcgactctcagtcaaggcgggggagcagcggagaaaatcttaaaacaagagggtctgaatcgcgagaagcttctgcaggctttgcgtgaggtgagagggactcagcgggtgacgagccagacgccggaagggaccttccgggcccttgaacaatatggacgcaatcttgtcgaacaagcccgccggggaaagctggatccggtcatcggccgggacgaggaaattcgccgggttatccagattctctcccgcaagaccaagaacaaccctgttctgatcggggagcccggtgtgggaaaaaccgccattgtggaaggtttggcccagcggatcgtccgcggtgatgttcccgaatcggtgaaagataagaagatcattgccttggatatgggttccttgatcgccggagcgaaataccggggagaatttgaggaacggcttaaagctgtgcttaaggaagttcaggaacgggaagacatcatcctgtttatcgatgaactgcacacggtggtgggagcgggggcagcagaaggggccatggatgccggcaatatgcttaaacccatgctggcccggggtgagctgcatatggtgggagccacaaccctggatgaataccgcaagtatattgaaaaggatgccgctttggaacggcgctttcagccggttacagtgggggctcccagtgttgaggataccatctccattttgcgggggctcaaagaacgctatgaaacccatcatggggtaagaattaccgatggagcgattatcgccgccgccgttctttctgaccgctatatcagcgatcgtttcctgccggataaagccatcgacctcattgatgaggccgctgcccgcatgcgtatggagatcaccagtgacccctatgaattggatcagatcaagcgccggattctgcagctggagattgagcgggaggctttaaagaaggaaaaagacgaaggcagcaaagaacgcctggaaaagattgaagaagatctggctaacctcaaagaagaacgcagtgccctggaagcccagctgcaaggggaaagagaagttctggccagaatcaactccctcaaagaagacatcgatcagaaccgcctgaaaatggagcaagcccagcaggccttcgactataacaaggcagctgagctgcaatacggcatattgccaaagctggagaaggagctcaacgctttggaagagcagcttcgcaaccggaagaacaccttgctcaagcaggaagtaggggaagaggacattgccgaagtggtggccaaatggacccaggttcctgttgctaaacttttggaaagcgaaatggaaaaactggttcatatggaagcgcgcatccatcagcgggtgatcggacaggaggaggctgtgaaagcggtagctgatgctgtccgcagatcccgggccggcctgcaggaccctaaccggcccttaggttcgttcctgtttcttggtcccacaggagtaggaaagacggagctggccaaagccttggctgaatttctctttgatgatgaccaaggaatcgtgcgcatcgacatgtccgaatatatggaaaagcataccgtttcccgcctgatcggtgctccgccggggtatgtaggctatgaagaggggggccagctgacggaagcagtaaggcgcaaaccctatagtgtggtcctctttgatgaagtggaaaaagctcatggggatgtcttcaatgtgttgctccagctcctcgatgacggccgcttaaccgatgggcagggacgggtggttaattttaagaatacagtggtcattctgaccagcaatatcgccagtcccttgattcaggaattgacggcctcaggagcggcccaggaagtgttgcgttcccgggttaccgaggaactcaggctgcatttccggccggagtttttgaaccggttggatgaaatcatcgttttccaccctcttggtcaggagcatattggttccatcgtgcagatacagatcaacaagctgcgtgattatctggctccccgcaaaatgactctggagctctcccaggcagcgttaaataaaatcattcaacaaggttatgatccgatctatggagcaagacccctgaaaagggtgatccagcaaaacctccaaaatcctttggccatgaaaatcctgcagggagccctttacgaaggggatcatgtcctggtcgaccttgatcctcagggccagcttctgtttaaaaagtcggaataa

SEQ ID NO: 7022 - protein, 864 aa, Desulfitobacterium hafniense Y51
MSFDTNRFTQKSQEAIIQAQTMAERNGNSQVEPEHLLLALLEQGEGVVPQVLTKLDIPVGALVQKVRQEVNRLPRMMGANVQLTISPRLRTVLVSAHDEMETFKDDYVSTEHLLLATLSQGGGAAEKILKQEGLNREKLLQALREVRGTQRVTSQTPEGTFRALEQYGRNLVEQARRGKLDPVIGRDEEIRRVIQILSRKTKNNPVLIGEPGVGKTAIVEGLAQRIVRGDVPESVKDKKIIALDMGSLIAGAKYRGEFEERLKAVLKEVQEREDIILFIDELHTVVGAGAAEGAMDAGNMLKPMLARGELHMVGATTLDEYRKYIEKDAALERRFQPVTVGAPSVEDTISILRGLKERYETHHGVRITDGAIIAAAVLSDRYISDRFLPDKAIDLIDEAAARMRMEITSDPYELDQIKRRILQLEIEREALKKEKDEGSKERLEKIEEDLANLKEERSALEAQLQGEREVLARINSLKEDIDQNRLKMEQAQQAFDYNKAAELQYGILPKLEKELNALEEQLRNRKNTLLKQEVGEEDIAEVVAKWTQVPVAKLLESEMEKLVHMEARIHQRVIGQEEAVKAVADAVRRSRAGLQDPNRPLGSFLFLGPTGVGKTELAKALAEFLFDDDQGIVRIDMSEYMEKHTVSRLIGAPPGYVGYEEGGQLTEAVRRKPYSVVLFDEVEKAHGDVFNVLLQLLDDGRLTDGQGRVVNFKNTVVILTSNIASPLIQELTASGAAQEVLRSRVTEELRLHFRPEFLNRLDEIIVFHPLGQEHIGSIVQIQINKLRDYLAPRKMTLELSQAALNKIIQQGYDPIYGARPLKRVIQQNLQNPLAMKILQGALYEGDHVLVDLDPQGQLLFKKSE

SEQ ID NO: 7023 - DNA, 2631 bp, Saccharophagus degradans 2-40
  CDS (1)..(2631): transl_table=11
atgagaattgatcgattaactaaccaacttcaagttgccttgtcggatgctcaatctctggccgttggccgcgatcattcgcaaattgaatccatacaccttatgcaggccatgctagaccagcaaggtggtgcagtgcggccgctattagctcgcgcgggttttgatgtgcccggtttgcgcaacgaattaaccaagcagctagaagcgctggcaaccgtaactaatccaaccggcgatgtgaacatgtcgcaggagttggggcgcttactaaaccttgcagacaaatacgcgcagaaagtgggcgataaatttatctctagcgaagcggtgttgtttgccggcatttcagataaagccagcaacttaggtaaattacttaatacatacggccagccagacaggttaaagcaagctatagccgccgtacgcggcggtgaaaccgtggacgaccccgaggccgaaggtaaccgtcaagctttagagaaattcacagtggaccttactgcgcgtgcagaggccggtaagctcgaccccgttattggtagagacgatgaaatccgtcgcacaattcaagtgttgcagcgccgcaccaaaaataaccctgtgctaataggtgagcccggtgtaggtaaaaccgccattgtagaaggcttggcgcaacgcattattaatggcgaggtgccagaaggcctaaaaaataaacgtttattatcgttagatttaggctcgctgttggcgggcgcaaaatttcgcggtgaatttgaagagcgtttaaaagctgtgcttaatgagctttccaagcaagaagggcgcattattttattcgtagatgagttgcacaccatggtgggggcgggtaaagccgacggcgctatggatgcaggtaatatgctaaaaccagcgctggcgcgtggtgagttacattgcgtgggcgcaacaacgctagatgaatatcgccaatatattgaaaaagatgctgcccttgagcgccgcttccaaaaagtacaagtggatgagccaaacgaagaagacaccatcgctattttgcgcgggttaaaagagcgctatgaggttcatcacggtgtaaatattacagattccgccattattgctgcggcgaaattgtcgcaacgctatatcaccgatagacaactgcccgataaagcaattgatttaattgatgaatccgctagccgtattcgcatggaaattgactccaaaccggaggaaatggacaagctagagcgccgcttaattcaattaaaaattgagcgcgaagcggttaaaaaagatgaagacatcgcctctaaagaacgactcaaaaaaatagacagtcaaattaatgaaatagaaaaatcgtttgcagatttagatgaaatttggcgggcagaaaaagccgcgctgcaggggtcgcaagaaattaaatcgcatttagaaaaggcgcgattagacctagaagccgcgcgtcgcgctggcgatttagggcgcatgtctgaattgcagtacggcattattccagatttagaaaaacaactagatatggccgcgcaagccgatatgcatgaaatgaaattattgcgcaacaaggttaccgaagaagaaattgcggaagtagtgtccaaatggacgggtattccggtttctaaaatgctagagggtgagcgcgataaactattgcgtatggaagacgatttgcacaagcgtgtaattggtcagcacgagtctgttgtggctgtctctaacgctgttcgccgttcgcgcgcaggcctttctgacccgaaccgccccaatggatcatttttgtttttaggccctacaggtgtaggtaaaaccgagttgtgcaaagcgttggcagagtttttattcgacagccaagatgccatggtacgcattgatatgtcggaatttatggagaaacactccgttgcccgtttaattggtgcgccccctgggtacgtaggttacgaagagggcggctacttaaccgaggcggtgcgccgcaagccctattcgctcgtattgctagatgaaattgaaaaagcgcatccagacgtattcaatattttgttgcaagtattagaagatggccgcttaacggatggccaaggtagaactgtcgacttccgcaacacggtggttgtaatgacgtcgaacctaggctccagtgccattcaagatattgcgcaaaataaatctttcgatacgatcagtttcgataacgaatctggtgccgaggagcagaaccaataccgttaccaagctatgaaagatgcggtaatggaggtggtaacaggtcacttccgcccagaatttatcaatcgtatcgatgaggctgtagtgttccacccattggcacagcagcaaatagcgggcattgccgatatacaactggaaacattacgcaagcgcttggcagaaagagatttacgcttgaacgtaacaccagaagtaatggcgaagctggcggaggcgggcttcgaccctgtatacggcgcaaggccgctaaaaagagctatacaacagttggtagaaaaccccttggcgcaacatatattgaaaggggagtttatcgctggtgacaccatcagcgccacgcttgaagaaggtgaaattacctttagaaagtaa

SEQ ID NO: 7024 - protein, 876 aa, Saccharophagus degradans 2-40
MRIDRLTNQLQVALSDAQSLAVGRDHSQIESIHLMQAMLDQQGGAVRPLLARAGFDVPGLRNELTKQLEALATVTNPTGDVNMSQELGRLLNLADKYAQKVGDKFISSEAVLFAGISDKASNLGKLLNTYGQPDRLKQAIAAVRGGETVDDPEAEGNRQALEKFTVDLTARAEAGKLDPVIGRDDEIRRTIQVLQRRTKNNPVLIGEPGVGKTAIVEGLAQRIINGEVPEGLKNKRLLSLDLGSLLAGAKFRGEFEERLKAVLNELSKQEGRIILFVDELHTMVGAGKADGAMDAGNMLKPALARGELHCVGATTLDEYRQYIEKDAALERRFQKVQVDEPNEEDTIAILRGLKERYEVHHGVNITDSAIIAAAKLSQRYITDRQLPDKAIDLIDESASRIRMEIDSKPEEMDKLERRLIQLKIEREAVKKDEDIASKERLKKIDSQINEIEKSFADLDEIWRAEKAALQGSQEIKSHLEKARLDLEAARRAGDLGRMSELQYGIIPDLEKQLDMAAQADMHEMKLLRNKVTEEEIAEVVSKWTGIPVSKMLEGERDKLLRMEDDLHKRVIGQHESVVAVSNAVRRSRAGLSDPNRPNGSFLFLGPTGVGKTELCKALAEFLFDSQDAMVRIDMSEFMEKHSVARLIGAPPGYVGYEEGGYLTEAVRRKPYSLVLLDEIEKAHPDVFNILLQVLEDGRLTDGQGRTVDFRNTVVVMTSNLGSSAIQDIAQNKSFDTISFDNESGAEEQNQYRYQAMKDAVMEVVTGHFRPEFINRIDEAVVFHPLAQQQIAGIADIQLETLRKRLAERDLRLNVTPEVMAKLAEAGFDPVYGARPLKRAIQQLVENPLAQHILKGEFIAGDTISATLEEGEITFRK

SEQ ID NO: 7025 - DNA, 2586 bp, Methylobacillus flagellatus KT
  CDS (1)..(2586): transl_table=11
atgcgtttcgataaactgactacaaaattccagcaagcgctggctgatgcgcaaagcattgcggttggcaacgacaatcccaatatagaagcatcacacctgttgctggccttgctcaatcaggaagatggcggcacggcatccctgcttgcccgtgccggggccaacctggcaccgctaagggccggattgcaagccgccatcgacaatctgcccaaggtgcagaacaatagcggcgaggtatcgatctcgcgtgagctcaacaacctcctgaacatcacggacaggaacgcccaaaaacgcaatgatgcctacatcgcgagtgagatgttcctgcttgcgctggctgacgacaagggcgagacgggtcgtttgctgaagacccacggcctgaccaaggctgcgctggaacaagcgatcaatgccgtacgcggcaatgagacggtcaatagccaggaagccgaaagcaatcgcgaggccctgaagaaattcaccatcgaccttaccgagcgtgcccgtttgggcaagctggatcctgttatcgggcgcgatgatgaaatccggcgcacgatccaagtcttacagcgccgtaccaagaacaacccagtattgatcggtgagcctggtgtgggcaagaccgcgatcgtggaaggcctggcccagcgcatcgtcaacggtgaggtgcctgaaaccctcaagaataagcgcgtgctggttcttgatatggccggcctgctggcgggcgccaagtaccgtggcgagttcgaggagcgcttgcaggccgtattgaaggagcttgcgcaggatgaaggcaaaaccattgtcttcattgatgagatccataccatggtgggcgcaggcaaggcggaaggcgccatggatgccggcaatatgctcaagccggcactggcgcgtggcgaattacactgtgtgggcgcgaccacgctggatgagtaccgcaagtacatcgagaaggatgcggcgctggagcgtcggttccagaaggtgctggtggatgaaccttctgttgaggcgaccatcgccatcctgcgcggattgcaggaaaaatacgaagtgcatcacggcgtggaaatcaccgatccggccattgtggctgccgcagagctgagccaccgttatattactgaccgcttcctgccagacaaggcaatcgacttgatcgatgaggcggcggcacgcatcaagatggaaatcgattccaagcccgaggcactggataagctggagcgtcgcctgatccagctcaagatcgagcgcgaggcggtgcatcgtgagaaggacgaagcttctcagaaacgcttgtcgctgatcgaggatgaaatcaggcgcctggaaaaagagtacgccgacctggaggagatctggaaggcggaaaaagcccaggtccaaggcagcaagcatctgaaggaagagatcgagaaggtcaagctgcagatcgaggaagccacacgcaagggtgaatggcagaaagtgtccgagctgcaatatggcaagctgccgcagctggaaacccagctcaagcaggctgccagcgcggaagaacaaggtggccagaagccacatcggctattgcgcacgcaagtcggcgcggaagagatcgccgaagtggtgtcgcgtgccactggcattcctgtttccaagatgctgcagggcgaacgtgacaaactcctgcatatggaggagaaactccatgaacgcgtggtcgggcaggatgaggctgtgcgccttgtcagtgacgcaatccgccgttcgcgctctggtctggctgacccgaaccggccgtatggctctttcctgttcctgggccctactggcgtaggcaaaaccgagctcaccaaggccttggcaggcttcctgttcgattcggaggaccacctgatccgcatcgatatgagcgagttcatggagaaacactccgtggcacgcctgatcggtgcgcctccaggctatgtgggctacgaggagggggggtatctcactgaagcagtgcgccgcaagccttactcggtgattctgctggatgagatcgagaaagcgcatcctgatgtgttcaatgtgctgctgcaggtgctggatgatgggcgtttgaccgatggtcaaggtcgtaccgtggacttcaagaatacggtgatcatcatgacttccaacctgggctcgcagatgattcagaacatgagcggcgacgaataccaggtcgtgaagctggcggtcatggccgaagtcaaggccaatttcaggccggaatttgtcaaccgtatcgatgaagtcgtggtgttccacgccctgggtgaatcccatgtgaagtcgatcgcccgcatccagttgcagaacctggccaagcgcctggcggcaatggagatgcaccttgatgtgagtgatgctgcattggcagaaatcgccaacgctggctttgatccggtatatggtgccagaccgctcaagcgggccatccagtccgagatcgagaatccgcttgcgaaggaaatcctcaatggcaactttgctgccaaggataccatccatgtggacttcaaaggcgggcgtatggtattcagtaaggcatga

SEQ ID NO: 7026 - protein, 861 aa, Methylobacillus flagellatus KT
MRFDKLTTKFQQALADAQSIAVGNDNPNIEASHLLLALLNQEDGGTASLLARAGANLAPLRAGLQAAIDNLPKVQNNSGEVSISRELNNLLNITDRNAQKRNDAYIASEMFLLALADDKGETGRLLKTHGLTKAALEQAINAVRGNETVNSQEAESNREALKKFTIDLTERARLGKLDPVIGRDDEIRRTIQVLQRRTKNNPVLIGEPGVGKTAIVEGLAQRIVNGEVPETLKNKRVLVLDMAGLLAGAKYRGEFEERLQAVLKELAQDEGKTIVFIDEIHTMVGAGKAEGAMDAGNMLKPALARGELHCVGATTLDEYRKYIEKDAALERRFQKVLVDEPSVEATIAILRGLQEKYEVHHGVEITDPAIVAAAELSHRYITDRFLPDKAIDLIDEAAARIKMEIDSKPEALDKLERRLIQLKIEREAVHREKDEASQKRLSLIEDEIRRLEKEYADLEEIWKAEKAQVQGSKHLKEEIEKVKLQIEEATRKGEWQKVSELQYGKLPQLETQLKQAASAEEQGGQKPHRLLRTQVGAEEIAEVVSRATGIPVSKMLQGERDKLLHMEEKLHERVVGQDEAVRLVSDAIRRSRSGLADPNRPYGSFLFLGPTGVGKTELTKALAGFLFDSEDHLIRIDMSEFMEKHSVARLIGAPPGYVGYEEGGYLTEAVRRKPYSVILLDEIEKAHPDVFNVLLQVLDDGRLTDGQGRTVDFKNTVIIMTSNLGSQMIQNMSGDEYQVVKLAVMAEVKANFRPEFVNRIDEVVVFHALGESHVKSIARIQLQNLAKRLAAMEMHLDVSDAALAEIANAGFDPVYGARPLKRAIQSEIENPLAKEILNGNFAAKDTIHVDFKGGRMVFSKA

SEQ ID NO: 7027 - DNA, 2598 bp, Burkholderia xenovorans LB400
  CDS (1)..(2598): transl_table=11
atgagaatcgacaaactcaccactaaattccaggaagcactggccgatgcccaaagtctggctgtcggccacgacaatcaatacatcgaaccggttcacgtcctgtcggcgctcgtcgcccaacaggatggctcggcgcgttcgctgctctcgcgtgccggcgtgcatgtgcaggcgctgcaaacggcgctcggcgacgccatcacgcgtctgccgcaagtgcaaggcaccgacggcaacgtgcagatcggccgcgatctgaccggcctcctgaaccaggccgacaaggaagcgcaaaaactcaacgacacgttcatcgcgagcgagatgttcctgctcgccgtcgcggacgacaaaggcgaagccggccgtctggcgcgtcagcatggcttgtcgcgcaagtcgctggaaagcgcgatcgccgcggtgcgcggcggttcgcaggtgcatagccaggacgcggaaagccagcgtgaggcgctgaagaaatacaccgtggatctgaccgagcgcgcgcgggccggcaagctcgatccggtgatcggccgcgacgacgaaatccgtcgctcgatccagatcctgcaacgccgcaccaagaacaaccctgtgctgatcggcgaaccgggcgtgggtaagaccgcgatcgtcgaaggtctggcgcagcgtatcgtcaacggcgaagtgccggagacgctcaagggcaagcgcgtgctgtcgctcgatatggcggcgttgctggccggcgccaagtatcgcggcgaattcgaagaacgcctgaaggccgtgctgaacgacatcgcgaaagacgaaggccagaccatcgtcttcatcgacgaaattcacactatggtcggtgcgggcaaggccgaaggcgcgatggacgcgggcaacatgctcaagccggcgctctcgcgcggcgagctgcattgcgtcggcgcgaccacgctcgatgaatatcgcaagtacatcgaaaaggacgccgcgctcgaacgccgcttccagaaggtgctggtcgacgaaccgacggtcgaagccaccatcgcgatcctgcgcggtctgcaggaaaagtacgagctgcaccacggcgtggatatcaccgacccggcgatcgtggcggcggctgaactgtcgcatcgctacatcacggatcggttcctgccggacaaggccatcgacctgatcgacgaagccgcttcgaagatcaagatggaaatcgattcgaagccggaagagatggatcggctcgaccgtcgtttgatccagttgaagattgagcgcgaagccgtcaagaaggaaaaagacgaagcgtcgcagaagcgtctgcaactgatcgaggaagaaatcgagcggctgaaccgcgaatattcggacctcgacgaaatctggaccgcggaaaaagccgcggtgcaaggcagcgcgcaactgaaggaagagatcgaaaaaacgcgtgcggaaatcacgcgcctgcaacgtgaaggcaagctcgagaaggtcgccgagttgcagtacggcaagctgccgggactcgaagcgcagttgaaggaagtgaccaaggccgaggcgagcgagcagaacaatccgacgcgcccgcgcctcttgcgcacgcaggtcggtgcggaagaaatcgctgaagtcgtgtcgcgcgccaccggcattcccgtgtcgcgcatgatgcagggcgagcgcgaaaagctgctgcagatcgaagagaagctgcacgcgcgcgtggtcggccaggacgaggcgatcagcgcggtggccgatgcgatccgccgctcgcgtgcgggtctgtcggatccgaaccggccgtatggttcgttcctgttcctcggcccgaccggcgtgggcaagaccgagttgtgcaaggcgctcgcgtcgttcctgttcgattcggaagatcatctgatccgtatcgacatgagcgaattcatggagaagcatagcgtcgcgcgtctgatcggtgcgccgccgggatacgtcggctacgaagagggtggatacctgaccgaagccgtgcgtcgcaagccgtatagcgtgatcctgctcgacgaaatcgagaaggcgcatccggacgtgttcaacgtgctgctgcaagtgctcgacgacggccgcatgaccgacggccagggccgtaccgtggacttcaagaacacggtgatcgtgatgacgtcgaacctcggttcgcaggtgatccaggcaatggtcggcgaaccgcaggaagccgtgaaggacgcggtctgggaagaagtgaagctgcacttccggcccgagttcctgaaccggatcgacgacgtggtggtgttccatgcactcgaccgttcgaacatccagtcgatcgcgcggatccagttgcagcgtctgcaggagcggctcgccaagctcgatatgcaattgctggtgtcggacgaggcgctcgaacacgtcggcaaggtcggctacgatccgctgttcggtgcgcggccgttgaagcgcgccatccagcaggaaatcgagaatccggtcgccaagctgattctggccggcaagttcggtccgaaagacgtgattccggtcgaagtggaagacggcaaactggtgtttgaacgcgtcgtgcattaa

SEQ ID NO: 7028 - protein, 865 aa, Burkholderia xenovorans LB400
MRIDKLTTKFQEALADAQSLAVGHDNQYIEPVHVLSALVAQQDGSARSLLSRAGVHVQALQTALGDAITRLPQVQGTDGNVQIGRDLTGLLNQADKEAQKLNDTFIASEMFLLAVADDKGEAGRLARQHGLSRKSLESAIAAVRGGSQVHSQDAESQREALKKYTVDLTERARAGKLDPVIGRDDEIRRSIQILQRRTKNNPVLIGEPGVGKTAIVEGLAQRIVNGEVPETLKGKRVLSLDMAALLAGAKYRGEFEERLKAVLNDIAKDEGQTIVFIDEIHTMVGAGKAEGAMDAGNMLKPALSRGELHCVGATTLDEYRKYIEKDAALERRFQKVLVDEPTVEATIAILRGLQEKYELHHGVDITDPAIVAAAELSHRYITDRFLPDKAIDLIDEAASKIKMEIDSKPEEMDRLDRRLIQLKIEREAVKKEKDEASQKRLQLIEEEIERLNREYSDLDEIWTAEKAAVQGSAQLKEEIEKTRAEITRLQREGKLEKVAELQYGKLPGLEAQLKEVTKAEASEQNNPTRPRLLRTQVGAEEIAEVVSRATGIPVSRMMQGEREKLLQIEEKLHARVVGQDEAISAVADAIRRSRAGLSDPNRPYGSFLFLGPTGVGKTELCKALASFLFDSEDHLIRIDMSEFMEKHSVARLIGAPPGYVGYEEGGYLTEAVRRKPYSVILLDEIEKAHPDVFNVLLQVLDDGRMTDGQGRTVDFKNTVIVMTSNLGSQVIQAMVGEPQEAVKDAVWEEVKLHFRPEFLNRIDDVVVFHALDRSNIQSIARIQLQRLQERLAKLDMQLLVSDEALEHVGKVGYDPLFGARPLKRAIQQEIENPVAKLILAGKFGPKDVIPVEVEDGKLVFERVVH

SEQ ID NO: 7029 - DNA, 2610 bp, Methanococcoides burtonii DSM 6242
  CDS (1)..(2610): transl_table=11
atggaccttaaccgttttacacagaaagcacaggaagccatacagaagtctttctccattgctgcaagatattataaccaacaaacagaatgcgaacatctgttgcttgcattggtggaacaaactggtgggcttgtacctaccattcttgacagaataggggctgaaaatcagtcgataataaaggaacttgaagaccatttgtcagaactgccacaggtatccggatcaggaagtggacagacttacgtaagtcaggcatacagcagagtattggacacggctgaaaatgaagcaagttcaatgaatgatgaatacataagtgtagaacatgtgctcatcgcactcctgaaagaaaaagagagcacaagttaccggatactcgaagaagcaggcatcacaatagatgccacactagaagcaattaaaaaactaagggggaatcggcgcattaccagcgaaaatccagaagacacaatggaaccgctcaagaaatacggaattgacttcaccgaacttgcagcacagggaaaacttgacccggtaataggtagggatcaggagataaggcataccatagagatcctttcacgccgcagaaagaataatcccgtactcataggagaagcaggggttggcaagacagctattgtagaaggacttgctctgcgtattgccaagcatgacatccccgaggatatgaaaaataagaagatcatagcattagacatgggtgcacttatcgcaggagcaaaattcagaggagagtttgaagaacgccttaaagcggtcttaaaagaagttgctgattccgaaggacagatcatccttttcattgatgagctgcacaccattgtgggtgcaggagccaccgaaggcgcgatggatgcagggaacttgctaaaaccaatgcttgccagaggtgaactgcattgcataggtgctactacacttgacgaataccgcaagtacatagaaaaggatgcagcccttgaaagaagattcctgccggtccttgttgaccagccggatgtcgaaaataccatatccatcctcagaggactgaaagaaaaatacgaggttcaccacggagtaagaattaaggatactgcacttgtggcagctgcggtcctcagtaaccgctatatttcggacaggttcctgccagacaaggcaatagaccttgttgatgaagcagctgcgaaggtaagaacggccattgacagcaaaccatccgagctggatgaggcagatcgtaagatattgcagctcgagatagaaagagaagcactgaaaaaagagaaggatgcggtttcaaaggaaagagtggccgaccttgaaaaggaacttgcggacattcgtgctgaatccgatgctatgcgtgctaagtggcaaagcgagaaggacaccattgcaaatcttggatcactgaaacagcaaatagaggatattaagatacaactcgaacttgctgagaacagcggagatttcgagctggcctcaaagctgaaatacggtagtttaacccctcttgaacatcagtataaagaagaggagacaaagttgcaggagcaacaggatgacatgctcctcaaggaagaggtttgggaagaggacattgcacaggtagtaagccaatggaccaacatcccggtaacgaggttgatggaaggagaacgtgaaaagctcacacatctggaagagaagcttcatgagagaattgttgggcagaacgaaactgtcaaagcggtttcagatgcgatcatacgtgcttatgcaggtatcaaggacccgaaacgacctattggaagtttcatattccttggaccaacaggtgttggcaagaccgaacttgcaaaggcacttgctgcggaaatgttcaatgatgagaacaatatgatacgcatcgacatgtcagagtacatggaaaaacatactgtatcccgccttatcggagcgccaccaggatatatcggtcacgatgaaggagggcaacttacagaagcagttcgcagacgaccttatgcagtcgttctctttgatgagatagaaaaggcccatcatgatgtgttcaatgtaatgctccagatacttgatgacggacgacttacagattcgcatggtagaacagtggatttcaagaatacactgatcataatgacatctaacatatgtgttgatcgcacactctcgaaactggaggaaggtgaggattatgctaagatgcaggagatggcacagaacgaacttgccaaacatttccgcccggaattcataaatcgtatcgatgaattggccatattccgccccctgacaaaggaacagcttgtgaccatcgtagatattaaagcaactgaccttatacaaaggctcaaggaaaagagaatggtgcttgaaatatcaaagaaggcgaaacattaccttgccgaagcaggttacagtgaaacttatggagcacgaccgctcaagcgtgtcattcagaacgaggtagaaaccgcagttgcaaaattaatagtcggaggacaggcacttgaaggttccaccatagaagtggatgccgatgaccgtggaatcgttgtcaatgtaagaacagagccagcaaagcaatga

SEQ ID NO: 7030 - protein, 869 aa, Methanococcoides burtonii DSM 6242
MDLNRFTQKAQEAIQKSFSIAARYYNQQTECEHLLLALVEQTGGLVPTILDRIGAENQSIIKELEDHLSELPQVSGSGSGQTYVSQAYSRVLDTAENEASSMNDEYISVEHVLIALLKEKESTSYRILEEAGITIDATLEAIKKLRGNRRITSENPEDTMEPLKKYGIDFTELAAQGKLDPVIGRDQEIRHTIEILSRRRKNNPVLIGEAGVGKTAIVEGLALRIAKHDIPEDMKNKKIIALDMGALIAGAKFRGEFEERLKAVLKEVADSEGQIILFIDELHTIVGAGATEGAMDAGNLLKPMLARGELHCIGATTLDEYRKYIEKDAALERRFLPVLVDQPDVENTISILRGLKEKYEVHHGVRIKDTALVAAAVLSNRYISDRFLPDKAIDLVDEAAAKVRTAIDSKPSELDEADRKILQLEIEREALKKEKDAVSKERVADLEKELADIRAESDAMRAKWQSEKDTIANLGSLKQQIEDIKIQLELAENSGDFELASKLKYGSLTPLEHQYKEEETKLQEQQDDMLLKEEVWEEDIAQVVSQWTNIPVTRLMEGEREKLTHLEEKLHERIVGQNETVKAVSDAIIRAYAGIKDPKRPIGSFIFLGPTGVGKTELAKALAAEMFNDENNMIRIDMSEYMEKHTVSRLIGAPPGYIGHDEGGQLTEAVRRRPYAVVLFDEIEKAHHDVFNVMLQILDDGRLTDSHGRTVDFKNTLIIMTSNICVDRTLSKLEEGEDYAKMQEMAQNELAKHFRPEFINRIDELAIFRPLTKEQLVTIVDIKATDLIQRLKEKRMVLEISKKAKHYLAEAGYSETYGARPLKRVIQNEVETAVAKLIVGGQALEGSTIEVDADDRGIVVNVRTEPAKQ

SEQ ID NO: 7031 - DNA, 2589 bp, Ralstonia metallidurans CH34
  CDS (1)..(2589): transl_table=11
atgcgaattgacaaactgaccacccggttccaggaagcgctggcagaagcgcaaagtctggcgctgggtaatgacaatcaatacatcgaaccccagcatctgctgcgtgcattgctcgcgcaggacgatggtgcggcccgcacactgctgtcgcgtgctggcgtgaacgtgggcggcctgcagagcgcgctcgatgcggcgatccatcgcctgccgcaggttcagggcacgaacgaggtccaggtgggccgcgacctgaacaacctgctgaatgccacagaaaaggaagcgatcaagcgcaacgaccagttcatcgccagtgaactgttcctgctcgccgtgtctgacgacaagggcgagacggggcggatcgcccgcgagaacggcttgtcgcgcaagtcgctcgaggccgcgatcacggccgtgcgcggcggtgataccgtcaatagcgccgacgccgagtcgcagcgcgaggcgctcaagaaatacacggtcgacctgaccgagcgagcgcgtgccggcaagctggaccccgtgattggccgcgacgacgaaatccgccgcgcgatccagatcctgcagcgccgcaccaagaacaaccccgtgctgatcggtgagcccggcgtgggcaagaccgccattgtcgaagggctggcacagcgcatcgtcaacggcgaagtgccggagacgctcaaaaacaagcgcgtgctcgtgctcgacatggccgggctgctggccggcgccaagtatcgcggcgagttcgaggaacgcctgaaggccgtgctcaacgacgtggccaaggacgaaggccagaccatcgtcttcatcgacgagattcacacgatggtgggcgcgggcaaggccgaaggcgcgatcgacgcgggcaacatgctcaagccggcgctggcgcgcggcgaactgcactgcatcggcgcgaccacgctgaacgaataccgcaagtacatcgagaaggatgccgcgctggagcgccgcttccagaaggtgcttgtggatgagcccagcgtcgaggcaacgatcgccattctgcgtggcctgcaggagaagtacgaactgcaccacaaggtggagatcaccgacccggccatcgtggctgcggccgagctgtcgcaccgctacatcaccgaccggttcctgccggacaaggccatcgacctgatcgacgaggctgccgcgcggatcaagatggaaatcgactcgaagcccgaggcgatggacaagcttgagcgtcgcacgatccagctcaagatcgagcgtgaggcggtcaagaaggaaaccgacgaggcatcgcgcaagcgtctggaactgatcgagcaggaaatcatccggctcgagaaggaatacgctgacctggatgagatctggcgcgccgagaagggcgccgcccagggtgcggccgcgctgaaggaggagatcgagaagatcaagctcgatatcacccgactgcagcgcgaaggcaagctcgacaaggtggctgaactccagtatggcaagctgccggaactcgagggcaagctgcaggcggcaaccaaggccgaggccagcgagcagaagcagcagaacaagctgctgcgcacgcaggtcggcgccgaggaaatcgccgaggtcgtcagccgcgccacgggtattccggtggccaagatgatgcagggcgagcgcgagaagctgctcaagatggaagatcgtctgcaccagcgtgtggtgggtcaggacgaggccgtgcggctggtgtctgatgcgatccgccgttcgcgtgccggtctgtcggatgagaacaagccgtatggctcgttcctgttccttgggccgacgggcgtgggcaagaccgagttgtgcaaggcgctgtccgagttcctgttcgattcggaggaacacctgatccgcatcgacatgagcgagttcatggagaagcacagcgtgagccggctgatcggcgcgcctccgggctacgtgggctatgacgaaggtggttacctgaccgaggcggtgcgtcgcaagccgtacgcggtgatcctgctcgacgaagtcgagaaggcgcacccggacgtgttcaacgtgctgctgcaggtgctggacgatggtcgtctgaccgacggtcagggccgtaccgtcgacttcaagaacacggtgatcgtgatgacgtcgaacctgggctcacacatcatccagtcgatggctggcgaaccgcaggaggcggtgaagggcgcggtatggcaggaggtgcgcacgcatttccggcccgagttcctgaaccggatcgacgaagtcgtggtgttccatgcgctcgaccagaagaatatcgagtcgatcgccaagattcagctcaagcgcctgcaggtccgtctggcccgcatggacatgacgctggacgtgagcgagcgcgcgctggagaagatcgccagcgcgggctacgacccggtgttcggagcccggccgctcaagcgcgcgatccagcagcagatcgagaatccggtggccaaggccatcctggaaggccggtttgccgcgaaggatgtcgtgccggtggactatgtggatggcgagttcacgtttgggcgaatggtgcattga

SEQ ID NO: 7032 - protein, 862 aa, Ralstonia metallidurans CH34
MRIDKLTTRFQEALAEAQSLALGNDNQYIEPQHLLRALLAQDDGAARTLLSRAGVNVGGLQSALDAAIHRLPQVQGTNEVQVGRDLNNLLNATEKEAIKRNDQFIASELFLLAVSDDKGETGRIARENGLSRKSLEAAITAVRGGDTVNSADAESQREALKKYTVDLTERARAGKLDPVIGRDDEIRRAIQILQRRTKNNPVLIGEPGVGKTAIVEGLAQRIVNGEVPETLKNKRVLVLDMAGLLAGAKYRGEFEERLKAVLNDVAKDEGQTIVFIDEIHTMVGAGKAEGAIDAGNMLKPALARGELHCIGATTLNEYRKYIEKDAALERRFQKVLVDEPSVEATIAILRGLQEKYELHHKVEITDPAIVAAAELSHRYITDRFLPDKAIDLIDEAAARIKMEIDSKPEAMDKLERRTIQLKIEREAVKKETDEASRKRLELIEQEIIRLEKEYADLDEIWRAEKGAAQGAAALKEEIEKIKLDITRLQREGKLDKVAELQYGKLPELEGKLQAATKAEASEQKQQNKLLRTQVGAEEIAEVVSRATGIPVAKMMQGEREKLLKMEDRLHQRVVGQDEAVRLVSDAIRRSRAGLSDENKPYGSFLFLGPTGVGKTELCKALSEFLFDSEEHLIRIDMSEFMEKHSVSRLIGAPPGYVGYDEGGYLTEAVRRKPYAVILLDEVEKAHPDVFNVLLQVLDDGRLTDGQGRTVDFKNTVIVMTSNLGSHIIQSMAGEPQEAVKGAVWQEVRTHFRPEFLNRIDEVVVFHALDQKNIESIAKIQLKRLQVRLARMDMTLDVSERALEKIASAGYDPVFGARPLKRAIQQQIENPVAKAILEGRFAAKDVVPVDYVDGEFTFGRMVH

SEQ ID NO: 7033 - DNA, 2637 bp, Acidobacteria bacterium Ellin345
  CDS (1)..(2637): transl_table=11
atggcaatacgttgggacaaattaactgtaaaggcgcaggaagcgtattcgcgcgccaacgatctcgcgtccgagcacggcaatcccgagctccgtcccgtccatgtgctggccgcactgttagaggaccgcgaaggcatcatcgttccactgctttcgaagatgggcgtgcggcccgaagcagtgacgcaggcaacggcgcgggaaatcgaacgcatgccgaaggtcagcggcagtgcgacccaggccacactctccaatgaagcgcaggagatgctcgagctggctttcaaacaagccgatcaattcaaggacgaatatgtttcgaccgaacatctgttgctcggaatcgcccagctcaagcgcgacgccgcgaaggacatcctcggctcaatgggcgcgacctacgaccgaatcttgagcgctctgaccggtatccgcggcaaccagaaggtgacagaccagaatcctgaggcgaagtaccaggcgctggagcgttacgctcgcgacctcacggatctcgcgcgtcggggcaaactcgatccggtgatcggccgcgatgacgaagtgcgtcgcgtggtgcaggtgctgtcgcggcgaacgaaaaataaccctgtgctcatcggcgagccgggcgttggtaagacggcgattgttgagggcttggcgcaacgcatcgtttccggcgatgtgccggagcaattgcgcaacaagcggctggtgtcgctggatctaggagcgatgctcgcgggcgcgaaatatcgcggcgagtttgaagatcgtcttaaggcggtgctgaaggaaatcgaggagagcgacggacgcatcatcctcttcatcgacgagctgcacacgttggttggtgcaggtgctgcggaaggggcgatcgacgccagcaatatgttgaagccggcattggcacgcggcgaactgcgcgcaattggcgccaccacgctgaatgagtaccgcaagtacatcgagaaggatgcggcgctggagcggcgcttccagatcgtgttcgtcgggcagccgacggtggaagacacgattgcgatcttgcgcggactgaaagagaaatacgaagtccatcacggcgtgcgcattaaggattcggcgatcgtcgcggcagcgacgctgtcgcaccgctacatcaccgatcgtttccttcccgataaagccatcgacctgatcgatgaagctgcagcctcgctgcgcattcagattgattcgctgccgacggaagtagacgaactcgagcgccgcatcacgcagcttgagatcgaacgacaagcgttgaagcgggaagaagacacaaactcgcgcgaacggctggccgtgattgaaaaagagctcgcagggctccgcgagcgttcgaacgcgttgaaggcgcgatggaaagacgagaagcagagcatcggtcggattcgcgagttgaaagagaagatcgaacagatcaagctccaggcgcagaccgcgagcaacaagggcgactacgaaaaagccgcgcagttgcagtatggcgagctgccgaagttgcaggcggaactcgacaacctcagcgcggagagcgacagcaagacatcgccacgcatgttgaaggaagaagtggacgaagaagacgtcgcgaagatcgtctcgaagtggacgggtattccggtgtcgaagatgctcgaaggcgaagtgaagaagctggtcgagatggaagaccggcttagtcagcgggtgatcgggcaagacgctgcgattgagcacgtggcgaacgcgattcggcgttcgcgtgctgggttgagtgatcccaaacgtccgatcggcagcttcatcttcctcggcccgacgggggtgggaaaaaccgagctggcgcgtgcgctggcggcgttcctgttcgacgacgagcatgcgatggtgcgcatcgacatgtcagagtatggcgagaagcattcggtttcgcgactgattggcgcacctccgggatacgttggctacgaagagggaggtcaattgacggaagcgattcgtcgccgactgtatgcggtgttgctcttcgacgaaattgagaaagccgctccagatgtgttcaatgtcttcctgcagatcatggacgacggtcagctcaccgacggcaaaggccgccgcgtggacttcaagaacacgatcatcatcatgacgtcgaacattggcgcgtcgttcatgaccggtgatgcgatccagagtcaagagaattacgaacgagcaagccgcctggtgatggacgcgctgcggcagcagttcaagccagagttcctgaaccgggtggacgacatcgtgctcttcaatccgctcgggaaggagcagctggcgaagatcgtcgagctgcaactggagtatgtgcgccggttgctggcggaccgccgcatcagcctcgaattgagcgacgccgcgaaagatgtgatcttcgcgcaagggtacgatccggcgtatggagcgcggccgttgaaacgtgcgatccagaagctggtgcaggacccgctggcgctgaagattctcgacggcgaggtattgcacggcgatcacgtggtggtgggcgtgagtggcgagggcaagttgacgttcaaggtgagccatcgcaccacggagcctgaaacggtgaagacgaagtaa

SEQ ID NO: 7034 - protein, 878 aa, Acidobacteria bacterium Ellin345
MAIRWDKLTVKAQEAYSRANDLASEHGNPELRPVHVLAALLEDREGIIVPLLSKMGVRPEAVTQATAREIERMPKVSGSATQATLSNEAQEMLELAFKQADQFKDEYVSTEHLLLGIAQLKRDAAKDILGSMGATYDRILSALTGIRGNQKVTDQNPEAKYQALERYARDLTDLARRGKLDPVIGRDDEVRRVVQVLSRRTKNNPVLIGEPGVGKTAIVEGLAQRIVSGDVPEQLRNKRLVSLDLGAMLAGAKYRGEFEDRLKAVLKEIEESDGRIILFIDELHTLVGAGAAEGAIDASNMLKPALARGELRAIGATTLNEYRKYIEKDAALERRFQIVFVGQPTVEDTIAILRGLKEKYEVHHGVRIKDSAIVAAATLSHRYITDRFLPDKAIDLIDEAAASLRIQIDSLPTEVDELERRITQLEIERQALKREEDTNSRERLAVIEKELAGLRERSNALKARWKDEKQSIGRIRELKEKIEQIKLQAQTASNKGDYEKAAQLQYGELPKLQAELDNLSAESDSKTSPRMLKEEVDEEDVAKIVSKWTGIPVSKMLEGEVKKLVEMEDRLSQRVIGQDAAIEHVANAIRRSRAGLSDPKRPIGSFIFLGPTGVGKTELARALAAFLFDDEHAMVRIDMSEYGEKHSVSRLIGAPPGYVGYEEGGQLTEAIRRRLYAVLLFDEIEKAAPDVFNVFLQIMDDGQLTDGKGRRVDFKNTIIIMTSNIGASFMTGDAIQSQENYERASRLVMDALRQQFKPEFLNRVDDIVLFNPLGKEQLAKIVELQLEYVRRLLADRRISLELSDAAKDVIFAQGYDPAYGARPLKRAIQKLVQDPLALKILDGEVLHGDHVVVGVSGEGKLTFKVSHRTTEPETVKTK

SEQ ID NO: 7035 - DNA, 2619 bp, Silicibacter sp. TM1040
  CDS (1)..(2619): transl_table=11
atggacttgaacaagttcactgaacgggcgcgtggttttgtgcaggcgtcccagacgattgcgttgcgtgaaggccaccagcgcctgacaccggaacatatcctgaaagcattgctcgacgacgatcaaggcatggcgtcgaacctgattgcgcacgcgggcgggaacatcgcgcgtgtgagcgaggcagtagaagccgcgatcggcaagttgccgaaggtttctggcgatgctggtcagatctatctggacgggcaaaccgccaaggttctggatgaagcggccaaggtggccgaaaaagcgggcgacagctttgtcccggtcgagcgactgctgacagcgcttgccctcgtgaaatccaaggcaaaggatgcgctggacgcaggtggcgtgacggcgcagaagctcaatgaggcgatcaacgacgtacgcaaggggcgcacggcggataccgcaaccgcagaggatacttatgaggcgctgaagaagttcaccctcgacctcacggagcgtgcgagagagggcaagatcgacccgatcattggccgcgatgacgaaattcgccgcgccatgcaggttctgtcgcgtcgcaccaagaacaaccctgtgctgatcggcgagccgggcgtgggtaaaaccgcgattgccgaaggcatggctttgcggatcgtcaatggcgacgtgcccgagagcctcaaggacaagcgtctgctagcgctcgacatgggcgcgcttattgcgggtgcgaaatatcgcggtgagttcgaggaacgcctcaagggcatcctcaatgaggtgaccgatgcggcgggcgaaatcattctgtttatcgacgagatgcatacccttgtaggggcaggcaaatccgatggcgcgatggatgcggccaacctcatcaagccggcacttgctcgcggtgagctgcactgtatcggcgcaaccacgctcgatgagtatcgtaaatacgtagagaaggacgcagccctggcccgccgcttccagcctgtcatggtcacggagccgacggtggaagacacgatttccatcctgcgtggcatcaaggaaaagtacgagctgcaccacggtgtccgcattgcggatgcggcgctggtgtctgccgctacgctctcgaaccgctatatcaccgaccggttcctgcccgacaaggcgattgaccttatggacgaggcggcatcgcgcctgcggatggaggtggactccaaacccgaagagctcgacgcgctggatcggcagatcctgcagatgcagatcgaagaagaagcgctgaagctcgaggatgatgcggcgtcgaaggaccggttggagcatctccagaaggaactggcagacctgcaggagcgttcgcgcgaaatgaccgcgcaatggcagtccgagcgtgacaagctcgcctctgcgcgtgatctgaaagagcagcttgatcgcgcacgtgccgaactcgacatcgccaaacgcgaggggaatctcgccaaggcgggtgagctgtcttatggcgtcattccggggttggaaaagcagctctctgaggccgaacagaaagaagagcagggcctgatggtcgaggaagcggtgcgcccggagcagattgcagctgtggtggaacgctggaccggtattccgacctcaaagatgttggagggcgagcgcgagaagctcttgcggatggaagatggcctgcacaagcgcgtcattggtcagaacgccgccgtgacggccgtggctaacgcggtgcgtcgggcgcgcgcggggctcaatgatgagaaccgtccgctggggtccttcctattccttgggccgaccggcgtggggaaaaccgagctcaccaaagctgtggccgagttcctctttgacaatgacagcgcgatggtacgcatcgacatgtcggagttcatggagaaacacgcagtcgcacgtctgatcggtgcccctccgggctatgtcgggtatgacgagggcggcgtgctcaccgaggcggtgcggcgcagaccttatcaggtggttctgtttgacgaggtcgaaaaggcccacccggacgtgttcaacgtgctcttgcaggtgctcgatgatggcgtgctgaccgatggtcagggccggaccgtggacttcaagcagacgctgatcatcctgacatcaaacctcggagcgcaggcgctgagtcagctgccagatggcgcggatgcagcagatgccaaacgcgacgtgatggatgcggtgcgggcacacttccggcccgagttcctgaaccgtctggatgagaccgtgatctttgaccgtctgggacggcacgatatggacggtatcgtcgaaatccagcttgggcgtctcgccaagcgtctggcgcaacgcaaaatcacgctggagctggatgagggggcaaagacctggctcgcagatgagggctacgacccggtgttcggggcgcgtccgctcaaacgcgtgatccagcgcgccttgcaaaacccgttggccgaggccctgctggctggcgacatcaaggacggtgaaatcgttcccgtgtctgccggggctgaggggctggtgatcggggatcgcgtcggcagctccgatcgtccgctgccggatgatgccgtggtgcattga

SEQ ID NO: 7036 - protein, 872 aa, Silicibacter sp. TM1040
MDLNKFTERARGFVQASQTIALREGHQRLTPEHILKALLDDDQGMASNLIAHAGGNIARVSEAVEAAIGKLPKVSGDAGQIYLDGQTAKVLDEAAKVAEKAGDSFVPVERLLTALALVKSKAKDALDAGGVTAQKLNEAINDVRKGRTADTATAEDTYEALKKFTLDLTERAREGKIDPIIGRDDEIRRAMQVLSRRTKNNPVLIGEPGVGKTAIAEGMALRIVNGDVPESLKDKRLLALDMGALIAGAKYRGEFEERLKGILNEVTDAAGEIILFIDEMHTLVGAGKSDGAMDAANLIKPALARGELHCIGATTLDEYRKYVEKDAALARRFQPVMVTEPTVEDTISILRGIKEKYELHHGVRIADAALVSAATLSNRYITDRFLPDKAIDLMDEAASRLRMEVDSKPEELDALDRQILQMQIEEEALKLEDDAASKDRLEHLQKELADLQERSREMTAQWQSERDKLASARDLKEQLDRARAELDIAKREGNLAKAGELSYGVIPGLEKQLSEAEQKEEQGLMVEEAVRPEQIAAVVERWTGIPTSKMLEGEREKLLRMEDGLHKRVIGQNAAVTAVANAVRRARAGLNDENRPLGSFLFLGPTGVGKTELTKAVAEFLFDNDSAMVRIDMSEFMEKHAVARLIGAPPGYVGYDEGGVLTEAVRRRPYQVVLFDEVEKAHPDVFNVLLQVLDDGVLTDGQGRTVDFKQTLIILTSNLGAQALSQLPDGADAADAKRDVMDAVRAHFRPEFLNRLDETVIFDRLGRHDMDGIVEIQLGRLAKRLAQRKITLELDEGAKTWLADEGYDPVFGARPLKRVIQRALQNPLAEALLAGDIKDGEIVPVSAGAEGLVIGDRVGSSDRPLPDDAVVH

SEQ ID NO: 7037 - DNA, 2625 bp, Myxococcus xanthus DK 1622
  CDS (1)..(2625): transl_table=11
atgcgactcgacaagtacacagtgaaggcgcaggaggcgatccacgagggtcagagcctggcccgtcgggcggacaatccgcagtacgagcccgagcacctggccgctgcgttgctcggccagaaggacggcatcgtcgatcccctgctccggaagatcggggcagacgtgaagctgttcgccgcgcggctcggcgaggcgctccagaagctgccccgcatgcaggggggcgagagcgcgatgctgggccagcggctgctcaagactttcgacaaggccgaggacgaggccaagtccctcaaggacgagttcatctcctcggagcacctgctgctcgcgctcacgcacgacaagggcgcggtgggcgaggtgatgaagtcctcgggcgtcacgagggagcgcgtgctgtccggactcaaggaggtccggggctccgggcgcgtgacgagccaggacgccgaggcgacctaccaggcgctggagaagtacggccgcgacctcacagaggcggcgcgctccggcaagctcgaccccgtcatcggccgtgacgaggagatccgccggtgcgtccaggtgctgagccggcgcaccaagaacaacccggtgctcatcggcgagcccggcgtgggcaagacggccatcgcggaaggactggcgcggcgcatcgtcgatggcgacgtgccggagggcctgaagaacaagcgcctggtgtccctggatttgggcgccatggtggccggcgcgaagtaccgcggcgagttcgaggagcgcctcaaggccgtcctcaaggagattgccgacgccgcgggcgaggtcatcctcttcatcgacgagctccacacgctggtgggcgcgggcaaggccgaaggggccatggacgcgggcaacatgctcaagccggcgctggcgcgcggcgagctgcactgcatcggcgccaccacgctggacgagtaccgcaagcacatcgagaaggacgccgcgctggagcggcgcttccagcccgtcctggtgggcgagccgagcgtgcacgacaccatcagcatcctccgcggcctgaaggagcgctacgaggtgcaccacggcgtgcgcatccaggacaacgccctggtggccgccgccacgctgagccaccgctacatcgcggaccggttcctgccggacaaggccatcgacctggtcgacgaggcctccagccgcctgcgcatcgaaatcgactccatgcccacggagctggacgacgtgcgccggaagatgacgcagctccagattgagcgggagggcttgcgcaaggagacggacccgcactcgcaggagcgcctgggccagattgagaaggagctggccaacctgagcgagaagttcaacgcgctcaaggtgcactgggacgcggagaagacggccattggcgccatccgcagcctgaaggagaagcaggagaaggcgaagaacgaccaggctgcggccgagcgtcagggcgacctgaaccgcgcggcggagctgaagttcggcgtcatcccctcgctcgacaaggagctgaaggcgcagaacgagaagctggccgagctgcagaagaaccagaagttcctcaaggaggaggtcgacgcggaggacatcgcccaggtggtggccaagtggacgggcatccccgtctcgcggctgatggagggcgaggtccagaagctggtccacatggaggaccggttggcgaaccgggtgattggccagcgcagcgccatcgaggcggtgtccaacgccgtgcgccgcgcgcgcagcggactgcaggaccccaaccgccccatcggttcgttcatcttcctgggccccacgggcgtgggcaagacggagacggccaaggcgctggcggagttcctcttcgatgatgactcggccatggtccgcatcgacatgtccgagtacatggagaagcactccgtggcccggctggtcggcgcgcctccggggtacgtcggctacgaggagggcggccagctcaccgaggcggtgcgccggcggccgtacacggtggtcctcttcgacgaaatcgagaaggcgcaccacgacgtcttcaatgtgctgctccagattctcgacgagggccggctgacggacagccagggccgcacggtggacttcaagaacacggtgctcatcctgacgtccaacatcggctcgcaggacatccaggccggcatggcgggcaaggaggagctggacgagcgcacgcgcaacgaggtgatggacgcgctgcgcgcgcacttccggccggagttcctcaaccgcgtggacgagatcgtcatcttcgagccgctgcggaagaaggacatctaccgcatcgtggacctgcagttggcgcggctgtccaagctgctggccgacaagcggctgacgctggagctgacggagaaggcgcgcgagctgctcgccgagcgcggctacgacccgacgtacggcgcgcggcccctgaagcgcgcggtacagaagaacctgttggacccgctggccctcaaggtcctgggcggcgagttcgtcccgggcgaccacatccaggcggatgcgggcccggacgggctcaccttcgccaaggtgctggtggacacctcgaaggacgtgaagcgctcggcctag

SEQ ID NO: 7038 - protein, 874 aa, Myxococcus xanthus DK 1622
MRLDKYTVKAQEAIHEGQSLARRADNPQYEPEHLAAALLGQKDGIVDPLLRKIGADVKLFAARLGEALQKLPRMQGGESAMLGQRLLKTFDKAEDEAKSLKDEFISSEHLLLALTHDKGAVGEVMKSSGVTRERVLSGLKEVRGSGRVTSQDAEATYQALEKYGRDLTEAARSGKLDPVIGRDEEIRRCVQVLSRRTKNNPVLIGEPGVGKTAIAEGLARRIVDGDVPEGLKNKRLVSLDLGAMVAGAKYRGEFEERLKAVLKEIADAAGEVILFIDELHTLVGAGKAEGAMDAGNMLKPALARGELHCIGATTLDEYRKHIEKDAALERRFQPVLVGEPSVHDTISILRGLKERYEVHHGVRIQDNALVAAATLSHRYIADRFLPDKAIDLVDEASSRLRIEIDSMPTELDDVRRKMTQLQIEREGLRKETDPHSQERLGQIEKELANLSEKFNALKVHWDAEKTAIGAIRSLKEKQEKAKNDQAAAERQGDLNRAAELKFGVIPSLDKELKAQNEKLAELQKNQKFLKEEVDAEDIAQVVAKWTGIPVSRLMEGEVQKLVHMEDRLANRVIGQRSAIEAVSNAVRRARSGLQDPNRPIGSFIFLGPTGVGKTETAKALAEFLFDDDSAMVRIDMSEYMEKHSVARLVGAPPGYVGYEEGGQLTEAVRRRPYTVVLFDEIEKAHHDVFNVLLQILDEGRLTDSQGRTVDFKNTVLILTSNIGSQDIQAGMAGKEELDERTRNEVMDALRAHFRPEFLNRVDEIVIFEPLRKKDIYRIVDLQLARLSKLLADKRLTLELTEKARELLAERGYDPTYGARPLKRAVQKNLLDPLALKVLGGEFVPGDHIQADAGPDGLTFAKVLVDTSKDVKRSA

SEQ ID NO: 7039 - DNA, 2661 bp, Rubrobacter xylanophilus DSM 9941
  CDS (1)..(2661): transl_table=11
atgggacagagaagggtttgcagggtctgcggcaggccggcgacggtaacgatccgcaggatcatacccggcgagccgccccgggtggagtactactgcgaggagcacgcggcgcaggcccggggcgggcgctcgcccttcggcgggggcggcagcctcttcgaccagttcttcaaccggttcttcgaggaggaacccttcgggggtagggccgcggtgccctccggcggccggagggccgagcaggtggacgtcacccagttcttctccgagagcaccaacgagctcttgcagcgggcggcgcagcaggccatggagtggggcagcctcgacctcggcagcgagcacctgctccacggggcgctcggggacgaggtcgtgcggcgggtgctcgagcgggccgacgccgaccccgacgccataaggcgccagatcgaggaggaggtcgagaaggccgggcgcaaggacgtggccccctccctctccccggaggccaagcgggcgctcctcgccgcctacgaggagtcgcaggagctcggcgcctcctacatcgggcccgagcacatcctgctcgcgctcgcccgggacgaagactccgaggccgggcggatgctgcggcgcttcgggctctcgcacacccggctgcgcggggccgtggtgcgcggtgtggacgagggcgggggcgtgcgggaggcccccagcgacacccccaccctcgacgagtacagccgcgacctcacccggatggcccgggaaggcaagctcgaccccgtcgtcgggcgctccgaggagatagagaccaccatcgagatcctctcgcgccggaccaagaacaaccccgtgctcatcggcgacccgggcgtcggcaagaccgccatcgtcgagggcatagcccagaggatcgtcaacggcgaggtgcccgagaccctcgccggcaagcgggtcctggcgctcgacctcgccgggatggtcgccgggaccaagtaccgcggcgagttcgaggagcgcctcaagaaggtcatagacgagatccgcgagcactccgacgagctgatcatcttcatcgacgagctgcacaccgtggtgggcgcgggggccgccgagggggccatggacgcctccaacatgctcaagcccgcgctcgcccgcggcgagctgcacgtcatcggggccaccaccatagacgagtaccgcaagaacatcgagaaggacgccgcgctcgagcggcgcttccagccggtcctggtgagcgagccctccgtggaggagaccgtggagatcctcaccgggctcaaggaccgctacgaggcccatcacggcgtgaagatctccgaggaggccatcgtagccgccgccgagctctccgaccgctacatcaccgaccggttcctgccggacaaggccatagacctcatggaccaggcggcggcgcgggtcaagctccgctcccggaccaagcccgaggacgcccgggagatagaggaggagataaagaagctgcagcgggagaaggaccgggccgtctccgccgaggactaccggcgcgcccaggagctgaagggccagatccaggagctcaaggaccggctcggggcctaccgggccggcgggcgcggggcgccggaggtgaccgccgaggacatcgccgaggtggtgagccgccagaccggcataccggtctctcagctcacccaggaggagcgcgagcggctgctgcggctcgaggagcggctgcacgagcgggtcgtcggccaggacgaggccgtcgaggccgtcgccgaggccataaggcgcgcccgggccgggctctccgaccccaaccgccccatcggctccttcctcttcctcgggcccacgggcgtggggaagacggagcttgcgcgcacgctcgccgaggcgctcttcggcgacgaggcggcgatggtgcgcatcgacatgagcgagttccaggagcggcacaccgtctcgcggctggtgggcgcgcccccgggctacgtgggctacgaggaggccgggcagctcaccgaggccgtcaggcgcaggccctactccgtgctgctgctggacgagatagagaaggcccaccccgacgtcttcaacctcctcttgcagatcctggacgaggggcgcctcaccgacgcccagggccggacggtggacttcaagaacaccgtcatcatcatgaccagcaacctcggggccgagaggatccaggcgcacgcccgcaggaaggagtccttcgaggagctcaaggaggacatgatgcagatcgtgcgccgttccttcaggcccgagttcataaaccggatagacgagatcatcatcttcagggccctgagccgggagcagatcctggagatagcccgcctgctcctggagcgcaccaggcggcgcctcaaggcccaggacatagaggtggagttcaccgacgccgccgtggagcacatcgccggcgagggcttcgaccccgagttcggggccaggcccctcaggcgcaccatccagcggcaggtggacaacgagctctccaggctgctcctcgagggctccgtggagcccggcgacagggtggtggtcggcgccgaggacggccgcctgaccttcgaggtgcagaaggaggcggccgccgccgtcggcgagcgcgacgggcgcggggagtga

SEQ ID NO: 7040 - protein, 886 aa, Rubrobacter xylanophilus DSM 9941
MGQRRVCRVCGRPATVTIRRIIPGEPPRVEYYCEEHAAQARGGRSPFGGGGSLFDQFFNRFFEEEPFGGRAAVPSGGRRAEQVDVTQFFSESTNELLQRAAQQAMEWGSLDLGSEHLLHGALGDEVVRRVLERADADPDAIRRQIEEEVEKAGRKDVAPSLSPEAKRALLAAYEESQELGASYIGPEHILLALARDEDSEAGRMLRRFGLSHTRLRGAVVRGVDEGGGVREAPSDTPTLDEYSRDLTRMAREGKLDPVVGRSEEIETTIEILSRRTKNNPVLIGDPGVGKTAIVEGIAQRIVNGEVPETLAGKRVLALDLAGMVAGTKYRGEFEERLKKVIDEIREHSDELIIFIDELHTVVGAGAAEGAMDASNMLKPALARGELHVIGATTIDEYRKNIEKDAALERRFQPVLVSEPSVEETVEILTGLKDRYEAHHGVKISEEAIVAAAELSDRYITDRFLPDKAIDLMDQAAARVKLRSRTKPEDAREIEEEIKKLQREKDRAVSAEDYRRAQELKGQIQELKDRLGAYRAGGRGAPEVTAEDIAEVVSRQTGIPVSQLTQEERERLLRLEERLHERVVGQDEAVEAVAEAIRRARAGLSDPNRPIGSFLFLGPTGVGKTELARTLAEALFGDEAAMVRIDMSEFQERHTVSRLVGAPPGYVGYEEAGQLTEAVRRRPYSVLLLDEIEKAHPDVFNLLLQILDEGRLTDAQGRTVDFKNTVIIMTSNLGAERIQAHARRKESFEELKEDMMQIVRRSFRPEFINRIDEIIIFRALSREQILEIARLLLERTRRRLKAQDIEVEFTDAAVEHIAGEGFDPEFGARPLRRTIQRQVDNELSRLLLEGSVEPGDRVVVGAEDGRLTFEVQKEAAAAVGERDGRGE

SEQ ID NO: 7041 - DNA, 2676 bp, Mesorhizobium sp. BNC1
  CDS (1)..(2676): transl_table=11
ttgggggtccgtcacattggcctgctcgatgccgccaagcgggtcggcacggagatggagacgtggaacatggacatcgaaaaatattccgagcgcgtgcgtggctttattcaggctgcccagacgctcgccctttccagaaatcaccagcagttttcgcctgagcacatcctgaaagtgctcgttgatgacgaggaaggactcgcggcgaatctcatcgagcgtgccggcgggcgggcgcgggatgtgaaactgggcgtcgacgccgcgcttgaggcgttgccgcgtgtcgaaggcggcagcggccagctttatctggcgcagccgctggcaaaggttttctccaccgctgaagaactcgcgaagaaggccggggacagtttcgttaccgtcgagcgcctgctcatggcgctggccatggagaaatccgccaagagcgcggatattctggcaaaggccggtgtcactccgacggctctcaatcaggtcataaacgatatccgcaagggccgaaccgccgattcgccgaatgcggagcagggctatgacgcgctgaagaaatatgcgcgcgatctgacagccgaggcgcgggcgggcaagcttgatcccgtgatcggccgcgatgacgagatccgccgcacgatccaggtcctttccaggcgcacaaaaaacaatccggtgctgatcggcgaacccggcgtaggcaaaaccgccatcgccgaggggctggcgctcaggatcgtgaacggcgacgtgcccgaatcgctcaaggacaagcagctcatggcgctcgacatgggtgcgctgatcgccggcgccaaatatcgcggcgagttcgaggagcggctgaaggccgtgctttccgagattcaggccgcggccggcggtgtcatcctcttcatcgacgagatgcacacgctggttggcgccggtaaagcggatggcgcgatggacgcttccaatcttctgaagcccgcgctggcgcggggcgagctgcactgtgtgggcgcgacgacgctcgatgaataccggaaatatgtggaaaaggacgcggcgctcgcccgccgctttcagcctgtctacgtgaacgagccttcggtggaggacactatctccatcctgcgcgggctgaaggagaaatacgagcagcaccacaaggtgcgcgtctccgattccgctcttgtggcggcggccaacctgtcgaaccgctacatcaccgatcgtttcctgcccgacaaggccatcgacctggtggacgaggcggcatcgcgcctgcgcatgcaggtggattccaagccggaggaactggatgaggtcgaccggcgcatcatgcagctcaagatcgaacgcgaggcgctgcgggtcgagaaggacgaggcttcgaaggatcggcttgaacggctagagagggaattggccgagctcgaggagcagtcggccaatatcaccgccaaatggcaggccgaaaagcagaaactgggccttgccgccgaactcaagaagcagcttgacgaagcgcgcaacgatcttgcgattgctcagcgcaaaggcgagttccagcgcgcgggcgagctggcctatggccgtatccccgagcttgagaagaagctgaaggaggctgaggagcaggacggcaagggctcgctcgtcgaagagacggtgacgcctgaccatgtggcgcatatcgtttcccgctggaccggcattcccgtcgacaagatgctccagggcgagcgtgaaaagctgctcaggatggaagacgagctcgccaagcgtgtgattgggcaaggtgaggcggtgcaagcggtttccaaagccgtgcggcgcgcgcgcgccgggttgcaggatccgaaccggccgctcggctcgttcatgttcctggggcccacgggcgtgggtaagacggagctgaccaaggcgctcgccgctttcctattcgatgacgagcaggcgatggtgcgcatcgacatgtcggagttcatggagaagcactcggttgcccggctgatcggcgctcctcccggctatgtgggttatgacgagggcggcgtgttgaccgaagctgtccgccgcaggccctatcaggtgatcctgttcgacgagatcgagaaagcgcacccggatgtctttaatgtgctgctccaggtgctggacgacggcaggctcacggatggccaaggccggacggtcgacttccgcaacactctgatcatcatgacgtccaatctgggcgcggagtaccttgtcaatctggccgaaggcgaggacgtggacaaggtgcgcgacgaggtgatggctgtcgtgcaggcttcgttccggcctgaattcctgaaccgtgtggacgagatcatcctcttccaccgcctgcgccggcaggatatgggcgatatcgtccgcatccagctcaagcgcatcgggcggctgctggaagaccgcaagatcacgctcgagctcgaccaggaggcaatcgactggcttgccgacaagggctacgatcctgcctatggcgctcgtccgctgaagcgggtcatgcagaaggaactgcaggatccgctggccgagaagatcctgatgggagagatcttcgatggctcgaccgtcaagatcaccgccggttcagataggctgatcttccgcccgcggaagaattcggaggctgcggcggaagcagcgtga

SEQ ID NO: 7042 - protein, 891 aa, Mesorhizobium sp. BNC1
MGVRHIGLLDAAKRVGTEMETWNMDIEKYSERVRGFIQAAQTLALSRNHQQFSPEHILKVLVDDEEGLAANLIERAGGRARDVKLGVDAALEALPRVEGGSGQLYLAQPLAKVFSTAEELAKKAGDSFVTVERLLMALAMEKSAKSADILAKAGVTPTALNQVINDIRKGRTADSPNAEQGYDALKKYARDLTAEARAGKLDPVIGRDDEIRRTIQVLSRRTKNNPVLIGEPGVGKTAIAEGLALRIVNGDVPESLKDKQLMALDMGALIAGAKYRGEFEERLKAVLSEIQAAAGGVILFIDEMHTLVGAGKADGAMDASNLLKPALARGELHCVGATTLDEYRKYVEKDAALARRFQPVYVNEPSVEDTISILRGLKEKYEQHHKVRVSDSALVAAANLSNRYITDRFLPDKAIDLVDEAASRLRMQVDSKPEELDEVDRRIMQLKIEREALRVEKDEASKDRLERLERELAELEEQSANITAKWQAEKQKLGLAAELKKQLDEARNDLAIAQRKGEFQRAGELAYGRIPELEKKLKEAEEQDGKGSLVEETVTPDHVAHIVSRWTGIPVDKMLQGEREKLLRMEDELAKRVIGQGEAVQAVSKAVRRARAGLQDPNRPLGSFMFLGPTGVGKTELTKALAAFLFDDEQAMVRIDMSEFMEKHSVARLIGAPPGYVGYDEGGVLTEAVRRRPYQVILFDEIEKAHPDVFNVLLQVLDDGRLTDGQGRTVDFRNTLIIMTSNLGAEYLVNLAEGEDVDKVRDEVMAVVQASFRPEFLNRVDEIILFHRLRRQDMGDIVRIQLKRIGRLLEDRKITLELDQEAIDWLADKGYDPAYGARPLKRVMQKELQDPLAEKILMGEIFDGSTVKITAGSDRLIFRPRKNSEAAAEAA

SEQ ID NO: 7043 - DNA, 2616 bp, Cytophaga hutchinsonii ATCC 33406
  CDS (1)..(2616): transl_table=11
atgaatattaataattacacgattaaagggcaggaggcatttcagaaagcgatggaaattgttgctgccaacgaacagcaatccattgaatctgttcacttattgaaaggaataatcgttgcggatgaaaacgtggttccttttttattcaaaaaaaataatatcaatccggttacgtttaatcagacattggatgccgtaattaaaacctacggtaaagtttccggaggcagtccgtatttgtcaaacgatgccacgcaggtattaaataaagctacggctttatcaaaagagtttggcgacgaatatatttcgatcgagcacatgttgcttgcattggtttcagggaaagataaggctgcaacgttattaaaagatgccggcctttcggaaaagggcttgcgcgctgcgatccaggagttacgtggtacaagtaaagtaaccgatcagcatgcggaaggtaaataccggtcgcttgaaaaatattctaaaaatttaaatgacctggctcgttccggaaaaattgatccggtgattggccgggatgaagagatccgcagagtactgcagatcttatccagacgtaccaaaaataatccgattttattgggcgagccgggcgttggtaaaacagctatcgctgaaggccttgcacagcgtattgtttcgggtgatgttcctgaaaatttaaaaagcaaacaattaatctctctggatatgggtttgctggttgcaggtgcaaagtataaaggtgaatttgaagagcggttgaaatcggtgatcaaagaagtgatcgattcagatggcgagattgtgttattcattgatgagatccatacgttaattggtgccggcggcggggaaggtgcgatggatgcggcaaacttgctgaaacctgcacttgcacgtggtgagctgcatgcaatcggtgcaacaaccttaaaagaatatcagaaatacattgaaaaagataaagcgctggaacgtcgtttccaagcggtaattgttgacgagccgaatacacaggatgcaatttctatccttcgcgggatcaaagaaaaatacgaagtgcatcacggaatccggattcaggatgatgccatcattgctgcagtagaactttctcaacgctatatcagtgatcgttatttgcccgataaagcgattgatttgatggatgaagcatctgctaaattgcgtatcgagcttgattctatgccgcaggagctggatgaaattcttcgccgtatcatgcagctggaaattgaacgtgaagcgatccgtagagaaaataataaagagaaggaaacgattctttcccgtgaacttgcagaactgaatgagcagaagagccagatcatggctaagtggcaggaggaaaaacgtgtgatcgatggcttgaagcaagccaaggaagatatcgaccggtacaaaatggaagccgagcaagccgaacgtaatggtgattacggtaaggttgcagagatccgttatggtaaaattcaggagtctgaaaagcaattggtcgaattcaacaagcagctgcaggagttgaaacaaacacttggttcttcgatgctgaaagaagaagtgacgccggaagatattgcagaagttgttgcgaaatggacaggcataccggtttcaaaaatgcttcagagtgagagagaaaagttgcttcacttagaagaagagttaggtaaacgtgtcgccggacaagcggaagcgatagaggccatatccgatgcggtccgtaggagcagagcaggcttacaggatccgaagcgtccgataggttcttttattttcttaggaacaacaggtgttggtaaaaccgaactggcaaaagcactggctgattatttattcaacgacgacaatgctatggtacgtattgatatgtctgaatatcaggaaagccatgctgtaagtcgcttggttggtgcacctccgggatacatcggatatgaagaagggggacaattaacggaagctgttcgacggaagccgtattcagtaattttattggatgagattgaaaaggcccatccggatgtatttaatatattgcttcaggtattggatgaagggcgcttgacagataataaaggccgtgtagcgaactttaaaaatgcaatcattatcatgacatccaatatgggtgcgcatgtgattcaggagaattttgataagctaactgctgcaaatgaagatcaggtagttgaggaaacaaaaaatgaagtaattgatttattacgtaaaacgattcggccggagttcttgaatcgtgtcgatgaaattataatgttcagaccgctgacccgaaaagagattcgtaagattgttggtatacagtttagcttgatccaaaaacgtctcgaagagaacggaatcaaagttgaggcaagtaccgaagtattggataaattgggagagttaggtttcgatccgcaattcggtgcacgtccgttgaaacgtgtcatgcagcgtttgatcctgaatgaattgtccaaagaaattctttccggaaacattcagaaagaaagtgttgtaggcattacgcttggtgaagatgggaatctgcagtttttgaacttggatagtgtaccgttgtaa

SEQ ID NO: 7044 - protein, 871 aa, Cytophaga hutchinsonii ATCC 33406
MNINNYTIKGQEAFQKAMEIVAANEQQSIESVHLLKGIIVADENVVPFLFKKNNINPVTFNQTLDAVIKTYGKVSGGSPYLSNDATQVLNKATALSKEFGDEYISIEHMLLALVSGKDKAATLLKDAGLSEKGLRAAIQELRGTSKVTDQHAEGKYRSLEKYSKNLNDLARSGKIDPVIGRDEEIRRVLQILSRRTKNNPILLGEPGVGKTAIAEGLAQRIVSGDVPENLKSKQLISLDMGLLVAGAKYKGEFEERLKSVIKEVIDSDGEIVLFIDEIHTLIGAGGGEGAMDAANLLKPALARGELHAIGATTLKEYQKYIEKDKALERRFQAVIVDEPNTQDAISILRGIKEKYEVHHGIRIQDDAIIAAVELSQRYISDRYLPDKAIDLMDEASAKLRIELDSMPQELDEILRRIMQLEIEREAIRRENNKEKETILSRELAELNEQKSQIMAKWQEEKRVIDGLKQAKEDIDRYKMEAEQAERNGDYGKVAEIRYGKIQESEKQLVEFNKQLQELKQTLGSSMLKEEVTPEDIAEVVAKWTGIPVSKMLQSEREKLLHLEEELGKRVAGQAEAIEAISDAVRRSRAGLQDPKRPIGSFIFLGTTGVGKTELAKALADYLFNDDNAMVRIDMSEYQESHAVSRLVGAPPGYIGYEEGGQLTEAVRRKPYSVILLDEIEKAHPDVFNILLQVLDEGRLTDNKGRVANFKNAIIIMTSNMGAHVIQENFDKLTAANEDQVVEETKNEVIDLLRKTIRPEFLNRVDEIIMFRPLTRKEIRKIVGIQFSLIQKRLEENGIKVEASTEVLDKLGELGFDPQFGARPLKRVMQRLILNELSKEILSGNIQKESVVGITLGEDGNLQFLNLDSVPL

SEQ ID NO: 7045 - DNA, 2553 bp, Rhodococcus sp. RHA1
  CDS (1)..(2553): transl_table=11
gtggactcgttcaatccgaccaccaagacccaggccgcgatgaccgctgcgctccagtcggcgtcgtcggccggtaatcccgacatcaggcccgcgcacctgctcgtggccctgctcgaccagaccgacggcatcgccgccccgctgctcaaggcggtcggcgtcgatcccaccgtggtccatcgtgaagggcaggatctcgtcgaccggctgcccaagacgacgggcgccacgaccacaccgcagctcggccgcgaggcccttgccgcactcaccgcagcacagcacctcgccaccgaactcgacgacgagtacgtgtcgacggaacacctgatggtcggtctcgcctcgggtgagtcggacgtggccggactgctgaagcggcacggcgccacccccgaggcgctgcgtgatgcgttcaccacggtccgcggcagtgcgcgcgtcaccagcccggatccggaagggacgtaccaggcgctcgagaagtactccaccgacctcaccgcgctggcccgcaacggcaagctcgacccggtgatcggccgcgacaacgagatccgccgcgtcgtgcaggtactcagccgccggaccaagaacaacccggtgctgatcggcgaacccggtgtcggcaagaccgccatcgtcgagggactcgcccagcgcatcgtcgcaggcgacgttcccgaatcgctgcgcggcaagtccgtgatctccctcgacctcggatcgatggtggcgggcgccaagtaccgcggcgagttcgaggagcgactcaaggccgtcctcgacgacatcaagaactcggccggtcaggtcatcacgttcatcgacgagctccacaccatcgtcggtgcgggtgccaccggtgagtccgcgatggacgcgggcaacatgatcaagccgatgctcgcccgaggtgagctgcggctcgtcggcgcgaccacgctcgaggagtaccgcaagtacatcgagaaggacgccgccctcgaacgtcgcttccagcaggtgctggtgggtgaaccctccgtcgaggacaccgtcggcatcctgcgcgggctcaaggagcggtacgaggtgcaccacggtgtgcgcatcaccgactccgcgctcgtcgccgccgccacgctcagcgaccgctacatcacgtcccggttcctgccggacaaggcgatcgacctcgtcgacgaggccgcgtcccggctgcggatggagatcgactcgcgacccgaggagatcgacaccgtcgaacgcatcgtccgccggctcgagatcgaggagatggcgctgcagaaggaatccgacgcggcgtcgaaggaccggctcgaaaagctgcggcaggaactggccgacgaacgcgagaagctcaaccagctgaccacccgctggcagaacgagaagcaagccatcgactccgtgcgcggggtcaaggagcagctcgagacgctgcgcggcgaggaggaacgcgccgaacgcgacggcgacctcggccgggccgcggagctgcggtacggccgcatcccgcagctcgagaaggaactcgagcaggcggcccgcgagtccggcgccgccgccgacggcgacgtcatgctcaaggaggaagtgggtcccgacgacgtcgcagacgtggtcgccgcatggaccggcatcccggccggccgcatgatggagggcgagaccgccaagctgctgcggatggaatccgaactcggcaagcgggtcgtcggccaggaagaggccgtcgtcgccgtatcggatgcggttcgccgcgcccgcgccggagtcgccgaccccaaccggcccaccggttcgttcctgttcctcgggcccaccggcgtcggcaagactgaactcgcgaaatccctcgccgacttcctgttcgacgacgagcgcgccatggtccgcatcgacatgtccgagtacagcgagaagcattcggtggcccggctcgtcggcgccccgcccggatacgtcgggtacgaggcgggcggccagctcaccgaggccgtgcgacggcgtccgtacacggtggtgctgttcgacgaggtggagaaggcgcaccccgacgtgttcgacatcctgctcgccgtcctcgacgaaggccggctgacggacggtcagggacgcaccgtcgacttccgcaacaccatcttgatcctcacgtccaacctcggtgcgggtggatcgcgggagcaggtgatggatgcggtgcggcacgcgttcaagccggagttcatcaaccggctcgacgacgtcgtgatcttcgagtcgctcacggaagagcagctcgagtccatcgtcgacatccagctcgaccagctgtcccgccggctcgcggcgcggcggctgacgctggatgtatccgactcggcccgcttctggctggcggtccgcggctacgaccccatgtacggggccaggccgctgcgccggctgatccagcaggcgatcggcgaccagctggcgaagctgctgctcgccggtgacgtcaaggacggcgacaccgtccccgtgaaggtgtccgagaccggggacgcgctcgtcctcggctga

SEQ ID NO: 7046 - protein, 850 aa, Rhodococcus sp. RHA1
MDSFNPTTKTQAAMTAALQSASSAGNPDIRPAHLLVALLDQTDGIAAPLLKAVGVDPTVVHREGQDLVDRLPKTTGATTTPQLGREALAALTAAQHLATELDDEYVSTEHLMVGLASGESDVAGLLKRHGATPEALRDAFTTVRGSARVTSPDPEGTYQALEKYSTDLTALARNGKLDPVIGRDNEIRRVVQVLSRRTKNNPVLIGEPGVGKTAIVEGLAQRIVAGDVPESLRGKSVISLDLGSMVAGAKYRGEFEERLKAVLDDIKNSAGQVITFIDELHTIVGAGATGESAMDAGNMIKPMLARGELRLVGATTLEEYRKYIEKDAALERRFQQVLVGEPSVEDTVGILRGLKERYEVHHGVRITDSALVAAATLSDRYITSRFLPDKAIDLVDEAASRLRMEIDSRPEEIDTVERIVRRLEIEEMALQKESDAASKDRLEKLRQELADEREKLNQLTTRWQNEKQAIDSVRGVKEQLETLRGEEERAERDGDLGRAAELRYGRIPQLEKELEQAARESGAAADGDVMLKEEVGPDDVADVVAAWTGIPAGRMMEGETAKLLRMESELGKRVVGQEEAVVAVSDAVRRARAGVADPNRPTGSFLFLGPTGVGKTELAKSLADFLFDDERAMVRIDMSEYSEKHSVARLVGAPPGYVGYEAGGQLTEAVRRRPYTVVLFDEVEKAHPDVFDILLAVLDEGRLTDGQGRTVDFRNTILILTSNLGAGGSREQVMDAVRHAFKPEFINRLDDVVIFESLTEEQLESIVDIQLDQLSRRLAARRLTLDVSDSARFWLAVRGYDPMYGARPLRRLIQQAIGDQLAKLLLAGDVKDGDTVPVKVSETGDALVLG

SEQ ID NO: 7047 - DNA, 2571 bp, Haemophilus somnus 129PT
  CDS (1)..(2571): transl_table=11
atgaacatagataaatttacgactaaatttcaacaagctattgctgaagctcaatctttagccataggaaaagaccatcaatttattgaaccagttcatttaatgaccgcacttttaaatcagcaagatggttcaatcccgccattattaacagcaagtgggggaaatttagcattattgcataatgaattagctgcagaattgagccgtttaccacaagtttcggggaataatggggatattcaggtttccagaagtttggtcaaattattaaatttatgcgacaaactggcacaacaacggcaagataaatttatttcctctgaattatttttattagcaatttttgaagataaaggtgctttaagtgaaagtttgaaaaagtgcggtataaaacaagaaaatttactacaagccattgataaattgcgaggaggcgaaaaagtgaatgaacaaggtgcggaagaaaatcgtcaggcattagaaaaatatactattgatttaactgcaagggcagaaagtggaaaattggatcctgttatcgggcgtgatgaagaaattcgccgtgccattcaggttttacaacgtcgtacaaaaaataacccggtattaattggggaaccgggtgtaggtaaaacagcgattgtggaaggattggcacaacgtatcgtaaacggtgaagtacctgaaggcttaaaaggaaaacgtgttctttctctggatatgggagcgttaattgcgggagccaaatatcgtggtgaatttgaagaacgtctaaaagcggttctcaaagaattggcacaagaagaaggtcgtgtgattttatttattgatgaaattcacactatggtaggtgcgggaaaaactgacggggcaatggatgcgggaaatttgttaaagccaagtttagctcgtggtgaactgcattgtgtaggtgcaacaactttagatgaatatcgccaatatattgaaaaagatgccgcacttgaacgtcgtttccaaaaggtatttgttggtgagccgacagttgaagatacgattgccattttacgtgggttaaaagagcggtatgaaattcatcaccatgtgcaaattaccgatccagcaattgttgcggcagcgaccctttctcatcgttatatttccgatcgtcaattaccggataaagctattgatttaattgatgaggcagcctcaagtattcgtatggaaattgatagtaagccacaacctttagatagattagaacgccgtattattcaattaaaattggaacaacaagcgttacaaaaagaagatgatgaagcaagtcgcaagcgtttggatcttcttgaggaagagcttggtgaaaaagaacgtgaatatgcggagttggaagacgtttggaaggcggaaaaagccgcactttcgggtgctcaacacatcaaggcagagctggacaatgccaaaattcaaatggagcaagctcgccgaatcagtgattttgcgaaaatgtctgagctgcagtatggtcgtattcctgagctggaaaaacagcttgcacaagctgaaagtgcggaaggaaaagagatgactttattgcgaaatcgtgttaccgatgaggaaatcgctgaagtgctttcacgtgcgacaggcattcctgttgcaaaaatgatggagggcgaaaaagataaattattgcgtatggaacaagaattgcacaagcgtgttgtaggacaatcagaggcggttgttgctgtcgcaaatgctattcgtcgtagtcgtgccggattatctgatccaaatcgtcctattggctcattcttgttcttaggaccaacgggcgtagggaaaaccgaactttgtaaaacgcttgctaactttatgtttgatgatgaaaatgccatggtgcgtattgatatgtctgagtttatggaaaaacatagcgtttcacgcttagtgggagcacctccgggctatgttggttatgaagaaggcggttatttaaccgaagccgttcgtcgccgtccgtattccgtaattttgcttgatgaagtagaaaaagcccatagcgatgtattcaatattttattacaagtattagatgacggacgtttgactgatggacagggtagaacggttgatttccgtaatactgtagtgattatgacttcaaatttaggctctgatttaattcaaggcaataaagagttggattataatgcgatgaaagaaattgttatgtcagttgtaggacaacatttccgtcctgaattcatcaaccgtattgatgaaactgtggtattccatccattagctaaagaaaatattcgtgccattgccactattcaattacaacgcttagtgaaacgtatggaaactcatggttatcagcttgaatttaccgatgcaactttagattttatcggtgaagtcggctacgatgtgatttacggtgcaagaccgttaaaacgtgccattcaacaagaaattgaaaatccattagcacaacaaatcttatccggacaattattaccgggtaaaaaagtcattgtggattatgttgatgggaaggttgttgctcagcagtaa

SEQ ID NO: 7048 - protein, 856 aa, Haemophilus somnus 129PT
MNIDKFTTKFQQAIAEAQSLAIGKDHQFIEPVHLMTALLNQQDGSIPPLLTASGGNLALLHNELAAELSRLPQVSGNNGDIQVSRSLVKLLNLCDKLAQQRQDKFISSELFLLAIFEDKGALSESLKKCGIKQENLLQAIDKLRGGEKVNEQGAEENRQALEKYTIDLTARAESGKLDPVIGRDEEIRRAIQVLQRRTKNNPVLIGEPGVGKTAIVEGLAQRIVNGEVPEGLKGKRVLSLDMGALIAGAKYRGEFEERLKAVLKELAQEEGRVILFIDEIHTMVGAGKTDGAMDAGNLLKPSLARGELHCVGATTLDEYRQYIEKDAALERRFQKVFVGEPTVEDTIAILRGLKERYEIHHHVQITDPAIVAAATLSHRYISDRQLPDKAIDLIDEAASSIRMEIDSKPQPLDRLERRIIQLKLEQQALQKEDDEASRKRLDLLEEELGEKEREYAELEDVWKAEKAALSGAQHIKAELDNAKIQMEQARRISDFAKMSELQYGRIPELEKQLAQAESAEGKEMTLLRNRVTDEEIAEVLSRATGIPVAKMMEGEKDKLLRMEQELHKRVVGQSEAVVAVANAIRRSRAGLSDPNRPIGSFLFLGPTGVGKTELCKTLANFMFDDENAMVRIDMSEFMEKHSVSRLVGAPPGYVGYEEGGYLTEAVRRRPYSVILLDEVEKAHSDVFNILLQVLDDGRLTDGQGRTVDFRNTVVIMTSNLGSDLIQGNKELDYNAMKEIVMSVVGQHFRPEFINRIDETVVFHPLAKENIRAIATIQLQRLVKRMETHGYQLEFTDATLDFIGEVGYDVIYGARPLKRAIQQEIENPLAQQILSGQLLPGKKVIVDYVDGKVVAQQ

SEQ ID NO: 7049 - DNA, 2613 bp, Trichodesmium erythraeum IMS101
  CDS (1)..(2613): transl_table=11
atgcagccaaataatcctaaccaatttacagaaaaagcttgggaggcaatatcccgtacccctgacattgctaaaacttctcaaaatcaacaaattgaagctgaacacctaatgaaagctttgttagaacaaaatggactggtagctagtctatttagcaaagtaggtgtttcaactaccaaaatacaagaatacacagattcatttattaagcgtcaacccaaagtcaaaaatatacccaataatatttacttaggtcgtagtctagatgccttattagataatgccgaaaaatatcgccaggaatacaaagatgaatatatatctattgaacatctgatactcgcttacctgaaagacgatcactttggcaaaaatctctataaagaattcaaattggatgaagtaaagctcaaaaaaacaatttcccaagttagaggtaagcaaaaagtaacagacaaaaatcctgaaggcaaatatgaagctctggaaaaatacggtcgcgacctgacagaatttgctcgtgaaggtaaacttgacccagttattgggcgtgacgacgaaattcgacgtactattcaaatactcagtcgtcgtactaaaaataacccagttttaataggtgaacctggagtcgggaaaactgcgatagctgaaggtctagcacaaaggatcatcactcttgatgttcctcagtctctaaaagaccgtaaacttatcgctctagatatgggtgccttaattgcgggtgctaaatttaggggtgaatttgaagaacgtctgaaagctgttctcaaagaagttactgactcagagggcaaaattatcttatttatagatgaaattcatactgttgttggagcaggtgcaacccaaggggcaatggatgcaggtaacttgctgaaacctatgttagctaggggggaactaaggtgtattggggcgacgactcttgatgagtatcgtaaatacattgaaaaagatgctgccttagaacgtcgtttccaacaagtttatgtcgatcaacctagtgtggaagatgcaatatcaattttacggggtctcaaagaacgctatgaggtacatcatggtgtaaaaatttctgatagttctttagttgctgctgctactttatctactagatatattagcgatcgcttcctcccagataaggccatcgacttggtggatgaagctgctgctaaacttaaaatggaaatcacttctaaacctgaggaacttgatgaaattgaccgcaaaattctccaactagaaatggagaagttatctttgcaaaaggaaagtgatactgcttctaaagaaaggttaggaaggctagaaaaagatttagcaaatttaaaagaggggcaacgggctcttaatgctcagtgggaatcagaaaaaggtatcattagtacaattcagactgtcaaggaagaaattgataaagttaatattgagattcagcaagcagaacgaaattatgaccttaaccgtgctgctgagttgaaatatggtagactgattaatttacagaaacaggtggaggaagcagaggctaaactggcaacaactcaaactagtggtcagactttgttacgagaagaggtgacagaagctgatattgctgagattatttctaagtggactggtattcctatcagtaaattagtagagtcagaaaaagaaaaactgctacatcttgaaggggagttgcataagcgagttattgggcagaatgaagctgtgagtgctgtttctgatgctattcagcgatcgcgtgcaggtttggctgacccgaaccgtccagttgctagttttattttcctgggtccgactggtgtgggtaaaacagagttaggaaaggcattggcagcatatttatttgacactgaagatgcgatggtgcgtatagatatgtctgagtatatggagaaacattctgtgtctcgtttaattggggcacctcctggatatgtgggttatgatgaaggtggtcagttaactgaagctattcgccgtcgcccatatacggtgattttgtttgatgaaattgaaaaagcacatccggatgtgtttaatattatgctgcaaattttggatgatgggcgggttactgatagtcaaggtcacaaggttgattttaagaatagtgtgattattatgacaagtaatattggttctcagtatattttagatgttactgatgattatgagcaaatgcagggtcgggtaatggaggcgttgcgtgctgctttccgcccagaatttctcaaccgtattgatgagacgattatttttcatgggttgcagaaagagcagttacgagaaattgtgcagttgcaggttgtgcgtttagagaaaaggttggctgaacgtaagatgtcattgaagcttactgatgctgctattaattttttggcagatgttgggtatgatccggtgtatggggctcgacctttaaagcgggcaattcagcgagagttggaaacgcaaattgctaaaagtattttgcgtagtgaatttaatgatggtgatactatttttgtagatattgaaaatgagcgactttcgttgaaacggttgcctatggagttggtgacagctaaatga

SEQ ID NO: 7050 - protein, 870 aa, Trichodesmium erythraeum IMS101
MQPNNPNQFTEKAWEAISRTPDIAKTSQNQQIEAEHLMKALLEQNGLVASLFSKVGVSTTKIQEYTDSFIKRQPKVKNIPNNIYLGRSLDALLDNAEKYRQEYKDEYISIEHLILAYLKDDHFGKNLYKEFKLDEVKLKKTISQVRGKQKVTDKNPEGKYEALEKYGRDLTEFAREGKLDPVIGRDDEIRRTIQILSRRTKNNPVLIGEPGVGKTAIAEGLAQRIITLDVPQSLKDRKLIALDMGALIAGAKFRGEFEERLKAVLKEVTDSEGKIILFIDEIHTVVGAGATQGAMDAGNLLKPMLARGELRCIGATTLDEYRKYIEKDAALERRFQQVYVDQPSVEDAISILRGLKERYEVHHGVKISDSSLVAAATLSTRYISDRFLPDKAIDLVDEAAAKLKMEITSKPEELDEIDRKILQLEMEKLSLQKESDTASKERLGRLEKDLANLKEGQRALNAQWESEKGIISTIQTVKEEIDKVNIEIQQAERNYDLNRAAELKYGRLINLQKQVEEAEAKLATTQTSGQTLLREEVTEADIAEIISKWTGIPISKLVESEKEKLLHLEGELHKRVIGQNEAVSAVSDAIQRSRAGLADPNRPVASFIFLGPTGVGKTELGKALAAYLFDTEDAMVRIDMSEYMEKHSVSRLIGAPPGYVGYDEGGQLTEAIRRRPYTVILFDEIEKAHPDVFNIMLQILDDGRVTDSQGHKVDFKNSVIIMTSNIGSQYILDVTDDYEQMQGRVMEALRAAFRPEFLNRIDETIIFHGLQKEQLREIVQLQVVRLEKRLAERKMSLKLTDAAINFLADVGYDPVYGARPLKRAIQRELETQIAKSILRSEFNDGDTIFVDIENERLSLKRLPMELVTAK

SEQ ID NO: 7051 - DNA, 2718 bp, Trichodesmium erythraeum IMS101
  CDS (1)..(2718): transl_table=11
atgcagccaactgacccaagcaaatttacagaacaagcctgggatgctatagtaaaatcccaagacgttgccaaacgctaccaaaaccaacaactggaagtagaacacctaattattgccctcctagaacaacaaggcacagcgaataaaatcttaagccgttctggtatagaaccagaaaagctcctacaacaagtagatgcttttgtgagacgtcaacctaaagttggcagtatagaacatctatatttaggtcaaggtctggaaacttttttagacctggctgatcaagctaaagaaaagtgggaagataaatttattgctgtggaacactttctactcgcttttcacgaagataaacgtctgggtaataaacttattggtggtggaactccccaactaccaactcgccctggttttgctcccccccaaactactctacaaattgaatttaaagaactagaggcaactattaaagcatttcgaggtagtagcaaagtcgaagaccaaaacccagaagctacttatgatgctttagctaaatatgggcgtgacctgacagagttagcgaaagtaggtaaacttgacccggttattggcagagatgaggaagttcggcgggtggttagttgtctatctcgtcggacaaaaaataatcctgtacttattggagaaccgggggtgggaaaaacagcgatcgcggagggtttagctcaacgtattgttaatggtgatgtgccagagtctcttaaagaacgtcaacttattagtcttgatatgggtagtctcattgcgggggctaagtttagaggagaatttgaagaacgtcttagatcggttttacgagaagttacccattctgatggtcaaatagttctgtttattgatgagttacatacagttgttggagcaggttctggtgggggtaacagttctggtgtagatgccggaaatttgttgaaaccaatgctggctcgtggtgaactgcgttgtatcggtgcaacaactattgatgaatatcgcaaacatatagaaaaagatgctgccctggaacgtcggtttcaaaaagtagaggttggtcagcctagtgttgaggatactatttctattttgcgggggttgaaagaccgctacgaaactcaccacggtgtgaaaattactgatgcggctttggttgctgctgctactttgtctaaccgatatatttctgaccgctttttgccagataaggcgatcgacttggtagatgaagctgctgctcaattaaaaatggaaattacttctaaaccagttgagttagaagctattgacagacggataatgcagttggaaatggagaaactttctattgagggagagttgtcaggtactaataaggaaaaaaattctgaagctattctgtctacaaaggtatctcctgctttagagcgcattactaatgaaattaatagtttaaagcaaaagcaggagaaattttcttctcaatggtctggggaaaaagagttgttaaattctattaattctttgaaggcagaagaagataaaattaaagtacaaatagaacaagcagaacgagcttatgatctgaatacggcagctcagttaaaatatgggcaattagaaacagttcatcgcgatcgcgaagcccaagaggcagagttattaaaagtgcaagctcaaggttcttttctcctccgagaacaggtgactgatggggatattgctacaattgttgctaagtggactggtattccggtaaatcgtttattggagtcggaacggcagaaattactacaactggaaaaacatcttcatcaaagggttattgggcagtcagaagctgtagcagctgtagcagcagctattagaagggcgagagcaggaatgaaagacccaggaagacccattggttcgtttatgtttttgggtccgactggggttggtaaaactgagttggcgcgggcattggcagggtttctctttgaccgggatgatgctttggtacgagttgatatgtcggaatatatggagaaacatgctgttgctcgcttggtgggtgctccccctggatatgtgggttatgaccaagggggtcaattatcggaggcagtcaggcgacatccttattctttggtattgtttgatgaggtggagaaggcgcacccagatgtgtttaatattttgttgcaggttttggatgatggtcgaattactgattctcagggtcgggttattgattttagtaatactgtaattgtgatgactagtaatattggtagtgagtatattttagatgtggcgggagatgattctaagtatgaggagatgtataagcgggtgatgggagcactgcgaaaacatttccgccctgaatttttaaatagggtagatgagattattttattccatactctaaggaagagtgaattacgtcaaattgtggaaattcaagtcaagagaattgaacggttattaggagaacaaaagattagtttgcagttgactgatgcgactttagatcacattactgaagtaggatatgacccagtttatggagccagacctttaaagcgggcaattcagcgagaattagaaaatcctctggcaaatcaaattttggagaataggtttgtttgtggggatgttgtgatcattgattttgtagatagtggtttagtttttaagaaaaaagaggagggaaaattggtaaaaaggtga

SEQ ID NO: 7052 - protein, 905 aa, Trichodesmium erythraeum IMS101
MQPTDPSKFTEQAWDAIVKSQDVAKRYQNQQLEVEHLIIALLEQQGTANKILSRSGIEPEKLLQQVDAFVRRQPKVGSIEHLYLGQGLETFLDLADQAKEKWEDKFIAVEHFLLAFHEDKRLGNKLIGGGTPQLPTRPGFAPPQTTLQIEFKELEATIKAFRGSSKVEDQNPEATYDALAKYGRDLTELAKVGKLDPVIGRDEEVRRVVSCLSRRTKNNPVLIGEPGVGKTAIAEGLAQRIVNGDVPESLKERQLISLDMGSLIAGAKFRGEFEERLRSVLREVTHSDGQIVLFIDELHTVVGAGSGGGNSSGVDAGNLLKPMLARGELRCIGATTIDEYRKHIEKDAALERRFQKVEVGQPSVEDTISILRGLKDRYETHHGVKITDAALVAAATLSNRYISDRFLPDKAIDLVDEAAAQLKMEITSKPVELEAIDRRIMQLEMEKLSIEGELSGTNKEKNSEAILSTKVSPALERITNEINSLKQKQEKFSSQWSGEKELLNSINSLKAEEDKIKVQIEQAERAYDLNTAAQLKYGQLETVHRDREAQEAELLKVQAQGSFLLREQVTDGDIATIVAKWTGIPVNRLLESERQKLLQLEKHLHQRVIGQSEAVAAVAAAIRRARAGMKDPGRPIGSFMFLGPTGVGKTELARALAGFLFDRDDALVRVDMSEYMEKHAVARLVGAPPGYVGYDQGGQLSEAVRRHPYSLVLFDEVEKAHPDVFNILLQVLDDGRITDSQGRVIDFSNTVIVMTSNIGSEYILDVAGDDSKYEEMYKRVMGALRKHFRPEFLNRVDEIILFHTLRKSELRQIVEIQVKRIERLLGEQKISLQLTDATLDHITEVGYDPVYGARPLKRAIQRELENPLANQILENRFVCGDVVIIDFVDSGLVFKKKEEGKLVKR

SEQ ID NO: 7053 - DNA, 2592 bp, Synechococcus sp. CC9311
  CDS (1)..(2592): transl_table=11
atgcaacccacagcagaacaattcaccgaaaaagcctggtccgcgatcacttcagcccagcagctagcccagaaccgccggcatcaacaacttgaaagcgaacacctcctgagagctttgttagaccaagagggcctggcaggccgaatcctcgacaaggctggggtctcttcaacagctctgcaaacgtctgtagacacctttctcagccagcaaccagcactgagcaacgccccggactcagtgtttcttggcaaaggcctcaatgctttgctcgatcgggctgaaacgctgaaacaaagttatggcgatagctttatttcgattgagcatctgctgctggccctcgccgacgatggccgctgtggccgtcagcttcttagccaagctggcacggatacctcacgattaaaaaccgccattaatgccgtgcgtggcagtcagaaagtaaccgaccaaaacccagagggaacctacgaatctcttgaaaaatatggtcgcgatctcaccagcgctgcccgtgagggcaagctcgatcccgtgatcggtcgcgatgaagaaatccgtagaaccattcaaatcctcagccgacgcaccaaaaacaaccctgtcctgatcggtgaaccaggggtgggcaagacagccattgtggaagggctcgcccaacgcatcgtgaatggggatgtgcctcaagcactgcaaaatcgtcagctgattgccctcgatatgggagcactcatcgctggagcaaaatatcgcggtgaattcgaagaacgattaaaagccgtccttaaagaggtcaccaactccgagggacagattgtcttgttcatcgatgaaatccataccgtggtgggtgcgggtgccaccggtggcgccatggacgccagcaacctgttgaagcccatgcttgcgcgaggcgaactgcgctgcatcggggccaccaccttggatgagcacaggcaacacattgaaaaagaccccgctctagagcgacgctttcagcaagttctggttgatcaaccgaccgtagaagacaccatttcaattttacgaggcctgaaagagcgctacgaggttcatcacggcgtacgcattgctgatagtgcgcttgtagcagcagcagtattaagtagtcgatacatcgccgatcgcttcctccccgacaaagcgatcgatcttgtggatgaatcagccgccaggctcaagatggaaatcacttccaaaccagaggagatcgacgagatcgaccgcaaaattctgcaactggaaatggagaagctttcgttaggaagagaatctgatgcagcgagtcaagagcgactacagcgactcgaacgcgagctagcagaattatccgaacagcagagcaccctcaatgcgcaatggcaacaagagaaaggtgccattgatgagctctctgctttaaaagaagagatcgaacgtgtgcagctacaagttgagcaagccaagcgaaattatgacctcaacaaagctgcagagttggaatacggaaccctcgcgggacttcaaaagcaacttcttgcgcaggaacaagcattagtagagaccgatgacaacgctgaaaaatcactactgagagaggaggtcagcgaagacgacatcgccgaggtgattgcgaagtggacaggaattcctgttgccaagcttgttcaatcggagatggaaaaactgctcaaactcgaggatcaactgcatcaacgcgtcgtgggacaaaaccaggccgttaccgcagtagccgatgccatccaacgatcgagagccgggctgagcgatcccaatcaaccaatcgccagttttttatttttaggtccaactggagtagggaaaacggagctgtcgaaagccttggcagcccaactatttgacagcgaagacgccttagttcgcatcgacatgtcggagtacatggagaaacacacggtgagccgattaatcggggctcctcctggatatgtgggttatgaagcgggaggacagctcacagaagcggtgaggcgcaggccttacgcagtgatcctgttcgatgaggtggaaaaagcccatccggacgtcttcaatgtgatgctccaaatcctcgatgatggtcgtgttaccgatggccaaggccgtaccgttgatttcaccaatgcggtgctgattctcacgagcaacatcggcagtcaatccatccttgatttaggaggggatgactctcaacatcaagagatggaaagccgggtgaatgaagctctgcgcaaccacttccgcccagaatttctcaatcgaatcgacgacacgattattttccacagccttcgtcgtgatgaacttcgcctgattgttgctctccaggtggaacggttgagaaaacgcctcagcgagcgcaagctggatctccacatcagcgaagaagcgactgactggttagcgaacgctggctatgaccctgtctatggagcgagacccctcaaacgtgccattcagcgcgaactggaaacgcccattgcaaaagcgatcctttcaggtgcttatgaagaaggaagtagcgttcaaattcaagtcaaagaagaacgcctaaacctgctctaa

SEQ ID NO: 7054 - protein, 863 aa, Synechococcus sp. CC9311
MQPTAEQFTEKAWSAITSAQQLAQNRRHQQLESEHLLRALLDQEGLAGRILDKAGVSSTALQTSVDTFLSQQPALSNAPDSVFLGKGLNALLDRAETLKQSYGDSFISIEHLLLALADDGRCGRQLLSQAGTDTSRLKTAINAVRGSQKVTDQNPEGTYESLEKYGRDLTSAAREGKLDPVIGRDEEIRRTIQILSRRTKNNPVLIGEPGVGKTAIVEGLAQRIVNGDVPQALQNRQLIALDMGALIAGAKYRGEFEERLKAVLKEVTNSEGQIVLFIDEIHTVVGAGATGGAMDASNLLKPMLARGELRCIGATTLDEHRQHIEKDPALERRFQQVLVDQPTVEDTISILRGLKERYEVHHGVRIADSALVAAAVLSSRYIADRFLPDKAIDLVDESAARLKMEITSKPEEIDEIDRKILQLEMEKLSLGRESDAASQERLQRLERELAELSEQQSTLNAQWQQEKGAIDELSALKEEIERVQLQVEQAKRNYDLNKAAELEYGTLAGLQKQLLAQEQALVETDDNAEKSLLREEVSEDDIAEVIAKWTGIPVAKLVQSEMEKLLKLEDQLHQRVVGQNQAVTAVADAIQRSRAGLSDPNQPIASFLFLGPTGVGKTELSKALAAQLFDSEDALVRIDMSEYMEKHTVSRLIGAPPGYVGYEAGGQLTEAVRRRPYAVILFDEVEKAHPDVFNVMLQILDDGRVTDGQGRTVDFTNAVLILTSNIGSQSILDLGGDDSQHQEMESRVNEALRNHFRPEFLNRIDDTIIFHSLRRDELRLIVALQVERLRKRLSERKLDLHISEEATDWLANAGYDPVYGARPLKRAIQRELETPIAKAILSGAYEEGSSVQIQVKEERLNLL

SEQ ID NO: 7055 - DNA, 2595 bp, Alkalilimnicola ehrlichei MLHE-1
  CDS (1)..(2595): transl_table=11
atgcggcaggacaaactgaccacgaaattccagatggccatcgccgatgcgcagagcttggccctgggccgcgatcaccagatgatcgagcctgtgcacctgatggccgcactgctggaccaggagggcggcgtcggccagttgctctcccgggccggcgttaacatcaaccagttgcgcaccgaaatgggccgggccctggaccggctgcccacggtggagggcagcgccggcgaggtgcatgtctccaacgaactgggccggctgctcaacctcaccgacaaactggcccagaagcgcaaggaccagtacatctccagcgagctcttcgtgctggcggcggtgaccgacaagggccagctcggcgaactgctgcgcggcgccggcgccaccaaggaggcggtggaaaaggccatcgaagagctgcgcggcggccagtcggtggacgaccccaacgccgaggaccagcgccagtccctggagaagtacaccatcgacctcaccgagcgggccgaacagggcaagctggacccggtgatcggccgcgacgaggagatccgccgcaccatccaggtgctctcccggcgcaccaagaacaaccccgtgctcatcggcgagcccggcgtgggcaagaccgccatcgccgagggcctggccaaccgcatcatcaacggcgaggtgccggagggcctgaagaccaagcgcatcctctcgttggacatggccgcgctgatcgccggcgccaagtaccggggcgagttcgaggagcggctgaaggccgtgctcaaagacctggccaagcaggagggccagatcatcctctttatcgacgagatccacaccatcgtcggcgccggcaaggccgagggcgccatggacgcgggcaacatgctcaagcccgccctcgcccggggcgagctgcactgcatcggcgccaccaccctggacgagtaccgcaagcacatcgaaaaggacgccgccctggagcgccgcttccagaaggtgctggtggacgagccctccgtggaggacaccgtggccatcctgcgcggcctcaaggagcgctacgaagtgcaccacggggtggagatcaccgacccggccatcgtggcggcggcccagctctcccaccgctacatcaccgaccggcaactgcccgacaaggccatcgacctggtggacgaggcggccagccggatcaagatggagatcgactccaagccggaggagatggacaggctggagcggcggctgatccagctcaagatcgaacgcgaagccctggccaaggaggaggacgacgcctcccgcaagcgcctagacgcgctggagggcgagatcaacgagctggaggacgagtacaaggcgctggaggagatctggaactccgagaaggccgccgtggaaggcacccagagcatcaaggagcaactggagcgcgcccggcaagagctggataccgcccgccgggccggcgacctggggcgcatgtcggagctgcagtacggccgcatcccggaactggagcggcaactggacctggccctgcaggcggagatgcacgacacccagttgctgcgcaccagcgtgggcaccgaggagatcgccgaggtggtctcccgctggaccggcatcccggtgagcaagatgctggagggcgagcgcgacaagctgctgcgcatggaggaagagatccgcaagcgcgtggtgggtcaggacgaggccgtggccgccgtggccaacgccatccgccgctcccgggccgggctctccgaccccaaccggcccaacggctccttcctcttcctgggccccaccggtgtcggcaagaccgagctgtgcaaggcgctggccagcttcctcttcgacaccgaggaggcgatgatccgcgtggacatgtctgagttcatggagaagcacgccgtggcccggttgatcggcgcgccccccggttacgtgggctacgaggaagggggttatctcaccgagcatgtgcggcgcaagccctactcggtgatcctgctggacgaggtggaaaaggcccacgcggacgtcttcaacgtgctgctgcaggtactggacgacggccgcctgaccgacagccacggccgcaccgtggacttccgcaacacggtgatcgtgatgacctccaacctgggctcggacgtgatccagcagatggcgggcgaggagcactaccaggagatgcgctcggccgtgatggagatcgtcggtacccacttccgcccggagttcatcaaccgggtggacgaggtggtggtcttccacccgctgggccgcgagcacatccgctccatcaccgacatccagctgcgccagctcaacgcccgtctggcggacaaggagctgacgctggaggtctccgacgcggccaaggaccagttgggtgaggccggcttcgacccggtgtacggggcgcggcccctgaagcgggtgttgcagcaacggctggagaacgccctggcccagcggatactgcgtggggagtttatgcctggggatagtattcgggtggatactgagggtgatgggttggcctttaccaagggtgcgccggctgttagtgaggcttga

SEQ ID NO: 7056 - protein, 864 aa, Alkalilimnicola ehrlichei MLHE-1
MRQDKLTTKFQMAIADAQSLALGRDHQMIEPVHLMAALLDQEGGVGQLLSRAGVNINQLRTEMGRALDRLPTVEGSAGEVHVSNELGRLLNLTDKLAQKRKDQYISSELFVLAAVTDKGQLGELLRGAGATKEAVEKAIEELRGGQSVDDPNAEDQRQSLEKYTIDLTERAEQGKLDPVIGRDEEIRRTIQVLSRRTKNNPVLIGEPGVGKTAIAEGLANRIINGEVPEGLKTKRILSLDMAALIAGAKYRGEFEERLKAVLKDLAKQEGQIILFIDEIHTIVGAGKAEGAMDAGNMLKPALARGELHCIGATTLDEYRKHIEKDAALERRFQKVLVDEPSVEDTVAILRGLKERYEVHHGVEITDPAIVAAAQLSHRYITDRQLPDKAIDLVDEAASRIKMEIDSKPEEMDRLERRLIQLKIEREALAKEEDDASRKRLDALEGEINELEDEYKALEEIWNSEKAAVEGTQSIKEQLERARQELDTARRAGDLGRMSELQYGRIPELERQLDLALQAEMHDTQLLRTSVGTEEIAEVVSRWTGIPVSKMLEGERDKLLRMEEEIRKRVVGQDEAVAAVANAIRRSRAGLSDPNRPNGSFLFLGPTGVGKTELCKALASFLFDTEEAMIRVDMSEFMEKHAVARLIGAPPGYVGYEEGGYLTEHVRRKPYSVILLDEVEKAHADVFNVLLQVLDDGRLTDSHGRTVDFRNTVIVMTSNLGSDVIQQMAGEEHYQEMRSAVMEIVGTHFRPEFINRVDEVVVFHPLGREHIRSITDIQLRQLNARLADKELTLEVSDAAKDQLGEAGFDPVYGARPLKRVLQQRLENALAQRILRGEFMPGDSIRVDTEGDGLAFTKGAPAVSEA

SEQ ID NO: 7057 - DNA, 2619 bp, Hyphomonas neptunium ATCC 15444
  CDS (1)..(2619): transl_table=11
atgaaccttgagcaatacacagaacgcgcccgcgctatcatccagggcgcccagaccgcagccctggccgctggccatcaggtgctgaccccggcgcatatcctcaaaacgctgctggacgaccgcgaccagctggctgtgaacctcatccgcgcgaccggtggacggcctgaactggccgtgcagggcgttgacgccgcgctcggccgcgtgccgaaagtttccggcgccggggcaggcgggctgcgcctcgaacaggcgggcgccaaactcttccaggacgctgaagccggcgccaagaaggccggcgacgccttcgtcaccgctgagcggctgctgcttgccattgccgggctgtccggagatccggcggcggacgtgctgaagaacgccggcgtgacgcccaagacgctggaaggcgctattgcacagctgcgccagggccgcacggccgacagtcagaatgcggaagaaggctatgaagccctcaagaaatacgcccgcgacctgaccaaggacgcgcgcgaaggcaagctcgaccccgtgatcggccgtgacgaggaaatccgccgcgccatccaggtcctctcgcgccgttcaaaaaacaaccccgtgctgatcggggagccgggcgtgggcaagacggcgattgccgaaggtctcgccctgcgcatcgtcaatggcgacgtgccagaaagcctcaaagacaagaaactcctcgcgctcgatatgggcgcgctgatcgccggggcaaaattccgcggcgagttcgaggagcgcctgaaagcggtgttgaacgaagttcagcaggcagacggcggcatcatcctcttcattgacgagatgcacacgctcgtcggcgcgggaaaatccgaaggcgcgatggacgcgtccaatcttctgaagcccgcactggcgcgcggggagctgcactgtatcggcgccaccacgctggacgaataccgcaaatatgtcgaaggcgacgcggcgctggcccgtcgcttcatggcggtatttgtcgatgagcctacggtggaggacacgatctcgatcctccgggggctgaagggccgttacgaagcccatcacggcgtgcgaatttccgatgcggcgattgtggccgccgctacgctgtccaaccgctatatcaccgatcgtttcctgcccgacaaagccatcgacctgatggacgaggccggatcgcgcctgcgcatgcaggtcgattccaagcccgaggagctcgacgagatcgaccggcggatgctgcagctgaaaatcgaggccgaagctctcaagaaggagaaggacaccgcctcgcaggaccgtctgaaaacgctggaaggcgaaatcgccggtcttgaaacccgctcacgcgagctgaccaccgcctggagcgccgagaaggacaagctgaaaggcgcagcctccgctaaggagaagctcgaccgggccttctcggatatggctgaggcccagcgccagggcgatctggcccgtgcgtccgagcttaaattcgcgaccatcccgcagcttgaaaaactgatcgccgaagtcgaagccaagggcgacgccgaaggcgggctcgtttccgaagtcgtccgtccagaggatattgccggggtcgtttccaaatggaccggcattccggtcgacaagatgatggaaggcgagcgggagaagctgctgcgcatggaagattccctgcgcgggcgggttgttggccaggaagacgcgctgctcgcggtctccaatgccgtgcgccgcgcgcgcgccggtctgcaggacccgaaccgccccatcggctcgttcctgtttgtcggccccacgggtgttggcaagacagagctcaccaaggcgctcgccgaattcatgttcgatgatgacaccgcgatcctgcggctcgatatgtcggaattttccgagaagcattcggttgcccgcctgatcggcgcgccgccgggctatgtcggctatgatgaaggcggggttttgaccgaatccgtccgcaggcggccttatcaggtcgtgctgtttgacgaggtggagaaagcccacccggacctcttcaacacgctgctccaggtgctcgatgatggccgtctcaccgatggccagggccgcacggtggatttcaagaacacgatcatcatcatgacctcaaacctcggcgccgacgcgctggcgagcggggaagagggggaggtgtccgagcaggcccgcgagcatgtgatgggcgccatccgccggcatttccgcccggaattcatcaaccggatcgacgagatcgtcttcttcaaacggcttggccgcggcgagatcgaccatatcgtcgacatccagatgggccgcctcgagcagcttctgaaggaccggaagatgaagctcgacctcagcctcgacgcccgcaactggctcgcggcgcggggatacgatccggtctatggcgcgcgccccttgaagcgtgtcatccagaaagagctgcaggacccgctcgcccggctgctgctcgaaggccgcatccttgacggcgaaaccatccatgtcggcgtggagggcgatggcctcgccatcaacggcgtgcccaacgactttgccaaaggccgggctgcgctcaactga

SEQ ID NO: 7058 - protein, 872 aa, Hyphomonas neptunium ATCC 15444
MNLEQYTERARAIIQGAQTAALAAGHQVLTPAHILKTLLDDRDQLAVNLIRATGGRPELAVQGVDAALGRVPKVSGAGAGGLRLEQAGAKLFQDAEAGAKKAGDAFVTAERLLLAIAGLSGDPAADVLKNAGVTPKTLEGAIAQLRQGRTADSQNAEEGYEALKKYARDLTKDAREGKLDPVIGRDEEIRRAIQVLSRRSKNNPVLIGEPGVGKTAIAEGLALRIVNGDVPESLKDKKLLALDMGALIAGAKFRGEFEERLKAVLNEVQQADGGIILFIDEMHTLVGAGKSEGAMDASNLLKPALARGELHCIGATTLDEYRKYVEGDAALARRFMAVFVDEPTVEDTISILRGLKGRYEAHHGVRISDAAIVAAATLSNRYITDRFLPDKAIDLMDEAGSRLRMQVDSKPEELDEIDRRMLQLKIEAEALKKEKDTASQDRLKTLEGEIAGLETRSRELTTAWSAEKDKLKGAASAKEKLDRAFSDMAEAQRQGDLARASELKFATIPQLEKLIAEVEAKGDAEGGLVSEVVRPEDIAGVVSKWTGIPVDKMMEGEREKLLRMEDSLRGRVVGQEDALLAVSNAVRRARAGLQDPNRPIGSFLFVGPTGVGKTELTKALAEFMFDDDTAILRLDMSEFSEKHSVARLIGAPPGYVGYDEGGVLTESVRRRPYQVVLFDEVEKAHPDLFNTLLQVLDDGRLTDGQGRTVDFKNTIIIMTSNLGADALASGEEGEVSEQAREHVMGAIRRHFRPEFINRIDEIVFFKRLGRGEIDHIVDIQMGRLEQLLKDRKMKLDLSLDARNWLAARGYDPVYGARPLKRVIQKELQDPLARLLLEGRILDGETIHVGVEGDGLAINGVPNDFAKGRAALN

SEQ ID NO: 7059 - DNA, 2601 bp, Rhizobium leguminosarum bv. viciae 3841
  CDS (1)..(2601): transl_table=11
atgaatatcgagaaatattcggagcgggtgcgcggtttcatccagtccgcccagacctatgcgctggcgcagggtcaccagcaatttacgccggaacatgtgctgaaagtcctgctcgacgacgatcagggcatggcggcgtcgctgatcgagcgcgccggcggcgatgccaaggccgcccgcctggccaatgacgcggctctcgccaaattgcccaagatctccggcggcaacggcaacatctatctggcacaaccgctcgccaaggtgctttcgaccgccgaagaagcggcgaagaaggccggcgacagcttcgtcacggtggaacgcctgttgcaggcgctgtcgatcgaatcctcggcctcgaccttttcgacgctgaagaacgccggcgtgacggcccagggcctcaaccaggtgattaacgacatccgcaagggtcggacggcggattcctccaatgccgagcagggtttcgactcgctgaagaagttcgcacgcgatcttaccgctgaagcccgggagggcaagctcgacccggtgatcggccgcgacgacgaaatccgccgcacgatccaggtgctttcgcgccggacgaagaacaatcctgtgctgatcggcgaacccggcgtcggcaagacggcgatcgtcgagggcctggcgctgcgaatcgtcaacggtgacgtgccggaatcgctcaaggacaagaagctgatggcgctcgacatgggcgcgctgattgccggtgcgaaatatcgcggcgaattcgaggagcggttgaaggccgtgctcaacgaggtccaggcggaaaacggcgagatcatcctgttcatcgacgagatgcatacgctggtcggcgccggcaaggcggatggggcgatggatgcctcgaacctcctgaagccggctcttgcccgcggtgagctgcattgcgtcggcgcgaccacgctcgacgaataccgcaaacatgtcgagaaggatccggcccttgcccgccgcttccaacccgtcgtcgtcgatgaaccgacggtcgaagacacaatctcgatcctgcgcggcctgaaggaaaaatacgagcagcatcacaaggtgcgcatcgccgatgcggcgctggtggccgcagcgacactttccaaccgctatatcaccgaccgtttcctgcccgacaaggccatcgacctgatggacgaggcggcagcgcggttgcgcatgcaggtggattccaagccggaagagctcgacgaactcgaccgccgcatcatgcagctgaagatcgagcgcgaagcgctgaaaaaggaaacggacgtcgcgtccgccgaccgtctgaagcgacttgaaaccgaagtgaccgatctcgaggagcaggccgatgcgctgactgcccgctggcaggcggaaaagcagaagctcggccttgccgccgatctcaagaagcagctcgacgatgcccgcaacgaactggcgatcgcgcagcgcaaaggcgaattccagcgtgccggcgagctgacctacggtgtcattccggatctcgaaaagcagctcgtcgatgctgagaagcaggatggcgaccgcggcgcgatggtgcaggaggtggtcatccccgacaacatcgcccatgtcgtgtcccgctggaccggcattccggtcgacaggatgctggagggcgaacgcgacaagctgcttcggatggaagacgaactggcgaaatcggtgatcggccagggcgatgcggtgcaggccgtgtcgcgcgccgtccgccgcgcgcgtgccggcctgcaggatccgaaccggccgatcggttcgttcatcttcctcggcccgaccggcgtcggcaagacggaactcaccaaggcgctcgcccgcttcctcttcgacgacgaaacggcgatggtgcgcatggatatgtcggaatatatggagaagcactccgttgcccggctgatcggtgcgcctcccggctatgtcggttatgatgaaggtggagcgctgacggaggcggtgcgccgccggccctatcaggtcgtgctgttcgacgagatcgaaaaggcgcatcccgacgtcttcaatatcctgctgcaggtgctggacgacgggcgtctgacggacggccagggccggacggtcgatttccgcaacacgatgatcatcatgacctcgaatctcggcgccgaatatctgacgcagctgagggacggcgacgacagcgacacggttcgcgagcaggtgatggaggtggtgcgcgggcatttccggccggaattcctgaaccgcatcgacgagatcatcctcttccatcgcctgaagcgcgaggagatgggggcgatcgtcgatatccagctgaagcggctggtggctctgctgtccgagcgcaagatcgtcatcgacctcgacgaggaagcccgccactggctggcgaacaagggttacgatccggtctacggcgcaaggccgctgaagcgggtgatccagaagttcgtgcaggatccgctggccgagcaaatcctgtccggccaggtgccggacggatcgacggtgacggtgacgaatggttcggaccggctgcagttcacgacgaggcagacggtgagcgaagcggcgtaa

SEQ ID NO: 7060 - protein, 866 aa, Rhizobium leguminosarum bv. viciae 3841
MNIEKYSERVRGFIQSAQTYALAQGHQQFTPEHVLKVLLDDDQGMAASLIERAGGDAKAARLANDAALAKLPKISGGNGNIYLAQPLAKVLSTAEEAAKKAGDSFVTVERLLQALSIESSASTFSTLKNAGVTAQGLNQVINDIRKGRTADSSNAEQGFDSLKKFARDLTAEAREGKLDPVIGRDDEIRRTIQVLSRRTKNNPVLIGEPGVGKTAIVEGLALRIVNGDVPESLKDKKLMALDMGALIAGAKYRGEFEERLKAVLNEVQAENGEIILFIDEMHTLVGAGKADGAMDASNLLKPALARGELHCVGATTLDEYRKHVEKDPALARRFQPVVVDEPTVEDTISILRGLKEKYEQHHKVRIADAALVAAATLSNRYITDRFLPDKAIDLMDEAAARLRMQVDSKPEELDELDRRIMQLKIEREALKKETDVASADRLKRLETEVTDLEEQADALTARWQAEKQKLGLAADLKKQLDDARNELAIAQRKGEFQRAGELTYGVIPDLEKQLVDAEKQDGDRGAMVQEVVIPDNIAHVVSRWTGIPVDRMLEGERDKLLRMEDELAKSVIGQGDAVQAVSRAVRRARAGLQDPNRPIGSFIFLGPTGVGKTELTKALARFLFDDETAMVRMDMSEYMEKHSVARLIGAPPGYVGYDEGGALTEAVRRRPYQVVLFDEIEKAHPDVFNILLQVLDDGRLTDGQGRTVDFRNTMIIMTSNLGAEYLTQLRDGDDSDTVREQVMEVVRGHFRPEFLNRIDEIILFHRLKREEMGAIVDIQLKRLVALLSERKIVIDLDEEARHWLANKGYDPVYGARPLKRVIQKFVQDPLAEQILSGQVPDGSTVTVTNGSDRLQFTTRQTVSEAA

SEQ ID NO: 7061 - DNA, 2592 bp, Pediococcus pentosaceus ATCC 25745
  CDS (1)..(2592): transl_table=11
atgaatccagagaaaatgactacggcacttcaagaagcaattagcgaagcacagcagattgctgtaaatcgtcaacatcaagaaattggtgtgccagaattatttaaatttttaacacaaccagaccaactggtcgggacactattaacagacttaaagattgataacaaccttgtccaaaccgagttagaccaagaacttgaacaaattagcgtggttagtggtagccaggttagttacggtcaatcgatttcagcagaactaaatcaattattagttcaagcagaacaacagcgtaaaaaattacaggatgagtatgttgcaattgatactattttaattgctttatttaatttagatcagaatcagtttaaaaaattcctgaatcaacaaggtctaactcaaaaacaggttttagccaaagtagatgaatttcgtgggggtgaaagagtgacatcaaaggaacaagaaagtggatataaagcgctagaaaaatatgggacagatttagttaaaagggcccacagtgaaaacccagatccagttattggacgtgatgaagaaattttagaagttattcgaattttatcgcgaaaaacaaaaaataatccagtactaattggtgaacctggtgtaggaaaaacagccattgtagaaggtctagcgcaaagaattgctaaaggtgatgttcctagcaatttagttgataaaaccattgtttctctagatatgggctcattaattgccggggctaaatatcgaggcgattttgaagaacgacttaaagcagttttgaaggaagtatcaaagtcagatggtcaaattatcttattcattgatgaaattcacacgattgtaggagcgggtaagactgaaggtagtatggatgctggaaatcttttgaaacctatgctagctcgtggtgaactccatttgattggtgcaacaacattagatgaataccgcgaaaacattgaaaaagacaaggcacttgagcgccgtttccaacgggtgctggttaaggagcctagcattgaggatactatcagtattttaagaggtttaaaggaacgctttgaaattcatcatggcgttcgtatccatgataatgctcttgtggcagccgctaaactttctagtcgttatattacggatcgttatttaccagataaggcgattgatttaatcgatgaagcatctgcaaaaattaaagtggaaatgaattccaatcctactgaactcgatcaggtcaaacgacagttgatgcgtttgcaggttgaagaacgagcacttaaaaatgaaagtgatgcagagtcagttaaacgtttaaaggacttacagaaagaattatctgaaaccaaagaagaaaaagttaagctggaatcacgttggtcagcccaaaaagaagaaattaaaaagatcagtgataagaagaatgaattagataaggccaagcatgacttacaagaagctgaaagttcttatgatctcgatcaagcggctattttacaacatgggaccattccagctttggaaaaagaattggaacaattagaaaatcaatccgaaagtgatcatggggattggttggtagaagaatccgttacagataaagaaattgcccaaactattagtcaaatgacaggcattccagttgcacggttggtggaaggtgaacgagaaaaactgctacatttagctgataaattacacaatcgagtaattggtcaagatgaagccgttcaatccgtttcagatgcggttttacgttcccgtgcgggactccaggatcctaatcgtccgattggttcatttctcttccttggtccgacaggggttggtaagacagaattgtctaaagctttagcagaagcgttatttgattcggaagataatatggtccgaatcgatatgtctgaatacatggaaaaagaatcggtttcccgtttggttggagctgctccaggatatattggttacgaagagggaggccaattaaccgaagcggtccggcgaaacccatattccattgttctatttgatgaaattgaaaaagcacatccagaagtgttcaatattcttttacaagttctagatgatggtcgtttaacagatggacaaggacgtacggttaactttagaaatacaattttaattatgacttctaacttaggttcagatttattattgaagaatcaatcagaaaacaagattgatgataatatccgtaaccaagttcaagatgttttgcatggatactttagaccagaatttttaaatcggattgatgatatcattatgtttactccattaagtaaacaagatgtacgccaaattgtgattaaattaattcataatttatctatgcgtttgagcgaccaagaaataagtttaagtatttcggatgatgcacaagattatattgttgaacaggcatatgatccagcgtttggtgctcgaccattgcgccgctacattactaaaaatgttgaaactcctttggcaaaagaaattattagtgggcgtgtccgtcctaattcaacagtcaatatcgatgttttgaatgatcaattggttttccagaataaataa

SEQ ID NO: 7062 - protein, 863 aa, Pediococcus pentosaceus ATCC 25745
MNPEKMTTALQEAISEAQQIAVNRQHQEIGVPELFKFLTQPDQLVGTLLTDLKIDNNLVQTELDQELEQISVVSGSQVSYGQSISAELNQLLVQAEQQRKKLQDEYVAIDTILIALFNLDQNQFKKFLNQQGLTQKQVLAKVDEFRGGERVTSKEQESGYKALEKYGTDLVKRAHSENPDPVIGRDEEILEVIRILSRKTKNNPVLIGEPGVGKTAIVEGLAQRIAKGDVPSNLVDKTIVSLDMGSLIAGAKYRGDFEERLKAVLKEVSKSDGQIILFIDEIHTIVGAGKTEGSMDAGNLLKPMLARGELHLIGATTLDEYRENIEKDKALERRFQRVLVKEPSIEDTISILRGLKERFEIHHGVRIHDNALVAAAKLSSRYITDRYLPDKAIDLIDEASAKIKVEMNSNPTELDQVKRQLMRLQVEERALKNESDAESVKRLKDLQKELSETKEEKVKLESRWSAQKEEIKKISDKKNELDKAKHDLQEAESSYDLDQAAILQHGTIPALEKELEQLENQSESDHGDWLVEESVTDKEIAQTISQMTGIPVARLVEGEREKLLHLADKLHNRVIGQDEAVQSVSDAVLRSRAGLQDPNRPIGSFLFLGPTGVGKTELSKALAEALFDSEDNMVRIDMSEYMEKESVSRLVGAAPGYIGYEEGGQLTEAVRRNPYSIVLFDEIEKAHPEVFNILLQVLDDGRLTDGQGRTVNFRNTILIMTSNLGSDLLLKNQSENKIDDNIRNQVQDVLHGYFRPEFLNRIDDIIMFTPLSKQDVRQIVIKLIHNLSMRLSDQEISLSISDDAQDYIVEQAYDPAFGARPLRRYITKNVETPLAKEIISGRVRPNSTVNIDVLNDQLVFQNK

SEQ ID NO: 7063 - DNA, 2610 bp, Solibacter usitatus Ellin6076
  CDS (1)..(2610): transl_table=11
atggacttcaatcgtttcactgagaagctacaggaagcggtgcgggcggcgcagagcatcgctgcccgccacggtcatcaacaggtggacgtggagcatttgctggcggccctgctggagcaggaaggcgggctcacggcatcgattctgacgcgcgcgggcgtcaatgtggacgcgctcaagcgacgcattgagggtgaactcgaccggctaccgaaggtatcgggctcggccgccgggatcgatcagatctacgtgacgccgcgcttgaacaagctgctgacgcaggccgaggacgaggccaagaagctgaaggacgagtacgtttcggtggagcatgtgctgctggccgccgtggatatgaaagatttaggggtgccgcgcgaccggctgctgcaggcgctgcgcgaggtgcgaggcagccagcgggtgacgtcacagaatccggaagggacttacgaagcgctcgaaaaatatgggcgtgacctgacggtggcggccgcgaccaacaagctggacccggtgatcgggcgcgacgacgagatccgccgtgtgatccaggtactctcgcggcgcaccaagaacaacccggtgctgatcggcgagccgggcgtgggcaagacggcgatcgtggaagggctggcggtgcgcattgtgcgcggggacgtgccggagggcctcaagaacaagcgcgtggtggcgctcgatatgggcgcgctgatcgccggcgccaagtatcgcggcgaattcgaagagcggctgaaggcggtgctcaaagaggtgctggacgccgccggcgagatcatcctgttcattgacgagctgcataccgtggtgggcgcgggaaagaccgaggggtcgatggacgcgggcaatctgctgaagccgatgctggcgcgcggcgagctgcattgcatcggcgcgacgacgctcgatgaatatcgcaagtacatcgagaaggacgcagcgctggcgcggcgcttccagccggtcatggtggaccagccctcggtggaagacacaatctcgattttgcgcggcttgaaggaacgctacgaggtgcatcacggcgtgcgcatcaaggacgcggcgctggtagcggcggcggtgctgagcgaccgctacatcacggaccggtttctgccggacaaggcgatcgacctggtggacgagtcggcggcacggctgcgcaccgagatcgattcgatgccggtggagctcgacgaaacacggcggcggatcatgcagctcgagatcgaacgcgaggcgctgcgcaaggagaaggacaaggcttcgaaggaacggctgaccaagctggagaaagaactggccgatttgaaggccgaatcggatgagctgatggctcgctggcaggccgagaaggacgaggtgcagcggctgcggacgctgcgcgagcaggtggaacagaccaaactggagatcggccaggcggagcggcagtacgatctgaatcgcgcggctgaattgaagtacggcaagctggcgcaactggagcggcagctggcggaggcggagaaggcgagcaagcagcagggcggtccgcggctaatcaaggaagaagtggacgaggaggatatcgcggcggtggtgagccggtggacgggggtgccggtgaccaagctgctggaaggggagatgcagaagctgctgcacctggaagaagagctgcacaagcgggtgatcggccaggatgaggccgtgacggcggtcgcggaggcggtgatccgcgcacggtcgggcttgaaggatccgcagcgcccgatcggcagcttcatattcatgggtccgaccggcgtgggcaagaccgaactggcgcgcgcgctggccgagtacatgttcgacgacgagcatgccatgatccgcatcgacatgtccgagtaccaggagaagcatacggtgagccgcctggtgggggcgcctccgggctatgtgggctacgacgaaggcggccagttgaccgaggcggtgcggcggcggccctactcggtgatcctgttcgatgaaatcgagaaggcgcaccacgatgtgttcaacgtgctgctgcaggtgctggacgatgggcgcctgacggacgggcaggggcgcacggtggacttcaagaacacgattgtgatcatgacctctaacgtaggcagcgcgcgtattctcgaatatcagggcgcctactccggcgcggggttcgaaaggatgaaagaggcggtgctggaggagatgaggcgccaattccggccggagttcctcaaccgcgtggacgaaattatcgtcttccacgcgctcagcgaggaggatctgaagaagatcgtggagatccaactcggccgcctgcgcgcacggctcgccgaccggcacatcacgctggagttgaccgacgcggcgcgcgccaacctggtgcacaccggctacgatccgcactatggcgcgaggccgttaaagcgcgccatccagaagaagatcgagacgccgctgggcagacaactcatccagggcgcgattagagacggccaggtggtgaaggtggacgccaccggggacagcggcgacctctcgttcacggtggaacaacgagagagagaacccgccgcgccatag

SEQ ID NO: 7064 - protein, 869 aa, Solibacter usitatus Ellin6076
MDFNRFTEKLQEAVRAAQSIAARHGHQQVDVEHLLAALLEQEGGLTASILTRAGVNVDALKRRIEGELDRLPKVSGSAAGIDQIYVTPRLNKLLTQAEDEAKKLKDEYVSVEHVLLAAVDMKDLGVPRDRLLQALREVRGSQRVTSQNPEGTYEALEKYGRDLTVAAATNKLDPVIGRDDEIRRVIQVLSRRTKNNPVLIGEPGVGKTAIVEGLAVRIVRGDVPEGLKNKRVVALDMGALIAGAKYRGEFEERLKAVLKEVLDAAGEIILFIDELHTVVGAGKTEGSMDAGNLLKPMLARGELHCIGATTLDEYRKYIEKDAALARRFQPVMVDQPSVEDTISILRGLKERYEVHHGVRIKDAALVAAAVLSDRYITDRFLPDKAIDLVDESAARLRTEIDSMPVELDETRRRIMQLEIEREALRKEKDKASKERLTKLEKELADLKAESDELMARWQAEKDEVQRLRTLREQVEQTKLEIGQAERQYDLNRAAELKYGKLAQLERQLAEAEKASKQQGGPRLIKEEVDEEDIAAVVSRWTGVPVTKLLEGEMQKLLHLEEELHKRVIGQDEAVTAVAEAVIRARSGLKDPQRPIGSFIFMGPTGVGKTELARALAEYMFDDEHAMIRIDMSEYQEKHTVSRLVGAPPGYVGYDEGGQLTEAVRRRPYSVILFDEIEKAHHDVFNVLLQVLDDGRLTDGQGRTVDFKNTIVIMTSNVGSARILEYQGAYSGAGFERMKEAVLEEMRRQFRPEFLNRVDEIIVFHALSEEDLKKIVEIQLGRLRARLADRHITLELTDAARANLVHTGYDPHYGARPLKRAIQKKIETPLGRQLIQGAIRDGQVVKVDATGDSGDLSFTVEQREREPAAP

SEQ ID NO: 7065 - DNA, 2652 bp, Solibacter usitatus Ellin6076
  CDS (1)..(2652): transl_table=11
atgtttcgattggacaaactgactcaaaaggcgcaggatgccctgcagcaaacgcaggccctggccgagaaaaatgacagccagatcatgttcccactgcacctgttgatcgccctggctgaagaacaggaaggcatcgtgcgccccgtgctcgaaaagtgcggcgtgcagcccgaagccgtcatcaccgaggcgcagcacctcgcggtatccctgccgaagaccaacggcatgcagcctggcatgtaccttgccccgcagctcaacaaaatcatggagcgcgccttcgatgaggccatccgcttcaaagacgaatttgtctctaccgagcacctgctgctctcgatcgccgaggagaccagcgatccggccggacagcttctgaaacaggccggcgccagccatgatgcgattttgaaggccctggtctccgtccgcggcacgcagcgcatcacggaccagaatccggagaccaaataccaggcgttggagcgctatgcgcacgacctgaccgaatccgcgcgtctcgggaagctcgatcccgtgatcgggcgcgacgatgagattcgccgcgtcatgcaggttctcagccgccgcaccaagaacaacccggtgctgatcggcgaacccggcgtcggcaagaccgccatcgtcgaaggacttgcgcagcggatcatccgcggcgacgtgccggatcagctcaagaacaagaagctggtcgcgatcgatctcggcagcatgatcgccggcaccaagttccgcggcgaattcgaagatcgccttaaagccgtggtcaaggaaatcatcgattccaacggcgagatcatctgcttcatcgacgagctgcacacgctcgtgggcgccggctccgcagaaggcgcgatcgatgccgccaacctgctgaaaccggcgctggctcgcggcgagctgcgctgcatcggcgctactacgctgaacgagtacaagaagcacgtcgagaaggacgccgccctggcgcgccgcttccagaccgtcatggtcggcgagccgagcgtggatgatacgattgcgattctgcgcgggctcaaggagaagttcgagatccaccatggcgtgcgcatcaaggactcggcaatcctcgcggccgccgtgctttcgcagcgctacattgccgaccgcttcctgcccgataaggccatcgatctgatcgacgaggccggcagcgcgctgcgtctccagatcggctccatgccgatcgagatcgacaacctggagcgccgcatctcgcatctcgagatcgagcgccaggccttgagcaaggagcgcgatcacgcgtcccacgaccgcctgcgccatgtcgagaacgaactggaatcgctgcgtggcgaagccgccggtttgaaagagcggtggagccgcgaaaaaggcgcgatcgatcgggtccgcaccctcaaagagcagcaggattccctgcggcaggaagaggaaaaggccagccgcgcgggcgattgggagaaggctgcccagcttcgctacggccagctctcgcagatcgagaaggacattcaggccgccgagcaggagatggagtccgtcaaatcgcacgctcttctgaaggaagagatcgatgaagacgatatcgccgccatcgttgccaagtggaccggaatccccgtgacccgcatgctcgaaggcgaagtccagaagctggttcagatgcccgaccggctcaaagaccgggttatcggccaggacgaagccgtccggctggtggccaacgccatcctgcgcaatcgcgccggactcggcgatccgcagcggccgatcggcagcttcattttcctcgggcccaccggcgtcggtaaaaccgagctggtgcgggctctcgctcaatacctgtttgacgacagcaaagccatgatccgcgtcgatatgagcgagtacatggagaagcatgccgtcgcccggatggttggctcgcctcccggatacgtcggctacgatgagggcggacagctcaccgaacaggtgcgccgccggccttattcggtggtccttttcgatgaaatcgagaaggcgcaccccgatgtcttccacatgctcctgcagatactcgacgacggccgcctgaccgatggccagggccgtaccgtgagtttcaagaacacggtcatcgtcatgaccagcaacgtcggcaccggaatggtcgagcgcaataccatcggcttctcggtgcatgccaagaacactcgcaacgcggacactcagaagcgcctgctcgaagctctgcgcgcccagttccggcccgagttcctcaaccgcgttgacgatatcattgtctttaactcgctgactcgcgatcatctcgctcgcatcgtggatatccagttggccaacgtgggcaaactcttgaaagatcgcaagctgaatatcgaaatcactcccgcggccaaagaccggatcatctccgaaggttacgatcccgattacggcgcacggcccatgcgtcgcgccatacagcgcctcgtccaggacccgctcgccctcaaggtgatcagcggcgaattcgaggaaggtgacaccatcctggtggacgccgctccggacggagccgaactcacgttcgcaaagctggttccgataacggaaccagcggttcccatctccaggtaa

SEQ ID NO: 7066 - protein, 883 aa, Solibacter usitatus Ellin6076
MFRLDKLTQKAQDALQQTQALAEKNDSQIMFPLHLLIALAEEQEGIVRPVLEKCGVQPEAVITEAQHLAVSLPKTNGMQPGMYLAPQLNKIMERAFDEAIRFKDEFVSTEHLLLSIAEETSDPAGQLLKQAGASHDAILKALVSVRGTQRITDQNPETKYQALERYAHDLTESARLGKLDPVIGRDDEIRRVMQVLSRRTKNNPVLIGEPGVGKTAIVEGLAQRIIRGDVPDQLKNKKLVAIDLGSMIAGTKFRGEFEDRLKAVVKEIIDSNGEIICFIDELHTLVGAGSAEGAIDAANLLKPALARGELRCIGATTLNEYKKHVEKDAALARRFQTVMVGEPSVDDTIAILRGLKEKFEIHHGVRIKDSAILAAAVLSQRYIADRFLPDKAIDLIDEAGSALRLQIGSMPIEIDNLERRISHLEIERQALSKERDHASHDRLRHVENELESLRGEAAGLKERWSREKGAIDRVRTLKEQQDSLRQEEEKASRAGDWEKAAQLRYGQLSQIEKDIQAAEQEMESVKSHALLKEEIDEDDIAAIVAKWTGIPVTRMLEGEVQKLVQMPDRLKDRVIGQDEAVRLVANAILRNRAGLGDPQRPIGSFIFLGPTGVGKTELVRALAQYLFDDSKAMIRVDMSEYMEKHAVARMVGSPPGYVGYDEGGQLTEQVRRRPYSVVLFDEIEKAHPDVFHMLLQILDDGRLTDGQGRTVSFKNTVIVMTSNVGTGMVERNTIGFSVHAKNTRNADTQKRLLEALRAQFRPEFLNRVDDIIVFNSLTRDHLARIVDIQLANVGKLLKDRKLNIEITPAAKDRIISEGYDPDYGARPMRRAIQRLVQDPLALKVISGEFEEGDTILVDAAPDGAELTFAKLVPITEPAVPISR

SEQ ID NO: 7067 - DNA, 2586 bp, Magnetococcus sp. MC-1
  CDS (1)..(2586): transl_table=11
atgaaacaggaacaactcaccagcaaatctgctgaagccctgaatagcgccgtcggcctcgccgccgagcgcaaccaccaatttgtcgaacctgaacatctgctgctggccatgcttgagcaaaaagatggggttatccctgctctcttgattaaaatgaatacccccctgcccgctttgcaacaggccaccagcgtggcggtggagaatctacctcgggtacacggtgggggggctgcgcagacactgccctcccggcggctacaaagtttgtggcaagatgccgagcgcgaagcggcaaccctgcgcgatgactacacctccaccgaacattttctgctggctatgaccgaacacaaagagggggcactaccctcccttttacgcccctttaccattacccgcacaagggtgttggaggccttaaaaaccgtgcgcagtgggcaacgcgtcaccagtaaagagcctgaaggaacctttcaggcccttgaaaaatatgcccgtgacctcaccgcgttggcaaaaagcggtaaattggatcccgtcattggccgcgatgaggagattcgccgcaccatacaggtgctcagccgtcgcaccaaaaacaatccggtgttgatcggtgagcccggtgtgggtaaaaccgccattgtggaggggttggcgctgcgtatggagcggggggatgtgcccgaatccctcaagggggtgcgggtggtggccctggatatgggggcgttggtggcgggtgccaaatatcggggtgagtttgaagagcgcctcaaagcggtcatcaaggaggtgcaagaggctcagggcaagatcattctgttcattgatgagatgcacaccatcgttggcgctggccaaagcgaaggagccatggatgcaggcaacctgctcaagccagccctggcgcggggtgatctgcactgtgtgggggccaccaccctggatgagtaccgtaaacatgtggagaaagatcccgccttggagcgccgctttcaaccggtgcaggttcgcgagccttcggtggaagccaccatctccattttacgaggcattaaggataagtatgaactgcaccatggggtgcgcattaccgatgccgccattgtggcggcggccacccttgcgcatcgctacatcagcgaccgttttctcccggataaagccattgatctggtggatgaagcagcggcccgcatccgcatggagatcacctccaaaccccaggtgttagactcccttgatcgccagatcttacagctacagattgagcagtctgccctgagtaaggagaaggatagcgcctctcgcgagcgcttgaccaagctggaggcggagttggcggatcttaaagagaatgcccacgccatgaccatacgctgggagcaagagcgccttaacatcaaacaagtgggcatccttaaagagacgttggagtcaacccgtctccagttggagcaggccgaacgcagcggcaatctggaaaaagcgggggagctgcgctatggcaccctacccaagctggagcaggaactgcaaaaggcccaagagcttgccgcccagagtcgtgaaaatccactcttaaaagagctggtggatgaagaggagatcgccaccgtggtggcccgctggaccggcattcccgtggcccgcatgttggaaggagagaaagacaaactgctcaagatggaggaacggttgggccatcaggtggtagggcaggagcgggcgctccaggccattgcacgggcggtccggcgggcacgggccgggttgcaggataataaccgtcccattggttccttcttttttctgggtcccacaggggtgggtaaaaccgagctgagcaaagcgttggcgcagtttctgtttaatgatgagagcgccatggttcgcttggatatgtccgagtatatggaaaaacatacggtggcgcggctgattggtgccccgccgggttatgtgggctatgaggagggaggccagctcaccgagcaggtacgccgccgcccctacagtgtggtgttgctggatgaggttgaaaaggcccatcccgatctgtttaacaccctgctccaggtgttggatgaggggcgcttaaccgatggtcacgggcgtaccgtggattttcgcaatacggtcctcatcatgacctctaacatcggttcccatttaatggcagagggcggccccacggctcaggtagagcatagggttatggagctacttaaacagacctttcgcccggagtttctcaaccgattggatgagatcattccctttcacgccctgcaacgtgagcacatgggcgccattgttgacatacagcttaaacgtctgcacaaactgctggataaattaaatatccgtttagaactggagcctgccgcccgcgccgccctggctgaagaggggtatgatcccatctatggggcacgccccttaaaacgggttatgcagcgcctggtccaagaccccctggcagaggcgatgctcagcggtcatctgcacgagggggatcgggtggtcatccacttcgatggggaacaatttgtgataaatcctgttcaccgttaa

SEQ ID NO: 7068 - protein, 861 aa, Magnetococcus sp. MC-1
MKQEQLTSKSAEALNSAVGLAAERNHQFVEPEHLLLAMLEQKDGVIPALLIKMNTPLPALQQATSVAVENLPRVHGGGAAQTLPSRRLQSLWQDAEREAATLRDDYTSTEHFLLAMTEHKEGALPSLLRPFTITRTRVLEALKTVRSGQRVTSKEPEGTFQALEKYARDLTALAKSGKLDPVIGRDEEIRRTIQVLSRRTKNNPVLIGEPGVGKTAIVEGLALRMERGDVPESLKGVRVVALDMGALVAGAKYRGEFEERLKAVIKEVQEAQGKIILFIDEMHTIVGAGQSEGAMDAGNLLKPALARGDLHCVGATTLDEYRKHVEKDPALERRFQPVQVREPSVEATISILRGIKDKYELHHGVRITDAAIVAAATLAHRYISDRFLPDKAIDLVDEAAARIRMEITSKPQVLDSLDRQILQLQIEQSALSKEKDSASRERLTKLEAELADLKENAHAMTIRWEQERLNIKQVGILKETLESTRLQLEQAERSGNLEKAGELRYGTLPKLEQELQKAQELAAQSRENPLLKELVDEEEIATVVARWTGIPVARMLEGEKDKLLKMEERLGHQVVGQERALQAIARAVRRARAGLQDNNRPIGSFFFLGPTGVGKTELSKALAQFLFNDESAMVRLDMSEYMEKHTVARLIGAPPGYVGYEEGGQLTEQVRRRPYSVVLLDEVEKAHPDLFNTLLQVLDEGRLTDGHGRTVDFRNTVLIMTSNIGSHLMAEGGPTAQVEHRVMELLKQTFRPEFLNRLDEIIPFHALQREHMGAIVDIQLKRLHKLLDKLNIRLELEPAARAALAEEGYDPIYGARPLKRVMQRLVQDPLAEAMLSGHLHEGDRVVIHFDGEQFVINPVHR

SEQ ID NO: 7069 - DNA, 2574 bp, Shewanella sp. ANA-3
  CDS (1)..(2574): transl_table=11
atgcgactcgatcgtatgaccaataaatttcagcttgccatctcagatgcccagtcgctcgcgctcgggcgtgatcatcagtttatcgaaccgttacatttgatgatggcgttgctcaaccaggattctggttctatccatcctttattaacccaagctggcattcgggtgagtgcgctgcgctcgctgttgagccaagagcttgaacgtctaccgcaggtcgaaggcactggcggcgatgtacaattatcccaaggtttaattcgcttattaaacttgtgcgacaagttggcgcaaaagcgcaaagacaaatatatctccagtgagttgtttgtcttagcggcactcgagggcagtgatgccttggcgcaatgcttaaagaaatccggcgccaccaaagagctgctcgagcaaaccattgagcaagtgcgcggcggtcagaatgtggatgatcctaacgcggaagatcaacgccaagcgctgaaaaagtttaccgttgatctcactgagcgtgccgagcaaggcaaactcgaccctgtgattggtcgcgacgatgaaatccgccgcaccattcaagtgttgcaacgccgtagtaaaaacaacccagtgctgattggtgagcctggcgtgggtaaaaccgcgattgttgaaggcctcgcgcagcgaattgtgaacggtgaagtgcctgaagggattaaaaataaacgcgttttatccttagatatgggcgcactgattgcgggcgctaaatatcgtggcgagtttgaagagcgtttaaaagccgtgcttaacgagctggcgcaggaagaaggccaagtgatcctctttatcgacgagctgcacactatggtgggcgcgggtaaaggcgatggcgccatggatgcgggcaatatgctaaagcctgcgctggcccgtggcgatcttcactgtgtgggtgcgaccactctcgacgaatatcgtcaatatattgaaaaggatgccgcccttgagcgccgcttccaaaaagtattagtggatgagcctagcgttgaagataccatagcgattttgcgtggtctcaaagagcgttacgagttacatcaccatgtggaaattaccgatccggcgattgtggcggcggccaccatgtcgcaccgttatgtgtcggaccgtaaattacccgataaagccatcgacttgattgacgaggcggcatcgagcatccgtatgcagatggattctaagcctgaatccctcgacagattggagcgccgtgctatccagttgaaactggaagagcaggcattagccaaagaaaacgatgaggcgagccgccgtcgacttgaacatttacgtgtcgagttgcatgaggttgaggctaaggcgtcggagcttaatgaaatctggcgcaccgaaaaagcggcgcttgcagggactcagcatattaaagccgaccttgagcaggcgcggatggatttagaggtggcgcgccgcgcgggcgacttgacccgtatgtccgagctgcaatatggccgtattcccgagcttgaaaagcaactggacttagcttcgcaagccgaaatgcaggatatgacgctgctacgaaataaagttactgacttagaaattgccgaagtgctctcaaaggcgacggggattccggtttctaagatgcttgaaggcgagcgtgaaaaactgctgcaaatggaagtggcactgcatgagcgggtgattggccaaaacgaagccgtggatgcggtggccaatgcgattcgccgtagccgcgcagggctggccgatccgaatcgtcctattggttcgttcctgttcttaggaccaaccggtgtgggtaaaactgagttatgtaagtcgttggctaagttcctcttcgatacggaatcggccttagtgcgcatcgacatgtctgaatttatggagaaacatgcggtttcccgtttagtgggggcgcctcctggctatgtcggttatgaagagggcggttacttaactgaagcggtgcgtcgtaagccttattcggtgatattgctcgatgaggtggaaaaggctcacccagacgtgttcaacattttgctgcaggtgctggatgatggccgcttaaccgatggtcaaggtcgtaccgtcgactttagaaatacggtgatcatcatgacctcaaacttaggctctgacattatccaagaaggattcggtcacctaagttatagcgaaatgaagagcgcggtgatgaatgtggttacccatagctttagacccgagtttctaaaccggatcgacgagtcagtggtattccatcccttggatgcggaaaatatcaagcatattgcatctatccaaattgcttcattgcgtaagcgtttggcagagaaagactatacgctggagatcaccgacgaggcattatcgttaatcgccgaaattggtttcgacccagtctatggcgcaagaccgctgaaacgtgccttacagcaagagatggaaaacccattagcgcaaaaattactgcgtggcgatttactgcccggcaaaccgattaaggtcagttgcgccggcggtgagttggtattcgagcaataa

SEQ ID NO: 7070 - protein, 857 aa, Shewanella sp. ANA-3
MRLDRMTNKFQLAISDAQSLALGRDHQFIEPLHLMMALLNQDSGSIHPLLTQAGIRVSALRSLLSQELERLPQVEGTGGDVQLSQGLIRLLNLCDKLAQKRKDKYISSELFVLAALEGSDALAQCLKKSGATKELLEQTIEQVRGGQNVDDPNAEDQRQALKKFTVDLTERAEQGKLDPVIGRDDEIRRTIQVLQRRSKNNPVLIGEPGVGKTAIVEGLAQRIVNGEVPEGIKNKRVLSLDMGALIAGAKYRGEFEERLKAVLNELAQEEGQVILFIDELHTMVGAGKGDGAMDAGNMLKPALARGDLHCVGATTLDEYRQYIEKDAALERRFQKVLVDEPSVEDTIAILRGLKERYELHHHVEITDPAIVAAATMSHRYVSDRKLPDKAIDLIDEAASSIRMQMDSKPESLDRLERRAIQLKLEEQALAKENDEASRRRLEHLRVELHEVEAKASELNEIWRTEKAALAGTQHIKADLEQARMDLEVARRAGDLTRMSELQYGRIPELEKQLDLASQAEMQDMTLLRNKVTDLEIAEVLSKATGIPVSKMLEGEREKLLQMEVALHERVIGQNEAVDAVANAIRRSRAGLADPNRPIGSFLFLGPTGVGKTELCKSLAKFLFDTESALVRIDMSEFMEKHAVSRLVGAPPGYVGYEEGGYLTEAVRRKPYSVILLDEVEKAHPDVFNILLQVLDDGRLTDGQGRTVDFRNTVIIMTSNLGSDIIQEGFGHLSYSEMKSAVMNVVTHSFRPEFLNRIDESVVFHPLDAENIKHIASIQIASLRKRLAEKDYTLEITDEALSLIAEIGFDPVYGARPLKRALQQEMENPLAQKLLRGDLLPGKPIKVSCAGGELVFEQ

SEQ ID NO: 7071 - DNA, 2781 bp, Phaeodactylum tricornutum
  CDS (1)..(2781): transl_table=11
atgtttgagaaatttaccgaaggcgcaataaaagtaattatgttgtcgcaagaagaagctcgacgtatgggtcacaattttgttggaaccgagcaacttttattaggtgtaatcggacaaaggcatggaattggtgcaaaagcattaaaaaaattaaaggtaacgttaaaaaaggcgcgaaaagaaatagagttatacattggtcgtggtactggatttgtagcatcagagattccttttactcctagagcaaaaagagttttagaaatggctgtgcatgaagggaaagatttgggtcaaaattttgtcggtacagagcacatcttattagctcttattgcagaatctgatggtgtagctatgcgaactttagacaaattaaatgtagacattcataaattacgaaatctaattttaacgtatatagaagaaactcaagaagaaattttacgtcctttaactcaagctgaaaaatttttattagaacgtgaaaaaaaagggagtccaaccccaactttagatgagtatgctgaaaatattacaaaagaagcaattgacggaaatttagatccggtaattggtcgtgaaaaagaaattgatgatgtaattgccgttttggccagacgtacaaaaaataaccccgttttaattggtgaaccgggcgttggtaaaacagcggttgctgaagggttagcccaactaattttaacagaaaaagtgcctgactttcttgatgggagtttaattatggctctagatttagggtcaattttagcaggtacgaaatatcggggtgaatttgaggaacgattaaaacgaattgttgaagaagcacagaacgattcggcagttattatcgtaatcgatgaaattcatacattagttggggctggtgcagcagaaggtgctgtagatgcagcaaatattttaaaaccagctttagcgcgaggtaaatttagatgtattggagcaaccactaatgatgagtatcgaaaatacattgagcgcgatcctgcattagaaagacgttttcagccagtacacgtcgaagaacctagtgttggtactacaatcgaaattttaagaggcctacgatcaaaatttgaacaacatcatacgttaagttatcatgataaagctttagaacaagccgcaattctttcagataaatatgtagcagatcgctacttacctgataaagcaattgatgtcttagatgaagcaggtgctagggttcgtttagagaatcgacgtttgcctttaggactgagaagtttaatgcatgaattacaagaaactattaaagataaagaagattgtataaaagaacatgattttgaagcagcaaagcaattattagatcatgaaatggaggtacggactcatattcgtattatgaaacagtcagctttaacgagtgaagctcgtgggtttagccgtcgtgacgtagacatggtcacagaaactgatgtttcggatgtggtttctaattggactggtattccagtaacaaaaattacaggttctgaatccgctcgtttattaaaaatggaagacactatacatgaacgaattattggtcaaaagcatgcagttgttgctgtttcacgggctattcggagggcacgagtaggattacgaaatccaaatagaccaattgctagttttatttttgctgggccaactggggttggtaagactgagttaacaaaggctttatcagattatatgtttggtagtgaagagagtatgattcgtctagatatgtcagaatacatggaaaagcatacggtggctaaattaattggttcaccaccaggatatgttggatataatgagggtggtcaactaacagaagctgtgcgttcaaagccttattccgttgtacttttagatgaagttgaaaaaggacaccccgatgtttttaatttattattacaaattttagatgacggtcgattaacagattcaaaagggcgagttattgatttcacaaatacactaatcattatgactactaacttagggtcaaaaattattgagcgggaaagtggtattaaatcaaaaacggaacaaggggaaggtggtttcaaaattacaccagatgctgtaattggttgggaacccgcgccagagccaattaaagatccagaagtttttgaacgtgtaacaaagttagtaaatgatgaattaaaaaactttttccgtcccgaatttttgaatcgtattgatgaaattattgtttttaatcatttaactcgaattgatatttgggaaatttgtgaattaatgattaaatcagttcaaaatagattaaaagataaaggtattaacttaattgttgagttatctgttcaagcttttttaactgatgaaggttatgatccgatttatggcgctcgtccattacgtcgtgcgattatgaagtatttagaagacacattagctgaacaatgcttatcaaaaacattatatccaaatacaaaaattcatgttcgccggaaaaaagtcgaaggaactttaatgacttatacaaatgaattagaagttgaagttgattttagcgatgttgatccaagtttattagatgaagaagcaaatgaaacagcaatgtcaagtttagacaaatctaacaatgaaaaagaaaaggtaggttctattgtttcaaaagataattcttctggaataaatgaagatgagccaagtttcggattagggagtaatgattctaaaccaacaattgcaggtcgagcagcaaagtttttcaaaaaaaaaaattaa

SEQ ID NO: 7072 - protein, 926 aa, Phaeodactylum tricornutum
MFEKFTEGAIKVIMLSQEEARRMGHNFVGTEQLLLGVIGQRHGIGAKALKKLKVTLKKARKEIELYIGRGTGFVASEIPFTPRAKRVLEMAVHEGKDLGQNFVGTEHILLALIAESDGVAMRTLDKLNVDIHKLRNLILTYIEETQEEILRPLTQAEKFLLEREKKGSPTPTLDEYAENITKEAIDGNLDPVIGREKEIDDVIAVLARRTKNNPVLIGEPGVGKTAVAEGLAQLILTEKVPDFLDGSLIMALDLGSILAGTKYRGEFEERLKRIVEEAQNDSAVIIVIDEIHTLVGAGAAEGAVDAANILKPALARGKFRCIGATTNDEYRKYIERDPALERRFQPVHVEEPSVGTTIEILRGLRSKFEQHHTLSYHDKALEQAAILSDKYVADRYLPDKAIDVLDEAGARVRLENRRLPLGLRSLMHELQETIKDKEDCIKEHDFEAAKQLLDHEMEVRTHIRIMKQSALTSEARGFSRRDVDMVTETDVSDVVSNWTGIPVTKITGSESARLLKMEDTIHERIIGQKHAVVAVSRAIRRARVGLRNPNRPIASFIFAGPTGVGKTELTKALSDYMFGSEESMIRLDMSEYMEKHTVAKLIGSPPGYVGYNEGGQLTEAVRSKPYSVVLLDEVEKGHPDVFNLLLQILDDGRLTDSKGRVIDFTNTLIIMTTNLGSKIIERESGIKSKTEQGEGGFKITPDAVIGWEPAPEPIKDPEVFERVTKLVNDELKNFFRPEFLNRIDEIIVFNHLTRIDIWEICELMIKSVQNRLKDKGINLIVELSVQAFLTDEGYDPIYGARPLRRAIMKYLEDTLAEQCLSKTLYPNTKIHVRRKKVEGTLMTYTNELEVEVDFSDVDPSLLDEEANETAMSSLDKSNNEKEKVGSIVSKDNSSGINEDEPSFGLGSNDSKPTIAGRAAKFFKKKN

SEQ ID NO: 7073 - DNA, 2547 bp, Mycobacterium avium 104
  CDS (1)..(2547): transl_table=11
gtggactctttcaacccgaccaccaagacgcaagcggcgttgaccgcggcgctgcaggcggcctcggccgccggcaaccccgagatccggcccgcccacctgctgatggccctgctgacgcaggcggacgggatcgccgcgccgttattggaggccgtgggtgtcgagcccgccaccattcgcgccgaggccgagcgcatgctggcccggctgccgcaggccagcggcgccagttcgcaaccgcagctgtcccgcgagtcgctggccgccatcaccaccgcccagcacctggccaccgagctggacgacgaatacgtctccaccgaacacctgatggtgggcctggccaccggcgactccgacgtcgccaagctgctcaccgggcacggcgcgtccccgcaggccctgcgggaggccttcgtcaaagtgcgcggcagcgcccgggtcaccagccccgaccccgaggccacttaccaggcgctggagaagtactccaccgacctcaccgcgcgggcccgcgagggcaagctcgacccggtcatcggccgcgacaacgagatccgccgcgtcgtgcaggtgctgtcccgtcgcaccaagaacaacccggtgctcatcggtgagcccggcgtcggcaagaccgcgatcgtcgagggcctggcccagcgcatcgtggccggcgacgtgccggaaagcctgcgcgacaagaccgtcatcgcgctggacctcggctcgatggtggccggcgccaaataccgcggcgagttcgaggagcggctcaaggccgtcctcgacgacatcaagaactccgccgggcagatcatcacgttcatcgacgagctgcacaccatcgtcggcgccggcgcgaccggcgagggcgcgatggacgccggcaacatgatcaagccgatgctggcccgcggggagctgcgcctggtcggcgccaccacgctcgacgagtaccgcaaatacatcgagaaggacgccgcgctggagcgccgcttccagcaggtgttcgtcggcgagccgtcggtggaggacaccgtcggcatcctgcgcgggctcaaggaccgctacgaggtgcaccacggggtgcgcatcaccgactccgcgctggtcgccgccgccacgctgtcggaccgctacatcaccgcccgcttcctgcccgacaaggccatcgacctggtcgacgaggccgccagccggctgaagatggagatcgactcgcggcccgtcgagatcgacgaggtcgagcggctggtgcgccgcctcgagatcgaggagatggccctggccaaggaggaggacgaggcgtccaaggagcggctggagaaactgcgctccgagctggccgaccagaaggaaaagctggccgaactgaccacccgctggcagaacgagaagaacgccatcgacgtcgtccgcgagctcaaggagcagctggaaacgctgcgcggcgagtccgaccgcgccgagcgcgacggcgacctggccaaggccgccgagctgcgctacggccggatcccggaggtggagaagaagctcgaggccgcgctgccccaggccgaggcccgcgagaacgtgatgctcaaggaggaggtcgggcccgacgacatcgccgaggtggtgtcggcgtggaccgggatcccggccgggcggatgctcgagggcgagaccgcgaagctgctgcgcatggaggacgagctgggcaagcgcgtcgtcgggcagaagcgggccgtgcaggcggtgtccgacgcggtgcggcgcgcccgggccggcgtggccgacccgaaccggccgaccgggtcgttcatgttcctgggacccaccggtgtcggtaagaccgagctggccaaggcgctggccgacttcctgttcgacgacgagcgggcgatggtccgcatcgacatgagcgaatacggcgagaagcactcggtggcccgcctggtcggcgcgccgccgggctacatcggctacgaccagggcggtcagctgaccgaggcggtgcgccggcgtccctacacggtgatcctgttcgacgagatcgagaaggcgcacccggacgtgttcgacgtgctgctgcaggtgctcgacgagggccggctcaccgacgggcagggccgcaccgtcgacttccgcaacaccatcctgatcctgacctccaacctggggtcgggtggcagcgaggagcaggtgatggccgcggtgcgctcggcgttcaagcccgagttcatcaaccggctcgacgacgtcatcatcttccacggcctcgagcccggcgagctggtgcagatcgtcgacatccagctggcccagctgcagaagcggctggcgcagcgccggctcacgctggaggtgtcgctgccggccaaacagtggctggcccaccgcggcttcgacccggtctacggcgcccggccgctgcgccggctggtgcagcaggccatcggcgaccagctggccaagcagttgctggccggtcaggtgcacgacggcgacaccgtcccggtcaacgtcagcccggacggcgactcgctgatcctgggctag

SEQ ID NO: 7074 - protein, 848 aa, Mycobacterium avium 104
MDSFNPTTKTQAALTAALQAASAAGNPEIRPAHLLMALLTQADGIAAPLLEAVGVEPATIRAEAERMLARLPQASGASSQPQLSRESLAAITTAQHLATELDDEYVSTEHLMVGLATGDSDVAKLLTGHGASPQALREAFVKVRGSARVTSPDPEATYQALEKYSTDLTARAREGKLDPVIGRDNEIRRVVQVLSRRTKNNPVLIGEPGVGKTAIVEGLAQRIVAGDVPESLRDKTVIALDLGSMVAGAKYRGEFEERLKAVLDDIKNSAGQIITFIDELHTIVGAGATGEGAMDAGNMIKPMLARGELRLVGATTLDEYRKYIEKDAALERRFQQVFVGEPSVEDTVGILRGLKDRYEVHHGVRITDSALVAAATLSDRYITARFLPDKAIDLVDEAASRLKMEIDSRPVEIDEVERLVRRLEIEEMALAKEEDEASKERLEKLRSELADQKEKLAELTTRWQNEKNAIDVVRELKEQLETLRGESDRAERDGDLAKAAELRYGRIPEVEKKLEAALPQAEARENVMLKEEVGPDDIAEVVSAWTGIPAGRMLEGETAKLLRMEDELGKRVVGQKRAVQAVSDAVRRARAGVADPNRPTGSFMFLGPTGVGKTELAKALADFLFDDERAMVRIDMSEYGEKHSVARLVGAPPGYIGYDQGGQLTEAVRRRPYTVILFDEIEKAHPDVFDVLLQVLDEGRLTDGQGRTVDFRNTILILTSNLGSGGSEEQVMAAVRSAFKPEFINRLDDVIIFHGLEPGELVQIVDIQLAQLQKRLAQRRLTLEVSLPAKQWLAHRGFDPVYGARPLRRLVQQAIGDQLAKQLLAGQVHDGDTVPVNVSPDGDSLILG

SEQ ID NO: 7075 - DNA, 2547 bp, Mycobacterium smegmatis str. MC2 155
  CDS (1)..(2547): transl_table=11
gtggactcgttcaacccgacgaccaagactcaggcggcgctgacctcggcgttgcaggcggcgagttccgctggcaacccggagatccgccccgcgcatttgctgatggcattgctgacccagaatgacggcattgccgcacccctgctggaggccgtcggcgtcgagcccgcgacgatccgcaccgagacccagcggttgctcgaccgtctgcccagcgcctcgggcgcgagcagccagccccagctcagccgcgaatcgctcgcggcgatcaccacggcccagaacctggccaccgagatggacgacgagtacgtctcgaccgagcacctgatggtcggcctggccacgggtgactccgaggtggccaagctgctgaccggacacggcgcgtcgccgcaggctctgcgtgaggcgttcgtcaaggtgcgcggcagcgcccgggtgaccagcccggacccggagggcacgtatcaggcgctggagaagtactccaccgacctgaccgcgcgtgcccgcgagggcaagctcgacccggtgatcgggcgcgacaacgagattcgtcgtgtcgtacaggtgctgagccgtcgtaccaagaacaatccggtgctcatcggcgagccgggcgtcggtaagacggccatcgtcgagggcctcgcgcagcgcatcgtcgccggcgacgtgcccgaaagcctgcgcgacaagaccgtcatcgcactggatctcggttcgatggtggccggtgcgaagtaccgcggtgagttcgaggagcggctgaaggccgtgctcgacgacatcaagaactcggccgggcaggtcatcacgttcatcgacgagctgcacaccatcgtcggcgccggtgccaccggtgagtcggcgatggacgcgggcaacatgatcaagccgatgctggcccgcggcgagctgcggctggtcggtgccaccacgctcgacgagtaccgcaagtacatcgagaaggacgccgcattggagcgccggttccagcaggtgttcgtcggtgaaccctcggtcgaggacaccgtcggcatcctgcgtggtctgaaggaccgctacgaggtgcaccacggcgtgcggatcaccgactcggcgttggtggccgcggcgacgctctccgaccggtacatcaccgcgcggttccttccggacaaggccatcgacctggtcgatgaggccgcgtcccggctgcgcatggagatcgactcgcgcccagttgaaatcgacgaggtcgagaggttggtacggcgcctggagatcgaggagatggcgcttgagaaagaagaggacgaggcgtccaaggaccggctggagaagctgcgcgccgaactggccgaccacaaggagaagctgtccgagctgaccacgcggtggcagaacgagaagaacgccatcaacgtcgttcgcgagctcaaggagcaactggacacgttgcgcggcgaggccgaccgtgccgagcgtgacggtgacctggccaaggcggccgaactgcggtacggccgaatcccggaggtggagaagaagctcgacgctgcccttcccgccgccgaggcccgcgagaacctgatgctcaaggaggaggtcggccccgacgacatcgccgaggtggtggaggcgtggaccggtatcccgtccggccgcatgctcgaaggcgagaccgccaagctgctccgcatggaggaggagctgggcaagcgtgtcgtcgggcagcgcaaggccgtgcaggccgtcagcgacgcggtgcggcgcagccgtgccggggtggccgaccccaaccggccgacgggttcgttcatgttcctgggcccgaccggtgtgggtaagaccgagctcgcaaaggcgttggcggagttcttgttcgacgacgagcgtgcgatggtccgcatcgacatgagcgagtacggcgagaagcactcggtggctcggctggtcggtgcgcctcccggctacatcggttacgaccagggcggtcagctgaccgaggcggtgcggcggcgtccgtacacggtgatcctgttcgacgagatcgaaaaggcgcacccggacgtgttcgacgtgctgctgcaggtgctcgacgagggccggttgaccgacggccagggccgcacggtcgacttccgcaacaccatcctcatcctgacgtccaacctgggcgcgggcggtaacgaggaccaggtgatggcggcggtgcgctcggcgttcaagcccgagttcatcaaccggctggacgacgtcatcatcttcgacgggctcaatcccgaagagctggtgcagatcgtcgacatccagttggcgcagctggccaagcgtctggagcagcggcgactcaccctcgaggtgtcgctgccggccaagaagtggctggggcagcgcggtttcgacccgctgtacggtgcccgtccgctgcgccggttggtgcagcaggccatcggcgaccagttggccaagatgctgctggccggcgaggtgcacgacggcgacatcgtgccggtgaacgtcagccccgacggcgagtccctcgttttgggctga

SEQ ID NO: 7076 - protein, 848 aa, Mycobacterium smegmatis str. MC2 155
MDSFNPTTKTQAALTSALQAASSAGNPEIRPAHLLMALLTQNDGIAAPLLEAVGVEPATIRTETQRLLDRLPSASGASSQPQLSRESLAAITTAQNLATEMDDEYVSTEHLMVGLATGDSEVAKLLTGHGASPQALREAFVKVRGSARVTSPDPEGTYQALEKYSTDLTARAREGKLDPVIGRDNEIRRVVQVLSRRTKNNPVLIGEPGVGKTAIVEGLAQRIVAGDVPESLRDKTVIALDLGSMVAGAKYRGEFEERLKAVLDDIKNSAGQVITFIDELHTIVGAGATGESAMDAGNMIKPMLARGELRLVGATTLDEYRKYIEKDAALERRFQQVFVGEPSVEDTVGILRGLKDRYEVHHGVRITDSALVAAATLSDRYITARFLPDKAIDLVDEAASRLRMEIDSRPVEIDEVERLVRRLEIEEMALEKEEDEASKDRLEKLRAELADHKEKLSELTTRWQNEKNAINVVRELKEQLDTLRGEADRAERDGDLAKAAELRYGRIPEVEKKLDAALPAAEARENLMLKEEVGPDDIAEVVEAWTGIPSGRMLEGETAKLLRMEEELGKRVVGQRKAVQAVSDAVRRSRAGVADPNRPTGSFMFLGPTGVGKTELAKALAEFLFDDERAMVRIDMSEYGEKHSVARLVGAPPGYIGYDQGGQLTEAVRRRPYTVILFDEIEKAHPDVFDVLLQVLDEGRLTDGQGRTVDFRNTILILTSNLGAGGNEDQVMAAVRSAFKPEFINRLDDVIIFDGLNPEELVQIVDIQLAQLAKRLEQRRLTLEVSLPAKKWLGQRGFDPLYGARPLRRLVQQAIGDQLAKMLLAGEVHDGDIVPVNVSPDGESLVLG

SEQ ID NO: 7077 - DNA, 2601 bp, Nocardioides sp. JS614
  CDS (1)..(2601): transl_table=11
atgagccagttcggcgccgagaagttcaccacccgcagccgcgaggcgatcgagtccgcccagctgtcggcgaccacggccggcaacatccacaccgagccgatccacctgctggtggcgctgctcctccaggaggagggcaccgccgcgaacctggtcaccaaggccggcgtcgacgtaccgggcctggtccgggccgccgccgccgaccgggaccggctgccgaaggcctcgggcgccaccgtgcagcagccgagcgcctccgcggcgctgacccgggtgctcgcgggcgccctcgacctggcggccggcatgaaggacgactacgtcgcgagcgagcacctgctgatctcgctggccaccgtcgagagcagcgcccgcacggtgctgaccgacgccggcctgagcgccgacggcctgcgcgagtcgctgaccgcggtgcgcggcaaccgccgggtgaccagccaggacgcggagtcgacgtacgaggcgctggagaagtacagcgtcgacctcaccaccgccgccgaggagggccggctcgacccggtgatcggtcgcgacgccgagatccggcgcgtcgtgcaggtgctctcgcggcgcaccaagaacaacccggtgctgatcggcgagcccggcgtcggcaagaccgccgtcgtcgaagggctcgcccagcgcgtggtcgcgggcgacgtgcccgactcgctcaagggccgccgggtgctgagcctcgacctggccgcgatggtcgccggggcgaagtatcgcggcgagttcgaggagcggctcaaggcggtcctcgaggagatcaaggccgccggcgggcaggtcatcaccttcatcgacgagctgcacaccgtcgtcggtgcgggcgccggcggcgactccgcgatggacgccggcaacatgctcaagccgatgctggcccgcggcgagctgcacatgatcggcgcgaccaccctcgatgagtaccgcgagcggatcgagaaggacccggcgctcgagcgccgcttccagcaggtgttcgtcggcgagcccagtgtcgaggacaccatccagatcctgcgcggcatccaggagaagtacgaggcccaccacggcgtccggatcaccgacgccgcgctggtcgcggccgcgacgctgtccgaccgctacatctccgggcggcagctgcccgacaaggccatcgacctcatcgacgaggccgcgtcgcggctgcggatggagatcgagtcctcgcccgaggagatcgaccggctgcggcgcgcggtcgagcggctgaagatggaggagttcgcgctcgccaaggagagcgacgaggcgtccaaggagcggctggccaacctgcgccaggacctcgccgaccacgaggaggagctgcgcgcgctcgaggcccggtgggagcgggagaagtccacgctcgagggcgagggcgagctgcgccgtcagctcgaccagctgcgcatggaggccgaccggctgcagcgcgagggcgacctcggcaaggccagcgagctgctctacggccggatccccgccctcgagcagcagatcgaggcggcgggtgctgccgagcgctccgacatcgagccgttggtcggcgaggaggtcggggccgagcagatcgccgaggtcgtcgaggcctggaccggcatcccgaccggccggatgctcgagggcgagaccgccaagctgctgcacatggaggacgtcatcggccagcgcctggtcggccagcgggccgcggtcacggccgtgagcgacgccgtacgccgctcccgcgccggcatcagcgacccgaaccggccgaccggatccttcctgttcctcggccccaccggcaccggcaagaccgagctcgcgaagtcgctcgcggacttcctcttcgacgacgagcgggcgatcgtgcgcatcgacatgagcgagtacggcgagaagcactcggtcgcccgcctggtcggagcgcccccgggctacgtgggctacgacgagggcggccagctcaccgaggcggtccgtcggcggccgtactccgtcgtcctgctcgacgaggtcgagaaggcccacccggaggtcttcgacatcctcttgcaggtgctcgacgacggccggctgaccgacggccagggccgcaccgtcgacttccgcaacacgctgctgatcctcaccagcaacctgggctcgggctacctggtcgaccccatgctggacccggagaagaagcacgaatccgtgctggccgtggtgcgctcgtcgttcaagccggagttcctcaaccgtctcgacgagatcgtggtgttcgacgcgctgacgatggacgacctggcccacatcgtcgacctccagctcggcctgctggccaagcggctcgcggtgcgccggatcaccatcgaggtcaccgatgccgcgcgccggtggctggcggacgtcggctacgacccggcgtacggcgcccgtccgctgcgccggctgatccagagcgccatcggcgacccgctggccaggctgctcatcggcggcgaggtgaccgacggcgcgaccgtgtcggtcgaccgcgcggcggagggcgacggtctggcgctcgagacggcgcccgcgtga

SEQ ID NO: 7078 - protein, 866 aa, Nocardioides sp. JS614
MSQFGAEKFTTRSREAIESAQLSATTAGNIHTEPIHLLVALLLQEEGTAANLVTKAGVDVPGLVRAAAADRDRLPKASGATVQQPSASAALTRVLAGALDLAAGMKDDYVASEHLLISLATVESSARTVLTDAGLSADGLRESLTAVRGNRRVTSQDAESTYEALEKYSVDLTTAAEEGRLDPVIGRDAEIRRVVQVLSRRTKNNPVLIGEPGVGKTAVVEGLAQRVVAGDVPDSLKGRRVLSLDLAAMVAGAKYRGEFEERLKAVLEEIKAAGGQVITFIDELHTVVGAGAGGDSAMDAGNMLKPMLARGELHMIGATTLDEYRERIEKDPALERRFQQVFVGEPSVEDTIQILRGIQEKYEAHHGVRITDAALVAAATLSDRYISGRQLPDKAIDLIDEAASRLRMEIESSPEEIDRLRRAVERLKMEEFALAKESDEASKERLANLRQDLADHEEELRALEARWEREKSTLEGEGELRRQLDQLRMEADRLQREGDLGKASELLYGRIPALEQQIEAAGAAERSDIEPLVGEEVGAEQIAEVVEAWTGIPTGRMLEGETAKLLHMEDVIGQRLVGQRAAVTAVSDAVRRSRAGISDPNRPTGSFLFLGPTGTGKTELAKSLADFLFDDERAIVRIDMSEYGEKHSVARLVGAPPGYVGYDEGGQLTEAVRRRPYSVVLLDEVEKAHPEVFDILLQVLDDGRLTDGQGRTVDFRNTLLILTSNLGSGYLVDPMLDPEKKHESVLAVVRSSFKPEFLNRLDEIVVFDALTMDDLAHIVDLQLGLLAKRLAVRRITIEVTDAARRWLADVGYDPAYGARPLRRLIQSAIGDPLARLLIGGEVTDGATVSVDRAAEGDGLALETAPA

SEQ ID NO: 7079 - DNA, 2583 bp, Azoarcus sp. BH72
  CDS (1)..(2583): transl_table=11
atgcgtttcgacaagctcaccaccaaattccagcaagccctcgcggatgcccagagcatcgcggtgggcaacgaccagcagttcatcgagccgcagcacctgctcgcggcgatgctcaaccaggacgacggcggcacggtgtcgctgttgcagcgcgccggcgtcaatgtgccgccgctgaaatccgcgctgcagaaggcgctcgaccgcctgcccaaggtggaaggccatggcggcgaggtgcaggtcggccgcgacctcaccaacctgctcaacctcaccgacaaggaagcccagaagcgcggcgaccagttcatcgccagcgagatgttcctgctcgcgctcgccgacgacaagggcgagaccggccgtctgctgaaggagcacggcctcacccgcaaggcgctggaggcggccgtggatgcggtgcgcggcggccagaacgtgggcagccaggatgccgaaggccagcgcgaggcgctgaagaagtactgcctggacctcaccgagcgcgcccgcgccggcaagctcgacccggtgatcggccgtgacgacgagatccgccgcgcgatccagatcctgcagcgccgcaccaagaacaacccggtgctgatcggcgagcccggcgtgggcaagaccgccatcgtcgagggcctggcgcagcgcatcgtcaatgacgaggtgccggagacgctcaagggcaagaaggtgctgtcgctcgacatggcggcgctgctggccggcgccaagtaccgcggcgagttcgaggagcggctgaaggcggtgctgaaggacatcgcccaggacgagggccgcatcatcctcttcatcgacgagatccacaccatggtgggcgccggcaaggccgaaggcgcgatggacgccggcaacatgctgaagccggcgctggcgcgcggcgagctgcactgcatcggcgccaccacgctggacgagtaccgcaagtacatcgagaaggatgccgcgctcgaacgccgcttccagaaggtgctggtggacgagccgacggtggaatccaccatcgccatcctgcgcggtctgcaggagaagtacgaggtgcaccacggcgtggacatcaccgacccggccatcgtcgccgcggcggaactctcgcaccgctacatcaccgaccgcttcctgccggacaaggcgatcgacctgatcgacgaggccgcggcgcgcatcaagatggagatcgactccaagccggaggtcatggacaagctcgaacgccggctgatccagctcaagatcgagcaggaggcggtcaagcgcgagaccgacgaggcgtcgcagcgacgcctgctgctgatccgcgacgagatcgacaagctcgaacgcgagtacgccaacctggacgaggtctggcgttcggaaaaggccagcgtgcagggcagccagcacatcaaggaagagatcgagaagctgcgcgcgcagatggccgagatgcagcgcaagggccagttcgacaagctcgccgagctgcagtacggcaagctgccgcagctggaagcccagctgaaggcggccgaaaccgccggcagcggcgagcgccagttcaagctcttgcgcacccaggtgggcgccgaggaaatcgccgaggtggtgtctcgcgccaccggcattccggtgagcaagatgatgcagggcgagcgcgacaagctcctgaagatggaagagcggctgcacggccgcgtggtgggccaggacgaagcggtgcggctggtgtcggacgcgatccggcgttcgcgcgcggggctggccgacgagaaccggccctacggctccttcctcttcctcggccccaccggcgtgggcaagaccgagctgtgcaagacgctggccgaattcctgttcgattcggaagagcacctgatccggatcgacatgagcgagttcatggagaagcactcggtcgcccgcctgatcggcgcgcccccgggctatgtcggctacgaagaaggcggctacctgaccgagcaggtgcggcgcaagccctacagcgtcatcctgttcgacgaggtcgagaaggcacatccggatgtgttcaacgtgctgctgcaggtgctcgacgacggccgcatgaccgacggccagggccgcacggtggacttcaagaacaccgtgatcgtgatgaccagcaacctcggcagccagatgatccagcagatgtcgggcgacgattaccaggtgatcaagctggcggtgatggccgaggtgaagaccttcttccgccccgagttcatcaaccgcatcgacgaggtggtggtgttccatgcgctcgacgagaagaacatcgccggtatcgcgcgcatccagctgaagtacctggagaagcgcctggccaagctcgacatgagcatggaggtgagcgacgcggcgctggccgagatcgcctcggccggtttcgatccggtgttcggcgcgcggccgctgaagcgtgcgatccaggagcgcatcgagaatccgctggcgaaggcgattctcgaagggcagttcggcgccaaggaccgcatccgggtcgacgccagcggcagcaagctgagcttcagccgggctgactga

SEQ ID NO: 7080 - protein, 860 aa, Azoarcus sp. BH72
MRFDKLTTKFQQALADAQSIAVGNDQQFIEPQHLLAAMLNQDDGGTVSLLQRAGVNVPPLKSALQKALDRLPKVEGHGGEVQVGRDLTNLLNLTDKEAQKRGDQFIASEMFLLALADDKGETGRLLKEHGLTRKALEAAVDAVRGGQNVGSQDAEGQREALKKYCLDLTERARAGKLDPVIGRDDEIRRAIQILQRRTKNNPVLIGEPGVGKTAIVEGLAQRIVNDEVPETLKGKKVLSLDMAALLAGAKYRGEFEERLKAVLKDIAQDEGRIILFIDEIHTMVGAGKAEGAMDAGNMLKPALARGELHCIGATTLDEYRKYIEKDAALERRFQKVLVDEPTVESTIAILRGLQEKYEVHHGVDITDPAIVAAAELSHRYITDRFLPDKAIDLIDEAAARIKMEIDSKPEVMDKLERRLIQLKIEQEAVKRETDEASQRRLLLIRDEIDKLEREYANLDEVWRSEKASVQGSQHIKEEIEKLRAQMAEMQRKGQFDKLAELQYGKLPQLEAQLKAAETAGSGERQFKLLRTQVGAEEIAEVVSRATGIPVSKMMQGERDKLLKMEERLHGRVVGQDEAVRLVSDAIRRSRAGLADENRPYGSFLFLGPTGVGKTELCKTLAEFLFDSEEHLIRIDMSEFMEKHSVARLIGAPPGYVGYEEGGYLTEQVRRKPYSVILFDEVEKAHPDVFNVLLQVLDDGRMTDGQGRTVDFKNTVIVMTSNLGSQMIQQMSGDDYQVIKLAVMAEVKTFFRPEFINRIDEVVVFHALDEKNIAGIARIQLKYLEKRLAKLDMSMEVSDAALAEIASAGFDPVFGARPLKRAIQERIENPLAKAILEGQFGAKDRIRVDASGSKLSFSRAD

SEQ ID NO: 7081 - DNA, 2547 bp, Mycobacterium sp. KMS
  CDS (1)..(2547): transl_table=11
gtggactcgttcaacccgacgaccaagacccaggcggcgctgacttcggcgttgcaggcggccagtgccgcaggcaacccccagatcgcgcccgcccatttgttgatggcattgctgacgcagaacgacggcattgccgcaccccttctggaggccgtcggcgtcgaacccgcgacagttcgggccgagacgcagcgcctcctcgaccggctgcccagcgccagcggcgccagcagccagccgcagttgtcgcgtgagtcgctggccgcggtcaccgccgcccagcagctcgccacggagatcgacgacgagtacgtctcgaccgagcacctgatggtcggcctggccaccggcgactccgacgtcgccaagctgctgaccggccacggcgcctcgccgcaggcgctgcgcgaggcgttcgtcaaggtgcgcggcagcgcccgcgtcaccagcccggaccccgagggcagctaccaggcgctggagaagtactccaccgatctgaccgcccgcgcacgcgaaggccagctcgacccggtcatcggccgggacaccgagatccgccgcgtcgtacaggtgctgagccgtcgtaccaagaacaacccggtgctcatcggtgagcccggcgtcggcaagaccgcgatcgtcgaaggcctggcccagcgcatcgtggccggtgacgtgccggagagcctgcgcggtaagaccgtcatctcgctcgacctgggttcgatggtcgccggttcgaagtaccgcggtgagttcgaggaacggctcaaggccgtgctcgacgacatcaagaactcggccgggcagatcatcacgttcatcgacgagctgcacaccatcgtcggcgccggcgcgaccggcgactcctcgatggacgccggcaacatgatcaagccgatgctcgcccgcggtgagctgcggctggtcggcgccaccaccctcgacgagtaccgcaagtacatcgagaaggacgctgcgctcgagcgccggttccagcaggtctacgtcggcgaaccgtcggtggaggacaccgtcggcatcctgcgcggcctcaaggagcgctacgaggtgcaccacggcgtgcgcatcaccgactccgctctcgtctccgctgccaccctctccgaccgctacatcaccgcccggttcctgccggacaaggccatcgacctggtcgacgaggccgcctcccggctgcgcatggagatcgactcccggcccgtcgagatcgacgaggtcgagcgcctggtccgtcgcctcgagatcgaggagatggcgctggccaaggaggaggacgacgcgtcgaaggaacggctggagaagctgcgcggtgagctggccgactacaaggagaagctggcggagctgacgacgcggtggcagaacgagaagaacgccatcgacatcgtccgcgaactcaaggagcagctcgaggcgctgcgcggtgaggccgaccgggccgagcgcgacggcaacctcgaaaaggccgccgagctgcgctacggccgcatccccgaggtcgagaagaaactcgacgccgcggtcccccaagccgaagcccgggacgacgtgatgctcaaggaggaggtcggacccgacgacatcgccgaggtggtgtcggcctggaccggcatccccgcaggccgcatgctcgaaggcgagaccgccaagctgctgcgcatggaggacgaactcggcaagcgggtcgtcgggcagcgcagggcggtgcaggccgtatccgacgcggtgcggcgcacccgggccggcgtcgccgacccgaaccggccgaccggctcgttcatgttcctgggcccgaccggtgtcggtaagaccgagctggccaaggcgctggcggagttcctgttcgacgacgaacgcgcgatggtccgcatcgacatgagcgagtacggcgagaagcactccgtcgcccgcctggtcggtgcgcctccgggatacatcggatacgaccagggcggccagctgaccgaggcggtgcggcgtcgcccgtacaccgtggtgctgttcgacgagatcgagaaggcccacccggacgtgttcgacgtgttgctgcaggtgctcgacgagggccggctgaccgacggtcagggccgcacggtcgacttccgcaacaccatcctcatcctgacgtccaacctgggcgccggcggcaccgaggacatggtgatggcggcagtgcgctcggccttcaagcccgagttcatcaaccgactcgacgacgtgatcgtgttcgacgggctcaaccccgaggagctggtgtccatcgtcgacatccagctgcagcagctggccaagcggctggcgcagcgtcgcctcacgctcgaggtgtcgctgccggcgaagaagtggctggccgaccgcgggttcgacccgctctacggcgcccggccgctgcgtcggttgatccagcagtccatcggcgatcagctcgcgaagatgctgctggccggtgacgtgcacgacggtgacatcgtgccggtcaacgtcagtccggacggcgaatcgctggtgctgggatga

SEQ ID NO: 7082 - protein, 848 aa, Mycobacterium sp. KMS
MDSFNPTTKTQAALTSALQAASAAGNPQIAPAHLLMALLTQNDGIAAPLLEAVGVEPATVRAETQRLLDRLPSASGASSQPQLSRESLAAVTAAQQLATEIDDEYVSTEHLMVGLATGDSDVAKLLTGHGASPQALREAFVKVRGSARVTSPDPEGSYQALEKYSTDLTARAREGQLDPVIGRDTEIRRVVQVLSRRTKNNPVLIGEPGVGKTAIVEGLAQRIVAGDVPESLRGKTVISLDLGSMVAGSKYRGEFEERLKAVLDDIKNSAGQIITFIDELHTIVGAGATGDSSMDAGNMIKPMLARGELRLVGATTLDEYRKYIEKDAALERRFQQVYVGEPSVEDTVGILRGLKERYEVHHGVRITDSALVSAATLSDRYITARFLPDKAIDLVDEAASRLRMEIDSRPVEIDEVERLVRRLEIEEMALAKEEDDASKERLEKLRGELADYKEKLAELTTRWQNEKNAIDIVRELKEQLEALRGEADRAERDGNLEKAAELRYGRIPEVEKKLDAAVPQAEARDDVMLKEEVGPDDIAEVVSAWTGIPAGRMLEGETAKLLRMEDELGKRVVGQRRAVQAVSDAVRRTRAGVADPNRPTGSFMFLGPTGVGKTELAKALAEFLFDDERAMVRIDMSEYGEKHSVARLVGAPPGYIGYDQGGQLTEAVRRRPYTVVLFDEIEKAHPDVFDVLLQVLDEGRLTDGQGRTVDFRNTILILTSNLGAGGTEDMVMAAVRSAFKPEFINRLDDVIVFDGLNPEELVSIVDIQLQQLAKRLAQRRLTLEVSLPAKKWLADRGFDPLYGARPLRRLIQQSIGDQLAKMLLAGDVHDGDIVPVNVSPDGESLVLG

SEQ ID NO: 7083 - DNA, 2580 bp, Neisseria meningitidis FAM18
  CDS (1)..(2580): transl_table=11
atgcgatacgacaaattaaccgccaaattccaacaggcccttgcagaagctcagagtttggcgttggctgcggacggcagctgtctggaagcgggctttgtgctgaaagccctgcttgacgaccaaaacagcggtgctgccgcgctcttggctcatgcgggcgtgaacgtgccgcaggtgaaacagcgtttgcagcagcatttgaacagcctgccgaaagtgtccggccagggcggcgacattctgcccagccgcgaattgcaggcggtgttgaacctgatggacaaagccgcaaccaaacgcggcgatgcctatatcgccagtgaacttttcctgcttgccttggtgcagcagaacgatgcggccggcaaaattttgaaagaagccggcgcgaccgaacaaaacatcaatgccgcgattgacgcggtacgaggaggacaaaacgtgaacgatgccaatgccgaagaccaacgcgatgctttgaaaaaatatacgctcgatctgacccaacgcgcccgagacggtaagctcgaccccgttatcggccgtgacgacgaaatccgccgtgcgattcaggtattgcaacgccgtaccaaaaacaaccctgtgctgattggcgaaccgggcgtgggtaaaaccgccatcgtcgaaggtttggcacaacgcatcgtcaacggcgaagtacccgaatccctgcgcaacaaacgcctactggttttggacttggcggcattgattgccggcgcgaaataccgcggcgaatttgaagaacgcttgaaaggcgtgttgaacgacttggcgaaagacgacggcaacactctgattttcatcgacgaaatccatactttggtcggcgcaggcaaaaccgacggtgcgatggatgcgggcaatatgctgaaaccggctttggcacgtggcgaattgcactgtatcggcgcgaccaccttggacgaataccgccaatacatcgaaaaagacgcggcactcgaacgccgcttccaaaaagtattggttggcgagccaagtgtagaagacaccatcgctatcttgcgcggtttacaggagcgttatgaaatccaccacggtatcgatattaccgaccctgctatcgttgccgcagcggagttgagcgaccgctacattaccgaccgcttcctgcctgataaagcgattgatttgattgacgaagccgccagccgtgtcaagatggaaaaagaaaccaagccggaagcaatggacaaaatcgaccgccgtctaattcagcttcggatggaaaaggcgcacgttgaaaaagaaaaagacgatgccagcaaaaaacgtttggaactgatagacgaggaaatcaacggtctgcaaaaagaatacgccgatttagacgaaatctggaaagccgaaaaagcaatttcagacggtgctgctaatattaagaaacaaattgacgaagtcaaaattaaaatcgaacaggcaaaacggcaaggcgatttggcactggcttcaaaattgatgtatgaagatttggagcatttggaaaaacagcgtgcagccgccgaacgggcagatacggacagcacaaaaccggcaaacaaactcttgcgtaataatgtcggcgcagaggaaatcgcagaggtggtttcccgtatgaccggcattcccgtatccaaaatgatggaaggcgaacgcgacaaactgctgaaaatggaagaagtattgcaccgccgcgtggtcggacaggacgaagccgtgcgtgccgtgtccgacgctatccgccgcagccgctccggtcttgccgatccgaacaaaccttacggcagcttcctgttcttgggcccgaccggcgtgggtaaaaccgagttgtgtaaagccctggcaggctttctgttcgacagcgaagatcatctgattcgcatcgatatgtccgaatatatggaaaaacacgccgttgcacgcctgatcggtgcgcctccgggctatgtcggctacgaagaaggcggctacctgaccgaacaagtgcgccgcaaaccgtacagcgtgattctgctggacgaagtggaaaaagcccatcccgatgtgttcaacatcctgctgcaagtattggatgacggtcgtttgaccgacgggcaaggcaggacggtagattttaaaaataccgtgattgtgatgacttccaacatcggcagccagcacatccaacaaatgggcattcaggattacgaagcggtaaaagaagttgtgatggaggatgtgaaagaacatttccgtcctgaaatgatcaaccgcatcgacgaagtggtcgtgttccacggtttggatcaggcaaacatccgcagcattgcgaaaatccagctcaaaggtttggaaaaacgtttggaaaaacaaaacctgcgcctgactgtttccgatgccgcactggacatcatcgccaaagccggtttcgacccgatttacggcgcacgtccgctcaaacgcgccatccagtcggaaatcgaaaacccgctggcaaaagccctgcttgccggaaactatgcgcccgaaagcgaaatcagggtagaagccgacggcgacagactgaaatttgcctga

SEQ ID NO: 7084 - protein, 859 aa, Neisseria meningitidis FAM18
MRYDKLTAKFQQALAEAQSLALAADGSCLEAGFVLKALLDDQNSGAAALLAHAGVNVPQVKQRLQQHLNSLPKVSGQGGDILPSRELQAVLNLMDKAATKRGDAYIASELFLLALVQQNDAAGKILKEAGATEQNINAAIDAVRGGQNVNDANAEDQRDALKKYTLDLTQRARDGKLDPVIGRDDEIRRAIQVLQRRTKNNPVLIGEPGVGKTAIVEGLAQRIVNGEVPESLRNKRLLVLDLAALIAGAKYRGEFEERLKGVLNDLAKDDGNTLIFIDEIHTLVGAGKTDGAMDAGNMLKPALARGELHCIGATTLDEYRQYIEKDAALERRFQKVLVGEPSVEDTIAILRGLQERYEIHHGIDITDPAIVAAAELSDRYITDRFLPDKAIDLIDEAASRVKMEKETKPEAMDKIDRRLIQLRMEKAHVEKEKDDASKKRLELIDEEINGLQKEYADLDEIWKAEKAISDGAANIKKQIDEVKIKIEQAKRQGDLALASKLMYEDLEHLEKQRAAAERADTDSTKPANKLLRNNVGAEEIAEVVSRMTGIPVSKMMEGERDKLLKMEEVLHRRVVGQDEAVRAVSDAIRRSRSGLADPNKPYGSFLFLGPTGVGKTELCKALAGFLFDSEDHLIRIDMSEYMEKHAVARLIGAPPGYVGYEEGGYLTEQVRRKPYSVILLDEVEKAHPDVFNILLQVLDDGRLTDGQGRTVDFKNTVIVMTSNIGSQHIQQMGIQDYEAVKEVVMEDVKEHFRPEMINRIDEVVVFHGLDQANIRSIAKIQLKGLEKRLEKQNLRLTVSDAALDIIAKAGFDPIYGARPLKRAIQSEIENPLAKALLAGNYAPESEIRVEADGDRLKFA

SEQ ID NO: 7085 - DNA, 2604 bp, Acidovorax sp. JS42
  CDS (1)..(2604): transl_table=11
atgcgtctcgataaattcaccacgaagttccaagaagcgctgtctgatgcacagtcgctggccctgggacatgacaacgcctacatagagcccgtgcacatgctggtggccatgctgcgccaggatgaaggcccgcgcgcgctgctgcagcgtgccggcgccaatgtgccgggcctgctggccgcggccgaggccgccgtcaagcgcctgccccaggtgcagggccaggaccaggtgcagggcagccccgagctgggccgtgtgctgcaggccaccgagaaggaggccatcaagcgcggcgaccagttcatcgccagtgagctgtttttgctggcgctggtcgacagcaagggcgaggccgcgcagctggccaaggacaacggcgtgacccgcaagagcctggaggcggccatcgatgccgtgcgcggcggccagaaggtggacagcgccgaagccgagggccagcgcgaggcgctgaagaaatacacgctggacctgaccgagcgcgcccgccagggcaagctggacccggtgatcggccgcgacgacgagatccgccgcgtcatccaggtgctgcagcggcgcagcaagaacaaccccgtgctgatcggcgagcccggcgtgggcaagaccgccatcgtcgaggggctggcccagcgcatcgtcgagggcgaggtgcccgagacgctgaagaacaagcgcgtgctggtgctggacatggccggcctgctggcgggtgccaagtaccgcggcgagttcgaggagcgtctgaagtccgtgctgaaggaagtggcgcacgaggaaggccgcatcatcctcttcatcgacgagatccacaccatggtcggcgccggcaaggccgaaggcgccatggacgcgggcaacatgctgaaacccgcactggcgcgcggcgagctgcactgcatcggcgcgaccacgctggacgagtaccgcaagtacatcgagaaggatgcggcgctggagcggcgctttcagaaggtgctggtggacgagcccagcgtagaagacaccatcgccatcctgcgcggcctgcaggtgcgctacgaggcgcaccacggcgtggacatcaccgacccggccatcgtggccgcggccgagctgtcgcaccgctacatcaccgaccgctttctgcccgacaaggccatcgatctgatcgacgaggccgcggccaagatcaagatcgagatcgactccaagcccgagtcgatggacaagctcgagcgccgcatgatccagctcaagatcgagcgcgaggcgatgaagaaagagaccgatgaggcctcgcaaaaacgcctgcagctcatcgaggaagagttgggcaatgtggagcgcgagtacgccgatctggaagaggtctggaaagccgagaaggccagcgcgcagggctccgaacagatccgcaaggacatcgatgccatccgcacgcagatcgacgacctgaagcgcaagggcgacttcaacaaggtcgccgagctgcagtacggcacgctgcccgagctggaaaagcgcctgaaggaagcgcaggacagcgaggccggcgggaccggcaccaagcacaagctgctgcgcacccaggtgggtgccgaggaaatcgccgaggtggtcagccgcgccaccggcattcccgtggccaagatgatgcagggcgagaaggacaagctgctgcacatggaggaaaagctgcacgagcgcgtggtgggccaggacgaggcgatctccgccgtggccaatgccatccgccgctcgcgctcgggcctatcagaccccaaccggccgctcggcagcttcctgttcctggggcccacgggcgtgggcaagaccgagctgtgcaaggcgctggccgggttcctcttcgacagtgaagagcatctggtgcgcatcgacatgagcgagttcatggaaaagcatagcgtcgcgcgcttgattggtgcgcctcccggctatgtgggctatgaagagggcggctacctgaccgaggccgtgcgccgcaagccctacagcgtactgctgctggatgaggtggaaaaggcccaccccgacgtgttcaacgtgctgcttcaggtgctggacgacggccgcctgaccgatggccaggggcgcaccgtggacttcaagaacacggtgatcgtgatgaccagcaacattggctcgcacctgatccaggccatggtgggccaggatgccgaggacatcaaggaagccgtgtggggggaactcaaaggccatttccgacccgaattcctcaaccgcatcgacgaaacggtggttttccacggcttggatgccaagcacatcgaagcgattgcacgcattcagttgcgtctgctggaggcgcggctggccaaaatggacctgaccctgcaggtgtcgccggccgcgatgggcgaactggccaaggtggggttcgacccggtgttcggggcgcgtccgctcaagcgggccatccagcagcgcatcgagaacccgctgtccaagctgctgctggagggccgctacccgcccaagagcgtgattccggtggatgtcgatcctgtgacagacccaggggtattccacttcggcgaggcccgccccgcggggtga

SEQ ID NO: 7086 - protein, 867 aa, Acidovorax sp. JS42
MRLDKFTTKFQEALSDAQSLALGHDNAYIEPVHMLVAMLRQDEGPRALLQRAGANVPGLLAAAEAAVKRLPQVQGQDQVQGSPELGRVLQATEKEAIKRGDQFIASELFLLALVDSKGEAAQLAKDNGVTRKSLEAAIDAVRGGQKVDSAEAEGQREALKKYTLDLTERARQGKLDPVIGRDDEIRRVIQVLQRRSKNNPVLIGEPGVGKTAIVEGLAQRIVEGEVPETLKNKRVLVLDMAGLLAGAKYRGEFEERLKSVLKEVAHEEGRIILFIDEIHTMVGAGKAEGAMDAGNMLKPALARGELHCIGATTLDEYRKYIEKDAALERRFQKVLVDEPSVEDTIAILRGLQVRYEAHHGVDITDPAIVAAAELSHRYITDRFLPDKAIDLIDEAAAKIKIEIDSKPESMDKLERRMIQLKIEREAMKKETDEASQKRLQLIEEELGNVEREYADLEEVWKAEKASAQGSEQIRKDIDAIRTQIDDLKRKGDFNKVAELQYGTLPELEKRLKEAQDSEAGGTGTKHKLLRTQVGAEEIAEVVSRATGIPVAKMMQGEKDKLLHMEEKLHERVVGQDEAISAVANAIRRSRSGLSDPNRPLGSFLFLGPTGVGKTELCKALAGFLFDSEEHLVRIDMSEFMEKHSVARLIGAPPGYVGYEEGGYLTEAVRRKPYSVLLLDEVEKAHPDVFNVLLQVLDDGRLTDGQGRTVDFKNTVIVMTSNIGSHLIQAMVGQDAEDIKEAVWGELKGHFRPEFLNRIDETVVFHGLDAKHIEAIARIQLRLLEARLAKMDLTLQVSPAAMGELAKVGFDPVFGARPLKRAIQQRIENPLSKLLLEGRYPPKSVIPVDVDPVTDPGVFHFGEARPAG

SEQ ID NO: 7087 - DNA, 2685 bp, Bifidobacterium longum DJO10A
  CDS (1)..(2685): transl_table=11
atggaggaatacgatatggaacagaagttcaccactatggcccaagaagccgtcggcgacgcgattcagagtgcgtccgccgcaggaaacgcgcaggtcgagaccctgcacgtcatggatgcgctgctgcgccaggaaaacggcgtggcgcgctctctgatcgaggccgcgggcggggacccgcaggccatcggcgcggcggtgcgcaacgctttggtcgcgctgccgagcgcatccggatccagcacctcgcagccacaggccagccgccagctgaccgccgccatcgcccaggctgagaaggaaatgcagcagatgggcgacgaatacgtctccaccgaacatctgcttatcggcatcgcggccagcaagccgaaccagtcggccgaaatcttggagaagaacggcgtcaccgcagcctccctgcgcaaggccgtacccggcgtgcgtggtggcgcgaaggtcaccagcccggacgcggaaggctcgtacaaggccctagagaagtactccaccgacctgacggccgccgccaaggaaggcaagctggacccggtcatcggacgtgaccaggaaatccgccgcgtgattcagatcctctcccgtcgtaccaagaacaacccggtgctgatcggcgagcccggcgtcggcaagaccgccgtcgtggaaggcctggcccagcgtatcgtggcgggcgacgtgcccaccaccctgcaaggcaagaagctcatctcccttgacctaggctccatggtggccggttcgaagtaccgtggcgagttcgaggagcgcctgaagagcgtcctgaacgaaatcaagaatgcggatggtcagatcatcaccttcatcgacgagatccacaccatcgtcggcgcgggtgcggccgaaggctcgatggacgccggcaatatgttgaagcccatgctggcccgtggcgagctgcgcctgatcggcgcgaccacgctggacgagtaccgcgagaacatcgaaaaggatccggcattggaacgccgtttccaacaggtgttcgtgggcgagccgagcgtggaagacaccatcgccatcctgcgtggcctgaagcagcgttacgaggcgcaccataaggtaacgatcggcgacgacgcgctggtcgccgccgcgaccctctcgaaccggtacatctcaggccgtcagctgccggacaaggccatcgacctggtcgatgaggcggccgctcacctgcgtatggagctcgactcctcgcctgaggagatcgatgagctgcagcgcaaggtgacccgtcttgaaatggaggaaatgcagctcaagaaggccgaggatcctgcgtccaaggagcgtctgggcaagctgcaagccgaacttgcggacacccgtgagaagctcagcggtctcaaggcgcgttgggatgcggaacaggctggccacaacaaggtcggcgacctgcgtgccaagctcgacgacctgcgcgtgcaggcggataagtatacccgtgaaggcaacttggcggaggcctcgaagattctgtacggcgagattccgtccattcagaaggagcttgccgccgcggagagcgcggatgctgaatctgctgatgccagcgcggccaacccggccgatgagccgatggtcccggaccgtgtggacgccgactcggtggctgagatcgtctccgactggaccggcattcccgtcggccgcctgatgcagggcgaaaacgagaagctgctgcacatggaggactacctcggcaagcgtgtgatcggccagaaggaagccatcgccgccgtgtccgacgcggtgcgccgttcgcgtgccggcatctccgacccgaaccgtccgaccggatcgttcctgttcctcggccccaccggtgtgggcaagaccgaactggccaaggcgctcgccgacttcctgttcgacgacgagaaggccatggtccgcatcgacatgtccgaatacatggagaaggcttcggtctcgcgcctgattggcgcggcgccgggctacgtgggctacgagcagggcggccagctgaccgaggccgtgcgccgtcgcccgtattccgtggtgctgttcgacgaggtcgagaaggccaacccggagatcttcgacgtgctgctgcaggtacttgacgatggtcgcctgaccgatggccagggaaggaccgtggacttcaagaacacgatcctgattatgacctctaacctcggctcgcagttcctcgtgaacgaggacatggacgccgacgccaagaaaaaggccgtgatggacgctgtccacatgaacttcaagccggagttcctgaaccgtctggacgacatcgtcatgttccacccgcttacgcgcgaggagcttggcggcatcgtggatatccaggtggctggcgtgtcccagcgtctgaccgatcgccgcatcacgctggacgtcaccgactcggctcgcgaatggcttgccaacaccggttacgacccggcttatggcgctcgtccgctgcgccgcctggtacagaccgaagtgggcgaccagctggcccgtatgctgctggccggcaaggtccacgacggtgacaccgtgctcgtcgaccagaccggcggcgaacatctggagctctccgcttgggcgagcgaccagattgtctccgacaatccggacgtgagcgtggacaacgtcaccgaagacaagtga

SEQ ID NO: 7088 - protein, 894 aa, Bifidobacterium longum DJO10A
MEEYDMEQKFTTMAQEAVGDAIQSASAAGNAQVETLHVMDALLRQENGVARSLIEAAGGDPQAIGAAVRNALVALPSASGSSTSQPQASRQLTAAIAQAEKEMQQMGDEYVSTEHLLIGIAASKPNQSAEILEKNGVTAASLRKAVPGVRGGAKVTSPDAEGSYKALEKYSTDLTAAAKEGKLDPVIGRDQEIRRVIQILSRRTKNNPVLIGEPGVGKTAVVEGLAQRIVAGDVPTTLQGKKLISLDLGSMVAGSKYRGEFEERLKSVLNEIKNADGQIITFIDEIHTIVGAGAAEGSMDAGNMLKPMLARGELRLIGATTLDEYRENIEKDPALERRFQQVFVGEPSVEDTIAILRGLKQRYEAHHKVTIGDDALVAAATLSNRYISGRQLPDKAIDLVDEAAAHLRMELDSSPEEIDELQRKVTRLEMEEMQLKKAEDPASKERLGKLQAELADTREKLSGLKARWDAEQAGHNKVGDLRAKLDDLRVQADKYTREGNLAEASKILYGEIPSIQKELAAAESADAESADASAANPADEPMVPDRVDADSVAEIVSDWTGIPVGRLMQGENEKLLHMEDYLGKRVIGQKEAIAAVSDAVRRSRAGISDPNRPTGSFLFLGPTGVGKTELAKALADFLFDDEKAMVRIDMSEYMEKASVSRLIGAAPGYVGYEQGGQLTEAVRRRPYSVVLFDEVEKANPEIFDVLLQVLDDGRLTDGQGRTVDFKNTILIMTSNLGSQFLVNEDMDADAKKKAVMDAVHMNFKPEFLNRLDDIVMFHPLTREELGGIVDIQVAGVSQRLTDRRITLDVTDSAREWLANTGYDPAYGARPLRRLVQTEVGDQLARMLLAGKVHDGDTVLVDQTGGEHLELSAWASDQIVSDNPDVSVDNVTEDK

SEQ ID NO: 7089 - DNA, 2574 bp, Rickettsia sibirica 246
  CDS (1)..(2574): transl_table=11
atgaatattgataaatttactgcacatgctaaatcagtgatagctagtagccaatcacttgctgctaaaaatgatcatcagcaaatattacctttgcatttattatctagtcttttaagtgaagaaacaggtataattcaaacccttattaataatactggcggtaatataaacttattaaaagatcaagttcagctagaactaaataaaatcccaaaagttcaggttgagggagggggacaagtttattcttctgctgaagctcttaaagttttagaaaaagctagtagcattgctaaagacagtggggatagctttgtaaccatagagcgtatatttgaagcattaacgtatgataatactatagccggtaaaattttaacgaataatggaattaataataaaaaaatagcaacagctattttacagtttcgtaaaggcaaaaaagcagataccgaatcggcagaaaatagttacgatgctttaaagaaatatggcagagatgtaacagagcttgccgaaagcggtaagcttgatccgatcatcggacgtgatgaagaaataagaagaacggtgcaggtactatcacgacgtatgaaaaataatcctgtattgattggagaacctggagtcggtaaaactgctataatagaggggcttgcacaacgaatatttagtaaggacgtacctgaatcgcttattaattgccgtattattgagcttgatatgggagctttaatagcgggagctaaatatcgaggcgaatttgaagaacgtcttaaagcagtgcttagcgaaatcaaagaatcaagcggtgaaattattttatttatcgatgaattgcatctattagtcggtacgggaaaaaccgacggtgctatggatgcctcgaatttattaaagccgatgcttgctcgtggtgagctgcattgtatcggtgctactactctagatgaatatcgtaaatatatcgagaaagatgcggcacttgctcgtcgttttcagcctgtttacgtgagtgagccgacggttgaggatactatatcaatacttagaggaattaaagaaaaatatgagctgcatcatgcagtgcgaatttccgatagtgcaatagttgcagcagcgacgttatcaaaccgttatattaccgatcgttatttacctgataaagctattgatttgattgatgaagcttgtagccgtatgaaaatagagctatcaagtaaaccagaagagcttgatgagctggaccgtcgtattattcagataaaagtagagcttgcagcacttaaaaaagaaaatgacgagcattctaaaaagaaaatagagcatttaactacagcattagaaaaattagagtctcaatcctatgatatgggagctaaatggcaagctgaaaaggctaaactacagcaaacacaaaagctcaaagaagaactagaccgtagccgaaacgagcttgaacgtgccgaacgtgatgctaatctcgctaaagctagtgagctaaaatacggaattatacctgagattatgaaaaagattcaggaagccgaaagtatggataataaagggctgttaaaagaaattgtatcggaaagcgatatagcaagtattatctctcgtattactggtattccaattgatacgatgctatcaagtgaacgtgagcgtctgcttgtgatggagcagaaattacgagaatcggtaatagggcaggataaggcaattaaaggtgttagtgatgcggtaagaagatcacgtgcagggattcaagatattaaccgcccacttggttcgttcttattcttaggaccgaccggagtcggtaaaaccgagcttaccaaagctttagctggttttctttttgatgaccgtaatgcaatacttcgtatagatatgtcggaatatatggagaagcacgctatttctcgcctgataggagctcctcccggctatatcggatatgatcaaggcggagtgttgacggaggcagtaagacgccgtccttatcaggtaatattatttgatgaggttgaaaaagcccatcccgacatatttaatattatgctgcaaatacttgatgagggaagattaacagatagtcaaggtataacggttgattttaagaatactataatagttttaacgtctaatttaggtgctgagatactcgttaatcagaaagaggacgaagatacatataaagtaaaggatgaggttatggaatatgtaaaagcagtatttaaacctgagtttttaaacagactagacgagattatattattccatcgcctaaatcgtaataatattcatgatatagttaagatacagcttgaaagtttaaagaaaattttactagcacaaaatattattcttgaatttgatgaatctgcattaaattatttagccgaaaaaggttatgatccaagctttggagcaagacccttaaaacgtcttatccagcgggaaatacaaaataatttagccaaaatgattttagcaggcgaaataagtagcggtaaaacggttaaaataaattcaaaggataaagaattgaaggtaacaataagttga

SEQ ID NO: 7090 - protein, 857 aa, Rickettsia sibirica 246
MNIDKFTAHAKSVIASSQSLAAKNDHQQILPLHLLSSLLSEETGIIQTLINNTGGNINLLKDQVQLELNKIPKVQVEGGGQVYSSAEALKVLEKASSIAKDSGDSFVTIERIFEALTYDNTIAGKILTNNGINNKKIATAILQFRKGKKADTESAENSYDALKKYGRDVTELAESGKLDPIIGRDEEIRRTVQVLSRRMKNNPVLIGEPGVGKTAIIEGLAQRIFSKDVPESLINCRIIELDMGALIAGAKYRGEFEERLKAVLSEIKESSGEIILFIDELHLLVGTGKTDGAMDASNLLKPMLARGELHCIGATTLDEYRKYIEKDAALARRFQPVYVSEPTVEDTISILRGIKEKYELHHAVRISDSAIVAAATLSNRYITDRYLPDKAIDLIDEACSRMKIELSSKPEELDELDRRIIQIKVELAALKKENDEHSKKKIEHLTTALEKLESQSYDMGAKWQAEKAKLQQTQKLKEELDRSRNELERAERDANLAKASELKYGIIPEIMKKIQEAESMDNKGLLKEIVSESDIASIISRITGIPIDTMLSSERERLLVMEQKLRESVIGQDKAIKGVSDAVRRSRAGIQDINRPLGSFLFLGPTGVGKTELTKALAGFLFDDRNAILRIDMSEYMEKHAISRLIGAPPGYIGYDQGGVLTEAVRRRPYQVILFDEVEKAHPDIFNIMLQILDEGRLTDSQGITVDFKNTIIVLTSNLGAEILVNQKEDEDTYKVKDEVMEYVKAVFKPEFLNRLDEIILFHRLNRNNIHDIVKIQLESLKKILLAQNIILEFDESALNYLAEKGYDPSFGARPLKRLIQREIQNNLAKMILAGEISSGKTVKINSKDKELKVTIS

SEQ ID NO: 7091 - DNA, 2577 bp, Fusobacterium nucleatum subsp. vincentii ATCC 49256
  CDS (1)..(2577): transl_table=11
atgatgaatccaaatcaatttacagagaacacaatttctgcaattaatttagctgttgatattagtaagggtaatatgcaacaaagtataagaccagaagcattagctttgggtttacttatgcaaaataatggattaattccaagagtaatagaaaaaatgggattgaatttacaatatattatttctgaattggaaaaagaaatgaataattatccaaaagttgaagtgaaagttagtaatgagaatatttcacttgaccaaaagacaaattccatattaaatcgtgcagaaaaaattatgaatgaaatgggagatagctttttaagtgttgaacatatttttaaagctatgatagaagagatgccaatttttaaaaagttaggtatcaatttagaaaaatatatggaggtattgatgaatataagagggaatagaaaagtagataatcaaaacccagaagcaacttatgaagttttagaaaaatatgcaaaagatttagttgaacttgctagagaaggtaagatagaccctatcataggtagagattctgaaatcagaagagctatacaaataatttcaagaaggacaaagaatgaccctattttaattggagaacctggtgttggtaaaactgcaatagttgaaggacttgctcaaagaatattaaatggagatgttcctgaaagtttaaagaacaaaaaaatattctcacttgatatgggagctttggttgcaggtgcaaaatataaaggtgaatttgaagaaagaatgaaaggtgttttaaaagaagttgaagaatcaaatggaaatatcattctttttatagatgaaattcacacaatagttggtgctggtaaaggagaaggttctcttgatgcagggaatatgttaaaacctatgcttgcaagaggagaattaagagttattggtgcaacaacaatagatgaatatagaaaatatattgaaaaagaccctgcacttgaaagaagattccaaacaatattagtaaatgaacctaatattgatgatactatttcaatattaagaggacttaaagataaatttgaaacttatcatggtgtcagaattgctgatgcagcaatagttgaagcggcaacacttagccaaagatatataactgatagaaaacttccagataaggctattgacctaatagatgaagctgctgcaatgataagaacagaaattgactctatgccagaagaacttgaccaattaacaagaaaggctcttcaattagaaattgaaattaaggcattacaaaaagaaactgatgatgcttctaaggaaagattaaaagttatagaaaaagaactagcagaattaaatgaagaaaagaaagttttgacatctaaatgggaacttgaaaaagaagatatttctaagattaaaaatattaaaagagagattgaaaatgttaaacttgaaatggacaaagccgaaagagaatatgatttaactaaattatcagaattaaaatatggtaaacttgcaactcttgaaaaagaattacaagaacaacaaaataaaattgatagagatggaaaagatgattctcttttaaaacaagaagttacagctgatgagattgctgacatagtttcaagatggacaggtattcctgtatcaaaacttactgaaactaaaaaagaaaaaatgttacatcttgaagaccatataaaagaaagagttaaaggacaagatgaagctgtcaaggctgttgcagacactatgcttagatcagttgcaggtttaaaagaccctaatagacctatgggttcatttatattcttaggacctactggtgttggtaagacatatcttgcaaaaactttggcatataatttatttgatagtgaagacaatgtagttagaatagatatgagtgaatatatggataagttttcagttacaagacttataggtgctcctcctggatatgttggttatgaagaaggaggacaacttacagaagctataagaactaaaccttattcagtaatattgtttgatgaaattgaaaaggctcaccctgatgtatttaatgtgctattacaagttttagatgatggtagacttacagatggacaaggaagaatagtggatttcaaaaacactttaattataatgacatctaatataggtagccatttaatacttgaagatcctgctctttctgaaagtacaagagaaaaagtaacagatgaattaaaggctagatttaaaccagaatttttaaacagaattgatgaaataattactttcaaggctttggatttaccagctattaaagaaattgtaaaattaagtctaaaagacttagaaaataaattaaaacctaaacatattacacttgaattttctgataaaatggttgattatttagctaataatgcttatgaccctcactatggtgcaagacctttaagaagatatatacaaaaagaaattgaaacaagtcttgctaagaaaattcttgcaaatgaaattcatgaaaaatctgatgttttaatagatttagataataaccatattgtttttaaagaaaaataa

SEQ ID NO: 7092 - protein, 858 aa, Fusobacterium nucleatum subsp. vincentii ATCC 49256
MMNPNQFTENTISAINLAVDISKGNMQQSIRPEALALGLLMQNNGLIPRVIEKMGLNLQYIISELEKEMNNYPKVEVKVSNENISLDQKTNSILNRAEKIMNEMGDSFLSVEHIFKAMIEEMPIFKKLGINLEKYMEVLMNIRGNRKVDNQNPEATYEVLEKYAKDLVELAREGKIDPIIGRDSEIRRAIQIISRRTKNDPILIGEPGVGKTAIVEGLAQRILNGDVPESLKNKKIFSLDMGALVAGAKYKGEFEERMKGVLKEVEESNGNIILFIDEIHTIVGAGKGEGSLDAGNMLKPMLARGELRVIGATTIDEYRKYIEKDPALERRFQTILVNEPNIDDTISILRGLKDKFETYHGVRIADAAIVEAATLSQRYITDRKLPDKAIDLIDEAAAMIRTEIDSMPEELDQLTRKALQLEIEIKALQKETDDASKERLKVIEKELAELNEEKKVLTSKWELEKEDISKIKNIKREIENVKLEMDKAEREYDLTKLSELKYGKLATLEKELQEQQNKIDRDGKDDSLLKQEVTADEIADIVSRWTGIPVSKLTETKKEKMLHLEDHIKERVKGQDEAVKAVADTMLRSVAGLKDPNRPMGSFIFLGPTGVGKTYLAKTLAYNLFDSEDNVVRIDMSEYMDKFSVTRLIGAPPGYVGYEEGGQLTEAIRTKPYSVILFDEIEKAHPDVFNVLLQVLDDGRLTDGQGRIVDFKNTLIIMTSNIGSHLILEDPALSESTREKVTDELKARFKPEFLNRIDEIITFKALDLPAIKEIVKLSLKDLENKLKPKHITLEFSDKMVDYLANNAYDPHYGARPLRRYIQKEIETSLAKKILANEIHEKSDVLIDLDNNHIVFKEK

SEQ ID NO: 7093 - DNA, 2601 bp, Bacillus cereus G9241
  CDS (1)..(2601): transl_table=11
atggacttaaatcaaatgacaacaaaaacacaagaggcgattatgagtgcccaatctttagcggtatctcaccatcatcaagaagtagatactgttcatctcttgtttacattattagaagagcaagatgggttagcagtacgtatttttcaaaaaatgaatgtcgatatagaagcgttaaaacaaggcgccgaaaatttaattaagaaaaagccttccgtaacgggaagtggtgcagaagcaggtaaattatatataacaggtgctctgcaacaattacttgtaagagcgggaaaagaagcagagaaattgcaagatgactacatttcagtggaacatgtattgcttgcttttactgaagaaaaaggcgatataagccaattatttacaagatttcatattacgaaagataacttattacagtctttaatgacagttcgggggaatcaaagagtgactagtcaaaatccagaagcaacttatgaagcgttagaaaaatatggtcgtgatttagtggcggaagtaagagcggggaaaattgaccctgtaatcggccgagatagtgaaattcgccgcgtaatccgcattctttcacgtaaaacgaaaaataacccggttttaattggtgagccaggtgttggtaaaacagcaatcgttgaaggattagcacagcgtattgtgaagaaggatgtaccagaaggattaaaagatagaacaatctttgcattagatatgagtgcgctcgtagctggagcgaaattccgtggtgaatttgaagagcgtctgcaagctgtattaaatgaaattaaaaagagtgaaggccgcattttattattcattgatgaacttcacacaatcgtcggcgctggtaaaacagaaggtgcgatggatgcagggaatatgttaaaaccgatgcttgctcgcggtgaactgcattgtattggggcgacgacgctcgatgaatatcgtaaatatattgagaaagatccagcactagaaagacgtttccaacaagtattagcagaagaaccaactgttgaagatacaatttccattttacgtggtttaaaagagcgctttgaaatttatcacggtgtaaatattcatgaccgcgcgattgtagcagcatcagttttatcagatcgatatatttcggatcgtttcttaccagataaatcaattgatcttgttgacgaagcgtgcgcaacgattcgtacagaaattgattctatgccaacagaattagatgaagtaacgcgccgcattatgcaactagaaattgaagaagcagctcttggaaaagagaaggattttggtagccaagaacgtctaaaaacgttgcaacgtgaattatcagatttaaaagaagttgcaagtggtatgagagcgaaatgggagaaagaaaaagaagatattcacaaagttcgtgacttacgtgaacatttagagcgtctgcgccgtgaattagaagaagcagaagggaattacgatttaaataaagcagcggaacttcgccacggaaaaattcctgcgattgaaaaagagttaaaagaagcagaagaaatgggcgctcataataaacaagaaaatcgtttattacgtgaggaagtaagtgaagaagaaattgctgatattgtttcacgctggactggtattcctgttgcaaaactcgttgaaggcgaacgtgagaaattactacgcttagagcaaattttatcagagcgtgtcatcggacaagaggaagcggtaagtttagtatcagacgcagttcttcgtgcacgcgctggtattaaagatccgaatcgtccgattggttccttcatcttcttaggaccgacaggtgttggtaaaacagaacttgcaaaaacgttagcgcagtctttattcgatagtgaagagcagatgattcgtatcgatatgtctgagtatatggagaaacacgctgtgtcacgcttaattggtgcgcctcctggatatgttgggtatgaagagggcggtcaattaacagaagcggtaagacgtaaaccgtattccgttattttattagacgaaatcgaaaaagcacatccagaagtatttaacattttattacaaatgttagatgatggacgcattacagattcgcaaggacgtacagtagactttaaaaacacagttattattatgacttcaaatattggatctgctcatttattagatggattagaagaagatggatcaattaaagaagaatcaagagaacttgtgatgggacaattaagaggacatttccgaccggagtttttaaaccgtgtcgacgaaattattttattcaaacctcttacaacgaatgaaattaaaggtattgttgataaaattgtaaaagaattacaaggtcgtttagctgaccgtcatattacggtagaattaacagacgcagcgaaagaatttgttgtagaagctggctttgatccgatgtacggagctcgtccattaaaacgatatgtacagcgccaagttgagacgaaattagcgagagaactaattgcaggtacgattactgacaatagtcatgtagtggttgatgtagaaaataacgaattagtcgtgcatgtgaaatga

SEQ ID NO: 7094 - protein, 866 aa, Bacillus cereus G9241
MDLNQMTTKTQEAIMSAQSLAVSHHHQEVDTVHLLFTLLEEQDGLAVRIFQKMNVDIEALKQGAENLIKKKPSVTGSGAEAGKLYITGALQQLLVRAGKEAEKLQDDYISVEHVLLAFTEEKGDISQLFTRFHITKDNLLQSLMTVRGNQRVTSQNPEATYEALEKYGRDLVAEVRAGKIDPVIGRDSEIRRVIRILSRKTKNNPVLIGEPGVGKTAIVEGLAQRIVKKDVPEGLKDRTIFALDMSALVAGAKFRGEFEERLQAVLNEIKKSEGRILLFIDELHTIVGAGKTEGAMDAGNMLKPMLARGELHCIGATTLDEYRKYIEKDPALERRFQQVLAEEPTVEDTISILRGLKERFEIYHGVNIHDRAIVAASVLSDRYISDRFLPDKSIDLVDEACATIRTEIDSMPTELDEVTRRIMQLEIEEAALGKEKDFGSQERLKTLQRELSDLKEVASGMRAKWEKEKEDIHKVRDLREHLERLRRELEEAEGNYDLNKAAELRHGKIPAIEKELKEAEEMGAHNKQENRLLREEVSEEEIADIVSRWTGIPVAKLVEGEREKLLRLEQILSERVIGQEEAVSLVSDAVLRARAGIKDPNRPIGSFIFLGPTGVGKTELAKTLAQSLFDSEEQMIRIDMSEYMEKHAVSRLIGAPPGYVGYEEGGQLTEAVRRKPYSVILLDEIEKAHPEVFNILLQMLDDGRITDSQGRTVDFKNTVIIMTSNIGSAHLLDGLEEDGSIKEESRELVMGQLRGHFRPEFLNRVDEIILFKPLTTNEIKGIVDKIVKELQGRLADRHITVELTDAAKEFVVEAGFDPMYGARPLKRYVQRQVETKLARELIAGTITDNSHVVVDVENNELVVHVK

SEQ ID NO: 7095 - DNA, 2451 bp, Wolbachia endosymbiont of Drosophila simulans
  CDS (1)..(2451): transl_table=11
atgcttgaagatgaatcaggtttagttcaggatttgataaacgcttgtggtggaagtgtgcaaagtatttctgatgctgtggatagcgcaataaaaaagttgccagtaattgaaggtccaggaagtggtggccttcaactttcaagagaaatagcaaaagtttttgaagattcaattggtattgcaagaagaaataaagattcatttgttgctgttgagcgtttactacagggcctcactgcacaaaaagatgatactgtaggcaaaattctggcagagaatggtgtgactctacaaaaactgaactcagttattgcagaaatgagacaaggcagcagtgcggactcgccaaacagtgaggaaaaattaaacgcggcaaagaaatatacaaaagatgttacagagcttgctatgcaaggaaagcttgatcctgtaattggtcgtgatgaagagatcagaagaactatgcaggtatcactgaggcggacaaaaaataatccagtgctgatcggtgaacctggtgttggaaaaactgcaatagttgaggggcttgcaaatagaattgttgcaaacgatgtgccacttggtttgcatgatgcaaaggtcttagctttggatcttggagcactaattgctggcactaagtttagaggagagtttgaggaaaggttaaaagcagtgattaatgagatttcgagagcggagggaaaaattatattattcatcgatgaattgcacactttagttggagcaggagcaacaagtggtgcaatggatgcctcgaatctgctgaagcctgctcttgcacgtggagaaattcgctgtataggagccacaactttagatgaatatcgtcagcatatagaaaaagatcctgcacttgcaaggcgttttcagcctgtgtttatttctcaaccaactgaaactgataccatttcaatactcaggggtttgaaggaaagatatgaggtgcatcatggtataagaattacagacggtgcaataattgctgctgcaacgttgtccaatagatatataacagataggttttcacctgataaagcaattgatttgattgatgaagcagcaagtagggtgagaattgaaatggatagcaagcctgaagttattgatgaacttgagagaaaggttatacagctaaagattgaagcagaggctttaaaaaaagaaagtgatgaaaattctaaacagcgtttaaaaaagataaatgaagagatcgaaaatctaaacagtaaatttgctgacttgaacagcaaatggcagatggaaaagaataaaatagctagaatacaagaaacagccgaaaaattagataacgctagaaaagagctggaattggctcagcggagtggaaatttaggaaaagcaggagagctgatgtatggtgtgatccctcagcttgagaatgaattaaaaaatcaggaaaaggttactgatagtttcttaaagaaagaagtgactggagatgatattgcaaacattgtttcaaagtggacgggaattccagttgataatatgatgcatagtgaaaaggaaaaactccttaacatggagaatgaaataggaagaagagtaatagggcagaaagatgcaatagaagcgataagtaatgcagttaggcgctcccgctctggggtgcaagataccaacaggccttttggttcatttttatttttaggtccaactggagttggtaaaactgaacttgcgaaagccttagctgaatttctgtttgacgatcaatcagcgcttctgcgttttgatatgtcagaatatatggaaaaacattctgtttcaaagttaattggcgcgcctccagggtatgttggctatgaacaaggtggcagattaactgaagcagcgaggagaagaccatatcaggtaatcttatttgatgagatagaaaaggcaaatccagatatatttaatctattgctgcaaatcttggatgaggggagactcactgatagtcatggcaaattgattgattttcgcaataccatactgattttaacttctaaccttggcgctgagataatgctaaaagggaatgttgattctgtaagaaatgaagtgatgcaaatagttaaatcaacatttcgtccagaatttttaaacaggctggatgaaattattatatttcacagtttaaccagagatgacatctataaaattatagatgttcaattttcttatttacaaaaaacacttgctaagcgtaaactgagtataagtttgtcgcaggaagctaaagaactaatagcacaaactggctatgaccctgaatatggagcaaggcccttaaaaagggttatacaagagtgtattcaaaataatttagctaaattagttttatcaggggaagtagtagaaaatgatgagctaatagtgtacgctcttgataatgaaatcttagttaaaaaggtttaa

SEQ ID NO: 7096 - protein, 816 aa, Wolbachia endosymbiont of Drosophila simulans
MLEDESGLVQDLINACGGSVQSISDAVDSAIKKLPVIEGPGSGGLQLSREIAKVFEDSIGIARRNKDSFVAVERLLQGLTAQKDDTVGKILAENGVTLQKLNSVIAEMRQGSSADSPNSEEKLNAAKKYTKDVTELAMQGKLDPVIGRDEEIRRTMQVSLRRTKNNPVLIGEPGVGKTAIVEGLANRIVANDVPLGLHDAKVLALDLGALIAGTKFRGEFEERLKAVINEISRAEGKIILFIDELHTLVGAGATSGAMDASNLLKPALARGEIRCIGATTLDEYRQHIEKDPALARRFQPVFISQPTETDTISILRGLKERYEVHHGIRITDGAIIAAATLSNRYITDRFSPDKAIDLIDEAASRVRIEMDSKPEVIDELERKVIQLKIEAEALKKESDENSKQRLKKINEEIENLNSKFADLNSKWQMEKNKIARIQETAEKLDNARKELELAQRSGNLGKAGELMYGVIPQLENELKNQEKVTDSFLKKEVTGDDIANIVSKWTGIPVDNMMHSEKEKLLNMENEIGRRVIGQKDAIEAISNAVRRSRSGVQDTNRPFGSFLFLGPTGVGKTELAKALAEFLFDDQSALLRFDMSEYMEKHSVSKLIGAPPGYVGYEQGGRLTEAARRRPYQVILFDEIEKANPDIFNLLLQILDEGRLTDSHGKLIDFRNTILILTSNLGAEIMLKGNVDSVRNEVMQIVKSTFRPEFLNRLDEIIIFHSLTRDDIYKIIDVQFSYLQKTLAKRKLSISLSQEAKELIAQTGYDPEYGARPLKRVIQECIQNNLAKLVLSGEVVENDELIVYALDNEILVKKV

SEQ ID NO: 7097 - DNA, 2664 bp, Crocosphaera watsonii WH 8501
  CDS (1)..(2664): transl_table=11
atgcaacctaccgaccccgatcagtttaccgaacaagcctgggatgcgatcgtaaaatcccaagaagtcgcccgacgcttcaaaaatcaaaacttagaagttgaacacctggttttagcccttctagaacaggaaaaaggcttaactttgcgcattttagaacgggctgaaattgatgtccctcggttgcagcaacaagtggaaacctttaccaaccgacaagctaaatttgccaccgtcgagcagctatacttaggccgaggcttagatattatgaccgatcgcgccgaagcatcccgtcagagttgggatgataaatacatttcggtggaacatttatgggttggttttgcagaagatgaacgtattggacgaaaatgtttacgcagctttaaccttgatcctcaagacttagaacaggccataaaatcagtaagaggcagtcaaaaagtcaccgaaaaagatcaagaagatcgttacgaagccttagaaaaatatggtcaggatctcaccgaagcggcaagagaaggtaagttagatccagtcattggtagagatgaagagatacgccgagtaattcaagttttatcccgtcgttccaagaataatcccgttttaattggagaacccggtgtggggaaaactgcgatcgccgaaggtttagcacaaagaataattaacggagatgtgccagaatctctcaaaaataggcaattaatctccctagatatgggtagcttagtagcaggggcaaaattacggggacagttcgaggaacgtttacaggccgtgatgcgagaagtaaccaactccgatggtcatattattctctttatcgacgaactgcacaacgtcgtaggaaccggttcacgggaaggcagttctatggatgcagggaacctcttaaaacccatgttagcacggggagaattgcgctgtatcggtgcaaccaccctggatgagtaccgtaagcacgttgagaaagatcctgccctagaaaggcgttttcagcaggtctatgttaaacaaccctccgtggatgacaccatctctattttacggggactcaaagaacgttacgaagtgcatcacggggtgaaaataaccgactctgctttagttgctgcagccaccttatcaaaccgttatattactgatagattcctccccgataaagccattgatttagtagacgaagctgctgcaaaattaaagatggaaatcacttctaaaccagtggaattagaagacgtagatagacgtttgatgcagctacaaatggaaaaattatccttagaaggtgaagaagaaagaggaatgttagttgtagacaaatcctccaaagaaagattagaaaaaattcaacaagaaattaaagaattagaacaaatacatgaaaaattaggtagtcaatggcaatctgaaaaacagatgctagaagaaatcaattctcttaaagaacaagaagagcaattacgtcatcaaattgaacaggcagaaagggattatgatcttaacaaagctgctcagttaaagtatggtgaattggaaggtttacaacgacaattagaagcaaaagaaacccaattaattgatattcaagcccaaggagaaaccctattaagagaacaagttactgattccgatattgccgaaatagtagcaggatggtctggtattcctgttaaccgtttattgggttcagaaagacaaaaattattagacttggaaggccatttacatcagcaagtaatcggtcaagaagaggcagtttcagccgttgcagcagccattcgtcgcgctagggccggaatgaaagacccttctcgtcccattggttcctttttattcatgggaccaacgggggtaggaaagactgaattagcgagagcgttagctgcatttctctttgactcccaagatgccatgattcgtattgatatgtccgaatatatggaaaaaaactccatttctcggttagttggtgcgcctcctggatatataggttacgatcaagggggtcaactatcagaagcggttcgccgtcgtccctattctgttgtccttttagatgaagtagaaaaggcacatatagacgtttttaacattttattacaagtgcttgacgatggacgcattaccgattctcagggtcgtgtcgtggatttctgtaacgctatcatcgttatgaccagtaatattggtagcgaatacattttaaatttagcaggagatgatgacaattatgaagccatgcgtaagaaagttttacaagcattacggaagcattttcgtcctgaatttttgaaccgtattgatgatttaattatcttccataccctcaagaaacagcaattaagaagtattgttaccctgcaacttaaacgtattgaaaagttattagaagatcaaggtattggcatagaattgagcgatgctgcccttgattatattgtcaattctggttatgatcctgtatatggcgcaagacctttaaaacgggcgattcaacgggaattagaaaatcccattgctaccaaaatattagaaacgacctttgcttctggggatactgtttttattaattgtaaagataataatttgctgtttgataaggaaaagaaagatgaggaggttcctaatgttgaggttgaggtagtttaa

SEQ ID NO: 7098 - protein, 887 aa, Crocosphaera watsonii WH 8501
MQPTDPDQFTEQAWDAIVKSQEVARRFKNQNLEVEHLVLALLEQEKGLTLRILERAEIDVPRLQQQVETFTNRQAKFATVEQLYLGRGLDIMTDRAEASRQSWDDKYISVEHLWVGFAEDERIGRKCLRSFNLDPQDLEQAIKSVRGSQKVTEKDQEDRYEALEKYGQDLTEAAREGKLDPVIGRDEEIRRVIQVLSRRSKNNPVLIGEPGVGKTAIAEGLAQRIINGDVPESLKNRQLISLDMGSLVAGAKLRGQFEERLQAVMREVTNSDGHIILFIDELHNVVGTGSREGSSMDAGNLLKPMLARGELRCIGATTLDEYRKHVEKDPALERRFQQVYVKQPSVDDTISILRGLKERYEVHHGVKITDSALVAAATLSNRYITDRFLPDKAIDLVDEAAAKLKMEITSKPVELEDVDRRLMQLQMEKLSLEGEEERGMLVVDKSSKERLEKIQQEIKELEQIHEKLGSQWQSEKQMLEEINSLKEQEEQLRHQIEQAERDYDLNKAAQLKYGELEGLQRQLEAKETQLIDIQAQGETLLREQVTDSDIAEIVAGWSGIPVNRLLGSERQKLLDLEGHLHQQVIGQEEAVSAVAAAIRRARAGMKDPSRPIGSFLFMGPTGVGKTELARALAAFLFDSQDAMIRIDMSEYMEKNSISRLVGAPPGYIGYDQGGQLSEAVRRRPYSVVLLDEVEKAHIDVFNILLQVLDDGRITDSQGRVVDFCNAIIVMTSNIGSEYILNLAGDDDNYEAMRKKVLQALRKHFRPEFLNRIDDLIIFHTLKKQQLRSIVTLQLKRIEKLLEDQGIGIELSDAALDYIVNSGYDPVYGARPLKRAIQRELENPIATKILETTFASGDTVFINCKDNNLLFDKEKKDEEVPNVEVEVV

SEQ ID NO: 7099 - DNA, 2619 bp, Crocosphaera watsonii WH 8501
  CDS (1)..(2619): transl_table=11
atgcaacctaccaatcccaatcaatttacagaaaaagcctgggaggccatagtccgtacccctgatattgctaaacaaaatagtcaccaacaaattgaaagcgaacacttaatgaaagctctgagtgaggaagagggactagccacaagtatcttcaataaagctaaccttagtgttcccaaattgcgagaacaaacagaggcttttattcgtcgccaacctaaagtctccaatcctggggagtcggtttatttaggccgtagtttagatagtttacttgacagaagcgagggctttcggaaagaatttgaagatgactatatctctgtagaacatttactattagcctaccttaaagatgatcgttttggtaaaaatttgttcaaagagtttggtctgactgaaagaaattttaaagatattattaaacaagtaagaggcaatcaaaaagtgaccgatcaaaatcctgaaaataaatacgaagctttagaaaaatatggacgagatttaactcaattagccaaagaaggtaagctcgatcctgttattggccgagacgacgaaattcgtcgaaccattcaaattttatcccgtagaaccaaaaataatcctgttttgattggggaacctggggtcggaaaaacagctattgtagaagggttagcgcaacgaattattaatagggatgtccctgaatctttgcgagatagaacattaattgctttggatatgggttctttgattgctggggcaaaataccgaggagaatttgaagaaagattgaaagctgtcctaaaagaagtaaccgattctcagggcaatattatcctttttatcgatgaaattcataccgttgttggtgccggtgcaactcaaggggcgatggatgcaggaaaccttttaaaacccatgttagcacggggagaattgcgctgtatcggggcaacaaccctggatgaatatcgtaagtatatcgagaaagatgctgccttagaaagacgttttcaagaagtgttagtggatgaacccaatgtagtcgatacaatttctattttacggggactcaaagagcgttatgaagtccatcatggggtaaaaattgctgatacagctttggtagcagcagcgatgttatctaaccgttatattagcgatcgctttttaccagataaggccattgatctcgtggacgaatctgctgctaaattaaagatggaaattacctctaaaccagaagaattagacgaagcagatcgtaaaattctccaattagaaatggaacgactttctttacaaaaagaggtagatatagcctctcgggaacgtttacaaagattagaaaaagaattagctaatctcaaggaagaacaatcccaacttaatgcccagtggcaagcggaaaaagaagttattgatcagattcgccaactaaaagaaactatggatcaagttaacttagaaattcaacaagctgaacgggattatgacctaaataaagccgctgaattacgctatggcaaactcacagatttacagggacaagtcaaggaattggaaagtaaaattgaggaacgacaaaccacaggaaaaactttactaagggaggaagttatagagtcagatattgccgaaattatctctaaatggacgggaattcctattcttaaattagtggaatcagaaaaagaaaaactattacatttggaggatgaactacacgagaaagttattggacaagaagaagctgtaactgctgtatcagaagcaatacagcgttctcgtgcaggactttctgatcccgatcgtcccactgccagcttcatctttttgggaccaactggggtaggtaaaacagaattagctaaagccttagctaagaacctttttgataccgaagaagccatagttcgtatcgatatgtctgagtacatggagaaacatagcgtatctcgtttaattggtgcgcctcctggatatgtaggctacgatgaaggcggacaattaacggaagcaattcgtcgtcgtccctactcagtaattctctttgacgagatagaaaaagcacacggtgatgtcttcaacatcatgttacaaattctcgatgatggacgtttaacagactctcaaggtcgggtagtagatttcaaaaatactatcattattatgaccagtaatatcggttctcaatacattttagatgtggcaggagacgatactcgttatgatgaaatgcgttcccgtgttatggaagcgatgcgtaatagtttccgtcccgaatttctcaatcgtatcgatgaaattatcatcttccacagcttacaaaaagaacaattacgagaaattgtcaagctacaagttcaactcttaagaagtcgtttagaagaccaaaaaatgtctcttaaattagcagatatttccctagattttgtggccgatatcggttacgatcccgtctatggtgccagacctttaaaaagggcagttcaaaggtacttagaaactcctattgctaagtcaattttaagaggagaatttaaagcaggggatactatttttgtggatgttgaagatgaaagattgacctttaaacgtttgcaatctgaaatgttaaccgtttaa

SEQ ID NO: 7100 - protein, 872 aa, Crocosphaera watsonii WH 8501
MQPTNPNQFTEKAWEAIVRTPDIAKQNSHQQIESEHLMKALSEEEGLATSIFNKANLSVPKLREQTEAFIRRQPKVSNPGESVYLGRSLDSLLDRSEGFRKEFEDDYISVEHLLLAYLKDDRFGKNLFKEFGLTERNFKDIIKQVRGNQKVTDQNPENKYEALEKYGRDLTQLAKEGKLDPVIGRDDEIRRTIQILSRRTKNNPVLIGEPGVGKTAIVEGLAQRIINRDVPESLRDRTLIALDMGSLIAGAKYRGEFEERLKAVLKEVTDSQGNIILFIDEIHTVVGAGATQGAMDAGNLLKPMLARGELRCIGATTLDEYRKYIEKDAALERRFQEVLVDEPNVVDTISILRGLKERYEVHHGVKIADTALVAAAMLSNRYISDRFLPDKAIDLVDESAAKLKMEITSKPEELDEADRKILQLEMERLSLQKEVDIASRERLQRLEKELANLKEEQSQLNAQWQAEKEVIDQIRQLKETMDQVNLEIQQAERDYDLNKAAELRYGKLTDLQGQVKELESKIEERQTTGKTLLREEVIESDIAEIISKWTGIPILKLVESEKEKLLHLEDELHEKVIGQEEAVTAVSEAIQRSRAGLSDPDRPTASFIFLGPTGVGKTELAKALAKNLFDTEEAIVRIDMSEYMEKHSVSRLIGAPPGYVGYDEGGQLTEAIRRRPYSVILFDEIEKAHGDVFNIMLQILDDGRLTDSQGRVVDFKNTIIIMTSNIGSQYILDVAGDDTRYDEMRSRVMEAMRNSFRPEFLNRIDEIIIFHSLQKEQLREIVKLQVQLLRSRLEDQKMSLKLADISLDFVADIGYDPVYGARPLKRAVQRYLETPIAKSILRGEFKAGDTIFVDVEDERLTFKRLQSEMLTV

SEQ ID NO: 7101 - DNA, 2586 bp, Xylella fastidiosa Ann-1
  CDS (1)..(2586): transl_table=11
atgcggatggataagcttacttcgcgtttccagaatgcgttggctgatgcgcaatcgctggccgtcggccgtgaccatactattattgagccggtgcatgttttttcggcattgcttgatcagcagggtgggagtacacgttcgttgctcgtgcaggccggtgtcaatgtgccattgctgcgtgagcggttgaccgagatacttgaggcattgccgaaagtgagtggtcagacggttaatgtctcacccagcaatgaattgagtcgtttgtttcatcggactgataagttagcgcagcagcatggtgatcagtttatggccagtgagtggttcgtgttggctgtggtcgatgatagtggggggctgggccaggcgttgcgtgctgctggtgcggaaaaaaagaagattgaggctgcgattgataaattgcgtggcggtgaaactgtccagactgagaatgcggaggagcagcgtcaagcgttggaaaagtacacgattgatctgactgccagggctgagagtggcaagcttgatccggtgattggtcgtgatgaggaaattcgccgcacgatacaggtattgcagcggcgtacaaaaaataatcctgtgctgattggtgagccgggtgtgggtaaaactgccattgtagaagggctggctcagcgcattgtcaatggtgaggttccggaagggttgcgcagtaagcgtctgctctcgctggatttgggggcgttgattgctggggccaagtttcgtggtgagttcgaggagcgcttgaagggggtgcttaacgatctcgctaagaatgaggggcgggtcattttgttcattgatgagctgcataccatggttggtgccggtaaagccgatggtgcgatggatgctggcaatatgctcaagccggcgttagcacgtggtgagttgcattgtatcggtgcgactacgttggatgagtatcgcaagtacattgagaaggatgcggcgttggaacgccgtttccagaaggtgtttgttggggagccgacggtggaggataccatcgcaattcttcgtggacttaaggaaaagtatgcgttgcaccacggtgtggaaatcactgatccggctattgttgctgcggctacgctgtctaatcgctacatcactgatcgtcagttaccagataaagcgattgacttgatggatgaggctgccagtcgtattcgtatggaaattgactccaaaccggaagagcttgatcgtttggagcgtcgcttgattcagttgaaaattcagcgtgagatgctgaagaaagaaaaggatgaggcgagcaagcagcgtttagtcgatcttgagcgtgatattgaggttctggaccgtgaattttccgatctggaggaggtgtggagatcagaaaaagccgcgctacagggggcgactaagatcaaggagtcgatcgagcaggccaagcttgatttggaagccgcgcagcgccgtcaggactacgccaagatgagcgagattcagtatggtgtactccccgcgttggagaagcagctagtggcagcaagtcaggcggaacagcacgattttactttggtgcaggagaaagtgactgctgaggagattgccgaggtagtcagtcgttggactggtattccagtgagcaagatgcttgagggcgagcgcgataagttgttgcgtatggaagctgatctaggtcgacgtgtggttggtcaagatgaggctatcaaggtggtatcggatgcggtgcgccgttcgcgtactggtttgtctgatccaaatcgaccgagcggctcgttcctctttctgggtccgacgggtgttggtaagactgagttatgtaaggcgctggctgaatttttgttcgacagtcaagatgcaatggtccgcattgatatgagtgagttcatggaaaaacattctgtggcgcgcctgattggtgcacctccgggctatgtgggttatgaggaaggaggttatcttactgaattggcgcgacgtcggccttactctctgattcttttggatgaagtggagaaggcgcatagtgatgtgttcaatattctgctgcaagtacttgatgatggacgcttgactgatggtcagggccgtactgttgattttcgcaataccgttattgtgatgacatcaaacttaggttcacatcagatccaagaactcagtggagacgattctccggaggtgtatacgcaaatgaaggcggcagtgatgggggtggtgcaggtgcattttcgcccagaattcattaacaggttggatgatattgttgttttccacccgttggacaaggcgcaaatcaagcagattgcgcggattcaactgcgggggctagagaagcgtctcgctgaatctgagttgaaactagatttggatgatcgtgcgctggaattgcttggtaatgtcggatttgatcctgtatatggtgcccgtccgctgaagagagcaatccaatctcagctggagaatcccttagcgcagcagatcttagctggagcgttcgtcagtggggatactgtgcaggtgggtgttgatggagggaagcttgtattctctaaggtgtga

SEQ ID NO: 7102 - protein, 861 aa, Xylella fastidiosa Ann-1
MRMDKLTSRFQNALADAQSLAVGRDHTIIEPVHVFSALLDQQGGSTRSLLVQAGVNVPLLRERLTEILEALPKVSGQTVNVSPSNELSRLFHRTDKLAQQHGDQFMASEWFVLAVVDDSGGLGQALRAAGAEKKKIEAAIDKLRGGETVQTENAEEQRQALEKYTIDLTARAESGKLDPVIGRDEEIRRTIQVLQRRTKNNPVLIGEPGVGKTAIVEGLAQRIVNGEVPEGLRSKRLLSLDLGALIAGAKFRGEFEERLKGVLNDLAKNEGRVILFIDELHTMVGAGKADGAMDAGNMLKPALARGELHCIGATTLDEYRKYIEKDAALERRFQKVFVGEPTVEDTIAILRGLKEKYALHHGVEITDPAIVAAATLSNRYITDRQLPDKAIDLMDEAASRIRMEIDSKPEELDRLERRLIQLKIQREMLKKEKDEASKQRLVDLERDIEVLDREFSDLEEVWRSEKAALQGATKIKESIEQAKLDLEAAQRRQDYAKMSEIQYGVLPALEKQLVAASQAEQHDFTLVQEKVTAEEIAEVVSRWTGIPVSKMLEGERDKLLRMEADLGRRVVGQDEAIKVVSDAVRRSRTGLSDPNRPSGSFLFLGPTGVGKTELCKALAEFLFDSQDAMVRIDMSEFMEKHSVARLIGAPPGYVGYEEGGYLTELARRRPYSLILLDEVEKAHSDVFNILLQVLDDGRLTDGQGRTVDFRNTVIVMTSNLGSHQIQELSGDDSPEVYTQMKAAVMGVVQVHFRPEFINRLDDIVVFHPLDKAQIKQIARIQLRGLEKRLAESELKLDLDDRALELLGNVGFDPVYGARPLKRAIQSQLENPLAQQILAGAFVSGDTVQVGVDGGKLVFSKV

SEQ ID NO: 7103 - DNA, 2682 bp, Croceibacter atlanticus HTCC2559
  CDS (1)..(2682): transl_table=11
ttgaatatttatgccattttagcagtgtatttaaatggtataccaattgcttatctagctataaaacttaagaagatgaattttaataattatactataaaatcacaggaggccatacagcaagcgcaacagcttgctcaggaaatgggccatcaacaaatagaaaatgaacacatttttaaagctatagctactgtagatgaaaatgtgactccatttttattgaaaaaactaaatattaatgtaccactattcactcaaattttagataaagaaatcgaaagtttccctaaagtaagtggtggcgacattatgttatctagagaagcaggaaaagctgtaaatgaagcttctagtatcgcaaaaaaaatgaatgatgagtatgtttcaatagaacatctcatattagccatttttaaatctaacagtaaaattgcacaaatattaaaagatcaaggtactacagaaaaaggattaaaattagctattgaagaattgagacaaggcgacagagtaacttcgcaaagtgcagaagacacttataactctttaagcaaatatgctatcaatcttaatgaacgtgcagagactggaaaattagatccggttataggacgcgatgaagagattagacgtgtgctgcaaatactttctagaagaactaaaaacaatcctatgttggttggtgaacctggtgttggtaaaacagctattgcagaaggcttagctcataggattattgctggtgatattccagacaaccttaaagacaaacaaattttctctttagatatgggcgcattaattgcaggtgccaaatttaaaggagaatttgaagaacgcttaaaggctgttgttaaagaagtaacctcaagtgacggaaacattgttttgtttatagatgaaattcacacgctagttggtgccggtggcggccaaggcgcaatggatgcggcaaacattttaaagccagcattagcaagaggagaactaagagcgattggtgcaacaactttagacgagtatcaaaagtattttgagaaagacaaagctttagaacgtcgttttcaaaaggtaattgtagatgaaccagatacagaaagcgcaatttcaatactaagaggtattaaggaaaagtacgagacacaccataaagtaagaattatggatgaagctataatagctgctgtggaattatctgaacgctacattactagtagattcttaccagataaagctattgatttaatggatgaagctgcatctaaactaaggatggagattaactctaaacctgaagagttagatgttttggatcgtaaagttatgcagctggaaattgagattgaagctattaagcgtgaaaaagatgaagttaagttaaaatctttacgatcagatttagcaaaccttaaggaagaacgtaatgaattacatgcgcagtggaaaaatgaaaaggatgttgtagacaatatacaacaggccaaacaagatattgagcagtttaagcttgaagctgaacgcgctgagcgagaaggcgattacggtaaagttgcagagatacgttatggtaaaattaaagaagctcaagaacgcttagagaaacttcagcaaaacgttgaagctcaaaaatctggaaaatctctcatacaagaggaagttacaagcgaagacattgcagaagttgttgctaaatggacaggtgttccggtaaccaaaatgttacaaagtgaccgtgaaaagctgttgcgtttagaagatgaattacacaaacgagtagtaggacaacaagaagctatagttgctgtaagcgacgctgtaagacgtagccgcgcaggtttacaagaccagaaaaagccaataggaagttttttattcttaggtaccactggtgttggtaaaactgagcttgctaaagctctagccgaatacctttttgatgatgaaagcgcgatgacacgtatagatatgagtgagtaccaagaacgtcacgcagtaagtagacttgttggtgcgcctccaggatatgtgggttatgacgaaggtggacagcttactgaagctgttagacgtaagccatactctgttgtcctgttagatgaaattgaaaaagcgcacccagatacttttaatatcttattacaggttttagatgaaggtaggcttacagataataaaggtcgaattgcagactttaaaaacaccattatcattatgacaagtaatatgggaagtggtattattgaagagaagtttaatgcggttaaagatattcctactgctattgaagctgcaagaactgaagttttaggtttacttaaacaaaccgtaaggccagagtttattaaccgtatagacgatatcgtaatgtttacgcctttaaatcaggataacattaaagagattgtaagcttgcagttgcgacaggttactaaaatgctaggtaaacagaatattacgctagatgctactgaagaagcaataagcctgttagcaaaacaaggatttgatcctcaatttggtgcaagaccagttaagcgtacaattcaaaaagaggtgcttaacgagttgtctaaacaaatcttatctggaaaggtaactacagatagtattattcttatagatgcgtttgatgatgaacttgtatttagaaaccaaagtgatctggttgaagatctataa

SEQ ID NO: 7104 - protein, 893 aa, Croceibacter atlanticus HTCC2559
MNIYAILAVYLNGIPIAYLAIKLKKMNFNNYTIKSQEAIQQAQQLAQEMGHQQIENEHIFKAIATVDENVTPFLLKKLNINVPLFTQILDKEIESFPKVSGGDIMLSREAGKAVNEASSIAKKMNDEYVSIEHLILAIFKSNSKIAQILKDQGTTEKGLKLAIEELRQGDRVTSQSAEDTYNSLSKYAINLNERAETGKLDPVIGRDEEIRRVLQILSRRTKNNPMLVGEPGVGKTAIAEGLAHRIIAGDIPDNLKDKQIFSLDMGALIAGAKFKGEFEERLKAVVKEVTSSDGNIVLFIDEIHTLVGAGGGQGAMDAANILKPALARGELRAIGATTLDEYQKYFEKDKALERRFQKVIVDEPDTESAISILRGIKEKYETHHKVRIMDEAIIAAVELSERYITSRFLPDKAIDLMDEAASKLRMEINSKPEELDVLDRKVMQLEIEIEAIKREKDEVKLKSLRSDLANLKEERNELHAQWKNEKDVVDNIQQAKQDIEQFKLEAERAEREGDYGKVAEIRYGKIKEAQERLEKLQQNVEAQKSGKSLIQEEVTSEDIAEVVAKWTGVPVTKMLQSDREKLLRLEDELHKRVVGQQEAIVAVSDAVRRSRAGLQDQKKPIGSFLFLGTTGVGKTELAKALAEYLFDDESAMTRIDMSEYQERHAVSRLVGAPPGYVGYDEGGQLTEAVRRKPYSVVLLDEIEKAHPDTFNILLQVLDEGRLTDNKGRIADFKNTIIIMTSNMGSGIIEEKFNAVKDIPTAIEAARTEVLGLLKQTVRPEFINRIDDIVMFTPLNQDNIKEIVSLQLRQVTKMLGKQNITLDATEEAISLLAKQGFDPQFGARPVKRTIQKEVLNELSKQILSGKVTTDSIILIDAFDDELVFRNQSDLVEDL

SEQ ID NO: 7105 - DNA, 2616 bp, Sulfitobacter sp. EE-36
  CDS (1)..(2616): transl_table=11
atggacttgagcaagttcacagaacggtcgcgcggctttattcatgctgcgcaaacaatcgcgacgcgtgaaagccaccaacggctgacgccggaacatttattgaaagcattgctggatgacgaccaagggctggcgagcaatctgattgctgctgccggtggcgatcctgcacgtgtgactgaaaccctgacgctgtctttgggcaagctgcccaaggtgtcgggcgacgccgcgcaggtataccttgataatgccaccgcaaaggtgctggccgaagcagagacgctggccaaaaaggcgggcgacagctttgtgccggtcgaacgcgtgctgatggcccttgcgatggtgaaatccggtgcgaaaaccgcgttggatgcgggtaaggtcaccgcacaggggttgaacgccgctatcaatgatatccggaaagggcgcacggctgatacggccagtgcggaagacgggtatgaggcgctcaagaagtacagccttgatctgacggaacgtgcccgcgaaggcaaaatcgacccgatcatcggtcgggacgaggaaattcgtcgggccatgcaggtgttgagccgccgtaccaagaacaacccggtgctgatcggtgagcccggcgtaggtaaaaccgcgattgccgaggggctcgccctgcggatcgtggatggcgatgtgcctgaatccctgcgcaacaaacgcttgctggcgctggacatgggcgcgctgattgccggcgcgaagtatcgtggcgagttcgaagaacggttgaaagccgtcttgaccgaggtcaccgaagctgcgggcgaggtgatcctgttcattgacgagatgcacacgctggtgggtgccggtaaggcggacggcgcgatggacgcggccaacctcatcaaaccggctttggcgcggggtgaattgcactgcgttggtgcgacgaccttggacgaataccgtaagtatgtcgaaaaagacgcagcacttgcccgtcgcttccagcctgtgatggtcagcgaacctacggtcgaggatacggtgtcgatcctgcgaggcattaaggagaagtacgagctgcaccatggtgtgcggatcagcgactctgcccttgtggcggcggcaaccctgtcgcaccgctatatcacggaccgtttcctgcccgacaaggcaatcgaccttgtggacgaggcagcgagccgtctgcggatggaagtcgacagcaaaccggaagagctggatgcgctggaccgtcagatcatgcagcttcagatcgaagccgaggcgttgaagaaagaggatgacgctgccagcaaggaccgcctggacaagttggagaaagagctgggggatctgcaggaaaaggccgatgccatgactgcgcagtggcagggcgaacgtgatcgccttgagggcgcgcgcgagctgaaagagcagctggaccgtgcccgcgccgagcttgagatcgccaagcgcgaaggcaacctcgccaaagcgggggagctttcctatggcgtgatcccgcagcttgaacgcaaactgggcgaggccgaagagaacgaagccgacgtgatggtcgaagaggccgtgcgcccggatcagatcgccagcgtcgtcgaacgttggacgggtatccccgcgggtcgtatgctggaaggcgagcgggacaagttgctgcgcatggaagaccagttgcacaaccgtgtcattggtcagaacctcgcggtcaaagctgtgtcgaacgcggtgcgccgtgcgcgtgctggcctgaatgacgaggcccgccccttgggcagcttcctgttcctcgggccgactggtgtcggtaagaccgagctgaccaaggccgtcgccgaattcctgttcgacgacgagaacgcgatggtgcggatcgacatgtctgagttcatggagaaacatgccgtggcccgtctgatcggcgcgcctcccgggtatgttggctatgacgaaggtggcgtattgaccgaagccgtgcggcgcagaccctatcaggtcgtgctgttcgacgaggtcgagaaggcgcaccccgacgtgttcaacgtgttgctgcaggtcttggatgatggcgtgctgacggatggtcagggccgtaaggtcgacttcaagcagacgctgatcgtgctgaccagcaaccttggggcgcaagcgctgagccagttgcccgaagggggcgacatggcgcaggcgaaacgggatgtgatggatgcggtgcgggctcacttccgccccgagttcctgaaccgactggatgaaacggtgatctttgaccgcttggcacgtgccgacatggcggggatcgtcgacattcaggtgaaccgtctgctgaagcgtctcgccggtcgcaagatcgggttggagttggacgaaggcgcgcgcaagtggctcgccgacgaaggctatgatccggtgttcggggcgcgtccgttgaagcgggtgatccagcgcgcattgcaagacccgctggccgagatgatcttggcaggtgacgtgctggatggggatcttatccccgtgcaggctggtgccgaagggctgatcattggcgaccgcgtggcccccagcaaccgcgccaaaccggacgaagcgaccgtccactag

SEQ ID NO: 7106 - protein, 871 aa, Sulfitobacter sp. EE-36
MDLSKFTERSRGFIHAAQTIATRESHQRLTPEHLLKALLDDDQGLASNLIAAAGGDPARVTETLTLSLGKLPKVSGDAAQVYLDNATAKVLAEAETLAKKAGDSFVPVERVLMALAMVKSGAKTALDAGKVTAQGLNAAINDIRKGRTADTASAEDGYEALKKYSLDLTERAREGKIDPIIGRDEEIRRAMQVLSRRTKNNPVLIGEPGVGKTAIAEGLALRIVDGDVPESLRNKRLLALDMGALIAGAKYRGEFEERLKAVLTEVTEAAGEVILFIDEMHTLVGAGKADGAMDAANLIKPALARGELHCVGATTLDEYRKYVEKDAALARRFQPVMVSEPTVEDTVSILRGIKEKYELHHGVRISDSALVAAATLSHRYITDRFLPDKAIDLVDEAASRLRMEVDSKPEELDALDRQIMQLQIEAEALKKEDDAASKDRLDKLEKELGDLQEKADAMTAQWQGERDRLEGARELKEQLDRARAELEIAKREGNLAKAGELSYGVIPQLERKLGEAEENEADVMVEEAVRPDQIASVVERWTGIPAGRMLEGERDKLLRMEDQLHNRVIGQNLAVKAVSNAVRRARAGLNDEARPLGSFLFLGPTGVGKTELTKAVAEFLFDDENAMVRIDMSEFMEKHAVARLIGAPPGYVGYDEGGVLTEAVRRRPYQVVLFDEVEKAHPDVFNVLLQVLDDGVLTDGQGRKVDFKQTLIVLTSNLGAQALSQLPEGGDMAQAKRDVMDAVRAHFRPEFLNRLDETVIFDRLARADMAGIVDIQVNRLLKRLAGRKIGLELDEGARKWLADEGYDPVFGARPLKRVIQRALQDPLAEMILAGDVLDGDLIPVQAGAEGLIIGDRVAPSNRAKPDEATVH

SEQ ID NO: 7107 - DNA, 2619 bp, Roseovarius nubinhibens ISM
  CDS (1)..(2619): transl_table=11
atggactttgaaaagttcaccgagcggtcgcgtggctttgttcaggcagcgcagacgatcgccatgcgggaaagccatcagaagctggcgcccgaacatatactgaaagcattgatggatgatgaccaggggcttgcgagcaacctgatcaaacgcgcgggcggcgagccggcacgggtggttcaggccttggatatcgccatctcgaaaatccctgtcgtcaccggcgacgcgggccagacctatatggatcagcagaccggcaaggtccttgccgaggccgaaaagctcgccaagaaggcgggtgacagtttcgtgccggtcgagcgcattctgacggcgcttgccatggtcaagagcccggcgaaagaggcgctcgaggccggcggcatcagcgcgcagaagctcaatgaagcgatcaatgatgtccgcaaggggcgcaccgccgacagtgccagcgccgaggacacctatgaggcgctcgagaaatatgcgcgcgacctgacgcgggccgccgacgagggcaagatcgatccgatcattggccgcgacgatgaaattcgccgcgccatgcaggttctgtcgcgccgcaccaagaacaacccggtgctcatcggcgagccgggggtcggcaagaccgccatcgccgaggggctggcgctgcgcatcgtcaatggcgatgtgcccgagagcctcgccgacaagcggctgttgtcgctcgacatgggggcgctcatcgctggggcgaaataccgtggcgaattcgaagagcggctcaaatccgtgctcaacgaggtgacggatgcggcgggcgagatcattctctttatcgacgagatgcacacgctcatcggggccgggaaatcggatggcgcgatggatgcggccaatctgatcaagccggcgctggcgcgcggcgagctgcattgtatcggggccaccacgctcgatgaatatcgcaagcatgtggagaaggacgcggcgctggcgcggcggttccagcccatcgtggtgcaggagccgacggtcgaggacacgatcagcatcctgcgcggcatcaaggagaaatacgagctgcaccatggggtgcggatttcggacagcgccctggtgaccgccgcgacgctcagccatcgctatatcaccgaccggttcctgccggacaaggcgatcgacctgatggacgaggccgccagccggttgcggatggaggtggacagcaagcccgaagagcttgacgcgctcgaccgtgagatcctgcaaaagcagatcgaagcggaggcgctcaagaaagaggatgatgtcgcgtcgaaggaccgtctcgagaagctcgagaaagagctgtcggatctgcaggagcgatcgcgcgagatgaccgcgcaatggcaggccgagcgggacaagctcgccggggcgcgggacctcaaggaacagctcgaccgggcgcggatagagctcgaccatgccaagcgcgagggtgatctcgccaaggcgggtgagctcagctatggcgtgattccggggctggaaaagcagctggcgcaggccgagagtgccgaggccgatggcgtcatggtcgaagaggcggtgcggcccgagcagatcgcgcaggtggtcgaacgctggaccgggattccgacggcaaagatgctcgagggcgagcgcgagaagcttctggggatggaagagaacctgcatcgtcgggtgatcggccagaaccaggcggtgaaggccgtggccaatgcggtgcgccgggcgcgcgccgggctcaatgacgagaaccggccgctgggctcgttcctgttcctcgggccgaccggtgtcggcaagaccgagctcaccaaggcggtggccgagttcctctttgacgacgacagcgccatggtgcgcatcgacatgtcggagttcatggagaaacattcggtggcccgtctgatcggcgcgcctccgggctatgtcggctatgacgagggcggtgtcctcaccgaggcggtgcggcgcagaccctatcaggtggtgctgttcgacgaggtggaaaaggcccacccggatgtgttcaacgtgctgttgcaagtgctcgatgatggcgtgctgaccgatggtcagggccgcaccgtggatttcaagcagacgctgatcatcctgacttcgaaccttggggcgcaggcgctgagccagctgcccgacggggccgatgccagcgacgccaagcgcgacgtgatggatgcggtgcgggcgcatttccggcccgagttcctcaaccggctcgacgagacgatcatctttgaccggctcaagcgcgaggatatggccgggatcgtcacgatccagatggggcgtctgctcaaacggctggcggcgcggaagatcacgctcgatctcgacgatgcggcgcgcaaatggctggccgatgagggctatgacccggtgttcggggcgcggcctctcaagcgggtgatccagcgtgcgctgcaggatccgctggccgaggccttgctggccggggatatcctcgacggcagcacggtgccggtgagcgccgggaccgagggcctgatcatcggcgatcgggtcggcagcaccaagcgccagccgcccgaggatgccgtggtgcattaa

SEQ ID NO: 7108 - protein, 872 aa, Roseovarius nubinhibens ISM
MDFEKFTERSRGFVQAAQTIAMRESHQKLAPEHILKALMDDDQGLASNLIKRAGGEPARVVQALDIAISKIPVVTGDAGQTYMDQQTGKVLAEAEKLAKKAGDSFVPVERILTALAMVKSPAKEALEAGGISAQKLNEAINDVRKGRTADSASAEDTYEALEKYARDLTRAADEGKIDPIIGRDDEIRRAMQVLSRRTKNNPVLIGEPGVGKTAIAEGLALRIVNGDVPESLADKRLLSLDMGALIAGAKYRGEFEERLKSVLNEVTDAAGEIILFIDEMHTLIGAGKSDGAMDAANLIKPALARGELHCIGATTLDEYRKHVEKDAALARRFQPIVVQEPTVEDTISILRGIKEKYELHHGVRISDSALVTAATLSHRYITDRFLPDKAIDLMDEAASRLRMEVDSKPEELDALDREILQKQIEAEALKKEDDVASKDRLEKLEKELSDLQERSREMTAQWQAERDKLAGARDLKEQLDRARIELDHAKREGDLAKAGELSYGVIPGLEKQLAQAESAEADGVMVEEAVRPEQIAQVVERWTGIPTAKMLEGEREKLLGMEENLHRRVIGQNQAVKAVANAVRRARAGLNDENRPLGSFLFLGPTGVGKTELTKAVAEFLFDDDSAMVRIDMSEFMEKHSVARLIGAPPGYVGYDEGGVLTEAVRRRPYQVVLFDEVEKAHPDVFNVLLQVLDDGVLTDGQGRTVDFKQTLIILTSNLGAQALSQLPDGADASDAKRDVMDAVRAHFRPEFLNRLDETIIFDRLKREDMAGIVTIQMGRLLKRLAARKITLDLDDAARKWLADEGYDPVFGARPLKRVIQRALQDPLAEALLAGDILDGSTVPVSAGTEGLIIGDRVGSTKRQPPEDAVVH

SEQ ID NO: 7109 - DNA, 2619 bp, Oceanicola batsensis HTCC2597
  CDS (1)..(2619): transl_table=11
atggacttgagcaagttcacggagcggtcgcgcgggttcattcaggccgcccagacgatcgcgattcgcgaaaaccatcagcgcctggcccccgaacacattctgaaatcgctgctggacgaccccgagggtctggcagccaacctggtcgccaaggccggcggaaacgcccgggccgtgacccaggcgaacgacgccgcactggcgaagatccccgtcgtgaccggcggcggcgaccaggtctacatggacaacgccaccgtgcgcgtcatttccgaggccgagaaggtcgcggacaaggcgaaggacagcttcgtgccggtcgaacggctgctgaccgccctggcgctggtcaagagtgccgccaagcaggcgctggaggcgggcggcgtctcggcccagaagctgaacgaggcgatcaacgacgtgcgcaaggggcggacggcggacagcgccaatgccgaggataccttcgaggcgctggagaaatacgcccgcgacctgacgaaggctgccgaggaaggcaagatcgacccgatcatcgggcgcgacgacgagatccgccgctcgatgcaggtgctgtcgcgccggacgaagaacaatcccgtcctgatcggtgagccgggcgtcggcaagacggcgatcgccgagggcatggccctccgcatcatcaatggcgacgtgccggaaagcctgcgcaacaagaagcttctggcgctggacatgggcgcgctcattgccggtgcgaagtatcgcggcgaattcgaagagcgtctgaaggccatcctgaaggagatcgagagcgccgccggcgagatcatcctcttcatcgacgagatgcacacgcttgtcggagccgggaagaccgacggcgcgatggatgccgccaacctgatcaagccggcgctggcgcgcggagagctgcactgtatcggcgcgaccacgctcgatgaataccgcaagtatgtcgagaaggacgcggcgcttgcccgccgcttccagccggtgatggtcgaggaaccgacggtcgaggacacgatttcgatcctgcgcggcatcaaggagaagtacgaactgcaccacggtgtgcggatcagcgactctgcgctggtggcggcgtcgaccctgtcgaaccgctacatcaccgaccgcttcctgcccgacaaggccatcgaccttgtcgacgaggccgcgtcgcgcctgcggatggaagtcgactcgaaacccgaagagctcgaccaactcgaccggaacatcctgcagatgcagatcgaggtcgaggcgctgaagctcgaggatgacgaggcgtcgaaggagcggcttgcccggcaggagaaggccctggccgagttgcaggagaaatcggccgagatgaccgccaagtggcaggccgaacgcgacaagctgggagaggcgcgcgagctgaaggaacagctggaccgcgcccgcgccgatctcgagatcgccaagcgcaacggcgacctcgcgcgcgcgggcgagctatcctatggcatcatcccgcagctcgagaagcagctgggcgaggccgaacagcaggaagccgaaggcgtcatggtcgaggaagccgtccgtccggagcagatcgcccaggtggtcgagcgctggaccgggattcccacgaccaagatgctcgagggcgaacgggaaaagctgctgcgcatggaggacgggctgcaccggcgtgtcatcggccagcagaccgccgtccgcgccgtggccaatgccgtgcgccgggcgcgcgccgggctgaacgacgagaaccggcccttgggctcgttcctcttcctcggaccgaccggtgtcggcaagaccgagctgaccaaggcggtggccgagttcctgttcgacgacgacagcgcgatggtccgcatcgacatgagcgagttcatggagaagcactcggtcgcccgtctgatcggcgcccctccgggctatgtcggttacgacgaagggggcgtgctgaccgaggcggtgcggcgccggccctaccaggtcgttctgttcgacgaggtggaaaaggcgcatccggatgtcttcaacgtgctgctgcaggttctcgatgacggcgtgctgaccgatgggcagggccgcaccgtggacttcaagcagacgctgatcgtgctgacctcgaacctcggggcgcaggcgttgagccagctgcccgagggggcggatgccggcgcggccaagcgcgacgtgatggatgcggtcaaggcccatttccggcccgagttcctcaaccgtctggacgagatcatcgtcttcgaccggctggcccggggcgacatggcggggatcgtcgacatccagatggcgcggctgctcaagcggctggcgggccggaacatccggctggaactggacgaggcggccaagaagtggctggccgacgaaggctatgatcccgtcttcggggcgcgtccgctcaagcgcgtaatccagaaggcggtgcaggacccgctggcggaggcgcttctggccggagaggtcaaggacggcgatacggtgcccgtcacggccggctccgacgggctgatcctgggcgaccggatcggcaccagcgaccgcggcaagccggacgacgcggtcgtgcactga

SEQ ID NO: 7110 - protein, 872 aa, Oceanicola batsensis HTCC2597
MDLSKFTERSRGFIQAAQTIAIRENHQRLAPEHILKSLLDDPEGLAANLVAKAGGNARAVTQANDAALAKIPVVTGGGDQVYMDNATVRVISEAEKVADKAKDSFVPVERLLTALALVKSAAKQALEAGGVSAQKLNEAINDVRKGRTADSANAEDTFEALEKYARDLTKAAEEGKIDPIIGRDDEIRRSMQVLSRRTKNNPVLIGEPGVGKTAIAEGMALRIINGDVPESLRNKKLLALDMGALIAGAKYRGEFEERLKAILKEIESAAGEIILFIDEMHTLVGAGKTDGAMDAANLIKPALARGELHCIGATTLDEYRKYVEKDAALARRFQPVMVEEPTVEDTISILRGIKEKYELHHGVRISDSALVAASTLSNRYITDRFLPDKAIDLVDEAASRLRMEVDSKPEELDQLDRNILQMQIEVEALKLEDDEASKERLARQEKALAELQEKSAEMTAKWQAERDKLGEARELKEQLDRARADLEIAKRNGDLARAGELSYGIIPQLEKQLGEAEQQEAEGVMVEEAVRPEQIAQVVERWTGIPTTKMLEGEREKLLRMEDGLHRRVIGQQTAVRAVANAVRRARAGLNDENRPLGSFLFLGPTGVGKTELTKAVAEFLFDDDSAMVRIDMSEFMEKHSVARLIGAPPGYVGYDEGGVLTEAVRRRPYQVVLFDEVEKAHPDVFNVLLQVLDDGVLTDGQGRTVDFKQTLIVLTSNLGAQALSQLPEGADAGAAKRDVMDAVKAHFRPEFLNRLDEIIVFDRLARGDMAGIVDIQMARLLKRLAGRNIRLELDEAAKKWLADEGYDPVFGARPLKRVIQKAVQDPLAEALLAGEVKDGDTVPVTAGSDGLILGDRIGTSDRGKPDDAVVH

SEQ ID NO: 7111 - DNA, 2577 bp, Erythrobacter sp. NAP1
  CDS (1)..(2577): transl_table=11
atgaatctcgaaaaattcaccgatcgcgcaaaaggttttctgcagagcgcgcagaccgtcgcgatccgcatgaaccatcagcgcatcacgccgctccacttgctcaaggcattgcttgaggatgaggaaggcatggctgccggcctgatccagcgcgccggtggtgaggctggccttgcggtgagtgcggtcgatatcggtctttccaagatcccgcaggtaacgggcagcggcgcacaatcgacgcctgggctggataacgacgccgttcgcgtgctcgacagcgccgaacaactcgcggacaaggcgggtgatgcgtacgtcacggtcgaacggctgctgaccgcgcttgcgctcgcctctggttcaaccggcgaggcgatgaaggcggcgagcgttactccgcaaagcctgaacgctgcgatcgaggacctgcgcggcggtcgcaaggccgacagcgcgaacgccgaaagcaattacgacgcgatggaaaaattcgcccgcgacctcacgcaggccgcgcgcgacggcaagctcgatccggtcatcggccgcgacgaggaaatccgccgcacgatccagatccttgcgcgccgcaccaagaacaaccccgcgatcatcggtgagcccggcacgggtaagaccgcgattgccgaaggcctcgcgctgcgcatcgcgaatggcgatgtgcccgacagcttgaagggccgcacgttgatgagcctcgacatgggcgctctgatcgctggcgcgaagtatcgcggcgagttcgaagaacgcctcaaatcgatcctggacgaggtgcgccatgccgatggcaatatcatcctgttcatcgacgagatgcacacgctgatcggtgcgggcgcgagcgaaggctcaatggatgcctcaaacctgttaaagcccgcactgtctcgcggcgagcttcactgcatcggggcgaccacgctcgacgaataccagaagtatgtcgagaaggaccccgcgctccagcggcgttttcagccggtctatatcgaggagccgacggtcgaggacaccgttagcatccttcgcggcatcaaggacaagtacgagcttcaccacggcgtgcgaattaccgacaccgcgattgtcgccgcggcaaagctgtccgaccgctacatccagaaccgcttcctccccgacaaggccatcgaccttatggatgaggccgcgagccgcatccgcatggaagtcgaatcgaagcctgaagagatcgaagcgctcgaccgccggatcatccagctcaagatcgaggaatcggcgctcgagaaggaagacgacacggcctcgaaggaccggctggcaaatctgctgaaggagttggccgagcttgaacaggaatcgtccgagctgacgacccgctggcagaacgagcgcgacaagatcgaagccgaaggcaagatcaaggaagagctcgacgcagccaagctcgaactcgaacaggcgcagcgttcgggcgacctcgcgaaagcgggcgagctttcctacggaacgatccccgatcttgagaaaaagctagccgctgctgaagacctcaccgagaacgcgctgctgcgcgaggaagtgaccgaagaggacatcgcaagcgtcgtctcgcgctggaccggcattcccatcgacaagatgatggaaggagaacgcgaaaagctgctggagatggaaagcatcatcggcaagcgcgtgatcgggcagtcgcaggcaatcgaggcggtatcgaaggctgtccgccgagcgcgtgcggggcttcaagaccccaaccgaccgctcggcagcttcctgttcctcggtcccaccggcgtcggcaagaccgagcttaccaaggcgctcgccgaattcctgttcgacgatgaccaggcgctcgtgcgcatcgacatgagcgaattcatggagaagcactctgtcgcacgccttatcggcgcgcctccgggctatgtcggctatgatgagggcggggtgctgaccgaagcggtgcggcgtcgtccgtaccaggtcgtgttgttcgacgaggtcgagaaagcgcacaccgatgtcttcaacgtgctgctgcaggtgctcgacgacgggcatctgaccgacgggcaggggcgcaaggtcgacttctcgaacacgctcattatcctgacatcgaacctcggcagccagcacctctcgaacctgggtgacgaccaaaaggtcgccgatgtcgaggaccaggttatggacgtggttcgcgggcatttccgtcccgagttcctgaaccgcctcgacgagatcatcctgttccaccgtctcgcgatggagcacatggcgccgatcgtggagattcaggtcaagcgcgttcagaagctgctcgacgatcgcaagatcacgctcgagctcaccgatgcggcgctgcgctggcttggccgggttggctacgatccggtctatggcgcacgacctctgaagcgcgcggtgcagcgttaccttcaagacccgctcgccgagatgctcattcagggcaatgtgagcgatggcgttacgctcaaggtcgacgaaggcgatggcgcgctcgaaatgaccgtggtctga

SEQ ID NO: 7112 - protein, 858 aa, Erythrobacter sp. NAP1
MNLEKFTDRAKGFLQSAQTVAIRMNHQRITPLHLLKALLEDEEGMAAGLIQRAGGEAGLAVSAVDIGLSKIPQVTGSGAQSTPGLDNDAVRVLDSAEQLADKAGDAYVTVERLLTALALASGSTGEAMKAASVTPQSLNAAIEDLRGGRKADSANAESNYDAMEKFARDLTQAARDGKLDPVIGRDEEIRRTIQILARRTKNNPAIIGEPGTGKTAIAEGLALRIANGDVPDSLKGRTLMSLDMGALIAGAKYRGEFEERLKSILDEVRHADGNIILFIDEMHTLIGAGASEGSMDASNLLKPALSRGELHCIGATTLDEYQKYVEKDPALQRRFQPVYIEEPTVEDTVSILRGIKDKYELHHGVRITDTAIVAAAKLSDRYIQNRFLPDKAIDLMDEAASRIRMEVESKPEEIEALDRRIIQLKIEESALEKEDDTASKDRLANLLKELAELEQESSELTTRWQNERDKIEAEGKIKEELDAAKLELEQAQRSGDLAKAGELSYGTIPDLEKKLAAAEDLTENALLREEVTEEDIASVVSRWTGIPIDKMMEGEREKLLEMESIIGKRVIGQSQAIEAVSKAVRRARAGLQDPNRPLGSFLFLGPTGVGKTELTKALAEFLFDDDQALVRIDMSEFMEKHSVARLIGAPPGYVGYDEGGVLTEAVRRRPYQVVLFDEVEKAHTDVFNVLLQVLDDGHLTDGQGRKVDFSNTLIILTSNLGSQHLSNLGDDQKVADVEDQVMDVVRGHFRPEFLNRLDEIILFHRLAMEHMAPIVEIQVKRVQKLLDDRKITLELTDAALRWLGRVGYDPVYGARPLKRAVQRYLQDPLAEMLIQGNVSDGVTLKVDEGDGALEMTVV

SEQ ID NO: 7113 - DNA, 2598 bp, Synechococcus sp. RS9917
  CDS (1)..(2598): transl_table=11
atgcaacccacggccgaacagttcaccgaaaaggcctgggccgcgatcctgtcggcccagcagctggcccagagccggcgccatcagcaactggaaaccgaacacctactgcttgcgctgctggagcagaacgggctggcctcgcgcatcctcgagaaggccggtgtctcacctccagcgctcaccagcgcagtggacacccacctgaatcaacaagcggcgctgcaaagtccacccgaatcggtgtatctcggcaaaggcctgagcgatctattcgaccgggccgacgggctcaagcagacctacggcgacagctatctctccatcgagcatctcctgctggccctggccgaggatccacgctgcggcaaacggctcctcagccaggccggggtggatgctcaaggtctgaaaaccgccgttgacgctgtgcgcggcagccagaaagtgaccgatcagaaccccgaaggcacctacgaatctctggaaaaatatggtcgggatctcacggctgcagcccgcgatggcaagcttgatccggtgatcggccgggatgaggaaatccggcgcacgatccagatcctcagccgccgcaccaagaacaatccggtgctgatcggcgaacccggcgtggggaaaacggcgatcgtggaagggctcgctcagcggatcgtcaatggcgatgtgccccaggccctgcagaaccgccagctcatcgccctcgacatgggcgccctgatcgccggtgccaaatatcgcggtgagttcgaagagcgactcaaggccgtgctcaaggaggtgaccgcctctgaagggcggatcgtgctgttcatcgacgaaatccacaccgtggtgggcgccggtgccaccggtggcgccatggatgcgagcaacctgctcaagcctatgctcgcccgcggtgaactgcgctgcatcggtgccaccaccctggatgagcatcgccagcacatcgaaaaggatcccgccctcgagcggcgcttccagcaggtgctggtggatcaacccacggtggaagacacgatctcgattctgcgcggtctcaaggagcgctatgaggtgcaccacggcgtgcgcatcgccgacagcgccctggtggccgccgccgttctcagcagccgctacatcgccgatcgtttcctccccgacaaggcgatcgatctggtggatgaatccgccgcccgcctgaagatggagatcacctccaaaccggaggagatcgacgagatcgatcgcaaaatcctgcagttggagatggaaaaactctccctgggccgcgagtcggatgcagccagccaggaacggctggagcgcctggagcgggaactcgccgaactggctgaacaacagagcagcctcaatgcccagtggcagcaggagaaaggggccatcgatgaactctcggccctcaaggaggagatcgagaaagtgcagctgcaggtggagcaagcgaagcggaattacgacctcaacaaggccgccgagctggaatacggcaccctggccaccctgcagaagcagttaagtgccaaggaggcggccctcgccggcgacgatggcggcagcaacggtgagaaatcgctgttgcgggaggaagtcaccgaagacgacatcgccgaggtgatcgccaagtggaccggcatccccgtggcgaagctggtgcagagtgagatggagaaactgctcggtctcgaagaccagctgcacgaacgggtcgttggccaacagcaggccgtgacggccgtcgccgatgcgatccagcgctcccgcgccggcctcagcgacccgcatcggccgatcgccagcttcctcttcctcggccccaccggcgtcggcaaaaccgaactctccaaggcgctggccgcccagctgttcgacagcgaagacgccatggtgcgcatcgacatgtcggagtacatggagaagcacagcgtcagccgcctgatcggggcgcctccgggttatgtcggctacgaagccggtggccagctcaccgaagccgtgcgacgacgcccctatgcggtgatcctgttcgacgaggtggagaaggcgcaccccgacgtgttcaacgtgatgctccagatcctcgatgacgggcgcgtcaccgatggtcagggccgcaccgtggatttcaccaacgcggtgctcatcctcaccagcaacatcggcagccagtcgatccttgatctcggcggtgatgacagccagcacagcgagatggagcggcgcgtgaatgacgccctcagggcccacttccggcccgagttcctcaaccggctcgatgaaacgatcatcttccacagcctgcgccgcgaggagctgcaccggatcgtgaacctccaggtggagcgactgcggcagcgcctcagcgatcggaaactcggcctcagcatcagcgctggggccaccgactggctcgccaatgccggctacgacccggtgtatggcgctcggcccctgaagcgggcgatccagcgtgaactggaaacaccgatcgccaaggcaatcctggccggacgcttcagcgatggcaccacggtgcaggtagaggtggatcaggagcggctggtgctgcgctga

SEQ ID NO: 7114 - protein, 865 aa, Synechococcus sp. RS9917
MQPTAEQFTEKAWAAILSAQQLAQSRRHQQLETEHLLLALLEQNGLASRILEKAGVSPPALTSAVDTHLNQQAALQSPPESVYLGKGLSDLFDRADGLKQTYGDSYLSIEHLLLALAEDPRCGKRLLSQAGVDAQGLKTAVDAVRGSQKVTDQNPEGTYESLEKYGRDLTAAARDGKLDPVIGRDEEIRRTIQILSRRTKNNPVLIGEPGVGKTAIVEGLAQRIVNGDVPQALQNRQLIALDMGALIAGAKYRGEFEERLKAVLKEVTASEGRIVLFIDEIHTVVGAGATGGAMDASNLLKPMLARGELRCIGATTLDEHRQHIEKDPALERRFQQVLVDQPTVEDTISILRGLKERYEVHHGVRIADSALVAAAVLSSRYIADRFLPDKAIDLVDESAARLKMEITSKPEEIDEIDRKILQLEMEKLSLGRESDAASQERLERLERELAELAEQQSSLNAQWQQEKGAIDELSALKEEIEKVQLQVEQAKRNYDLNKAAELEYGTLATLQKQLSAKEAALAGDDGGSNGEKSLLREEVTEDDIAEVIAKWTGIPVAKLVQSEMEKLLGLEDQLHERVVGQQQAVTAVADAIQRSRAGLSDPHRPIASFLFLGPTGVGKTELSKALAAQLFDSEDAMVRIDMSEYMEKHSVSRLIGAPPGYVGYEAGGQLTEAVRRRPYAVILFDEVEKAHPDVFNVMLQILDDGRVTDGQGRTVDFTNAVLILTSNIGSQSILDLGGDDSQHSEMERRVNDALRAHFRPEFLNRLDETIIFHSLRREELHRIVNLQVERLRQRLSDRKLGLSISAGATDWLANAGYDPVYGARPLKRAIQRELETPIAKAILAGRFSDGTTVQVEVDQERLVLR

SEQ ID NO: 7115 - DNA, 2628 bp, Synechococcus sp. WH 5701
  CDS (1)..(2628): transl_table=11
atgcaccccaccgccgaagcgttcacggagaaggcctgggccgccatcgtggccgcgcagcagctggcccagcagcgccggcagcagcagctggagagcgagcatctgttcgccagcctgatcagccagcccggactggccacccgcatcctcgaaaaggccggcgttgatgtggcggccctgaaccaggcggtggagtcgtacctcgcgagccagcccagtctgggcgcggctccggagaacgtgttcctgggcaagggtctcaatgaggtgctcgatcaggccgaacagctcaaggcgacctacggcgacagcttcatctcgatcgagcacctgctgctggccctggcgatcgacgaccgctgcggcaaacggctgctctctcaggccggcaccagcgctgacaaactcaaggacgccgtccaggccgtgcgcggcaaccagagcgtgaccgatcagaaccccgaaggcacctacgaatccctggagaagtacggacgcgatctcacccaggccgcccgcgacggcaagctggatccggtgatcggccgcgacgaggagatccgccgcacgatccagattctcagccgccgcaccaagaacaacccggtgctgatcggtgaacccggcgtgggcaagacggccatcgtggagggcctggcccagcggatcgtgaatggtgatgtgccccaggcgctgcagaaccgtcagctgatcgccctcgacatgggcgccctgatcgccggggccaagtaccgcggtgagttcgaggagcggctgaaggcggtgctcaaggaagtgacctccagtgaggggcagatcgtgctgttcatcgacgagatccacaccgtggtgggggccggcgccgccggcggctcgatggatgccagcaatctgctcaagccgatgctggcccgcggtgaactgcgctgcatcggtgccaccaccctcgatgagcaccgccagcacatcgagaaggatcccgccctggagcgccgcttccagcaggtgttcgtggatcagcccaccgtggaggacacgatctcgatcctgcgtggcctcaaggagcgctacgaggtgcatcacggcgtgcgcatcgccgacaacgccctggtggcggcagcggtgctctccagccgctacatcgccgatcgctttctcccagacaaggcgatcgatctgatggatgaatcagcggcccgcctgaagatggtgatcacctccaagccggaggcgatcgatgaactcgaccggcgcatcctgcagcttgagatggagaaactgtcgctgggccgcgaatccgatgccgccagcaaggaccgcctggagcggctggagaaggagttggccgatctgagcgagcagcagagcaccctcaatgcccagtggcagcaggagaagggggcgatcgatcagctcagcgccatcaaggaggagatcgagcaggtgcagctgcaggtggagcaggccaagcgtcagtacgacctcaacaaggcggccgagctggagtacggcaccctggcggacctgcacaagaagctggccgtcaaggaagccgaactgaatgcgggtgatggcgagaagaccctgctgcgcgaggaggtcaccgaagacgacatcgccgaggtgatcgccaagtggaccggcatccccgtttcgcggctggtgcagagcgagatggagaaactgctgcatctcgaggatgagctgcacacccgagtgatcggtcagagccaggccgtgaccgctgtggccgatgcgatccagcgctcccgggccggcctctccgaccccaaccgcccgatcgccagcttcctgttcctcggccccaccggcgtgggcaagacggagctctccaaggccctggcctcccagctgtttgacagcgacgacgccatggtgcgcattgacatgagcgaatacatggagaagcacgccgtgtcccgcctgatcggagcgcctccgggctacgtgggctacgaggagggtggccagctcaccgaagcggtgcggcgccggccatatgccgtgatcctctttgatgaggtggagaaggcccaccccgatgtcttcaacgtgatgctgcagatcctcgatgacggccgcgtcaccgatggccaggggcgcacagtggatttcaccaacacggtgctgattctcaccagcaacatcggcagcagctcgatccttgatctggccggtgatccggcccgccacggcgagatggagaagcgggtgaacgaggccctgcgcgctcacttccggcccgagttcctcaaccgcctggatgaaacgatcatcttccacagcctgcgcgccgaggaactgcgccagatcgtggagctgcaggtgcaacggctgcgccagcgcctggaggaccgcaagctcggcctcgatctcgatggcgccgccctcgactggctcgcgggcgttggttacgacccggtctacggggctcggccgctgaagcgggcgatccagcggcagctggaaaccccgatcgccaaggcgatcctggccggtcagttccccgagggcagcacgatcgcggtggatgtggagaccggagcggagccgccaaggctgcgcttccagctcgccaggagccgggagctggcgttggtgtaa

SEQ ID NO: 7116 - protein, 875 aa, Synechococcus sp. WH 5701
MHPTAEAFTEKAWAAIVAAQQLAQQRRQQQLESEHLFASLISQPGLATRILEKAGVDVAALNQAVESYLASQPSLGAAPENVFLGKGLNEVLDQAEQLKATYGDSFISIEHLLLALAIDDRCGKRLLSQAGTSADKLKDAVQAVRGNQSVTDQNPEGTYESLEKYGRDLTQAARDGKLDPVIGRDEEIRRTIQILSRRTKNNPVLIGEPGVGKTAIVEGLAQRIVNGDVPQALQNRQLIALDMGALIAGAKYRGEFEERLKAVLKEVTSSEGQIVLFIDEIHTVVGAGAAGGSMDASNLLKPMLARGELRCIGATTLDEHRQHIEKDPALERRFQQVFVDQPTVEDTISILRGLKERYEVHHGVRIADNALVAAAVLSSRYIADRFLPDKAIDLMDESAARLKMVITSKPEAIDELDRRILQLEMEKLSLGRESDAASKDRLERLEKELADLSEQQSTLNAQWQQEKGAIDQLSAIKEEIEQVQLQVEQAKRQYDLNKAAELEYGTLADLHKKLAVKEAELNAGDGEKTLLREEVTEDDIAEVIAKWTGIPVSRLVQSEMEKLLHLEDELHTRVIGQSQAVTAVADAIQRSRAGLSDPNRPIASFLFLGPTGVGKTELSKALASQLFDSDDAMVRIDMSEYMEKHAVSRLIGAPPGYVGYEEGGQLTEAVRRRPYAVILFDEVEKAHPDVFNVMLQILDDGRVTDGQGRTVDFTNTVLILTSNIGSSSILDLAGDPARHGEMEKRVNEALRAHFRPEFLNRLDETIIFHSLRAEELRQIVELQVQRLRQRLEDRKLGLDLDGAALDWLAGVGYDPVYGARPLKRAIQRQLETPIAKAILAGQFPEGSTIAVDVETGAEPPRLRFQLARSRELALV

SEQ ID NO: 7117 - DNA, 2619 bp, Synechococcus sp. WH 7805
  CDS (1)..(2619): transl_table=11
atgcaacccacggccgaacaattcactgagaaagcctgggccgccatcctttcggcccagcagctggcccagaaacgccgacatcagcagctggaaactgaacacctgctccaagccctcctggaacaggatggtttggccagccgcatcctcgaaaaagcgggagtcacgcctgccgccctgcagagcagcgtggaaagtcacctcacccagcaacctgctctgcagaccccgcctgagtctgtgtatttgggcaagggcctgagcgacctgcttgatcgggccgacagtctcaaacaaaactatggcgacagctacatctccgttgagcacctgctgctggccctggcagacgacagccgctgtggacgacggctgctcacgcaggccggcgctgaccccgactcactcaaaaatgccatcaacgcggtgcggggcagtcagaccgtgacggatcagaacccggagggctcctacgagtccctggaaaaatatggacgggatctcacagccgcagccagggacggcaagctcgacccggtgatcggtcgtgatgaggaaatccgccgcaccattcagatcctcagccgccggacgaagaacaatccggtgctgatcggggaaccaggggtcggcaaaacagcgatcgtggaaggactggcacaacgcatcgtcaacggcgacgttccccaggccctgcagaaccgacagctcatcgccctcgacatgggctccctgatcgccggtgccaaatacagaggggagttcgaggagcggctgaaggccgtgctcaaggaggtgaccgcctccgacggcgggatcgtgctcttcatcgacgagatccacaccgtggtcggtgccggtgccaccggaggagccatggatgccagcaatctgctcaagccgatgcttgctcggggcgaactgcgctgcatcggcgccaccaccctcgatgaacaccgccagcacatcgagaaggatccggccctcgagcgccgcttccagcaggtgcttgtggatcagcccaccgtggaagatacggtgtcgatcctgcgtggactgaaggagcggtatgaagtgcaccacggcgtgcgcattgccgacagcgccctcgtggcggcggcggttctgagcagccgctacatcgccgatcgcttcctgcccgataaggcgatcgacctggtagatgaatccgccgcgcgcctgaagatggagatcacctccaaaccggaggagatcgacgagatcgaccgcaagattctgcagctagagatggagaagctgtctctcggccgcgagtccgacgccgccagtcaggaaaggttggaacgccttgagcgagagctggcggaactctccgaacagcagagcaccctcaacgcccagtggcagcaggagaaaggcgccattgatgacctctcgaatctgaaagaagagatcgagcgcgtgcagctgcaggtggagcaagccaagcgcagctacgacctgaacaaagctgccgaactggaatacggaacgctggccactctgcagaaacagctagccgacaaggaggcagcccttgcggccgcagacgacggagggcaggacaagtccctgcttcgcgaggaagtcaccgaagacgacatcgctgaggtgatcgccaaatggacaggcattcccgtggcgaaactggtccaatcggagatggccaagctgctgagcctggaaaccgagctgcacgaacgcgtcgtgggtcagcagcaggcggtcaccgctgtcgccgatgcgatccagcgatcccgtgctggcctcagtgatcccaaccgaccgatcgccagcttcctgttcctgggcccgaccggggtgggcaagaccgaactgtcaaaggcattggcggctcagctcttcgacagcgaggacgccatggtgcgcatcgacatgtcggagtacatggagaagcacacggtgagtcggctgatcggagcacctcccggctatgtggggtacgaggccgggggccagctcacggaggctgtccgacgccggccctacgccgtgatcctctttgacgaggtggagaaggcccaccccgatgtgttcaatgtgatgctgcagatcttggatgatgggcgcgtcaccgatggtcaggggcgaacggtggatttcaccaatgctgttctgatcctcaccagcaacatcggcagccagtcgatccttgacctcgggggcgacgacggtcagcacaccgaaatggagcgacgggtgaatgacgctctgcgcgctcacttcaggccggaatttctcaacaggcttgatgatcagatcatcttccacagcctcaggcgggatgagttgcgccggatcgtgaccctccaggtggagcgcctgcgctctcggctggatgagcgcaagctggggctcaatctcaccgaagcagccaccgactggctggccaatgccggctacgaccctgtctatggcgcacgcccactcaagcgcgccgttcagcgggaactggaaacgcccatcgccaaagccatcctttccgggcggtacggcgacggtgacaccgtccatgtggatgttgaacctgttgtcactggccaggagaaccagcagcagttggccctgcgctga

SEQ ID NO: 7118 - protein, 872 aa, Synechococcus sp. WH 7805
MQPTAEQFTEKAWAAILSAQQLAQKRRHQQLETEHLLQALLEQDGLASRILEKAGVTPAALQSSVESHLTQQPALQTPPESVYLGKGLSDLLDRADSLKQNYGDSYISVEHLLLALADDSRCGRRLLTQAGADPDSLKNAINAVRGSQTVTDQNPEGSYESLEKYGRDLTAAARDGKLDPVIGRDEEIRRTIQILSRRTKNNPVLIGEPGVGKTAIVEGLAQRIVNGDVPQALQNRQLIALDMGSLIAGAKYRGEFEERLKAVLKEVTASDGGIVLFIDEIHTVVGAGATGGAMDASNLLKPMLARGELRCIGATTLDEHRQHIEKDPALERRFQQVLVDQPTVEDTVSILRGLKERYEVHHGVRIADSALVAAAVLSSRYIADRFLPDKAIDLVDESAARLKMEITSKPEEIDEIDRKILQLEMEKLSLGRESDAASQERLERLERELAELSEQQSTLNAQWQQEKGAIDDLSNLKEEIERVQLQVEQAKRSYDLNKAAELEYGTLATLQKQLADKEAALAAADDGGQDKSLLREEVTEDDIAEVIAKWTGIPVAKLVQSEMAKLLSLETELHERVVGQQQAVTAVADAIQRSRAGLSDPNRPIASFLFLGPTGVGKTELSKALAAQLFDSEDAMVRIDMSEYMEKHTVSRLIGAPPGYVGYEAGGQLTEAVRRRPYAVILFDEVEKAHPDVFNVMLQILDDGRVTDGQGRTVDFTNAVLILTSNIGSQSILDLGGDDGQHTEMERRVNDALRAHFRPEFLNRLDDQIIFHSLRRDELRRIVTLQVERLRSRLDERKLGLNLTEAATDWLANAGYDPVYGARPLKRAVQRELETPIAKAILSGRYGDGDTVHVDVEPVVTGQENQQQLALR

SEQ ID NO: 7119 - DNA, 2583 bp, Pseudoalteromonas tunicata D2
  CDS (1)..(2583): transl_table=11
atgcgattagatagactgacaagtaaattccaagctgcgatatccgatgctcaatctttagcgttgggtcgagatcaccaatttatagaaccggtgcatttaatgtatgcacttttacagcaaaccggttcaagtgtgcgagcattgttagcaaaagctggagtgaactcttctgagatgaatggcaaagtatcacaagccatggaaaagctatttaaagtagaaggcattggtggtgatgtacaattatcaccaaacatggttaatttactgaatttatgtgataaatacgcgcaaaaacgcaaagataaatttatctcaagtgagatttttattttagctgcctgtgaagataaagggcctttgggcgaaatatttaaaacctttggtttaaatgccactaaagtagaaaccgcaattcaagctattcgtggtggacaaaaagttgaagatgccagcgctgaagattctcgccaatcactcgaaaaatacacggttgatttaactgagcgggcagagctcggaaagcttgatcccgttattggtcgtgatgacgaaattcgccgcacgattcaagtattacaacgtcgtactaaaaataatccagtattaatcggtgaacccggtgtgggtaaaacagccatagctgaaggattagcacagcgaattattaatggtgaagtgcctgagggtttaaaagataagcgagtgctttcactcgatttaggtgcgcttgttgctggggctaaatatcgtggtgaatttgaagaacgattaaaagcagtgctgaatgagcttgccaaagaagaagggcgcgttattttatttattgatgaaattcataccattgtcggcgcaggtaaaagtgatggtgcgatggatgcgggtaatatgctcaaacctgcgttatcgcgcggagagctccattgtgtgggggcaaccactctagatgaataccgtcaatacatcgaaaaagatgcggcacttgagcgtcgctttcaaaaagtgctggttgaagagccgacagtcgaagacaccatcgcaattttacgtggtttaaaagagcgctatgaactacatcacagtgttgaaattaccgatccggccattgtggcggcagcaacgctatcacatcgttatataagtgaccgtcaactcccagacaaagcaattgatttaattgatgaagcaggctcatctttacggatgcaaatcgattcaaaaccagaagtgctagataaacttgagcgtaaaattattcaattaaaacttgaagataacgcgcttgccaaagaaaaagatgaagcgagcttgcagcgccagcaagatatcaaacaacaaattttagtattagataaacaatataatgagttagatgaagtttggattgcagaaaaagcctcgcttcaaggtacacaagttattaaaacagaattagaacaagcgcggttagatttagaaattgctcgccgagcgagcgatttacaacgcatgtcagagctacaatatggccgcattccagaactagagcgcaaacttgatttagcatcgcaagttgaaatgcaagatatgcgtttattgcgaaataaagtgggcgaaaatgaaattgctgaaattttatcgcgttggaccggtattccagtcaccaaaatgttacaaggtgaacgcagtaaattattaaaaatggaagaaaacctccacacccaagtgattggccaagatgaagctgtcacagctgtcgctaatgcaattcgccgctcgcgagctgggctttcagatccaaatcgtccgattggctctttcttatttttaggcccgaccggggtcggaaaaaccgaattaaccaaagcattggcaacgttcttatttgataccgaagatgccatggtacgtatcgatatgtcggagtttatggaaaagcactctgtggctcgattagtgggtgcgccgccaggttatgttggttatgaagaaggtggctatttaaccgaagctgttaggcgcaaaccttatagcgttattttgcttgatgaaatcgaaaaagcacatcccgatgtatttaatattttgttacaagtgcttgatgatggccgtttaacggacggacaagggcgcacggttgattttaaaaataccgtgatcattatgacatcaaacttaggttctgatgttattcaagagcatgcggttaacagtgattatgagcgtttaaaagctatgttaatggacgtgctcacaactcaatttaggccagagtttattaatcgaattgatgataccgtggtatttcatccactttcgaccgagcacattaaacatattgcggatattcagttagctaaattaaaacaacgtttagttgataatggatatacgatgcggttaaccgatgaagcgcttagccagttagcgcttgctggatttgatcctgtgtttggggcaagaccattaaaacgagctattcaacactatattgaaaatccattagcgcaaaaattactagaaggtgattatgctgctggtagttgctttgttattgctctggtcgatggacagtttagtattaccgttgatgctcaataa

SEQ ID NO: 7120 - protein, 860 aa, Pseudoalteromonas tunicata D2
MRLDRLTSKFQAAISDAQSLALGRDHQFIEPVHLMYALLQQTGSSVRALLAKAGVNSSEMNGKVSQAMEKLFKVEGIGGDVQLSPNMVNLLNLCDKYAQKRKDKFISSEIFILAACEDKGPLGEIFKTFGLNATKVETAIQAIRGGQKVEDASAEDSRQSLEKYTVDLTERAELGKLDPVIGRDDEIRRTIQVLQRRTKNNPVLIGEPGVGKTAIAEGLAQRIINGEVPEGLKDKRVLSLDLGALVAGAKYRGEFEERLKAVLNELAKEEGRVILFIDEIHTIVGAGKSDGAMDAGNMLKPALSRGELHCVGATTLDEYRQYIEKDAALERRFQKVLVEEPTVEDTIAILRGLKERYELHHSVEITDPAIVAAATLSHRYISDRQLPDKAIDLIDEAGSSLRMQIDSKPEVLDKLERKIIQLKLEDNALAKEKDEASLQRQQDIKQQILVLDKQYNELDEVWIAEKASLQGTQVIKTELEQARLDLEIARRASDLQRMSELQYGRIPELERKLDLASQVEMQDMRLLRNKVGENEIAEILSRWTGIPVTKMLQGERSKLLKMEENLHTQVIGQDEAVTAVANAIRRSRAGLSDPNRPIGSFLFLGPTGVGKTELTKALATFLFDTEDAMVRIDMSEFMEKHSVARLVGAPPGYVGYEEGGYLTEAVRRKPYSVILLDEIEKAHPDVFNILLQVLDDGRLTDGQGRTVDFKNTVIIMTSNLGSDVIQEHAVNSDYERLKAMLMDVLTTQFRPEFINRIDDTVVFHPLSTEHIKHIADIQLAKLKQRLVDNGYTMRLTDEALSQLALAGFDPVFGARPLKRAIQHYIENPLAQKLLEGDYAAGSCFVIALVDGQFSITVDAQ

SEQ ID NO: 7121 - DNA, 2577 bp, Photobacterium sp. SKA34
  CDS (1)..(2577): transl_table=11
atgcgtcttgaccgatttaccagcaaatttcaatcggcaatatctgatgctcagtcgctggctctaggacgagaccatcagtatatcgagcctgcacaccttatggtggctttgcttaatcaagatggtagcaccgtgcgtccgttgctcacccttttgaacatcgatattacccagttacgttcacgcttagctgagctattagatcgcatgcctaaagtaacgggtattggtggtgaagttcagctttcacatggtatgggcgtactgcttaatatgtgcgataagttggcacaaaagcggaaagataaattcatttcttcagagctatttattttagcggcggctgaagataaaggcccattgggtgagctatttaaagaattaggtttaacggcgaaaaatattgaacaagcgattgatcaagttcgtggtggacagaaagtcgatgatcctaatgccgaagaaaatcgtcaagcactggaaaaatatactgttgatttaaccgaacgtgctgagcagggcaagcttgatcctgttatcggtcgtgatgatgaaattcgccgtactattcaagtattgcaacgccgtaccaaaaataacccagtgatcattggtgaaccaggtgtgggtaaaaccgcgattgttgaagggttagcacaacgtattgttaatggtgaagtacctgaaggtttacgtgataagcgtgttctttctctcgacatgggctcattgattgcaggtgcaaaattccgtggtgaatttgaagagcgcttaaaagcggtacttaatgagttatcgcaagaagatggccgtgtaattttgttcatcgatgaaattcacaccatggttggtgcaggtaaaggcgaaggctcaatggatgccggtaatatgctaaaacctgcattggcacgtggtgagcttcattgtgtcggtgctacaacattagatgaataccgtcagtatattgagaaagatgcagcacttgaacgtcgtttccaaaaagtgctggtggatgaaccaagtgtggaagataccattgcgatccttcgtggtttgaaagagcgttacgagcttcatcaccatgtggaaattaccgatcctgcaattgtagctgctgcaacattgtcacatcgttacatttcagatcgccagttacctgataaagcaattgatcttatcgatgaagcggcatcaagcattcgtatgcaaattgattcaaagcctgaatcattagatcgtcttgagcgtcgtattattcaacttaagattgaacagcaagcgctagaaaaagaagatgatgctgcaagtaataaacgtctcagtgatctgcttgaagaacttgatctaaaagagcgcgaatatgcagagcttgaagaagtgtggaatgctgaaaaagcagcactgtcaggtactcaacatattaaagcagagcttgaacaagcgcgtactgatgtggaaattgctcgtcgtgctggcgatttaaaccgcatgtcagagctacaatacggtcgtattcctgagttagagaagcagttagatcttgctgcgcaagcagaaatgcaagaaatgaccttgttgaaaaacaaagtcactgataccgaaattgccgatgttttatcaaaagcgacaggtattccggtatcaaaaatgctcgaaggtgaacgtgataaattgcttcgtatggaagatgaattacaccatcgtgtcattggtcaagatgaagcggtcgtcgctgttgctaacgccattcgtcgtagccgtgcaggtcttgctgatccacaacgcccaattggctctttcttattcttaggcccaacaggtgtaggtaaaacagagctatgtaaatcactggctaactttatgtttgatagtgaagaagcaatggttcgaatcgacatgtccgaatttatggagaaacactcagtcgctcgtctagtgggtgcgcctccaggttacgtcggttatgaagaagggggttacctcacagaagcggttcgtcgtcgtccatattcagtagtattactagatgaagtagaaaaagcacaccctgatgtgttcaatatcttacttcaagtattagatgatggtcgtttaactgacggtcaaggtcgtacagtagatttccgtaatacggtgatcatcatgacatcgaacttgggctcagatcgtattcaagagcatttcggcaaccttgactatgaggggatcaaagcacttgtaatggacgttgttggacaacattttcgccctgagtttataaaccgtgttgatgaaaccgtcgtgttccacccgcttggtaaagaaaacatcaagaatattgcaagcattcagcttgaacgattgaaaaaacgcctcgctgaaaatgacttccgtctagatgttgaagacagtgcgttagatatgattgctgaagctggatttgatcctgtttatggtgcgcgtccattgaaacgtgctattcagcaatatattgaaaacccactagcgcaagacttgttatcaggtaaatttgttccgggtaaagtgataacactgtctgtgaaagatgatgtaattgttgctgagcaaatttaa

SEQ ID NO: 7122 - protein, 858 aa, Photobacterium sp. SKA34
MRLDRFTSKFQSAISDAQSLALGRDHQYIEPAHLMVALLNQDGSTVRPLLTLLNIDITQLRSRLAELLDRMPKVTGIGGEVQLSHGMGVLLNMCDKLAQKRKDKFISSELFILAAAEDKGPLGELFKELGLTAKNIEQAIDQVRGGQKVDDPNAEENRQALEKYTVDLTERAEQGKLDPVIGRDDEIRRTIQVLQRRTKNNPVIIGEPGVGKTAIVEGLAQRIVNGEVPEGLRDKRVLSLDMGSLIAGAKFRGEFEERLKAVLNELSQEDGRVILFIDEIHTMVGAGKGEGSMDAGNMLKPALARGELHCVGATTLDEYRQYIEKDAALERRFQKVLVDEPSVEDTIAILRGLKERYELHHHVEITDPAIVAAATLSHRYISDRQLPDKAIDLIDEAASSIRMQIDSKPESLDRLERRIIQLKIEQQALEKEDDAASNKRLSDLLEELDLKEREYAELEEVWNAEKAALSGTQHIKAELEQARTDVEIARRAGDLNRMSELQYGRIPELEKQLDLAAQAEMQEMTLLKNKVTDTEIADVLSKATGIPVSKMLEGERDKLLRMEDELHHRVIGQDEAVVAVANAIRRSRAGLADPQRPIGSFLFLGPTGVGKTELCKSLANFMFDSEEAMVRIDMSEFMEKHSVARLVGAPPGYVGYEEGGYLTEAVRRRPYSVVLLDEVEKAHPDVFNILLQVLDDGRLTDGQGRTVDFRNTVIIMTSNLGSDRIQEHFGNLDYEGIKALVMDVVGQHFRPEFINRVDETVVFHPLGKENIKNIASIQLERLKKRLAENDFRLDVEDSALDMIAEAGFDPVYGARPLKRAIQQYIENPLAQDLLSGKFVPGKVITLSVKDDVIVAEQI

SEQ ID NO: 7123 - DNA, 2580 bp, Neptuniibacter caesariensis
  CDS (1)..(2580): transl_table=11
atgcgcccagataagtttactgcaaaactacaggaagcccttgcggatgctcaatcgctcgctgtgggcttagatcataactacattgaacctgttcatctattgagtgcactgctggatcaacagtcaggaagcagtgcgcaactgcttgtacaggcaggagctgatttaaaccgtctgaaacaggcaatccaagcagaattaaatggcatggccagggtcagcaatcccgatggcgaactgcgcttttcgcaagactgcgcccgtgttttcaacaaaactgacaagatcgcgcagcagaaaggtgaccagtttatcgccagtgaactgctgctaatagccttagtcgaagataaatcgtccgcgggtaagttattaagagatgctggcgttaccttacagcgtttggaacaagttattgatcgggttcgtggaggtgagtctgtgcaggatgctaatgctgaagagaaccgtcaggctttagataagtactgtattgatctgactgaacgagcagagtcagggaagttagaccctgttatcggtcgagatgatgagattcgcagaaccattcaggttcttcagcgcaggaccaagaacaatccggtgttgataggtgagccgggggttggtaagacggcgattgtcgaagggctagcgcagcgaatcgtcaacggtgaagtgcctgaaggcctgaagaataagttggtgctttcattggacatgggggctctgatcgcgggggcgaagttccgcggtgaattcgaagaacgccttaaagcggtgctcaatgaactctctaaacaggaaggacagatcatactgtttattgatgagctgcataccatggttggcgcaggtaaaggcgaaggggctatggatgcaggcaacatgctaaagcctgcgcttgcgcggggtgagctgcattgtgttggtgccacgacgcttgatgagtatcgccaatatgtggagaaggatgccgccttagagcgccgtttccagaaggttcaggtggatgaacccgatgaagagtcgaccatcgccatactgcgtgggctgaaggagcgttatgagattcatcacagtgttgatatcaccgactcagcgattatagccgctgccaagttgtctcaacgttacatcactgatcgacaactgcctgataaggcaatcgacctgattgatgaagctgcctcccggatacgtatggagatggattccaagccagaagatatggaccgcctggagcgccgtctcattcaactgaaaatggaaagagaggcgctgaaaaaggaaaaagatgcggctgcaaaacagaggcttgctgaacttgaaagtaccattcaaagcatcgagaaagagttttccgatctggatgaagtctggaaagcagaaaaagttgctctgcaagggtcgcagcagattaaggaagaactggatcttgcgcgaatagagctggaaaagttcactcgcgcgggcgacctgcagaagatgtctgaacttcagtacgggaaaattcctgagttggaaaagaaactcgcagcggcggctgaagcagaagagtcggggcagcaggagatgaaactgctccgtaataaagtaacggaggaagaggtcgctgaagttgtttctcgctggacgggcatcccggtaagcaaaatgctggagggcgagagagataaactcctgcgaatggaatctaccctgcataatcgggttgtgggtcaggaagaggcagtgacggctgtatccaatgctgttcgccgttcgcgagcgggattggctgatcctaatcggcctaatggttcgtttctgtttttaggccctaccggggtgggtaaaacagaactttgtaaagcattggcaagttttctgtttgatacagaagaggcgatggtgcggatcgatatgtctgaatttatggagaagcactctgttgctcgattgatcggcgcgcctccaggctatgtgggttatgaagagggtggttatctgaccgaagctgtacggagaaagccgtattctgtactgttgcttgatgaagtagagaaagctcacccggatgtattcaatattttactccaggttctcgaagatggccgtttaactgatggtcaggggcgtacggtcgatttccgaaatacgattgttgtgatgacgtcgaatctgggttcagatttgatccagaatttcagtgatgatgacgattatcagttaatgcataacgcggtaatggaagcggtaggtgtgcacttccgccctgaagttatcaaccgtatcgatgaggtggtggttttccacagtctgcagaaaagtcaggtggccggtattgccaaaattcagctacagcgcctgcaaagccgtttagctgaacgagagttgagcctaacattgacaagcactgcgatggacaagctagtcgacgtcggttttgaaccaatctatggtgcgcgtccattgaaacgagcgatacaacaatggattgaaaacccgctggctcaggaaattctcgcagggaagtatgcagctggaaccgagattgctgttgatgtggagcagggagaatttgtcttccgttaa

SEQ ID NO: 7124 - protein, 859 aa, Neptuniibacter caesariensis
MRPDKFTAKLQEALADAQSLAVGLDHNYIEPVHLLSALLDQQSGSSAQLLVQAGADLNRLKQAIQAELNGMARVSNPDGELRFSQDCARVFNKTDKIAQQKGDQFIASELLLIALVEDKSSAGKLLRDAGVTLQRLEQVIDRVRGGESVQDANAEENRQALDKYCIDLTERAESGKLDPVIGRDDEIRRTIQVLQRRTKNNPVLIGEPGVGKTAIVEGLAQRIVNGEVPEGLKNKLVLSLDMGALIAGAKFRGEFEERLKAVLNELSKQEGQIILFIDELHTMVGAGKGEGAMDAGNMLKPALARGELHCVGATTLDEYRQYVEKDAALERRFQKVQVDEPDEESTIAILRGLKERYEIHHSVDITDSAIIAAAKLSQRYITDRQLPDKAIDLIDEAASRIRMEMDSKPEDMDRLERRLIQLKMEREALKKEKDAAAKQRLAELESTIQSIEKEFSDLDEVWKAEKVALQGSQQIKEELDLARIELEKFTRAGDLQKMSELQYGKIPELEKKLAAAAEAEESGQQEMKLLRNKVTEEEVAEVVSRWTGIPVSKMLEGERDKLLRMESTLHNRVVGQEEAVTAVSNAVRRSRAGLADPNRPNGSFLFLGPTGVGKTELCKALASFLFDTEEAMVRIDMSEFMEKHSVARLIGAPPGYVGYEEGGYLTEAVRRKPYSVLLLDEVEKAHPDVFNILLQVLEDGRLTDGQGRTVDFRNTIVVMTSNLGSDLIQNFSDDDDYQLMHNAVMEAVGVHFRPEVINRIDEVVVFHSLQKSQVAGIAKIQLQRLQSRLAERELSLTLTSTAMDKLVDVGFEPIYGARPLKRAIQQWIENPLAQEILAGKYAAGTEIAVDVEQGEFVFR

SEQ ID NO: 7125 - DNA, 2607 bp, Flavobacteria bacterium BBFL7
  CDS (1)..(2607): transl_table=11
atgaatatgaatcaacttaccataaaatcgcaagaagcactccaggctgcgcaacaacttgcacaagagtcgggtcatcaatttatagaaaacctgcacttattaaaaggaatgatacagatagatgaaaatgtattaccatttatctttaaaaaacttaatgtaaacctaacgctagtaattcaacttatagacagtagtcttactgctcttcctaaagtagaaggtggcgacattcaattatctagagacgcatctagaacggtcaatagtgccatgagtatcgctacaaaaatggatgatgaatacgttagtttagagcatttgttattatcattatttgatagtaaatcaacagcggcacgtatccttaaagatcaaggaatttcaaaaaatcagttagaaaaggcgatagaagaattaagacaaggaagtcgtgtaaccagtgccagcgccgaggagacttataacagtctaaataaatatgctaaaaatctcaatcagctcgcagaccagggaaaattagatcctgtaataggtagagatgaagaaatcagacgtattttacaaattctttccagacgtactaaaaacaaccctatgttagtaggtgaacctggtgtaggtaaaactgcaattgcagaaggtcttgcccataggattgtaggtggtgatgtacccgataaccttaagaataaacaaattttttcattagatatgggtgcgcttatcgctggtgctaaatataaaggtgaatttgaagagcgattaaaagcggttataaaagaggtcacagaaagctcaggagatattgtattatttatagatgagatacatactctagtaggtgctggtggcggacaaggagccatggatgctgcaaatattttaaagcctgctttagcacgtggtgaattgcgagctataggagccactaccctagatgagtatcaaaaatattttgaaaaagataaagcgctagaaagacgtttccaacgtgttttagtggacgaacctgatactgaaagtgcgatctctatattgcgtggtattaaggataaatacgagacacatcataaagttcgcataatggatgaagcgattataggtgccgtagaattatctcaacgttatataactaatcgttttttaccagataaagctattgacttgatggatgaagctgcagcaaaattacgtatggagataaattcaaagcctgaagagttggatgttctagatcgtaagattatgcaattagaaatcgagattgaggcgattaaacgtgagaaagacgaatcaaagttaaaagcgttacgtagtgaactagctaattttaaagagtctcgcaatgaaattaatgcgcaatgggtgaatgaaaaagacatcgtagatgccattcaaaacgcaaaaagtgatatagaaaactataaacaacaggcagaacgtgcagaacgtgaaggagattatggccaagtagcagaactgcgctacggtaaaatcaaagatgcgcaagaagaattagatcgattacaaaaagaagttgcgcttaatgatacagggaaatctttaattcaagaagaagtaacttatgatgacatcgcagaagtgattgcaaaatggacgggtatacctgttactaaaatgcttcaaagtgagcgcgataaattattaaaacttgaagatgagttacacaaacgtgtcgtaggtcaacaagaagctattattgcagtgagtgatgccgtgagacgtagtcgcgctggattacaagatcagaaaaagccagtaggttcatttcttttcttaggtactacaggtgtcggtaaaacagaactcgcaaaagctctagcagattatctctttaatgacgaaaactccatgacacgtatcgatatgagtgaataccaagaacgacatagtgtgagtcgacttgtaggtgctcctccaggatatgtaggttatgatgaaggtggacaactgacagaagctgttagaagaaaaccatatagtgtcgtcttgttagatgagatagaaaaagctcatccagacacttttaatattttattacaagtacttgatgaaggaagattaactgataataaaggtcgtgttgcagatttcaaaaacactattatcattatgacatctaacatgggcgcaaatttgattcaagatcgttttgagaaggctaacactgtaacagaatctctattggaggaaacaaaaaaagaggttttaatagcgttaaagcagcgtgtcagaccagaatttatcaatcgtattgatgatattgtgatgtttacaccactcaccaaaaatgaaattcaacaaattgtaagtttacagttaaaaggtgttacaaaaatgttagctcttcaaggaattacaatagatgctacaccagcagccattgaactgttagcagtacaaggttatgatccacagtatggagcgagacctgttaaaagagtgattcaaaaaaatgtgcttaatgaattatctaaacagatcttatcaggtgaaatatctacagagagtatcgtattgattgatgcctttgagaatcaaatagttttcaggaatgaaacagatgctgtagaggtataa

SEQ ID NO: 7126 - protein, 868 aa, Flavobacteria bacterium BBFL7
MNMNQLTIKSQEALQAAQQLAQESGHQFIENLHLLKGMIQIDENVLPFIFKKLNVNLTLVIQLIDSSLTALPKVEGGDIQLSRDASRTVNSAMSIATKMDDEYVSLEHLLLSLFDSKSTAARILKDQGISKNQLEKAIEELRQGSRVTSASAEETYNSLNKYAKNLNQLADQGKLDPVIGRDEEIRRILQILSRRTKNNPMLVGEPGVGKTAIAEGLAHRIVGGDVPDNLKNKQIFSLDMGALIAGAKYKGEFEERLKAVIKEVTESSGDIVLFIDEIHTLVGAGGGQGAMDAANILKPALARGELRAIGATTLDEYQKYFEKDKALERRFQRVLVDEPDTESAISILRGIKDKYETHHKVRIMDEAIIGAVELSQRYITNRFLPDKAIDLMDEAAAKLRMEINSKPEELDVLDRKIMQLEIEIEAIKREKDESKLKALRSELANFKESRNEINAQWVNEKDIVDAIQNAKSDIENYKQQAERAEREGDYGQVAELRYGKIKDAQEELDRLQKEVALNDTGKSLIQEEVTYDDIAEVIAKWTGIPVTKMLQSERDKLLKLEDELHKRVVGQQEAIIAVSDAVRRSRAGLQDQKKPVGSFLFLGTTGVGKTELAKALADYLFNDENSMTRIDMSEYQERHSVSRLVGAPPGYVGYDEGGQLTEAVRRKPYSVVLLDEIEKAHPDTFNILLQVLDEGRLTDNKGRVADFKNTIIIMTSNMGANLIQDRFEKANTVTESLLEETKKEVLIALKQRVRPEFINRIDDIVMFTPLTKNEIQQIVSLQLKGVTKMLALQGITIDATPAAIELLAVQGYDPQYGARPVKRVIQKNVLNELSKQILSGEISTESIVLIDAFENQIVFRNETDAVEV

SEQ ID NO: 7127 - DNA, 2604 bp, delta proteobacterium MLMS-1
  CDS (1)..(2604): transl_table=11
atgcaatttgacaaatttaccatgaaatcccaggaggcggtgcaggcggcccaaagcctggcccaggagctgcagcaccaggagttacagcccgagcacctgctcaaggtactctttgaccagaccgacggcgtgatcgccccggctttgcagaagatgggagtcagtcgggaaaagctggccagcgagatcggcaatcgcctgtcgcggctgcccaaggtcagcggcgccggcgccggccgcctttacgccgcgccggccctgcagcgcctttttgaccgggccttcaaagtggccgccgagatgcaggatgattatgtcagccaggaacacctggtgctggccctgctggacgacaaggacaacgaagtcgccagggtgttaagtaaggaaggactcacccgggacgcctttttgcaggcgttgacggcggtgcggggcagtcagcgggtcaccgatcccaaccccgaggagaaataccaggccctggagaaatacgcccgcaacctcaccgatgtcgcccggcagggcaagctcgatccggtgatcggccgcgatgacgaggtgcgccgggtgatccaggtgctctcccggcgaaccaaaaacaatccggtactgatcggcgagccgggggtgggcaagaccgccatcgttgaagggctggcccagcggatcgtcaacggcgatgtctccgacaccctgcgggacaagcaggtgatcgccctggacatgggctccctggtggccggcgccaagtatcgcggcgagttcgaggaccggctcaaggcggtgttgcaggagatcgaaaaacgccagggcgaggtgattctcttcatcgacgagatccacaccctggtgggggccggcgccgccgaaggttccatggacgcctccaatatgttgaaacccgccctggcccggggtgagctgcattgtgtcggggcgaccacccttaaagagtaccgtaagtacatcgaaaaagacgccgccctggagcgccgcttccagcaggtgctggtccaggagcccagtatcgaagatgccattgccatcctgcgggggatcaaggaaaagtacgaggttcaccacggggtgcgaatccaggattcggccacggtggccgccgtcaccctctccaaccgctacatcaccgaccgtttcctgcccgacaaggccatcgacctgatcgacgaggccgccagccggttgcgcatcgagatcgattcgatgcccaccgagatcgacgagatcgagcgcaaaaagatcatgctggagatcgagcgtgaggctttaaaaaaggagagcgacaaatcttcccgggagcgtctggccaaactcgaggcggaactggccgattgcaacgagaccctgaacgccatgaagggccactggaacctggagaaggaagttatccagcagctccgggagatcaaggccaaaatcgacgaggcccgcatcgaagcccagcaggccgaacgccagggcgatttgagcaaggtggccgaaatccgctacggtcgcatcgtcgagctggaaaaggaactggcggccaaaaacgagcggctggcggaggtccagcaggatcgcaagatgctcaaggaggaagtggacgaggaggatatcgccaaagtggtcgccaagtggaccggcattccggtggacaagctgctggagggcgaaaaggaaaagctggtggccgccgatggcgaattaagcaagcgggtggtggggcaacgggaggcgatcagcgcggtggccaacgccgtgcgccgggcccgggccggcttgcaggaccccaaccggcccctgggttcctttatcttcatgggccccaccggggtgggtaagaccgaactggcccgctccctggccgcctttctgtttgataccgaaaaggcgatgatccggctggatatgtccgagttcatggaaaagcactcggtggcccggctgatcggggcgccccccggctacgtgggctacgaggaagggggctacctcaccgaggcggtgcgccgccggccctattcggtgattttgttcgatgaaatcgaaaaggcccatcccgatgtcttcaacgtcctgctgcagatcctcgatgacggccggatgaccgacggccaggggcggacggtggacttcaagaacaccatcctgatcatgacctccaacctgggcagccagttgatcatggagctgggggaggcgcggcgcgaggagatcaagacccgggtggatgagattctccatgcccagttccggccggagttcttaaatcgcctggatgagattatcatcttccacgccttaagccgggaggacctgcgccagatcatcgaccttcaggcggagctgctgaccgggcggctggccgagcgccattaccagatcgaactgaccccggcggccaaggagttcctgatcgaggtgggctacgaccccaactacggagcccggccgctgaagcgggccatccagcgccatgtcctggacgccctggccatgaagatcctggaagggaacttcgccgagggcgataccatcgtcgtggaacggtgggaaggggcggagagcctgagctttgagcggcgccagccgcagtaa

SEQ ID NO: 7128 - protein, 867 aa, delta proteobacterium MLMS-1
MQFDKFTMKSQEAVQAAQSLAQELQHQELQPEHLLKVLFDQTDGVIAPALQKMGVSREKLASEIGNRLSRLPKVSGAGAGRLYAAPALQRLFDRAFKVAAEMQDDYVSQEHLVLALLDDKDNEVARVLSKEGLTRDAFLQALTAVRGSQRVTDPNPEEKYQALEKYARNLTDVARQGKLDPVIGRDDEVRRVIQVLSRRTKNNPVLIGEPGVGKTAIVEGLAQRIVNGDVSDTLRDKQVIALDMGSLVAGAKYRGEFEDRLKAVLQEIEKRQGEVILFIDEIHTLVGAGAAEGSMDASNMLKPALARGELHCVGATTLKEYRKYIEKDAALERRFQQVLVQEPSIEDAIAILRGIKEKYEVHHGVRIQDSATVAAVTLSNRYITDRFLPDKAIDLIDEAASRLRIEIDSMPTEIDEIERKKIMLEIEREALKKESDKSSRERLAKLEAELADCNETLNAMKGHWNLEKEVIQQLREIKAKIDEARIEAQQAERQGDLSKVAEIRYGRIVELEKELAAKNERLAEVQQDRKMLKEEVDEEDIAKVVAKWTGIPVDKLLEGEKEKLVAADGELSKRVVGQREAISAVANAVRRARAGLQDPNRPLGSFIFMGPTGVGKTELARSLAAFLFDTEKAMIRLDMSEFMEKHSVARLIGAPPGYVGYEEGGYLTEAVRRRPYSVILFDEIEKAHPDVFNVLLQILDDGRMTDGQGRTVDFKNTILIMTSNLGSQLIMELGEARREEIKTRVDEILHAQFRPEFLNRLDEIIIFHALSREDLRQIIDLQAELLTGRLAERHYQIELTPAAKEFLIEVGYDPNYGARPLKRAIQRHVLDALAMKILEGNFAEGDTIVVERWEGAESLSFERRQPQ

SEQ ID NO: 7129 - DNA, 2613 bp, Oceanobacter sp. RED65
  CDS (1)..(2613): transl_table=11
atggaaaagtttaccagtagcttacagcaagctttgtctgatgctcagtccctagcgttgggcaaagaccataatcaaattgaaacagcacacctgcttttagctttgttggagcaggcaccaggtggcattcgtcctttattgcaaggtttaggggttcaagctggttcgttgcgtcagaaattggaaggggtattgggtaacttacctgtcgttagtagccctgatggaaatctaagtgtttcttcagaacttggtcgagtactgaaccttacggatcgtttggcgcaaaagcgaggtgatcaatatatttcaagtgatcttgtgttattggccgctcttgaagagaaaggtgacacaggtaaagcgttgaacgacttgggcctaaataaagaaaaagtagagcgggctattgatactgtgcgccaaggtgaatcggttgatgaccctaacgcagaagataatcgtcaggcactcgataagtttaccgttgatctaacagcaagagctgaagagggtaagcttgatccggtgattggtcgtgatgatgagattcgccgcactattcaagtactacagcgtcgcacaaagaataacccagttttaattggagcgcctggtgttggtaaaaccgccattattgaaggcttagcgcagcgtattgtggatggagaggtgccagaaggtttgcgtaacaagcgcattttgtctttggatatgggctccctgttagcaggggctaaattccgaggagattttgaagagcggctgaaaaatgttttgaaagaagtcagtaaacaagaaggtaatatcgtcttgttcattgatgagattcatacaatggtaggcgctggtaaaactgacggcgctcttgatgctggcaacatgttgaagccagctttaagtcgcggcgaactgcattgcgttggtgctactacgcttgatgagtaccgtgaatatattgaaaaagacgcagcacttgagcgtcgtttccaaaaagtgttggtagacgagccatcagaagaagatactgtggccatattacgaggcttgaaagagcgctacgaggtacatcatggtgtgcaaattactgatggagccattattgcagcggccaagttatcaacgcgttacattaccgatcgtcaattgccggataaagccattgacctgattgatgaggccgcgtccattattcgaatggaaatagacagtaagccccaagaaatggatcgcttagagcgtcgtttgattcaactgaaaattgaacgagaagcgcttaataaggaaagtgatgaaggcagtaaaaaacgcctgaatgagatcaacggtgagattaacaagttaggccgagagtatgtcgaactagaagacgtttggaagcaagaaaagttgtctcttgaaggtagtaagcaggcaaaagaggcactggaagaagccaaggttgaaatggagcaagctcgacgggcaggtgatcttcagcggatgtcggaacttcaatacggcaaaattccagaattggaaaagcagattgaagcggccgaaaaagctgaaaaaggcagcaatgaatttaaactattgcgcaaccgcgttaccgatgaagaaatcgcggaagtggtttcgaagtggactggtgtgccggtggcaaaaatgcttgaaggcgagcgcgaaaagcttttacgtatggagcaggagctacacaaacatgttgtcgggcaagacgatgcgattacggctgtatctaatgcagtgcgtcgtagccgtgcgggtttaagcgacccacgtaagcccaatggtagttttctttttcttggtccaacaggtgttggtaagacggagctttgcaaagcattggctacctttatgttcgattctcaagacgccatggtgcgtattgatatgtcggaatttatggaaaagcatagcgttgcacgtttaattggtgcgcctccggggtatgtgggttacgaagaaggcggttacttaactgagcatgttcgtcgtaaaccgtatagcgttatcttgctcgatgaagtcgaaaaagcgcaccctgatgtgtttaatattttgcttcaggtcctagatgatgggcagttaacagacggtcaaggtcgcaccgttgattttaaaaatacggtattggttatgacctctaaccttggtagtgatgttattcaaaccatgagtcaccacaatcaaggggaagagcaaacggatacagaatacgaagaaatgaaatcggcagtgatggaaattgtgggtggtcatttccgtcctgaattcatcaatcgtattgatgaggtagttgtattccatccactacaaaaatcgcagatccaaggcattgcacaaatccagttgcaagagcttgagaagcgcttaaaagagcgtgagctaagtttgcaattgagtgatgaagcaatcaatcgcttggttgaggttggatatgatccggtatacggggctcgtccactgaagcgcagtattcaacgttggatcgaaaatccgttggcgcaagatattctgtctggtaagttcgtgcccggtgatcgtatcgttgcagaagtaagcggtgatcaattgtcgtttacggtggcgcaaacggttcactga

SEQ ID NO: 7130 - protein, 870 aa, Oceanobacter sp. RED65
MEKFTSSLQQALSDAQSLALGKDHNQIETAHLLLALLEQAPGGIRPLLQGLGVQAGSLRQKLEGVLGNLPVVSSPDGNLSVSSELGRVLNLTDRLAQKRGDQYISSDLVLLAALEEKGDTGKALNDLGLNKEKVERAIDTVRQGESVDDPNAEDNRQALDKFTVDLTARAEEGKLDPVIGRDDEIRRTIQVLQRRTKNNPVLIGAPGVGKTAIIEGLAQRIVDGEVPEGLRNKRILSLDMGSLLAGAKFRGDFEERLKNVLKEVSKQEGNIVLFIDEIHTMVGAGKTDGALDAGNMLKPALSRGELHCVGATTLDEYREYIEKDAALERRFQKVLVDEPSEEDTVAILRGLKERYEVHHGVQITDGAIIAAAKLSTRYITDRQLPDKAIDLIDEAASIIRMEIDSKPQEMDRLERRLIQLKIEREALNKESDEGSKKRLNEINGEINKLGREYVELEDVWKQEKLSLEGSKQAKEALEEAKVEMEQARRAGDLQRMSELQYGKIPELEKQIEAAEKAEKGSNEFKLLRNRVTDEEIAEVVSKWTGVPVAKMLEGEREKLLRMEQELHKHVVGQDDAITAVSNAVRRSRAGLSDPRKPNGSFLFLGPTGVGKTELCKALATFMFDSQDAMVRIDMSEFMEKHSVARLIGAPPGYVGYEEGGYLTEHVRRKPYSVILLDEVEKAHPDVFNILLQVLDDGQLTDGQGRTVDFKNTVLVMTSNLGSDVIQTMSHHNQGEEQTDTEYEEMKSAVMEIVGGHFRPEFINRIDEVVVFHPLQKSQIQGIAQIQLQELEKRLKERELSLQLSDEAINRLVEVGYDPVYGARPLKRSIQRWIENPLAQDILSGKFVPGDRIVAEVSGDQLSFTVAQTVH

SEQ ID NO: 7131 - DNA, 2595 bp, Desulfitobacterium hafniense DCB-2
  CDS (1)..(2595): transl_table=11
atgtcttttgatacgaaccgctttacccaaaaatctcaggaggccattattcaaacgcaaacgatggcggagcgtaatggcaacagccaagtggagcctgagcacttgcttttagctctcctggaacagggagagggggtcgttccccaagtcctgaccaagcttgatatcccggtgggggctttggttcaaaaagtacgccaggaggtcaaccgcctcccgcgcatgatgggagctaatgttcaactgaccatttccccccggctgcggaccgtgctggtctcggctcacgatgagatggagacctttaaggatgactatgtaagcaccgaacatcttttgctggcgatcctcagccaaggcgggggcccagcggagaaaatcttaaagcaagagggtctgaatcgcgagaagcttctgcaggctttgcgtgtggtgagagggactcagcgggtgacgagccagacaccggaaggaaccttccgggcccttgaacaatatggacgcaatcttgtcgaacaagcccgccggggaaagctggatccggtcatcggccgggacgaagaaattcgccgcgtcattcagattctttcccgcaagaccaagaacaaccctgttctcatcggagagcccggtgtgggaaaaacggccattgtcgaaggtctggcccagcggatcgtccgcggtgatgttcccgaatcggtgaaagataagaagatcattgccttggatatgggttccttgatcgccggagcgaaataccggggagaatttgaggaacggcttaaagcggtgcttaaggaagttcaggaacgggaagatattatcctgtttatcgatgaactgcacacggtggtgggagcaggggcagcagaaggggccatggatgccggcaatatgcttaaacccatgctggcccggggtgagctgcatatggtgggagccacaaccctggatgaataccgcaagtatattgaaaaggatgccgctctggaacggcgctttcagccggttacggtgggagctcccagtgttgaggataccatctccattttgcgggggctcaaagaacgctatgaaacccatcatggcgtaagaattaccgatggagcgattatcgccgccgcagttctttctgaccgctatatcagcgatcgtttcctgccggataaagccatcgacctcattgatgaggccgctgcccgcatgcgtatggagatcaccagtgacccctatgaattggatcagatcaagcgccggattctgcagttggagattgagcgggaggccttaaagaaggaaaaagacgaaggcagcaaggaacgcctggaaaagattgaggaagatctggctaacctcaaagaagaacgcagtgccctggaagcccagctgcaaggggaaagagaagttctgaccagaatcaactccctcaaggaagacatcgatcagaaccgccttaagatggaacaagcccagcaggcctttgattataacaaggcggccgagctgcaatatggcatattgccaaagctggagaaggagctcaacgctttggaagagcagcttcgcaaccggaagaacaccttgctcaagcaggaagtaggggaagaggacattgctgaagtagtggccaaatggacccaggttcctgttgctaaacttttggaaagcgaaatggataaactggtccatatggaagcgcgcatccatcagcgggtgatcgggcaggaggaggctgtgaaagcggtagccgatgctgtccgcagatcccgggccggcctgcaggaccccaaccggcccttaggttcgttcctgtttctcggccccacaggggtagggaagacggagttggccaaagccttggctgaatttctctttgatgatgaccaggggatcgtgcgcatcgacatgtccgaatatatggagaagcataccgtttcccgcctgatcggcgctcctccggggtacgtaggctatgaagagggaggccagctcacggaagcagtaaggcgcaaaccctatagtgtggtcctctttgatgaagtggaaaaagctcatggggatgtctttaatgtgttgctgcagctcctcgatgacggccgcttaaccgacgggcagggacgggtggttaattttaagaatacagtggtcattctgaccagtaatatcgccagccccttgattcaggaattgacggcctcaggagcggcccaggaagtgttgcgttcccgggttaccgaggaactcaggctgcatttccggccggagtttttgaaccggttggatgaaatcatcgttttccaccctcttggtcaggagcatattggttccatcgtgcagatacagatcaacaagctgcgtgattatctggctccccgcaaaatgactctggagctctcccagggagccttaaataaaatcattcaacaaggttatgatccgatctatggagcaagacccctgaaaagggtgatccagcaaaacctccaaaatcctttggccatgaaaatcctgcagggaatccttcacgaaggggatcatgtcctggtcgaccttgatcctcagggccagcttctgtttaaaaagtcggaataa

SEQ ID NO: 7132 - protein, 864 aa, Desulfitobacterium hafniense DCB-2
MSFDTNRFTQKSQEAIIQTQTMAERNGNSQVEPEHLLLALLEQGEGVVPQVLTKLDIPVGALVQKVRQEVNRLPRMMGANVQLTISPRLRTVLVSAHDEMETFKDDYVSTEHLLLAILSQGGGPAEKILKQEGLNREKLLQALRVVRGTQRVTSQTPEGTFRALEQYGRNLVEQARRGKLDPVIGRDEEIRRVIQILSRKTKNNPVLIGEPGVGKTAIVEGLAQRIVRGDVPESVKDKKIIALDMGSLIAGAKYRGEFEERLKAVLKEVQEREDIILFIDELHTVVGAGAAEGAMDAGNMLKPMLARGELHMVGATTLDEYRKYIEKDAALERRFQPVTVGAPSVEDTISILRGLKERYETHHGVRITDGAIIAAAVLSDRYISDRFLPDKAIDLIDEAAARMRMEITSDPYELDQIKRRILQLEIEREALKKEKDEGSKERLEKIEEDLANLKEERSALEAQLQGEREVLTRINSLKEDIDQNRLKMEQAQQAFDYNKAAELQYGILPKLEKELNALEEQLRNRKNTLLKQEVGEEDIAEVVAKWTQVPVAKLLESEMDKLVHMEARIHQRVIGQEEAVKAVADAVRRSRAGLQDPNRPLGSFLFLGPTGVGKTELAKALAEFLFDDDQGIVRIDMSEYMEKHTVSRLIGAPPGYVGYEEGGQLTEAVRRKPYSVVLFDEVEKAHGDVFNVLLQLLDDGRLTDGQGRVVNFKNTVVILTSNIASPLIQELTASGAAQEVLRSRVTEELRLHFRPEFLNRLDEIIVFHPLGQEHIGSIVQIQINKLRDYLAPRKMTLELSQGALNKIIQQGYDPIYGARPLKRVIQQNLQNPLAMKILQGILHEGDHVLVDLDPQGQLLFKKSE

SEQ ID NO: 7133 - DNA, 2634 bp, Synechococcus sp. RS9916
  CDS (1)..(2634): transl_table=11
atgcaaccaacagcagagctgtttactgaaaaagcctggggcgccatcgtggccgcccagcagctggcccaaagccatcggcatcaacaactggaaagcgagcacctgttcctcgccctgttggagcaaaacggtcttgccggtcgcattctcgagaaagccggtgtttcgccacccgagctccaatccgttgtggagcagcacctgcaccaacaacccgcacttcagaaccgccctgagtcggtatatctcggaaagggtctgagtgatctgctcgaccgcgctgatgctctcaagcagggctatggcgacagcttcattgccattgagcacctggtgctcgccctggccgacgattcccgctgcgggaagcgcctgctcaatcaggtcggcgctgatgcaacatccctgaaaaccgccattgatgccgtgcgcggcagccagaccgtgactgaccaaaaccctgagggcacctacgaatccttggagaaatacgggcgggatctgaccgccgccgcccgcgacggcaaactcgacccggtgatcggccgcgacgaggaaatccggcgcacgattcagatcctcagccgccgcaccaaaaacaatccggtgctgatcggcgaacccggcgttggtaaaaccgcaatcgtggaaggcctggcgcagaggatcgtcaatggcgacgtcccccaggcgttgcagaaccgacagctcatcgccctcgacatgggcgcactgatcgccggtgccaaatatcggggcgaattcgaagaacggctcaaggccgtactgaaggaggtgacctcctctgaggggcgcattgtgctgttcatcgacgagatccacaccgtggtgggcgctggtgccaccggtggagccatggatgccagcaacctgctcaaacccatgctggccaggggggaactgcgctgcatcggtgccaccaccctggatgaacaccgccagcacatcgaaaaagaccctgcgttggagcgtcgcttccaacaggtgctggtggatcaacccactgtggaagacaccatttcaattctgcgcggcctgaaggagcgctacgaagtgcaccacggcgtacgcatcgccgacagcgccctggtggctgccgctgtgctgagcacgcgctatatcgccgatcgcttcctgcccgacaaggcgattgacctagtggatgaatcggccgcccggttgaagatggagatcacctccaaaccggaggagatcgatgaaatcgatcgcaagattctccaactggagatggaaaagctctccctcggccgtgagtcggatgctgccagccaagagcgactcgagcggttggagcgtgaagtcgcggagctctccgagcagcagagcaccctcaacgcccaatggcagcaggaaaaaggcgccatcgacgacctctccaatctcaaggaagagatcgaacgggtgcaactgcaggtggagcaagccaaacgcaactacgacctcaacaaggctgccgaactggaatacggcacgttggctgggctgcaaaagcagctctccgatcaggaggcagctctggctgcagccgacgacggcgggcaagacaaatccctgttgcgtgaggaagtcactgaagacgacatcgccgaggtgatcgccaagtggacgggcattcccgtggccaaattggtgcaatcggaaatggagaagctgctcagcctcgagagtcagctgcatgagcgcgtggtaggtcagcagcaggccgtcaccgcagtggcggatgcgatccagcgctcccgcgccggcctcagtgaccccaacaggccgatcgccagctttctgttcctcggccccaccggcgtgggcaaaaccgaactctccaaagccctagcggcgcagctgttcgacagcgacgacgccatggtgcgcatcgacatgtcggaatacatggagaagcacagcgtcagccgtctgatcggtgcgcctccgggctacgtgggctacgaagccggcggacagctcaccgaagccatccgtcgtcgcccctactccgtcgtcctcttcgacgaggtggagaaagcccaccctgatgtgttcaacgtgatgctgcagatcctcgatgacggacgcgtcacggatggacaagggcgcacggtggatttcaccaacgcagtgctgattctcaccagcaacatcggcagccagtcgatcctcgatcttggcggcgatgacagccagcacagtgaaatggagcggcgggtgaatgaggctctacgggcccatttccggcccgaattcctcaaccgtctggatgaccagatcatcttccacagcctgcggcgcgaggagttgcgccagatcgtgagccttcaggtggagcggttgcgccaccgcctcagcgatcgcaagctcagcctcaccatcagcgaaggagcgaccgattggctggccaacgcgggctacgacccggtgtatggcgcacggccgctgaagcgagcgattcagcgcgaactggaaacacccattgccaaggccatccttggcggtcactatggagaaggcgccaccgttgaagtggatgccattgccatcgcaggtgataccggcagcaccgatggcgatgcgcacaagcaactggtgctgcgttga

SEQ ID NO: 7134 - protein, 877 aa, Synechococcus sp. RS9916
MQPTAELFTEKAWGAIVAAQQLAQSHRHQQLESEHLFLALLEQNGLAGRILEKAGVSPPELQSVVEQHLHQQPALQNRPESVYLGKGLSDLLDRADALKQGYGDSFIAIEHLVLALADDSRCGKRLLNQVGADATSLKTAIDAVRGSQTVTDQNPEGTYESLEKYGRDLTAAARDGKLDPVIGRDEEIRRTIQILSRRTKNNPVLIGEPGVGKTAIVEGLAQRIVNGDVPQALQNRQLIALDMGALIAGAKYRGEFEERLKAVLKEVTSSEGRIVLFIDEIHTVVGAGATGGAMDASNLLKPMLARGELRCIGATTLDEHRQHIEKDPALERRFQQVLVDQPTVEDTISILRGLKERYEVHHGVRIADSALVAAAVLSTRYIADRFLPDKAIDLVDESAARLKMEITSKPEEIDEIDRKILQLEMEKLSLGRESDAASQERLERLEREVAELSEQQSTLNAQWQQEKGAIDDLSNLKEEIERVQLQVEQAKRNYDLNKAAELEYGTLAGLQKQLSDQEAALAAADDGGQDKSLLREEVTEDDIAEVIAKWTGIPVAKLVQSEMEKLLSLESQLHERVVGQQQAVTAVADAIQRSRAGLSDPNRPIASFLFLGPTGVGKTELSKALAAQLFDSDDAMVRIDMSEYMEKHSVSRLIGAPPGYVGYEAGGQLTEAIRRRPYSVVLFDEVEKAHPDVFNVMLQILDDGRVTDGQGRTVDFTNAVLILTSNIGSQSILDLGGDDSQHSEMERRVNEALRAHFRPEFLNRLDDQIIFHSLRREELRQIVSLQVERLRHRLSDRKLSLTISEGATDWLANAGYDPVYGARPLKRAIQRELETPIAKAILGGHYGEGATVEVDAIAIAGDTGSTDGDAHKQLVLR

SEQ ID NO: 7135 - DNA, 2574 bp, Vibrio sp. Ex25
  CDS (1)..(2574): transl_table=11
atgcgtcttgatcgattcacaagtaagtttcaaatcgctatctctgatgctcaatcactagcgttagggcgcgatcatcaatatatcgagccagttcacctcatggtggctttgcttgaccaaaatggcagtccaattcgtccattgcttactatgctggatgtggacgtaacgcatttacgctctaaattgagtgaaatgctagatcgattaccaaaagtcagtggcatcggtggagatgtacagctctctagttcgatgggcacgttgtttaacctgtgtgacaaagtggcgcaaaagcgtcaagactcctatatctcgtctgaaatcttcctgcttgctgctttagaagatcgcggaccattggggcaattactcaaagagataggtttaacagagcaaaaagttagccaagcaatcgaaaagatcagaggtggtcaaaaggttaatgatccgaatgcagaagagcttcgccaagcattggaaaagttcaccattgaccttaccgagcgagcagaacagggcaaactggatccggttatcggccgtgatgatgaaattcgccgtaccatccaagtattgcagcgccgtactaaaaacaaccctgtgatcatcggtgaacctggcgtaggtaagaccgcaattgttgaaggcttagctcagcgcattgtcaacaatgaagtgccagaaggtttgcgtggtcgccgtgtgctgtcattagatatgggcgcactggttgctggtgctaagtaccgtggtgaatttgaagagcgcttgaagtcggtattgaatgaactcgctaaagaagaaggtaatgtcattctgtttatcgacgagctccatactatggttggtgcgggtaaaggtgaaggctcaatggatgcggggaacatgctcaaacctgcattagcccgtggtgaactgcactgtgttggcgcaacaacactggatgaatatcgtcagtacatcgaaaaagatgcggcgttagaacgtcgtttccaaaaagtgctggtggatgagccgaccgttgaggataccgtggcgattttacgtggcttgaaggagcgttatgagcttcatcatcacgttgaaattactgacccagcgattgttgcagcggcgagtttgtcacatcgttatgtttctgaccgtcaactgccagataaagcgatcgacttaatcgacgaagcggcttcaagcattcgtttacaaattgactctaagccagagtcattagataagcttgaacgtaaaattatccaacttaagattgagcaacaggcgcttagtaacgagcacgacgaagcgagtgaaaagcgtttgaaagcgcttaatgaagaactcaatgaaaaagaacgtgagtacgctgaactagaagaggtttggaatacagaaaaagccgcactttctggcactcaacatattaagtctgagcttgaacaagctcgtatggacatggagtttgctcgccgagctggtgatttaaaccgcatgtcggaacttcaatatggtcgtattcctgaacttgagaagcagttagatcttgcaacccaagcggaaatgcaggaaatgacactattgcgtaataaagtaaccgacaacgagattgcagaagtactttctaagcaaactggcatcccagtatccaagatgctagaagcggaaaaagagaaactacttcgtatggaagacgtactgcataatcgtgtggtagggcaaagcgaagcagtctctgttgtatcgaatgccattcgtcgtagtcgagctgggctttctgatccaaaccgaccaattggctccttcttattcttaggtccaactggtgtaggtaaaacagagctttgtaagacacttgcgagctttatgttcgacagcgaagatgcgatggtccgtatcgacatgtctgagttcatggagaaacactcagtggcaagattagtgggtgcgcctccaggctatgtcggatatgaagagggtggttacttaacggaagcggttcgtcgcaagccgtattcggtaattttgttagatgaagtagagaaagcgcatccggatgtatttaacattctgctgcaagttctcgatgatgggcgtttaacggatggtcaaggtcgtactgttgacttccgtaatacggttgtgatcatgacatcgaacttgggttcatctcgtatccaagagaatttcgcaacattagactatcaaggtatcaagagtgaagtaatggatgtggttagcaaacacttccgtcctgagttcttgaaccgtgttgacgaaatcgtggtgttccatccacttggtcaagaacacatcaagtccatcgcttctattcaattagaacgtttggcgaaacgactagaagaaaaaggatatcaactagaggtttctgacaaagcactcgatttgatcgctcaagttggtttcgaccctgtatatggtgcgcgtcctttaaaacgcgcaattcaacagaatgtcgagaacccattagccaaatcgattctttctggtgaaattgttccagacaagaaagtgcagctaatcgttactaatgaccaaattcgtgcccatcagtaa

SEQ ID NO: 7136 - protein, 857 aa, Vibrio sp. Ex25
MRLDRFTSKFQIAISDAQSLALGRDHQYIEPVHLMVALLDQNGSPIRPLLTMLDVDVTHLRSKLSEMLDRLPKVSGIGGDVQLSSSMGTLFNLCDKVAQKRQDSYISSEIFLLAALEDRGPLGQLLKEIGLTEQKVSQAIEKIRGGQKVNDPNAEELRQALEKFTIDLTERAEQGKLDPVIGRDDEIRRTIQVLQRRTKNNPVIIGEPGVGKTAIVEGLAQRIVNNEVPEGLRGRRVLSLDMGALVAGAKYRGEFEERLKSVLNELAKEEGNVILFIDELHTMVGAGKGEGSMDAGNMLKPALARGELHCVGATTLDEYRQYIEKDAALERRFQKVLVDEPTVEDTVAILRGLKERYELHHHVEITDPAIVAAASLSHRYVSDRQLPDKAIDLIDEAASSIRLQIDSKPESLDKLERKIIQLKIEQQALSNEHDEASEKRLKALNEELNEKEREYAELEEVWNTEKAALSGTQHIKSELEQARMDMEFARRAGDLNRMSELQYGRIPELEKQLDLATQAEMQEMTLLRNKVTDNEIAEVLSKQTGIPVSKMLEAEKEKLLRMEDVLHNRVVGQSEAVSVVSNAIRRSRAGLSDPNRPIGSFLFLGPTGVGKTELCKTLASFMFDSEDAMVRIDMSEFMEKHSVARLVGAPPGYVGYEEGGYLTEAVRRKPYSVILLDEVEKAHPDVFNILLQVLDDGRLTDGQGRTVDFRNTVVIMTSNLGSSRIQENFATLDYQGIKSEVMDVVSKHFRPEFLNRVDEIVVFHPLGQEHIKSIASIQLERLAKRLEEKGYQLEVSDKALDLIAQVGFDPVYGARPLKRAIQQNVENPLAKSILSGEIVPDKKVQLIVTNDQIRAHQ

SEQ ID NO: 7137 - DNA, 2577 bp, Alteromonadales bacterium TW-7
  CDS (1)..(2577): transl_table=11
atgcgtttagatagatttacaagtaaatttcaatctgcgctttctgatgcgcaatcacttgcccttgggcgcgatcatcaatttattgaacccgttcacctaatgtatgcactcctccaacagagtggttcaagcgttcgtgccttgtttgctcaaacaggtgtaagtgcagacgagcttaatacaaagttatcccaagaaatagaaaagctattcaaagttgaaggggttgggggcgatgtacagttatctaataatatggctacgcttataaatttatgtgataagtacgctcaaaagcgcaaagataaatttatttctagtgagttatttgttcttgctgcgtgcgatgacaaaggtcctcttggggatattttgagatcgcttaatatcactgcaacaaaaatagaaagcgccataaaagcaatccgtgggggtcaaaaagttgatgatccgaatgcggaagaaacgcgtcaagctttagaaaagtatacaattgatttaaccgaacgcgcagagcaaggcaagcttgaccccgttataggtcgagacgacgaaatacgccgtactatccaggtattacagcgcagaactaaaaacaacccggtacttattggcgagcctggggtgggtaaaaccgccatagcagaaggcttagcgcaacgtattattaatggtgaagtaccagagggattaaaaaacaaacgtgtattgtcacttgatttaggagccttggttgctggtgctaaatttagaggtgaatttgaagagcgtttaaaatcggttttaaacgagttggctaaagaagaaggccaagtcatcttatttattgatgaaattcataccattgtaggtgcaggtaaaagcgatggcgcaatggatgcaggcaatatgcttaagccagcgctcgcacgtggcgagctgcattgtgtaggggcaaccacactagacgaataccgtaaatacatagaaaaagatgcagcccttgagcgccgttttcaaaaagtattaatcgaagagccttcagttgaagacactattgcaatattgcgtggtttaaaagaacgttatgaactgcaccactcagttgaaatcaccgaccctgcaattgttgctgccgcgcagttatcgcatcgttatattagcgaccgccagcttcccgataaagcaatagatttaattgatgaagcaggttcttctattcgtttgcaaattgattcgaagcctgagtcattggacaagcttgaacgccgcattattcagttaaaacttgaagataatgctctcgctaaagaaaaagatgaggcaagtcaaaagcgccgcagtgaaatgcaagagcttataaccgatcttgacggccaataccgcgaactcgatgaaatttggaatgcagaaaaagcatcactgcaaggtacgcaagttattaaagctgagcttgagcaagctcggctcgacttagacgttgctcgcagagcaagtgatttacagcgcatgtctgagttgcaatatggtcgtatacccgaacttgaacgcaaattagacttagcgtcacaagccgaaatgcaagacatgacgctgcttaaaaaccaagtaggcgaagatgaaattgcagagatactctctcgttggacaggtattccagtgtcacgcatgttgcaaggtgaacgtgaaaaactactgcaaatggaagatagattgcacagtaaagtaatagggcaagacgaggcagttgtcgcggtgtctaacgctattcgtcgctcccgagctgggcttgctgatccaaaccgaccgattggctcatttttgtttttagggccaacaggcgtaggtaaaacagagcttactaaagcccttgctgggtttatgtttgacacagaagatgccatggtgcgcattgatatgtctgagtttatggaaaaacattctgttgcccgtttagtaggtgcgcctcctgggtacgtagggtatgaagaagggggctacttaacagaagctgttcgccgtaagccatattcggtcatattgcttgatgaaatagaaaaagcacaccctgacgtgttcaatattttattacaagtacttgatgatggtaggttaaccgacggacaagggcgtactgttgattttaaaaataccgtgatcatcatgacctcaaatttaggttcagatattattcaagagcaggcgggtaataatgattacgcaacactaaaatcaaaagtaatggatgtattgatcagtgaattcagacctgagtttataaaccgcattgacgaaaccgtggtatttcatccgctagcgaatcagcacattaaagaaattgctgatattcagttaatgaaattacgtgaacgtttaactgagatggggtacttactagaaattagcgatgcggcgctcgatactattgctgcaagtgggtttgatcctgtatacggcgcacgtccattaaagcgggctattcaacaaacgattgaaaacccgttggcacaaaagttacttaatggtgattacattccaggatgtgtcattgttattgatgctggcagtgatgggttagtatttactagccggtaa

SEQ ID NO: 7138 - protein, 858 aa, Alteromonadales bacterium TW-7
MRLDRFTSKFQSALSDAQSLALGRDHQFIEPVHLMYALLQQSGSSVRALFAQTGVSADELNTKLSQEIEKLFKVEGVGGDVQLSNNMATLINLCDKYAQKRKDKFISSELFVLAACDDKGPLGDILRSLNITATKIESAIKAIRGGQKVDDPNAEETRQALEKYTIDLTERAEQGKLDPVIGRDDEIRRTIQVLQRRTKNNPVLIGEPGVGKTAIAEGLAQRIINGEVPEGLKNKRVLSLDLGALVAGAKFRGEFEERLKSVLNELAKEEGQVILFIDEIHTIVGAGKSDGAMDAGNMLKPALARGELHCVGATTLDEYRKYIEKDAALERRFQKVLIEEPSVEDTIAILRGLKERYELHHSVEITDPAIVAAAQLSHRYISDRQLPDKAIDLIDEAGSSIRLQIDSKPESLDKLERRIIQLKLEDNALAKEKDEASQKRRSEMQELITDLDGQYRELDEIWNAEKASLQGTQVIKAELEQARLDLDVARRASDLQRMSELQYGRIPELERKLDLASQAEMQDMTLLKNQVGEDEIAEILSRWTGIPVSRMLQGEREKLLQMEDRLHSKVIGQDEAVVAVSNAIRRSRAGLADPNRPIGSFLFLGPTGVGKTELTKALAGFMFDTEDAMVRIDMSEFMEKHSVARLVGAPPGYVGYEEGGYLTEAVRRKPYSVILLDEIEKAHPDVFNILLQVLDDGRLTDGQGRTVDFKNTVIIMTSNLGSDIIQEQAGNNDYATLKSKVMDVLISEFRPEFINRIDETVVFHPLANQHIKEIADIQLMKLRERLTEMGYLLEISDAALDTIAASGFDPVYGARPLKRAIQQTIENPLAQKLLNGDYIPGCVIVIDAGSDGLVFTSR

SEQ ID NO: 7139 - DNA, 2583 bp, marine gamma proteobacterium HTCC2143
  CDS (1)..(2583): transl_table=11
atgcgtattgatcgatttactaaccagttgcaaaatgctttgtcagatgcccagtcgttagctgttggtaaagaccataattcgattgaccccctacatttgttgtctgccttgttagatcaggtgaatggttcagttcaaccattaatgcggcaggcgggaggcaatattccagctttaaaagatacgcttggtcaggctatgagtaacttaccaacagtgtcgggcacggttggtgacatccatatgtctaatgatttggcgcgggtattaaacttggctgataaacaatcccagcaaaataatgatgcctacctttcctgcgaagttgtcgcaatggcactgttagatgccaatattgctgttagcaagttactcactgactcgggagtgagcaagcaggctttagggagtgcgattgagagtgttcgcggcggtgaggcggttaacgatcccgccgctgaagaaaatcgtcaggctttggataaatacacaattgatttaacagagcgtgcagagcagggaaaacttgatccggtaataggtcgtgatgatgaaatacgccgaaccatccaagtgcttcaacgacgtactaaaaataacccagtattaattggtgagccaggggttggtaagacggctattgttgaaggtttggcgcagagaattgttaatggagaagtgccggaaggcttaaaagataaacgggtactatcattggatcttggctccctactggcaggagcgaagtttcgaggagagtttgaagagcgtctaaaagccgttcttaacgagttgagtaagcaagaaggacgaatcattctatttatcgatgagctccataccatggttggtgcgggtaaggctgaaggctcaatggatgcaggcaatatgttgaagccggcgctggccagaggggagctgcactgtgttggcgcaacaacgctgaatgagtatcgacaatatttagagaaagatgccgcgctcgaacgccgtttccaaaaggtattagtcgaagagcctagcgaagaagataccattgcaattttacgcggtctaaaagaacgctatgaaattcatcacggagtggatatcaccgattcggcaattattgcagccgctaaattatcccaacgttatattacggaccgacaattacctgacaaagccattgatctaatcgatgaggccggcagccgaattcgtatggaaattgattctaagccagagagtatggaccgtttggaacggcggctgattcagttaaaaatcgagagagaagccgtcaaaaaagatactgacagtgcggctaagaagcagttggtcatacttgataatgatatccttaaatctgagaaagaatatgccgacttagaagaagtttggatggctgaaaaatcgattttgcaggggtctcagcaaacgaaaagcgagcttgaaaaggcgagaatggatctcgaagcggcccatagggcaggcgatttaacccgcatgtcggaattacaatatggtgttattcccggtcttgaaaaaacgatggaaaccgccagtcaggctgaaacggttgagatgaccttgttgaggaacaaagtgaccgaggaggaagtggcagaagttgtctcgaaatggaccggtattcctgtatccaaaatgctggagggagagcgagacaaattattacgaatggaagagtcactacagaagcgggttattggtcaaagcgaagcagttatatcggtgtccaacgcggttcgacgttctcgcgcaggactttccgaccccaatcggcccaatggctcgttcctttttttggggcctaccggtgttggtaaaaccgagctatgtaaagcactggcaatgtttctttttgacagcgaagatgcgatggtccgtattgatatgtcagagtttatggaaaaacattcagtagcgcgtttgattggggcaccgccaggctatgttggctatgaagaggggggctatttaaccgaagcggtccgtcgccggccttattccgtgctattactggatgaagttgaaaaagcccattccgatgttttcaatgtgttgttgcaagtattggatgatggtcgtttgaccgatggacagggacgtactgtcgattttagaaataccgttatcgtgatgacctcgaacctcggttcagatctgattcagcaattatctgaagagaaaaattatgaggcgatgaagcgttcagttatggaggttgttggtggtcattttcggcctgaattcattaacagaattgacgaaaccgttgtctttcatccgctagatcaacaacagattcgtggtatcgccgctatccaaattgatttattacggtctcggttgcgcgatcgggaactggggctagaacttagcagtgcagcgatagacaagctggccaatgtgggttttgatcctgtttacggtgctcgccctttgaaaagagcggttcagcaatatgtggaaaacccactggctcaagatatcttacagggaaaatttgcaccgggtgatgtgattaaaggtgagttggatagtgctactggacagctaacatttagtcacgggtga

SEQ ID NO: 7140 - protein, 860 aa, marine gamma proteobacterium HTCC2143
MRIDRFTNQLQNALSDAQSLAVGKDHNSIDPLHLLSALLDQVNGSVQPLMRQAGGNIPALKDTLGQAMSNLPTVSGTVGDIHMSNDLARVLNLADKQSQQNNDAYLSCEVVAMALLDANIAVSKLLTDSGVSKQALGSAIESVRGGEAVNDPAAEENRQALDKYTIDLTERAEQGKLDPVIGRDDEIRRTIQVLQRRTKNNPVLIGEPGVGKTAIVEGLAQRIVNGEVPEGLKDKRVLSLDLGSLLAGAKFRGEFEERLKAVLNELSKQEGRIILFIDELHTMVGAGKAEGSMDAGNMLKPALARGELHCVGATTLNEYRQYLEKDAALERRFQKVLVEEPSEEDTIAILRGLKERYEIHHGVDITDSAIIAAAKLSQRYITDRQLPDKAIDLIDEAGSRIRMEIDSKPESMDRLERRLIQLKIEREAVKKDTDSAAKKQLVILDNDILKSEKEYADLEEVWMAEKSILQGSQQTKSELEKARMDLEAAHRAGDLTRMSELQYGVIPGLEKTMETASQAETVEMTLLRNKVTEEEVAEVVSKWTGIPVSKMLEGERDKLLRMEESLQKRVIGQSEAVISVSNAVRRSRAGLSDPNRPNGSFLFLGPTGVGKTELCKALAMFLFDSEDAMVRIDMSEFMEKHSVARLIGAPPGYVGYEEGGYLTEAVRRRPYSVLLLDEVEKAHSDVFNVLLQVLDDGRLTDGQGRTVDFRNTVIVMTSNLGSDLIQQLSEEKNYEAMKRSVMEVVGGHFRPEFINRIDETVVFHPLDQQQIRGIAAIQIDLLRSRLRDRELGLELSSAAIDKLANVGFDPVYGARPLKRAVQQYVENPLAQDILQGKFAPGDVIKGELDSATGQLTFSHG

SEQ ID NO: 7141 - DNA, 2580 bp, marine gamma proteobacterium HTCC2080
  CDS (1)..(2580): transl_table=11
atgcgtatggataagctaaccaatccgttacaaaacgtgctcgcagatgcgcagtcgctggctgtagggggcgatcagcagttcattgagccgatacatattttaaagtcattgcttaatcagaccggaggctctgccgttcctttattgcagaaagccggggctaatggttcacagttagccagtgccgtgagcgatgccttggcgaagttaccaaccgtaaatggcggcagcggagacgtacacttatctcaagaatccagccgtttgctcaatagagccgataaattggcgcaaaagcgcaatgatagttatttgtcttctgaactcgtattgctggcgatgattgatgcgagctcaccggtggcaaaacttcttacaaaatctggagctagccgctcgtcgctagagcaggcgattgaggatgtaagaggaggtgatggtgtgaattcgcccgaagccgaagcctctagacagtcgcttgaaaaatacacggtggatctcactgaacttgcaaaagtgggtaagctcgatcccgttattggcagggatgatgagatacgccgaaccattcaggtgttgcaacggagaactaaaaacaaccctgtattaattggtgagcccggtgttggcaagaccgcaatcattgagggtttggctcagcgcgtcatcaatggtgaagttccagaggggttaaaaaataagcgtattctttcgttggaccttggtgctctgctggctggcgcgaaatttcgcggcgactttgaagagcgcttaaaatcggttcttaatgagctttccaaagaagaagggcggattattttatttgtcgatgaactgcatacgatggtgggggctgggaaatctgagggctctatggacgctgggaacatgcttaagcctgcgcttgcaaggggcgaactgcactgcgttggcgcgacaaccctcaatgaatatcggcagtttgtagaaaaggatgcggcgttagagcgacgttttcaaaaagtgttggtcgacgagccttccgaggaggacacgattgccattctccgcggactgaaagagcgttatgaggtgcatcatggtgtcgccgttactgacagtgccatcatcgccgctgcgaaactcagtcaacgctacattactgatcgccagttacccgacaaagcgattgatctcattgacgaggccgccagtcgtattcgcatggagattgattcaaagccagaaagtatggatcgcttggaacgacgattgatacagctgaaaatcgagcgagaggccgtcaataaagatcaaaccgaagcagcgcagaagcaagtggcattacttgacgtgcaagttgcagagctcgatcaagagctgtctgatcttgatgagattttaaccgcggagaaggctgctgttcagggtgctgcgaaaatcaaagctgcgatagagcaagctaaattggatttggaaatggcgcagcgagcaggtgatttgacgcgaatgtcagagatccaatacggagagttgcctgagctcgacaaacagttgggtattgcggaacaggtggaacagggccccactcagcttttgcgaaatcgcgtgaccgaagaggaggttgctgaggttgtatcccggtggacaggaattcctatttctaaaatgcttgagggtgatcgcgaaaaattgcttcgcatggagtcagtgcttcatgagcgtgttgtgggtcaggatgaggctgtcattgccgttgccaacgcggtgagacgttctcgagcggggctaagcgaccctaaccgtcccaatggttcgtttttgtttcttggacctacgggagtcggtaaaactgagctctgtaaagctttggcaagttttgttttcgacagtgaccaggccatggtgcgcctcgatatgtcagagttcatggagaagcattcggttgctaggctcattggtgcacccccgggttatgtaggatatgaggcggggggctatctaacagaagcggtgcgacgacgcccttactccttattgctcctcgatgaagtagagaaggcgcacccagatgtatttaatatactgctccaagttttagaagatggtcgcctcacagacggtcagggacgcaccgttgatttcaaaaatacggttattgtgatgacgtctaatttgggctccgatctcattcaggagatggcgggcgatgagcgttacgacgccatgaaggccgctgtgatgggggttgtgggaaggcattttcgcccggagtttattaatcgtgtggatgaaacagtggtatttcatcctctggctgaggagcaaattcgaggtatcgcaaatattcaggttgaaagcctcaggcatcggctggctgagcgtgatctcgcattgcagttatcagatgaggtgctggaccaccttgctgaggctggatttgatcctgtttttggcgcccgacccctgaagagagccattcagcaattgctggaaaaccccttggcccagcaaattttacagggcgactatgcgcccggcgacacgatacaggcgctggtagaaggtcagaaaataatcttaagtcgacagcattaa

SEQ ID NO: 7142 - protein, 859 aa, marine gamma proteobacterium HTCC2080
MRMDKLTNPLQNVLADAQSLAVGGDQQFIEPIHILKSLLNQTGGSAVPLLQKAGANGSQLASAVSDALAKLPTVNGGSGDVHLSQESSRLLNRADKLAQKRNDSYLSSELVLLAMIDASSPVAKLLTKSGASRSSLEQAIEDVRGGDGVNSPEAEASRQSLEKYTVDLTELAKVGKLDPVIGRDDEIRRTIQVLQRRTKNNPVLIGEPGVGKTAIIEGLAQRVINGEVPEGLKNKRILSLDLGALLAGAKFRGDFEERLKSVLNELSKEEGRIILFVDELHTMVGAGKSEGSMDAGNMLKPALARGELHCVGATTLNEYRQFVEKDAALERRFQKVLVDEPSEEDTIAILRGLKERYEVHHGVAVTDSAIIAAAKLSQRYITDRQLPDKAIDLIDEAASRIRMEIDSKPESMDRLERRLIQLKIEREAVNKDQTEAAQKQVALLDVQVAELDQELSDLDEILTAEKAAVQGAAKIKAAIEQAKLDLEMAQRAGDLTRMSEIQYGELPELDKQLGIAEQVEQGPTQLLRNRVTEEEVAEVVSRWTGIPISKMLEGDREKLLRMESVLHERVVGQDEAVIAVANAVRRSRAGLSDPNRPNGSFLFLGPTGVGKTELCKALASFVFDSDQAMVRLDMSEFMEKHSVARLIGAPPGYVGYEAGGYLTEAVRRRPYSLLLLDEVEKAHPDVFNILLQVLEDGRLTDGQGRTVDFKNTVIVMTSNLGSDLIQEMAGDERYDAMKAAVMGVVGRHFRPEFINRVDETVVFHPLAEEQIRGIANIQVESLRHRLAERDLALQLSDEVLDHLAEAGFDPVFGARPLKRAIQQLLENPLAQQILQGDYAPGDTIQALVEGQKIILSRQH

SEQ ID NO: 7143 - DNA, 2577 bp, Erythrobacter sp. SD-21
  CDS (1)..(2577): transl_table=11
atgaatctcgaaaagttcaccgaccgggccaagggcttcctgcaggcggcgcagaccgtcgccatccgcatgagccaccagcgcatcacgcccgcgcatttgctgaaagcgctgctcgatgacgagcagggcatggccgcgcagctgatccagcgtgcggggggcaatccgggcgtcgcgattaccgaaatcgataccgctttgggcaaggtgccttcggtgtccgggggcggggcgcagcaaacgcccgggctcgacaacgacgccgtgcgcgcgctcgaccaggccgagcagcttgccgaaaaggcgggcgacagcttcgtgccggtccagcgtatcctgcaggcgcttgccatgcaggacaacgatgcaggccacgcgctcaaggctgcgggcatagacgccaagtcgctcgaagccgcgatccaggaggcgaccggtggccgcactgcggatagcgcgggcgcggaagacgcgtatgacgcgatgaagaaatacgctcgcgatctcactcaggcggcgcgcgacggcaagctcgaccccgttatcgggcgcgacgaggaaatccgtcgcacggtgcagatcctcgcccggcggaccaagaacaaccccgcgctcatcggtgaacccggcactggcaagacagcgatcgccgagggcctcgctctgcgcatcgccaatggcgatgtgcccgacagtctcaagggccgcacgctcatgtcgctggatcttggcgcactcattgcgggcgcgaagtaccgcggcgagttcgaggagcggctaaaggccgtgctcgatgaggtgaagggcgccgaagggcagatcattctcttcatcgacgagatgcacacgctgatcggcgcgggcgcgagcgaaggcagcatggatgctggcaacctcctcaagcctgccctgtcgcgcggggaactgcactgcatcggcgcgaccacgctcgacgaataccagaagtatgtcgagaaggaccccgcgctccagcggcgcttccagcccgtctatatcgacgagccgagcgtcgaggacacgatcagcatcctgcgcggcatcaaggacaagtacgagctgcaccatggcgtgcgcatcaccgacggcgcgatcgtggcggctgcgcagctcagcaaccgctacatccagaaccgctttttgcccgacaaggccatcgacctgatggacgaggcggcctcgcgcattcgtatggaggtagagagcaagcccgaggaaatcgaagggctcgaccgtcgcatcatccagctgcgtattgaagagcaggcgttgcagaaggaaaccgacagcgcgtcgaaggaccggctggaggcgctgcgcaaggagctgtccgaactcgagcagcagtcctccgaactgaccacccgctggcagaacgagcgcgacaagatccatgccgaggcacggatcaaggaagagctcgacgcggcgcgtatcgagctcgaacaggcccagcgcggcggcgacctgcagaaggcgggcgagttgcaatacggcaagatcccagagctcgaaaagcggctccaggaggccagcggacaaaccgacaacgcgctgctcaaggaagaagtcaccgaagacgacatcgccggcgtggtctcacgctggacgggcatcccggtcgacaagatgatggaaggcgagcgcgagaagctgctcgacatggaaaacatcctcgccaagcgggtaatcggccagagccaggcgatcgacgccgtgtccaaggccgtgcgccgtgcgcgggcggggctgcaggatccgggccgtccgctcggcagcttcctgttcctcggcccgaccggtgtcggcaagaccgaactgaccaaggcgctcgccggcttcctgttcgacgacgaccaggcgatggtccgcatcgacatgagcgaattcatggaaaagcacgcggtcgcccgcctcatcggcgcgcctccgggctatgtcggatacgaggagggcggcgtgctgaccgaggcggtgcggcgcaggccctaccaagtggtgctgttcgacgaggtcgagaaggcgcacagcgatgtcttcaacgtgctgctgcaggtgctcgacgacgggcgcctgaccgacgggcagggccgcgtggtcgatttctcgaacacgctgatcatcctcacttccaacctcggcagccagtatctggcgaacatggaggatggccagaaggtcgaggaggtcgagccgcaggtaatggacgtggttcgcgggcatttccgccccgagttcctcaaccgcctcgacgagatcatcctgttccaccgcctggcgcaggagcacatggccccgatcgtcgatatccaggtcgcgcgggtgcagaaactgctcaaggatcgcaagatcgtgctcgacctgaccgaggcggccaagaagtggctcggccgcgtaggctacgatcccgtctacggcgcgcgtcctctgaagcgcgcggtccagcgctacgtgcaggatccgctggccgacatgatcctgtcgggcaatgtgccagatgggtcgacggtagcgatcgacgagggcgacggctctctagagatgacggtcagatga

SEQ ID NO: 7144 - protein, 858 aa, Erythrobacter sp. SD-21
MNLEKFTDRAKGFLQAAQTVAIRMSHQRITPAHLLKALLDDEQGMAAQLIQRAGGNPGVAITEIDTALGKVPSVSGGGAQQTPGLDNDAVRALDQAEQLAEKAGDSFVPVQRILQALAMQDNDAGHALKAAGIDAKSLEAAIQEATGGRTADSAGAEDAYDAMKKYARDLTQAARDGKLDPVIGRDEEIRRTVQILARRTKNNPALIGEPGTGKTAIAEGLALRIANGDVPDSLKGRTLMSLDLGALIAGAKYRGEFEERLKAVLDEVKGAEGQIILFIDEMHTLIGAGASEGSMDAGNLLKPALSRGELHCIGATTLDEYQKYVEKDPALQRRFQPVYIDEPSVEDTISILRGIKDKYELHHGVRITDGAIVAAAQLSNRYIQNRFLPDKAIDLMDEAASRIRMEVESKPEEIEGLDRRIIQLRIEEQALQKETDSASKDRLEALRKELSELEQQSSELTTRWQNERDKIHAEARIKEELDAARIELEQAQRGGDLQKAGELQYGKIPELEKRLQEASGQTDNALLKEEVTEDDIAGVVSRWTGIPVDKMMEGEREKLLDMENILAKRVIGQSQAIDAVSKAVRRARAGLQDPGRPLGSFLFLGPTGVGKTELTKALAGFLFDDDQAMVRIDMSEFMEKHAVARLIGAPPGYVGYEEGGVLTEAVRRRPYQVVLFDEVEKAHSDVFNVLLQVLDDGRLTDGQGRVVDFSNTLIILTSNLGSQYLANMEDGQKVEEVEPQVMDVVRGHFRPEFLNRLDEIILFHRLAQEHMAPIVDIQVARVQKLLKDRKIVLDLTEAAKKWLGRVGYDPVYGARPLKRAVQRYVQDPLADMILSGNVPDGSTVAIDEGDGSLEMTVR

SEQ ID NO: 7145 - DNA, 2574 bp, Moritella sp. PE36
  CDS (1)..(2574): transl_table=11
atgcgcttagatcaacttaccaccaaattccaaatggctatttctgatgcgcagtcacttgcactgggtaaagataatcaatttatcgaacccattcacttgatgaccgcgttattaaaccaagaccacagctctattcgcccattactgaccgctgccgcgattgatgccaatgcattgcgctggcaattagcggatgagttagaccgcttaccacaagtgcaaggtacccaaggcgatctccaattatcgtcagccttgaatatgctattaaacttgtgtgataagtttgcccaaaaacgtaaagataaatttattgcttccgagatgtttgtccttgcagcggttgaagataaaggccgtttagggcaattattacgcaaagccggagggtcgcgtaagctagtcgaagaagcgattgacgtgatccgtggtggtgacaaagtgaatgaccaaggcgcggaagagcaacgtgaagcgttagccaaatataccttagatctgaccgaacgtgctgaagtcggtaagcttgatcctgtgattggccgggatgacgagatccgccgtgttatccaggtattacaacgccggactaagaataacccggtattaattggtgagcccggggtaggtaaaactgcgattgccgaaggtttggcacagcgtattgtgaatggcgaagtaccggaaggtttaaagaataaacgcgtgttatcactggatatgggggccttgattgcgggggctaaataccgtggtgaatttgaagaacggttaaaatcagtgatcaaagaactggcgcaaaccgaaggccaaacgattctgtttattgatgaactacataccatggtcggcgccggtaaaggtgagggcgcgatggatgccggcaacatgctaaaaccggcattagcccgtggtgaattacattgcatgggcgcgaccacccttgatgaataccgtaaatatattgaaaaagatgcggcacttgaacgtcgttttcaaaaagtattgattgaagagccaaatgttgaagacactattgctatcttacgtggtttaaaatcacgctatgaactacatcataatgttgatattaccgatcccgccattgttgcggcagcgaccttatcgcaccgttatatttccgatcgtcaattgcccgataaagccattgatctgatcgatgaagctgcatcgtctattcgcttacaaatggactcaaaaccagaagcgttagataaattagaacgtcgtattattcaacttaaaattgaacgacaagcgctagaaaaagaagatgactcggccagtattaaacgtttatcgacgattgctgaggaattggctgagaagcaagataagtttaacgagctagatgagatctggcggactgaaaaagccgcgctttctggtactaaacacattaaatcagcgttagataaagcccgtgttgaattggatatggctcgacgcgcgagcgatttaaataaaatgtcagaactgcaatacggcactattccaatgttagaaaaacaattggatttagccgcccaagctgaaatgcaagacatgaccttgttaaagcataaggtgggagaagccgagatcgccgatattttatcgcgttggacggggatcccggtacaccgtatgctggaaggggaaaaagaaaagctgctggcgatggaagataacttacatcaacgggtgattggtcaagcagaagcgatcagcgtggtatccaatgcgatacgccgtagccgtgccggtcttgctgatccaaaccgtccgatgggatcttttttattcatggggccaacgggtgtcggtaaaactgaagtatgcaaagccttagctgattttatctttgattcagaccaggccatgatccgccttgatatgtctgaatttatggagaagcattctgttgctcgtctgattggtgcgcctcctggttatgtgggttatgaagaaggcggttacctgaccgaagcggtacgtcgaaaaccttactcagttatcttactcgatgagattgaaaaagcgcatcctgatattttcaatattttattacaagtgttggatgatggtcgcttaacggatggtcagggacgaaccgttaacttccgcaatacggtgatcattatgacatctaacttgggctcggatatcattcaagaagagtatgggaagcatgactataatacggtgaaattacgtttgttagagttgcttggacaaagcttccgtcccgagtttattaaccgtatcgatgataccgtggtgttccatccactcgggcgtagtcacatcgagaaaattgcggtgatccagttaaaatcgttagaagcgcggttaaaacaactgggttatagcttatcgatcaccgccggtgccttagcaaaattagccgatgcggggtttgatccgttatttggtgccagaccgctaaaacgggtattacagaaacaagtcgaaaaccgcttagccaatgctattttggcaggtgatgtggtcccgggtaaacagattaagataagtgtggttgatgatgagttaagcgtgactcaataa

SEQ ID NO: 7146 - protein, 857 aa, Moritella sp. PE36
MRLDQLTTKFQMAISDAQSLALGKDNQFIEPIHLMTALLNQDHSSIRPLLTAAAIDANALRWQLADELDRLPQVQGTQGDLQLSSALNMLLNLCDKFAQKRKDKFIASEMFVLAAVEDKGRLGQLLRKAGGSRKLVEEAIDVIRGGDKVNDQGAEEQREALAKYTLDLTERAEVGKLDPVIGRDDEIRRVIQVLQRRTKNNPVLIGEPGVGKTAIAEGLAQRIVNGEVPEGLKNKRVLSLDMGALIAGAKYRGEFEERLKSVIKELAQTEGQTILFIDELHTMVGAGKGEGAMDAGNMLKPALARGELHCMGATTLDEYRKYIEKDAALERRFQKVLIEEPNVEDTIAILRGLKSRYELHHNVDITDPAIVAAATLSHRYISDRQLPDKAIDLIDEAASSIRLQMDSKPEALDKLERRIIQLKIERQALEKEDDSASIKRLSTIAEELAEKQDKFNELDEIWRTEKAALSGTKHIKSALDKARVELDMARRASDLNKMSELQYGTIPMLEKQLDLAAQAEMQDMTLLKHKVGEAEIADILSRWTGIPVHRMLEGEKEKLLAMEDNLHQRVIGQAEAISVVSNAIRRSRAGLADPNRPMGSFLFMGPTGVGKTEVCKALADFIFDSDQAMIRLDMSEFMEKHSVARLIGAPPGYVGYEEGGYLTEAVRRKPYSVILLDEIEKAHPDIFNILLQVLDDGRLTDGQGRTVNFRNTVIIMTSNLGSDIIQEEYGKHDYNTVKLRLLELLGQSFRPEFINRIDDTVVFHPLGRSHIEKIAVIQLKSLEARLKQLGYSLSITAGALAKLADAGFDPLFGARPLKRVLQKQVENRLANAILAGDVVPGKQIKISVVDDELSVTQ

SEQ ID NO: 7147 - DNA, 2613 bp, Opitutaceae bacterium TAV2
  CDS (1)..(2613): transl_table=11
atggacccgaatcaattcacccaaatgtcgcgtcaggccatcaccgatgcccagtcggaagcccgccgccgcaacaacaatgaagtcgaaacctggcacctgctgcacgccctgctcgcgcaggaaaacgggatcgtgcccgccatcgtcgaaaaactcggcctcaccacgccggccctgcaactcgccgccaaccgcgaactcgaccgcctgccgcgtgtgagtggcagcgtggatacatcaaaaatttacgtgacgcaggccgtcaacgaagtgctcacccgcgccgaggaggaggcgaagcaactcaccgacgaatttgtatccgtcgaacacctcttcctcgcgctcgtcgaagtcgccaagcccgacgccctcgccaaatacctgcgctctttcaacatcgaccgccgcgccgtcctcaaaaccctgcgcgaacttcgcggcgcgcaacgcgtcaccagcgacaaccccgaggccacctacaacgccctcaaaaaatacggcatcgatctcgtggaacaggcgaagaagggcaaaatggatcccgtcatcggccgcgacgacgagatccgccgcaccatccgtatcctttcccgcaagacaaaaaacaaccccgtcctcatcggcgaacccggcgtgggcaaaaccgccatcgttgaaggactcgcgcagcgcatcgtgcgcggcgacgtgcccgaaggcttgaaggacaaaaccatcttctcgctcgacatgggcgcgcttgtcgccggcgcgaagtaccgcggcgaattcgaagaacgcctcaaagccgtgctcaacgaagtcaaacaaagcgacggacgcatcctcctcttcatcgacgaactccacaccatcgtcggcgcgggcaagaccgagggcgcgatggacgcaggcaatctcctcaaacccatgctcgcccgcggcgaactccactgcatcggcgcgaccacgctcgacgaataccgcaagcatatcgaaaaagacgccgcgctcgaacgccgcttccaacccgtgcaagtcgagccccccagcgtcgaagacgcgatctcgatcctgcgcggcctgcgcgaacgcttcgagctccaccacggcgtgcgcatccaggacaacgccctcgtcgccgccgtcacgctctccaaccgctacatctccgaccgcttcctgcccgacaaggccatcgacctcgtggacgaagcctgcgccatgatccgcaccgagatggactccatgccgcaggaactcgacgccctcacccgccgcgccctgcaactcgaaatcgaggaaaccgcgctcaaactcgaaaaggacgacgcctccaaacagcgcctcgaaaccctccgtaaggaacttgccaatacacgcgaacaggccggcgcgctcaagcgccagtgggaacgcgaaaaggcgtccatcgaccgcgtgcgcaaaatccgcgaggaactcgacgccgcgcgcgtcgaaatggaaaaagcccagcgcgcctacgacctcaacaagctcgccgaactccagcacggccgcatcccgcaactcgaagccgaattgaaaaagagcgaatccgtcgcgaccgatggcggttcaaacaaccagcttttcaaagaagaagtctctgccgaagaagtcgccgagatcgtggccaagtggagcggcatccccgtcacgcgcctcgtcgagagcgaaaaagcaaaactcctccgcctcggcgacacgctgcatgagcgcgtcatcggccaggatgaggcggtgcaactcaccagcgaggccatcctgcgcgcccgcgctggcatcaaagatccgcgccgccccgtgggcagtttccttttcctaggacccaccggcgtcggcaagacggaactcgccaaaaccctcgccgaaacgctcttcgacagcgaagccgccatgatccgcctcgacatgtcggaatacatggagccgatttccgtaaataaactcattggcgcgccccctggctacgtcggttacgaggaaggtggccagctcacggaggccgtgcgtcgcaagccctacgcggtaatccttttcgacgagatcgagaaggctcaccacgacgttttcaatgcgctcctccaagtcctcgacgatgggcggctgacagatggtcagggccgcacagtcgacttcaaaaacacggtcatcattatgacctcgaacattggctcgcgattcctgctcgacggcgtgcagggcgacgccatacccgacggcgtgcgagagagcgtcatggcggagctacgcaaatcgtttcggccggaatttctgaaccgcatcgatgagacgattctcttcaagccgctcacactcgaagaaataacgaagatcgtcgacctcctcctgatcgacctcaacaagcgtctggctgaccgccgtgtcacggtgaatctcgataagaaagcgcgtgagtggacggcggagaagggctacgacccggtcttcggtgctcgtccgctgaagcgtttccttcaacgtaacatcgagacgaagctcgcgcgcgccctcatctctggcgagatcgccgagggcagcagcgtcaccttccaagtgaaggacgacgaattagtcgtcgaacacgccgacgtggtggaataa

SEQ ID NO: 7148 - protein, 870 aa, Opitutaceae bacterium TAV2
MDPNQFTQMSRQAITDAQSEARRRNNNEVETWHLLHALLAQENGIVPAIVEKLGLTTPALQLAANRELDRLPRVSGSVDTSKIYVTQAVNEVLTRAEEEAKQLTDEFVSVEHLFLALVEVAKPDALAKYLRSFNIDRRAVLKTLRELRGAQRVTSDNPEATYNALKKYGIDLVEQAKKGKMDPVIGRDDEIRRTIRILSRKTKNNPVLIGEPGVGKTAIVEGLAQRIVRGDVPEGLKDKTIFSLDMGALVAGAKYRGEFEERLKAVLNEVKQSDGRILLFIDELHTIVGAGKTEGAMDAGNLLKPMLARGELHCIGATTLDEYRKHIEKDAALERRFQPVQVEPPSVEDAISILRGLRERFELHHGVRIQDNALVAAVTLSNRYISDRFLPDKAIDLVDEACAMIRTEMDSMPQELDALTRRALQLEIEETALKLEKDDASKQRLETLRKELANTREQAGALKRQWEREKASIDRVRKIREELDAARVEMEKAQRAYDLNKLAELQHGRIPQLEAELKKSESVATDGGSNNQLFKEEVSAEEVAEIVAKWSGIPVTRLVESEKAKLLRLGDTLHERVIGQDEAVQLTSEAILRARAGIKDPRRPVGSFLFLGPTGVGKTELAKTLAETLFDSEAAMIRLDMSEYMEPISVNKLIGAPPGYVGYEEGGQLTEAVRRKPYAVILFDEIEKAHHDVFNALLQVLDDGRLTDGQGRTVDFKNTVIIMTSNIGSRFLLDGVQGDAIPDGVRESVMAELRKSFRPEFLNRIDETILFKPLTLEEITKIVDLLLIDLNKRLADRRVTVNLDKKAREWTAEKGYDPVFGARPLKRFLQRNIETKLARALISGEIAEGSSVTFQVKDDELVVEHADVVE

SEQ ID NO: 7149 - DNA, 2607 bp, Rickettsiella grylli
  CDS (1)..(2607): transl_table=11
atgagtcttaataaattaacaagtcaatttcagaatgcgttggccgaatcgcaatcaatcgcaatagggcatgataacgcgtttattgaacctattcatttgatgtctgctttattacgacaagaaaagggtacggtgaggcctctattaagtaaagcgaacgttaatttaaatcaattaacgaaaagtgtagatgaagcaatcgcacacttgccgagcgtagaaacttcaacaccaggtgaaatttatccttctaaagattttactcgtttattgaatataaccgataaatttgcacaacaaagacaggatgagtatctatccagtgaattatttgtattggccgcagtgggggataaaagtattttaggtgagttattaaggaaagcaggtgctgataaaacaatgattgaacaagcaataaaggatatacgaggtggcgagaccgtgaatgatcctgaagcggaaggtcgtcgaggggctttagaaaaatataccattgatttgacaacacaagcgtcacaaggaaaattagatccggtgattggtcgagatgatgtgatacgtcgaaccattcaagtgttacaacgacgaaccaaaaataatccggttcttattggtgaacctggagtgggtaaaacggctgtcgtggaagggcttgctcaacgtattgttaatcacgaagttccagaaggattaagaaataaacgtttactggctttagatatcggttcattgattgcgggggctaagtatcgtggtgaatttgaagagcgattaaaagcggtattaaatgaacttgcaaagcaagaagggcaaattattttatttattgatgagttgcataccatggtgggggcagggaaagcggaaggggctatggatgcggggaatatgctaaaacctgctttagcaagaggtcaattacactgtattggtgcaacgacattaaatgaataccgaaactatattgaaaaggatgctgcattagaacgtcgttttcaaaaaattctggttgatgagccgaatgttgaagatacgatcgctattttacggggtttaaagcaacgttatgaaattcatcatggcgtcgaaattatggattctgctattgttgcggccgcaacgttatcgcatcgttatatttcagatagaaatttaccggacaaagccattgatctgattgatgaagcggcgagtcggattcgaattgaaattgattctaaacccgaaaaattagatcgattagataggcgattaattcagttaaaaattgaacgagaagcactcaaaaaagaaaccgatgaatcctccaaaatcagattgaaaaatttagacaatgagattactgaactttcaaaaaaatatgccgatctgaatgagatttggaaagctgaaaaggcaaccttacaaggcgagcaaaaaattaaaagtgaactggaaaaggctcaatttgagttagaaaaagcacgccgttcgggcgatttgaatcgaatgtctgaactccaatatggccatattcctgctttagaaaaaaaattagtggccgctcaaaaaatagaaaaaaaagaacaacccgctttaatacgcaataaggtaagcgagaaagaaattgcagaaattgtttcacaatggaccggtatccctgttgcgaagatgctcgagggtgaacgagaaaaattattacagatggaagacgcactccataaacgggtggtgggtcaagatgaagcgatttctgtggtagccaatgccattcggcggtctcgcgcaggactttctgatccgaatcgtcccatcggatcatttattttttcaggacctacgggtgtgggtaaaactgaagtgtgcaaagctttagcaggatttttatttgattccgatgaggcgatggtgcgtttagacatgtccgaatttatggaaaaacattcggtcgcacggttaattggtgctcctccaggctatgtgggttacgaagaaggcggctatcttactgaagcagtgcgtcgaaagccttattctgtggtgcttttggatgaaattgaaaaagcacatgcggatgtattcaatattttattacaagtattagaagatggtcggttaaccgatagtcatggacgtaccgtcgactttcgaaatacagtgattgttatgacatcgaatttaggatcgcaaattattcaagaatttacttcaaagcaggactatgccgctttaaaaagtacattaatggatatcattgcgcaacattttcgacctgaatttattaatcgcgttgatgaagtggttgtatttcatgccttaaatgaaacacaaattcattcgattacaaaaattcaattacaacgcctccgtcaacgtcttggtgaacgagacttacacttagaagtgagcgaagctgccataaaccatattgctaaaatgggttacgatcctgtttatggcgcacgacctttaaaacggacgattcagcaagaattggaaaaccccattgccaaggaaatgcttgaagaaaaatttctgccgggggacaaaatttttgtggattatagtgacgataaaataaaattaaccgcaaaaaaacaacgtcaaaaaatgaggaaataa

SEQ ID NO: 7150 - protein, 868 aa, Rickettsiella grylli
MSLNKLTSQFQNALAESQSIAIGHDNAFIEPIHLMSALLRQEKGTVRPLLSKANVNLNQLTKSVDEAIAHLPSVETSTPGEIYPSKDFTRLLNITDKFAQQRQDEYLSSELFVLAAVGDKSILGELLRKAGADKTMIEQAIKDIRGGETVNDPEAEGRRGALEKYTIDLTTQASQGKLDPVIGRDDVIRRTIQVLQRRTKNNPVLIGEPGVGKTAVVEGLAQRIVNHEVPEGLRNKRLLALDIGSLIAGAKYRGEFEERLKAVLNELAKQEGQIILFIDELHTMVGAGKAEGAMDAGNMLKPALARGQLHCIGATTLNEYRNYIEKDAALERRFQKILVDEPNVEDTIAILRGLKQRYEIHHGVEIMDSAIVAAATLSHRYISDRNLPDKAIDLIDEAASRIRIEIDSKPEKLDRLDRRLIQLKIEREALKKETDESSKIRLKNLDNEITELSKKYADLNEIWKAEKATLQGEQKIKSELEKAQFELEKARRSGDLNRMSELQYGHIPALEKKLVAAQKIEKKEQPALIRNKVSEKEIAEIVSQWTGIPVAKMLEGEREKLLQMEDALHKRVVGQDEAISVVANAIRRSRAGLSDPNRPIGSFIFSGPTGVGKTEVCKALAGFLFDSDEAMVRLDMSEFMEKHSVARLIGAPPGYVGYEEGGYLTEAVRRKPYSVVLLDEIEKAHADVFNILLQVLEDGRLTDSHGRTVDFRNTVIVMTSNLGSQIIQEFTSKQDYAALKSTLMDIIAQHFRPEFINRVDEVVVFHALNETQIHSITKIQLQRLRQRLGERDLHLEVSEAAINHIAKMGYDPVYGARPLKRTIQQELENPIAKEMLEEKFLPGDKIFVDYSDDKIKLTAKKQRQKMRK

SEQ ID NO: 7151 - DNA, 2616 bp, Gemmata obscuriglobus UQM 2246
  CDS (1)..(2616): transl_table=11
atggatttgaaccagtttacagagaaggctcagcaggcactcgccggcgcccagaagctcgcggcccggcttaaccatcaacaaattgacaccgaacacgcgctgctgtcgctgctcgatcaggagaaggggctcgctcccgcgatcctgacgaaggcgggcgtgtccgtcgatgcggtcaccgtcaaacttcagcgcgagctggaccgtttacccaaggtgaccggcacgaacgccgaaccgcgcctgacgcaacggctcgtgaagctcatcgacgccgccgaggcggaagccaagaagctcaaggacgagtacgtctcggtcgagcacctgttgctcgccgcgaccgacgacaccggcaccgccggcaagacgctccgcgagttcgggctgacccgcgaccggctgctctccgcgctgaaggaggtgcgcggcagccagcgcgtgacctcgcagaaccccgaagagacgtaccagtcgctggagaagtacggccgcgacctgacgcagtacgcacgcaacggcaagctcgaccccgtaatcggccgtgacgaggagatccgccgcgtcatgcaggtgctgtcgcggcgcacgaagaacaaccccgtcctcatcggcgagcccggggtcggcaagaccgccgtcgtggaggggctggcgcaacggatcgtgcgcggcgacgtgccggaagggctgaaggacaagctcatcgtggcgctcgacatgggcgcgctgatcgccggggcgaagtaccgcggcgagttcgaggagcggctcaaggccgttctgaaggaagtgacctcgtcggacgggcggatcatcctgttcatcgacgagatgcacaccatcgtcggcgccggcaaggccgagggggcgatggacgccggcaacctgctcaaaccgctgctggcccgcggcgagttgcactgcatcggcgcgacgacgctcgacgagtaccggcagcacgtcgagaaggacgcggcgctggagcggcggtttcaaccggtgcaggtgggcgagccgtcggtggaggacaccatcagcatcctccgcgggctcaaggagcggtacgaggttcaccacggggtgcgcatcaaggacggggcgctggtgtcggcggcggtcctctcgagccgctacatcgcggaccggttcctgcccgataaggccatcgacctcgtggacgaggccgcggcgaagctgcgcaccgagatcgactcgatgccgacggagttggacgagatcagccgccgtgtgatgcaactggagatcgagcgcgaggcgctcaagaaggagtccgaccgcgcttcgaaggaccggctcgaaaagctcgagcacgaactcggcaacctgaaggccgatgccgacgcgctgaaagcacgctggcaggccgagaagcaggccgttcaacaggtgcaggcggtgcgcgagcagatcgagcaggtgaaagccgagatcgaaaaggcggagcgggcttacgacctcaataaggcggcggaactgaagtacgggaaactgccagcgctggagaagcaactcgccgcggccgaagcggcgttcgcgcgggaccgggacaacaagctcatcaaggaggaggtcggcgaggaggaggtcgccgccgtggtgagtcggtggaccggcgtgccggtgtcgaagttgctggagggcgagaaggagaagctcctgcacctagaagccgagttgcacaagcgcgtcatcggccaggacgaggccgtcacggcggtcggcgaggcggtcgttcgcgcccgtagcgggttgaaggatccgaaccggccgatcggcagcttcatcttccttggccccaccggcgtggggaagaccgaactggcccgggcgctggcggagttcctgttcgacgacgaaaaggcgatgatccgcatcgatatgtcggagtaccaggagaagcacacggtgtcgcggctggtcggcgcgcccccgggctacgtcgggtacgacgagggcgggcagctcacggaggcggtccgccggcggccctatagcgtggtgctgttcgacgagatcgagaaggcgcacccggacgtgttcaacacgctgctccaggtgctcgacgacggccggctcacggacggtcaaggccgcacggtggacttcaagaacaccatcgtcatcatgacctcgaacgtcggcagtcagcgcatcctgcagtacaagggcacgcacatcggcgaggtgtacgaccggatgcgggcggcggtgatggaggagctgcgtaaggggttccggcccgagtttttgaaccggatcgacgagatcatcgtgttccacgcgctgaccgaggcggacctgacgaagatcattgaggtccagttggggaacttgcggaagcggctcgcggagcggaagatcgggctggcgctcaccgagggggcgaaggcccacatggtgcgcgtcgggtacgacccggcctacggggcgcggccgctgaagcgcacgatccagaaggaggttgaaacgccgctcgcccggctgctcctcaagggcgaggtggccgacggcggctcggtggcggtcgattacgacgcggcgcacgacgctttgagcttcaccgcgacgccgggcgaaccggtggcataa

SEQ ID NO: 7152 - protein, 871 aa, Gemmata obscuriglobus UQM 2246
MDLNQFTEKAQQALAGAQKLAARLNHQQIDTEHALLSLLDQEKGLAPAILTKAGVSVDAVTVKLQRELDRLPKVTGTNAEPRLTQRLVKLIDAAEAEAKKLKDEYVSVEHLLLAATDDTGTAGKTLREFGLTRDRLLSALKEVRGSQRVTSQNPEETYQSLEKYGRDLTQYARNGKLDPVIGRDEEIRRVMQVLSRRTKNNPVLIGEPGVGKTAVVEGLAQRIVRGDVPEGLKDKLIVALDMGALIAGAKYRGEFEERLKAVLKEVTSSDGRIILFIDEMHTIVGAGKAEGAMDAGNLLKPLLARGELHCIGATTLDEYRQHVEKDAALERRFQPVQVGEPSVEDTISILRGLKERYEVHHGVRIKDGALVSAAVLSSRYIADRFLPDKAIDLVDEAAAKLRTEIDSMPTELDEISRRVMQLEIEREALKKESDRASKDRLEKLEHELGNLKADADALKARWQAEKQAVQQVQAVREQIEQVKAEIEKAERAYDLNKAAELKYGKLPALEKQLAAAEAAFARDRDNKLIKEEVGEEEVAAVVSRWTGVPVSKLLEGEKEKLLHLEAELHKRVIGQDEAVTAVGEAVVRARSGLKDPNRPIGSFIFLGPTGVGKTELARALAEFLFDDEKAMIRIDMSEYQEKHTVSRLVGAPPGYVGYDEGGQLTEAVRRRPYSVVLFDEIEKAHPDVFNTLLQVLDDGRLTDGQGRTVDFKNTIVIMTSNVGSQRILQYKGTHIGEVYDRMRAAVMEELRKGFRPEFLNRIDEIIVFHALTEADLTKIIEVQLGNLRKRLAERKIGLALTEGAKAHMVRVGYDPAYGARPLKRTIQKEVETPLARLLLKGEVADGGSVAVDYDAAHDALSFTATPGEPVA

SEQ ID NO: 7153 - DNA, 2583 bp, Thauera sp. MZ1T
  CDS (1)..(2583): transl_table=11
atgcgtttcgacaagctcaccaccaagttccagcaggccctcgccgatgcgcagagcatcgccgtgggcaacgaccagcagttcatcgagccgctgcacgtgctgcaggccctgctcgagcaggacgacggcggcagtgtgtcgctgctgcagcgcgccggggtcaatgtcccgccgctcaagaatgcggtcgccaaggccgtcggccgcctgcccaaggtggaagggcacggcggcgaggtcagcatcgggcgcgacctcaacaacctgctcaacgtcaccgaccgtgaagcgcagaaacgcggcgaccagttcatcgccagcgagatgttcctgctcgcgctcgcggacgacaagggcgaggccggccgcctgctcaaggagaacggcctggcgcgcaaggcgctcgaggccgcgatcgaggcggtgcgcggcggcgccaacgtgggcagccaggacgccgaaggccagcgcgaatcgctgtcgaagtactgtctcgacctcaccgagcgcgcacgaagcggcaagctcgacccggtgatcggtcgtgacgacgagatccgccgcgccatccagatcctgcagcgccgcaccaagaacaacccggtgctgatcggcgagccgggcgtgggcaagaccgcgatcgtcgagggcctggcgcagcgcatcgtcaatgacgaggtgcccgagacgctcaagggcaagcgcgtgctctcgctcgacatggcggcgctgctcgccggcgccaaataccgcggcgagttcgaggagcgcctgaaggcggtgctcaaggagatcgcccaggaagaggggcgcatcatcgtgttcatcgacgagctccacaccatggtgggcgccggcaaggccgagggcgcgatcgatgccggcaacatgctcaagcccgcgctcgcacgcggcgagttgcactgcatcggcgccaccacgctcgacgaataccgcaagtacatcgagaaggacgcggcgctcgagcgccgcttccagaaggtgctcgtcgaggagccttcggtcgaggcgaccatcgccatcctgcgcggcctgcaggagaagtacgagatccaccacggcgtcgacatcaccgacccggccatcgtcgccgcggccgaactgtcgcaccgctatatcaccgaccgcttcctgcccgacaaggcgatcgacctgatcgacgaggccgcggcgcgcatcaagatggagatcgactccaagcccgaggtcatggacaagctcgaccgtcgcatgatccagctcaagatcgagcgcgaggcggtgaagaaggagaaggacgaggcttcgctcaagcgcctgcaactgatcgaggacgagctcgccaagctgcagcgcgagtacaacgacctggaagaggtgtggaaggcggagaaggccaaggtcgccggctcggcccacatcaaggaggagatcgacgcgctgcgcgcgcagatggccgagtaccaacggaagggccagctcgacaaggtcgccgagctgcagtacggcaagctgccgcagctcgagggccagctcaggatggccgagcaggcgggccagaatgccgcgcccaacaagctgctgcgcaccgaggtgggcgccgaggagatcgccgaggtcgtatcgcgcgccaccggcatcccggtgagcaagatgatgcagggcgagcgcgagaagctcctgaagatggaggacaagctgcacgagcgcgtggtcggccaggacgaggcggtgcgcctggtggccgacgccatccggcgctcgcgcgcgggcctgtcggacgagaaccgtccctacggctccttcctcttcctcggccccaccggggtgggcaagaccgagctgtgcaagacgctggcgaacttcctgttcgattccgaggaacacctgatccgcatcgacatgagcgagttcatggagaagcactcggtggcgcgcctgatcggtgcgcccccgggctacgtcggctacgaggaaggcggctacctgaccgagcaggtgcggcgcaagccctatagcgtgatcctcttcgacgaggtcgagaaggcgcatccggacgtgttcaacgtgctgctgcaggtgctcgacgacggtcgcatgacggacggccagggccgcacggtggacttcaagaacaccgtgatcgtgatgacctccaacctcggcagccagatgatccaggccatggcgggagacgactacggggtgatcaagctcgcggtgatggcggaagtgaagacctacttccgtccggagttcatcaaccgcatcgacgaggtggtggtgttccacgcgctggatgaaaagcacatcgccggcatcgcgaagattcagttgcagtacctcgagaagcgcctggcgcggctggaaatgggcatggagatcagcgatgcggcgctcgccgagctcgcgactgccggcttcgacccggtgtttggcgcacggcccttgaagcgggcgatccaggagcgcatcgagaacccgctcgcgaaggcgatcctcgaaggtcgcttcgccgccaaggactgcatccgggtggatgccgagggcgggcaactggtgttccggcgcgccgactga

SEQ ID NO: 7154 - protein, 860 aa, Thauera sp. MZ1T
MRFDKLTTKFQQALADAQSIAVGNDQQFIEPLHVLQALLEQDDGGSVSLLQRAGVNVPPLKNAVAKAVGRLPKVEGHGGEVSIGRDLNNLLNVTDREAQKRGDQFIASEMFLLALADDKGEAGRLLKENGLARKALEAAIEAVRGGANVGSQDAEGQRESLSKYCLDLTERARSGKLDPVIGRDDEIRRAIQILQRRTKNNPVLIGEPGVGKTAIVEGLAQRIVNDEVPETLKGKRVLSLDMAALLAGAKYRGEFEERLKAVLKEIAQEEGRIIVFIDELHTMVGAGKAEGAIDAGNMLKPALARGELHCIGATTLDEYRKYIEKDAALERRFQKVLVEEPSVEATIAILRGLQEKYEIHHGVDITDPAIVAAAELSHRYITDRFLPDKAIDLIDEAAARIKMEIDSKPEVMDKLDRRMIQLKIEREAVKKEKDEASLKRLQLIEDELAKLQREYNDLEEVWKAEKAKVAGSAHIKEEIDALRAQMAEYQRKGQLDKVAELQYGKLPQLEGQLRMAEQAGQNAAPNKLLRTEVGAEEIAEVVSRATGIPVSKMMQGEREKLLKMEDKLHERVVGQDEAVRLVADAIRRSRAGLSDENRPYGSFLFLGPTGVGKTELCKTLANFLFDSEEHLIRIDMSEFMEKHSVARLIGAPPGYVGYEEGGYLTEQVRRKPYSVILFDEVEKAHPDVFNVLLQVLDDGRMTDGQGRTVDFKNTVIVMTSNLGSQMIQAMAGDDYGVIKLAVMAEVKTYFRPEFINRIDEVVVFHALDEKHIAGIAKIQLQYLEKRLARLEMGMEISDAALAELATAGFDPVFGARPLKRAIQERIENPLAKAILEGRFAAKDCIRVDAEGGQLVFRRAD

SEQ ID NO: 7155 - DNA, 2577 bp, Verrucomicrobium spinosum DSM 4136
  CDS (1)..(2577): transl_table=11
atgaacccggaacgaatcactgttaaacttcaagaagccctggcctcgtcgcaatcccttgcgacccgctatggccacgcggaggtgaaaccctctcacatgctgctgaccctgctggagcaggacggcggcatcaccaagcccttggtggacaaggtgggtgccaacgcggctgctctccagtctgctgtggaagctttcctggccaagcagccccggatctctggcggcggcggggccgaccggctctccggcgatctccgtgagacgctggccaatgccgaaaaggagcaaaagacgctcaaggacgagtacctgagcgtggagcacttcctcctcgccctcttcaagacgcgcaccgatatcgaaggcgtgctgaagcaggccgggctgaagtacgagaccctgctgcaggccctcacttccgtgcgtggcgcccagcgggtgactgaccaggacccggaagggaagtatcagacgctggaaaaatacggtacggacctgaccgcccgtgcgcggcaggggaagatcgatcccgtgatcggccgtgacgacgagattcgccgtgtcatgcaggtgctctcgcgccgcagcaagaacaaccccgtcctgattggcgagcccggggtgggcaagaccgcgattgtggagggattggcccgccgcatcgtcgcgggtgacgtgcccgactccctgaagaacaagcgcgtcatcagcatggacctgggcgggatgctggccggggccaagtatcgtggtgagttcgaagagcgcctcaaggccttccttaaagaagtcacttccagcgaaggcgagatcatcctcttcatcgatgagctccacaccattgtgggagcaggcgcgagtgaaggtgccgtggacgccagcaacctgctcaagccgcaactcgctcgtggagagttgcgctgcgttggggcgaccaccctggacgagtatcgcaagtacattgaaaaggacgccgctctcgagcgccgcttccagccggtgtacgtgggagagcccagtgtcgaggacaccatcgccatcctgcgaggcctgaaggaacgctatgaagtgcaccatggcgtgcgcattcaagacagcgccatcgtggcggcggccactctgagccaccggtacatcagtgatcggttcctgccggacaaggcggtggacctggtggacgaggctgccagtaggctgaagattgagctcgactccatgcccacggagatcgacgtcatcgagcgtgatgtcatgcagcgggagatggagcggcaggccctcaagaaggagaccgatcccgccagccgtgcccgtctggaaaagctggaaaaggaaattgccgacctgaaagagaagggctccggcctgaagcttcagtggcagaaggagaaggaagtcgtgcaggccagccgcaaggtgaaggaggagattgaccgcctccgcactgagcaggagcaagcccagcgtcgcggcgactttgcccgcgccggggagatccagtacggccttatccccgacctggagaagaagctccaggaggcgacccaggcccatgcccaggggactgccaaagggcagttgctgcgggaagaggtgactgaggacgacatcgccaaggtggtcgccacctggactgggatccccgtgagccgtcttcaggaaggggagcggtcgaagctcacccacatggaggaccgtctggccaatcgcgtcatcgggcagaagaacgccatcaaggcggtctcgaatgcagtccggcgcgcccgggccggcctccaggatgagaaccgccccattggcagcttcctcttcctcggacctaccggggtggggaagacggagctgagcaaggctctggccgagttcctctttgacgatgagaacgccatgacccgcatcgacatgagcgagtacatggagaagcacagcgtggcccgactcatcggggcacctcccggctatgtcggctatgaagagggggggcagctcacggaggcggtgcgccgccgaccctatagtgtggtcctctttgacgaagtggagaaggcccacccggatgtgttcaactccctcctccaggtgctggatgacgggcggatcacggacgggcaggggaggacggtggacttccggaacacggtcatcatcatgaccagcaacatcggcagccatgccatccaggaagaggccaatcccgagcagcgggaggctctcgttcgggatgccttgcgccagttcttccgtccggagttcctgaaccgcattgatgaggtcatcatcttcgaccggctcgatgcccgcgatctcagcgccatcgtcaaggtgcagctccagcgggtggtcagccgcctggcgaagcaaaacatcggcctggtcctcacggacgaggcggtgcggaagattgccgacgaaggctacgaccccgtcttcggagcacgcccgctcaagagggctatccagaggctggtactggacccgctctcgctcgacatgctggacgggaagttcgtcgatggcgaagtcattgaggcccgactggagggcaccgggatccagttcgccaagaagtga

SEQ ID NO: 7156 - protein, 858 aa, Verrucomicrobium spinosum DSM 4136
MNPERITVKLQEALASSQSLATRYGHAEVKPSHMLLTLLEQDGGITKPLVDKVGANAAALQSAVEAFLAKQPRISGGGGADRLSGDLRETLANAEKEQKTLKDEYLSVEHFLLALFKTRTDIEGVLKQAGLKYETLLQALTSVRGAQRVTDQDPEGKYQTLEKYGTDLTARARQGKIDPVIGRDDEIRRVMQVLSRRSKNNPVLIGEPGVGKTAIVEGLARRIVAGDVPDSLKNKRVISMDLGGMLAGAKYRGEFEERLKAFLKEVTSSEGEIILFIDELHTIVGAGASEGAVDASNLLKPQLARGELRCVGATTLDEYRKYIEKDAALERRFQPVYVGEPSVEDTIAILRGLKERYEVHHGVRIQDSAIVAAATLSHRYISDRFLPDKAVDLVDEAASRLKIELDSMPTEIDVIERDVMQREMERQALKKETDPASRARLEKLEKEIADLKEKGSGLKLQWQKEKEVVQASRKVKEEIDRLRTEQEQAQRRGDFARAGEIQYGLIPDLEKKLQEATQAHAQGTAKGQLLREEVTEDDIAKVVATWTGIPVSRLQEGERSKLTHMEDRLANRVIGQKNAIKAVSNAVRRARAGLQDENRPIGSFLFLGPTGVGKTELSKALAEFLFDDENAMTRIDMSEYMEKHSVARLIGAPPGYVGYEEGGQLTEAVRRRPYSVVLFDEVEKAHPDVFNSLLQVLDDGRITDGQGRTVDFRNTVIIMTSNIGSHAIQEEANPEQREALVRDALRQFFRPEFLNRIDEVIIFDRLDARDLSAIVKVQLQRVVSRLAKQNIGLVLTDEAVRKIADEGYDPVFGARPLKRAIQRLVLDPLSLDMLDGKFVDGEVIEARLEGTGIQFAKK

SEQ ID NO: 7157 - DNA, 2667 bp, Cyanothece sp. PCC 8801
  CDS (1)..(2667): transl_table=11
atgcagccaactgattcgagtaaatttacagaacaagcctgggatgccatcgtcaagtctcaagatatcgcccgacgcttcaaaaatcagaccttagaagtcgagcacgttgtcttagccctcttagaacaagaaaaaggcctcgctatacggattttagaaagggctaacctagatattccccgtttgcaacaacaaatcgaagcctttgccaaccgtcaatcgaaattaatggcagttgatcaactttaccttggccaagggttagatttaatgctcgatcgcgccgaagcttcccgcaccagttggcaagacaaatacatctccgtcgaacatctcctaatggggttcgcagaagacgaacgcattgggagacgttgtttacgcagctttcaactagacccccaagacctcgaacgagaaattaaagccgttcggggatcgcaaaaagtcaccgaacagaaccaggaagaccgctacgaagccctggaaaaatatgggcgagatctcaccgaacaggcaaaagaaggcaaattagaccccgttatcggacgagatgaagaaatccgccgcgtcatccaagtgctctcccgtcggtcgaaaaataaccccgtcctcattggagaacccggagtcggaaaaaccgcgatcgccgaaggattggcacaacgtatcatcaacggcgatgttcccgaatctttgaaaaatcgtcaattaatctccctagacatgggtagcctcatcgccggagccaaatatcgcggggaatttgaagaacgacttcgtaccgtcatgcgcgaagtcacccactccgacggccgcattatcctgtttatcgacgaactccacaccgtcgtcggggcagggtcccgtgaagggggaggaatggatgccggaaacctcctcaaacccatgttagcgcggggagaattgcgctgtatcggggcaaccaccctcgatgagtaccgcaagcacatcgagaaagatccccccctagaacggcgttttcagcaggtctacgtcaaacaacccaccgtcgaggacactatctcgatcctacggggactcaaagaacgctacgaactgcaccacggggtcaaaattaccgactcagccctagttgcggcggctaacctctcccatcgttacatcagcgatcgctttttacccgacaaagcgatcgacctcgtagacgaggcagccgctaaactgaaaatggagatcacctccaaacccgtcgaactcgaagacgttgatcgccgtctgatgcagttgcagatggagaaactctccctagaagccgaagaacaacggggaatgttggtcattgatcgctcctccaaagagcgtttagaggcaattcaacagcaaattaaagccctagaaactacccatgaacaactgaactcccaatggcaggccgaaaagcagatgttggatgagatcaatgccctcaaggaagaagaagaacacctccgtaagcaggtggaacaggcagaacgggactacgatctcaataaggctgcccaactcaaatacgggaaattagaagtcctccaacggcaattagaggctaaagaaaccgaactcctcgatattcagtcccaaggtaaaaccctcctgcgtgaacaagtcaccgagtcagatatcgccgaaattgtggcgggatggacgggtattcccctcaaccgtctgttagcgactgaacggcaaaaattgctccaacttgaaggccatctccatgaacgggttatcggtcagagtgaagctgttgctgctgttgccgcagccattcgtcgcgcccgcgcgggaatgaaagatccttcgcgtcctatcggttctttcttgtttatgggaccaacaggggtcggaaagacggaattagctagggcgttagctgcctttctctttgattcagaagaggcgatggttcgtatcgatatgtctgaatacatggaaaaacacgccgtctcgcgcttggtcggggctccccccgggtacgtcgggtatgaggaagggggtcaactgtctgaggcagtacgtcgtcgtccctattgtgtggtactcttggatgaggtggaaaaagcccatattgatgtatttaatatcctcctacaagtccttgacgatgggcgtattaccgactcccaagggcgtgtcgtagacttccgtaatgcgattattgtcatgaccagtaatatcggaagtgaccatattttaaacttgtcgggagatgatacggactatgaaaaaatgcgccaacaggttttacaagccttacgcaagcattttcgtccggaatttctcaaccgcattgatgatttgattattttccataccctgaaacggaacgaattgcgtcagatcgtcagtctacaaattaagcgtattgaacaattattagccgaacagaaaattaatctggaattaagcgatgctgccttggattatttagtaaactcagggtatgatccaacctacggggcacgtccccttaaacgggcaattcaacgggagttggaaaacccgatggcaactaaattattagaaaatacctttgttagtggggataaaattttaattgattgtcaagaaaaccatttaatttttaggaaaaaagcagaagaaataatcctgacggtagaaccagaaattgtttcatcctaa

SEQ ID NO: 7158 - protein, 888 aa, Cyanothece sp. PCC 8801
MQPTDSSKFTEQAWDAIVKSQDIARRFKNQTLEVEHVVLALLEQEKGLAIRILERANLDIPRLQQQIEAFANRQSKLMAVDQLYLGQGLDLMLDRAEASRTSWQDKYISVEHLLMGFAEDERIGRRCLRSFQLDPQDLEREIKAVRGSQKVTEQNQEDRYEALEKYGRDLTEQAKEGKLDPVIGRDEEIRRVIQVLSRRSKNNPVLIGEPGVGKTAIAEGLAQRIINGDVPESLKNRQLISLDMGSLIAGAKYRGEFEERLRTVMREVTHSDGRIILFIDELHTVVGAGSREGGGMDAGNLLKPMLARGELRCIGATTLDEYRKHIEKDPPLERRFQQVYVKQPTVEDTISILRGLKERYELHHGVKITDSALVAAANLSHRYISDRFLPDKAIDLVDEAAAKLKMEITSKPVELEDVDRRLMQLQMEKLSLEAEEQRGMLVIDRSSKERLEAIQQQIKALETTHEQLNSQWQAEKQMLDEINALKEEEEHLRKQVEQAERDYDLNKAAQLKYGKLEVLQRQLEAKETELLDIQSQGKTLLREQVTESDIAEIVAGWTGIPLNRLLATERQKLLQLEGHLHERVIGQSEAVAAVAAAIRRARAGMKDPSRPIGSFLFMGPTGVGKTELARALAAFLFDSEEAMVRIDMSEYMEKHAVSRLVGAPPGYVGYEEGGQLSEAVRRRPYCVVLLDEVEKAHIDVFNILLQVLDDGRITDSQGRVVDFRNAIIVMTSNIGSDHILNLSGDDTDYEKMRQQVLQALRKHFRPEFLNRIDDLIIFHTLKRNELRQIVSLQIKRIEQLLAEQKINLELSDAALDYLVNSGYDPTYGARPLKRAIQRELENPMATKLLENTFVSGDKILIDCQENHLIFRKKAEEIILTVEPEIVSS

SEQ ID NO: 7159 - DNA, 2619 bp, Cyanothece sp. PCC 8801
  CDS (1)..(2619): transl_table=11
atgcaacccacgaatcctaaccaatttacagaaaaagcttgggaagccattgtgcgaactcccgatattgctaaacaacatagtcatcaacaaatcgaaacagaacatctgatgaattcccttttgcaacaagagggactagctactagcgtctttaataaagcagatattagtgttcaaagattacgcgataaaaccgaagaatttatccgtcgtcaacccaaagtttctaaccctggagagtctgtttatttaggaagaagtttagatcaattattagatcgcgctgaacaatttcgtcaagaatttggggatgattacatctccattgaacatttattgttagcctacactaaagatgatcgctttggccaaggcttattcaaagaatttagcctcaacgaaaccaaacttaaagagattattaaacaagtacgaggaacgcaaaaagtgaccgaccaaaacccagaaggaaaatatgaatctttagaaaaatatggtcgagatctaacccaattagcgcgagaaggtaaacttgatcccgtgattggaagagacgatgaaattcgccgtactattcaaattctctcccgtcgaaccaaaaataatcccgttttaattggagaacccggagtcggtaaaaccgccattgtagaagggttagcacaacgaattattaaccgtgatgtgcctgaatctttacgcgatcgcaagttaattgccttggatatgggagcattaattgccggggcaaaatatcgcggagaatttgaagaacgcctcaaagccgtactcaaagaagtgaccgattcccaaggcaatattatcatgtttattgatgaaattcataccgtggtgggggcaggagcaacccaaggcgcgatggatgcagggaacctcttaaaacccatgttagcccggggagaattgcgctgtattggggcaacaaccctcgatgaataccgtaagtatatcgaaaaagatgcagccctagaacggcgttttcaagaggttctagtggatgaacccaatgtggttgataccatctctattttacggggactcaaagaacggtatgaactgcatcacggggtaaaaattgctgatactgcgttggttgctgcggcgatgttgtctaaccgttatattagcgatcgctttttaccggataaagccattgatttagtcgatgaagctgctgctaaattaaagatggaaatcacctccaaaccggaagaattagatgaagttgatcgcaagattcttcaattagaaatggaacggttatccttacaaaaagaagaagataaagcctcccgtgaacggttagaaaaactcgaaaaagaactcgccgatctcaaggaacagcaatcccaattaaacgcccaatggcaagccgaaaaaggggtcattgatgaaatccgtcaagtcaaaggagccatcgatcagattaacttagaaattcaacaagctgaacgggattacgaccttaataaagctgctgaattacgctatggtaaattaacggatttacagcgaaaaataaaagaactggaaactaaaattgaagaacgacaaattatgggtaaaaccttgctgcgcgaagaagttttagagtcagatattgcagaaattatctctaaatggacagggattccccttagtaaattagtcgaatctgagaaagaaaaactactacagttagaagacgaactccatgaacgagttattggtcaagaagaggctgtaacggctgtatcagaagctatccagcgttcccgtgcaggactttctgatcccaatcgtccaaccgctagttttattttcttgggtccaactggagtcggtaaaactgaattagctaaggcattagcgaagaatctttttgataccgaagaagccttagttcggattgatatgtctgagtatatggagaaacacgcggtatctcgtttattgggggctcctccagggtatgtgggctatgatgaagggggacaattaaccgaagcaattcgccgccgtccctattcggttatcctctttgatgagattgaaaaagcccataatgatgtctttaatgtcatgctacaaattctcgatgatgggcgtttaaccgatgctcaaggtcatgtagtagacttcaagaatactatcattattatgaccagtaatatcgggtcacaatacattttagatgtcgctggagatgactctcgttatgaagaaatgcgctcccgtgtgatggaagccatgactaatagtttccgtcccgaatttcttaaccgtatcgatgaaatcattattttccacgggttacaaaaatctcaattacgcgagattattaaactccaagttgctttgttagaaacgcggttatctgaacaaaaaatctatctgaaactgtcagaagaagctctagattttgtggcagaaattggttatgatcccgtgtatggtgcaagacccttaaaacgggctatccagaaatatttagaaactgcgatcgcaaagtcaattctacggggtgaatttaaggcaggagacaccatctttgtagacgtagaagccgaaagattaacctttaaacggctaccctctgaaatgttaaccatctaa

SEQ ID NO: 7160 - protein, 872 aa, Cyanothece sp. PCC 8801
MQPTNPNQFTEKAWEAIVRTPDIAKQHSHQQIETEHLMNSLLQQEGLATSVFNKADISVQRLRDKTEEFIRRQPKVSNPGESVYLGRSLDQLLDRAEQFRQEFGDDYISIEHLLLAYTKDDRFGQGLFKEFSLNETKLKEIIKQVRGTQKVTDQNPEGKYESLEKYGRDLTQLAREGKLDPVIGRDDEIRRTIQILSRRTKNNPVLIGEPGVGKTAIVEGLAQRIINRDVPESLRDRKLIALDMGALIAGAKYRGEFEERLKAVLKEVTDSQGNIIMFIDEIHTVVGAGATQGAMDAGNLLKPMLARGELRCIGATTLDEYRKYIEKDAALERRFQEVLVDEPNVVDTISILRGLKERYELHHGVKIADTALVAAAMLSNRYISDRFLPDKAIDLVDEAAAKLKMEITSKPEELDEVDRKILQLEMERLSLQKEEDKASRERLEKLEKELADLKEQQSQLNAQWQAEKGVIDEIRQVKGAIDQINLEIQQAERDYDLNKAAELRYGKLTDLQRKIKELETKIEERQIMGKTLLREEVLESDIAEIISKWTGIPLSKLVESEKEKLLQLEDELHERVIGQEEAVTAVSEAIQRSRAGLSDPNRPTASFIFLGPTGVGKTELAKALAKNLFDTEEALVRIDMSEYMEKHAVSRLLGAPPGYVGYDEGGQLTEAIRRRPYSVILFDEIEKAHNDVFNVMLQILDDGRLTDAQGHVVDFKNTIIIMTSNIGSQYILDVAGDDSRYEEMRSRVMEAMTNSFRPEFLNRIDEIIIFHGLQKSQLREIIKLQVALLETRLSEQKIYLKLSEEALDFVAEIGYDPVYGARPLKRAIQKYLETAIAKSILRGEFKAGDTIFVDVEAERLTFKRLPSEMLTI

SEQ ID NO: 7161 - DNA, 2673 bp, Cyanothece sp. PCC 7424
  CDS (1)..(2673): transl_table=11
atgcagccaactgactctagtaaatttacagaacaagcttgggatgcgatcgtaaaatctcaagaagttgctcgtcgttataaaaatcagaccctagaaattgaacacctggttattgccctactcgaacaagaaaaagggctagccggtcgaattttaaatcgggcccagatcgactcaataagattaaaacagcaactcgaaacctttgccactcgccaacccaaatttatgagcgtcgatcaactctacctcggtcggagtttagatatcatgttagaccgggcggatgcttcacgagaaagttggcaagataaatttatctcggttgaacatctgttgatcggttttgccgaagatgaacgcatcggacgacgatcgttaaaagggtttaacctcgatccccaagacttagaagctcatattaaagccattcgagggactcaaaaggtcgttgaaccgaaccaagaagaccgttatgaagccttggttaaatatggccgagatctcaccgaacaagccaaagaagggaaattagaccccgttatcggacgagatgacgaaattcgccgagtggttcaagttctctcccgtcggtctaaaaataaccccgttttgatcggagaacccggagtcggaaaaacggcgatcgccgaaggactcgcccaacggatcgttaatggagatgttccagagtccctgaaaaaccgtcaattaatctccttagatatgggaagtctgatcgccggggctaaatatagaggagaatttgaagaacggttaaggacggtgatgaaagaagtcacccagtctgacgggcaaattattctatttatcgatgaacttcataccgtagtcggtgcgggttcacgggaagggggatcaatggatgccggcaacctcctcaaacccatgttagctcgtggagaattacactgtattggggcgagtaccttagacgaatatcggaaacatattgaaaaagatcccgcgcttgaacgccggtttcaacaagtttatgtcaaacaaccgagcgtagaagataccatatcaattttacggggacttaaagaacgctatgaagtccatcacggggtaaaaattactgactctgctttagtggcagcagcaaccttatctcatcgctatattaccgatcgctttttacccgataaggcgatcgatctcgtcgatgaggcagcagctaaattaaagatggaaataacttctaaaccggtggaattagaagggatcgatcggcgtttgatgcagttacagatggaaaaactttctttagaaggagaagaaaaacgcccaggaatgttaacagtcgatcgcgcctctaaagaacgcttggatcgaattcaacaagaaatagaagaattagaaagtcaacaaaaagaactctcttcccaatggcaaggagaaaaacaattattagatgaaattaatgctttaaaagaagaagaagaacaattacgtctgcaagttgaacaagcagaacgggcgtatgatcttaataaagcggctcaattaaaatacggtaaattacaagttttagaacaagaaatagaaagcaaagaagttaaattattagaacttcaagcccaaggaacttgtttacttcgggaacaagtgacagaatcagatattgcggaaatagtcgcccggtggacgggtattcctatcaaccgtttattagaaacagaacggcaaaaacttctacaattagaagttcatctccatgaacgggtgatcggacaaactgaggcagtagccgccgttgcagcagcgatccgtcgcgccagagcgggtatgaaagacccttctcgtcctattggctcatttttgtttatggggccgacaggagtcggaaaaacggaattagcgagggcattagcgcaattcttgtttgactcagaagaggcgatggtgagaattgatatgtcggaatatatggagaaacacgccatttcccgtttaattggcgctcctccgggatatgtagggtatgaggaagggggacaactctcagaagcagtgcgtcgtcgtccttattcggtggtgttgttggatgaagtagaaaaagcccatcgggatgtatttaacattttattacaagtgcttgacgatggacggattaccgactctcaagggcgagtagtggactttcgtaataccattattgtcatgaccagtaatatcggcagtgagcatattttaaatgtatctgggaatgatacggattatgaagaaatgcgaaagcgagtgttacaagctttaagaaaacatttccgcccagaatttttaaatcgaattgatgatttaattattttccataccctgaaaaaagacgaattacgttatattgtccgcctacaattacaacggattcaaaagttattatctgagcaaaagattaccttagagttaactaacttggctcaagattatattgttaatgtgggatatgatccggtgtatggggcgcgtcctttaaaacgggcaatacaacgagaattagaaaatcctttggcgatgaagattttagatcagacctttgttgagggagataccgttgtaattgactgtgtcaataacgctttaacctttagtaaacctgacgaggaagaagtgattgaagcgatagtccctgaaattgtttatccttaa

SEQ ID NO: 7162 - protein, 890 aa, Cyanothece sp. PCC 7424
MQPTDSSKFTEQAWDAIVKSQEVARRYKNQTLEIEHLVIALLEQEKGLAGRILNRAQIDSIRLKQQLETFATRQPKFMSVDQLYLGRSLDIMLDRADASRESWQDKFISVEHLLIGFAEDERIGRRSLKGFNLDPQDLEAHIKAIRGTQKVVEPNQEDRYEALVKYGRDLTEQAKEGKLDPVIGRDDEIRRVVQVLSRRSKNNPVLIGEPGVGKTAIAEGLAQRIVNGDVPESLKNRQLISLDMGSLIAGAKYRGEFEERLRTVMKEVTQSDGQIILFIDELHTVVGAGSREGGSMDAGNLLKPMLARGELHCIGASTLDEYRKHIEKDPALERRFQQVYVKQPSVEDTISILRGLKERYEVHHGVKITDSALVAAATLSHRYITDRFLPDKAIDLVDEAAAKLKMEITSKPVELEGIDRRLMQLQMEKLSLEGEEKRPGMLTVDRASKERLDRIQQEIEELESQQKELSSQWQGEKQLLDEINALKEEEEQLRLQVEQAERAYDLNKAAQLKYGKLQVLEQEIESKEVKLLELQAQGTCLLREQVTESDIAEIVARWTGIPINRLLETERQKLLQLEVHLHERVIGQTEAVAAVAAAIRRARAGMKDPSRPIGSFLFMGPTGVGKTELARALAQFLFDSEEAMVRIDMSEYMEKHAISRLIGAPPGYVGYEEGGQLSEAVRRRPYSVVLLDEVEKAHRDVFNILLQVLDDGRITDSQGRVVDFRNTIIVMTSNIGSEHILNVSGNDTDYEEMRKRVLQALRKHFRPEFLNRIDDLIIFHTLKKDELRYIVRLQLQRIQKLLSEQKITLELTNLAQDYIVNVGYDPVYGARPLKRAIQRELENPLAMKILDQTFVEGDTVVIDCVNNALTFSKPDEEEVIEAIVPEIVYP

SEQ ID NO: 7163 - DNA, 2586 bp, Herbaspirillum seropedicae
  CDS (1)..(2586): transl_table=11
atgcgtctcgacaaactcaccaccaaattgcaggaagcgctggccgatgcgcaatcccaggccgtcggccacgacaatcaatacatcgaacccgtccacctcatcctggcgctgctgaaccaggaggacggcggcgctcgctcgctgctgcagcgcgccggcgtgaacgtcaatggtctgtctgccgccttgcaggcggccgtcaagcgcctgccgcaggtctccggcaatggcggcgaagtgcaggtcggccgcgagctggtggccctgctgaacctggccgacaaggaagcgcaaaagcatggcgaccagttcgtcgccagcgaaatggtgctgctgggcctggtggacgacaagtccgacgccggccgcgccgcgcgcgaaaacggtctgacccgcaagtcgctggaagcggccatcaccgccgtgcgcggtggcgcgtccgtgtcctcgcagcaagatgaaggccagcgcgaagccctgaagaaatacaccctggacctgaccgagcgtgcccgcgccggcaagctcgacccggtgatcggccgcgacgatgaaatccgccgcgccatccaggtgctgcaacggcgcagcaagaacaacccggtcctgatcggggagccgggcgtgggcaagaccgccatcgtcgaaggcctggcccagcgcatcgtcaatggcgaagtgccggacagcctcaagtccaagcgcgtgctgtcgctggacatggcggccctgctggcgggcgccaagtatcgcggcgaattcgaggaacgcctgaaagcggtcttgaaggaaatcgcccaggacgaaggccagaccatcgtcttcatcgatgagttgcataccatggtcggcgccggctatgccgagggcgccatggacgccggcaacatgttgaagccggccctggcgcgcgccgaactgcactgcgtgggcgccaccaccctggatgaataccgccagtacatcgagaaagatgccgcgctggaacgccgcttccagaagatcctggtggatgagcccagcgtggaagccaccatcgccatcctgcgcggtctgcaggaaaagtacgaggtgcaccacggcgtggacatcaccgacccggccatcgtggctgcggccgagctgtcgcatcgctatatcaccgaccgcttcctgccggacaaggccatcgacctgatcgacgaagcggcttccaagatcaagatcgaaatcgattccaagccggaagtgatggacaagctcgaccgtcgcctgatccagttgaagatcgagcgcgaagccgtcaagcgcgagaaggacgaagcctcgcagaagcgcctgcagctgatcgaggaagaaatcgagaagctcgagcgcgaatacgccgacctggaagaaatctggaaggccgagaagtcgagcgcccagggcggccagcaattgaaggaagaaatcgagaaggtgcgcctgcagatggaagaggccacccgcaagagcgactggcagaaggtctcggaactgaagtacggcaagctggccgagctggaagccgcgctggaagtgcagaacaagaaggatgcggcgggcgtcaagaccgagaagcccaagctggtgcgcacgcaggtgggcgctgaggaaatcgccgagatcgtcgcgcgcgccactggcattccggtctcgcggatgatgcagggcgaacgcgaaaaactgctgcacatggaagacgtgctgcatgaacgcgtggtcggccaggacgaagccatcgtggccgtctccgacgccatccgccgttcccgtgccggcctgggcgatcccagcaagccctatggttccttcatgttcctgggccccaccggggtgggcaagaccgagctgtgcaaggcgctggcctcctatctcttcgataccgaggaagccatgatccgcatcgacatgagcgaattcatggagaagcattccgtggcccgcctgatcggcgcgccgccgggctatgtcggctatgaagagggcggttacctgaccgaagcggtgcgtcgcaagccctacagcgtgatcctgctcgacgaaatcgagaaggcccacccggatgtcttcaacgtgctgctgcaggtgctggacgatggccgcatgaccgatggccagggccgtaccgtggacttcaagaacaccgtgatcgtgatgacttccaacctgggttcgcacaagatccagagcatggaagacagcgatccggccctggtgaagctggccgtgatggccgaggtgcgcacccacttccgtccggaattcatcaaccgggtggatgagatcgtggtcttccacgcgctggacgccaagaacatcggcgccatcgccaagatccagctgcgcatcctggagcaacgcctggccaagctggagatcggcctggagatcagcgaggccggtttgcagaagatcgccgaggctggtttcgatccggtctatggcgctcgtccgctcaagcgcgccatccagcaggagatcgagaacccgctgtccaagcagatcctggcaggcaagttcggtcccaaggatgtggtgcgggtggacgtggaccatggccagttgagtttcagcaagtaa

SEQ ID NO: 7164 - protein, 861 aa, Herbaspirillum seropedicae
MRLDKLTTKLQEALADAQSQAVGHDNQYIEPVHLILALLNQEDGGARSLLQRAGVNVNGLSAALQAAVKRLPQVSGNGGEVQVGRELVALLNLADKEAQKHGDQFVASEMVLLGLVDDKSDAGRAARENGLTRKSLEAAITAVRGGASVSSQQDEGQREALKKYTLDLTERARAGKLDPVIGRDDEIRRAIQVLQRRSKNNPVLIGEPGVGKTAIVEGLAQRIVNGEVPDSLKSKRVLSLDMAALLAGAKYRGEFEERLKAVLKEIAQDEGQTIVFIDELHTMVGAGYAEGAMDAGNMLKPALARAELHCVGATTLDEYRQYIEKDAALERRFQKILVDEPSVEATIAILRGLQEKYEVHHGVDITDPAIVAAAELSHRYITDRFLPDKAIDLIDEAASKIKIEIDSKPEVMDKLDRRLIQLKIEREAVKREKDEASQKRLQLIEEEIEKLEREYADLEEIWKAEKSSAQGGQQLKEEIEKVRLQMEEATRKSDWQKVSELKYGKLAELEAALEVQNKKDAAGVKTEKPKLVRTQVGAEEIAEIVARATGIPVSRMMQGEREKLLHMEDVLHERVVGQDEAIVAVSDAIRRSRAGLGDPSKPYGSFMFLGPTGVGKTELCKALASYLFDTEEAMIRIDMSEFMEKHSVARLIGAPPGYVGYEEGGYLTEAVRRKPYSVILLDEIEKAHPDVFNVLLQVLDDGRMTDGQGRTVDFKNTVIVMTSNLGSHKIQSMEDSDPALVKLAVMAEVRTHFRPEFINRVDEIVVFHALDAKNIGAIAKIQLRILEQRLAKLEIGLEISEAGLQKIAEAGFDPVYGARPLKRAIQQEIENPLSKQILAGKFGPKDVVRVDVDHGQLSFSK

SEQ ID NO: 7165 - DNA, 2670 bp, Oryza sativa subsp
  CDS (1)..(2670)
atggaggtgtgctgctgctcgacgtcgtcggccgtgcccgggaggaggttcgcggcggccggggcggcggcggcggcggtggcggcgaggtggggcgccgagggggtcgggagggcggtgcgggaggccaaggggctcggggagggcgccgtggcgccgcgccacctgctgctggggctcatcgccgaggaccggtcggcgggcgggttcctctcgtcggggatcaacatcgagcgcgcgcgcgaggagtgccgcggcatcggcgccagggacttgacccccggcgcgccgtcgccgtccggctccgggctggaaatggacatacccttctccggcagctgcaagcgggtgttcgaggtcgccgtggagttctcccggaacatgggctgcagcttcatctccccggagcacctcgccctcgcgctcttcaccctcgacgatcccaccaccaacagcctcctcaggagcttgggagcggatccgagtcaactagcatcagtagcgcttacccgactccaagcggagcttgcgaaagatggcagagaacctgcaggagcatcatctttcaaagtacccaagaaatctcctgctggagctggaagatctgccttctcgaaatctttaaattcaaagaaagaaaagggtgcgcttgatcaattttgtttagatctgaccacacaagctagtggcgggtttattgatcctatcattggccgtgaggaggagattgaaagagtagttcagataatatgccgacggacaaagaacaatcctattcttttgggtgaggcaggtgttggcaaaactgcaatcgctgaagggttggctcttcgaattgcaaatggagatgtccccatttaccttgtggcaaagcgtataatgtcattggacgttggtctacttattgctggtgcaaaagaaagaggtgaactggagtccagggttactagtttaattcgtgaagtccgggaagcaggggatgttattcttttcattgatgaggttcacaatcttattggatctggcactgttggaaagggtaagggtgctggccttgacattggcaacttgctgaagcccccacttgctagaggtgaattgcagtgcattgcagctacaactctagatgaacacagaatgcattttgagaaggataaggctttggctcgccgcttccagccagtattagtagaggagcctagtcaggatgatgctgtgaagatattacttggtcttcgtgaaaaatatgaaacatatcacaaatgcaaatttaccttagaagccatcaatgcagcagtttatctgtcagcaagatatattcctgacaggcagctccctgacaaggccatcgatctgattgatgaagctggcagtagagctcgaatggaatcatttaataggaagaaggaagggcagtcttcaatcctcttaaagtcgccagatgaatactggcaagagataagagctgctcaaaacatgcatgaagtggtgtcatcaaaccagatgaagtattccccttgtcaagagaatggcagtgctgccattaaagcaccaagcgaggacatgaatgagttgacatctgaactccaagttgaggaaccaattgtagttggaacagaggaaattgcaagagttgcctcattgtggtcagggataccagtccagcagttaactgctgatgatagaaagcttctcgtaggactagatggtgaactcagaaagcgtgtgattggtcaagatgatgctgttatggcaatatctagagcagtgaagagatcacgtgttggcctcaatgatcctgacagacctattgccactctacttttctgtggtccgacaggagttggtaaaactgagcttactaaagctctagcagctagttattttggatcggaatctgctatgcttagattagacatgagcgagtatatggagaggcacactgtgagcaagctcataggctctcctccagggtacatcggatatggtgaaactggtactctgacagaagctgtcaggagaaagccatttactgtagtattacttgatgagatagagaaagctcaccctgatattttcaacattcttctccaaatttttgaagatgggcatctgtcggactcacagggccgcagagtgtccttcaagaacacattgattgtcatgacatcaaatgttggttctacatcaatttcaaagggaagacgaagcatgggtttcatgacagaagatactgaatcaagctcatatgttgcaatgaaatctctagtaatggaagagttgaaggcatttttccgtccagaattgctcaacagaatcgatgagatggttgtattccgtcccttagagaaaactcagatgctagcaattcttgatatcatcctacaagaagtgaagggtaggctgttagcccttggaataggcctcgaggtgtccgatgcaatgaaggacctgatttgcgaagaaggctatgacaagagctacggtgcgcggccactgaggagagccgtcacccacctgattgaggatgtgatcagcgaagcaattctatttggcgaatacaagcctggggacacgatactgatggatattgatgccgcggggaaaccttgcatgagccacctgaatgagaaggttgtccagttgtctgatccgacacggacattctga

SEQ ID NO: 7166 - protein, 889 aa, Oryza sativa subsp
MEVCCCSTSSAVPGRRFAAAGAAAAAVAARWGAEGVGRAVREAKGLGEGAVAPRHLLLGLIAEDRSAGGFLSSGINIERAREECRGIGARDLTPGAPSPSGSGLEMDIPFSGSCKRVFEVAVEFSRNMGCSFISPEHLALALFTLDDPTTNSLLRSLGADPSQLASVALTRLQAELAKDGREPAGASSFKVPKKSPAGAGRSAFSKSLNSKKEKGALDQFCLDLTTQASGGFIDPIIGREEEIERVVQIICRRTKNNPILLGEAGVGKTAIAEGLALRIANGDVPIYLVAKRIMSLDVGLLIAGAKERGELESRVTSLIREVREAGDVILFIDEVHNLIGSGTVGKGKGAGLDIGNLLKPPLARGELQCIAATTLDEHRMHFEKDKALARRFQPVLVEEPSQDDAVKILLGLREKYETYHKCKFTLEAINAAVYLSARYIPDRQLPDKAIDLIDEAGSRARMESFNRKKEGQSSILLKSPDEYWQEIRAAQNMHEVVSSNQMKYSPCQENGSAAIKAPSEDMNELTSELQVEEPIVVGTEEIARVASLWSGIPVQQLTADDRKLLVGLDGELRKRVIGQDDAVMAISRAVKRSRVGLNDPDRPIATLLFCGPTGVGKTELTKALAASYFGSESAMLRLDMSEYMERHTVSKLIGSPPGYIGYGETGTLTEAVRRKPFTVVLLDEIEKAHPDIFNILLQIFEDGHLSDSQGRRVSFKNTLIVMTSNVGSTSISKGRRSMGFMTEDTESSSYVAMKSLVMEELKAFFRPELLNRIDEMVVFRPLEKTQMLAILDIILQEVKGRLLALGIGLEVSDAMKDLICEEGYDKSYGARPLRRAVTHLIEDVISEAILFGEYKPGDTILMDIDAAGKPCMSHLNEKVVQLSDPTRTF

SEQ ID NO: 7167 - DNA, 2937 bp, Oryza sativa subsp
  CDS (1)..(2937)
atggccgcagcgccgccgctcgccgcggggctccggcccgccatggcggcggcacaggcgccggtcgtcgccgcggcgtggggcgtgggcgctaggaggggggcggccttgtcgtcgtcggctcggtgtagggcgcttcggttgtcgagaggaggaggaggagggcgagatgggtgggtgcctcctcccgtggtggggaggaggccgccgcggacgctctccgtcaggtgcgccgccagcaatgggaggattacacaacaagagttcactgagatggcatggcaatcgattgtttcgtcgcctgaagtagcgaaagagagtaaacaccagattgtggagactgaacatctgatgaaatcattgctggagcaaaggaatgggctcgcccgtcgaatcttttctaaagctggagttgataatacaaggcttcttgatgccacagagaagttcatccagcggcagcctaaggtgttgggtgaagatcctggttccatgttgggacgtgacttggaagctctgatacaaagagcacgagactttaaaaaagagtatggtgattcatttgtttcggttgagcatctggtccttggttttgcggaggataaacgatttggaagacagctgttcaaggatttccagattaccgtacagtccttgaaaactgccattgaatcaataagagggaaacaaaatgtgattgatcaagatcctgagggaaaatatgaagctttggacaagtatggcaaggacctcacagccatggcacgtcaggggaaacttgacccggttataggaagagatgatgaaattcgtagatgcattcaaattttatctcggagaacaaagaataatccagttttgattggtgaacctggtgtggggaaaactgctatagctgaagggcttgctcagaggatagtgcaaggagatgttccgcaagctctaacaaaccgcagactaattgcacttgacatgggtgctttgattgctggggcaaaatatcgtggggaatttgaggataggctgaaggctgtactcaaggaagtcacagattctgatggacaaaccattcttttcattgatgagattcacactgttgttggagcaggtgcaacaaatggtgccatggacgctggtaatcttctaaaaccgatgcttggtaggggagagctacgttgtatcggtgccacaacccttgacgagtaccgcaaatatattgagaaggatcctgcattggagcgtcgcttccaacaagtttatgttgatcaaccttcagttgaagatacaatctcaatactccgtggattacgggagagatatgaattgcaccatggggtacgcatatcagacagtgcacttgtggcagcagctcttctctcagaccgttacattagtggacgatttctgccggacaaagcaattgatttggttgatgagtcagctgccaaattgaaaatggagataacttccaagccaactgctctagatgagattgatcgtgctgtaataaagcttgaaatggaacgtctctcactaacaaacgatacagacaaagcatcaagggacagactatctcgaattgaagcagaactgtcactattgaaagaaaagcagaaggacctgactgagcagtgggagcgtgagaagtcggtgatgactaagattcaatctattaaagaagagattgatagggtcaatgtggagatccagcaggccgaacgtgagtatgatctcaatcgtgctgctgaactgaagtatggcagtctgaacgcattgcagcgccagcttcaaacaacagagaaagagctagatgaatatcaaagttctgggaaatccatgctaagagaagaggtcacccaagatgatattgcagaaatagtgagcaggtggactggtattccagtatctaaactaaagcaatctgatagggagaagttgctgtatctagaggaagaactgcacaagcgtgttgttgggcaggatcctgcagtcaaagcagtttctgaggctattcagagatccagggctggtttgtccgatccaaatcgccccattgccagtttcatgttcatgggccctacaggagttggcaaaacggaactagcaaaagcccttgctgcttttatgttcaacactgaggaagctgttgttaggattgacatgagtgaatacatggagaagcattctgtctcaagactgattggtgcaccaccaggctatgttgggtatgaagagggtggtcagcttacggaagctgttcgtcggaggccatattccattatcttgtttgatgagattgagaaagcccatggagatgtattcaatgttttccttcaaatattggacgatggaagggttactgactcgcagggcaggaaagtgagcttcaccaacagtatcattatcatgacatccaatgttggttcacagttcatactaaacatggatgaagaaggtgggtcaactgattcagcctatgagaatataaagaagagggtgatggatgctgcaagatctgttttccgtccggagttcatgaatcggattgatgagtacattgtcttcaagccacttgagagggaacagatcaacagcattgtcaaattacagcttgcaagagtacaaaaaagaattgccgatcgcaagatcaaactcgaagtgtcgcctggagcagtcgaattcctgggaagccttggttacgatccgaattacggtgccaggccagtgaagcgagtgattcaacagtatgtggagaacgagctggcgaagggtatcctgagaggtgatttcaaggacgaggacagcatcctggtagacacccaggtcaccgtgccatctaatggtcagctccctcagcaaaagctcgttttccacaaaatgagtgaagaatccgcaccagctgctgctgaagacgagaaatttttgccggctgtttga

SEQ ID NO: 7168 - protein, 978 aa, Oryza sativa subsp
MAAAPPLAAGLRPAMAAAQAPVVAAAWGVGARRGAALSSSARCRALRLSRGGGGGRDGWVPPPVVGRRPPRTLSVRCAASNGRITQQEFTEMAWQSIVSSPEVAKESKHQIVETEHLMKSLLEQRNGLARRIFSKAGVDNTRLLDATEKFIQRQPKVLGEDPGSMLGRDLEALIQRARDFKKEYGDSFVSVEHLVLGFAEDKRFGRQLFKDFQITVQSLKTAIESIRGKQNVIDQDPEGKYEALDKYGKDLTAMARQGKLDPVIGRDDEIRRCIQILSRRTKNNPVLIGEPGVGKTAIAEGLAQRIVQGDVPQALTNRRLIALDMGALIAGAKYRGEFEDRLKAVLKEVTDSDGQTILFIDEIHTVVGAGATNGAMDAGNLLKPMLGRGELRCIGATTLDEYRKYIEKDPALERRFQQVYVDQPSVEDTISILRGLRERYELHHGVRISDSALVAAALLSDRYISGRFLPDKAIDLVDESAAKLKMEITSKPTALDEIDRAVIKLEMERLSLTNDTDKASRDRLSRIEAELSLLKEKQKDLTEQWEREKSVMTKIQSIKEEIDRVNVEIQQAEREYDLNRAAELKYGSLNALQRQLQTTEKELDEYQSSGKSMLREEVTQDDIAEIVSRWTGIPVSKLKQSDREKLLYLEEELHKRVVGQDPAVKAVSEAIQRSRAGLSDPNRPIASFMFMGPTGVGKTELAKALAAFMFNTEEAVVRIDMSEYMEKHSVSRLIGAPPGYVGYEEGGQLTEAVRRRPYSIILFDEIEKAHGDVFNVFLQILDDGRVTDSQGRKVSFTNSIIIMTSNVGSQFILNMDEEGGSTDSAYENIKKRVMDAARSVFRPEFMNRIDEYIVFKPLEREQINSIVKLQLARVQKRIADRKIKLEVSPGAVEFLGSLGYDPNYGARPVKRVIQQYVENELAKGILRGDFKDEDSILVDTQVTVPSNGQLPQQKLVFHKMSEESAPAAAEDEKFLPAV

SEQ ID NO: 7169 - DNA, 2844 bp, Oryza sativa subsp
  CDS (1)..(2844)
atggcgtcggaggcggggcacgcgcagctgacgccgctgcacctgacggcggcgctggcggcggacaagggcgggatactccggcaggcgatctcgcaggcgtccggcggggacgccggcgcgccggactcgttcgagcgcgtggtgagcggggcgctcaagaagctgccctcgcagtcgccgccgccggacagcgtgccggcgtccacggcgctgatcaaggtcatccgccgcgcgcagtccgcgcagaagaagcgcggggactcccacctcgccgtcgaccagctgctgctgggcctcctggaggactcgctaatctccgactgcctcaaggaggccggcgtgtccgcggcgcgggtgcgcgccgagctcgagaagctccgtggcggggagggccgcaaggtggagtccgcgtccggcgacaccaacttccaggcgctcaagacctacggccgcgacctcgtcgagcaggccggtaagctcgaccccgtcattggccgcgacgaggagatccgccgcgtcgtgcgcatcctgtcgcgccgcacgaagaacaaccccgtactcatcggcgagcccggcgtcggcaagacggccgtcgtggagggcctcgcgcagcgcatcgtgcgcggggacgtgcccagcaacctgctcgacgtccgcctcatcgcgctcgacatgggcgcgctcgtcgccggcgccaagtaccgcggcgagttcgaagaacggctcaaggccgtgctcaaggaggtggaggaggccgagggcaaggtgatcctcttcatcgacgagatacacctcgtcctcggcgccgggaggacggagggctccatggacgcggccaacctgttcaagccaatgctcgcgaggggccagctccggtgcatcggcgccacgacgctggaggagtaccgcaagtacgtcgagaaggacgccgcgttcgagaggcggttccagcaggtgttcgtcgcggagccgagcgtcccggacaccatcagcatcctgcgaggcctcaaggagaagtacgaggggcaccacggtgtgaggatccaggaccgcgcgctcgtcgtcgccgcgcagctctcggcgaggtacatcatgggacgccacctgcctgacaaagcgatcgacctcgtcgacgaggcctgcgcgaacgtgagggtgcagctggacagccagccagaggagatcgacaacctcgagaggaagaggattcagctggaggtggagcaccacgcgctggagaaggagaaggacaaggcaagcaaggcccggcttgtcgaggtcaagaaagagctggacgatctgagggacaagctgcagccattgacgatgaagtacaggaaggagaaggagaggatcgacgagatcaggaagctgaagcagcgccgcgaggagctccagttcacgctgcaggaggccgagcgccggatggacctcgcccgcgtcgccgacctcaagtacggcgcgctccaggagatcgacgtcgccatcgcgaagctcgagagcgagacgggggagaacctgatgctcaccgagaccgtcggccccgagcagatcgccgaggtggtgagccgctggaccggcatcccggtgacccggctcggccagaacgacaaggagaggctcgtcggcctcgccgacaggctgcaccagagggtggtcggccaggcggaggccgtgagcgccgtcgccgaggcggtgctgaggtcgcgcgccggacttggccggccgcagcagcccaccggctcgtttctcttcctcggtcccaccggcgtcggcaagaccgagctcgccaaggccctcgccgagcagctgttcgacgacgagaacctgctcgtccgcatcgacatgtccgagtacatggagcagcactccgtcgctcgcctcatcggagcaccacctggctacgtcggccatgaggaaggtgggcagctgacggagcaagtgcggcggcggccgtacagcgtgatcctgttcgacgaggtcgagaaggcgcacgtcgcggtgttcaacactctgctccaggttctcgacgacgggaggctcaccgacgggcaaggccgcacggtggacttcaggaacaccgtgatcatcatgacctccaacctcggcgccgagcacctcctcgccggcatggtcggcaagaactccatgaaggtcgcccgtgaccttgtcatgcaggaggtgaggaggcacttccgtcctgagctcctgaaccggctcgacgagattgtgatattcgatcccctgtcccacgagcaactcaggaaggtcgcccgtctccagatgaaggacgtcgccgtccggctcgccgagaggggtgtcgccctggccgtcaccgacgccgcgctggacgtcattctgtctctgtcctatgatccggtttatggcgcgaggccgatcaggaggtggatcgagaagagggtggtgacgcagctgtccaagatgctgatccaggaggagatcgacgagaactgcacggtgtacatcgacgcggcgccgcacaaggacgagctggcctatagggtggacaaccgcggggggttggtgaacgccgagacggggcagaagtcggacatcctcatccaggtgcccaacggcgccgccaccgggagcgacgccgcgcaggcggtgaagaagatgaggatcatggaggacgaggaggacggcatggacgaagagtatacttgcagggtgcagtttttgttcctcaactggaacgaagttacagatggagcatctactgttgataaattgtccggctggaagtctctactatcagattggatagctgggcataagagcaacatcgaaagggcttcaggtccttggaagccccactga

SEQ ID NO: 7170 - protein, 947 aa, Oryza sativa subsp
MASEAGHAQLTPLHLTAALAADKGGILRQAISQASGGDAGAPDSFERVVSGALKKLPSQSPPPDSVPASTALIKVIRRAQSAQKKRGDSHLAVDQLLLGLLEDSLISDCLKEAGVSAARVRAELEKLRGGEGRKVESASGDTNFQALKTYGRDLVEQAGKLDPVIGRDEEIRRVVRILSRRTKNNPVLIGEPGVGKTAVVEGLAQRIVRGDVPSNLLDVRLIALDMGALVAGAKYRGEFEERLKAVLKEVEEAEGKVILFIDEIHLVLGAGRTEGSMDAANLFKPMLARGQLRCIGATTLEEYRKYVEKDAAFERRFQQVFVAEPSVPDTISILRGLKEKYEGHHGVRIQDRALVVAAQLSARYIMGRHLPDKAIDLVDEACANVRVQLDSQPEEIDNLERKRIQLEVEHHALEKEKDKASKARLVEVKKELDDLRDKLQPLTMKYRKEKERIDEIRKLKQRREELQFTLQEAERRMDLARVADLKYGALQEIDVAIAKLESETGENLMLTETVGPEQIAEVVSRWTGIPVTRLGQNDKERLVGLADRLHQRVVGQAEAVSAVAEAVLRSRAGLGRPQQPTGSFLFLGPTGVGKTELAKALAEQLFDDENLLVRIDMSEYMEQHSVARLIGAPPGYVGHEEGGQLTEQVRRRPYSVILFDEVEKAHVAVFNTLLQVLDDGRLTDGQGRTVDFRNTVIIMTSNLGAEHLLAGMVGKNSMKVARDLVMQEVRRHFRPELLNRLDEIVIFDPLSHEQLRKVARLQMKDVAVRLAERGVALAVTDAALDVILSLSYDPVYGARPIRRWIEKRVVTQLSKMLIQEEIDENCTVYIDAAPHKDELAYRVDNRGGLVNAETGQKSDILIQVPNGAATGSDAAQAVKKMRIMEDEEDGMDEEYTCRVQFLFLNWNEVTDGASTVDKLSGWKSLLSDWIAGHKSNIERASGPWKPH

SEQ ID NO: 7171 - DNA, 2880 bp, Oryza sativa subsp
  CDS (1)..(2880)
atggagagaaccctactgaacccgccgccgtctctccgatcgccggcatgccgtaccaccaccgccaccaggatcaggccctcctcctccatggctactatgatcccaacgcctccgcagatgcggcacgcccgcctcgtcaaggcatcggccgcgggccggcgagagctccacgctcccccgatcgcgccgccaatattactcggcctccgttcacccgcggcggcgtcgtacgggcgtgcgagcggcggcggcgggaggaggaggggggcgcgggtggtggcgaggatggggttcgacatgttcacggacaaggcgatcaaggcgatcatgatggcgcaggaggaggcgcggcggctggggcaccacgccgccggcagcgagcagctcctcctcggcgtcatcggggagggcaccggcatcggcgccaaggtgctcaggggcgccgggctcagcctcaaggcggcgcgcgccgaggtggagaagatggccgggaggggccccggcatggtccccatggagatcaagttcacccccgccgccaagaacgtcctccaggcctcccaagaagaagcgcaccagctagggcataactatgttggatctgaacacctcctacttgggttgctccgtgagcatggtgccgcgcttgttgtgctgaagaactttcaggctgatcccagcaacatccgcagtgaggttatccgaatgatcagtgacacctctgaagatcatcaacctgttagtgctgcagttgggggaggaagcagtacaactaagatacccacacttttagagtatggtactaatctgacaaaactagcagaggaggggaagctggatcctgttgtcggaaggcaaaaccaggttgaccgtgtagtgcagattctcggcaggcggaccaagaacaacccctgcctgattggagagcctggagtagggaaaacagcgatcgcggaagggctcgcgcagcgcattgctgcaggaaatgtgcctgaaacaatcgatgggaaaacgaatttacaatttgagcactatgagattgcgaagagttacctttctagattaccagaaaggaagcatggaaatcctttccaggttatcacccttgatatgggtctacttgttgctggtacaaaataccgtggtgagtttgaggagagattgaagaagctgatggacgaagtgaagcagaatggtgagataattctcttccttgatgaagttcacaccctggtgggtgctggagcagctgaaggggccatcgacgctgccaacatcctgaagccagcgctagcaagaggtgaactacagtgtattggagccactaccattgatgaatacagaaagcacattgagaaagacccagcactggagaggcgttttcagcctgtcaaggtccctgagccaactgttgatgagaccataggaattctcaaaggtctccgggagcgatatgagatccatcataaggtccggtatactgatgagtcgttgatcgcagctgctcggctctcataccagtacatcagtgatcgtttcctcccggataaagcaattgacttggttgatgaagcaggttctcttgtcaggctgcgaaatgcccagctacctgatgaagctaaagaactcgagaagaagctcaagaagatcatggcagagaagagcgaagccatccgaagccaagacttcgagaaggcgggagcgcttcgcggcgaggaggtggagctcaagtcggagatcatgtcgctggtcgacaagagcaaggagatgagcaaggcggcggtggactccggcgagtcgccggggccgacggtgacggaggcggacgtccagcacatcgtctccagctggaccggcgtccccgtggagaaggtcaccgtcgacgagtcgagccgtctcctcgccatggagtcgtcgctgcaccggcgcatcgtcggccaggacgaggccgtgacggcgatcagccgcgccatccgccgcgcccgcgtcgggctccgcgacccgcgccgcccgatcgcgagcttcatcttcgccgggccgacgggggtcggcaagtcggagctcgccaaggcgctggcggcgtactactacggctcgccggaggccatggtgcggctcgacatgagcgagttcatggagaagcacacggtggcgaagctggtgggctcgccgccggggtacgtcggctacgccgagggcggccagctgacggaggcgatccggcggcgcccctacgccgtcgtgctgttcgacgaggtcgagaaggcgcaccccgacgtgttcaacatgatgctccagatcctcgacgatggccggctcacggacagcaaggggaggacggtggatttcaagaactcgctcatcatcatgacatccaacgtcggcagcggcgtcatcgagaagggcgggaggcagctcgggttcgccggcgatggcagcggcgacggcgggtacggggtgatcaagaacatggtggaggaggagatgaagcgctacttcaggccggagttcctgaaccggctggacgagatgatcgtgttccggcagctgacgaagctggaggtgaaggagatcgccgggatcatgctcgccgaggtcaccgggcggatcggcgggaaggggatcgggctgcaggtgacggagaggttcaaggagctcgtcgtcgagcaaggcttcgacccgagctacggcgcgcggccgctgcgccgggccatcatgcggctgctggaggacacgctcacggacaagatgctcgccggggagatctgcgccggcgactcggtgatcgtcgacgccgacggtgacgggaacgtcgtcgtggtcggccggcgcagcgccggcttgccggacctgaaatcgccggcgtttactgtctag

SEQ ID NO: 7172 - protein, 959 aa, Oryza sativa subsp
MERTLLNPPPSLRSPACRTTTATRIRPSSSMATMIPTPPQMRHARLVKASAAGRRELHAPPIAPPILLGLRSPAAASYGRASGGGGRRRGARVVARMGFDMFTDKAIKAIMMAQEEARRLGHHAAGSEQLLLGVIGEGTGIGAKVLRGAGLSLKAARAEVEKMAGRGPGMVPMEIKFTPAAKNVLQASQEEAHQLGHNYVGSEHLLLGLLREHGAALVVLKNFQADPSNIRSEVIRMISDTSEDHQPVSAAVGGGSSTTKIPTLLEYGTNLTKLAEEGKLDPVVGRQNQVDRVVQILGRRTKNNPCLIGEPGVGKTAIAEGLAQRIAAGNVPETIDGKTNLQFEHYEIAKSYLSRLPERKHGNPFQVITLDMGLLVAGTKYRGEFEERLKKLMDEVKQNGEIILFLDEVHTLVGAGAAEGAIDAANILKPALARGELQCIGATTIDEYRKHIEKDPALERRFQPVKVPEPTVDETIGILKGLRERYEIHHKVRYTDESLIAAARLSYQYISDRFLPDKAIDLVDEAGSLVRLRNAQLPDEAKELEKKLKKIMAEKSEAIRSQDFEKAGALRGEEVELKSEIMSLVDKSKEMSKAAVDSGESPGPTVTEADVQHIVSSWTGVPVEKVTVDESSRLLAMESSLHRRIVGQDEAVTAISRAIRRARVGLRDPRRPIASFIFAGPTGVGKSELAKALAAYYYGSPEAMVRLDMSEFMEKHTVAKLVGSPPGYVGYAEGGQLTEAIRRRPYAVVLFDEVEKAHPDVFNMMLQILDDGRLTDSKGRTVDFKNSLIIMTSNVGSGVIEKGGRQLGFAGDGSGDGGYGVIKNMVEEEMKRYFRPEFLNRLDEMIVFRQLTKLEVKEIAGIMLAEVTGRIGGKGIGLQVTERFKELVVEQGFDPSYGARPLRRAIMRLLEDTLTDKMLAGEICAGDSVIVDADGDGNVVVVGRRSAGLPDLKSPAFTV

SEQ ID NO: 7173 - DNA, 2859 bp, Oryza sativa subsp
  CDS (1)..(2859)
atgggccggctcggtggaggcgggctgctggttccggcagccgccgccgcagcggaggctgttccaccccacgcaggcggcgagataactccaggagaatttactgagatggcctgggagggggttgtcggcgcggttgatgcagctagaatgtcgaagcaacaagtagtggaagcagagcacctgatgaaagctcttctggagcagaaggatggtttagcgcgcagaatattttcgaaagctggaatagataacacatctgtcctgcaagctactgatgagttcatctcgagacagccaaaggttgttggcgatacaagtggaccgatcattgggtcaagctttgtatcaattttggataatgcaaggaagcataagaaagaatatgctgatgagtttgtatctgttgagcacatattgcgagcattcacagaagataagaggtttggacaacagctgttcagagatctcaaaattggggagaatgagttgaaggaagctatctccgctgtacgtggcagtcagcgggtcacagatcagattgtttttctacagaggtatctctttgttcagctctctattcacaacttgaggggagactctgccaatggcaatggttttgtttcagccagatggtttttcatgttagcattaaaatgtacccagtgtgactgtttgataaccttaggaatcataactctttttatggtgctgcttccagatccggaggggaagtaccaggctctagagaagtatggtattgacatgacagaattagctcgacgtggaaaactggatcctgttattggccgtgatgatgaagtgcgacgatgcattcagatcctttgcaggagaactaagaataatcctgtaattattggtgagccaggagtcggcaaaactgctatcgctgaaggattggcacagcgtattgtgcggggagatgttcctgaacctttacagaatagaaagcttatttcattggacatgggagcattacttgctggggctaaattccaaggtcaatttgaagagagacttaaggctgttctgaaggagatcactgcctcgaatgggcagatcatcttgttcattgatgagatccacactattgttggtgcaggagcagcaggtggggcaatggatgctggtaatttgctgaagccaatgttaggtcggggtgaactccgttgcattggagcaacaacactagatgagtacaggaagtacattgagaaggatgctgctctggagcgtaggttccagcaggtttattgtggtgagccagcagttgaggatacaatctctatactgcgtggcctaagagagcggtatgaactgcaccatggtgtcaaaatatcagatggagctcttgtttctgcggctgttttatcagatcgctacatcactggacgttttttgcctgataaagctattgacctagttgatgaagcagctgctaagctgaaaatggagataacatcgaaacctattgaattggatgagcgactgagcaagcttgaagctgatctagaatctctgaagcagaagcagaaaaacctttcagaacattgggaatatgagaagtccttgatgactcgcataagatcgatcaaggaagagactgacagagttaacctggagattgaagctgctgagagagagtatgatttgaaccgtgcagctgagctcaagtacggaacacttctgtcgctacaaaaacagcttgaagaggctgagaacaaactcatggaattccagcagtcaggcaagtcaatgcttcgagaagaggtgactgatgttgacattgctgagattgttagcaagtggactggtattccagtgtcaaaccttcaacaatctgaaaaggaaaagctactgctattggaagatgtactccacaagagggttattggccaagatattgcagtgaagtcagtggctaatgcaatccgtcgttctagggcaggcctatcagaccctaaccgtcccatagcaagcttaatgtttatgggtccaacaggtgtaggaaagaccgaactggggaaaacactagctgaattccttttcaacacagagaatgctctaatacggattgatatgagcgagtacatggaaaagcatgccgtctcccgtttggttggagcccctcctggctatattggttatggggaagggggccaactgacagaagctgttcgtcgtaggccttattctgtggttcttttcgatgaaattgagaaagcgcaccaggatgtgttcaacatcttattgcaacttttggatgatggaagaataaccgactctcagggcagaacagtcagctttactaactgtgttatcatcatgacttcaaacattgggtcgccattgattcttgatacgcttagaaacacatcagacagcaaggaggcagtttatgaaataatgaagaagcaagtgattgacatggctcggcagtcattccggccagagtttttgaataggatagatgagtacattgtattccagccgctggacaccacagagataaatcgcatcgtggagatccagctgaaccgagtcaagaaccggctgaggcaacagaagattcatctgcagtacacaccagaagctgtggagcatcttggctctctcggctttgaccctaactacggtgctaggcctgtgaagagggtgatccagcagatggtagagaacgagatcgccctcagtgtcctgaagggcgacttcaaagaagacgacaccgtcctcgtcgacgtgagctccgtggcgatcgcgaaaggccttgctccacagaagaagcttgtcctccagaggttagagaatgcaaacttagagttagtcgccaatgactag

SEQ ID NO: 7174 - protein, 952 aa, Oryza sativa subsp
MGRLGGGGLLVPAAAAAAEAVPPHAGGEITPGEFTEMAWEGVVGAVDAARMSKQQVVEAEHLMKALLEQKDGLARRIFSKAGIDNTSVLQATDEFISRQPKVVGDTSGPIIGSSFVSILDNARKHKKEYADEFVSVEHILRAFTEDKRFGQQLFRDLKIGENELKEAISAVRGSQRVTDQIVFLQRYLFVQLSIHNLRGDSANGNGFVSARWFFMLALKCTQCDCLITLGIITLFMVLLPDPEGKYQALEKYGIDMTELARRGKLDPVIGRDDEVRRCIQILCRRTKNNPVIIGEPGVGKTAIAEGLAQRIVRGDVPEPLQNRKLISLDMGALLAGAKFQGQFEERLKAVLKEITASNGQIILFIDEIHTIVGAGAAGGAMDAGNLLKPMLGRGELRCIGATTLDEYRKYIEKDAALERRFQQVYCGEPAVEDTISILRGLRERYELHHGVKISDGALVSAAVLSDRYITGRFLPDKAIDLVDEAAAKLKMEITSKPIELDERLSKLEADLESLKQKQKNLSEHWEYEKSLMTRIRSIKEETDRVNLEIEAAEREYDLNRAAELKYGTLLSLQKQLEEAENKLMEFQQSGKSMLREEVTDVDIAEIVSKWTGIPVSNLQQSEKEKLLLLEDVLHKRVIGQDIAVKSVANAIRRSRAGLSDPNRPIASLMFMGPTGVGKTELGKTLAEFLFNTENALIRIDMSEYMEKHAVSRLVGAPPGYIGYGEGGQLTEAVRRRPYSVVLFDEIEKAHQDVFNILLQLLDDGRITDSQGRTVSFTNCVIIMTSNIGSPLILDTLRNTSDSKEAVYEIMKKQVIDMARQSFRPEFLNRIDEYIVFQPLDTTEINRIVEIQLNRVKNRLRQQKIHLQYTPEAVEHLGSLGFDPNYGARPVKRVIQQMVENEIALSVLKGDFKEDDTVLVDVSSVAIAKGLAPQKKLVLQRLENANLELVAND

SEQ ID NO: 7175 - DNA, 3102 bp, Oryza sativa subsp
  CDS (1)..(3102)
atgaactacctcagccccgacctcaagcgcggcaacttcaccgacgacgacgacgagctcaccatcaagctccacgcccttcttggcaacaagtggaacacgcacatcaagcgcaagctcttgagccagggcatcgatccgcagacgcatcagccggttagcgccgggaccagcgttgccgcggcaagcgagctgactacgacggccatcactgtcggcttcccgtccctggcggtggcgccggcgcgagggagctcgaggaggaaggagggaaggctgggaggggtcttccttgtagtcgtcgctagtggcggaggggtctctggcggaggccgagtcagcgacggagggattggattggtgggcaggtggctcggggttttccttttggggaggagcggcaccgcgcggttccgcgtgcgcgcgagggccacgatgatgcgtaccatgccaacacggaccctcaccctggggggtttccagggcctgcggcagacgaatttcctggactcgaggtcggtgattaagcgtgacttcggctctattgtcgcgagccagatttcacgcccccgagggttggggtcaagaggggtggtccgcgccatgtttgagcgcttcacggagaaggcaatcaaggtgatcatgcttgcacaggaagaagcgaggcgcctgggccacaactttgttgggacggagcaaattctactgggccttatcggtgagggcacaggaatcgcggcaaaggttctcaagtctatgggtatcaaccttaaggatgcccgtgtggaagttgagaagatcattggacgtggtagcgggtttgtggctgttgagatcccattcacgcctcgtgcaaagcgtgtcttggaactgtcacttgaagaagctcgccagctagggcataactatataggatctgagcacttacttctggggctacttcgtgagggtgaaggtgtagcagcacgggtactggaaagtcttggtgctgatccaaacaacattcgtacccaggtcataagaatggttggtgaaagcacagaagctgttggtgctggagttggtggcggaagcagtggccagaagatgcctacactcgaagagtatggcactaatttgactaagctggcagaagagggtaaactagacccagttgttggcaggcaggatcaaattgagcgtgtaactcaaattttgggaaggcggacaaagaacaacccttgcctaattggagaacctggtgttggaaagactgctattgctgaggggcttgcacaacgtatttccaatggtgacgttccagaaacaattgaaggaaagaaggttattactcttgacatggggctccttgttgctggtaccaagtaccgtggagagttcgaagaaagactgaagaaacttatggaggaaatcaaacaaaatgatgacattattctctttattgatgaagtgcacacgctaattggagcaggtgctgctgaaggtgcaattgatgctgccaacatcttgaaaccagctcttgctagaggtgaactgcagtgcattggtgccacaacacttgatgagtacaggaaacatattgagaaagatccagctttagagcgacggtttcaaccagttaaggttccagagccaactgttgatgaaacaatacaaatcttaagaggacttcgtgagcgatatgaactgcatcataagctgcgatacacagatgattctttaattgctgcagcacaattgtcataccagtatatcagtgatcgcttcctgcctgataaggctattgacttgattgatgaagcaggatctcgtgttaggctcaggcatgcacagctccctgatgaagccaaggagctggacaaagagcttcgacaggtaaccaaagacaagaacgaggctgtacgtggccaagattttgaaaaggctggggaattaagagatcgggaaatggaattgaaggcccaaattacagccattattgacaagagcaaggaaatggttaaagcagagactgaatccggtgaagtcggtccccttgttactgaggcagatattcagcatatcgtgtcctcttggactggaatacctgtggagaaagtctcatctgatgagtctgaccgtctccttaagatggaggagacactccatacgcgtatcattggtcaggatgaggctgtcaaagctattagccgtgccatccgccgtgctcgtgttggcctcaagaacccaaatcggcctattgctagcttcatcttctctggaccaactggtgtcggtaaatcagagttagcaaaggctcttgcagcctactactttggctcagaagaggccatgatcagactagacatgagtgagttcatggagaggcatacagtctccaagctcattggatcacctccaggttatgttggttacactgagggtggtcaactgacagaagcagttcgccgccgaccatacactgttgttctcttcgatgagattgaaaaggcacatcctgatgtcttcaacatgatgcttcagatcttagaagatggaagactaactgacagcaagggtcggactgttgatttcaagaacacactgttgatcatgacatcaaatgttggaagcagtgtcattgagaagggaggacggaagattggatttgaccttgactatgatgagaaagacaccagctacaataggattaagagcttggtgactgaagagctgaagcagtacttccgacctgagttcttaaacagattggacgagatgattgtgttccggcagcttaccaagctggaggttaaggagattgctgatattatgctcaaagaagtgtttgacaggctcaaggcaaaggacatcgacctccaggtgacagagaagttccgggatagagttgtcgacgaaggttacaacccaagctatggtgccaggcctctgcggcgtgctattatgaggcttctggaggacagcttggcggagaagatgttggctggcgaggtcaaggaaggtgactctgctattgttgatgtggattcagagggcaaggtgatagttcttaacggtggtagtggtgttccggaaccactggcacctgctctgagtgtctaa

SEQ ID NO: 7176 - protein, 1033 aa, Oryza sativa subsp
MNYLSPDLKRGNFTDDDDELTIKLHALLGNKWNTHIKRKLLSQGIDPQTHQPVSAGTSVAAASELTTTAITVGFPSLAVAPARGSSRRKEGRLGGVFLVVVASGGGVSGGGRVSDGGIGLVGRWLGVFLLGRSGTARFRVRARATMMRTMPTRTLTLGGFQGLRQTNFLDSRSVIKRDFGSIVASQISRPRGLGSRGVVRAMFERFTEKAIKVIMLAQEEARRLGHNFVGTEQILLGLIGEGTGIAAKVLKSMGINLKDARVEVEKIIGRGSGFVAVEIPFTPRAKRVLELSLEEARQLGHNYIGSEHLLLGLLREGEGVAARVLESLGADPNNIRTQVIRMVGESTEAVGAGVGGGSSGQKMPTLEEYGTNLTKLAEEGKLDPVVGRQDQIERVTQILGRRTKNNPCLIGEPGVGKTAIAEGLAQRISNGDVPETIEGKKVITLDMGLLVAGTKYRGEFEERLKKLMEEIKQNDDIILFIDEVHTLIGAGAAEGAIDAANILKPALARGELQCIGATTLDEYRKHIEKDPALERRFQPVKVPEPTVDETIQILRGLRERYELHHKLRYTDDSLIAAAQLSYQYISDRFLPDKAIDLIDEAGSRVRLRHAQLPDEAKELDKELRQVTKDKNEAVRGQDFEKAGELRDREMELKAQITAIIDKSKEMVKAETESGEVGPLVTEADIQHIVSSWTGIPVEKVSSDESDRLLKMEETLHTRIIGQDEAVKAISRAIRRARVGLKNPNRPIASFIFSGPTGVGKSELAKALAAYYFGSEEAMIRLDMSEFMERHTVSKLIGSPPGYVGYTEGGQLTEAVRRRPYTVVLFDEIEKAHPDVFNMMLQILEDGRLTDSKGRTVDFKNTLLIMTSNVGSSVIEKGGRKIGFDLDYDEKDTSYNRIKSLVTEELKQYFRPEFLNRLDEMIVFRQLTKLEVKEIADIMLKEVFDRLKAKDIDLQVTEKFRDRVVDEGYNPSYGARPLRRAIMRLLEDSLAEKMLAGEVKEGDSAIVDVDSEGKVIVLNGGSGVPEPLAPALSV

SEQ ID NO: 7177 - DNA, 2673 bp, Oryza sativa subsp
  CDS (1)..(2673)
atgggggacgagacggtggcgccgcaccacctgctgctgggcctcgtcgcggaggaccggtcgccgctggggttcctcgcctcgggcgtccgcgtcgagcgcgcccgcgaggcgtgccgcgccgccgtgggcaaggaagggctcgcgcaggcgccggtcgggctggccacggacgtgcccttctcgggggccagcaagcgcgtcttcgaggccgccgtggagttctccaggaacatgggatgcaacttcatctcgccggagcacattgcgctcggcctcttcaacctgaacgatcccaccacgaacaacgtccttaagagcttaggagtagattcaagtcagctagcaaagcaggcacttacccgagtccaaggggagcttgcaaaggatggaagagagcctgtcggattatcttcttttaaagtgcgtgagaaatttactcctggaggtgggaagtctgcaattgtcaaatactcgaataaaaataaagagaagagtgcactggctctattttgtctagacttgaccatgcgagccagtggaggattgattgatcctgttattggtcgcaaggatgagattgaaagagtagttcagattatatgccgccgcacgaaaaacaatccaattcttttgggcgaagcaggtgttggtaagactgccattgctgagggtttggcccataaaattgccaatggagatgttcctattttcctcgtgggaaagcgtatattatcattggatgttgctctactaatggctggtgctaaagagaggggtgaactggaagccagagttactagtttaatacgtgaagtgcgcaaagcagatccaaaacttccgttcttggtcttcaatcttcaaagagctccaaagtttcatgcaggtgatgttatactgttcattgatgaagtccatactcttattgggtctgggattgctggaagaggaagcaaaggagctggtcttgatattgcgaatttgctgaagcctgcactggctagaggagaattgcagtgtattgcatctacaactctggatgaacaccgattgcattttgataaggataaggctttggctcgccgatttcagcctgttttggtgaatgagcctagccaggaggatgctgtgaagatattacttggtctgcgtgagaagtatgagacctatcacaaatgcaaatacactttggaaagcatcaatgcagcagtttatttgtcagcaagatatattgctgacagacatcttcccgataaggccattgatctaattgatgaagctggcagtagagctaggatggaatcatttaaaaggaagaaggaggaacaatgctctattctctcaaaatcaccagatgagtactggcaagagattagagctgtccagaacatgcatgaagtggcactgactaacaaggtaaaatattctctaaatcagaatgaccaagaggatgctgttgatattgaactcgtgggtgaggacaaaacaagtccagcatctatgctatcaacttcaactgataaaccatctctggttggatcagaggaaattgcaagagtcacatcattgtggtcaggcataccagttcagcagttgactgcagatgaaagaaagcttctagtaggactggatgatgaactcaggaaacgtgtcataggtcaagacgatgctgttctagccatatctaaagctgtgaagagatcgcgtgttggcctcaatgaccctgacagacctattgctacactaattttctgtggcccaacaggtgttggaaaaactgagctcacgaaagctctagcagcaagttattttggatctgtgggtcactctttgctggaatcagctactgttaggttagatatgagtgagtatatggagcggcatgctgtgagcaagttgataggctctcctccaggatacatgggatttggtgaaggtggtactttgactgaagcagtcaggagaaaaccattcactgtggtgttgcttgatgaaatagagaaagctcatcctgatattttcaatattcttcttcaaatattcgaagacggtcatttgactgattcacagggccggagggtttccttcaagaatacattaattgtgatgacatcaaatgttggttccacatcaatttctaatggaaagaggagcataggtttccagacacaaactgatactgaagaaaagtcatatgctgcaatgaaatctttggtaatggaagaactgaaggcatttttccgtcccgaattgctcaatagaattgatgaagtggttgtgttccaccctcttgagaaaactcaggcatgttgcttttatagatactgcacttgcatattgccttgtacttttgttaatactatgctggctattctcaatataatgctgcaagaggtgaagggtaggattttagcccttgggattggcctagaggtgtctgattccatgaaggacctgatttctcagcatgggtacgacaagagctacggtgcacggccactaagaagagccgtcactcagctggttgaggatgttatcagcgaagcaattctgtctggtcagttcaagcctggtgacaccataatggtggacactgatgccacggggaaaccttgcttgagccgactgaatgatcagaccgtccaattatccgatccgacaccaacactttga

SEQ ID NO: 7178 - protein, 890 aa, Oryza sativa subsp
MGDETVAPHHLLLGLVAEDRSPLGFLASGVRVERAREACRAAVGKEGLAQAPVGLATDVPFSGASKRVFEAAVEFSRNMGCNFISPEHIALGLFNLNDPTTNNVLKSLGVDSSQLAKQALTRVQGELAKDGREPVGLSSFKVREKFTPGGGKSAIVKYSNKNKEKSALALFCLDLTMRASGGLIDPVIGRKDEIERVVQIICRRTKNNPILLGEAGVGKTAIAEGLAHKIANGDVPIFLVGKRILSLDVALLMAGAKERGELEARVTSLIREVRKADPKLPFLVFNLQRAPKFHAGDVILFIDEVHTLIGSGIAGRGSKGAGLDIANLLKPALARGELQCIASTTLDEHRLHFDKDKALARRFQPVLVNEPSQEDAVKILLGLREKYETYHKCKYTLESINAAVYLSARYIADRHLPDKAIDLIDEAGSRARMESFKRKKEEQCSILSKSPDEYWQEIRAVQNMHEVALTNKVKYSLNQNDQEDAVDIELVGEDKTSPASMLSTSTDKPSLVGSEEIARVTSLWSGIPVQQLTADERKLLVGLDDELRKRVIGQDDAVLAISKAVKRSRVGLNDPDRPIATLIFCGPTGVGKTELTKALAASYFGSVGHSLLESATVRLDMSEYMERHAVSKLIGSPPGYMGFGEGGTLTEAVRRKPFTVVLLDEIEKAHPDIFNILLQIFEDGHLTDSQGRRVSFKNTLIVMTSNVGSTSISNGKRSIGFQTQTDTEEKSYAAMKSLVMEELKAFFRPELLNRIDEVVVFHPLEKTQACCFYRYCTCILPCTFVNTMLAILNIMLQEVKGRILALGIGLEVSDSMKDLISQHGYDKSYGARPLRRAVTQLVEDVISEAILSGQFKPGDTIMVDTDATGKPCLSRLNDQTVQLSDPTPTL

SEQ ID NO: 7179 - DNA, 2898 bp, Oryza sativa subsp
  CDS (1)..(2898)
atgaatccggacaacttcacgcacaagaccaacgaggcgctcgtggcggcgcacgagatagcgtcggaggcggggcacgcgcagctgacgccgctgcacctggtggcggcgctggcggcggacaagggcgggatactccggcaggcgatctcgcaggcgtccggcggggacgccggcgcgccggactcgttcgagcgcgtggtgagcggggcgctcaagaagctgccctcgcagtcgccgccgccggacagcgtgccggcgtccacggcgctgatcaaggtcatccgccgcgcgcagtccgcgcagaagaagcgcggggactcccacctcgccgtcgaccagctgctgctgggcctcctggaggactcgctaatctccgactgcctcaaggaggccggcgtgtccgcggcgcgggtgcgcgccgagctcgagaagctccgtggcggggagggccgcaaggtggagtccgcgtccggcgacaccaacttccaggcgctcaagacctacggccgcgacctcgtcgagcaggccggtaagctcgaccccgtcattggccgcgacgaggagatccgccgcgtcgtgcgcatcctgtcgcgccgcacgaagaacaaccccgtactcatcggcgagcccggcgtcggcaagacggccgtcgtggagggcctcgcgcagcgcatcgtgcgcggggacgtgcccagcaacctgctcgacgtccgcctcatcgcgctcgacatgggcgcgctcgtcgccggcgccaagtaccgcggcgagttcgaagaacggctcaaggccgtgctcaaggaggtggaggaggccgagggcaaggtgatcctcttcatcgacgagatacacctcgtcctcggcgccgggaggacggagggctccatggacgcggccaacctgttcaagccaatgctcgcgaggggccagctccggtgcatcggcgccacgacgctggaggagtaccgcaagtacgtcgagaaggacgccgcgttcgagaggcggttccagcaggtgttcgtcgcggagccgagcgtcccggacaccatcagcatcctgcgaggcctcaaggagaagtacgaggggcaccacggtgtgaggatccaggaccgcgcgctcgtcgtcgccgcgcagctctcggcgaggtacatcatgggacgccacctgcctgacaaagcgatcgacctcgtcgacgaggcctgcgcgaacgtgagggtgcagctggacagccagccagaggagatcgacaacctcgagaggaagaggattcagctggaggtggagcaccacgcgctggagaaggagaaggacaaggcaagcaaggcccggcttgtcgaggtcaagaaagagctggacgatctgagggacaagctgcagccattgacgatgaagtacaggaaggagaaggagaggatcgacgagatcaggaagctgaagcagcgccgcgaggagctccagttcacgctgcaggaggccgagcgccggatggacctcgcccgcgtcgccgacctcaagtacggcgcgctccaggagatcgacgtcgccatcgcgaagctcgagagcgagacgggggagaacctgatgctcaccgagaccgtcggccccgagcagatcgccgaggtggtgagccgctggaccggcatcccggtgacccggctcggccagaacgacaaggagaggctcgtcggcctcgccgacaggctgcaccagagggtggtcggccaggcggaggccgtgagcgccgtcgccgaggcggtgctgaggtcgcgcgccggacttggccggccgcagcagcccaccggctcgttcctcttcctcggtcccaccggcgtcggcaagaccgagctcgccaaggccctcgccgagcagctgttcgacgacgagaacctgctcgtccgcatcgacatgtccgagtacatggagcagcactccgtcgctcgcctcatcggagcaccacctggctacgtcggccatgaggaaggtgggcagctgacggagcaagtgcggcggcggccgtacagcgtgatcctgttcgacgaggtcgagaaggcgcacgtcgcggtgttcaacactctgctccaggttctcgacgacgggaggctcaccgacgggcaaggccgcacggtggacttcaggaacaccgtgatcatcatgacctccaacctcggcgccgagcacctcctcgccggcatggtcggcaagaactccatgaaggtcgcccgtgaccttgtcatgcaggaggtgaggaggcacttccgtcctgagctcctgaaccggctcgacgagattgtgatattcgatcccctgtcccacgagcaactcaggaaggtcgcccgtctccagatgaaggacgtcgccgtccggctcgccgagaggggtgtcgccctggccgtcaccgacgccgcgctggacgtcattctgtctctgtcctatgatccggtttatggcgcgaggccgatcaggaggtggatcgagaagagggtggtgacgcagctgtccaagatgctgatccaggaggagatcgacgagaactgcacggtgtacatcgacgcggcgccgcacaaggacgagctggcctacagggtggacaaccgcggggggttggtgaacgccgagacggggcagaagtcggacatcctcatccaggtgcccaacggcgccgccaccgggagcgacgccgcgcaggcggtgaagaagatgaggatcatggaggacgaggacggcatggacgaagagtatacttgcagggtgcagtttttgttcctcaactggaacgaagttacagatggagcatctactgttgataaattgcccggctggaagtctctactatcagattggatagctgggcataagagcaacatcaaaagggcttcaggtccttggaagccccactga

SEQ ID NO: 7180 - protein, 965 aa, Oryza sativa subsp
MNPDNFTHKTNEALVAAHEIASEAGHAQLTPLHLVAALAADKGGILRQAISQASGGDAGAPDSFERVVSGALKKLPSQSPPPDSVPASTALIKVIRRAQSAQKKRGDSHLAVDQLLLGLLEDSLISDCLKEAGVSAARVRAELEKLRGGEGRKVESASGDTNFQALKTYGRDLVEQAGKLDPVIGRDEEIRRVVRILSRRTKNNPVLIGEPGVGKTAVVEGLAQRIVRGDVPSNLLDVRLIALDMGALVAGAKYRGEFEERLKAVLKEVEEAEGKVILFIDEIHLVLGAGRTEGSMDAANLFKPMLARGQLRCIGATTLEEYRKYVEKDAAFERRFQQVFVAEPSVPDTISILRGLKEKYEGHHGVRIQDRALVVAAQLSARYIMGRHLPDKAIDLVDEACANVRVQLDSQPEEIDNLERKRIQLEVEHHALEKEKDKASKARLVEVKKELDDLRDKLQPLTMKYRKEKERIDEIRKLKQRREELQFTLQEAERRMDLARVADLKYGALQEIDVAIAKLESETGENLMLTETVGPEQIAEVVSRWTGIPVTRLGQNDKERLVGLADRLHQRVVGQAEAVSAVAEAVLRSRAGLGRPQQPTGSFLFLGPTGVGKTELAKALAEQLFDDENLLVRIDMSEYMEQHSVARLIGAPPGYVGHEEGGQLTEQVRRRPYSVILFDEVEKAHVAVFNTLLQVLDDGRLTDGQGRTVDFRNTVIIMTSNLGAEHLLAGMVGKNSMKVARDLVMQEVRRHFRPELLNRLDEIVIFDPLSHEQLRKVARLQMKDVAVRLAERGVALAVTDAALDVILSLSYDPVYGARPIRRWIEKRVVTQLSKMLIQEEIDENCTVYIDAAPHKDELAYRVDNRGGLVNAETGQKSDILIQVPNGAATGSDAAQAVKKMRIMEDEDGMDEEYTCRVQFLFLNWNEVTDGASTVDKLPGWKSLLSDWIAGHKSNIKRASGPWKPH

SEQ ID NO: 7181 - DNA, 2610 bp, Methanohalophilus portucalensis
  CDS (1)..(2610): transl_table=11
atggacctgaataatttcacacagaaagcccaggaggcaatacaaaattcccgaaccattgctgcaagatattatcatcagcagattgattcggagcatctgttcctttctcttttggaacaaagggaaggacttgtgccttctttgcttgataagatgaacatttccagcgcaatggttaaagaacaactcgaaaaacacatgtcagggcttgggcaggtatcaggtccgggaagcgagaatgtttacttcacccagaaagccatccgggtactggataatgctgcatcccttgcgagtaagatgaatgatgaatataccagtgtagagcatatactggtagccctggcccgggaaaagggcagctacagcaaggaactgctcgaggaattcggggcagatgaagagcgcctgaaccaggcgataaaggaaatcagggggaatcgcagagtgacatcagaaaacccggaggatacatatgaacctctggaaaaatacggcatcgattttacagaacttgccaaccagggaaaacttgacccggtaatcggcagggatcatgagatcaggcatacgatagaaatactgtcccgccgcaggaagaataacccggtacttattggagaggcaggcgtgggtaagaccgccattgtagaaggactggcgcagcgtattgcaaaaaaggacgttcccgatgcaatgaagaacaaacgtatcgtggctctggacatgggttctctggtcgcaggagccaaattccggggagaatttgaggaaagactcaaggcagtcctgaaggaagtggccgaatctgaaggacagattatactgttcatcgatgagttgcataccattgtaggggcaggagccactgaaggtgcaatggatgccggcaacctgctcaaacctatgctggccaggggagaactgcactgtttaggtgcaaccacccttgatgaatatcggaaatacatcgagaaagatgcagccctggagcgcaggttcatgcctgtgatggtgaatgccccggatgttgagaacaccatctctatcctgagaggactgaaagagaaatatgaggttcatcacggagtacggctcaaggacagtgccctggttgcagccgccgtgttgagtgaccggtatatatcggacaggttcctgcctgacaaagccatagacttgctggatgaggcagcctcgaaggtaaagactgccatcgacagcaaaccggccagcctggatgaagctgacaggaaactgatgcaacttgagatcgagaaggaagccctgaaaaaggaaaaggatgctgcttcaaaagaaaggctgcagagcctggagaaagagatctcagaaatccgggccgaatccgacgcaatgcgcactcgctgggaaaacgagaaggccaccattgcaaaactgaacagtatcaaagaacagatcgatgataccaagacccagctggaactggcagagacagaaggcgattttgaaaaggcatcccggctgaaatacggtactcttgttcccctgcagcatgaatacgaggaagaggaaaatcgtctgaaggaaaagcaaaccaatatgcttctcaaggaagaggtggacgaggaagatattgcacatgtagtaagcgagtggaccagaattccggttaccaaacttatggagggagaaaggggaaaactggtgcatctggaggatcgcctgcatgaaagagtgatcggccagaacgaggcagtaaaagccgtttcagatgctgtgatccgtgcccaggcgggaatcaaggacccacgtcggccaatcggcagtttcatcttcctgggacctaccggtgtgggtaagaccgaactcgccaaagcccttgcaaccgaacttttcgatagcgaagaccatatgatccgcgttgatatgtccgagtacatggaaaaacacacagttgcaaggcttatcggtgctccgctgggatacatcggccatgatgaagggggccagcttactgaagccgtacgcaggaatccctattcggtcgtcctgtttgatgagatcgaaaaagcccatcatgatgtattcaatatcatgctccagttgctcgatgacggcagattgaccgattcaaagggcaggactgtggatttcaagaatacgatcgtgatcatgacctccaatatctgtgtggattacgccatctccaaacttgaagaaggagttgcctacagcaagatgcaggagacggccatgaacgaactcaccaaacacttcaggccggaattcctcaaccgtatcgacgagatcgccatattccgcgcccttaccaaggaccagctgacatacatcgtggatatcaagatagaagaccttgtgcagaggctcaaagagcgcagaatcgatcttgaaatcactgaccgggcgaagaaatacctgggagatgctggctatagtgagacgtacggtgcgagaccactgaaaagggtcatccagaacgaacttgaaaccgaggtaggtaaacgtattgtcagtggagaggtgatggaatccgatactgttgttgtcgatgccgatgagcgtggtcttaactttgaggtcagaaagggagaagaacatacatga

SEQ ID NO: 7182 - protein, 869 aa, Methanohalophilus portucalensis
MDLNNFTQKAQEAIQNSRTIAARYYHQQIDSEHLFLSLLEQREGLVPSLLDKMNISSAMVKEQLEKHMSGLGQVSGPGSENVYFTQKAIRVLDNAASLASKMNDEYTSVEHILVALAREKGSYSKELLEEFGADEERLNQAIKEIRGNRRVTSENPEDTYEPLEKYGIDFTELANQGKLDPVIGRDHEIRHTIEILSRRRKNNPVLIGEAGVGKTAIVEGLAQRIAKKDVPDAMKNKRIVALDMGSLVAGAKFRGEFEERLKAVLKEVAESEGQIILFIDELHTIVGAGATEGAMDAGNLLKPMLARGELHCLGATTLDEYRKYIEKDAALERRFMPVMVNAPDVENTISILRGLKEKYEVHHGVRLKDSALVAAAVLSDRYISDRFLPDKAIDLLDEAASKVKTAIDSKPASLDEADRKLMQLEIEKEALKKEKDAASKERLQSLEKEISEIRAESDAMRTRWENEKATIAKLNSIKEQIDDTKTQLELAETEGDFEKASRLKYGTLVPLQHEYEEEENRLKEKQTNMLLKEEVDEEDIAHVVSEWTRIPVTKLMEGERGKLVHLEDRLHERVIGQNEAVKAVSDAVIRAQAGIKDPRRPIGSFIFLGPTGVGKTELAKALATELFDSEDHMIRVDMSEYMEKHTVARLIGAPLGYIGHDEGGQLTEAVRRNPYSVVLFDEIEKAHHDVFNIMLQLLDDGRLTDSKGRTVDFKNTIVIMTSNICVDYAISKLEEGVAYSKMQETAMNELTKHFRPEFLNRIDEIAIFRALTKDQLTYIVDIKIEDLVQRLKERRIDLEITDRAKKYLGDAGYSETYGARPLKRVIQNELETEVGKRIVSGEVMESDTVVVDADERGLNFEVRKGEEHT

SEQ ID NO: 7183 - DNA, 2589 bp, Magnetospirillum gryphiswaldense
  CDS (1)..(2589): transl_table=11
atggatttcgagaaatacagcgaacgctgcaagggtttcgttcaggcggcgcagaccttggccttgcgtcatggccaccaacggctgatgcccgagcatctgttgaaggtgctgctggacgacaaggacggcttggccgccaagttgatcaaggccgccggcggcgaccacaagaaggcgctggccggggtggaagccgagatcgccaagcaacccaaggtggaagggccgggggcgtcgggtctgcacctgaccggtgaactggcccgggtgtttcagttggcggaagaggccgcgaccaagtcgggcgacgaatacgtcaccgccgaacgtctgctgttggctctgaccatgggcgccggcaccgcgtcggcccgtatcctgtcggaagccggaatcaatccgcaggcgcttaaccgtgccatcgacgatatgcgcaagggccgcaaggccaattccgccagcgccgaggacggctatgacgccttgaagaaatacgcccgcgacctgacggccgccgcgcgtgagggcaagcttgatccggtgatcgggcgcgacgaggaaatcaggcgcacgatccaggtgctgagccgtcggaccaagaacaacccggtgctgatcggcgagcccggcgtcggcaagaccgccatcatcgaagggctggccatccgcatcgtcaacggcgacgtgccggaaaacctgaagctgaaaagtctgatgagcctcgacatgggctcgctgatcgccggggccaagtttcgcggcgagttcgaggaacggttgaaggcggtgctgtcggaaattcaggctgccaatggcgacgtcatcttgttcatcgacgagatgcataccctggtgggggcgggggcggcggaaggggccatggatgcctcgaatctgctgaaaccggccttggcccgtggcgagctgcattgcgtcggcgccaccacgctcaacgaataccgcaagcatgtggaaaaggatgcggcgctggctcggcggttccagccggttttcgtttccgaacccaatgtggaagacaccatttccattctgcgcggcatcaaggaaaagtacgagatgcatcacggcgtgcgcatctcggattcgtcgctggtggcggcggcgactttgtccaaccgctatatcaccgaccgtttcctacccgacaaggccatcgatctggtggacgaggcggccagccgcctgcgcatggaggtggattccaagcccgaggaactggacgagatcgatcgccgcatcgtccagttgaagatcgagcgcgaggccttgaaaaaggaaaccgacccggccagccgtgaccgcctgttgaccctggaagacgaactgatcgacctggaagccgacagcgaccgcatcaccaatgagtggcgggcggaaaaggatcaattggcctcggccaccaagctgaaggaacaattggatgcggcccgcatcgaggccgacaaggcgcagcgcgaaggccagtaccagaaggcgggtgagttgctctatggcctgatccccgatctggaacgcaagctggcgacggcggatgccgccgagggccgcatgctcaacgaggcggtgacggaagaacacatcgccggggtggtgtcgcgctggaccggtattcccgtcgacaagatgctggcgggtgagcgggaaaagctgctggacatggaaaaccggctgaaaaagcgggtgatcggccaggacgaggccctggtggcggtgtcaaacgccgtgcgccgggcgcgggccgggttgcaagaccccaaccgccccatcggttcgttcctgttcctggggccgaccggcgtcggcaagaccgagttgaccaaggccctggccgagttcctgttcgacgacgagaccgccatggtccgcatggacatgtcggaatacatggaaaagcattccgtcgcccgtctgatcggcgctccgcccggctatgtcggctacgaggaaggcggtgccctgaccgaggcggtgcggcggcggccctatcaggtcatcttgttcgatgaggtggagaaagcccatccggatgtcttcaatgtgctgttgcaggtgctggacgatggtcgcttgaccgacggccagggccgcacggtggatttccgcaacaccctgatcgtgctgacctccaatctgggctcggacatcctggccaaccaggaggaaggccacgattcgggcgaggtgcgcgatctggtgatggaggtggtgcgcgcctcgttccggcccgagtttcttaaccgcttggatgaaatcttgctgttccatcgtctgggccgtgcccatatggccggtatcgtccagattcagctggcgcggctgcggcaattgttggtcgatcgtaaaatcgtgctggatttggatgattccgccaatgaatggcttgcgcaaaagggttacgaccctatctacggcgcacgtccgctgaagcgggtgatccagcgggctttgcaaaatccgctggccggtctgatcctggaaggtcgcgtctgcgatggcgccaaggtaacggtttccgccccgtccggggtgctgaccatcaacggtcaggcggtggaattaacctga

SEQ ID NO: 7184 - protein, 862 aa, Magnetospirillum gryphiswaldense
MDFEKYSERCKGFVQAAQTLALRHGHQRLMPEHLLKVLLDDKDGLAAKLIKAAGGDHKKALAGVEAEIAKQPKVEGPGASGLHLTGELARVFQLAEEAATKSGDEYVTAERLLLALTMGAGTASARILSEAGINPQALNRAIDDMRKGRKANSASAEDGYDALKKYARDLTAAAREGKLDPVIGRDEEIRRTIQVLSRRTKNNPVLIGEPGVGKTAIIEGLAIRIVNGDVPENLKLKSLMSLDMGSLIAGAKFRGEFEERLKAVLSEIQAANGDVILFIDEMHTLVGAGAAEGAMDASNLLKPALARGELHCVGATTLNEYRKHVEKDAALARRFQPVFVSEPNVEDTISILRGIKEKYEMHHGVRISDSSLVAAATLSNRYITDRFLPDKAIDLVDEAASRLRMEVDSKPEELDEIDRRIVQLKIEREALKKETDPASRDRLLTLEDELIDLEADSDRITNEWRAEKDQLASATKLKEQLDAARIEADKAQREGQYQKAGELLYGLIPDLERKLATADAAEGRMLNEAVTEEHIAGVVSRWTGIPVDKMLAGEREKLLDMENRLKKRVIGQDEALVAVSNAVRRARAGLQDPNRPIGSFLFLGPTGVGKTELTKALAEFLFDDETAMVRMDMSEYMEKHSVARLIGAPPGYVGYEEGGALTEAVRRRPYQVILFDEVEKAHPDVFNVLLQVLDDGRLTDGQGRTVDFRNTLIVLTSNLGSDILANQEEGHDSGEVRDLVMEVVRASFRPEFLNRLDEILLFHRLGRAHMAGIVQIQLARLRQLLVDRKIVLDLDDSANEWLAQKGYDPIYGARPLKRVIQRALQNPLAGLILEGRVCDGAKVTVSAPSGVLTINGQAVELT

SEQ ID NO: 7185 - DNA, 2634 bp, Rhodococcus sp
  CDS (1)..(2634): transl_table=11
atggacaccggcagcctgactgagaagtcacgagaagccctgcaggaagcccagaacgtagcgaccagaatgggtcacaccgaggtcgacggagagcacctgctgctcgcgttggtcgaccagcaggaagggttggtcccccgactgctcgagcaggccggcgcgaacgtcgatgccctgcgatccgacctggaacgtgaactgtcgcgtaggccgaaggtcagcggccccggcgcgacgcccggtcaggtgatgatcacccagcgcctggccaagctgctcgacgccgcggaacgggaggcgaagcgactcaaggattcctacgtgtcggtggagcatctcgtgatggccctctccgaggaggggtcggccagtgcggcggggcgggtcctcgccagtcatggggtcacacgagaggcattcctcacggcgctgacgaaagtgcgcggcaatcaacgcgtcacctcggcgaccccggaaggggcgtacgaggctctggagaagtacggacgcgacctcgtctccgaggggcgggcaggcaaactcgatccggtcatcggccgagatgccgagatccgcagggtaacgcagatcctgagccggaagacgaagaacaatccggtgctgatcggcgaccccggcgtcggtaagaccgcgatcgtcgagggcctcgcccagcggatcgtccgcggcgacgtgcccgagggcctgcgcgacaagacgatcttttcgctcgacatgggttccctggtggccggtgcgaagtaccgcggcgagttcgaggagcgactgcaggcggtgctgtccgaggtgaaggcggccgaggggcgcatcctgttgttcgtcgacgagttacatacagtggtcggtgcgggatcagtcggcggcgaggggtctctcgacgccggcaacatgctcaagccgatgctcgctcgcggcgaactgcacatgatcggtgccaccactctcgacgagtatcgcaagcacatcgaatccgacgcggcactggagcgtcgcttccagaccgttctcgtcgacgagcccagcgccgaggatgcgatctcgattctgcgcggacttcgagaacgcctcgaggtgtttcacggcgtgaagattcaggacggcgcactggtggccgccgtgaccctctcgcaccggtacatcaccgaccgcttccttccggacaaggcgatcgatctggtggacgaggcgtgtgcccggctacgcaccgaaatcgattcgatgccggccgaactcgacgagctcacgcggaaggtgacccggctggagatcgaagaggccgcgctgtccaaggaaacggacgcggccagcaaggcgcgcctcgaagagctgcgtaaggagctggccgacctgcgggccgaggccgacgcccggcacgctcagtgggaggcggagcggcaggcgatccggcgggtgcaggagctgcggggagagctggaacgattgcgccacgaggccgaggaggcggagcgcaactacgacctcaatcgggccgccgagttgcgatacggcgagatcaccgagctggaacgcaggctcgaggcggcggaggagcaactggccaccaggcagggccggaatccgttgctgcgtgaagtggtcaccgaagacgagatcgcagagatcgtggccgcatggacgggtatcccggtcgcccggctgcaggaaggcgagcgggagaagctgttgaagctcgacgagattctgcacgagagggtcgtcggtcaggacgaggcggtgcaactggtcgcagacgcggtgatccgggcgaggtccggtatccgtgatccgcgccggccgatcggttcgttcatcttcctgggcccgacgggcgtgggaaagaccgagctcgcaaagacgctggccagtgccctcttcgacagcgaagacaacatggtgcgcctggacatgagcgagtaccaggagcggcacacggtgagcaggctcatcggtgcgccccccgggtacgtcgggtacgacgagggtggccagctcaccgaggcggtgcggcgtaagccgtattccgtggtgctcttcgacgagatcgagaaggcccacgccgacgtcttcaataccctgctgcaggtgctcgatgacggccggatcaccgattctcaaggcaggcaagtcgatttccggaacacggtgatcatcatgacctccaacatcggatcccagcatctgctcgagggagtcacagccgacggcgagatcaagccggacgcccgggactgggtgctggcggaactgcgcgggcacttccgtcccgagttcctcaaccgggtcgacgacatcgtgttgttcaccccgctcacgctgccccagatcgagcacatcgtcgagctgcagctcaccgatcttcggaacaggttgtcggagcgccagatacacctggatatcacgccggaggcacgccggctcatcgccgaacacggtttcgacccggtctacggtgcgcggccgctgcggcggtacatcgcccacgaggtagagaccaagatcggtcgtgcgctgttgcggggcgaaatcgaaccgggtggcactatcagtgtcacggtggacggcggcgagctcgccgtcgcgtatgcggaacccgccgtcgcggcggcctga

SEQ ID NO: 7186 - protein, 877 aa, Rhodococcus sp
MDTGSLTEKSREALQEAQNVATRMGHTEVDGEHLLLALVDQQEGLVPRLLEQAGANVDALRSDLERELSRRPKVSGPGATPGQVMITQRLAKLLDAAEREAKRLKDSYVSVEHLVMALSEEGSASAAGRVLASHGVTREAFLTALTKVRGNQRVTSATPEGAYEALEKYGRDLVSEGRAGKLDPVIGRDAEIRRVTQILSRKTKNNPVLIGDPGVGKTAIVEGLAQRIVRGDVPEGLRDKTIFSLDMGSLVAGAKYRGEFEERLQAVLSEVKAAEGRILLFVDELHTVVGAGSVGGEGSLDAGNMLKPMLARGELHMIGATTLDEYRKHIESDAALERRFQTVLVDEPSAEDAISILRGLRERLEVFHGVKIQDGALVAAVTLSHRYITDRFLPDKAIDLVDEACARLRTEIDSMPAELDELTRKVTRLEIEEAALSKETDAASKARLEELRKELADLRAEADARHAQWEAERQAIRRVQELRGELERLRHEAEEAERNYDLNRAAELRYGEITELERRLEAAEEQLATRQGRNPLLREVVTEDEIAEIVAAWTGIPVARLQEGEREKLLKLDEILHERVVGQDEAVQLVADAVIRARSGIRDPRRPIGSFIFLGPTGVGKTELAKTLASALFDSEDNMVRLDMSEYQERHTVSRLIGAPPGYVGYDEGGQLTEAVRRKPYSVVLFDEIEKAHADVFNTLLQVLDDGRITDSQGRQVDFRNTVIIMTSNIGSQHLLEGVTADGEIKPDARDWVLAELRGHFRPEFLNRVDDIVLFTPLTLPQIEHIVELQLTDLRNRLSERQIHLDITPEARRLIAEHGFDPVYGARPLRRYIAHEVETKIGRALLRGEIEPGGTISVTVDGGELAVAYAEPAVAAA

SEQ ID NO: 7187 - DNA, 2673 bp, Vitis vinifera
  CDS (1)..(2673)
  misc_feature (1229)..(1229): w is a or t
atggctagggctctggttcagtcaaccaatatctttgcttcagttgctgatgggaagcatggaaagtttcaagggtctgagagaaccaaaaagtctgtcaaaatgatgtgtaatgccatgatttccattccagagtggcagctgctatttctggttcggggaggaaaggctagtcgatgtgtagctagagctatgtttgagcgcttcactgagaaagcaattaaagttattatgcttgcacaagaggaagcaagaagacttggtcacaattttgttggcactgagcagattctgttgggtcttattggggaaggcactggtattgctgctaaggtccttaaatccatgggaatcaatctgaaagatgcccgtgtggaagtggaaaagataattggaaggggcagtggatttgttgctgtcgagattccatttacgcctcgagcaaagcgtgttttggaactttcgctggaggaagctcggcaacttggccataactatattggatcggagcacttgcttctgggactacttcgtgaaggcgaaggtgtagctgcccgtgttcttgagaatttaggtgctgaccctagtaatattcgcactcaggcaagcaaagctgttggtgctggtgttggaggaggaaccactggcaataagatgccaacgttggaggagtatggtaccaatttaacaaagctggcagaggagggtaaattggaccctgttgttggaaggcagcaacaaatagagcgtgtaacccaaattttgggtcgacggactaaaaataacccatgcctcattggagaacctggcgttggaaaaacagcaattgcagaaggccttgcacaaagaattgcaaatggtgatgttccagaaacgattgaggggaagaaggttataacattggatatgggtctccttgttgctggaacaaaatatcgcggagagtttgaggaaagattgaagaagctaatggaagaaatcaaacaaagtgatgagataatactcttcattgatgaggtacacaccttaattggagcaggagcagcagagggggcgattgatgctgctaacatcttgaagccagctcttgcaaggggtgaactgcagtgtatcggagccacaacactggatgaatacaggaagcacattgagaaagaccctgccttggaaaggagattccagccagtcaaagtgcctgaaccatctgtggatgaaaccatacaaatttwgaaagggcttcgggagcggtatgagatccatcacaagctccggtatacggatgaagctttggtatctgctgcccgactgtcataccagtacattagtgatcgatttcttcctgataaggcaattgacttgatcgacgaagctggttctcgggttcgacttcgtcatgcacagcttccagaggaagcaagagagcttgagaaagagctcagacagatcactaaagagaagaatgaagcagtacgaagccaagattttgagaaggccggtgaattacgtgatagagaaatggatctaaaggcacagatctcaaccctcatagacaaaggcaaggagatgaccaaggcagagactgaggcaggagatataggtcctatggtgacagaagtggacattcagcacattgtatctgcttggactggcatccctgttgagaaagtgtcaactgatgaatctgatcgtctcctcaagatggaggagaccctccacagacgagtcattggtcaggatgaagctgttaaagccatcagccgtgctattcgccgagctcgtgttggactcaagaatcccaaccgtccaattgccagcttcatcttttctggtccaactggtgtaggaaagtcagaattggcaaaagcactagctgcttactattttggttctgaagaagccatgatccgtcttgatatgagtgagttcatggagagacacacagtctccaaactgattggttcacctcctggttatgttggttatactgagggtggtcagttgactgaggctgttagacgccgaccttatacagtggttctctttgatgaaattgagaaggctcaccctgatgtcttcaacatgatgcttcagattcttgaggatggcaggttgacagacagcaagggccgaactgtggacttcaagaatactcttttgataatgacatccaatgttggaagcagtgtgatcgagaagggaggccgcaggataggatttgatctcgattacgatgaaaaggatagcagttacaaccgaattaagagcttggtgacagaggaactgaaacaatatttcaggccagagttcttgaatagattggatgagatgattgttttccgacagctcactaagctggaggtgaaggacattgctgatataatgctgaaggaggtgtttgaaaggctgaaggccaaggacatagaacttcaggtgaccgagaggtttagagatagagtggtggatgaagggtacaaccccagttatggtgcaaggccactgagaagagccataatgagacttttggaggacagcatggctgagaagatgcttgcaagggaaatcaaagaaggcgattcggtaattgtggatgttgattctgatggaaatgtcactgtgctcaatggcagcagtggtgctccacctgagtcattaccagaggcaatgcctgtgtaa

SEQ ID NO: 7188 - protein, 890 aa, Vitis vinifera
  misc_feature (410)..(410): The Xaa at location 410 stands for Stop, or Leu.
MARALVQSTNIFASVADGKHGKFQGSERTKKSVKMMCNAMISIPEWQLLFLVRGGKASRCVARAMFERFTEKAIKVIMLAQEEARRLGHNFVGTEQILLGLIGEGTGIAAKVLKSMGINLKDARVEVEKIIGRGSGFVAVEIPFTPRAKRVLELSLEEARQLGHNYIGSEHLLLGLLREGEGVAARVLENLGADPSNIRTQASKAVGAGVGGGTTGNKMPTLEEYGTNLTKLAEEGKLDPVVGRQQQIERVTQILGRRTKNNPCLIGEPGVGKTAIAEGLAQRIANGDVPETIEGKKVITLDMGLLVAGTKYRGEFEERLKKLMEEIKQSDEIILFIDEVHTLIGAGAAEGAIDAANILKPALARGELQCIGATTLDEYRKHIEKDPALERRFQPVKVPEPSVDETIQIXKGLRERYEIHHKLRYTDEALVSAARLSYQYISDRFLPDKAIDLIDEAGSRVRLRHAQLPEEARELEKELRQITKEKNEAVRSQDFEKAGELRDREMDLKAQISTLIDKGKEMTKAETEAGDIGPMVTEVDIQHIVSAWTGIPVEKVSTDESDRLLKMEETLHRRVIGQDEAVKAISRAIRRARVGLKNPNRPIASFIFSGPTGVGKSELAKALAAYYFGSEEAMIRLDMSEFMERHTVSKLIGSPPGYVGYTEGGQLTEAVRRRPYTVVLFDEIEKAHPDVFNMMLQILEDGRLTDSKGRTVDFKNTLLIMTSNVGSSVIEKGGRRIGFDLDYDEKDSSYNRIKSLVTEELKQYFRPEFLNRLDEMIVFRQLTKLEVKDIADIMLKEVFERLKAKDIELQVTERFRDRVVDEGYNPSYGARPLRRAIMRLLEDSMAEKMLAREIKEGDSVIVDVDSDGNVTVLNGSSGAPPESLPEAMPV

SEQ ID NO: 7189 - DNA, 2721 bp, Vitis vinifera
  CDS (1)..(2721)
  misc_feature (1140)..(1140): y is t or c
atgaatccagagaaattcacccacaagacaaatgagactcttgctggggctcatgagcttgctatgaactctggccatgctcagctcacaccacttcacgttgctgtggctttgataactgatcccaatggcatcctccggcaagccataatcggtgctggtggaaatgaggaggctgccaactctgttgaaagagtcttcaataaagctctgaagaaactcccatctcagagtcctcctccagatgaaatcccagtaagcactactctaatcaaagtggttcgaagagcccaatcttcacaaaagtcacggggtgacacccatttagcagttgatcaattgattcttggccttcttgaggattcccaaattggtgatttgcttaaagaagccggggttagtacttctagagtgaaatctgaggttgagaagcttcgagggaaagaaggtaagaaggtggaaagtgcttctggggacaccacattccaggcattgaagacttatgggcgtgaccttgttgagcaagctggaaagcttgatcctgtcattggccgggacgaagagattcggagggtcatcaggattctttcaaggaggaccaagaacaaccctgttcttattggagaaccaggtgtgggtaagactgctgttgttgaaggattagctcagagaattgtaagaggggacgttcccagtaatctcgctgaagtgaggcttatagcattggatatgggtgctttggttgctggggcaaaatatagaggagaattcgaggagaggttgaaatctgttttgaaagaagtggaagaggcagaagggaaagtgattttattcattgatgaaattcaccttgttcttggtgctggtcggactgaaggatctatggatgctgctaacttgtttaagcccatgcttgccagaggtcagctacgctgcatcggagcaacgacccttgaggaatacagaaagtatgttgagaaagatgccgcttttgagaggcggttccagcaagtttatgtagctgagcccagcgtccctgacacaataagcattcttcgagggctaaaagaaaggtatgaagggcatcatggtgttcgaattcaggaccgagctcttgtagttgcagcccaactatcaagycgatacatcactgacaaggcaatcgacctggttgatgaagcttgcgccaatgtgagagttcaacttgatagccagcccgaagaaatcgacaatttggaaaggaagagaatgcaattagaagttgaacttcatgctcttgaaaaggagaaggacaaagccagtaaagctcgtcttgttgaagtccgcagagagcttgacgacttgagggacaagcttcaacccttgatgatgaagtacaaaaaggagaaagaaaggattgatgagcttcgcaggctaaaacagaaaagagaggagctcttgtttgctttacaagaggctgaaagaagatatgatttagccagagctgctgatttgcgatatggggcaattcaagaagtggaggctgctatagcaaaccttgaaggaaccactgatgagaacatgatgttaacggagactgttgggcctgagcagattgctgaggtggtgagccgctggactggcatccctgtcactaggcttggacaaaatgataaagaaaggttaattgggcttgcggagaggctgcatcagagagtggtgggacaggatcaggcagtcagtgctgtggcagaggctgtcttgagatcgagggctgggttaggaaggccacaacaacccactggttcgttcctcttcttgggtccaactggtgttggtaagactgagcttgccaaggccctggctgaacagctctttgatgatgaaaatcttttggtgagaattgacatgtccgagtatatggagcagcattcagtttcaagattgattggggctcctcctggatatgttggacatgatgaaggtgggcaactcacagaggcagtaagaaggaggccttatagtgttgtactgttcgatgaagtagagaaagcacatatcgccgtattcaataccctcctccaggttttagacgatggaaggttaactgatggccaaggccgcactgtagacttcacaaacacagtgatcatcatgacttcaaaccttggagctgagcatctcctctcgggtttagtaggcaagtgtacaatgcaagatgctcgtgaccgggtgatgcaggaggtgagaaggcacttcaggccagagttgcttaaccggctggatgaaattgtggtatttgatcccctctcacatgaccaactgagaaaggttgccaggctacaaatgaaggatgttgcaagccgcttggcggagaggggcattgctctggctgtgactgatgcagcattggatgttgttctagcagagagttatgatccggtttacggtgcaagacccattaggagatggctggagaagaaggtggtgactgagctatcaaagatgctcataagggaggagatcgatgaaaactcaactgtttatatagatgcgggagtgtcaggaaaggggttggcgtaccgagtagaaaacaatggggggctggtgaatgcatccaccggacaaaagtcagacgtgttgattcggatcccaaacgggccaagaagcgatgctgcccaagcggtgaagaagatgaagatcgaagaaatagaagacgaagaggatgagatggatctataa

SEQ ID NO: 7190 - protein, 906 aa, Vitis vinifera
MNPEKFTHKTNETLAGAHELAMNSGHAQLTPLHVAVALITDPNGILRQAIIGAGGNEEAANSVERVFNKALKKLPSQSPPPDEIPVSTTLIKVVRRAQSSQKSRGDTHLAVDQLILGLLEDSQIGDLLKEAGVSTSRVKSEVEKLRGKEGKKVESASGDTTFQALKTYGRDLVEQAGKLDPVIGRDEEIRRVIRILSRRTKNNPVLIGEPGVGKTAVVEGLAQRIVRGDVPSNLAEVRLIALDMGALVAGAKYRGEFEERLKSVLKEVEEAEGKVILFIDEIHLVLGAGRTEGSMDAANLFKPMLARGQLRCIGATTLEEYRKYVEKDAAFERRFQQVYVAEPSVPDTISILRGLKERYEGHHGVRIQDRALVVAAQLSSRYITDKAIDLVDEACANVRVQLDSQPEEIDNLERKRMQLEVELHALEKEKDKASKARLVEVRRELDDLRDKLQPLMMKYKKEKERIDELRRLKQKREELLFALQEAERRYDLARAADLRYGAIQEVEAAIANLEGTTDENMMLTETVGPEQIAEVVSRWTGIPVTRLGQNDKERLIGLAERLHQRVVGQDQAVSAVAEAVLRSRAGLGRPQQPTGSFLFLGPTGVGKTELAKALAEQLFDDENLLVRIDMSEYMEQHSVSRLIGAPPGYVGHDEGGQLTEAVRRRPYSVVLFDEVEKAHIAVFNTLLQVLDDGRLTDGQGRTVDFTNTVIIMTSNLGAEHLLSGLVGKCTMQDARDRVMQEVRRHFRPELLNRLDEIVVFDPLSHDQLRKVARLQMKDVASRLAERGIALAVTDAALDVVLAESYDPVYGARPIRRWLEKKVVTELSKMLIREEIDENSTVYIDAGVSGKGLAYRVENNGGLVNASTGQKSDVLIRIPNGPRSDAAQAVKKMKIEEIEDEEDEMDL

SEQ ID NO: 7191 - DNA, 2679 bp, Vitis vinifera
  CDS (1)..(2679)
atggacaagcaaatgtcattgcatcatcagtcagagttcactgagatggcatgggaaggaatggttgatgctgttgatgcggcacgacttagtaaacaacaaattgttgaatctgagcatttaatgaaagctcttttggagcagaaggatggcttggctcggagaatatttacaaaggctgggcttgacaatacatcagttttgcaggctacagatgactttatagatcaacaacccaaggtggtaggtgatactagtggccctatattgggtacaaatctcaggtccctattggaaaaggcaagaagacacaagaaagaaatgggagataacttcttgtctgtagagcacctattgttgggattcctttcagatgcaaggtttgggcggcaactatttcagaacctccagctcagtgaaaaagatttgaaagatgctgtctcagcagttcgtggaaatcagagagttactgatcaaaaccctgaaggaaaataccaagcactggaaaaatatgggaatgacttgactgaacttgctagacgtggaaaactagatcctgtaataggacgagatgatgaaattcggcgttgtatccagatattatctaggagaacaaagaacaaccctgtcattattggtgagcctggtgttggaaagactgcaattgctgaaggcttagctcaaagaattgtgcgaggggatgttcctgaacctttgatgaacagaaagttgatttcactggatatgggttcattgcttgctggtgctaagttccgtggagattttgaggaaagactgaaagcagtccttaaggaagtcaccgcttcaaatgggcagattattttatttattgatgagatccatactgtagtgggtgcaggggctgtgagtggggcaatggatgctgggaacttgttgaagccaatgcttggcagaggtgagctccgatgtataggggcaacaacattgaatgaatacagaaaatacattgagaaggatcctgcccttgagcgcaggttccagcaagtgttctgtggtcagccttcagttgaagacgcaatttccattcttcgtggattgcgtgaacgctatgagcttcatcatggtgtcaaaatatcagacagtgcccttgtatcagcagcagttcttgcagaccgatatattacagagcgttttttgcctgacaaagccattgatcttgtggatgaagcggctgcaaagctgaaaatagagataacttcaaagcctacggagttggatgagatagatagagctgtgattaaactagagatggagaaactatccctgaaaagtgacactgataaagcatccagagaaaggttaagcaagctggaaaatgatctactttcacttaagcagaaacagaaagatctaactgatcaatgggaacaagaaaaagttctcatgacacgaatccgatctattaaggaggagattgacagggtgaacctggagatggaatctgctgaacgtgaatataatttaaatcgtgctgctgagctcaaatatggaaccttaatttctcttcagcggcaactggaagaggctgagaagaaccttgctaattatcggaaatccggaaagtctttgctccgggaagaagtgactgaccttgatattgctgaaattgtgagtaaatggaccggtatacccttgtcaaacctacagcaatcagagagggacaagttagtcttgctagaacaagttctgcaccaaagggtggttggtcaggaaaatgctgttaaatcagtggctgatgcaatccggcgttcaagggcaggattgtcagaccccatccggccaattgcaagcttcatgttcatgggtcctactggggtcggtaaaactgagcttgcaaaggctctcgcagggtacctttttaatacagaaaatgctcttgttagaattgacatgactgaatacatggaaaagcacgcagtctcacgcttggttggtgcaccacctggttatgtcggatatgaagaaggtggacagctcaccgaagtagttcgccggagaccttattccgtggtactatttgatgagattgagaaggcacatcacgatgtgttcaacattctgttacagctactagatgatggcaggataactgattctcagggaagaacagttagttttacaaattgtgtagtgatcatgacatcaaatatcgggtcccactatatcctagaaacacttcagagcacagataagaaggaagcagtttatgagatcatgaaaaaacaagttgttgagttggccagacaaacattccgaccagagttcatgaatcgaatcgatgaatatattgtcttccagcctttggactccaaagaaatcagcaaaattgttgagatacagatgaaccgactaagagagaggctgaaacagaagaaaatcgatctccattacacaaaggaggctgttgaacttttggggacgcaaggctttgacccaaatttcggtgcaaggccagtcaagagggtaatacagcagatggttgaaaacgaaatagcaatgggaattctgagaggggatttcaaggaggacgagtcgattatcatcgatgctgacatgtcagccaacattcctccccataagagattgctgatcaagaagttggagagtagttctcccatggacgccatggttgcctga

SEQ ID NO: 7192 - protein, 892 aa, Vitis vinifera
MDKQMSLHHQSEFTEMAWEGMVDAVDAARLSKQQIVESEHLMKALLEQKDGLARRIFTKAGLDNTSVLQATDDFIDQQPKVVGDTSGPILGTNLRSLLEKARRHKKEMGDNFLSVEHLLLGFLSDARFGRQLFQNLQLSEKDLKDAVSAVRGNQRVTDQNPEGKYQALEKYGNDLTELARRGKLDPVIGRDDEIRRCIQILSRRTKNNPVIIGEPGVGKTAIAEGLAQRIVRGDVPEPLMNRKLISLDMGSLLAGAKFRGDFEERLKAVLKEVTASNGQIILFIDEIHTVVGAGAVSGAMDAGNLLKPMLGRGELRCIGATTLNEYRKYIEKDPALERRFQQVFCGQPSVEDAISILRGLRERYELHHGVKISDSALVSAAVLADRYITERFLPDKAIDLVDEAAAKLKIEITSKPTELDEIDRAVIKLEMEKLSLKSDTDKASRERLSKLENDLLSLKQKQKDLTDQWEQEKVLMTRIRSIKEEIDRVNLEMESAEREYNLNRAAELKYGTLISLQRQLEEAEKNLANYRKSGKSLLREEVTDLDIAEIVSKWTGIPLSNLQQSERDKLVLLEQVLHQRVVGQENAVKSVADAIRRSRAGLSDPIRPIASFMFMGPTGVGKTELAKALAGYLFNTENALVRIDMTEYMEKHAVSRLVGAPPGYVGYEEGGQLTEVVRRRPYSVVLFDEIEKAHHDVFNILLQLLDDGRITDSQGRTVSFTNCVVIMTSNIGSHYILETLQSTDKKEAVYEIMKKQVVELARQTFRPEFMNRIDEYIVFQPLDSKEISKIVEIQMNRLRERLKQKKIDLHYTKEAVELLGTQGFDPNFGARPVKRVIQQMVENEIAMGILRGDFKEDESIIIDADMSANIPPHKRLLIKKLESSSPMDAMVA

SEQ ID NO: 7193 - DNA, 2736 bp, Vitis vinifera
  CDS (1)..(2736)
atgaatccagagaaattcacccacaagacaaatgagactcttgctggggctcatgagcttgctatgaactctggccatgctcagctcacaccacttcacgttgctgtggctttgataactgatcccaatggcatcctccggcaagccataatcggtgctggtggaaatgaggaggctgccaactctgttgaaagagtcttcaataaagctctgaagaaactcccatctcagagtcctcctccagatgaaatcccagtaagcactactctaatcaaagtggttcgaagagcccaatcttcacaaaagtcacggggtgacacccatttagcagttgatcaattgattcttggccttcttgaggattcccaaattggtgatttgcttaaagaagccggggttagtacttctagagtgaaatctgaggttgagaagcttcgagggaaagaaggtaagaaggtggaaagtgcttctggggacaccacattccaggcattgaagacttatgggcgtgaccttgttgagcaagctggaaagcttgatcctgtcattggccgggacgaagagattcggagggtcatcaggattctttcaaggaggaccaagaacaaccctgttcttattggagaaccaggtgtgggtaagactgctgttgttgaaggattagctcagagaattgtaagaggggacgttcccagtaatctcgctgaagtgaggcttatagcattggatatgggtgctttggttgctggggcaaaatatagaggagaattcgaggagaggttgaaatctgttttgaaagaagtggaagaggcagaagggaaagtgattttattcattgatgaaattcaccttgttcttggtgctggtcggactgaaggatctatggatgctgctaacttgtttaagcccatgcttgccagaggtcagctacgctgcatcggagcaacgacccttgaggaatacagaaagtatgttgagaaagatgccgcttttgagaggcggttccagcaagtttatgtagctgagcccagcgtccctgacacaataagcattcttcgagggctaaaagaaaggtatgaagggcatcatggtgttcgaattcaggaccgagctcttgtagttgcagcccaactatcaagccgatacatcactggccgacatctgccagacaaggcaatcgacctggttgatgaagcttgcgccaatgtgagagttcaacttgatagccagcccgaagaaatcgacaatttggaaaggaagagaatgcaattagaagttgaacttcatgctcttgaaaaggagaaggacaaagccagtaaagctcgtcttgttgaagtccgcagagagcttgacgacttgagggacaagcttcaacccttgatgatgaagtacaaaaaggagaaagaaaggattgatgagcttcgcaggctaaaacagaaaagagaggagctcttgtttgctttacaagaggctgaaagaagatatgatttagccagagctgctgatttgcgatatggggcaattcaagaagtggaggctgctatagcaaaccttgaaggaaccactgatgagaacatgatgttaacggagactgttgggcctgagcagattgctgaggtggtgagccgctggactggcatccctgtcactaggcttggacaaaatgataaagaaaggttaattgggcttgcggagaggctgcatcagagagtggtgggacaggatcaggcagtcagtgctgtggcagaggctgtcttgagatcgagggctgggttaggaaggccacaacaacccactggttcgttcctcttcttgggtccaactggtgttggtaagactgagcttgccaaggccctggctgaacagctctttgatgatgaaaatcttttggtgagaattgacatgtccgagtatatggagcagcattcagtttcaagattgattggggctcctcctggatatgttggacatgatgaaggtgggcaactcacagaggcagtaagaaggaggccttatagtgttgtactgttcgatgaagtagagaaagcacatatcgccgtattcaataccctcctccaggttttagacgatggaaggttaactgatggccaaggccgcactgtagacttcacaaacacagtgatcatcatgacttcaaaccttggagctgagcatctcctctcgggtttagtaggcaagtgtacaatgcaagatgctcgtgaccgggtgatgcaggaggtgagaaggcacttcaggccagagttgcttaaccggctggatgaaattgtggtatttgatcccctctcacatgatcaactgagaaaggttgccaggctacaaatgaaggacgttgcaagccgcttggcagagaggggcattgctctggctgtgactgatgcagcattggatgttgttctagcagagagttatgatccggtttacggtgcaagacccattaggagatggctggagaagaaggtggtgactgagctatcaaagatgctcataagggaggagatcgatgaaaactcaactgtttatatagatgcgggagtgtcaggaaaggggttggcgtaccgagtagaaaacaatggggggctggtgaatgcatccaccggacaaaagtcagacgtgttgattcggatcccaaacgggccaagaagcgatgctgcccaagcggtgaagaagatgaagatcgaagaaatagaagacgaagaggatgagatggatctataa

SEQ ID NO: 7194 - protein, 911 aa, Vitis vinifera
MNPEKFTHKTNETLAGAHELAMNSGHAQLTPLHVAVALITDPNGILRQAIIGAGGNEEAANSVERVFNKALKKLPSQSPPPDEIPVSTTLIKVVRRAQSSQKSRGDTHLAVDQLILGLLEDSQIGDLLKEAGVSTSRVKSEVEKLRGKEGKKVESASGDTTFQALKTYGRDLVEQAGKLDPVIGRDEEIRRVIRILSRRTKNNPVLIGEPGVGKTAVVEGLAQRIVRGDVPSNLAEVRLIALDMGALVAGAKYRGEFEERLKSVLKEVEEAEGKVILFIDEIHLVLGAGRTEGSMDAANLFKPMLARGQLRCIGATTLEEYRKYVEKDAAFERRFQQVYVAEPSVPDTISILRGLKERYEGHHGVRIQDRALVVAAQLSSRYITGRHLPDKAIDLVDEACANVRVQLDSQPEEIDNLERKRMQLEVELHALEKEKDKASKARLVEVRRELDDLRDKLQPLMMKYKKEKERIDELRRLKQKREELLFALQEAERRYDLARAADLRYGAIQEVEAAIANLEGTTDENMMLTETVGPEQIAEVVSRWTGIPVTRLGQNDKERLIGLAERLHQRVVGQDQAVSAVAEAVLRSRAGLGRPQQPTGSFLFLGPTGVGKTELAKALAEQLFDDENLLVRIDMSEYMEQHSVSRLIGAPPGYVGHDEGGQLTEAVRRRPYSVVLFDEVEKAHIAVFNTLLQVLDDGRLTDGQGRTVDFTNTVIIMTSNLGAEHLLSGLVGKCTMQDARDRVMQEVRRHFRPELLNRLDEIVVFDPLSHDQLRKVARLQMKDVASRLAERGIALAVTDAALDVVLAESYDPVYGARPIRRWLEKKVVTELSKMLIREEIDENSTVYIDAGVSGKGLAYRVENNGGLVNASTGQKSDVLIRIPNGPRSDAAQAVKKMKIEEIEDEEDEMDL

SEQ ID NO: 7195 - DNA, 2667 bp, Vitis vinifera
  CDS (1)..(2667)
atggcttggcaagcaattgtttcttcaccagaagtggcaaaggagaacaagcatcagatagtagagacagagcatttgatgaaggctctgctggagcagaagaatggacttgctcgcagaatcttctcgaaggctggggttgacaatacccgtctccttgatgccactgacaagttcattcaacgccagcctaaggttattggtgaatcagctggttcaatgttaggacgggacttagaaagcttgattcagcgggccagggagtacaagaaagagtatggtgattcctttgtgtcagttgagcacttggttcttgcctttgtacaagatcaacgttttgggaagcaactgtttaaggattttcaaatctcccagaaagccttaaaatctgcaatcgaggccataagaggacgccaacaagtcattgatcaagatcctgaagggaagtatgaagcacttgagaaatatggaaaagatttgacagccatggcaaaagcaggaaagcttgacccagtaataggaagagatgatgaaatacggaggtgcatccagattctctccaggagaacaaagaacaatcctgtgctaattggtgagccaggtgttggaaaaactgcaatttctgaagggcttgctcagagaatcgtgcaaggggatgtgcctcaagctttgatgaatcgtaagcttatatctcttgacatgggtgcactcatagctggggcaaaatttcgaggggaatttgaggataggctgaaggctgtactcaaggaagtaacagaatcagatggccagactatcctttttattgatgagatccacacagttgttggagcaggtgctacaaatggtgcaatggatgcgggcaatctactgaaaccgatgcttggtcgtggagagttgcgatgtattggtgcaacaacactggatgagtatcggaaatatattgagaaagatccagcattggaacgtcgtttccagcaagtttatgtggatcaacctacagtggaagatacaatttccatacttcgtgggttgcgggaaagatatgaactgcatcatggtgtccgcatttctgacagtgcacttgtggaggcggcaattctgtctgatcgttacatcagtggtcgctttttacctgacaaagctattgacctagttgatgaagcagctgctaaactgaaaatggaaattacatccaaacccactgcacttgatgagatcaaccgttctgtactgaagctggagatggaaaggctgtctcttacaaatgatacagataaagcttcaaaagataggttgagtcgccttgaggctgagctgtctctgttaaaagagaaacaagcagagctgagtgagcaatgggagcatgaaaaatcagttatgacacgccttcagtcaatcaaagaagagattgacagggtgaatcttgagattcagcaggctgagcgggagtatgaccttaatcgtgctgctgaactcaagtatgggagcctgaactctttgcagcgtcaacttgaaaatgcggaaaaagagttggatgagtatatgaaatctgggaaatccatgctaagagaagaggttacagggaatgatattgctgaaattgtcagtaaatggactggtatccctgtttccaagctacaacaatcagagagggagaaactgttacatttggaagaagagctacataaacgtgtcgttggtcaagatcctgcagtgagatcagtagctgaggccatccagcggtcccgagcaggtctctctgatccacaccgcccaattgctagtttcatgttcatgggtcctacaggtgttgggaagacagagctagccaaggcccttgcttcctacatgttcaacactgaagaagcccttgtgcgaattgatatgagcgagtacatggaaaaacatgcagtttcaagattgataggggcaccgcctggttatgttggttacgaggaaggagggcagttgacagagacagtccgcaggaggccatatgcagttattctgtttgatgaaatagaaaaggcccattcagatgtgttcaatgtgtttcttcagatcctggatgatgggagggtgactgactcacagggtcgcactgtgagctttaccaacactgtcatcattatgacttcaaatgtgggttcacagtacattctcaatatggacgatgagaccttaccaaaagagacagcttatgaaactattaagcagagggtaatggatgctgcaagatcaattttccgtcctgagttcatgaaccgagttgatgagtacatagttttccagcctctggaccgtgatcagataagcagtattgtcaagttacagttggaacgggtacagttgagactagcagaccggaagatgaaactccaggtgaccgaaacagcgattcagctcctaggaagtcttgggtatgatcccaattatggtgctaggccagtcaagcgggtgatccagcaaaatgttgaaaatgaacttgccaagggcatattaaggggtgagtttaaggacgaggacacggtgttgattgacacagaggtcacagcattttccaatggccagcttccccagcaaaagctaattctgagaaaactggagtctgattcagacacaccagctgcagaaggccaagaagctttttcacaaaccatctga

SEQ ID NO: 7196 - protein, 888 aa, Vitis vinifera
MAWQAIVSSPEVAKENKHQIVETEHLMKALLEQKNGLARRIFSKAGVDNTRLLDATDKFIQRQPKVIGESAGSMLGRDLESLIQRAREYKKEYGDSFVSVEHLVLAFVQDQRFGKQLFKDFQISQKALKSAIEAIRGRQQVIDQDPEGKYEALEKYGKDLTAMAKAGKLDPVIGRDDEIRRCIQILSRRTKNNPVLIGEPGVGKTAISEGLAQRIVQGDVPQALMNRKLISLDMGALIAGAKFRGEFEDRLKAVLKEVTESDGQTILFIDEIHTVVGAGATNGAMDAGNLLKPMLGRGELRCIGATTLDEYRKYIEKDPALERRFQQVYVDQPTVEDTISILRGLRERYELHHGVRISDSALVEAAILSDRYISGRFLPDKAIDLVDEAAAKLKMEITSKPTALDEINRSVLKLEMERLSLTNDTDKASKDRLSRLEAELSLLKEKQAELSEQWEHEKSVMTRLQSIKEEIDRVNLEIQQAEREYDLNRAAELKYGSLNSLQRQLENAEKELDEYMKSGKSMLREEVTGNDIAEIVSKWTGIPVSKLQQSEREKLLHLEEELHKRVVGQDPAVRSVAEAIQRSRAGLSDPHRPIASFMFMGPTGVGKTELAKALASYMFNTEEALVRIDMSEYMEKHAVSRLIGAPPGYVGYEEGGQLTETVRRRPYAVILFDEIEKAHSDVFNVFLQILDDGRVTDSQGRTVSFTNTVIIMTSNVGSQYILNMDDETLPKETAYETIKQRVMDAARSIFRPEFMNRVDEYIVFQPLDRDQISSIVKLQLERVQLRLADRKMKLQVTETAIQLLGSLGYDPNYGARPVKRVIQQNVENELAKGILRGEFKDEDTVLIDTEVTAFSNGQLPQQKLILRKLESDSDTPAAEGQEAFSQTI

SEQ ID NO: 7197 - DNA, 2661 bp, Microcystis aeruginosa PCC 7806
  CDS (1)..(2661): transl_table=11
atgcaacccacagactcgaataaatttaccgaacaagcttgggattcgattgttaaatcgcaagaaattgcgcgacgctttaaaaatcagaccttagaggtggaacacgttattattgccctcctagagcagaataacggtctagccacccggattttacaaaaagctaatatagaaattccccgactgcaacaacagctagaagtcttcaccaaccgacagccgaaagtggccatcgtcgatcaattatacctaggtcgtggtctcgatctgctgctcgatcgagcggaagcatcccgggaaagttggcaagataaatttatctccgtcgaacatcttctcgtcggttttgccgaagatgaaagggtgggccggaaatgtttacgcactttcaatcttgacccccaagatttagaattagctatcaaagctattcgcggtactcaaaaggttactgaacccaatcaagaggaaaaatacgaagctttagataaatatggccgggatttaacagcagcggcgaaagaaggcaaattagacccggttatcggtcgtgatgaagaaattcgacgggtggtacaagtcctctcgcgacggtcgaaaaataacccagttttaatcggtgaaccgggagtaggaaaaaccgctattgcggaaggattagcccaaaggattattaacggagatgttcccgaatctttgaaaaatcgtcagttaatttccctcgatatgggaagtttaatcgctggggcaaaatatcgaggcgaatttgaggaaagattgcggtcagtcatgaaagaagttacccaatcagaagggcgaattattctctttattgatgaactgcataccgtcgtcggtgcgggttctagggaaggaggatcgatggatgcgggcaacctattaaaacctatgttagctcggggagaattgcgctgtattggggcgacaactttagatgaatatcgcaatcatattgaaaaagatccccctttagaaagacgttttcaacaggtttatattaaggaaccttccgtggaggatactatctcgattctccggggtttaaaagaacgttatgagctgcatcatggggtgacaattaccgattcggctctagtggcagcagctaccctatcccatcgttatattagtgatcgctttttaccggataaagcgatcgatttagttgatgaagcggcggcaaaattagaggtagaaagtaccactaaacccgtcgatttggaaatgatagatcgtcgcttaatgcagttacagatggaaaaattctccttagaaaaagaggagaaaaaagatcgagcttttcaagatcgtttagaaagaattatcgaagaaattgaggaattagaaagtaaacaaaagcctctcgctgaccaatggcaaacggaaaaacatatcgccgaggaaattaaattattgcgagaggaagaagaacaattgcgcctacaggtggaacaggcggaacgagcttatgatctcaataaagcggcccaattaaagtatggcaaactagaaattttacagggggaattagaagcaaaagaaaaagaactagaaactattcaagcggcaggttataccctgttaagacaacaggtaactgatgctgatatagccgaaatagttgcccggtggacaggaattcccgtcaatcgtttaatggaatcggaacgacaaaaattattagaattagagtctcatttacagaaaaaagtggtcggacaaaatgaagcggtcacggcagtagcagcggcgattcgacgcgcacgcgcgggaatgaaagatccctcccgtccgattggttcattcctgtttatgggacccacaggagtgggtaaaaccgagttagcgcgggccttggcggggttactgttcgactccgaggaggccatggttcgcatcgatatgtcggaatacatggaaaaacacgcggtttcgcggttaatcggcgctcctccgggttatgtgggttacgaggaagggggacaactatcggaagcggtgcgtcgtcgtccctattctgtggttttattggatgaagtggagaaggcccatcgggatgtttttaacattttattacaagtgcttgacgatgggcgcattaccgactctcagggacgagtggtggattttcggaatacgattatcgtcatgaccagtaatattggcagtgaccatattttaaatgtttccgaagatgccgattatgaggagatgcggaaacgggttttaacagctttgcggagtcattttcgtcccgaatttttgaatcgtatcgacgatttaattattttccataccctgaaaaaagaagaattgcgttacattgttcgtctgcaattacagcgtctggaaagattattaggagaacaaaaaattaatctagaattaactacggccgcagaaaatcatatcgttactgttggttacgatcccacctacggtgcgcgacctttaaaacgcgctatccaacgggagttagagaatcctttagccacaaaaattctcgaacaagcttttatagaaggggatacggtggtaattgattgtctggatgaggtgttaagttttagcaaaaaggagctagaaaaggaagggcaaacattagaattagctgtggttaacctcagttcagattaa

SEQ ID NO: 7198 - protein, 886 aa, Microcystis aeruginosa PCC 7806
MQPTDSNKFTEQAWDSIVKSQEIARRFKNQTLEVEHVIIALLEQNNGLATRILQKANIEIPRLQQQLEVFTNRQPKVAIVDQLYLGRGLDLLLDRAEASRESWQDKFISVEHLLVGFAEDERVGRKCLRTFNLDPQDLELAIKAIRGTQKVTEPNQEEKYEALDKYGRDLTAAAKEGKLDPVIGRDEEIRRVVQVLSRRSKNNPVLIGEPGVGKTAIAEGLAQRIINGDVPESLKNRQLISLDMGSLIAGAKYRGEFEERLRSVMKEVTQSEGRIILFIDELHTVVGAGSREGGSMDAGNLLKPMLARGELRCIGATTLDEYRNHIEKDPPLERRFQQVYIKEPSVEDTISILRGLKERYELHHGVTITDSALVAAATLSHRYISDRFLPDKAIDLVDEAAAKLEVESTTKPVDLEMIDRRLMQLQMEKFSLEKEEKKDRAFQDRLERIIEEIEELESKQKPLADQWQTEKHIAEEIKLLREEEEQLRLQVEQAERAYDLNKAAQLKYGKLEILQGELEAKEKELETIQAAGYTLLRQQVTDADIAEIVARWTGIPVNRLMESERQKLLELESHLQKKVVGQNEAVTAVAAAIRRARAGMKDPSRPIGSFLFMGPTGVGKTELARALAGLLFDSEEAMVRIDMSEYMEKHAVSRLIGAPPGYVGYEEGGQLSEAVRRRPYSVVLLDEVEKAHRDVFNILLQVLDDGRITDSQGRVVDFRNTIIVMTSNIGSDHILNVSEDADYEEMRKRVLTALRSHFRPEFLNRIDDLIIFHTLKKEELRYIVRLQLQRLERLLGEQKINLELTTAAENHIVTVGYDPTYGARPLKRAIQRELENPLATKILEQAFIEGDTVVIDCLDEVLSFSKKELEKEGQTLELAVVNLSSD

SEQ ID NO: 7199 - DNA, 2508 bp, Populus trichocarpa
  CDS (1)..(2508)
atgtttgaacgtttcacagaaaaagcaatcaaagtaatcatgcttgcccaagaggaagcgagacggcttggtcataattttgttggaacagaacaaatcctgttgggtcttattggtgaagggactggaattgctgcaaaggttctcaaatccatgggaattaatcttaaagatgcacgtgtagaagtagagaagattattgggaggggcagtggatttgttgctgtggaaattccattcactcctcgtgccaagcgtgtcctggaactatcattggaggaagctcgccaacttggtcataactacattggatctgagcacttacttctcgggctacttcgtgaaggtgagggtgtagcagcccgtgttcttgagaatttaggcgctgatcctagtaacatccgaactcaggtcattcgcatggtgggcgagagcacggagaacctggctggatccactgttggacctggaagcagtaacaacaagatgcctacacttgaggaatatggaactaatctgactaagctagcagaggagggtaaattggatcctgttgtcggtaggcagccacaaatagaacgtgtcatccaaatcttgggccgaagaactaagaacaacccttgtcttattggagaaccaggggttggaaaaacagcaattgctgaaggtcttgctcagaggatagcaagtggtgatgttcctgagacaattgagggaaagaaggttatcacccttgatatgggccttcttgttgctggaactaaataccgtggagagtttgaggaaagattaaagaagctaatggaggaaatcaagcagagtgatgaaataatgctctttatcgatgaggtgcataccctgataggggcaggagctgcagaaggagctattgatgctgctaatatcttgaaaccagctcttgcaagaggtgaattgcagtgtattggagctacaaccctagatgaatacagaaagcacattgagaaggaccctgctttagaaagacgtttccagccagtcaaagtacctgagccatctgtagatgaaacgatacagattttgaaaggacttcgtgagcgatatgagatccaccacaagctccgttacacagatgagtccttagtagctgctgctcagttgtcataccagtacatcagtgaccgttttctgcctgataaggcaattgatttgattgatgaagctggttctcgggttcggcttcgtcatgcacaggtccccgaggaagcaagagagcttgagaaagaggtcagacaaatcacaaaggaaaaggatgaagctgtccgtggccaagactttgaaaaggctggggaattgcgagacagagaaatggaccttagagcacagattgcagctattgtggagaaaggcaaagagatgagcaaagctgagacagaggcaggggatgtaggtcccactgtcactgaatcagacattcagcacattgtttcttcttggactggaattccagtagagaaagtatccacagacgaatctgaccgtctcctaaagatggaagatacccttcacaagcgagtcgttggccaggatgaagctgtcaaggcaatcagccgtgccatccgccgagctcgtgttggactcaagaatcccaatcgaccaattgctagcttcatattttctggtccaactggtgtcgggaagtcagaattggcaaaagcactagctgcctattactttggctctgaagaagccatgatccgtcttgatatgagtgagtacatggaaagacacactgttgctaagctgattggttcgcctcctggttatgttggttacactgagggtggtcagttgacggaggctgttaggcgtcgcccttacactgtggtactctttgatgagattgagaaggcccatcctgatgtctttaacattatgcttcaaattcttgaagatggaaggttgacagacagcaagggcaggactgtagacttcaaaaacaccctcctgataatgacttcaaatgttggtagcagtgttattgagaagggaggacgcaagattggatttgatcttgattatgatgagaaggatagcagttacaatcggattaagagcctggtgacagaggagttaaagcagtattttaggccggaattcttaaatagattggatgagatgattgttttccgtcaacttaccaagctggaggtcaaggatattgctgatataatgttgaaggaggtctttgagaggttgaaggccaaggaaatagagcttcaagtgacagagagatttatagatagggtggtagatgaagggtataacccagcctatggtgcaaggcctttgagaagagctataatgaggcttctcgaggacagcatggctgagaaaatgctttcagcagagatcaaagaaggtgattctgttattatagatgttgattctgatgggaatgttattgttctcaatggtcaaagtggtggtgctcccgacgccttgccggatgtgttgaatgttgcgtag

SEQ ID NO: 7200 - protein, 835 aa, Populus trichocarpa
MFERFTEKAIKVIMLAQEEARRLGHNFVGTEQILLGLIGEGTGIAAKVLKSMGINLKDARVEVEKIIGRGSGFVAVEIPFTPRAKRVLELSLEEARQLGHNYIGSEHLLLGLLREGEGVAARVLENLGADPSNIRTQVIRMVGESTENLAGSTVGPGSSNNKMPTLEEYGTNLTKLAEEGKLDPVVGRQPQIERVIQILGRRTKNNPCLIGEPGVGKTAIAEGLAQRIASGDVPETIEGKKVITLDMGLLVAGTKYRGEFEERLKKLMEEIKQSDEIMLFIDEVHTLIGAGAAEGAIDAANILKPALARGELQCIGATTLDEYRKHIEKDPALERRFQPVKVPEPSVDETIQILKGLRERYEIHHKLRYTDESLVAAAQLSYQYISDRFLPDKAIDLIDEAGSRVRLRHAQVPEEARELEKEVRQITKEKDEAVRGQDFEKAGELRDREMDLRAQIAAIVEKGKEMSKAETEAGDVGPTVTESDIQHIVSSWTGIPVEKVSTDESDRLLKMEDTLHKRVVGQDEAVKAISRAIRRARVGLKNPNRPIASFIFSGPTGVGKSELAKALAAYYFGSEEAMIRLDMSEYMERHTVAKLIGSPPGYVGYTEGGQLTEAVRRRPYTVVLFDEIEKAHPDVFNIMLQILEDGRLTDSKGRTVDFKNTLLIMTSNVGSSVIEKGGRKIGFDLDYDEKDSSYNRIKSLVTEELKQYFRPEFLNRLDEMIVFRQLTKLEVKDIADIMLKEVFERLKAKEIELQVTERFIDRVVDEGYNPAYGARPLRRAIMRLLEDSMAEKMLSAEIKEGDSVIIDVDSDGNVIVLNGQSGGAPDALPDVLNVA

SEQ ID NO: 7201 - DNA, 2787 bp, Arabidopsis thaliana
  CDS (1)..(2787)
atggctatggccacaagggtgttggctcaatcgactccaccgtctttagcttgttaccagaggaatgttccttcacgtggatctggaagatcgagaagatcggtgaaaatgatgtgtatcatttttaatgtctggttaccaatgcaagggtttatgggattacgtggtaacaatgctttagacactcttggaaaaagtcgtcaagattttcattcgaaggtgcgacaggcaatgaatgtgcccaaggggaaagctagccggtttacggtgaaagcaatgtttgaaagatttacggagaaagctatcaaagttattatgcttgctcaggaggaagctagaagactaggccacaattttgtgggaaccgaacaaattcttcttggtcttattggtgagggtactggaatcgctgctaaagttttgaaatccatggggattaacttaaaagatgcacgtgtggaggttgaaaaaattattggaaggggaagtggctttgttgctgttgaaatcccattcactcctcgtgccaagcgtgttcttgaactctctcttgaggcaactcgccaacttggtcacaattacattggatccgagcaccttttgcttgggttgctacgtgaaggtgaaggagttgcagctcgagtccttgaaaatttaggtgcagatcctagtaatattcgcactcaggtgatacgcatggtgggtgaaaacaatgaagtaactgctaatgttgggggaggaagcagcagcaataagatgccaactcttgaagagtacggaacaaacttgacgaaactggctgaggagggtaaattggacccagttgttggaaggcagccgcagatagaacgtgtggtgcaaattcttggcaggagaaccaagaacaacccttgtcttattggagaacctggtgttggtaagacagctattgctgaaggacttgcacagcgtattgccagtggcgatgtccctgaaactattgaagggaagaaggttataacactcgacatgggtcttctagttgctggaacaaaatatcgtggagagtttgaagagagattgaaaaagcttatggaggaaattagacagagcgatgagataatcttatttatcgacgaagtgcatactttgattggggctggagcagcagaaggtgcaattgacgcagctaacattttaaaaccagctctcgctagaggtgaattgcagtgcattggagcgacaacattagatgaataccgaaagcacattgagaaagaccctgccttggaaagaagattccagccagtgaaagtacctgaacctaccgtggatgaaactattcagatccttaagggtctgcgagagcgatatgaaattcaccacaagcttcgttacacagacgaatctttagtagcagctgcacagttgtcataccagtatataagtgatcgtttccttcctgacaaggcaattgacttgattgatgaagctggttctcgggttcgacttcgtcatgcacaggtccctgaggaagttagggagcttgagaaggagcttaggcagataacaaaggagaagaatgaagctgtccgtggccaggactttgagaaggctgggacacttcgggatagagaaattgaactcagagctgaggtatctgcaatccaagcgaaaggcaaggagatgagcaaagcagagagtgagaccggtgaggaaggccctatggtcacggagtcagacatccaacacattgtgtcttcatggactggtattcctgttgagaaagtatcaaccgatgagtctgaccgtctcctcaagatggaagaaaccctccacaaacgtatcataggccaagacgaagctgtgaaagccataagccgagccattcgccgtgcacgtgttggactcaagaatcctaaccgtccaatcgctagtttcatattctcgggtccaaccggtgttgggaaatctgagcttgccaaagctttagcagcttactacttcggttccgaagaagccatgattcgtttagatatgagtgagttcatggagaggcacactgtctccacactcatcggttcacttcctggatatgtcggatacaccgaaggaggtcagttaacagaagcggttagacgtcgcccttacaccgtcgttttattcgatgagattgaaaaagcccatccagatgttttcaacatgatgcttcaaatccttgaagatggtagattaacagacagcaaaggaagaacagttgacttcaaaaacacacttctcatcatgacatcaaacgtcggaagcagcgtgattgagaaaggaggaagacgtatcggattcgacttagactacgacgagaaagacagcagttacaacagaatcaagagccttgtaacagaggagctgaaacaatatttcagacccgagttcctaaacaggctagacgagatgattgtgttcagacagctaacaaagctggaagtgaaagaaattgctgacatactgttgaaggaagtgttcgagaggttgaagaagaaagagattgagcttcaggtgaccgaaagattcaaagagagagtagtagacgaaggttataacccgagctatggagcaagaccgttgagaagagccatcatgaggcttttagaggatagtatggcagagaagatgcttgcgagagagatcaaagaaggagactcggtgattgtggacgttgacgctgaaggtaacgtcacggtgctaaatggtggaagtggcactccaactacttccttggaggagcaggaagattctctccctgttgcttaa

SEQ ID NO: 7202 - protein, 928 aa, Arabidopsis thaliana
MAMATRVLAQSTPPSLACYQRNVPSRGSGRSRRSVKMMCIIFNVWLPMQGFMGLRGNNALDTLGKSRQDFHSKVRQAMNVPKGKASRFTVKAMFERFTEKAIKVIMLAQEEARRLGHNFVGTEQILLGLIGEGTGIAAKVLKSMGINLKDARVEVEKIIGRGSGFVAVEIPFTPRAKRVLELSLEATRQLGHNYIGSEHLLLGLLREGEGVAARVLENLGADPSNIRTQVIRMVGENNEVTANVGGGSSSNKMPTLEEYGTNLTKLAEEGKLDPVVGRQPQIERVVQILGRRTKNNPCLIGEPGVGKTAIAEGLAQRIASGDVPETIEGKKVITLDMGLLVAGTKYRGEFEERLKKLMEEIRQSDEIILFIDEVHTLIGAGAAEGAIDAANILKPALARGELQCIGATTLDEYRKHIEKDPALERRFQPVKVPEPTVDETIQILKGLRERYEIHHKLRYTDESLVAAAQLSYQYISDRFLPDKAIDLIDEAGSRVRLRHAQVPEEVRELEKELRQITKEKNEAVRGQDFEKAGTLRDREIELRAEVSAIQAKGKEMSKAESETGEEGPMVTESDIQHIVSSWTGIPVEKVSTDESDRLLKMEETLHKRIIGQDEAVKAISRAIRRARVGLKNPNRPIASFIFSGPTGVGKSELAKALAAYYFGSEEAMIRLDMSEFMERHTVSTLIGSLPGYVGYTEGGQLTEAVRRRPYTVVLFDEIEKAHPDVFNMMLQILEDGRLTDSKGRTVDFKNTLLIMTSNVGSSVIEKGGRRIGFDLDYDEKDSSYNRIKSLVTEELKQYFRPEFLNRLDEMIVFRQLTKLEVKEIADILLKEVFERLKKKEIELQVTERFKERVVDEGYNPSYGARPLRRAIMRLLEDSMAEKMLAREIKEGDSVIVDVDAEGNVTVLNGGSGTPTTSLEEQEDSLPVA

SEQ ID NO: 7203 - DNA, 2676 bp, Spinacia oleracea
  CDS (1)..(2676)
atggctggggcattgattcaatcaactaacatcccttcattggcttacaaagtaaatggccaatttcaaagatctgataagggtaataaggctgtgaagatgatggccagccttcaggaccccggatatagaatgcgaactttctcgggggttcgtggaggaaatgctttggatactttgggaactaccagtgaatgtttctactccaagatgagggctgtgctttctgtacgtaaagggacagccagccgtggtgtagttagggctatgtttgaacgtttcactgagaaagcaattaaagtaatcatgcttgctcaagaagaggcaagacggttaggccataactttgttggcacagagcagattttgctgggtcttattggtgaaggcactggaattgctgccaaggtcttgaaatccatgggaattaatctgaaagatgctcgtgtagaagttgagaaaattattgggaggggcagcggatttgttgctgttgaaattccatttactcctcgtgccaagcgtgttttggaactttcattagaggaagcccgtcaacttggccacaactatattgggtcagagcacttgcttctgggtcttcttcgtgagggtgagggtgtagctgctcgtgttttagagaatttgggtgctgatcctagtaacatccgtacgcaggttatacgtatggtcggtgaaaacacagaagctgttggtgctggtgttggaggtggcactacagggaataagatgccaactttggaagagtatggaacaaatttgacaaaattggcggaagagggaaaattggatcctgttgttggaagacaagcacagattgagcgtgttacccaaattctgggtaggcgaacaaaaaataacccctgtcttattggagagcccggtgttggtaaaacagctatagcagagggccttgctcaaagaatagctactggtgatgttccagaaacaattgagggaaagaaggttattactcttcatatgggtcttctggttgctggaactaaataccgtggagaatttgaggaaagattgaagaagttgatggaggaaattaaacaaagtgatgaaataattttatttattgatgaagtacatactttgattggggcaggagcagcagaaggagccatcgatcgtgcaaacattttgaaaccacgttttcgaaggggtgaattacagtgtattggagctaccacccttgatgagtacagaaaacacattgagaaagatccagcacttgagagaaggtttcagcctgttaaagtgcccgagccaactgtagatgaaactatacagatcttgaaagggcttcgtgaacgctatgagatccatcacaaacttcggtacacggatgaagcactagtggctgcagcacaactctcttaccagtacatcagtgaccgtttcctgcctgataaagctattgaccttatagatgaagcgggttcccgggttctgcccagctccctgaagaagctagagagctggttacaacatgagaaagaacttaggcagctcactaaggagaagaatgaagctgtccgtggccaagactttgaaaaggctggtgagttgcgtgacagagaaatggacctcaaggcccaaattagtgctcttgtagagaagaagaaggaaatgagcaaggcggagacagaagctggggatgtcggtcctatggtcacagaatctgatattcagcacatagtgtcttcttggactggtattcctgttgagaaagtatctactgatgaatctgatcgtctactcaagatggaagatacacttcataccagagtaattggtcaagatgaagctgttaaagccattagccgtgccatccgccgtgctcgtgtaggcctaaagaaccccaaccgtccaattgcaagcttcatcttctcaggtccaactggtgttggaaagtctgaacttgccaaagctttggctgcttactactttggttcagaagaagctatgatacggcttgatatgagtgagttcatggaaaggcacactgtatccaaactaattggttcacccccaggttatgtaggttatactgaaggtggccagcttactgaggctgttagacgtcgcccatacacggtggttctttttgatgaaattgagaaggcacatcctgatgtctttaacatgatgcttcaaattcttgaagacgggaggttgactgacagcaagggaaggactgccgatttcaagaacacacttcttattatgacatcaaatgttggaagtagtgtaatcgagaaaggtgggcgtaggataggttttgacctagactatgatgagaaggacagcagttacaaccgtatcaagagccttgtgactgaagagcttaagcagtactttaggcctgagttcttgaacagattagatgagatgattgtgtttaggcaacttacaaagctggaggtcaaggaaattgccgatattatgttgaaggaggtatttgggaggttgaagaacaaggaaattgagcttcaagtaacagagagattcagagatagggtggtggatgaaggctacaaccctagttatggtgctagacctttgaggagggctattatgagacttctggaggatagcatggctgagaaaatgcttgctaggaaatcaaagagggtgattcagtga

SEQ ID NO: 7204 - protein, 891 aa, Spinacia oleracea
MAGALIQSTNIPSLAYKVNGQFQRSDKGNKAVKMMASLQDPGYRMRTFSGVRGGNALDTLGTTSECFYSKMRAVLSVRKGTASRGVVRAMFERFTEKAIKVIMLAQEEARRLGHNFVGTEQILLGLIGEGTGIAAKVLKSMGINLKDARVEVEKIIGRGSGFVAVEIPFTPRAKRVLELSLEEARQLGHNYIGSEHLLLGLLREGEGVAARVLENLGADPSNIRTQVIRMVGENTEAVGAGVGGGTTGNKMPTLEEYGTNLTKLAEEGKLDPVVGRQAQIERVTQILGRRTKNNPCLIGEPGVGKTAIAEGLAQRIATGDVPETIEGKKVITLHMGLLVAGTKYRGEFEERLKKLMEEIKQSDEIILFIDEVHTLIGAGAAEGAIDRANILKPRFRRGELQCIGATTLDEYRKHIEKDPALERRFQPVKVPEPTVDETIQILKGLRERYEIHHKLRYTDEALVAAAQLSYQYISDRFLPDKAIDLIDEAGSRVLPSSLKKLESWLQHEKELRQLTKEKNEAVRGQDFEKAGELRDREMDLKAQISALVEKKKEMSKAETEAGDVGPMVTESDIQHIVSSWTGIPVEKVSTDESDRLLKMEDTLHTRVIGQDEAVKAISRAIRRARVGLKNPNRPIASFIFSGPTGVGKSELAKALAAYYFGSEEAMIRLDMSEFMERHTVSKLIGSPPGYVGYTEGGQLTEAVRRRPYTVVLFDEIEKAHPDVFNMMLQILEDGRLTDSKGRTADFKNTLLIMTSNVGSSVIEKGGRRIGFDLDYDEKDSSYNRIKSLVTEELKQYFRPEFLNRLDEMIVFRQLTKLEVKEIADIMLKEVFGRLKNKEIELQVTERFRDRVVDEGYNPSYGARPLRRAIMRLLEDSMAEKMLARKSKRVIQ

SEQ ID NO: 7205 - DNA, 2481 bp, Ostreococcus tauri
  CDS (1)..(2481)
atgctcgttcgcgcgcagggcgtgttcggagacgccgaggaggaacgctcggcgaaggaggcgcggcgggcgcgggaggacgcgcagttggagatgatgcggcagatgcagatgcagatgcaaaaaatgcagcaacaacaacaagggccggaggatgatgagttgagcgcgctcgagcggttctgcacggacgtcacggatgaggcaaagagagggttgctcgatccgctcgtcggtcgcgaggaggaggtgcgacgattgattcacattctctgccgacggacgaagaacaacccggtgttgctcggtcaatctggggtcggtaagacggctatcgttgagggtttggctcagcgcatcgtgaacgacgacgtcccgcacgcccttcgcggcgcgcgtttgctcgaggtcgatttgggcgccgtcggcgccggatgccaaatgccgggtgagttcgaggagcgtctcaccatcatagttcaagaggtcgtcgacgcgagcgccaagggaccggtcgtgctttttatcgatgacattcacaacctgtgcccggcgccgccgatgaacaacaacggcgcggcgattctcaagccggcgctcggcagaggtttgcttcgctgcgtcggcgccacgtccgcggacaagttcaagaagacgatcgagcaagacgccgccctcgagcgacgtttccaggtggtcacggtcgaagaaccgagcgttgacgacacggtgagcatcttgcgcggtcttcgcccgagatacgagcagcaccacagcatcgccatttctgaaggcgctctgttggcctcggcgcagctctcggcgcgttacgtctccggtcgtcaactgccggacaaggcgatcgatttactcgacgaagccgccgccgccgttcgaatgtcgaagacgagcaagccggatggtctcgacatggccgaccgtcgcatcgcgcagcttcaaaaggagcgcgagcaactcttgcgcaaaaacgcgagcgagctcaccaaggctggcacctctaacatcgccgccgcggagctccagaagattgcgcattcgctctccattgagaagaagggtcgcaaggaaatgcaagtcaagtttgaaacggagcgtcgcgttcaagacgagtatcgtcgcgcgttcgcgaacaactctttcatcaagcgcaaggttgaaaatgccaagatgaagatcgagcaagcatctaaagccgagccaggttctgtgctcgcagccgagctcactcgagccgaggccgagctcaagaagcttgaacaacaaatgagagtgacgcaagatgagctcaccaacgcggaagcgggtgtgctcgagctcaaggatggcggcgccatgatacgcgaggaagtcacggataacgacgtcgccgccgtcgtcagccgatggaccggtgttccggtggccaagctcgtgtccagcgagaaggcgaagttacttcaactcgaatctgagcttcatcagcgtgtcatcggccaagaagccgctgtcacgtccgtcgcggaggcggtgcaacgctcacgcgccgatctcgctgatcccaacgggccggtcgcctccttcatgttcctcggccccacgggtgtcggtaagacggagctcgccaaggcgttggctaactacctgttcaactctgataccgcgctcgtgcgtctcgacatgagcgagtacatggagaagcactccgtcgctcgtttgatcggcgctccgccgggttacgtgggttatgacgagggtggcatgctcacagacgccgttcgtcaaaagccgtactccgtggtgttgtttgatgagattgagaaggcgcacgtcgacgttttcaacgttctcttgcagctcctcgatgaaggtcacgtgacagacactcaaggacgcaacgtgtccttccgcaactgcctcatcatcatgacctctaacttgggatcggacgaaatctcctacgccaacaagcgacgcaacaaggtgaacgtcaaggatgcggtgatgcaacacgtccgctcgcacttccggcctgaattcgtgaaccgtatcgatgagttcatcgtctttgagcccctcacgcacgcgcaaatcgaggaaattgtccagctgcaaaccaagaagttgtcgcagcgcatcgaaggacagcgaatgaacctttcgttggacaagagcgcggtcgaacacttggctcgcatgggttacgatcctgcgtacggggcacgtcccgtgcgtcgcgccattcagcgtgaactcatccagccgcttgccaacgcgatgctccgaggcgtgttcaacgaggacgacaccattctcgtcaccgccgaccgcgaaggtatctgcttgtcgaatggcccaaaaatcgtgcgtgaattgtacgacgtgcacgctgaggattcggaggacgagtccgcggtgtcgtccagtgctccgcgcaccaacggcttcaacggcgtcatacacagtttcaatggtatgatgtag

SEQ ID NO: 7206 - protein, 826 aa, Ostreococcus tauri
MLVRAQGVFGDAEEERSAKEARRAREDAQLEMMRQMQMQMQKMQQQQQGPEDDELSALERFCTDVTDEAKRGLLDPLVGREEEVRRLIHILCRRTKNNPVLLGQSGVGKTAIVEGLAQRIVNDDVPHALRGARLLEVDLGAVGAGCQMPGEFEERLTIIVQEVVDASAKGPVVLFIDDIHNLCPAPPMNNNGAAILKPALGRGLLRCVGATSADKFKKTIEQDAALERRFQVVTVEEPSVDDTVSILRGLRPRYEQHHSIAISEGALLASAQLSARYVSGRQLPDKAIDLLDEAAAAVRMSKTSKPDGLDMADRRIAQLQKEREQLLRKNASELTKAGTSNIAAAELQKIAHSLSIEKKGRKEMQVKFETERRVQDEYRRAFANNSFIKRKVENAKMKIEQASKAEPGSVLAAELTRAEAELKKLEQQMRVTQDELTNAEAGVLELKDGGAMIREEVTDNDVAAVVSRWTGVPVAKLVSSEKAKLLQLESELHQRVIGQEAAVTSVAEAVQRSRADLADPNGPVASFMFLGPTGVGKTELAKALANYLFNSDTALVRLDMSEYMEKHSVARLIGAPPGYVGYDEGGMLTDAVRQKPYSVVLFDEIEKAHVDVFNVLLQLLDEGHVTDTQGRNVSFRNCLIIMTSNLGSDEISYANKRRNKVNVKDAVMQHVRSHFRPEFVNRIDEFIVFEPLTHAQIEEIVQLQTKKLSQRIEGQRMNLSLDKSAVEHLARMGYDPAYGARPVRRAIQRELIQPLANAMLRGVFNEDDTILVTADREGICLSNGPKIVRELYDVHAEDSEDESAVSSSAPRTNGFNGVIHSFNGMM

SEQ ID NO: 7207 - DNA, 2814 bp, Oryza sativa
  CDS (1)..(2814)
atggaggcgtgctgctgctcgtcgtcgtcggtgccgtccgcgtccatcctcgccacgggcgccggcctccgccgccggttctcccctgcgggggccggcgggggtgggagggcggtggcggttgcggcagggcgaccgatccgcgcgtccgcggctctgctggccgcgcccgcgccgcggcggcgcgggggcgtcgtcgtgagggcggtgttcgagcggttcacggagcgggcggtgaaggcggtggtgttctcgcagcgggaggcgcgcgggatgggggacgagacggtggcgccgcaccacctgctgctgggcctcgtcgcggaggaccggtcgccgctggggttcctcgcctcgggcgtccgcgtcgagcgcgcccgcgaggcgtgccgcgccgccgtgggcaaggaagggctcgcgcaggcgccggtcgggctggccacggacgtgcccttctcgggggccagcaagcgcgtcttcgaggccgccgtggagttctccaggaacatgggatgcaacttcatctcgccggagcacattgcgctcggcctcttcaacctgaacgatcccaccacgaacaacgtccttaagagcttaggagtagattcaagtcagctagcaaagcaggcacttacccgagtccaaggggagcttgcaaaggatggaagagagcctgtcggattatcttcttttaaagtgcgtgagaaatttactcctggaggtgggaagtctgcaattgtcaaatactcgaataaaaagaaagagaagagtgcactggctctattttgtctagacttgaccatgcgagccagtggaggattgattgatcctgttattggtcgcaaggatgagattgaaagagtagttcagattatatgccgccgcacgaagaacaatccaattcttttgggcgaagcaggtgttggtaagactgccattgctgagggtttggcccataaaattgccaatggagatgttcctattttcctcgtgggaaagcgtatattatcattggatgttgctctactaatggctggtgctaaagagaggggtgaactggaagccagagttactagtttaatacgtgaagtgcgcaaagcaggtgatgttatactgttcattgatgaagtccatactcttattgggtctgggattgctggaagaggaagcaaaggagctggtcttgatattgcgaatttgctgaagcctgcactggctagaggagaattgcagtgtattgcatctacaactctggatgaacaccgattgcattttgataaggataaggctttggctcgccgatttcagcctgttttggtgaatgagcctagccaggaggatgctgtgaagatattacttggtctgcgtgagaagtatgagacctatcacaaatgcaaatacactttggaaagcatcaatgcagcagtttatttgtcagcaagatatattgctgacagacatcttcccgataaggccattgatctaattgatgaagctggcagtagagctaggatggaatcatttaaaaggaagaaggaggaacaatgctctattctctcaaaatcaccagatgagtactggcaagagattagagctgtccagaacatgcatgaagtggcactgactaacaaggtaaaatattctctaaatcagaatgaccaagaggatgctgttgatattgaactcgtgggtgaggacaaaacaagtccagcatctatgctatcaacttcaactgataaaccatctctggttggatcagaggaaattgcaagagtcacatcattgtggtcaggcataccagttcagcagttgactgcagatgaaagaaagcttctagtaggactggatgatgaactcaggaaacgtgtcataggtcaagacgatgctgttctagccatatctaaagctgtgaagagatcgcgtgttggcctcaatgaccctgacagacctattgctacactaattttctgtggcccaacaggtgttggaaaaactgagctcacgaaagctctagcagcaagttattttggatctgaatcagctactgttaggttagatatgagtgagtatatggagcggcatgctgtgagcaagttgataggctctcctccaggatacatgggatttggtgaaggtggtactttgactgaagcagtcaggagaaaaccattcactgtggtgttgcttgatgaaatagagaaagctcatcctgatattttcaatattcttcttcaaatattcgaagacggtcatttgactgattcacagggccggagggtttccttcaagaatacattaattgtgatgacatcaaatgttggttccacatcaatttctaatggaaagaggagcataggtttccagacacaaactgatactgaagaaaagtcatatgctgcaatgaaatctttggtaatggaagaactgaaggcatttttccgtcccgaattgctcaatagaattgatgaagtggttgtgttccaccctcttgagaaaactcagatgctggctattctcaatataatgctgcaagaggtgaagggtaggattttagcccttgggattggcctagaggtgtctgattccatgaaggacctgatttctcagcatgggtacgacaagagctacggtgcacggccactaagaagagccgtcactcagctggttgaggatgttatcagcgaagcaattctgtctggtcagttcaagcctggtgacaccataatgatggacactgatgccacggggaaaccttgcttgagccgactgaatgatcagaccgtccaattatccgatccgacaccaacactttga

SEQ ID NO: 7208 - protein, 937 aa, Oryza sativa
MEACCCSSSSVPSASILATGAGLRRRFSPAGAGGGGRAVAVAAGRPIRASAALLAAPAPRRRGGVVVRAVFERFTERAVKAVVFSQREARGMGDETVAPHHLLLGLVAEDRSPLGFLASGVRVERAREACRAAVGKEGLAQAPVGLATDVPFSGASKRVFEAAVEFSRNMGCNFISPEHIALGLFNLNDPTTNNVLKSLGVDSSQLAKQALTRVQGELAKDGREPVGLSSFKVREKFTPGGGKSAIVKYSNKKKEKSALALFCLDLTMRASGGLIDPVIGRKDEIERVVQIICRRTKNNPILLGEAGVGKTAIAEGLAHKIANGDVPIFLVGKRILSLDVALLMAGAKERGELEARVTSLIREVRKAGDVILFIDEVHTLIGSGIAGRGSKGAGLDIANLLKPALARGELQCIASTTLDEHRLHFDKDKALARRFQPVLVNEPSQEDAVKILLGLREKYETYHKCKYTLESINAAVYLSARYIADRHLPDKAIDLIDEAGSRARMESFKRKKEEQCSILSKSPDEYWQEIRAVQNMHEVALTNKVKYSLNQNDQEDAVDIELVGEDKTSPASMLSTSTDKPSLVGSEEIARVTSLWSGIPVQQLTADERKLLVGLDDELRKRVIGQDDAVLAISKAVKRSRVGLNDPDRPIATLIFCGPTGVGKTELTKALAASYFGSESATVRLDMSEYMERHAVSKLIGSPPGYMGFGEGGTLTEAVRRKPFTVVLLDEIEKAHPDIFNILLQIFEDGHLTDSQGRRVSFKNTLIVMTSNVGSTSISNGKRSIGFQTQTDTEEKSYAAMKSLVMEELKAFFRPELLNRIDEVVVFHPLEKTQMLAILNIMLQEVKGRILALGIGLEVSDSMKDLISQHGYDKSYGARPLRRAVTQLVEDVISEAILSGQFKPGDTIMMDTDATGKPCLSRLNDQTVQLSDPTPTL

SEQ ID NO: 7209 - DNA, 2595 bp, Candidatus Kuenenia stuttgartiensis
  CDS (1)..(2595): transl_table=11
atgagacttgataagtttaccataaaagcgcaggaagccatacaggaagctcaggaattagccgaatcaaagaggcagcagcaaatcctttcggcgcacgtattggaggttttattgacgcaggagcagggcatcgtagttcctctcctgcaaaaattaggtgtggatgcaaatattgttcttgataaaacaatggaggccgttaacaagcttccgcaaataagcggctcaggagcgccggggcaggcatatgtgagtgcggaactgcgcgatatgataaactttgcatgggaagaagccggcaagctgaaggacgaatacctaagcaccgaacatatgctgctggcgctggcacggcaaaaaaatacctccgcatgcaaaatattaaacgaggcaggcattgaccgggaaaatattctcaaggctttaaaagaaatccggggcagccagagagtcaccgaccagactcccgaagacaagtaccgtgcacttgaacgatacagtaaagatctggttgctctggcacaaagaggaaagcttgaccccgttattggccgtgatgacgaaattcgcagggtaatacaggtattgtcacgaaggacaaaaaataatcccgttctcatcggcgagccaggcgtgggaaaaaccgctatcgtcgaagggcttgcccagcgcattgtaaacggagatatccctgaaagcttaaaaaacaaacgggtaatgtcgctcgatatgggtgcgcttattgccggcgcaaaataccgtggggagtttgaagaccgtcttaaggcggttcttaaagagataagcgagaaggaagggcagataatacttttcatcgatgaattgcacaccgtggttggggcaggagccgcagaaggggcaatggacgcttccaacctcctaaaaccggcattggcgcgtggagaactgcgttgcgtgggcgccaccactcttgatgaatacagaaaatacattgaaaaagacgccgccctggaacgacggttccagcaagtatatgtgagagaacctaccgttgaagacactatcgcaatcctgcgcggactaaaagaacgatacgaagtgcatcacggagtgcgcataacagactcagcgattattgctgcagcgaccctttccagccggtacatatcggacaggtttctgcccgacaaggcaatagatcttatcgatgaagctgcgtcaaaattaaggatagaaatcgacagcatgcctgttgagcttgatgagatagagcgtaagatcctgcaattggaaatagaaaaagaggctttaaaaaaagaaaaagacgaagcttctaaacaacgcatagagaaaattgaaagacaattatccgacctgaaagaagaatccagggctttccgggcacactgggaaaacgaaaagaaggttatcaaggaaatacaggacattaacgcaaagattgaccaggcgcgcattgaggagcaagcagcccaaagggagggaaatttagaaaaggttgctgagatacgctatggacgtattattgaatgtgaaagaaaattaaaggaaaagcaccttgaattacaggaactgcaaaaatccaaatccctcctgaatgaggaggtgggtgaggatgacattgccatggtagtcgccaaatggactggaattcccgtatcacgtatgctggaaagtgaaaaggaaaaactattaaagatggaagaaagactgaaagagagggtagttggtcaggaagaggcaatttccgccgtgtcaaacggcatccggcgtgcacgcgccggactccaggatccgaaccggcctatcggtaccttcctgtttcttggtcctaccggagttgggaaaacggagctttgcaaggcgctggcggcctttttgtttgataacgaagatgcaatggttcgtatcgacatgtctgaattcatggaacaacactcggttgcacggcttataggcgccccacctggttatgtgggatacgaagaaggcggaagactcactgaggctataagaagaagaccctatgcagtggtgctattcgatgaaattgaaaaggcacaccgggatgtatttaacgtcttgcttcaggtttttgatgacggacggcttactgacggacacggcagaaccgttgattttaagaataccattattgtaatgacctcaaacatcgcaagccagtggatacaggatttaaccggccctgaaaatgaagaagaactgaaaagagaggtaaaacaggcgctgaaggagaccttccgccctgaattccttaaccgtatcgatgaaacaattgtctttcacagtctctccaaagaactaatcaaacagattgccgacatacaattgaacgaccttcgaaagcgcctcgccagaaacaaccttaaacttaccgttacagaccgggtaaaagagactttgattgaagaagggtatgacccgcattttggcgcacggcctttaaagcgcaccatccagcagctcatcgaaaacccgctttctatggaaattttgggagggaaattcccagacggctcggaaatcatggtagatatgcaggatgggaaggctgtttttacaaataaatga

SEQ ID NO: 7210 - protein, 864 aa, Candidatus Kuenenia stuttgartiensis
MRLDKFTIKAQEAIQEAQELAESKRQQQILSAHVLEVLLTQEQGIVVPLLQKLGVDANIVLDKTMEAVNKLPQISGSGAPGQAYVSAELRDMINFAWEEAGKLKDEYLSTEHMLLALARQKNTSACKILNEAGIDRENILKALKEIRGSQRVTDQTPEDKYRALERYSKDLVALAQRGKLDPVIGRDDEIRRVIQVLSRRTKNNPVLIGEPGVGKTAIVEGLAQRIVNGDIPESLKNKRVMSLDMGALIAGAKYRGEFEDRLKAVLKEISEKEGQIILFIDELHTVVGAGAAEGAMDASNLLKPALARGELRCVGATTLDEYRKYIEKDAALERRFQQVYVREPTVEDTIAILRGLKERYEVHHGVRITDSAIIAAATLSSRYISDRFLPDKAIDLIDEAASKLRIEIDSMPVELDEIERKILQLEIEKEALKKEKDEASKQRIEKIERQLSDLKEESRAFRAHWENEKKVIKEIQDINAKIDQARIEEQAAQREGNLEKVAEIRYGRIIECERKLKEKHLELQELQKSKSLLNEEVGEDDIAMVVAKWTGIPVSRMLESEKEKLLKMEERLKERVVGQEEAISAVSNGIRRARAGLQDPNRPIGTFLFLGPTGVGKTELCKALAAFLFDNEDAMVRIDMSEFMEQHSVARLIGAPPGYVGYEEGGRLTEAIRRRPYAVVLFDEIEKAHRDVFNVLLQVFDDGRLTDGHGRTVDFKNTIIVMTSNIASQWIQDLTGPENEEELKREVKQALKETFRPEFLNRIDETIVFHSLSKELIKQIADIQLNDLRKRLARNNLKLTVTDRVKETLIEEGYDPHFGARPLKRTIQQLIENPLSMEILGGKFPDGSEIMVDMQDGKAVFTNK

SEQ ID NO: 7211 - DNA, 2526 bp, Streptomyces tenjimariensis
  CDS (1)..(2526): transl_table=11
atgttcgagaggttcaccgaccgcgcgcggcgggttgtcgtcctggctcaggaagaagcccggatgctcaaccacaactacatcggcaccgagcacatcctcctgggcctgatccacgagggtgaaggtgtcgccgcaaaggccctggagagcctcggcatttcgcttgaggcggtccgccagcaggtggaggagatcatcggccagggccagcaggccccttccggccacatccccttcacgccccgtgccaagaaggtcctggagctgtcgctccgcgaggcccttcagctcggccacaactacatcggcaccgagcacatcctgctcggactgatccgcgagggcgagggcgtcgccgcccaggtcctcgtgaagctgggtgccgatctcaaccgggtgcggcagcaggtcatccagctgctctccggctactccacgggcaaggagaccgccaccgccggcggtcccgccgagggcacgccctcgacgtccctggtcctcgaccagttcggccggaacctcacccaggccgcccgtgagtccaagctcgaccccgtcatcgggcgcgagaaggagatcgagcgggtcatgcaggtgctgtcccgccgtaccaagaacaacccggtcctcatcggtgagcccggcgtcggcaagacggcggtcgtcgagggcctggcgcaggccatcgtcaagggcgaggtgcccgagaccctcaaggacaagcacctctacaccctggacctgggcgcgctcgtcgccggttcccggtaccgcggtgacttcgaggagcgcctgaagaaggtgctcaaggagatccgcacccgcggcgacatcatcctgttcatcgacgagctccacaccctggtgggtgcgggtgccgccgagggcgccatcgacgcggcgtccatcctgaagccgatgctcgcccgcggtgagcttcagaccatcggcgccacgacgctcgacgagtaccgcaagtacctggagaaggacgcggccctggagcgccgcttccagcccatccaggtcgcggagccgtcgctgccgcacaccatcgagatcctcaagggcctgcgcgaccggtacgaggcccaccaccgggtctccatcacggacgaggccctcgtccaggcggccacgctggccgaccggtacatctcggaccgcttcctgccggacaaggcgatcgacctgatcgacgaggccggttcccggatgcgtatccgccggatgaccgcgccgccggacctccgcgagttcgacgagaagatcgcgggcgtccgccgcgacaaggagtccgcgatcgacgcgcaggacttcgagaaggccgcctcgctccgcgacaaggagaagcagctcctcgcggccaaggccaagcgggagaaggagtggaaggccggcgacatggacgtcgtcgcggaggtcgacggcgagctgatcgccgaggttctcgcgaccgccaccggcatcccggtcttcaagctgacggaggaggagtcctcccggctgctgcgcatggaggacgagctccacaagcgcgtcatcggccaggaagacgccatcaaggccctgtcgcaggccatccgccgtacccgcgccggtctgaaggacccgaagcgccccggtggctcgttcatcttcgccggcccgtccggtgtcggtaagaccgagctgtccaagacgctcgcggagttcctcttcggtgacgaggacgcgatgatctccctcgacatgtcggagttcagcgagaagcacaccgtctcgcggctcttcggctccccgcccggatacgtgggctacgaggagggcggccagctcaccgagaaggtccgtcgcaagccgttctccgtcgtcctcttcgacgaggtcgagaaggcccacccggacatcttcaactcgctgctccagatcctggaggacggtcgcctgaccgactcccagggccgggtcgtggacttcaagaacacggtcatcatcatgacgaccaacctcggcacccgggacatctccaagggcttcaacctgggcttcgccgcccagggcgacgtcaagaccgggtacgagcggatgaaggcgaaggtcaacgaggagctgaagcagcacttccgccccgagttcctgaaccgtgtcgacgacaccgtcgtgttccaccagctcagccaggaagacatcatccagatcgtcgacctgatgatcgcgaaggtggacgagcggctgaaggaccgcgacatgggcatcgagctcagccaggacgcgaagatcctgctggccaagcgcggttacgacccggtgctgggcgcccggccgctgcgccggaccatccagcgcgagatcgaggacgtgctctccgagaagatcctcttcggtgagctgcgccccggtcacatcgtggtcgtggacaccgagggcgagggtgaggagaagaagttcaccttccgcggcgaggagaagtccgcgctcccggacgtgccgccgatcgaggcggccggcggggcgggtccgaacctgtccaaggacgcgtag

SEQ ID NO: 7212 - protein, 841 aa, Streptomyces tenjimariensis
MFERFTDRARRVVVLAQEEARMLNHNYIGTEHILLGLIHEGEGVAAKALESLGISLEAVRQQVEEIIGQGQQAPSGHIPFTPRAKKVLELSLREALQLGHNYIGTEHILLGLIREGEGVAAQVLVKLGADLNRVRQQVIQLLSGYSTGKETATAGGPAEGTPSTSLVLDQFGRNLTQAARESKLDPVIGREKEIERVMQVLSRRTKNNPVLIGEPGVGKTAVVEGLAQAIVKGEVPETLKDKHLYTLDLGALVAGSRYRGDFEERLKKVLKEIRTRGDIILFIDELHTLVGAGAAEGAIDAASILKPMLARGELQTIGATTLDEYRKYLEKDAALERRFQPIQVAEPSLPHTIEILKGLRDRYEAHHRVSITDEALVQAATLADRYISDRFLPDKAIDLIDEAGSRMRIRRMTAPPDLREFDEKIAGVRRDKESAIDAQDFEKAASLRDKEKQLLAAKAKREKEWKAGDMDVVAEVDGELIAEVLATATGIPVFKLTEEESSRLLRMEDELHKRVIGQEDAIKALSQAIRRTRAGLKDPKRPGGSFIFAGPSGVGKTELSKTLAEFLFGDEDAMISLDMSEFSEKHTVSRLFGSPPGYVGYEEGGQLTEKVRRKPFSVVLFDEVEKAHPDIFNSLLQILEDGRLTDSQGRVVDFKNTVIIMTTNLGTRDISKGFNLGFAAQGDVKTGYERMKAKVNEELKQHFRPEFLNRVDDTVVFHQLSQEDIIQIVDLMIAKVDERLKDRDMGIELSQDAKILLAKRGYDPVLGARPLRRTIQREIEDVLSEKILFGELRPGHIVVVDTEGEGEEKKFTFRGEEKSALPDVPPIEAAGGAGPNLSKDA

SEQ ID NO: 7213 - DNA, 2727 bp, Funaria hygrometrica
  CDS (1)..(2727)
atgaatccggagaagtttactcacaagacgaacgaagcgttggcagccgggcaggagcttgcgaccgaagccggccatgcgcaatacacgcccgtgcatttggcccttgcgctgttgaatgatagtgagggactgttgcgccaggccattgcctctgcgtcgggtggcgaccaaacgctcaattctgttgagcgtgtgttgaagaatactctgaagaagattccatcgcagaatcctgctcctgacgcttctcctgcgaacaatgcactcattaaatgtataaagaaggcgcagagcttgcagaaatcaagaagcgactcacatttggctgtcgatcagctgattttggcgttgctcgaggattcccagatagcagactgcttcaaggaggcgggtgtgagtgcaactagggtgaagagagagctcgaggctgtgagaagatcttctaaaaaggtcgacaacgcaaacgctgattccaattttcaagcattgaaaaaatatgggcgggatttggtggaggatgctgcgaagctggatcccgtcattggtcgagatgacgaaatccggagagttgtgagaatcctgtctcggaggacgaagaataatcccgtgttgattggtgagcctggcgtcggaaaaacagctgtcgttgaggggctcgcccagcgtattgtgagaggagatgcgccaagcaatttgctagaagtccgtctagtcgctttggatatgggagccttggttgcgggagccaaataccgaggtgaatttgaggaaagattgaaggccgtgctcaaggaagtggaagattctgatggcaaagtcattcttttcatagatgaaattcatcttgttcttggagcagggcgtacagaaggatctatggatgcagccaatctactgaagccaatgctggcccgaggacagctccgttgcattggagcaaccactttggatgagtacaggaagtatgttgaaaaggatgcagccttcgagcggcggtttcagcaggttatggtttcagaaccaagtgtagcagacacgatcagtattttaagaggcctgaaggagcgatacgaagggcaccatggtgtccgtctcttagacagggctttggttgttgctgcgcaactatcgagcagatacataacaagcaggttcttgcccgacaaagcgattgacctcattgatgaagcatgtgccaacgtgcgtgtgcagctggatagtcaaccagaagagattgatgttttggaaaggcgtagaatacagcttgaggtggaggctcatgctatggagaaagagaaggataaagccagcaaggcccgtttacttgaggtgcggcaggaactccaaaatttggaggatcaactgagacttctgaaaatgaagtatcaaagagaaaaggaaagggtcgatgaacttcggaagttgaagcagaagagagaagatcttcaagccagtttggtggatgcagaacgacggtatgatttggcaagggcagcagacttcaagtacggagctttagtggaggtggagaaggctatccagaaaatggagcagcaagagtctggagaaaacaccatgctcacggaatctgtaggtccagagcaaattgcggaggtggttagtcggtggactggaattccggtaactaggttgggtcaaaatgagaaagcccggctgttggccttcgccgatcgtttacatgagcgagttgttggtcaagacgaggcagttcaggctgtcgcagaagcaatattacgatcacgggctggtttgggtcgacagcaacaacccactggatccttcctcttccttggtccaacgggtgtgggcaaaactgaattggcgaaggcattggctgagcagctctttgacaaggaaaaccagcttgttcgcatggatatgtccgaatacatggaacagcattcggtttctcgtctgattgggtctccacctgggtatgtgggacacgaggagggaggtcagcttacagaagcagtgagaaggcgcccttacagtgttgttctttttgatgaagttgagaaagcccatccggcagttttcaacactctcttgcagttgcttgatgatggtcgtctcacggatggccaaggccgaactgtggatttcaccaacacagtagtcatcatgacctctaacctaggagcagagcatttacttgcgggtttgagtggcatgatgtctatgactgtcgccaaggaaaaagttctagagcaagtgcgggtacacttccgtccagaacttctcaatcgattggacgaaattgtagttttcgagccgctcaagcacgatcagctgcgcaaagtggcaaggatgcagatgaaggatgttgccttgcgacttgcagaacggggcgttgcattagctgtcactgatgccgctcttgaccttgttttgaaggagtcgtacgatcctgtttacggtgcgcgtccactgcgaagatggttagagcgcaaagttgtgaccaacctatcaaggatgctgatcaacgatgaagtggatgacaattctacagtcttcatagacgttaaaccaggagagaatcaactctcatatgctgtggaacgcaacggcggcctggtgaacagtattactgggaagaaggcggacatcctcatcgaagtaccgagagtagaacagcatgatgtcaagagaataagagttgaagaaccagacagcgacttagatgatgagatggaagactaa

SEQ ID NO: 7214 - protein, 908 aa, Funaria hygrometrica
MNPEKFTHKTNEALAAGQELATEAGHAQYTPVHLALALLNDSEGLLRQAIASASGGDQTLNSVERVLKNTLKKIPSQNPAPDASPANNALIKCIKKAQSLQKSRSDSHLAVDQLILALLEDSQIADCFKEAGVSATRVKRELEAVRRSSKKVDNANADSNFQALKKYGRDLVEDAAKLDPVIGRDDEIRRVVRILSRRTKNNPVLIGEPGVGKTAVVEGLAQRIVRGDAPSNLLEVRLVALDMGALVAGAKYRGEFEERLKAVLKEVEDSDGKVILFIDEIHLVLGAGRTEGSMDAANLLKPMLARGQLRCIGATTLDEYRKYVEKDAAFERRFQQVMVSEPSVADTISILRGLKERYEGHHGVRLLDRALVVAAQLSSRYITSRFLPDKAIDLIDEACANVRVQLDSQPEEIDVLERRRIQLEVEAHAMEKEKDKASKARLLEVRQELQNLEDQLRLLKMKYQREKERVDELRKLKQKREDLQASLVDAERRYDLARAADFKYGALVEVEKAIQKMEQQESGENTMLTESVGPEQIAEVVSRWTGIPVTRLGQNEKARLLAFADRLHERVVGQDEAVQAVAEAILRSRAGLGRQQQPTGSFLFLGPTGVGKTELAKALAEQLFDKENQLVRMDMSEYMEQHSVSRLIGSPPGYVGHEEGGQLTEAVRRRPYSVVLFDEVEKAHPAVFNTLLQLLDDGRLTDGQGRTVDFTNTVVIMTSNLGAEHLLAGLSGMMSMTVAKEKVLEQVRVHFRPELLNRLDEIVVFEPLKHDQLRKVARMQMKDVALRLAERGVALAVTDAALDLVLKESYDPVYGARPLRRWLERKVVTNLSRMLINDEVDDNSTVFIDVKPGENQLSYAVERNGGLVNSITGKKADILIEVPRVEQHDVKRIRVEEPDSDLDDEMED

SEQ ID NO: 7215 - DNA, 2742 bp, Triticum turgidum subsp
  CDS (1)..(2742)
atgaatcccgacaagttcacgcacaagaccaatgaggcgctcgcggcggcgcacgagatggcgtccgaggccggccatgcgcagctcacgccgctgcacctcgccgcggcgctcgcggcggacaggtcgggcatcctccgccaggccatcgcccacgcgtccggcggcaacgacgccgcggccgagtcgttcgagcgcgtcgcgaccgcagcgctcaagcggctgccttcgcagtccccgccgcccgacaccgtcccggcctccacttcgctggtcaaggccgtccgccgcgcgcagtcggcgcagaagtcgcgcggcgactcgcacctcgccgtcgaccagctgctcatgggcctcctcgaggacccacagatctccgacgcgctcaaggaggccggcatctccgccgcgcgggtgaaggcagaggtcgagaagctccggggaggcgacaaccggcgcgtggagtccgcgtcgggggacaccaacttccaggccctcaagacgtacggccgcgacctcgtggaggtggcgggcaagctggacccggtcatcggccgcgacgaggagatccggcgcgtggtgcggatcctgtcgcggcgcaccaagaacaaccccgtcctgatcggcgagcccggcgtgggcaagaccgccgtggtggaggggctcgcgcagcgcgtcgtgcgcggcgacgtccccagcaacctcctggacgtgcgcctggtcgcgctggacatgggcgcgctcgtggccggcgccaagtaccgcggcgagttcgaggagcggctcaaggccgtgctcaaggaggtggaggaggccgaggggaaggtgatactgttcatcgacgagatacacctggtgctcggcgccgggcggacggaggggtccatggacgcggccaacctgttcaagccgatgctggcgagggggcagctcaggtgcattggcgcgacgaccctcgaggagtacaggaagtacgtggagaaggacgcggcgttcgagaggcggttccagcaggtgttcgtggcagagcccagcgtccccgacaccgtcagcatactgagagggctcaaggagaagtacgaggggcaccatggtgtgaggattcaggaccgcgcgctcgtcattgccgcgcagctctcgtcgaggtacatcatgggtcgtcatctgcctgataaagcaatcgatttggttgacgaggcctgcgcaaatgtgagggtgcaacttgacagccagcctgaagagatcgacaacctcgagaggaagaggatccagttggaagtcgagctccatgccctcgagaaggagaaggacaaggctagcaaagctcggctagttgatgtgaggaaagagttggacgatctgcgagacaagctgcagccgctgcagatgaagtatcgcaaggagaaagagaggatcgacgagatcaggagactgaagcagcgccgcgaagagctgcagttcactctgcaggaggccgagcgccggatggatttggcccgcgtggctgatctcagatacggtgctctgcaggaggttgatgctgccatcgctaagctggagggtgagaccggcgagaacctgatgttaacagagactgtcggcccggaccagattgccgaggtggtgagccgctggactggcattcctgtcactaggctgggacagaatgagaaggccaggctgatcggtctggctgatagactgcatcagagggtggttggacagtatgaggccgtcaatgcagtcggagaggctgttttgcggtcgagggctggccttggacggccacagcagcctactggttcattcctcttcctcgggccgaccggtgtgggtaaaaccgagctcgccaaggctctagctgagcagctgtttgatcacgagaacctgctcgtccgcattgacatgtctgaatacatggagcagcattcggttgcccggctaatcggtgccccacctggttacgttggtcatgaggaaggagggcagctgacagagcaagtgaggaggaggccatacagtgtcatcctcttcgacgaggttgagaaggcacatgtggcggtattcaacaccctgctccaggtcctggacgacgggcggttgaccgacgggcaaggcaggacggttgatttcaggaacaccgtcatcatcatgacctcgaaccttggcgcggagcacctcctcgccggaatggtgggcaactccatgaaggttgctcgcgatctcgtcatgcaggaggtgaggaggcatttccgcccggagctgctgaaccgcctggacgagatcgtcatcttcgaccctctgtcgcacgagcagctgcggaaggttgcccggcttcagatgaaagatgtggcagtacgtcttgcggagaggggcgttgccttggccgtcacagacgctgccctggacgtcatcctctcactctcttatgatccggtgtacggcgccaggccaatcaggagatggatcgagaagaggatagtggcggagctttccaagatgttgatccgcgaggagatcgacgagaactccacggtgtacatcgacgctgcgcccagcaaggacgagctgacctatggcgtcgacaagcacggagggctggtgaacgcgcgcacgggccacaagtccgacatcctcatccaggttcctagcggagctgttgagggcgatgcggcgcacgccgtgaagaagatgaagatcatgcaggacggcggagaggtggacgacatggaggaagagtag

SEQ ID NO: 7216 - protein, 913 aa, Triticum turgidum subsp
MNPDKFTHKTNEALAAAHEMASEAGHAQLTPLHLAAALAADRSGILRQAIAHASGGNDAAAESFERVATAALKRLPSQSPPPDTVPASTSLVKAVRRAQSAQKSRGDSHLAVDQLLMGLLEDPQISDALKEAGISAARVKAEVEKLRGGDNRRVESASGDTNFQALKTYGRDLVEVAGKLDPVIGRDEEIRRVVRILSRRTKNNPVLIGEPGVGKTAVVEGLAQRVVRGDVPSNLLDVRLVALDMGALVAGAKYRGEFEERLKAVLKEVEEAEGKVILFIDEIHLVLGAGRTEGSMDAANLFKPMLARGQLRCIGATTLEEYRKYVEKDAAFERRFQQVFVAEPSVPDTVSILRGLKEKYEGHHGVRIQDRALVIAAQLSSRYIMGRHLPDKAIDLVDEACANVRVQLDSQPEEIDNLERKRIQLEVELHALEKEKDKASKARLVDVRKELDDLRDKLQPLQMKYRKEKERIDEIRRLKQRREELQFTLQEAERRMDLARVADLRYGALQEVDAAIAKLEGETGENLMLTETVGPDQIAEVVSRWTGIPVTRLGQNEKARLIGLADRLHQRVVGQYEAVNAVGEAVLRSRAGLGRPQQPTGSFLFLGPTGVGKTELAKALAEQLFDHENLLVRIDMSEYMEQHSVARLIGAPPGYVGHEEGGQLTEQVRRRPYSVILFDEVEKAHVAVFNTLLQVLDDGRLTDGQGRTVDFRNTVIIMTSNLGAEHLLAGMVGNSMKVARDLVMQEVRRHFRPELLNRLDEIVIFDPLSHEQLRKVARLQMKDVAVRLAERGVALAVTDAALDVILSLSYDPVYGARPIRRWIEKRIVAELSKMLIREEIDENSTVYIDAAPSKDELTYGVDKHGGLVNARTGHKSDILIQVPSGAVEGDAAHAVKKMKIMQDGGEVDDMEEE

SEQ ID NO: 7217 - DNA, 2742 bp, Triticum turgidum subsp
  CDS (1)..(2742)
atgaatcccgacaagttcacgcacaagaccaatgaggcgctcgcggcggcgcacgagatggcgtccgaggccggccacccgcagctcacgccgctgcacctcgccgcggcgctcgcggcggacaggtcgggcatcctccgccaggccatcgcccacgcgtccggcggcaacgacgccgcggccgattcgttcgagcgcgtcgcgtccgccgcgctcaagcggctgccctcgcagtccccgccgcccgacaccgtcccggcctccacctcgctggtcaaggccgtccgccgcgcgcagtcggcgcagaagtcgcgcggcgactcgcacctcgccgtcgaccagctgctcatgggcctcctcgaggacgcgcagatctccgacgcgctcaaggaggccggtatctccgccgcgcgggtgaaggccgaggtggagaagctccggggaggcgacaaccggcgcgtggagtcggcgtcgggggacaccaacttccaggccctcaagacgtacggccgcgacctggtggaggtggccggcaagctggacccggtcatcggccgcgacgaggagatccggcgcgtggtgcggatcctgtcgcggcgcaccaagaacaaccccgtcctcatcggcgagcccggcgtgggcaagaccgccgtcgtggaggggctcgcgcagcgcgtcgtgcgcggtgacgtccccagcaacctcctggacgtgcgcctggtggcgctggacatgggcgcgctcgtggccggcgccaagtaccgcggcgagttcgaggagcggctcaaggccgtgctcaaggaggtggaggaggccgaggggaaggtgatcctgttcatcgacgagatacacctggtgctcggcgccgggcggacggaggggtccatggacgccgccaacctgttcaagccgatgctggcgagggggcagctcaggtgcatcggcgccacgaccctcgaggagtacaggaagtacgtggagaaggacgcggcgttcgagaggcggttccagcaggtgttcgtggcggagcccagcgtccccgacaccgtcagcatactgagagggctcaaggagaagtacgagggccaccatggtgtgaggatccaggaccgcgcgctcgtcattgccgcgcagctctcgtcgaggtacatcacgggtcgtcatttgcctgataaagcaatcgatttggtcgacgaggcctgtgcaaatgtgagggtgcagcttgacagccagcctgaagagattgacaacctcgagaggaagagaatccagttggaagtcgagctccatgccctcgagaaggagaaggacaaggctagcaaagctcggttagttgatgtgaggaaagagttggacgatctgcgagacaagctgcagccgctgcagatgaagtaccgcaaggagaaagagaggatcgacgagatcaggagcctgaagcagcgccgcgaagagctgcagttcactctgcaggaggccgagcgccggatggacttggcccgcgtggctgatctcagatacggtgctctgcaggaggttgacgctgccattgctaagctggagggtgagaccggcgagaacttgatgttaacagagactgtcggcccggaccagattgccgaggtggtgagccgctggactggcattcctgtcaccaggctcgggcagaatgagaaggcgaggctgatcgggcttgctgacagactgcatcagagggtggttggacagtacgaggccgtcaatgcggtcggagaggctgttttgcggtcgagggctggccttgggcggccacagcagcctactggttcattcctcttcctcggaccgaccggtgtgggtaaaaccgagctcgcaaaggctctagctgagcagctgtttgatgatgagaacctgctcgtccgcatcgacatgtctgaatacatggagcagcattcggttgcccggctaatcggagccccacctggttacgttggtcatgaggaaggagggcagctgacggagcaagtgaggaggaggccatacagtgtcgtcctcttcgacgaggttgagaaggcgcatgtggcggtattcaacactctgctccaggtcctggacgacgggcggttgaccgacgggcaaggcaggacggtggacttcaggaacaccgtgatcatcatgacctcgaaccttggcgcggagcacctgctcgccggaatggtgggcagctcgatgaaggttgctcgcgatctcgtcatgcaggaggtgaggaggcatttccggccggagctgctgaaccgtctggacgagatcgtcatcttcgaccctctgtcgcacgagcagctgcggaaggtcgcccggcttcagatgaaagatgtggcagtccgtcttgccgagaggggcgtcgctctggccgtcaccgacgccgccctggacgtcatcctctcactctcttacgatccggtgtatggcgccaggccaatcaggagatggatcgagaagaggatagtgacggagctgtccaagatgttgatccgcgaggagatcgacgagaattccacggtgtacatcgacgccgcgcccagcaaggacgagctgacctatggcgtcgacaagcacggggggctggtgaacgcgcgcacgggccacaagtccgatatcctcatccaggtccctaacggagctgtcgggggcgatgcggcgcacgccgtgaagaagatgaagatcatgcaggacggcggagatgtggacgacatggaggaagagtag

SEQ ID NO: 7218 - protein, 913 aa, Triticum turgidum subsp
MNPDKFTHKTNEALAAAHEMASEAGHPQLTPLHLAAALAADRSGILRQAIAHASGGNDAAADSFERVASAALKRLPSQSPPPDTVPASTSLVKAVRRAQSAQKSRGDSHLAVDQLLMGLLEDAQISDALKEAGISAARVKAEVEKLRGGDNRRVESASGDTNFQALKTYGRDLVEVAGKLDPVIGRDEEIRRVVRILSRRTKNNPVLIGEPGVGKTAVVEGLAQRVVRGDVPSNLLDVRLVALDMGALVAGAKYRGEFEERLKAVLKEVEEAEGKVILFIDEIHLVLGAGRTEGSMDAANLFKPMLARGQLRCIGATTLEEYRKYVEKDAAFERRFQQVFVAEPSVPDTVSILRGLKEKYEGHHGVRIQDRALVIAAQLSSRYITGRHLPDKAIDLVDEACANVRVQLDSQPEEIDNLERKRIQLEVELHALEKEKDKASKARLVDVRKELDDLRDKLQPLQMKYRKEKERIDEIRSLKQRREELQFTLQEAERRMDLARVADLRYGALQEVDAAIAKLEGETGENLMLTETVGPDQIAEVVSRWTGIPVTRLGQNEKARLIGLADRLHQRVVGQYEAVNAVGEAVLRSRAGLGRPQQPTGSFLFLGPTGVGKTELAKALAEQLFDDENLLVRIDMSEYMEQHSVARLIGAPPGYVGHEEGGQLTEQVRRRPYSVVLFDEVEKAHVAVFNTLLQVLDDGRLTDGQGRTVDFRNTVIIMTSNLGAEHLLAGMVGSSMKVARDLVMQEVRRHFRPELLNRLDEIVIFDPLSHEQLRKVARLQMKDVAVRLAERGVALAVTDAALDVILSLSYDPVYGARPIRRWIEKRIVTELSKMLIREEIDENSTVYIDAAPSKDELTYGVDKHGGLVNARTGHKSDILIQVPNGAVGGDAAHAVKKMKIMQDGGDVDDMEEE

SEQ ID NO: 7219 - DNA, 2754 bp, Triticum turgidum subsp
  CDS (1)..(2754)
atgaacccggacaacttcacgcacaagaccaacgaggcgctggtggcggcgcacgaggcggcgtcggaggccggccacgcgcagatcacgccgctgcacctggcggcggcgctggcggcggacaggtcgggcatcctgcggcaggcggtggcgggggcgtccggcgggaacgcgtccgcgggggactcgttcgagcgcgtgctctccgccgcgctcaagaagctgccgtcgcagtcgccgccgccggactccgtgccggcctccacggcgctcatcaaggccatccgccgcgcgcagtcggcgcagaagaagcgcggggactcgcacctcgccgtcgaccagctgctcatgggcctcctcgaggacgcgcagatcgccgactgcctcaaggaggccggcgtgtccgcctcgcgggtgcgcgccgagctcgagaagctccgcggcggggacaacgcgcgcaaggtcgagtccgcctccggcgacaccaacttccaggcgctcaagacgtacggccgcgacctcgtcgaggtggccggcaagctcgaccccgtcatcggccgcgacgaggagatccgccgcgtcgtgcgcatcctctcgcgccgcaccaagaacaaccccgtcctcatcggcgagcccggcgtgggcaagacggccgtcgtggagggcctcgcgcagcgcgtcgtgcgcggggacgtgcccagcaacctgctcgacgtccgcctcgtcgcgctcgacatgggcgccctcgtcgccggcgccaagtaccgcggcgagttcgaggagcggctcaaggccgtgctcaaggaggtggaggaggccgacggcaaggtcatcctcttcatcgacgagatacacctcgtcctcggtgccggcaggacggaggggtccatggacgcggccaacctgttcaagccgatgctcgcgcgtggccagctccggtgcatcggcgccaccacgctggaggagtaccgcaagtacgtcgagaaggacgccgcgttcgagcggcggttccagcaggtgtacgtggccgagccgagcgtcgccgacaccatcagcatcctgcgagggctcaaggagaagtacgaggggcaccacggcgtgcgcatccaggaccgcgccatcgtcgtcgcggcgcagctctcggcgaggtacatcatgggccggcacctgccggacaaggccatcgacctggtggacgaggcgtgcgcgaacgtgagggtgcagctggacagccagccggaggagatcgacaacctggagaggaagcggattcagctggaggtggagctccacgcgctggagaaggagaaggacaaggccagcaaggcccggctggtggaggtgaggaaggagctggacgacctgagggacaagctgcagccgctgaccatgaagtaccgcaaggagaaggagcggatcgacgagatccggaagctgaagcagcggcgcgaggagctgcagttcacgctgcaggaggcggagcggcgcatggacctggcacgcgtcgccgacctcaagtacggcgccctccaggagatcgacgccgccatcgccaagctggagggcgagaccggcgagaacctgatgctcaccgagaccgtcggccccgagcagatcgcggaggtggtgagccggtggaccggcatcccggtgacccggctcgggcaaaacgacaaggagcggctggtgggcatggcggacaggctgcacacgagggtggtcgggcagacggaggccgtgaacgccgtcgccgaggcggtgctgaggtccagggcggggcttggacggccgcagcagcccaccgggtcgttcctcttcctgggcccgaccggcgtaggcaagaccgagctcgccaaggccctcgccgagcagctgttcgacgacgagaacctgctcgtccgcatcgacatgtccgagtacatggagcagcactccgtcgctcgcctcatcggagcgccacctggctatgtcgggcacgaggagggcgggcagctgacggagcaggtgaggaggcggccgtacagcgtgatcctgttcgacgaggtggagaaggcgcacgtggcggtgttcaacacgctcctccaggtgctggacgacggccggctgaccgacgggcagggcaggacggtggacttccggaacaccgtgatcatcatgacctccaacctcggcgccgagcacctcctcgccgggatggtcggcaagaactccatgaaggtcgcgcgcgacctcgtcatgcaggaggtgaggaggcacttcaggccggagctgctgaaccggctggacgagatcgtcgtcttcgacccgctgtcccacgagcagctgaggaaggtcgctcgcctgcagatgagggacgtggccgtccggctcgccgagcgcggcgtcgccctggccgtcaccgacgccgcgctggacgtcatcctgtcgctggcctacgatccagtgtatggcgctcggccgatcaggaggtggatcgagaagcgggtggtgacgcagctgtccaagatgctgatccaggaggagatcgacgagaactgcacggtgtacatcgacgccgccaacaaggacgagctggcctaccgggtggaccgcagcggcgggctggtgaacgccgagacggggcagaggtccgacatcctcatccaggtgcccaacggcgccctcggcggcggcggcggcgaggcggccaaggccgtgaagaagatgagggtgatggaggacggggacgaggacagcatggacgaggatgtttga

SEQ ID NO: 7220 - protein, 917 aa, Triticum turgidum subsp
MNPDNFTHKTNEALVAAHEAASEAGHAQITPLHLAAALAADRSGILRQAVAGASGGNASAGDSFERVLSAALKKLPSQSPPPDSVPASTALIKAIRRAQSAQKKRGDSHLAVDQLLMGLLEDAQIADCLKEAGVSASRVRAELEKLRGGDNARKVESASGDTNFQALKTYGRDLVEVAGKLDPVIGRDEEIRRVVRILSRRTKNNPVLIGEPGVGKTAVVEGLAQRVVRGDVPSNLLDVRLVALDMGALVAGAKYRGEFEERLKAVLKEVEEADGKVILFIDEIHLVLGAGRTEGSMDAANLFKPMLARGQLRCIGATTLEEYRKYVEKDAAFERRFQQVYVAEPSVADTISILRGLKEKYEGHHGVRIQDRAIVVAAQLSARYIMGRHLPDKAIDLVDEACANVRVQLDSQPEEIDNLERKRIQLEVELHALEKEKDKASKARLVEVRKELDDLRDKLQPLTMKYRKEKERIDEIRKLKQRREELQFTLQEAERRMDLARVADLKYGALQEIDAAIAKLEGETGENLMLTETVGPEQIAEVVSRWTGIPVTRLGQNDKERLVGMADRLHTRVVGQTEAVNAVAEAVLRSRAGLGRPQQPTGSFLFLGPTGVGKTELAKALAEQLFDDENLLVRIDMSEYMEQHSVARLIGAPPGYVGHEEGGQLTEQVRRRPYSVILFDEVEKAHVAVFNTLLQVLDDGRLTDGQGRTVDFRNTVIIMTSNLGAEHLLAGMVGKNSMKVARDLVMQEVRRHFRPELLNRLDEIVVFDPLSHEQLRKVARLQMRDVAVRLAERGVALAVTDAALDVILSLAYDPVYGARPIRRWIEKRVVTQLSKMLIQEEIDENCTVYIDAANKDELAYRVDRSGGLVNAETGQRSDILIQVPNGALGGGGGEAAKAVKKMRVMEDGDEDSMDEDV

SEQ ID NO: 7221 - DNA, 2742 bp, Triticum turgidum subsp
  CDS (1)..(2742)
atgaacccggacaacttcacgcacaagaccaacgaggcgctggtggcggcgcacgaggcggcgtcggaggccggccacgcgcagatcacgccgttgcacctggcggcggcgctggcggcggacaagtcgggcatcctgcggcaggccgtcgcgggggcgtccggcgggaatgcgtccgcgggggactcgttcgagcgcgtgctcgccggcgcgctcaagaagctgccgtcgcagtcgccgccgccggactccgtgccggcctccacggcgctcatcaaggccatccgccgcgcgcagtcggcgcagaagaagcgcggggactcgcacctcgccgtcgaccagctgctcatgggcctcctcgaggacgcgcagatcgccgactgcctcaaggaggccggcgtgtccgcctcgcgggtgcgcgccgagctcgacaagctccgcggcggggacaactcgcgcaaggtcgagtccgcctccggcgacaccaccttccaggcgctcaagacgtacggccgcgacctcgtcgaggtggccggcaagctcgaccccgtcatcggccgcgacgaggagatccgccgcgtcgtgcgcatcctctcgcgccgcaccaagaacaaccccgtcctcatcggcgagcccggcgtcggcaagacggccgtcgtcgagggcctcgcgcagcgcgtcgtgcgcggggacgtgcccagcaacctgctcgacgtccgcctcgtcgcgctcgacatgggcgcgctcgtcgccggcgccaagtaccgcggcgagttcgaggagcggctcaaggccgtgctcaaggaggtggaggaggccgacggcaaggtcatcctcttcatcgacgagatacacctcgtcctcggcgccgggaggacggaggggtccatggacgcggccaacctcttcaagcccatgctcgccaggggccagctccggtgcatcggcgccaccacgctggaggagtaccgcaagtacgtcgagaaggacgccgcgttcgagcggcggttccagcaggtgtacgtggccgagccgagcgtcgccgacaccatcagcatcctgcgagggctcaaggagaagtacgaggggcaccacggcgtgcgcatccaggaccgcgccatcgtcgtcgcggcgcagctctcggcgaggtacatcatgggccgccacctgccggacaaggccatcgacctggtggacgaggcgtgcgccaacgtgagggtgcagctggacagccagccggaggagatcgacaatctggagcggaagcggattcagctggaggtggagctgcacgcgctggagaaggagaaggacaaggccagcaaggcccggctggtggaggtgaggaaggagctggacgacctgagggacaagctgcagccgctgaccatgaagtacaggaaggagaaggagcggatcgacgagatccggaagctgaagcagcggcgggaggagctgcagttcacgctgcaggaggccgagcggcgcatggacctggcacgcgtcgccgacctcaagtacggcgccctccaggagatcgacgccgccattgcgaagctggagggagagaccggcgagaacctgatgctcaccgagaccgtcggccccgagcagatcgcggaggtggtgagccggtggaccggcatcccggtgacccggctcgggcagaacgacaaggagcgcctggtcggcatggcggacaggctgcacacgagggtggtcgggcagacggaggccgtgaacgccgtcgccgaggcggtgctgaggtccagggcggggcttgggcggccgcagcagcccaccgggtcgttcctcttcctgggcccgaccggcgtgggcaagacagagctcgccaaggccctcgccgagcagctgttcgacgacgagaacctgctcgtccgcatcgacatgtccgagtacatggagcagcactccgtcgctcgcctcatcggcgcgccaccaggctatgtcggacacgaggagggcgggcagctgacggagcaggtgaggaggaggccgtacagcgtgatcctgttcgacgaggtggagaaggcgcacgtggcggtgttcaacacgctcctccaggtgctggacgacggccggctgaccgacgggcaaggccggacggtggacttccggaacaccgtgatcatcatgacctccaacctcggcgccgagcacctcctcgccgggatggtgggcaagaactccatgaaggtcgcccgcgacctcgtcatgcaggaggtgaggaggcacttcaggccggagctgctgaaccggctggacgagatggtgatcttcgacccgctgtcccacgagcagctgaggaaggtcgctcgcctgcagatgaaggacgtggccgtccggctcgccgagcgcggcgtcgcactggccgtcaccgacgccgcgctggacgtcatcctgtcgctggcctacgatccagtgtatggcgctcggccgatcaggaggtggatcgagaagagggtggtgacgcagctgtccaagatgctgatccaggaggagatcaacgagaactgcactgtgtacatcgacgccgccgacaaggacgagctggcctaccgggtggaccgcagcggcgggctggtgaacgccgagacggggcagaggtccgacatcctcatccaggtgcccaacggcgccctcggcggcggcggcggcggcgaggcggccaaggccgtgaagaagatgagggtcatggaggacggggacgaggatgcttga

SEQ ID NO: 7222 - protein, 913 aa, Triticum turgidum subsp
MNPDNFTHKTNEALVAAHEAASEAGHAQITPLHLAAALAADKSGILRQAVAGASGGNASAGDSFERVLAGALKKLPSQSPPPDSVPASTALIKAIRRAQSAQKKRGDSHLAVDQLLMGLLEDAQIADCLKEAGVSASRVRAELDKLRGGDNSRKVESASGDTTFQALKTYGRDLVEVAGKLDPVIGRDEEIRRVVRILSRRTKNNPVLIGEPGVGKTAVVEGLAQRVVRGDVPSNLLDVRLVALDMGALVAGAKYRGEFEERLKAVLKEVEEADGKVILFIDEIHLVLGAGRTEGSMDAANLFKPMLARGQLRCIGATTLEEYRKYVEKDAAFERRFQQVYVAEPSVADTISILRGLKEKYEGHHGVRIQDRAIVVAAQLSARYIMGRHLPDKAIDLVDEACANVRVQLDSQPEEIDNLERKRIQLEVELHALEKEKDKASKARLVEVRKELDDLRDKLQPLTMKYRKEKERIDEIRKLKQRREELQFTLQEAERRMDLARVADLKYGALQEIDAAIAKLEGETGENLMLTETVGPEQIAEVVSRWTGIPVTRLGQNDKERLVGMADRLHTRVVGQTEAVNAVAEAVLRSRAGLGRPQQPTGSFLFLGPTGVGKTELAKALAEQLFDDENLLVRIDMSEYMEQHSVARLIGAPPGYVGHEEGGQLTEQVRRRPYSVILFDEVEKAHVAVFNTLLQVLDDGRLTDGQGRTVDFRNTVIIMTSNLGAEHLLAGMVGKNSMKVARDLVMQEVRRHFRPELLNRLDEMVIFDPLSHEQLRKVARLQMKDVAVRLAERGVALAVTDAALDVILSLAYDPVYGARPIRRWIEKRVVTQLSKMLIQEEINENCTVYIDAADKDELAYRVDRSGGLVNAETGQRSDILIQVPNGALGGGGGGEAAKAVKKMRVMEDGDEDA

SEQ ID NO: 7223 - DNA, 2619 bp, Tetragenococcus halophilus
  CDS (1)..(2619): transl_table=11
atgaatattgaaaaaatgacaaccacattacaaagtgcaattgctgaagcacaacaggttgctgtaacaagaaaacaacaagaaatagatattgctcatttatggaaaatatttttacaaccaaaacaatttgctagaaatttttataaagacttaggtgttgatcttaacgcttttgaacatgaaattgatcaaacgatcgatagtttaccaagtgttgaaggcggtaatgtacaatatggtcaaaatattagtcaaaatattagtcaaaatttataccatttattaaatgaagcagatcaattggcgaaagattttaaagatgagtttttatctaccgaaattgttttacttgcattgatgaagttaaaaaattatcgtttgacaaaatttttaaaaaatcaaggtgttaatgaaaaacaaataaaacaaagcattgaaaatattcgacaaggggatcgggtcacttcccaaaaccaagaagaacaatatgaagccttagaaaagtatggaacagatcttgttcaagaagtgaaaaatggcgagatgggtccgatcatcggccgtgatgaagagattcgggatgttattcgaatcttatcacgcaagactaaaaacaaccctgttttgattggtgaagctggggtaggtaagacggcaattgttgaaggtcttgcacagcgtattgttaaaaaagatgtacctgaaaacttgaaagataagactgtattttctttagatatgggtgctttgattgcgggcgctaagtatcggggtgaatttgaagaaagattaaaagccgttttgaaggaagttaaaaaagcggacggtcgtattattctatttatcgatgaaattcataatatcgtaggcgctgggaagactgaaggtagtatggatgccggtaatttattaaaacccatgctagctcgaggtgaattgcatacaatcggtgcaacgaccttagatgaatatcgggaaaatattgaaacggataaagcgctagaacgacgctttcaaagagtcagtgttcaagagccatcggtagaagatacgatttctattttacgtggcttaaaagaacgttttgaaatccatcacggcgtaaatatccatgacaatgctttagttgctgcggctaccttatctgatcgctatattacagatcgttatttaccagacaaagccattgatttagtcgatgaagcttgtgccaatattcgggtggaaatgaattcaatgccaactgaattggaccaagtaacaagacgtttaatgcaattagagattgaagaagcggctttgaaaaaagaaatagacgatgcttcaatgaaacgtttagcatctttacaagaagaactggctgaattacgtgaagaagtcaactcaatgaagctacaatgggaaacagaaaaagaagaagtaaatgctgtttcaaataaacgggcagaaattgataaagcgaaacatgaattagaagacgccgaaaataactacgatttggaaagagctgctgttttaagacatggcactgtaccacagttagaaaaggaacttaaagaattagaagataaagatgatcaaactgttctaaaaatggtacaagagtcggtgactgctaatgaaatcgcagtggttgtaggacgtttgacaggcatacctgtaacgaaattagttgaaggcgaacgagaaaaattacttaacttgaacgaaaccttgcacaagcgagtgattggtcaagatgaagctgttaatgcagtaagcgatgcagtgattcgttcgcgtgctggattacaaaatccggatcgaccattaggttctttcttattcctgggacccacaggtgtagggaaaactgaacttgctaaagctttagcagaaaatctttttgattctgaagatcatatggtacggattgatatgagtgaatatatggaaaaacatacggtttctcgtttagtcggtgcacctcctggttatgtaggttatgaagagggcggacaattgactgaagccgtacgtcgcaatccttacacaattattttgcttgatgaaattgaaaaagctcatccagatgtctttaatattttactacaagtattagatgatggtcgtctgacagattcaaaaggtcgagttgttaattttaaaaatactgttttaattatgacaagtaatatcggttcgcaaatattattggaaggtgtttcggaccaaggagagatttcagcagaaacaagatctcaagtgatgaatatgttacaagcagcgtttaaaccagaatttctcaaccgaattgacgataccatcgttttcactccgttaaatatagaggacatgaaaggcatcgttgaaaaaatcattgaggaattatcacaaagattaatgcaacaggagattttccttgaaatatcagatgaagcaaaagcttggatcgctcaaaatgcctatgagccagcatatggcgctagacctttgcgacgttatattacacgtgaagtagaaacaccattggctaaagaaattgtttcaggacgtgtcatgccaaaaacaaaagtgactatcgaattgcttgataaccacttagtatttcaaaatgaaccaatggaagaggaataa

SEQ ID NO: 7224 - protein, 872 aa, Tetragenococcus halophilus
MNIEKMTTTLQSAIAEAQQVAVTRKQQEIDIAHLWKIFLQPKQFARNFYKDLGVDLNAFEHEIDQTIDSLPSVEGGNVQYGQNISQNISQNLYHLLNEADQLAKDFKDEFLSTEIVLLALMKLKNYRLTKFLKNQGVNEKQIKQSIENIRQGDRVTSQNQEEQYEALEKYGTDLVQEVKNGEMGPIIGRDEEIRDVIRILSRKTKNNPVLIGEAGVGKTAIVEGLAQRIVKKDVPENLKDKTVFSLDMGALIAGAKYRGEFEERLKAVLKEVKKADGRIILFIDEIHNIVGAGKTEGSMDAGNLLKPMLARGELHTIGATTLDEYRENIETDKALERRFQRVSVQEPSVEDTISILRGLKERFEIHHGVNIHDNALVAAATLSDRYITDRYLPDKAIDLVDEACANIRVEMNSMPTELDQVTRRLMQLEIEEAALKKEIDDASMKRLASLQEELAELREEVNSMKLQWETEKEEVNAVSNKRAEIDKAKHELEDAENNYDLERAAVLRHGTVPQLEKELKELEDKDDQTVLKMVQESVTANEIAVVVGRLTGIPVTKLVEGEREKLLNLNETLHKRVIGQDEAVNAVSDAVIRSRAGLQNPDRPLGSFLFLGPTGVGKTELAKALAENLFDSEDHMVRIDMSEYMEKHTVSRLVGAPPGYVGYEEGGQLTEAVRRNPYTIILLDEIEKAHPDVFNILLQVLDDGRLTDSKGRVVNFKNTVLIMTSNIGSQILLEGVSDQGEISAETRSQVMNMLQAAFKPEFLNRIDDTIVFTPLNIEDMKGIVEKIIEELSQRLMQQEIFLEISDEAKAWIAQNAYEPAYGARPLRRYITREVETPLAKEIVSGRVMPKTKVTIELLDNHLVFQNEPMEEE

SEQ ID NO: 7225 - DNA, 2736 bp, Glycine max
  CDS (1)..(2736)
atgaatcctgagaagtttactcacaagactaatgaagctcttgcgtcggcccacgagctcgcgatgagttcaggccacgcgcaattgactcccatccacttggcccacgcgctgatttccgatcccaacggcatcttcgtgctagcgataaacagcgcgggcggcggcgaggaatcggcacgcgccgtggagcgagtgttgaaccaggctctgaagaagctaccctgccagtcccctccgccggacgaggtgccggcgagcaccaacctcgtgagggccatcaggagagcacaggcggcgcaaaaatcacgtggcgacacgcgtttggccgttgatcagttgatcctcggaatcctcgaagactcccaaatcggagacctgttgaaggaagcgggggttgcggtggcgaaggtagaatcggaagtggataagcttcgtgggaaggaagggaagaaggttgagagcgcttccggggatacgaatttccaagctttgaagacttatgggcgtgaccttgttgaacaagcggggaagctcgaccctgttattggccgtgacgaagagattagaagggttgtgaggattctatcacggaggactaagaacaacccggttctcgttggagaaccgggtgtgggaaaaactgcggttgtggaagggttggcacagaggatagtaagaggggatgttccaagcaaccttgctgatgtgaggcttattgcgttggatatgggggcgttggtcgcgggtgccaagtatagaggcgagtttgaggagcggttaaaggctgttttgaaggaagtggaggaggctgaggggaaggtgatactcttcattgatgagattcatttggtccttggtgctggtagaactgaaggctccatggatgctgctaatctattcaaacctatgcttgctcgcggccagcttaggtgcattggtgccaccacgcttgaggagtacaggaagtatgtggagaaggatgctgcattcgagaggaggttccaacaggtttttgtggcggaacctagtgtggttgataccattagcattcttcgtggcttgaaagagagatatgaaggccatcacggtgttagaattcaggaccgtgctttggttatggcagctcaattgtctaaccggtatataactgggcgtcatcttcctgacaaggcaattgatttggttgacgaggcttgtgcaaatgttagggttcaacttgatagtcagcctgaggaaattgataaccttgaaaggaagagaatgcagctagaagtggaacttcatgctctggagaaagagaaagacaaggctagcaaagcccgtcttgttgaagtgcggaaagaacttgatgacttgagggacaagcttcagcctttgatgatgaagtaccgaaaagagaaagagagggttgatgagattcgaaggctcaagaagaaaagagaagagcttctttttgctttacaagaggctgagagaagatatgatctggctagagctgcagacctgcgatatggagcaattcaagaggtggaaactgcaatacaacaacttgaagggagcactgaagagaatctgatgttgactgaaactgttggaccggagcaaatagctgaggttgtgagccgctggaccggtataccagttacaaggcttggccaaaatgaaaaagaaagattgattggacttggtgacagattgcacagcagagttgtaggacaagaccaagctgttaatgctgttgctgaggctgtgttgagatctagagctgggctaggaagacctcaacaaccaactggttcattcctattccttggtccaactggtgttggtaaaactgagcttgcaaaggctcttgctgagcaactatttgataatgaaaaccagttggtgagaattgatatgtccgaatacatggagcagcactcggtttcaagattgattggtgcaccaccagggtatgttggacatgaggaaggtggacaactaactgaagccgtaaggcgaagaccttacagtgtggtgctttttgatgaagtggaaaaggcacatacatctgtgttcaatactcttcttcaagttttggacgatgggaggttaactgatggacaaggccgtactgtggactttagaaacactgtaattatcatgacctcaaatcttggagcagagcacctcctcagtggactttcaggaaaatgtaccatgcaagttgctcgggatcgggtaatgcaggaggtgagaaggcaatttaggccagaattgctgaatcgacttgatgaaattgtggtatttgaccccctttcacatgaccaattgaggaaggttgcaaggctacaaatgaaggatgtagctagtcgtcttgctgagaaaggaattgccttggcagtcactgatgcagcactagactatatactttccgagagctatgatccggtgtatggtgctagaccaataaggaggtggcttgagaagaaggtggtgacagagttgtctagaatgcttgtaagagaggagattgatgagaattcaacggtttacatagatgctggacccaatgggggcgagttggtctaccgtgtagaaaagaatggaggggttgttaatcctacaactgggcagaagtccgatatcttgattcagatacctaatggacatgcacctaaaactgatgctgttcaagcagtcaagaagatgaagattgaggaaattgatgatgatgaaatggaagagtga

SEQ ID NO: 7226 - protein, 911 aa, Glycine max
MNPEKFTHKTNEALASAHELAMSSGHAQLTPIHLAHALISDPNGIFVLAINSAGGGEESARAVERVLNQALKKLPCQSPPPDEVPASTNLVRAIRRAQAAQKSRGDTRLAVDQLILGILEDSQIGDLLKEAGVAVAKVESEVDKLRGKEGKKVESASGDTNFQALKTYGRDLVEQAGKLDPVIGRDEEIRRVVRILSRRTKNNPVLVGEPGVGKTAVVEGLAQRIVRGDVPSNLADVRLIALDMGALVAGAKYRGEFEERLKAVLKEVEEAEGKVILFIDEIHLVLGAGRTEGSMDAANLFKPMLARGQLRCIGATTLEEYRKYVEKDAAFERRFQQVFVAEPSVVDTISILRGLKERYEGHHGVRIQDRALVMAAQLSNRYITGRHLPDKAIDLVDEACANVRVQLDSQPEEIDNLERKRMQLEVELHALEKEKDKASKARLVEVRKELDDLRDKLQPLMMKYRKEKERVDEIRRLKKKREELLFALQEAERRYDLARAADLRYGAIQEVETAIQQLEGSTEENLMLTETVGPEQIAEVVSRWTGIPVTRLGQNEKERLIGLGDRLHSRVVGQDQAVNAVAEAVLRSRAGLGRPQQPTGSFLFLGPTGVGKTELAKALAEQLFDNENQLVRIDMSEYMEQHSVSRLIGAPPGYVGHEEGGQLTEAVRRRPYSVVLFDEVEKAHTSVFNTLLQVLDDGRLTDGQGRTVDFRNTVIIMTSNLGAEHLLSGLSGKCTMQVARDRVMQEVRRQFRPELLNRLDEIVVFDPLSHDQLRKVARLQMKDVASRLAEKGIALAVTDAALDYILSESYDPVYGARPIRRWLEKKVVTELSRMLVREEIDENSTVYIDAGPNGGELVYRVEKNGGVVNPTTGQKSDILIQIPNGHAPKTDAVQAVKKMKIEEIDDDEMEE

SEQ ID NO: 7227 - DNA, 2736 bp, Vitis vinifera
  CDS (1)..(2736)
atgaatccagagaaattcacccacaagacaaatgagactcttgctggggctcatgagcttgctatgaactctggccatgctcagctcacaccacttcacgttgctgtggctttgataactgatcacaatggcatcctccggcaagccataatcggtgctggtggaaatgaggaggctgccaactctgttgaaagagtcttcaataaagctctgaagaaactcccaactcagagtcctcctccagatgaaatcccagtaagcactactctaatcaaagtggttcgaagagcccaatcttcacaaaagtcacggggtgacacccatttagcagttgatcaattgattcttggccttcttgaggattcccaaattggtgatttgcttaaagaagccggggttagtacttctagagtgaaatctgaggttgagaagcttcgagggaaagaaggtaagaaggtggaaagtgcttctggggacaccacattccaggcattgaagacttatgggcgtgaccttgttgagcaagctggaaagcttgatcctgtcattggccgggacgaagagattcggagggtcatcaggattctttcaaggaggaccaagaacaaccctgttcttattggagaaccaggtgtgggtaagactgctgttgttgaaggattagctcagagaattgtaagaggggacgttcccagtaatctcgctgaagtgaggcttatagcattggatatgggtgctttggttgctggggcaaaatatagaggagaattcgaggagaggttgaaatctgttttgaaagaagtggaagaggcagaagggaaagtgattttattcattgatgaaattcaccttgttcttggtgctggtcggactgaaggatctatggatgctgctaacttgtttaagcccatgcttgccagaggtcagctacgctgcatcggagcaacgacccttgaggaatacagaaagtatgttgagaaagatgccgcttttgagaggcggttccagcaagtttatgtagctgagcccagcgtccctgacacaataagcattcttcgagggctaaaagaaaggtatgaagggcatcatggtgttcgaattcaggaccgagctcttgtagttgcagcccaactatcaagccgatacatcactggccgacatctgccagacaaggcaatcgacctggttgatgaagcttgcgccaatgtgagagttcaacttgatagccagcccgaagaaatcgacaatttggaaaggaagagaatgcaattagaagttgaacttcatgctcttgaaaaggagaaggacaaagccagtaaagctcgtcttgttgaagtccgcagagagcttgacgacttgagggacaagcttcaacccttgatgatgaagtacaaaaaggagaaagaaaggattgatgagcttcgcaggctaaaacagaaaagagaggagctcttgtttgctttacaagaggctgaaagaagatatgatttagccagagctgctgatttgcgatatggggcaattcaagaagtggaggctgctatagcaaaccttgaaggaaccactgatgagaacatgatgttaacggagactgttgggcctgagcagattgctgaggtggtgagccgctggactggcatccctgtcactaggcttggacaaaatgataaagaaaggttaattgggcttgcggagaggctgcatcagagagtggtgggacaggatcaggcagtcagtgctgtggcagaggctgtcttgagatcgagggctgggttaggaaggccacaacaacccactggttcgttcctcttcttgggtccaactggtgttggtaagactgagcttgccaaggccctggctgaacagctctttgatgatgaaaatcttttggtgagaattgacatgtccgagtatatggagcagcattcagtttcaagattgattggggctcctcctggatatgttggacatgatgaaggtgggcaactcacagaggcagtaagaaggaggccttatagtgttgtactgttcgatgaagtagagaaagcacatatcgccgtattcaataccctcctccaggttttagacgatggaaggttaactgatggccaaggccgcactgtagacttcacaaacacagtgatcatcatgacttcaaaccttggagctgagcatctcctctcgggtttagtaggcaagtgtacaatgcaagatgctcgtgaccgggtgatgcaggaggtgagaaggcacttcaggccagagttgcttaaccggctggatgaaattgtggtatttgatcccctctcacatgatcaactgagaaaggttgccaggctacaaatgaaggacgttgcaagccgcttggcagagaggggcattgctctggctgtgactgatgcagcattggatgttgttctagcagagagttatgatccggtttacggtgcaagacccattaggagatggctggagaagaaggtggtgactgagctatcaaagatgctcataagggaggagatcgatgaaaactcaactgtttatatagatgcgggagtgtcaggaaaggggttggcgtaccgagtagaaaacaatggggggctggtgaatgcatccaccggacaaaagtcagacgtgttgattcggatcccaaacgggcaaagaagcgatgctgcccaagcggtgaagaagatgaagatcgaagaaatagaagacgaagaggatgagatggatctataa

SEQ ID NO: 7228 - protein, 911 aa, Vitis vinifera
MNPEKFTHKTNETLAGAHELAMNSGHAQLTPLHVAVALITDHNGILRQAIIGAGGNEEAANSVERVFNKALKKLPTQSPPPDEIPVSTTLIKVVRRAQSSQKSRGDTHLAVDQLILGLLEDSQIGDLLKEAGVSTSRVKSEVEKLRGKEGKKVESASGDTTFQALKTYGRDLVEQAGKLDPVIGRDEEIRRVIRILSRRTKNNPVLIGEPGVGKTAVVEGLAQRIVRGDVPSNLAEVRLIALDMGALVAGAKYRGEFEERLKSVLKEVEEAEGKVILFIDEIHLVLGAGRTEGSMDAANLFKPMLARGQLRCIGATTLEEYRKYVEKDAAFERRFQQVYVAEPSVPDTISILRGLKERYEGHHGVRIQDRALVVAAQLSSRYITGRHLPDKAIDLVDEACANVRVQLDSQPEEIDNLERKRMQLEVELHALEKEKDKASKARLVEVRRELDDLRDKLQPLMMKYKKEKERIDELRRLKQKREELLFALQEAERRYDLARAADLRYGAIQEVEAAIANLEGTTDENMMLTETVGPEQIAEVVSRWTGIPVTRLGQNDKERLIGLAERLHQRVVGQDQAVSAVAEAVLRSRAGLGRPQQPTGSFLFLGPTGVGKTELAKALAEQLFDDENLLVRIDMSEYMEQHSVSRLIGAPPGYVGHDEGGQLTEAVRRRPYSVVLFDEVEKAHIAVFNTLLQVLDDGRLTDGQGRTVDFTNTVIIMTSNLGAEHLLSGLVGKCTMQDARDRVMQEVRRHFRPELLNRLDEIVVFDPLSHDQLRKVARLQMKDVASRLAERGIALAVTDAALDVVLAESYDPVYGARPIRRWLEKKVVTELSKMLIREEIDENSTVYIDAGVSGKGLAYRVENNGGLVNASTGQKSDVLIRIPNGQRSDAAQAVKKMKIEEIEDEEDEMDL

SEQ ID NO: 7229 - DNA, 2685 bp, Bifidobacterium breve
  CDS (1)..(2685): transl_table=11
atggaggaatacgatatggaacagaagttcaccactatggcccaagaagccgtcggcgacgcgattcagagtgcgtccgccgcaggaaacgcgcaggtcgagaccctgcacgtcatggatgcgttgctgcgtcaggaaaacggcgtggtgcgctccctcatcgaggccgcgggcggagacccacaggccatcggcgctgccgtgcgtaacgctttggtcgcgctgccgagtgcgtccggctccagcacttcgcagccgcaggccagccgtcagctgaccgcagccatcgcccaggccgagaaggaaatgcagcagatgggcgacgaatacgtctccaccgagcacctgctcatcggcatcgcggccagcaagccgaaccagtcggctgaaatcctggagaaaaacggcgtcaccgccgcttccctgcgtaaggctgtgcccggcgtgcgcggcggcgcgaaagtcaccagccctgacgcggaaggctcgtacaaagctttggagaagtactctaccgacctgacggccgccgccaaggaaggcaagctcgacccggtcatcggccgtgaccaggagattcgccgtgtgattcagatcctgagccgccgtaccaagaacaaccctgtgctgatcggtgagcctggcgtcggcaagaccgccgtcgtggagggcttggcccagcgtatcgtggcgggcgacgtgcccaccaccctgcagggcaagaagctcatctcccttgacctgggctccatggtggccggctcgaagtaccgtggtgagtttgaggagcgcctgaagagcgtgctcaacgaaatcaagaacgcggacggccagatcatcaccttcatcgacgagatccataccatcgtcggcgcgggtgcggccgaaggctccatggatgccggcaatatgctcaagcccatgctggcccgcggcgagctgcggctgatcggcgcgaccacgctggacgagtaccgcgagaacatcgagaaggatccggcgctggagcgtcgtttccagcaggtgttcgtgggcgagccttccgtggaagacaccatcgccattctgcgtggcctgaagcagcgttacgaggctcaccataaggtaacaatcggcgatgacgcgttggttgccgccgcaaccctgtcgaaccgctacatttcgggtcgtcagctgccggacaaggccatcgatctggttgatgaggcggctgcccacctgcgtatggagctcgactcctcgcctgaggaaatcgatgagctgcagcgcaaggtgacccgtcttgagatggaggaaatgcagctcaagaaggccgaggatcccgcgtccaaggagcgtctgggcaagctgcaagccgaactcgcggacacccgtgagaagctcagcggcctcaaggcgcgttgggatgcggaacaggccggccataacaaggtcggtgacctgcgtgccaagctcgatgacctgcgtgtgcaggcggataagttcactcgtgaggggaatctggctgaggcctcgaagattctgtacggagagattccggctattcagaaggagctcgccgctgcggaaagcgcggatgccgaatctgctgatgcgggtgccgagaatccggctgatgagccgatggttccggaccgcgtggatgccgactcggtggctgaaatcgtctccgactggaccggcattcccgttggccgcctgatgcagggcgaaaacgagaagctgctgcacatggaggactacctcagcaagcgcgtgatcggccagaaggaagccatcgccaccgtgtccgacgcagtgcgtcgttcgcgtgccggtatctccgacccgaaccgtccgaccggatcgttcctgttccttggtcccaccggtgtgggtaagaccgaactggccaaggcactcgccgacttcctgttcgacgacgagaaggccatggtccgcatcgacatgtccgaatacatggagaaggcttcggtctcgcgcctgatcggcgcggctccgggctacgtgggttacgagcagggcggtcagctgaccgaagccgtgcgccgtcgcccgtactccgtggtgctgttcgatgaggtcgaaaaggccaatccggagatcttcgacgtgctgctgcaggtactcgatgatggccgcctgaccgatggtcagggcaggaccgtggacttcaagaacacgatcctgatcatgacctccaacttgggctcgcagttcctcgtgaacgaggacatggacgccgacgccaagaaaagggccgtgatggatgcggtccacatgaacttcaagccggagttcctgaaccgtttggacgatattgtcatgttccacccgctcacgcgcgaggagcttggcggcatcgtggatatccaggtcaagggcgtggcccagcgcctgaccgaccgtcgcatcacgctggacgtcaccgattcggctcgcgagtggctggccaacaccggctacgacccggcctatggcgctcgtccgctgcgtcgcttggtgcagaccgaagttggcgaccagctggcccgcatgttgctggccggcaaggtccacgacggcgacaccgtgctcgtcgaccagaccggcggcgaacacctggagctctccgcctgggcgaatgaccagattgcctccgacgatccggacgtgagcgtagacaacgtctccgaagacaagtga

SEQ ID NO: 7230 - protein, 894 aa, Bifidobacterium breve
MEEYDMEQKFTTMAQEAVGDAIQSASAAGNAQVETLHVMDALLRQENGVVRSLIEAAGGDPQAIGAAVRNALVALPSASGSSTSQPQASRQLTAAIAQAEKEMQQMGDEYVSTEHLLIGIAASKPNQSAEILEKNGVTAASLRKAVPGVRGGAKVTSPDAEGSYKALEKYSTDLTAAAKEGKLDPVIGRDQEIRRVIQILSRRTKNNPVLIGEPGVGKTAVVEGLAQRIVAGDVPTTLQGKKLISLDLGSMVAGSKYRGEFEERLKSVLNEIKNADGQIITFIDEIHTIVGAGAAEGSMDAGNMLKPMLARGELRLIGATTLDEYRENIEKDPALERRFQQVFVGEPSVEDTIAILRGLKQRYEAHHKVTIGDDALVAAATLSNRYISGRQLPDKAIDLVDEAAAHLRMELDSSPEEIDELQRKVTRLEMEEMQLKKAEDPASKERLGKLQAELADTREKLSGLKARWDAEQAGHNKVGDLRAKLDDLRVQADKFTREGNLAEASKILYGEIPAIQKELAAAESADAESADAGAENPADEPMVPDRVDADSVAEIVSDWTGIPVGRLMQGENEKLLHMEDYLSKRVIGQKEAIATVSDAVRRSRAGISDPNRPTGSFLFLGPTGVGKTELAKALADFLFDDEKAMVRIDMSEYMEKASVSRLIGAAPGYVGYEQGGQLTEAVRRRPYSVVLFDEVEKANPEIFDVLLQVLDDGRLTDGQGRTVDFKNTILIMTSNLGSQFLVNEDMDADAKKRAVMDAVHMNFKPEFLNRLDDIVMFHPLTREELGGIVDIQVKGVAQRLTDRRITLDVTDSAREWLANTGYDPAYGARPLRRLVQTEVGDQLARMLLAGKVHDGDTVLVDQTGGEHLELSAWANDQIASDDPDVSVDNVSEDK

SEQ ID NO: 7231 - DNA, 2943 bp, Solanum lycopersicum
  CDS (1)..(2943)
atgtctaccgtgacgtcattttccggcgtacagttttgcgttccttcttcttcttccaattcttcaaacagagttgctttattttcatcccattcagcgccgtacctgaacttctcaggcaaatcgcgagttcttggcaagtgtagttcgttgaaactgaagaggaaggatgtgttcttcagtaggaaaactgagaaactttctcagggctcaaggcttaccgtacgttgtgatgcttcaaatggaaggatcactcagcaagattttacagaaatggcatggcaagcaattgttgcatcgccagaaatagctaaagagaacaagcatcaaatagtagagactgagcacttgatgaaggcactgttggagcaaaagaatgggctggctcgtcgcatattctccaaggcgggtgtagataatacccgccttttagaggctactgataagtttattagacaacaaccaaaggttattggtgagacagcaggttctatgttaggccgagagttggaaggtctgatgcagagagccagggagtacaagaaagagtatggtgattcctttgtgtcagttgagcatttggtgcttggcttcattcaagataaacgatttgggaagcaactgtttaatgatttccagatttccctgaagacactgaaaactgccattgaatccataaggggacgccaaaatgttattgatcaagatcctgaagggaagtatgaatcactagaaaaatatggaaaagacctgactgctatggctagagcggggaagcttgacccagttataggaagagatgatgagatacgtagatgcatacaaatcctctcaaggagaacaaagaataacccagtgttaattggtgagcctggagttgggaaaactgcaatctctgaagggcttgctcagagaattgtgcaaggagatgtacctcaggctttgatgaatcgaaggttgatatctcttgatatgggtgcgctcatagctggtgcaaaatatcgtggtgaatttgaagacagattgaaggcagtgcttaaggaagtgacagaatctgaaggacagatcatcctttttattgatgagatacatactgttgttggtgcaggtgctactaatggtgcaatggatgctgggaatctattgaagccgatgcttggtcgaggagaactacgatgtattggtgcgaccaccttggatgaataccgtaaatatattgagaaagatcctgccctggagcgtcgtttccagcaagtttatgttgaccagcctacagttgaagacactgtctccatacttcgcggattacgtgaaagatatgagctgcatcacggggttcgcatttcagacactgcgcttgtcgacgcagctattctttcggaccgttatattagtggacgttttctacctgacaaagctattgacctagttgatgaagctgctgcaaaactgaaaatggagatcacctcaaaacctacagcccttgacgagatcaatcgtgcagttttgaagttggagatggagaggctatctctaactaatgatacagataaagcatcgaaagaccggttaaaccgtcttgagactgaattgtctcttctgaaggagaggcaagctgagctgactgagcagtgggagcatgaaaagagtgtgatgactcgcttgcagtccattaaggaagagatcgaccgggtaaatcttgagatccagcaagcagagcgggaatatgatcttaatcgtgctgctgaacttaagtatgggagtctaaacaccttgcagcgtcaacttgaagcttcagaaaaagaactgagtgattatatgaagtctggaaaatcgatgctcagagaagaagtaactgggaatgatgttgcagagattgttagtaagtggactgggattcctgtttctaagctacaacagtcggagagggaaaagctgttgcatttagaggaagagttgcacaaacgtgttgttggtcaagatccagcagtaagagcagtagcagaggcaatccagcgctcgcgtgctggactttcagatcctcatcgtcctattgcaagctttatgttcatgggtcccactggagttggaaagacggagttagctaaggcccttgctaactatttgttcaatactgaagaggcacttgtgcgcatcgatatgagtgaatacatggagaagcatgcagtttcaagattgataggagctccccctggttatgtcgggtatgaagaaggggggcagttgacagagattgttcgccgaagaccttatgcagttatattgtttgatgaaattgagaaggcccattcggatgtatttaatgtgttcctgcaaatcttagatgatggtagggtgaccgactcgcaaggacgcacagtgagtttcaccaatactgtcatcatcatgacatcaaatgttggttcacaatatatcctaaatacagatgataatgatgatgattcatcgaaggaagcgacttatcaaacaataaagcaaagggtgatggatgctgcacgtgcagttttccgccctgagttcatgaaccgggttgatgaatatatagtattccagcctcttgatcgtgaccagatcagtagcattgtgcgattacagcttgaaagagtgcagcagagattagctgatcgtaaaatgaagattcaagtgagtgaagctgctattcaattgcttggaagtcttggttatgaccccaactatggagcacggccagtgaagcgggtgatccagcagaatgttgagaacgaattggccaaaggaatattaagaggagaattcaaggatgaggatactattttagtagacacggaggtcagcgcattttcgaatggacaacttcctcagcagaagctagtgtttaaaagacaagagtctggttcagattctccagctgagaaccaagaagctttctctcagaaactatga

SEQ ID NO: 7232 - protein, 980 aa, Solanum lycopersicum
MSTVTSFSGVQFCVPSSSSNSSNRVALFSSHSAPYLNFSGKSRVLGKCSSLKLKRKDVFFSRKTEKLSQGSRLTVRCDASNGRITQQDFTEMAWQAIVASPEIAKENKHQIVETEHLMKALLEQKNGLARRIFSKAGVDNTRLLEATDKFIRQQPKVIGETAGSMLGRELEGLMQRAREYKKEYGDSFVSVEHLVLGFIQDKRFGKQLFNDFQISLKTLKTAIESIRGRQNVIDQDPEGKYESLEKYGKDLTAMARAGKLDPVIGRDDEIRRCIQILSRRTKNNPVLIGEPGVGKTAISEGLAQRIVQGDVPQALMNRRLISLDMGALIAGAKYRGEFEDRLKAVLKEVTESEGQIILFIDEIHTVVGAGATNGAMDAGNLLKPMLGRGELRCIGATTLDEYRKYIEKDPALERRFQQVYVDQPTVEDTVSILRGLRERYELHHGVRISDTALVDAAILSDRYISGRFLPDKAIDLVDEAAAKLKMEITSKPTALDEINRAVLKLEMERLSLTNDTDKASKDRLNRLETELSLLKERQAELTEQWEHEKSVMTRLQSIKEEIDRVNLEIQQAEREYDLNRAAELKYGSLNTLQRQLEASEKELSDYMKSGKSMLREEVTGNDVAEIVSKWTGIPVSKLQQSEREKLLHLEEELHKRVVGQDPAVRAVAEAIQRSRAGLSDPHRPIASFMFMGPTGVGKTELAKALANYLFNTEEALVRIDMSEYMEKHAVSRLIGAPPGYVGYEEGGQLTEIVRRRPYAVILFDEIEKAHSDVFNVFLQILDDGRVTDSQGRTVSFTNTVIIMTSNVGSQYILNTDDNDDDSSKEATYQTIKQRVMDAARAVFRPEFMNRVDEYIVFQPLDRDQISSIVRLQLERVQQRLADRKMKIQVSEAAIQLLGSLGYDPNYGARPVKRVIQQNVENELAKGILRGEFKDEDTILVDTEVSAFSNGQLPQQKLVFKRQESGSDSPAENQEAFSQKL

SEQ ID NO: 7233 - DNA, 2880 bp, Oryza sativa subsp
  CDS (1)..(2880)
atggagagaaccctactgaacccgccgccgtctctccgatcgccggcatgccgtaccaccaccgccaccaggatcaggccctcctcctccatggctactatgatcccaacgcctccgccgatgcggcacgcccgcctcgtcaaggcatcggccgcgggccggcgagagctccacgctcccccgatcgcgccgccaatattactcggcctccgttcacccgcggcggcgtcgtacgggcgtgcgagcggcggcggcgggaggaggaggggggcgcgggtggtggcgaggatggggttcgacatgttcacggacaaggcgatcaaggcgatcatgatggcgcaggaggaggcgcggcggctggggcaccacgccgccggcagcgagcagctcctcctcggcgtcatcggggagggcaccggcatcggcgccaaggtgctcaggggcgccgggctcagcctcaaggcggcgcgcgccgaggtggagaagatggccgggaggggccccggcatggtccccatggagatcaagttcacccccgccgccaagaacgtcctccaggcctcccaagaagaagcgcaccagctagggcataactatgttggatctgaacacctcctacttgggttgctccgtgagcatggtgccgcgcttgttgtgctgaagaactttcaggctgatcccagcaacatccgcagtgaggttatccgaatgatcagtgacacctctgaagatcatcaacctgttagtgctgcagttgggggaggaagcagtacaactaagatacccacacttttagagtatggtactaatctgacaaaactagcagaggaggggaagctggatcctgttgtcggaaggcaaaaccaggttgaccgtgtagtgcagattctcggcaggcggaccaagaacaacccctgcctgattggagagcctggagtagggaaaacagcgatcgcggaagggctcgcgcagcgcattgctgcaggaaatgtgcctgaaacaatcgatgggaaaacgaatttacaatttgagcactatgagattgcgaagagttacctttctagattaccagaaaggaagcatggaaatcctttccaggttatcacccttgatatgggtctacttgttgctggtacaaaataccgtggtgagtttgaggagagattgaagaagctgatggacgaagtgaagcagaatggtgagataattctcttccttgatgaagttcacaccctggtgggtgctggagcagctgaaggggccatcgacgctgccaacatcctgaagccagcgctagcaagaggtgaactacagtgtattggagccactaccattgatgaatacagaaagcacattgagaaagacccagcactggagaggcgttttcagcctgtcaaggtccctgagccaactgttgatgagaccataggaattctcaaaggtctccgggagcgatatgagatccatcataaggtccagtatactgatgagtcgttgatcgcagctgctcggctctcataccagtacatcagtgatcgtttcctcccggataaagcaattgacttggttgatgaagcaggttctcttgtcaggctgcgaaatgcccagctacctgatgaagctaaagaactcgagaagaagctcaagaagatcatggcagagaagagcgaagccatccgaagccaagacttcgagaaggcgggagcgcttcgcggcgaggaggtggagctcaagtcggagatcatgtcgctggtcgacaagagcaaggagatgagcaaggcggcggtggactccggcgagtcgccggggccgacggtgacggaggcggacgtccagcacatcgtctccagctggaccggcgtccccgtggagaaggtcaccgtcgacgagtcgagccgtctcctcgccatggagtcgtcgctgcaccggcgcatcgtcggccaggacgaggccgtgacggcgatcagccgcgccatccgccgcgcccgcgtcgggctccgcgacccgcgccgcccgatcgcgagcttcatcttcgccgggccgacgggggtcggcaagtcggagctcgccaaggcgctggcggcgtactactacggctcgccggaggccatggtgcggctcgacatgagcgagttcatggagaagcacacggtggcgaagctggtgggctcgccgccggggtacgtcggctacgccgagggcggccagctgacggaggcgatccggcggcgcccctacgccgtcgtgctgttcgacgaggtcgagaaggcgcaccccgacgtgttcaacatgatgctccagatcctcgacgatggccggctcacggacagcaaggggaggacggtggatttcaagaactcgctcatcatcatgacatccaacgtcggcagcggcgtcatcgagaagggcgggaggcagctcgggttcgccggcgatggcagcggcgacggcgggtacggggtgatcaagaacatggtggaggaggagatgaagcgctacttcaggccggagttcctgaaccggctggacgagatgatcgtgttccggcagctgacgaagctggaggtgaaggagatcgccgggatcatgctcgccgaggtcaccgggcggatcggcgggaaggggatcgggctgcaggtgacggagaggttcaaggagctcgtcgtcgagcaaggcttcgacccgagctacggcgcgcggccgctgcgccgggccatcatgcggctgctggaggacacgctcacggacaagatgctcgccggggagatctgcgccggcgactcggtgatcgtcgacgccgacggtgacgggaacgtcgtcgtggtcggccggcgcagcgccggcttgccggacctgaaatcgccggcgtttactgtctag

SEQ ID NO: 7234 - protein, 959 aa, Oryza sativa subsp
MERTLLNPPPSLRSPACRTTTATRIRPSSSMATMIPTPPPMRHARLVKASAAGRRELHAPPIAPPILLGLRSPAAASYGRASGGGGRRRGARVVARMGFDMFTDKAIKAIMMAQEEARRLGHHAAGSEQLLLGVIGEGTGIGAKVLRGAGLSLKAARAEVEKMAGRGPGMVPMEIKFTPAAKNVLQASQEEAHQLGHNYVGSEHLLLGLLREHGAALVVLKNFQADPSNIRSEVIRMISDTSEDHQPVSAAVGGGSSTTKIPTLLEYGTNLTKLAEEGKLDPVVGRQNQVDRVVQILGRRTKNNPCLIGEPGVGKTAIAEGLAQRIAAGNVPETIDGKTNLQFEHYEIAKSYLSRLPERKHGNPFQVITLDMGLLVAGTKYRGEFEERLKKLMDEVKQNGEIILFLDEVHTLVGAGAAEGAIDAANILKPALARGELQCIGATTIDEYRKHIEKDPALERRFQPVKVPEPTVDETIGILKGLRERYEIHHKVQYTDESLIAAARLSYQYISDRFLPDKAIDLVDEAGSLVRLRNAQLPDEAKELEKKLKKIMAEKSEAIRSQDFEKAGALRGEEVELKSEIMSLVDKSKEMSKAAVDSGESPGPTVTEADVQHIVSSWTGVPVEKVTVDESSRLLAMESSLHRRIVGQDEAVTAISRAIRRARVGLRDPRRPIASFIFAGPTGVGKSELAKALAAYYYGSPEAMVRLDMSEFMEKHTVAKLVGSPPGYVGYAEGGQLTEAIRRRPYAVVLFDEVEKAHPDVFNMMLQILDDGRLTDSKGRTVDFKNSLIIMTSNVGSGVIEKGGRQLGFAGDGSGDGGYGVIKNMVEEEMKRYFRPEFLNRLDEMIVFRQLTKLEVKEIAGIMLAEVTGRIGGKGIGLQVTERFKELVVEQGFDPSYGARPLRRAIMRLLEDTLTDKMLAGEICAGDSVIVDADGDGNVVVVGRRSAGLPDLKSPAFTV

SEQ ID NO: 7235 - DNA, 2613 bp, Edwardsiella tarda
  CDS (1)..(2613): transl_table=11
gtgaatacagatttgaaagccttgacgggaaaaatgaaccagacctgccatcaggcgctggaggcagcggcgggcctgtgcctggcgcggggccatcacgaggtcgatatcgagcacgtgctgctcaagctgctggagaccgacaacacggatctggcgcgcctgctgcagcactatggggtcgacgccggccgttttcagcgggacattgagcgggcgctggatcgcctgaagggcggatgcagccggcagccgatgctctccccccacctgccgcggctgctgtctggtgcctggctgatggcctccgtcaactgtggcgagagccagatccgcagcggtcatctgatcatggcgctgctggatgacgcggtgctgcagcagctcgccagggcgatgtcgcccgagtgggcggcgtggtcagcggcagatctgctgcaccagtggcccgcgctggtcgcgggcagtcgagaggcgacgacgatgagcacgccggggccgcacgcgggtgcatctccctcgcccgccctggatcaatacacggtaaacctgagcgagcgggcccgccagggccagctggacccggttctcgggcgggatagcgagattcggcagatgatcgatattttgctgcgccgcaggcagaacaacccgattcttaccggtgaggccggcgtagggaaaaccgccgtggttgaggggctggccctgcgcattgcagccggcgaggtgccggatagcctgcgcaacgttgccctgcggatgctggatctgggcctgctgcaggcgggcgccagcgtcaagggtgagttcgagcggcgtctcaaggcggtcatcgacgaggtgaaggcctgcagtgagccggtcattttgttcatcgatgaagcccatacgctgatcggcgcgggaggcgcggcgggtcagaatgatgccgccaatctgctgaagccggcgctggcccgcggtgagctgcgcaccattgccgccaccacctggagcgagtacaaaaaatatttcgagaaagatcccgccctggcgcggcgcttccaggccatcaaggtggaggagcccagcgaggagatcgccatggtgatgctgcgcggcatgctgaccaaaatgcgccagcaccaccaggtccggattctggatgaggcggtgacggccgccgtcaggctgtcacaccgctatttgaccggcagacagctgccggacaaggcggtcagcgtgctggataccgcctgcgcccgcattgcgctcgggcagcgtaccctgccggcccccgtcgaggatgcctgccgccatctggagcatctccagaccgagatcacgctgctggagcaggagcaggccagcggcctcgatcatggtcgccgcctggagacgctgcaggagcaggcccgggtcgcccgggagcactatcagaccctggagcagcgctggatcgcggagtgtgatcaggtcgccgtcattcaggcgctgcaagcgcagctggagcaggaggatggcccggcgcgcgctgaggggctgacccagctggagcaggccgttttggcgcttgagcagatgcagggccgggcgccgctggtgcagacctgtgtggatgagtccgccattgcggcggtgatctcggcatggacggggattccgctgggcaagatggttcaggatgagctggagatggttcgccagctgcagacgcggctggccgagcgggtcatcgggcagccctatgccctggagaccatcgcccgggggattcgcctgtcccgcgcggggctcgaggatcccaacaagcccatcggcgtgtttctgctggtcggctccagcggcgtgggaaagaccgagaccgcgctggcgctggccgaaaccctgtatggcggcgagcgcaacctgatcaccatcaacctgtcggagtttcaggaggcccataccgtttcgacgctgcggggctcgccgccgggctacgtcggctacggagagggcggcgtgctgacggaggcggtacgccgcaaaccctacagtgtggtgctgctggatgaggtggagaaagcccacccggatgtcctggagctgttcttccaggtgtttgacaagggggtcatggacgatgccgaggggcgggagatcaacttccgcaataccgtcatactgctgacctccaacgtcggcagcgacaccctgatggcctactgtcaggacggcatgacgccgcccgaaccggcgctgctgtgtgaggcgctgcgggatgagctgatccagaccttcaagccggccttcctcggacgcctgcaggtagtgccctactacccggtgcggggcgcggtgctaaaacagattatccgcctcaagctggataagattgcccgccgcttccagcgcaatcatcaggccaccttccattacgatgaggccctggtggagggcatcgccgagcgctgtacccagccggagagcggcgcccgcctgatcgataacattctgtcggcccagctgctgtccgatatggcggacgcggtgctggcgcgcatggccgccggtgagccggtgtccgatatcaccgtctcaatggatgagcacggccgactgacgggatcgttagaggggagtgactga

SEQ ID NO: 7236 - protein, 870 aa, Edwardsiella tarda
MNTDLKALTGKMNQTCHQALEAAAGLCLARGHHEVDIEHVLLKLLETDNTDLARLLQHYGVDAGRFQRDIERALDRLKGGCSRQPMLSPHLPRLLSGAWLMASVNCGESQIRSGHLIMALLDDAVLQQLARAMSPEWAAWSAADLLHQWPALVAGSREATTMSTPGPHAGASPSPALDQYTVNLSERARQGQLDPVLGRDSEIRQMIDILLRRRQNNPILTGEAGVGKTAVVEGLALRIAAGEVPDSLRNVALRMLDLGLLQAGASVKGEFERRLKAVIDEVKACSEPVILFIDEAHTLIGAGGAAGQNDAANLLKPALARGELRTIAATTWSEYKKYFEKDPALARRFQAIKVEEPSEEIAMVMLRGMLTKMRQHHQVRILDEAVTAAVRLSHRYLTGRQLPDKAVSVLDTACARIALGQRTLPAPVEDACRHLEHLQTEITLLEQEQASGLDHGRRLETLQEQARVAREHYQTLEQRWIAECDQVAVIQALQAQLEQEDGPARAEGLTQLEQAVLALEQMQGRAPLVQTCVDESAIAAVISAWTGIPLGKMVQDELEMVRQLQTRLAERVIGQPYALETIARGIRLSRAGLEDPNKPIGVFLLVGSSGVGKTETALALAETLYGGERNLITINLSEFQEAHTVSTLRGSPPGYVGYGEGGVLTEAVRRKPYSVVLLDEVEKAHPDVLELFFQVFDKGVMDDAEGREINFRNTVILLTSNVGSDTLMAYCQDGMTPPEPALLCEALRDELIQTFKPAFLGRLQVVPYYPVRGAVLKQIIRLKLDKIARRFQRNHQATFHYDEALVEGIAERCTQPESGARLIDNILSAQLLSDMADAVLARMAAGEPVSDITVSMDEHGRLTGSLEGSD

SEQ ID NO: 7237 - DNA, 2739 bp, Zea mays
  CDS (1)..(2739)
atgaatccggacaacttcacccacaagacgaacgaggcgatcgtgggggcgcacgagattgcggtggaggccggccacgcgcagctcacgccgctgcacctggccgcagtgctggctgcggacaagggcggcatcctgcggcaggccatcacgggggcgtcggggggcgacggagcggccggggactcgttcgagcgcgtgctgaacaactcgctcaagaagctgccgtcgcagtccccgccgccggactccgttccggcgtctacggcgctgatcaaggtcatccgccgggcgcagtccgcgcagaagaaacgcggggactcgcacctcgccgtcgaccagctgctgctcggcctgctcgaggactcgcagatctccgactgcctcaaggaggccggcgtgtccgcggcgcgggtgcgcgccgagcttgagaagctccgcggcggggaggggcgccgcgtagagtccgcgtcgggggataccaacttccaggcgctcaagacatacggccgggacctcgtcgagcaggccgggaagcttgaccccgtcatcggccgcgacgaggagatccgccgcgtcgtgcgcattctctcgcgccgcaccaagaataaccccgtcctcatcggcgggcccggcgttggcaagacggccgtcgtggagggcctcgcgcagcgcatcgttcgcggcgacgtgcccagtaacctcctcgacgtccgcctcatcgcgctcgacatgggcgcgctcgtcgcgggcgccaagtaccgcggcgagttcgaggagcggctcaaggccgtgctcaaggaggtggaagaggccgaggggaaggtcattctcttcatcgacgagatacacctcgtcctgggcgcgggcaggacggagggttccatggacgcggccaacctgttcaagccaatgctggcgaggggacagctcaggtgcatcggcgccaccacgctggaggagtaccgcaagtacgtggagaaggacgcagcgttcgagcggcggttccagcaggtgttcgtcgcggagccgagcgtgcccgacaccgtcagcattctgaggggcctcaaggagaagtacgaggggcaccatggcgtgaggatccaggaccgcgccctcgtggtcgcggcacagctctccgcgaggtacatcatgggtcggcacctgcctgacaaagccatagacctggtggacgaggcctgcgccaatgtgagggtgcagctcgacagccagccggaagagattgataacctggagaggaagagaatccagcttgaggttgagctccacgcgctcgagaaggagaaggacaaggccagcaaagcccggctgattgaggtcaggaaggaattggacgatctgagggtcaagctgcagcccctgaccatgaagtacaggaaggagaaggagagaattgatgagatcaggaagctgaagcagcgccgcgaggagctccagttcaccctgcaggaggccgagcgccggatggacctggcccgtgtggccgacctcaagtacggcgccctccaggaaatcgacgctgctatctccaagctggagagcgaaacaggggagaacctgatgctcaccgaaaccgtcggccctgaacaaattgcagaggtggtgagccgttggacgggtattccagtgacccggcttggccagaacgacaaggagaggctggttggcctggctgacaggcttcaccagagggtggtcggccagacagaggctgtgagcgccgtcgcagaggcggtgctgaggtcgagggccggtcttggcaggccacaacagcccactggctcgttcctcttcctgggtccgactggcgtggggaaaactgagctggccaaggccctagccgaacagctgttcgacgacgagaaccttcttgtccgcatcgacatgtcggagtacatggagcagcactcggttgcccgcctcatcggagcaccacctggctacgtcggccatgaagagggtgggcagcttactgaacaagtgaggaggaggccgtacagcgtgatcctgttcgacgaggtcgagaaggcccatgtcgccgtgttcaacaccctgctccaggtcctcgacgacggcaggctgacggatgggcaaggcaggacggtgaacttcaggaacaccgtgatcatcatgacatcgaaccccggcgccgagcacctcctcgctgggatggtgggcaagaactccatgaaggtcgctcgcgatctggtcatgcaggaggtgaggaggcacttccgccctgagctgctgaaccgtctcgacgagatcgtgatcttcgatcctctgtcccacgagcagctgaggaaggtcgctcgccttcagatgaaggatgtggccgtccgtcttgccgaaaggggcatcgctctggctgtgaccgacgccgcattggacatcatcttgtctctctcttacgatccggtgtatggcgcgcggccaatcaggaggtggatcgagaagagggtggtgacgcagctgtcgaagatgctgatccaggaggagatcgacgagaactgcacggtctacatcgacgccgcgcccggcaaggacgagctggtctacagggtggaccggagcggcggtctggtgaacgctgagacggggatgaagtcggacatcctgatccaggcccccaacagctccaccaggagcgacgctgcgcaggccgtcaagaagatgaggatcatggaggaggacgaggacggtatggacgaggagtaa

SEQ ID NO: 7238 - protein, 912 aa, Zea mays
MNPDNFTHKTNEAIVGAHEIAVEAGHAQLTPLHLAAVLAADKGGILRQAITGASGGDGAAGDSFERVLNNSLKKLPSQSPPPDSVPASTALIKVIRRAQSAQKKRGDSHLAVDQLLLGLLEDSQISDCLKEAGVSAARVRAELEKLRGGEGRRVESASGDTNFQALKTYGRDLVEQAGKLDPVIGRDEEIRRVVRILSRRTKNNPVLIGGPGVGKTAVVEGLAQRIVRGDVPSNLLDVRLIALDMGALVAGAKYRGEFEERLKAVLKEVEEAEGKVILFIDEIHLVLGAGRTEGSMDAANLFKPMLARGQLRCIGATTLEEYRKYVEKDAAFERRFQQVFVAEPSVPDTVSILRGLKEKYEGHHGVRIQDRALVVAAQLSARYIMGRHLPDKAIDLVDEACANVRVQLDSQPEEIDNLERKRIQLEVELHALEKEKDKASKARLIEVRKELDDLRVKLQPLTMKYRKEKERIDEIRKLKQRREELQFTLQEAERRMDLARVADLKYGALQEIDAAISKLESETGENLMLTETVGPEQIAEVVSRWTGIPVTRLGQNDKERLVGLADRLHQRVVGQTEAVSAVAEAVLRSRAGLGRPQQPTGSFLFLGPTGVGKTELAKALAEQLFDDENLLVRIDMSEYMEQHSVARLIGAPPGYVGHEEGGQLTEQVRRRPYSVILFDEVEKAHVAVFNTLLQVLDDGRLTDGQGRTVNFRNTVIIMTSNPGAEHLLAGMVGKNSMKVARDLVMQEVRRHFRPELLNRLDEIVIFDPLSHEQLRKVARLQMKDVAVRLAERGIALAVTDAALDIILSLSYDPVYGARPIRRWIEKRVVTQLSKMLIQEEIDENCTVYIDAAPGKDELVYRVDRSGGLVNAETGMKSDILIQAPNSSTRSDAAQAVKKMRIMEEDEDGMDEE

SEQ ID NO: 7239 - DNA, 2667 bp, Oryza sativa subsp
  CDS (1)..(2667)
atgatgcgtaccatgccaacacggaccctcaccctggggggtttccagggcctgcggcagacgaatttcctggactcgaggtcggtgattaagcgtgacttcggctctattgtcgcgagccagatttcacgcccccgagggttggggtcaagaggggtggtccgcgccatgtttgagcgcttcacggagaaggcaatcaaggtgatcatgcttgcacaggaagaagcgaggcgcctgggccacaactttgttgggacggagcaaattctactgggccttatcggtgagggcacaggaatcgcggcaaaggttctcaagtctatgggtatcaaccttaaggatgcccgtgtggaagttgagaagatcattggacgtggtagcgggtttgtggctgttgagatcccattcacgcctcgtgcaaagcgtgtcttggaactgtcacttgaagaagctcgccagctagggcataactatataggatctgagcacttacttctggggctacttcgtgagggtgaaggtgtagcagcacgggtactggaaagtcttggtgctgatccaaacaacattcgtacccaggtcataagaatggttggtgaaagcacagaagctgttggtgctggagttggtggcggaagcagtggccagaagatgcctacactcgaagagtatggcactaatttgactaagctggcagaagagggtaaactagacccagttgttggcaggcaggatcaaattgagcgtgtaactcaaattttgggaaggcggacaaagaacaacccttgcctaattggagaacctggtgttggaaagactgctattgctgaggggcttgcacaacgtatttccaatggtgacgttccagaaacaattgaaggaaagaaggttattactcttgacatggggctccttgttgctggtaccaagtaccgtggagagttcgaagaaagactgaagaaacttatggaggaaatcaaacaaaatgatgacattattctctttattgatgaagtgcacacgctaattggagcaggtgctgctgaaggtgcaattgatgctgccaacatcttgaaaccagctcttgctagaggtgaactgcagtgcattggtgccacaacacttgatgagtacaggaaacatattgagaaagatccagctttagagcgacggtttcaaccagttaaggttccagagccaactgttgatgaaacaatacaaatcttaagaggacttcgtgagcgatatgaactgcatcataagctgcgatacacagatgattctttaattgctgcagcacaattgtcataccagtatatcagtgatcgcttcctgcctgataaggctattgacttgattgatgaagcaggatctcgtgttaggctcaggcatgcacagctccctgatgaagccaaggagctggacaaagagcttcgacaggtaaccaaagacaagaacgaggctgtacgtggccaagattttgaaaaggctggggaattaagagatcgggaaatggaattgaaggcccaaattacagccattattgacaagagcaaggaaatggttaaagcagagactgaatccggtgaagtcggtccccttgttactgaggcagatattcagcatatcgtgtcctcttggactggaatacctgtggagaaagtctcatctgatgagtctgaccgtctccttaagatggaggagacactccatacgcgtatcattggtcaggatgaggctgtcaaagctattagccgtgccatccgccgtgctcgtgttggcctcaagaacccaaatcggcctattgctagcttcatcttctctggaccaactggtgtcggtaaatcagagttagcaaaggctcttgcagcctactactttggctcagaagaggccatgatcagactagacatgagtgagttcatggagaggcatacagtctccaagctcattggatcacctccaggttatgttggttacactgagggtggtcaactgacagaagcagttcgccgccgaccatacactgttgttctcttcgatgagattgaaaaggcacatcctgatgtcttcaacatgatgcttcagatcttagaagatggaagactaactgacagcaagggtcggactgttgatttcaagaacacactgttgatcatgacatcaaatgttggaagcagtgtcattgagaagggaggacggaagattggatttgaccttgactatgatgagaaagacaccagctacaataggattaagagcttggtgactgaagagctgaagcagtacttccgacctgagttcttaaacagattggacgagatgattgtgttccggcagcttaccaagctggaggttaaggagattgctgatattatgctcaaagaagtgtttgacaggctcaaggcaaaggacatcgacctccaggtgacagagaagttccgggatagagttgtcgacgaaggttacaacccaagctatggtgccaggcctctgcggcgtgctattatgaggcttctggaggacagcttggcggagaagatgttggctggcgaggtcaaggaaggtgactctgctattgttgatgtggattcagagggcaaggtgatagttcttaacggtggtagtggtgttccggaaccactggcacctgctctgagtgtctaa

SEQ ID NO: 7240 - protein, 888 aa, Oryza sativa subsp
MMRTMPTRTLTLGGFQGLRQTNFLDSRSVIKRDFGSIVASQISRPRGLGSRGVVRAMFERFTEKAIKVIMLAQEEARRLGHNFVGTEQILLGLIGEGTGIAAKVLKSMGINLKDARVEVEKIIGRGSGFVAVEIPFTPRAKRVLELSLEEARQLGHNYIGSEHLLLGLLREGEGVAARVLESLGADPNNIRTQVIRMVGESTEAVGAGVGGGSSGQKMPTLEEYGTNLTKLAEEGKLDPVVGRQDQIERVTQILGRRTKNNPCLIGEPGVGKTAIAEGLAQRISNGDVPETIEGKKVITLDMGLLVAGTKYRGEFEERLKKLMEEIKQNDDIILFIDEVHTLIGAGAAEGAIDAANILKPALARGELQCIGATTLDEYRKHIEKDPALERRFQPVKVPEPTVDETIQILRGLRERYELHHKLRYTDDSLIAAAQLSYQYISDRFLPDKAIDLIDEAGSRVRLRHAQLPDEAKELDKELRQVTKDKNEAVRGQDFEKAGELRDREMELKAQITAIIDKSKEMVKAETESGEVGPLVTEADIQHIVSSWTGIPVEKVSSDESDRLLKMEETLHTRIIGQDEAVKAISRAIRRARVGLKNPNRPIASFIFSGPTGVGKSELAKALAAYYFGSEEAMIRLDMSEFMERHTVSKLIGSPPGYVGYTEGGQLTEAVRRRPYTVVLFDEIEKAHPDVFNMMLQILEDGRLTDSKGRTVDFKNTLLIMTSNVGSSVIEKGGRKIGFDLDYDEKDTSYNRIKSLVTEELKQYFRPEFLNRLDEMIVFRQLTKLEVKEIADIMLKEVFDRLKAKDIDLQVTEKFRDRVVDEGYNPSYGARPLRRAIMRLLEDSLAEKMLAGEVKEGDSAIVDVDSEGKVIVLNGGSGVPEPLAPALSV

SEQ ID NO: 7241 - DNA, 2781 bp, Paracoccidioides brasiliensis
  CDS (1)..(2781)
atgaacggaacacagttgacagacagagctaatcaagctcttgtcgatgctcacgcactcgcagagcagcatgctcacccacagctcctccccattcatctcgcagtttcgctcctggacccccctgtggatgagtccaaggaccagcaagttaccacacatccctcacaccaagccagttcaggctctctcttcaaacgagttgtggagaaagcccatggcgatcctcagcagctacgcagggccctcaacaagtctttggtccggctagcttcgcaagatccgcctccagagaccatctccccgtcaccggcgtttgcaaaggttctccgggcggcttccaatttatcaaagacccagaaggatacttatgtcgcaattgatcatttaatagctgcgctggcgcaggatcctactatccagcgggcgcttgcggacgcaaatatccccaatgtcaagatgatcgattctgctatccagcaaatccgcgggatgaaacgcgtggattcaaaaacggcagatacagaagaagaaagtgaaaacttaaaaaagtttacagttgacatgactgccatggcgagagaagggaagattgatcccgtgatcggccgagaagaggagattagaagagtgattcgcattctcagccgacggacaaagaacaatccagtgcttattggcgaacctggcgtgggaaagacaacggtcgtcgaaggcctagcacgacggattgtcaatgccgatgttcccgccaatctggctaattgcaagcttctatccttggatgtcggatcacttgttgctggcagcaagtatcgtggtgagttcgaggagaggatgaagggcgttttgaaagagattgaagaatcaaaggagaccatcgttctgtttgtggatgaaatccatcttcttatgggagctggctccagtggagaaggtggcatggatgccgcaaatctactcaagcccatgcttgcaagaggtcagctacattgcattggcgcaaccactcttggcgaatacaggaagtacatcgagaaagaccaagctttcgagcgtcgattccaacaggtcttggtcaaggagcctactgttggcgagaccatctctattctcaggggtctgaaagaacgatacgaagttcaccatggtgttaacatcctcgatggagccattgtatccgcagccaaccttgcttctcgttaccttactgcccgaagacttccagattctgcagttgatctaattgacgaagcagccgccgctgttcgcgtcacgagagaatctcaacctgaagccctggatactttggaacgccgtgcccgacaactccagatcgaaatccatgctctggctcgcgaaaaggatgcggcctcgaaggctcgactcgaggctgccaaacaggaagcagctaacgtcaacgaagagcttcgccctctacgagaaaaatatgaaagtgagaaacaacggagcaaggatattcaagatgctaaaatcaaattggaccttttgaaagtgaaaagggacgaggcaacccggtctggagatacccaaactgcttcggatctgatttactatgccatcccggatgtcgagaagcgcatcgaacaattggaggctgaaagagctcgacaagatgcggaactatcagcccagccaggtgcaggagaaacccttatggcagatgctgttggccctgagcaaatcaatgaaattgtggccagatggactggcattcccgttaccagactgaggaccaccgaaaaggacaggcttctgcacatggaatcgcacctttccaaaattgttgttggccagaaggaagccgtccaatcagtgtcgaacgcaattcgactccaacggtctggcctgagcaaccctaactccccgccaagcttcctcttctgtgggccatcaggcacgggtaaaaccctgcttactaaggcactggcggaattcctgttcgatgaccccaaggctatgatccgatttgacatgtctgaatatcaggaacggcattctttgagtcgaatgatcggagcgccacctggctacgttgggcatgatgctggtggccagctaacagaatcacttcgccggcgaccattctccattctcctcttcgatgaggtggaaaaagctgcgaaggaagttttaaccgtcctccttcagctgatggatgacggaagaatcacagacggtcagggaagaattgtcgatgcaaagaattgcatcgttgtcatgacttccaaccttggcgccgagtttctccaacggcccacagcttccaatggccagattgaccccaccactaaagagcttgttatgggcgcactgcggaactacttcctgcccgaattccttaatcgaatctctagcatcattatcttcaatcgcctcacaaggcgggagatacggaagatcgtggatgttcggttacaagagatccaacggaggctagagcagaacgaccgcacggtgacgatagattgtacagacgaagtcaaggattacttgggtaatgccggatactcgccagtctatggcgccaggccactctcgcgactcattgagaaagaggtcttgaaccgccttgcggtcttgatcttaagaggggccatcaaagacggcgagactgcacgtgttgtgatgcaggaaggaaggatcactgtcctaccaaaccacgttgaaacggaaagtgaagacgaggagatgattgatgaatctgacacacttgcggagatggaagaggatatgggagaacgggacctttatgagtga

SEQ ID NO: 7242 - protein, 926 aa, Paracoccidioides brasiliensis
MNGTQLTDRANQALVDAHALAEQHAHPQLLPIHLAVSLLDPPVDESKDQQVTTHPSHQASSGSLFKRVVEKAHGDPQQLRRALNKSLVRLASQDPPPETISPSPAFAKVLRAASNLSKTQKDTYVAIDHLIAALAQDPTIQRALADANIPNVKMIDSAIQQIRGMKRVDSKTADTEEESENLKKFTVDMTAMAREGKIDPVIGREEEIRRVIRILSRRTKNNPVLIGEPGVGKTTVVEGLARRIVNADVPANLANCKLLSLDVGSLVAGSKYRGEFEERMKGVLKEIEESKETIVLFVDEIHLLMGAGSSGEGGMDAANLLKPMLARGQLHCIGATTLGEYRKYIEKDQAFERRFQQVLVKEPTVGETISILRGLKERYEVHHGVNILDGAIVSAANLASRYLTARRLPDSAVDLIDEAAAAVRVTRESQPEALDTLERRARQLQIEIHALAREKDAASKARLEAAKQEAANVNEELRPLREKYESEKQRSKDIQDAKIKLDLLKVKRDEATRSGDTQTASDLIYYAIPDVEKRIEQLEAERARQDAELSAQPGAGETLMADAVGPEQINEIVARWTGIPVTRLRTTEKDRLLHMESHLSKIVVGQKEAVQSVSNAIRLQRSGLSNPNSPPSFLFCGPSGTGKTLLTKALAEFLFDDPKAMIRFDMSEYQERHSLSRMIGAPPGYVGHDAGGQLTESLRRRPFSILLFDEVEKAAKEVLTVLLQLMDDGRITDGQGRIVDAKNCIVVMTSNLGAEFLQRPTASNGQIDPTTKELVMGALRNYFLPEFLNRISSIIIFNRLTRREIRKIVDVRLQEIQRRLEQNDRTVTIDCTDEVKDYLGNAGYSPVYGARPLSRLIEKEVLNRLAVLILRGAIKDGETARVVMQEGRITVLPNHVETESEDEEMIDESDTLAEMEEDMGERDLYE

SEQ ID NO: 7243 - DNA, 2424 bp, Leptosphaeria maculans
  CDS (1)..(2424)
atgctaactactaaagcgcgcctcagtgcgaggcatctcatcacccatggaacagtacaattaccatctcgaccgttgttaccatgtgcagccatcacgttacgcgcgcatcaagatcctgttccaagacaacagctattaggccctacgaggtcctacatgaacacgactcgcccgcaacaaccatgtttgatacaaccgcgcatcacttctcgaggctatgcgaacggacggccgcatccaccaggtggcacacatcgaatgaatatggggggtgagccggaaaaaccggcgttggaacaatacggaatagacctcacagaacgggcacgggatggaaaattagatcctgtcatcggccgtgacggcgagatccagcggactatacagatcctgtcacgacggacaaagaacaatccggtactcatagggaaagccggaactggcaaaactgctattcttgaaggcttggctcagcgtatcgtcaagggcgatgtgcctgagtcaatcaaggataagcgtgtcatctcactcgatcttggttcgctcattgcaggcgccaagttccgaggcgattttgaagaacggctgaagagcgtcttaaaagaggtggaagaagcgaagaaaggagtcatcttattcgttgatgagcttcatacgctcttgggtctcggcaaggcagagggtagcattgatgccagtaacttactaaagccagctctgtcccggggcgagctacagctctgcggtgccactactttgagcgagtatcgccaaattgaaaaggatgctgcgcttgctagacgctttcagcccattcaagttggcgaacccaccgtccaagataccatttcaattcttcgtggaatcaaagagcgttatgaggtccaccacggagtgcgcataaccgataatgccctggtcgcggcggcctcatacagcaacaggtacataacagatcgcttcctcccagacaaagcaattgatctcgtggacgaggctgccagcgccttacgactgcaacaggagagcaaacccgatgcaattcaagagcttgatcgtcagatcatgacgatccagatcgaattggaatcacttcgaaaggagaccgacatcgccagcaaagagcgacgccagcgcttggaagagtctttgaagcaaaagcaagaggaagccaaaggactcaccgaaaagtgggagaaggagcgcgcggagctcgaagaaattaagaacgcccaagagaatcttgaaaaagcaagactggagcttgaacaagcccgacgagagggcaattttgccaaggctggagagctacagtacagcagaattccggagctgatagagaagctcccaaaagacgaggaattggttgcaggcgccagccgtcctgactcactgctgcatgactcagtcacggccgatgatatagccagtgtcgtctcacgtacgacaggaatcccactttccaagttgaacagtggtgaaagcgagaaactgattcacatggaggagaccttacgccaatttgtcaaagggcaagatgaggcactcacagcagttgcaaatgctattcgcttgcaaagagcgggactttctggggagaataggccgatagcttctttcatgatgctggggccaacaggtgtcggcaagacagaggtatgtaagaggctggcagagtatctgttcagcactccacaggcagtcatccgtttcgacatgagcgaattcagcgaaaagcacactgtctcgagattgataggcagtccagccggatacgtaggctatgaagacgccggacagctcaccgaggccgtaagacgaaagccatatgccgtgctccttttcgacgagtgggaaaaggctcacaaggacatttccacactattactgcaggttctagacgaaggtttcttgacagatgcacaaggtcacaaggttgacttccgcaacacgatcattgttatgacatcgaatctgggcgcagacatcatcgtcggcgatgacgccttacgttcaggtaatcaagactctggcgagatatcgtctgatgtccgcaatgctgtcatggatatcgtttccgccacgtatcctcccgagttcctcaatcgtctcgacgaattcataattttcaggcgcttatctcgtgaagcactgagggacattgtagacattcgactgaaagagctccagcaacgattggacgaccgaagaatcacccttgattgccccgacgaagcaaaacaatggctctgcgatcgcggatacgaccctaagtatggagcgaggccgttgaacaggcttatcgcacgagaaattggtaatggccttgcagacaaaattattcgaggagaaattcgaagtggcgacacagctaaaatcggcgtcaaatcggatggctcaggcctcgaggtgactgcgtga

SEQ ID NO: 7244 - protein, 807 aa, Leptosphaeria maculans
MLTTKARLSARHLITHGTVQLPSRPLLPCAAITLRAHQDPVPRQQLLGPTRSYMNTTRPQQPCLIQPRITSRGYANGRPHPPGGTHRMNMGGEPEKPALEQYGIDLTERARDGKLDPVIGRDGEIQRTIQILSRRTKNNPVLIGKAGTGKTAILEGLAQRIVKGDVPESIKDKRVISLDLGSLIAGAKFRGDFEERLKSVLKEVEEAKKGVILFVDELHTLLGLGKAEGSIDASNLLKPALSRGELQLCGATTLSEYRQIEKDAALARRFQPIQVGEPTVQDTISILRGIKERYEVHHGVRITDNALVAAASYSNRYITDRFLPDKAIDLVDEAASALRLQQESKPDAIQELDRQIMTIQIELESLRKETDIASKERRQRLEESLKQKQEEAKGLTEKWEKERAELEEIKNAQENLEKARLELEQARREGNFAKAGELQYSRIPELIEKLPKDEELVAGASRPDSLLHDSVTADDIASVVSRTTGIPLSKLNSGESEKLIHMEETLRQFVKGQDEALTAVANAIRLQRAGLSGENRPIASFMMLGPTGVGKTEVCKRLAEYLFSTPQAVIRFDMSEFSEKHTVSRLIGSPAGYVGYEDAGQLTEAVRRKPYAVLLFDEWEKAHKDISTLLLQVLDEGFLTDAQGHKVDFRNTIIVMTSNLGADIIVGDDALRSGNQDSGEISSDVRNAVMDIVSATYPPEFLNRLDEFIIFRRLSREALRDIVDIRLKELQQRLDDRRITLDCPDEAKQWLCDRGYDPKYGARPLNRLIAREIGNGLADKIIRGEIRSGDTAKIGVKSDGSGLEVTA

SEQ ID NO: 7245 - DNA, 2817 bp, Oryza sativa subsp
  CDS (1)..(2817)
atggaggtgtgctgctgctcgacgtcgtcggccgtgcccgggaggaggttcgcggcggccggggcggcggcggcggcggtggcggcgaggtggggcgccgtgggggtcgggagggcggtggtgctggcgcacccgctgcgcccggcgccgcgcggcgggcacgcgcacgcgcagcaggcgggcgcgcggcgggcgcggcgcgcggtcgtcagggcggtgttcgagcggttcacggagcgggcggtgaaggcggtggtgctgtcgcagcgggaggccaaggggctcggggagggcgccgtggcgccgcgccacctgctgctggggctcatcgccgaggaccggtcggcgggcgggttcctctcgtcggggatcaacatcgagcgcgcgcgcgaggagtgccgcggcatcggcgccagggacttgacccccggcgcgccgtcgccgtccggctccgggctggaaatggacatacccttctccggcagctgcaagcgggtgttcgaggtcgccgtggagttctcccggaacatgggctgcagcttcatctccccggagcacctcgccctcgcgctcttcaccctcgacgatcccaccaccaacagcctcctcaggagcttgggagcggatccgagtcaactagcatcagtagcgcttacccgactccaagcggagcttgcgaaagatggcagagaacctgcaggagcatcatctttcaaagtacccaagaaatctcctgctggagctggaagatctgccttctcgaaatctttaaattcaaagaaagaaaagggtgcgcttgatcaattttgtttagatctgaccacacaagctagtggcgggtttattgatcctatcattggccgtgaggaggagattgaaagagtagttcagataatatgccgacggacaaagaacaatcctattcttttgggtgaggcaggtgttggcaaaactgcaatcgctgaagggttggctcttcgaattgcaaatggagatgtccccatttaccttgtggcaaagcgtataatgtcattggacgttggtctacttattgctggtgcaaaagaaagaggtgaactggagtccagggttactagtttaattcgtgaagtccgggaagcaggggatgttattcttttcattgatgaggttcacaatcttattggatctggcactgttggaaagggtaagggtgctggccttgacattggcaacttgctgaagcccccacttgctagaggtgaattgcagtgcattgcagctacaactctagatgaacacagaatgcattttgagaaggataaggctttggctcgccgcttccagccagtattagtagaggagcctagtcaggatgatgctgtgaagatattacttggtcttcgtgaaaaatatgaaacatatcacaaatgcaaatttaccttagaagccatcaatgcagcagtttatctgtcagcaagatatattcctgacaggcagctccctgacaaggccatcgatctgattgatgaagctggcagtagagctcgaatggaatcatttaataggaagaaggaagggcagtcttcaatcctcttaaagtcgccagatgaatactggcaagagataagagctgctcaaaacatgcatgaagtggtgtcatcaaaccagatgaagtattccccttgtcaagagaatggcagtgctgccattaaagcaccaagcgaggacatgaatgagttgacatctgaactccaagttgaggaaccaattgtagttggaacagaggaaattgcaagagttgcctcattgtggtcagggataccagtccagcagttaactgctgatgatagaaagcttctcgtaggactagatggtgaactcagaaagcgtgtgattggtcaagatgatgctgttatggcaatatctagagcagtgaagagatcacgtgttggcctcaatgatcctgacagacctattgccactctacttttctgtggtccgacaggagttggtaaaactgagcttactaaagctctagcagctagttattttggatcggaatctgctatgcttagattagacatgagcgagtatatggagaggcacactgtgagcaagctcataggctctcctccagggtacatcggatatggtgaaactggtactctgacagaagctgtcaggagaaagccatttactgtagtattacttgatgagatagagaaagctcaccctgatattttcaacattcttctccaaatttttgaagatgggcatctgtcggactcacagggccgcagagtgtccttcaagaacacattgattgtcatgacatcaaatgttggttctacatcaatttcaaagggaagacgaagcatgggtttcatgacagaagatactgaatcaagctcatatgttgcaatgaaatctctagtaatggaagagttgaaggcatttttccgtccagaattgctcaacagaatcgatgagatggttgtattccgtcccttagagaaaactcagatgctagcaattcttgatatcatcctacaagaagtgaagggtaggctgttagcccttggaataggcctcgaggtgtccgatgcaatgaaggacctgatttgcgaagaaggctatgacaagagctacggtgcgcggccactgaggagagccgtcacccacctgattgaggatgtgatcagcgaagcaattctatttggcgaatacaagcctggggacacgatactgatggatattgatgccgcggggaaaccttgcatgagccacctgaatgagaaggttgtccagttgtctgatccgacacggacattctga

SEQ ID NO: 7246 - protein, 938 aa, Oryza sativa subsp
MEVCCCSTSSAVPGRRFAAAGAAAAAVAARWGAVGVGRAVVLAHPLRPAPRGGHAHAQQAGARRARRAVVRAVFERFTERAVKAVVLSQREAKGLGEGAVAPRHLLLGLIAEDRSAGGFLSSGINIERAREECRGIGARDLTPGAPSPSGSGLEMDIPFSGSCKRVFEVAVEFSRNMGCSFISPEHLALALFTLDDPTTNSLLRSLGADPSQLASVALTRLQAELAKDGREPAGASSFKVPKKSPAGAGRSAFSKSLNSKKEKGALDQFCLDLTTQASGGFIDPIIGREEEIERVVQIICRRTKNNPILLGEAGVGKTAIAEGLALRIANGDVPIYLVAKRIMSLDVGLLIAGAKERGELESRVTSLIREVREAGDVILFIDEVHNLIGSGTVGKGKGAGLDIGNLLKPPLARGELQCIAATTLDEHRMHFEKDKALARRFQPVLVEEPSQDDAVKILLGLREKYETYHKCKFTLEAINAAVYLSARYIPDRQLPDKAIDLIDEAGSRARMESFNRKKEGQSSILLKSPDEYWQEIRAAQNMHEVVSSNQMKYSPCQENGSAAIKAPSEDMNELTSELQVEEPIVVGTEEIARVASLWSGIPVQQLTADDRKLLVGLDGELRKRVIGQDDAVMAISRAVKRSRVGLNDPDRPIATLLFCGPTGVGKTELTKALAASYFGSESAMLRLDMSEYMERHTVSKLIGSPPGYIGYGETGTLTEAVRRKPFTVVLLDEIEKAHPDIFNILLQIFEDGHLSDSQGRRVSFKNTLIVMTSNVGSTSISKGRRSMGFMTEDTESSSYVAMKSLVMEELKAFFRPELLNRIDEMVVFRPLEKTQMLAILDIILQEVKGRLLALGIGLEVSDAMKDLICEEGYDKSYGARPLRRAVTHLIEDVISEAILFGEYKPGDTILMDIDAAGKPCMSHLNEKVVQLSDPTRTF

SEQ ID NO: 7247 - DNA, 2379 bp, Paracoccidioides brasiliensis
  CDS (1)..(2379)
atgttgcttaagacaacctctttgactcacaccataaccattatggacaagcaccttctacacaccctaactggggtacaggtcaatgccatagataaagctttagcggttggtcccgactgggtattattgggccttagcgaagttggggccaccaaaagcttattgaacagcatcggtgtcagtgcagacagtctgcgtcaggtaattttaaaaattcgaggtgatgaaaaagtgatgagtaataatcatgaagatcaacgtgattcactcaataaatacactgtagatttaaccgaacgtgcgctggccggcaagctcgatccggtgattggccgtgatgatgaaatccgccgtaccgtacaggtcttgtcacgtcggaccaaaaataacccggtactgattggtgagcctggggtcggtaaaaccgcaattgtagaaggtctggcacagcgtattgtgaatggtgaagtgccagaaagcttaaaaggcaaacgcgtgttatcgctggacctgggttcattgctggccggtgccaaatatcgcggcgagtttgaggagcgtttaaaagcggtcctgaaagatctggccaagcatgaaggcgaaatcatcctgtttattgatgagttgcataccctggttggcgcaggtaaaggtgatggcgcgatggatgccggcaacatgctgaaaccggcgctggcacgcggtgaattacgctgcgtgggggcaaccacactcgatgaatatcgtcagtacattgaaaaagatgccgcccttgagcgccgtttccagaaagtgctggtcgatgagccaagtgtcgaagacaccattgccattttacgtggtctgaaagagcgttatgaagtccaccacggggtgaaaattctcgactcagcgattattgctgcagcgaaaatgtcacatcgttatatcactgaccgtcagttgcccgataaagccattgacctgattgatgaagcagcatcgcgcatcaagatggagctggactctaaaccggaagcgctggataagctggaacgccgtctgattcagttaaagttgcaacttgaagctgtgaaaaaagatgaagatgccggcagccgtgcagaagtcagtcatctggaaaaacagatcgaagacgtccaaaaagactataacgatctggaagaagtgtggaagtctgaaaaaactctggtcgaaggcactaagcagattcaggcacagctggatcaggcgcgtattgccttgcaaaaagcacagcgtgaaaatgatctgggcgagatgtcgcgtctgcaatatggcgtgattccggaactggaaaaacagctggcccaagatgagctggtggaagagaaagaagaaccgaagttattgcgcaataaagtcaccgataacgaaattgcggaagtggtcagcgcagccaccggtattccggttgcgaaaatgctgcaaggcgagcgtgaaaaactgctgcaaatggaaagcttcctgcatcagcgtgtggtagggcaggatgaagcggtgattgcggtatccaatgcggtgcgccgttcacgtgccgggttgtcggatccgaaccgtccaagtggttctttcctgttcctgggtccaaccggtgtcggtaagaccgagttaaccaaagccttggccaatttcctgtttgacagcgatgacgccatgatccggattgatatgtccgaatttatggaaaaacactcagtcagccgtctggtcggtgcgcctccgggctatgtcggctatgaagaaggcggggtattaaccgaagccgtacgccgtaaaccatatagcgtggtgctgtttgatgaggtggaaaaagcccatccggatgtatttaacatcttgctgcaggtactggatgatggtcgcttgaccgactcgcagggccgtgtagtggactttaaaaacaccgtgattgtaatgacctcgaacctgggttcaagcgatgtgcgtgaactgggcgataatccaagccgtgatgatgtacgcaatgtagtgatggcagccgtgtctgagcatttccgtccggagtttatcaaccgtattgatgagctggtagtattccatgccctggaaaaagcgcagattcgtggtattgccgatatccagctggaccgtttacgtgcccgtctggccgaccgcgatatcaagttaacggtagatgattctgcctttgaccagctgattgaagccggttttgacccagtttacggtgcgcgtccattaaaacgtgccatccagcaacaggtagaaaataatctggcgcagaaaattctggccggtgacttccagccgggagataccattgtgattacggcagatgcaggccaactggatttccagaagctgaaactgaactaa

SEQ ID NO: 7248 - protein, 792 aa, Paracoccidioides brasiliensis
MLLKTTSLTHTITIMDKHLLHTLTGVQVNAIDKALAVGPDWVLLGLSEVGATKSLLNSIGVSADSLRQVILKIRGDEKVMSNNHEDQRDSLNKYTVDLTERALAGKLDPVIGRDDEIRRTVQVLSRRTKNNPVLIGEPGVGKTAIVEGLAQRIVNGEVPESLKGKRVLSLDLGSLLAGAKYRGEFEERLKAVLKDLAKHEGEIILFIDELHTLVGAGKGDGAMDAGNMLKPALARGELRCVGATTLDEYRQYIEKDAALERRFQKVLVDEPSVEDTIAILRGLKERYEVHHGVKILDSAIIAAAKMSHRYITDRQLPDKAIDLIDEAASRIKMELDSKPEALDKLERRLIQLKLQLEAVKKDEDAGSRAEVSHLEKQIEDVQKDYNDLEEVWKSEKTLVEGTKQIQAQLDQARIALQKAQRENDLGEMSRLQYGVIPELEKQLAQDELVEEKEEPKLLRNKVTDNEIAEVVSAATGIPVAKMLQGEREKLLQMESFLHQRVVGQDEAVIAVSNAVRRSRAGLSDPNRPSGSFLFLGPTGVGKTELTKALANFLFDSDDAMIRIDMSEFMEKHSVSRLVGAPPGYVGYEEGGVLTEAVRRKPYSVVLFDEVEKAHPDVFNILLQVLDDGRLTDSQGRVVDFKNTVIVMTSNLGSSDVRELGDNPSRDDVRNVVMAAVSEHFRPEFINRIDELVVFHALEKAQIRGIADIQLDRLRARLADRDIKLTVDDSAFDQLIEAGFDPVYGARPLKRAIQQQVENNLAQKILAGDFQPGDTIVITADAGQLDFQKLKLN

SEQ ID NO: 7249 - DNA, 2706 bp, Phycomyces blakesleeanus
  CDS (1)..(2706)
atgagtggaatgaattttactgaaaaagtcgaaaagactcttgcaactgctcaagctcaggcgcgcgaattctcgcacactctcttgcaccctgctcacatcgcatgtgccatgtttgacgatgttgacggacagtccctgttcaagtcgattctcgagaaggctggtgccgatccctctctggtcgagcggggttacaagaagcagatggttcaccttcctgcccaagatcctcctccacctgagatcagcatcagtccccagacagccaaactgctccgtaatgccgagaaacacatgaaagaccaaaaggattcctacatctccatcgaccacctgatccttgccttggccgacgagaccacaacattccagccgatgaaggatgctggtgtgacaaagaaggctctcgaaagcgcagtccagcaggtccgcggaaacaagcgtgtggatagcaaaaacgccgaagaggtctacgagtccctgtcaaagtatgcgattgaccttaccgagatggcccagactggaaaactcgatcctgtcattggccgtgacgatgagatccgtcgtgtaatccgagtgctctgtcggcgtaccaagaacaacccagtcctgattggtgagcctggtgtcggtaaaactgcgattgccgaaggtctggcacgtcgtatcgtcgaacgagatgttccagagtccctgcagtgcaagttgttctcgctcgacatgggtgccctgattgccggtgcaaagtaccgtggtgagttcgaagagcgtctcaaggccgtcctcaaggaagtcaaggagtccgaagaaggcatcattctctttattgacgagatccacaccgtcctgggtgccggtaaaggcgaaggttcaatggacgctgccaatctgctcaagcctatgctggcccgcggtgaacttcgctgcatcggtgcaacaaccctgaccgagtacaaggttatcgaaaaggatccagcctttgaacgtcgtttccaaaaggtcgatgtcggagagccttctgttgctgccacaatctctatcctgcgtggtctcaaagaacgctacgagtcctaccatggtgtcaagatcactgactctgcactagtcgttgccgcccagctctccgaccgttacatcaccacccgtttcttgcccgacaaggccattgatctgattgacgaggctggtgccaacactcgtgtccagcttgactcaaagccagaggagatcgatgttcttgagcgcaagcacttccagctcgagattgaggccatggcgctcggcaaggagaagaacaacaaggactcgcaggagcgtctcaaggttgtcaaggaggagatggccaagatccaggaggagttgaagcccctaaagctgcggtacgacatggacaagggccgattggacgagatccgagacttgaagcaaaagttggatgagctgaagcgcaaggctgtcgaggcaagaaaccgctatgatctagactctgcagctgatatcgagtactatgccattcctgatgtcgagcagcgtatcaatgccctgtctgccgagaagcaacgcaagatggctgagcagatggccaacgacacagccggccaggcatcgacaaccggtcagttggtgagcgagattgtccgacctgagcagattatggaagtcatctctcgctggactggtatccccgttcagaatctggccaagagtgagcgagagaagctgctgcacatggaggccgagattggtaaaaaggtggttggtcaaaagagagcaattgagtcggtgtgtgatgcaatccgtctttcgaaagctggactgcagaatccaaccaagccactggctagctttatgttccttggtcctactggtgttggtaagacgcttctttgcaagaccctggctgaatttctgttcaacgatgagcgcgcgatgatccgtattgatatgagtgagcttatggaacagcacagtgttgcaaaacttatcggagcccctcccggttatgtcggtcacgaagacggaggtttatttgaggcagtccgtcgcaagccatatgctgttgttcttcttgatgaactggagaaggcacacaaggatgttgcaaatgtgcttctgcaggtgcttgatgaaggatttattcatgattccaagggtcgcaagatcgatttccgcaacacgattatcgtcatgacatccaaccttggagctcatcttttagccgaacagtctgctgcaggaggcgacccggatttgattattttgaaagagagtattctgcagattgtccgccagcactttagcccagagttcacgaaccgtattgatgagatcgtgatcttcaaccgcctgactgagacgaacattacaaacattgtggatgtgcgacttgaggaagtccaagagcgcctggccgatcgtaagattaccctggatgtttcaaagcctgccaaggaattactcggaaaggaaggatatgagcctgtatttggtgcacgcccgctcaaccgtcttattcagcaaaaggttctcaatccattggcacgtctgattatcgatggaggtgtacgtcctggcgaggtagctcatgtgggattgaacgagtctggcaagcttgaggttttgcgcaatcatgagatccaatctgactacgaggttgaagaacccatggaagaaaataatgattctgatgaagacatggactaa

SEQ ID NO: 7250 - protein, 901 aa, Phycomyces blakesleeanus
MSGMNFTEKVEKTLATAQAQAREFSHTLLHPAHIACAMFDDVDGQSLFKSILEKAGADPSLVERGYKKQMVHLPAQDPPPPEISISPQTAKLLRNAEKHMKDQKDSYISIDHLILALADETTTFQPMKDAGVTKKALESAVQQVRGNKRVDSKNAEEVYESLSKYAIDLTEMAQTGKLDPVIGRDDEIRRVIRVLCRRTKNNPVLIGEPGVGKTAIAEGLARRIVERDVPESLQCKLFSLDMGALIAGAKYRGEFEERLKAVLKEVKESEEGIILFIDEIHTVLGAGKGEGSMDAANLLKPMLARGELRCIGATTLTEYKVIEKDPAFERRFQKVDVGEPSVAATISILRGLKERYESYHGVKITDSALVVAAQLSDRYITTRFLPDKAIDLIDEAGANTRVQLDSKPEEIDVLERKHFQLEIEAMALGKEKNNKDSQERLKVVKEEMAKIQEELKPLKLRYDMDKGRLDEIRDLKQKLDELKRKAVEARNRYDLDSAADIEYYAIPDVEQRINALSAEKQRKMAEQMANDTAGQASTTGQLVSEIVRPEQIMEVISRWTGIPVQNLAKSEREKLLHMEAEIGKKVVGQKRAIESVCDAIRLSKAGLQNPTKPLASFMFLGPTGVGKTLLCKTLAEFLFNDERAMIRIDMSELMEQHSVAKLIGAPPGYVGHEDGGLFEAVRRKPYAVVLLDELEKAHKDVANVLLQVLDEGFIHDSKGRKIDFRNTIIVMTSNLGAHLLAEQSAAGGDPDLIILKESILQIVRQHFSPEFTNRIDEIVIFNRLTETNITNIVDVRLEEVQERLADRKITLDVSKPAKELLGKEGYEPVFGARPLNRLIQQKVLNPLARLIIDGGVRPGEVAHVGLNESGKLEVLRNHEIQSDYEVEEPMEENNDSDEDMD

SEQ ID NO: 7251 - DNA, 2700 bp, Candida albicans
  CDS (1)..(2700): transl_table=12
atggaagattttacagataacgctatcaagattatcaataatgctactgaattggcaaaacaacaggccaattcgcaattggtaccccttcattttcttgctgcatttatcccatcagatgatactgaaggctcaacacagtatttgaaaacgttggtcaagagagcaagatacgaatggggcgatttcgaaagaatcgtgaacagacatttggttaaaataccatctcagaacccccctccagatgaaatacgaccaagctatcaagcaggccaggtgttaacgagggccaacaaaatcaaacaacaacaaaaggactcatatgttgctcaggaccatattttgttggcgctcttggaggaccaatcaattaaagatattttcaaagaagctggtatgagtgttgacacaataaagacacaagctattgaattgagagggtcccaaaggattgactccagacaagctgattcgtcttcatcttatgaatttttgaacaagtattgtgaagattttaccgaaaaggctagggaaggtaagattgatcctgtaattggtagagaggaagaaattcgaagagtcatcagagttttggcaagaagaagcaaatcgaactcggtgttgatcggtgatgctggtgttggtaagacttctattgttgaaggtgttgcacaaagaatagttgatggggacgttccaaatgttttggctggctcaagattatttgctcttgatttgggtgcattgactgcaggtgcaaaatacaagggtgagtttgaggaaagattgaaaggtgttttgaatgaaattgaaaaatccaaagagtttatcatcttgttcattgatgaaatccacatgttgatgggtgatggtaaatcagatgctgctaatttgttgaagccaatgttggccagaggtgcattacattgtattggtgctactacctttgctgaatacagaaagttcatttccaaagatggtgcatttgaaagaagattccaaaaaatcgatgttcctgccgccaccgtgcaagaaactgttgccattttaagaggtatccagcctaaatatgaaattcaccatggggtccgtatattggatagtgcattggtcactgctgctcagttggcttcaagatacttgacatacagagcattacctgattcagctgttgatcttgttgatgagagtgctgctgctgttgctgtggctagagactctaagccagaagagttggacactttggaaagacaattgcatttggtagatgtcgaaatcagtgcattagaaagagacaaagatgcagactctgcttccaaggaacgtttgaatttggccaaaaagaagaaagcagaattggaagaaaaaattggaccattgaacgagagatacagacaagaacgagctagtcatgaacaattgactgctgccaaaagaaaattggatgaacttgagatcaaagctcaagatgctgaaagaagatacgatactgctactgctgctgacttgagatactttgctatcccagatatccagaagcaaattgaagagttagaagtcaaagttgctgaagaggaagcttctaatttggacagcttgttgaagaatgcagttggaccagaacaaatatgtgaaaccgctgctagattgactggtatccctgtcacgaaattgtcgcaagcagaaaacaataaattgatcaatatggaagcagaattgtcgaaagaagttgttggacaatcggaagctgtgaaggcagtctccaatgccatcagattaagaagatcgggtttggctaatcctaaccaaccaccatcctttttgtttttgggtctttctggttcgggtaagactgaattggctaagaagcttgctggttttctctttgcagacgaaaaggcaattattagaattgactgctctgaattgggagacaaatggtctgcttcaaaattgttgggtgctgctccaggttatgttggatatgaagaaggtggtatcttgactgagccattaatcagacggccatactctgtggtcttgttggatgaagttgaaaaagctgctcctgaagtgttgactgtgttattacagattttggatgatggtagagttacctcttctcaaggtaagcttgttaactgctcgaatgccattttcataatgacgtctaatttgggtgcaaactacatcaatgccgccaagggaagcaagattgatgccaacacaaaggaacatgtaatggatgctgtgagagcacatttcagacctgaatttattaaccgtatttccagtattgttgtgtttaacagattgtcgagaaaagccatttccaagattgtcaagatcaggttgtccgaaattgaaaacagattcactgctaatggtaaggctatacaattgaagctagatgatgatgccatggagtacttgtgcaagaatggatggtcacctgacttgggtgcaagaccattgaaccgcttgatccaaaacgagattttgaacaggttggctgtaatgttgttgaaagggcaaatccaagataaagaaactgctagagttgttcttggcgaaaaaggtttggagattttacctaaccatgaaccagaagatgtggaaatgaatgatgttgataactggcaagactcagaggatgaagatgatgacgaagccagattcacttcacctggacttgactaa

SEQ ID NO: 7252 - protein, 899 aa, Candida albicans
MEDFTDNAIKIINNATELAKQQANSQLVPLHFLAAFIPSDDTEGSTQYLKTLVKRARYEWGDFERIVNRHLVKIPSQNPPPDEIRPSYQAGQVLTRANKIKQQQKDSYVAQDHILLALLEDQSIKDIFKEAGMSVDTIKTQAIELRGSQRIDSRQADSSSSYEFLNKYCEDFTEKAREGKIDPVIGREEEIRRVIRVLARRSKSNSVLIGDAGVGKTSIVEGVAQRIVDGDVPNVLAGSRLFALDLGALTAGAKYKGEFEERLKGVLNEIEKSKEFIILFIDEIHMLMGDGKSDAANLLKPMLARGALHCIGATTFAEYRKFISKDGAFERRFQKIDVPAATVQETVAILRGIQPKYEIHHGVRILDSALVTAAQLASRYLTYRALPDSAVDLVDESAAAVAVARDSKPEELDTLERQLHLVDVEISALERDKDADSASKERLNLAKKKKAELEEKIGPLNERYRQERASHEQLTAAKRKLDELEIKAQDAERRYDTATAADLRYFAIPDIQKQIEELEVKVAEEEASNLDSLLKNAVGPEQICETAARLTGIPVTKLSQAENNKLINMEAELSKEVVGQSEAVKAVSNAIRLRRSGLANPNQPPSFLFLGLSGSGKTELAKKLAGFLFADEKAIIRIDCSELGDKWSASKLLGAAPGYVGYEEGGILTEPLIRRPYSVVLLDEVEKAAPEVLTVLLQILDDGRVTSSQGKLVNCSNAIFIMTSNLGANYINAAKGSKIDANTKEHVMDAVRAHFRPEFINRISSIVVFNRLSRKAISKIVKIRLSEIENRFTANGKAIQLKLDDDAMEYLCKNGWSPDLGARPLNRLIQNEILNRLAVMLLKGQIQDKETARVVLGEKGLEILPNHEPEDVEMNDVDNWQDSEDEDDDEARFTSPGLD

SEQ ID NO: 7253 - DNA, 2700 bp, Candida albicans
  CDS (1)..(2700): transl_table=12
atggaagattttacagataacgctatcaagattatcaataatgctactgaattggcaaaacaacaggccaattcgcaattggtaccccttcattttcttgctgcatttatcccatcagatgatactgaaggctcaacacagtatttgaaaacgttggtcaagagagcaagatacgaatggggcgatttcgaaagaatcgtgaacagacatttggttaaaataccatctcagaacccccctccagatgaaatacgaccaagctatcaagcaggccaggtgttaacgaaggccaacaaaatcaaacaacaacaaaaggactcatatgttgctcaggaccatattttgttggcgctcttggaggaccaatcaattaaagatattttcaaggaagctggtatgagtgttgacacaataaagacacaagctattgaattgagagggtcccaaaggattgactccagacaagctgattcgtcttcatcttatgaatttttgaacaagtattgtgaagattttaccgaaaaggctagggaaggtaagattgatcctgtaattggtagagaggaagaaattcgaagagtcatcagagttttggcaagaagaagcaaatcgaactcggtgttgattggtgatgctggtgttggtaagacttctattgttgaaggtgttgcacaaagaatagttgatggggacgttccaaatgttttggctggctcaagattatttgctcttgatttgggtgcattgactgcaggtgcaaaatacaagggtgagtttgaggaaagattgaaaggtgttttgaatgaaattgaaaaatccaaagagtttatcatcttgttcattgatgaaatccacatgttgatgggtgatggtaaatcagatgctgctaatttgttgaagccaatgttggccagaggtgcattacattgtattggtgctactacctttgctgaatacagaaagttcatttccaaagatggtgcatttgaaagaagattccaaaaaatcgatgttcctgccgccaccgtgcaagaaactgttgccattttaagaggtatccagcctaaatatgaaattcaccatggggtccgtatattggatagtgcattggtcactgctgctcagttggcttcaagatacttgacatacagagcattacctgattcagctgttgatcttgttgatgagagtgctgctgctgttgctgtggctagagactctaagccagaagagttggacactttggaaagacaattgcatttggtagatgtcgaaatcaatgcattagaaagagacaaagatgcagactctgcttccaaggaacgtttgaatttggccaaaaagaagaaagcagaattggaagaaaaaattggaccattgaacgagagatacagacaagaacgagctagtcatgaacaattgactgctgccaaaagaaaattggatgaacttgagatcaaagctcaagatgctgaaagaagatacgatactgctactgctgctgacttgagatactttgctatcccagatatccagaagcaaattgaagagttagaagtcaaagttgctgaagaggaagcttctaatttggacagcttgttgaagaatgcagttggaccagaacaaatatgtgaaaccgctgctagattgactggtatccctgtcacgaaattgtcgcaagcagaaaacaataaattgatcaatatggaagcagaattgtcgaaagaagttgttggacaatcggaagctgtgaaggcagtctccaatgccatcagattaagaagatcgggtttggctaatcctaaccaaccaccatcctttttgtttttgggtctttctggttcgggtaagactgaattggctaagaagcttgctggttttctctttgcagacgaaaaggcaattattagaattgactgctctgaattgggagacaaatggtctgcttcaaaattgttgggtgctgctccaggttatgttggatatgaagaaggtggtatcttgactgagccattaatcagacggccatactctgtggtcttgttggatgaagttgaaaaagctgctcctgaagtgttgactgtgttattacagattttggatgatggtagagttacctcttcccaaggtaagcttgttaactgctcgaatgccattttcataatgacgtctaatttgggtgcaaactacatcaatgccgccaagggaagcaagattgatgccaacacaaaggaacatgtaatggatgccgtgagagcacatttcagacctgaatttattaaccgtatttccagtattgttgtgtttaacagattgtcgagaaaagccatttccaagattgtcaagatcaggttgtccgaaattgaaaacagattcactgctaatggtaaggctatacaattgaagctagatgatgatgccatggagtacttgtgcaagaatggatggtcacctgacttgggtgcaagaccattgaaccgcttgatccaaaacgagattttgaacaggttggctgtaatgttgttgaaagggcaaatccaagataaagaaactgctagagttgttcttggcgaaaaaggtttggagattttacctaaccatgaaccagaagatgtggaaatgaatgatgttgataactggcaagactcagaggatgaagatgatgacgaagccagattcacttcacctggacttgactaa

SEQ ID NO: 7254 - protein, 899 aa, Candida albicans
MEDFTDNAIKIINNATELAKQQANSQLVPLHFLAAFIPSDDTEGSTQYLKTLVKRARYEWGDFERIVNRHLVKIPSQNPPPDEIRPSYQAGQVLTKANKIKQQQKDSYVAQDHILLALLEDQSIKDIFKEAGMSVDTIKTQAIELRGSQRIDSRQADSSSSYEFLNKYCEDFTEKAREGKIDPVIGREEEIRRVIRVLARRSKSNSVLIGDAGVGKTSIVEGVAQRIVDGDVPNVLAGSRLFALDLGALTAGAKYKGEFEERLKGVLNEIEKSKEFIILFIDEIHMLMGDGKSDAANLLKPMLARGALHCIGATTFAEYRKFISKDGAFERRFQKIDVPAATVQETVAILRGIQPKYEIHHGVRILDSALVTAAQLASRYLTYRALPDSAVDLVDESAAAVAVARDSKPEELDTLERQLHLVDVEINALERDKDADSASKERLNLAKKKKAELEEKIGPLNERYRQERASHEQLTAAKRKLDELEIKAQDAERRYDTATAADLRYFAIPDIQKQIEELEVKVAEEEASNLDSLLKNAVGPEQICETAARLTGIPVTKLSQAENNKLINMEAELSKEVVGQSEAVKAVSNAIRLRRSGLANPNQPPSFLFLGLSGSGKTELAKKLAGFLFADEKAIIRIDCSELGDKWSASKLLGAAPGYVGYEEGGILTEPLIRRPYSVVLLDEVEKAAPEVLTVLLQILDDGRVTSSQGKLVNCSNAIFIMTSNLGANYINAAKGSKIDANTKEHVMDAVRAHFRPEFINRISSIVVFNRLSRKAISKIVKIRLSEIENRFTANGKAIQLKLDDDAMEYLCKNGWSPDLGARPLNRLIQNEILNRLAVMLLKGQIQDKETARVVLGEKGLEILPNHEPEDVEMNDVDNWQDSEDEDDDEARFTSPGLD

SEQ ID NO: 7255 - DNA, 2574 bp, secondary endosymbiont of Glycaspis brimblecombei
  CDS (1)..(2574): transl_table=11
atgcgtttggatcgtcttaccaacaaatttcaacaagcactagctgatgctcaatctttagcaattggacaagataatcaatttattgaaccagtacatttactgattgccttgttagatcaagaaggcggtacattacgtcctttattgacatcgataggggttaatatcagtcagcttagtaacaaattaaactatattctcaataccttaccgcaagtgcatggcactgctggtgatatccagccatcaaacgatcttattcggcacttaaatttgtgtgataagttggcgcaacagcgaggtgatacgtttatatcctcagagctatttcttctggcaatttttgatgccaaaacctccctggcagatacacttaaaacgatgggagcgaataaagcaaatatagaaaaggcgatagaacaaatgcgtggtggtgataatgttaatgaccaaggtgctgaagagcagcgtcaagcacttaaaaaatacacaattgatttaactgaaagagctgaacaaggcaaactcgatcctgttattggacgtgatgaagagatccgccgaacgatacaagttcttcagcgccgaacaaaaaacaatccggttttaattggtgaaccaggggtaggtaaaaccgcgattgttgaaggtcttgctcaaagaattgttaatggtgaagtacccgaagggttgaaaaataaacgcgttctctctttagatatgggtgctttgctggctggcgctaaatatcggggcgaatttgaagaacgcttaaaggatgtcttaaatgatctggccaaacaagaaggaagtgtgattctgtttatcgatgaattacatactatggttggcgcaggtaaagctgaaggagcaatggatgctggtaatatgttaaaaccagcactagcgcgaggagaattgcattgcgtcggtgcgactacacttgatgaatatcgtcagtatattgaaaaggatgcggcattagagcgtcgtttccagaaagtttatgttgctgaacctaccgttgaggacaccattgcaatattaaggggactgaaagaacgttatgagctgcatcatcatgtacaaataactgaccctgccattgttgctgctgccagtttatcaaatcgttatatttctgatcgtatgcttcctgataaagcaatagatttaattgatgaagctggcgctagcttacgcatgcagatggattctaaaccggaagcgcttgatcgtttagaacgtcgagttactcaattaaaacttgaacaacaagcgctaaaaaaggaatctgatgacgccagtaaaaagcggcttaaaatgttagaggaagaactaacggaaaaagaacgggaatattcagagctagaagaagagtggaaagcggaaaaagcagagcttaccggtacacagcatataaaagcggaattggaaaacgcacgtataagtatggagcaggctcggcgtagcggtgatttagctaaaatgtcagaattgcaatatggtaaaattcctgaattagaaaaacaacttgaagctgccactaaggcggaaagtcacagcatgaagttattgcgcaataaagtaactgatgcagagattgcagaaatattagcgcgctggacaggcattcccgtttcaaaaatgttagaaagtgaacgtgaaaagttactccatatggaacaggatctgcataagcgagtcattggtcagaatgaagctgttgatgcggtatctaatgctattcggcgtagtcgtgctggtttatcagatccaaatcggcctattggctcattcttatttttaggtcctacgggtgttggtaaaaccgagctatgtaaggcactggcaaattttttatttgatagtgacgatgcaatggtacgtattgatatgtccgaatttatggaaaaacatacagtctccaggctagttggtgcacctccaggttatgtaggatatgaagaaggcggttatttaaccgaagccatccgacgtcgcccttattctgttattttgcttgatgaaattgaaaaagcacatcccgatgttttcaatattttattacaagttctggatgatggacgtttgaccgatgggcaaggaagaacggtcgattttcgtaatacagttgtcattatgacatcaaacctaggttcggatttaatccaagagcgttttggtagtttgggttatgacgaaatgaaagagctcgtcatggaagttgtcagccgtagtttccgacccgaatttataaaccgtattgatgaagtagtagtattccatccactcgataaagagcaaattacagaaattgcgcagattcaactatcgcgtttatataaacgaatggaagagcaaggctataaagtaaaaatcacgccagcggcattagaaaaattaggcgaagcgggatttgatccggtatttggtgcacgccctttgaaacgagcgatccaacaagagatagaaaatccattggctgaacagatgttatcaggcaaattagtgccaggcaaacaagtcactttagatattaaaaaaggtgttattgttgctaagcaataa

SEQ ID NO: 7256 - protein, 857 aa, secondary endosymbiont of Glycaspis brimblecombei
MRLDRLTNKFQQALADAQSLAIGQDNQFIEPVHLLIALLDQEGGTLRPLLTSIGVNISQLSNKLNYILNTLPQVHGTAGDIQPSNDLIRHLNLCDKLAQQRGDTFISSELFLLAIFDAKTSLADTLKTMGANKANIEKAIEQMRGGDNVNDQGAEEQRQALKKYTIDLTERAEQGKLDPVIGRDEEIRRTIQVLQRRTKNNPVLIGEPGVGKTAIVEGLAQRIVNGEVPEGLKNKRVLSLDMGALLAGAKYRGEFEERLKDVLNDLAKQEGSVILFIDELHTMVGAGKAEGAMDAGNMLKPALARGELHCVGATTLDEYRQYIEKDAALERRFQKVYVAEPTVEDTIAILRGLKERYELHHHVQITDPAIVAAASLSNRYISDRMLPDKAIDLIDEAGASLRMQMDSKPEALDRLERRVTQLKLEQQALKKESDDASKKRLKMLEEELTEKEREYSELEEEWKAEKAELTGTQHIKAELENARISMEQARRSGDLAKMSELQYGKIPELEKQLEAATKAESHSMKLLRNKVTDAEIAEILARWTGIPVSKMLESEREKLLHMEQDLHKRVIGQNEAVDAVSNAIRRSRAGLSDPNRPIGSFLFLGPTGVGKTELCKALANFLFDSDDAMVRIDMSEFMEKHTVSRLVGAPPGYVGYEEGGYLTEAIRRRPYSVILLDEIEKAHPDVFNILLQVLDDGRLTDGQGRTVDFRNTVVIMTSNLGSDLIQERFGSLGYDEMKELVMEVVSRSFRPEFINRIDEVVVFHPLDKEQITEIAQIQLSRLYKRMEEQGYKVKITPAALEKLGEAGFDPVFGARPLKRAIQQEIENPLAEQMLSGKLVPGKQVTLDIKKGVIVAKQ

SEQ ID NO: 7257 - DNA, 2934 bp, Phaseolus lunatus
  CDS (1)..(2934)
atggctaccagacgaactccgacgctagccaaatcgcttttcgccaccgtaactgcttctagaacctctcgctcccggtccgcgcgacgactcttctccgccataactcgtgcttcggagacttctccgaatgtcctttctcggtctcaggttgtcgacgcacttgcagccaacaatgtcgcctccgccaaattcctctccctctctttcacccgcagcttccacgccactaatccctccctccgctctgctgcaagctctcaggtagcccagactgaattcacagatatggcatgggaggggattcttggggctgttgatgcggctcggattagtaaacagcaaattgtggagtctgagcacttaatgaaagcccttttggagcaaaaggatggcttggcacgaagggtgtttactaagacaggattggacaacacgtctgttctacaggctactgatgattttataccgaagcaacctaaggttactggcgacactactggacctgttataggctcacaccttagctccctcttggacaatgcgcgaaagtacaagaaagaaatgggggatgagtatgtgtctgtggagcacctattgcttgcatttcattcagataagacgtttgggcagcagttgttcaagaatcttcagcttagcgggataactttgaaggatgctgtacaagctgttcgtggaagtcaaagagtgactgatcaaaatccggaggggaaatatgaggcactggataagtatggaaacgatctgactgaacttgctaagcgtggcaagcttgatcctgtcataggtcgagatgatgaaattcggcgctgtatccagatattatcaaggagaacaaaaaacaatccggttattattggtgaacccggtgtgggcaaaactgcaatagctgaaggattagctcaacgtattgtgcgtggtgatgttcctgagccattgatgaacagaaagttgatctccctggatatgggttcattgcttgctggggccaagtatcgtggagattttgaagaaaggttgaaagctgtcctgaaggaagttacagcatcaaatgggcaaataattttgtttattgatgaaattcatactgttgtaggtgcaggggctacaagtggtgcaatggacgccgggaacttgttgaagccaatgcttggaagaggtgaacttagatgtataggagcaactacattaaatgagtatagaaaatatattgaaaaggatcctgcactggagcgtagatttcagcaagtgttttgcagtcaaccatctgttgaagatacaatatccattcttcgtgggttgcgtgaacggtatgagttgcatcatggagtcaaaatatcagatagtgcacttgtttcagctgcagttcttgcagatcgatacattacggagcgctttttacctgacaaagccattgatcttgttgatgaagctgctgcgaagctgaagatggagataacctctaagcctactgaattggatgagatagacagggcaatattgaaattggagatggaaaagctctctttgaaaaatgacactgacaaggcatctaaagaaagattaagtaagctcgaaaatgatttgagtttacttaaacagaagcaaaaagaattggcagaacaatgggacaatgaaaaagtttttatgacacgaataaggtcaatcaaagaagagattgacagagtcaacctagagatggaagctgctgaacgtgattatgacctgaaccgtgctgctgagctcaagtatggaactttgatgtcccttcagcgccaattagaagaagctgaaaagaacctaactgacttccgaaagtctgggaaatctttacttcggagaagaggtcactaccttgatattactgagattgttagcaagtggactggtataccattatcaaacctccaacaaacagagagagaaaaattagtcttgctggaacaggttcttcacaatagagtggttggtcaggatatcgctgtaaaatctgtggctgatgcaattcgccgttcaagggctggattgtctgatccaaaccggccaattgcaagcttcatgttcatgggtccaactggtgttggcaaaactgagcttgccaaggctttggctggttacttgtttaacactgaaaatgctcttgttagaattgatatgagtgagtacatggagaaacatgctgtttcacgtttagttggagcccctcctggttatattggttatgaagaaggaggtcagctgactgaagtggtccggagaagaccctactctgtggtcctatttgatgaaatagagaaggcacatcacgatgtcttcaacatattgttacagttgttggatgatggaaggattactgattcccaaggaaggactgttagcttcacgaattgtgttgtgatcatgacttcaaacattggttcacattttatacttgaaacccttcgtagcacacaagatgataaaactggagtctatgatcagatgaagagacaagttgttgagttggccaggcaaacatttcgtccagagttcatgaatcgcattgacgaatatattgtgttccagcctttggattccgaacagataagcaaaatagtggagctccagatggaacgagtgaaaaacaggcttaagcaaaagaaaattgatcttcatttcacagaagaagctgttaaacatcttggtgtactgggttttgatccaaattttggtgcaagaccagttaagagagtgatacaacagttagttgaaaatgaaattgctatgggagttctaaggggagatttcaaagaagaggactcaattattgtggatgctgatgtggctccatcaggcaaagaacgttctctaaatagactgcttattaagaagttggacagccctgttgcagatgccatggttgtcaatcactaa

SEQ ID NO: 7258 - protein, 977 aa, Phaseolus lunatus
MATRRTPTLAKSLFATVTASRTSRSRSARRLFSAITRASETSPNVLSRSQVVDALAANNVASAKFLSLSFTRSFHATNPSLRSAASSQVAQTEFTDMAWEGILGAVDAARISKQQIVESEHLMKALLEQKDGLARRVFTKTGLDNTSVLQATDDFIPKQPKVTGDTTGPVIGSHLSSLLDNARKYKKEMGDEYVSVEHLLLAFHSDKTFGQQLFKNLQLSGITLKDAVQAVRGSQRVTDQNPEGKYEALDKYGNDLTELAKRGKLDPVIGRDDEIRRCIQILSRRTKNNPVIIGEPGVGKTAIAEGLAQRIVRGDVPEPLMNRKLISLDMGSLLAGAKYRGDFEERLKAVLKEVTASNGQIILFIDEIHTVVGAGATSGAMDAGNLLKPMLGRGELRCIGATTLNEYRKYIEKDPALERRFQQVFCSQPSVEDTISILRGLRERYELHHGVKISDSALVSAAVLADRYITERFLPDKAIDLVDEAAAKLKMEITSKPTELDEIDRAILKLEMEKLSLKNDTDKASKERLSKLENDLSLLKQKQKELAEQWDNEKVFMTRIRSIKEEIDRVNLEMEAAERDYDLNRAAELKYGTLMSLQRQLEEAEKNLTDFRKSGKSLLRRRGHYLDITEIVSKWTGIPLSNLQQTEREKLVLLEQVLHNRVVGQDIAVKSVADAIRRSRAGLSDPNRPIASFMFMGPTGVGKTELAKALAGYLFNTENALVRIDMSEYMEKHAVSRLVGAPPGYIGYEEGGQLTEVVRRRPYSVVLFDEIEKAHHDVFNILLQLLDDGRITDSQGRTVSFTNCVVIMTSNIGSHFILETLRSTQDDKTGVYDQMKRQVVELARQTFRPEFMNRIDEYIVFQPLDSEQISKIVELQMERVKNRLKQKKIDLHFTEEAVKHLGVLGFDPNFGARPVKRVIQQLVENEIAMGVLRGDFKEEDSIIVDADVAPSGKERSLNRLLIKKLDSPVADAMVVNH

SEQ ID NO: 7259 - DNA, 2859 bp, Arabidopsis thaliana
  CDS (1)..(2859)
atggcttggtcgatagctcttcttacacctcctttttttggtcccggaaggcatgtgcaggccaaagaatacagggaaccaagagggtgtgtgatgaagatgagcagtttaaaagcacctgttctgagaattcaggccacagaatacagagaaccaagagggcgtgtgaagatgatgtccagtttacaagcacctcttctgacaattcagagcttctcagggttaagggcccccagtgcattagattatttgggaaggcctagtccaggtttccttgttaagtataaacttgcaaaatcatctgggagagaaaaagctagccgatgtgtacccaaagcaatgtttgagcgttttaccgagaaagcaattaaggtcataatgctgtctcaagaggaagctcggagacttggccataactttgttgggactgagcaaatactgttgggtctaattggagaagggactgggattgccgccaaggttcttaaatccatggggatcaatcttaaagattcacgcgtggaagtagaaaagataattgggagaggcagtggattcgtggcagtggagattccatttactcctcgcgcaaagcgggtgctggagttgtcactagaggaagctcgacaacttgggcataactacattggttcagagcaccttttgcttggtctacttcgtgaaggggagggtgtggcagctcgtgtcttggagaatttgggtgcagatcctagtaatatacggacacaggttatacgtatggtcggggaaaacaatgaagtcacagcaagcgttggtgggggaagcagcggaaacagcaaaatgccaacacttgaagagtatgggactaacttaactaaactagcagaggagggtaaactggatccggttgttggaaggcagccacagatcgaacgaatggtccagatcttggctcgaagaaccaagaacaacccatgtcttattggagaacctggagttggtaagacggcaatagcagaaggacttgcacagcgaatagctagtggtgatgttcctgaaacaatcgaggggaagacggttataacccttgatatgggtcttctagtggctggaacgaaataccgtggagagttcgaggaaagattgaagaagcttatggaggaaatcaggcaaagtgatgagataattctgtttattgatgaagtgcacacgctcatcggtgcaggagccgctgaaggtgcgatcgatgctgctaacatcttaaagccagctctagcaagaggtgaattgcagtgtattggtgcaacaacaattgatgagtacaggaaacacattgagaaagatcctgcattggagagacggttccagcctgtgaaagtacctgaaccaactgtagaagaagctatacagattttgcaaggtctgcgtgagcgctatgagatccaccacaaacttcgatacactgatgaagccttggttgctgctgcacaattgtcacatcagtacatcagtgatcggtttcttcccgacaaagcgattgacttgattgatgaagctgggtctcgggttcgactacgccatgctcagcttcctgaggaagctagagagcttgaaaagcaactcaggcaaatcaccaaagagaagaatgaagctgtgcgaagccaagacttcgagatggctggttctcatcgtgaccgtgaaatagagctcaaggctgagatagctaatgttttatctcgaggcaaagaagtggccaaagccgagaatgaagctgaggaaggaggacctactgtcacagaatctgacatccaacacatcgtcgccacctggacaggaatcccggtagagaaagtctcgtctgatgaatctagccgtcttctccaaatggagcagacccttcacacaagagtcattggccaagatgaagccgttaaagcaatcagtcgggctatccgccgtgcccgtgttgggctcaaaaacccaaaccgtcctatcgccagtttcatcttctctggtccaactggtgttgggaaatcagagcttgctaaggccttggctgcttactacttcggttcagaagaagcaatgatccgtcttgacatgagtgagttcatggaacgacacactgtttcgaaactcatcggttcacctcctggttacgtaggatacacagaaggaggtcagttaacagaggcggttcgacgcaggccctacactcttgttctctttgacgaaattgagaaagcacatcccgatgttttcaacatgatgcttcagatcctagaagacggtagactaactgatagcaaaggaagaactgtcgatttcaagaacacgcttctgatcatgacttcaaacgtagggagcagcgtgatcgaaaaaggtggtagaagaattgggtttgatcttgaccacgacgagaaagacagcagttacaacagaatcaagagcttagtgactgaggaactaaaacagtatttcagaccagagttcttgaacaggttagatgagatgattgttttcagacagttaacaaagctggaagtcaaggagattgctgatataatgcttaaagaagtggtggcgagacttgaggtcaaagagattgagcttcaggtgactgagaggtttaaagagagagtggtggatgaaggattcgacccgagttatggtgcgaggccacttagacgtgcaataatgaggcttttggaggatagtatggcggagaagatgctttcaagggacattaaagaaggagattctgtgattgttgatgttgatgccgaaggaagtgtggttgtgttgagtggtaccactggacgtgttggtggttttgctgctgaagaagccatggaagatcctattccaatattgtag

SEQ ID NO: 7260 - protein, 952 aa, Arabidopsis thaliana
MAWSIALLTPPFFGPGRHVQAKEYREPRGCVMKMSSLKAPVLRIQATEYREPRGRVKMMSSLQAPLLTIQSFSGLRAPSALDYLGRPSPGFLVKYKLAKSSGREKASRCVPKAMFERFTEKAIKVIMLSQEEARRLGHNFVGTEQILLGLIGEGTGIAAKVLKSMGINLKDSRVEVEKIIGRGSGFVAVEIPFTPRAKRVLELSLEEARQLGHNYIGSEHLLLGLLREGEGVAARVLENLGADPSNIRTQVIRMVGENNEVTASVGGGSSGNSKMPTLEEYGTNLTKLAEEGKLDPVVGRQPQIERMVQILARRTKNNPCLIGEPGVGKTAIAEGLAQRIASGDVPETIEGKTVITLDMGLLVAGTKYRGEFEERLKKLMEEIRQSDEIILFIDEVHTLIGAGAAEGAIDAANILKPALARGELQCIGATTIDEYRKHIEKDPALERRFQPVKVPEPTVEEAIQILQGLRERYEIHHKLRYTDEALVAAAQLSHQYISDRFLPDKAIDLIDEAGSRVRLRHAQLPEEARELEKQLRQITKEKNEAVRSQDFEMAGSHRDREIELKAEIANVLSRGKEVAKAENEAEEGGPTVTESDIQHIVATWTGIPVEKVSSDESSRLLQMEQTLHTRVIGQDEAVKAISRAIRRARVGLKNPNRPIASFIFSGPTGVGKSELAKALAAYYFGSEEAMIRLDMSEFMERHTVSKLIGSPPGYVGYTEGGQLTEAVRRRPYTLVLFDEIEKAHPDVFNMMLQILEDGRLTDSKGRTVDFKNTLLIMTSNVGSSVIEKGGRRIGFDLDHDEKDSSYNRIKSLVTEELKQYFRPEFLNRLDEMIVFRQLTKLEVKEIADIMLKEVVARLEVKEIELQVTERFKERVVDEGFDPSYGARPLRRAIMRLLEDSMAEKMLSRDIKEGDSVIVDVDAEGSVVVLSGTTGRVGGFAAEEAMEDPIPIL

SEQ ID NO: 7261 - DNA, 2742 bp, Triticum aestivum
  CDS (1)..(2742)
atgaatcccgacaagttcacgcacaagaccaatgaggcgctcgcggcggcgcacgagatggcgtccgaggccggccacgcgcagctcacgccgctgcacctcgccgcggcgctcgcggcggacaggtcgggcatcctccgccaggccatcgcccacgcgtccggcggcaacgacgccgcggccgagtcgttcgagcgcgtcgcgtccgccgcgctcaagcggctgccctcgcagtccccgccgcccgacaccgtcccggcctccacctcgctggtcaaggccgtccgccgcgcgcagtcggcgcagaagtcgcgcggcgactcgcacctcgccgtcgaccagctgctcatgggcctcctcgaggacccgcagatctccgacgcgctcaaggaggccggcatctccgctgcgcgggtgaaggccgaggtcgagaagctccggggaggcgacaaccggcgcgtggagtccgcgtcgggggacaccaacttccaggccctcaagacgtacggccgcgacctcgtggaggtggcgggcaagctggacccggtcatcggccgcgacgaggagatccggcgcgtggtgcggatcctgtcgcggcgcacaaagaacaaccccgtcctcatcggcgagcccggcgtgggcaagaccgccgtggtggaggggctcgcgcagcgcgtcgtgcgcggcgacgtccccagcaacctcctggacgtgcgcctggtcgcgctcgacatgggcgcgctcgtggccggcgccaagtaccgcggcgagttcgaggagcggctcaaggccgtgctcaaggaggtggaggaggccgaggggaaggtgatactgttcatcgacgagatacacctggtgctcggcgccgggcggacggaggggtcaatggacgcggccaacctgttcaagccgatgctggcgagggggcagctcaggtgcattggcgcgacgaccctcgaggagtacaggaagtacgtcgagaaggacgccgcgttcgagaggcggttccagcaggtgttcgtggcggagcccagcgtcccggacaccgtcagcatactcagagggctcaaggagaagtacgaggggcaccatggcgtgaggattcaggaccgcgcgctcgtcattgccgcgcagctctcgtcgaggtacatcatgggtcgccatttgcctgataaagcaatcgatttggttgacgaggcctgcgcaaatgtgagggtgcaacttgacagccagcctgaagagatcgacaacctcgagaggaagaggatccagttggaagtcgagctccatgccctcgagaaggagaaggacaaggctagcaaagctcggctagttgatgtgaggaaagagttggacgatctgagagacaagctgcagccgctgcagatgaagtatcgcaaggagaaagagaggatcgacgagatcaggagcctgaagcagcgccgcgaagagctgcagttcactctgcaggaggccgagcgccggatggatttggcccgcgtggctgatctcagatacggtgctctgcaggaggttgacgctgccattgctaagctggagggtgagaccggcgagaatttgatgttaacagagactgtcggcccggaccagattgctgaggtggtgagccgctggactggtattcctgtcaccaggctcggacagaatgagaaggcgaggctgatcgggctggcagatcgactgcatcagagggtcgttggacagtatgaggccgtcaatgcagttggagaggctgttctacggtcgagggctggccttggacgcccgcagcagcctactggttcattcctcttccttggaccgaccggtgtcggaaaaaccgagctcgccaaggctctagctgagcagctgtttgatgacgagaacctgctcgtccgcatcgacatgtctgaatacatggagcagcattcggttgcccggctaatcggagccccacctggatatgttggtcatgaagaaggggggcagctgaccgagcaagtgaggaggaggccatacagtgtcatcctcttcgacgaggttgagaaggcgcatgtggcggtgttcaacactctgctccaggtcctggacgatgggcggttgaccgacgggcaaggcaggacggttgattttaggaacacggtgatcatcatgacctcaaaccttggcgcggagcacctcctcgccggaatggtgggcaattcgatgaaggttgctcgtgatctggtcatgcaggaggtgaggaggcatttccgcccggagctgctgaaccgtctggacgagatcgtcatcttcgaccctctgtcgcatgagcagctgcggaaggtcgctcggcttcagatgaaagatgtggcagtccgtcttgccgagaggggcgttgctctggccgtcaccgacgccgccctggacgtcatcctgtcactgtcttacgatccggtctatggcgccaggccaatccggagatggatcgagaagaggatagtgacggagctctccaagatgttgatccgcgaggagatcgacgagaactccacggtgtacatcgacgctgcgcccagcaaggacgagctgacctatggcgtcgacaagcacggagggctggtgaacgcgcgcacgggccacaagtccgacatcctgatccaggttcctagcggagctgttgggggcgatgcggcgcacgccgtgaagaagatgaagatcatgcaggacagcggagaggtggacgacatggaggaagagtag

SEQ ID NO: 7262 - protein, 913 aa, Triticum aestivum
MNPDKFTHKTNEALAAAHEMASEAGHAQLTPLHLAAALAADRSGILRQAIAHASGGNDAAAESFERVASAALKRLPSQSPPPDTVPASTSLVKAVRRAQSAQKSRGDSHLAVDQLLMGLLEDPQISDALKEAGISAARVKAEVEKLRGGDNRRVESASGDTNFQALKTYGRDLVEVAGKLDPVIGRDEEIRRVVRILSRRTKNNPVLIGEPGVGKTAVVEGLAQRVVRGDVPSNLLDVRLVALDMGALVAGAKYRGEFEERLKAVLKEVEEAEGKVILFIDEIHLVLGAGRTEGSMDAANLFKPMLARGQLRCIGATTLEEYRKYVEKDAAFERRFQQVFVAEPSVPDTVSILRGLKEKYEGHHGVRIQDRALVIAAQLSSRYIMGRHLPDKAIDLVDEACANVRVQLDSQPEEIDNLERKRIQLEVELHALEKEKDKASKARLVDVRKELDDLRDKLQPLQMKYRKEKERIDEIRSLKQRREELQFTLQEAERRMDLARVADLRYGALQEVDAAIAKLEGETGENLMLTETVGPDQIAEVVSRWTGIPVTRLGQNEKARLIGLADRLHQRVVGQYEAVNAVGEAVLRSRAGLGRPQQPTGSFLFLGPTGVGKTELAKALAEQLFDDENLLVRIDMSEYMEQHSVARLIGAPPGYVGHEEGGQLTEQVRRRPYSVILFDEVEKAHVAVFNTLLQVLDDGRLTDGQGRTVDFRNTVIIMTSNLGAEHLLAGMVGNSMKVARDLVMQEVRRHFRPELLNRLDEIVIFDPLSHEQLRKVARLQMKDVAVRLAERGVALAVTDAALDVILSLSYDPVYGARPIRRWIEKRIVTELSKMLIREEIDENSTVYIDAAPSKDELTYGVDKHGGLVNARTGHKSDILIQVPSGAVGGDAAHAVKKMKIMQDSGEVDDMEEE

SEQ ID NO: 7263 - DNA, 2709 bp, Pleurotus sajor
  CDS (1)..(2709)
atgtctgttgataatttcgactttaccgacaaagctcgccgcacgatcaccgccgctgtccaactggcaaaggactacgcgaatgcgcaagttcatccagttcatatcgcttcgtctctcttgaatgattcaggagaagaggagcaatcgtcaggaggaggactgggagacgcttcttccaggtcccaatccttattccactcagcaatttcaaaggctggtggtgatccggcagtagttaaacgcgggatacagcgtgcagtcgtcaggctgcctacgcaagatccccctcctgaagaagtttacttcagcgggcctgcgctcaaagtcctgcgagaagcgcagagcttgcagaagacaatgcacgactcgtacatcgctcaggaccatctactcctcgccgccttgaaggacgcgaccattcaagcagttatcaaagaagccgggcttactgaggctaccttgaaaactgccattgaacaagcacgaggaaaccgtcgtatcgaatcgaagacggctgaacaaggttttgatgcccttcaaaaatacgccgtcgacttgaccgctctggcagaggaaggaaagatcgacccagtcattggccgtgacaatgaaattcgtcgcgtcatccgaattctctgccgaagaacgaagaacaatccggttctcatcggtgaacccggtgtaggcaaaacctcgatcgctgagggtctcgctcaaagaatagtcaagagggatgtaccagccagcctgatctctagattatactcgctcgacatgggtgctttaatggcaggcgcgaagtataagggtgaatacgaagagcgtatcaaggctgtcttgaacgaagttgagaaggcatccgaagatggtggcccaggcgttattctctttgctgacgaattgcacctcattatggctggacgtggcgccgaaggaggaggcatggacgctgccaatctcttcaaacctctccttgcgcgtggcaagcttcgatgtattggcgcgacgaccctcgccgaatatcgaaaatacattgaaactgatgcggcactcgaacgtcgattcgcccaagtcttagtaaacgaaccgagcgtgctggaaacgatcagtatccttcgaggcatccgtgagaagtacgaagtccatcatggtgtcaggatattggacggcgcgctgatacaagctgcgacattggcacaccgctacttgacatctcggcgtctgcctgacgctgctattgatctcgtggacgaggcttgtgctagcgtacgtgttaatcgcgaaacggagcccgaggcaatcgacaagcttcagcgcaagaggcttgagcttgagatagaaatccatgccctcgagcgagagaaggatgctgcaagcaaggagcgtctccaagctgcgaagaaagctatttccgacgtagacgaggagctgcaacctctccaggctgcgttccaggcagagaagatgcgaggcgataactcaacgttctgcggcggaagatggacgaactcaaggcgaagattgaagaggctgagcgaagaccgcgacattaccactgcctccgatttgaaattctatgctgtccccgaagttcaagcgcgtatcgagcagctagaagcaaagaaggcagcagaggacgcttccaccggctctgcagctgatgtggtaaccccagaagccattgcagatattgttggacggtggaccaacattcccgtctcgaggctcatgtcttccgaaaaggagaagctgctaaggatggagcggattctcaccgaaaacgtcgttgggcagcccgaggcagtgaaggctgtcgcgaatgccatccggctctctcgcagtgggctcgcaaatgctcaaaggccaattgcaagcttccttttcgcaggccccagtggcacgggcaaaactcttctttccaagacactcgcgacacttctattcgactcgcctgacgctatgatccgaattgatggctccgagtactcagagaagcactccattgctcgtttgatcggagcaccgccagggtacatcggccatgatgcaggaggacaactcacggaatacgttcgccgcaagccttacagtattatcctcattgatgaaatcgagaaggcctgccgagaatttgtcaccctcttcctgcaagtcctcgatgatggcagacttactgatggtcaaggacgtgtcgttgacttcagaaactcggttatcatcatgacatccaacctgggcgccgcctatctcaatgatatgggcgatggacctgttcgtccggagacaagaacactagtcatgggcgccattcaaggtcatttccctcccgagtttgtgaatcgtatcgacgagattgttatcttccgtgcgctttcccagaagaacgtactgaagatcgtggacatccgtctcaaggaggtactcgagcgtcttgctgaacgaaagattacaatcgacatcgacgacgtggcgaagagctacctcagctcagccggatattctcctgcgtacggcgcccgtccactgaatcgggccattcaaagcgaactcttgaaccccttgtcgatcatgatcttgtccgaacaagttcgcttcgacggacctcataatcgtctgaatatcatcccgaatcacgaagccaccgaaacgcaagggatggatgtagattatgacgacgacgatattgaaattgaagagatggattaa

SEQ ID NO: 7264 - protein, 902 aa, Pleurotus sajor
MSVDNFDFTDKARRTITAAVQLAKDYANAQVHPVHIASSLLNDSGEEEQSSGGGLGDASSRSQSLFHSAISKAGGDPAVVKRGIQRAVVRLPTQDPPPEEVYFSGPALKVLREAQSLQKTMHDSYIAQDHLLLAALKDATIQAVIKEAGLTEATLKTAIEQARGNRRIESKTAEQGFDALQKYAVDLTALAEEGKIDPVIGRDNEIRRVIRILCRRTKNNPVLIGEPGVGKTSIAEGLAQRIVKRDVPASLISRLYSLDMGALMAGAKYKGEYEERIKAVLNEVEKASEDGGPGVILFADELHLIMAGRGAEGGGMDAANLFKPLLARGKLRCIGATTLAEYRKYIETDAALERRFAQVLVNEPSVLETISILRGIREKYEVHHGVRILDGALIQAATLAHRYLTSRRLPDAAIDLVDEACASVRVNRETEPEAIDKLQRKRLELEIEIHALEREKDAASKERLQAAKKAISDVDEELQPLQAAFQAEKMRGDNSTFCGGRWTNSRRRLKRLSEDRDITTASDLKFYAVPEVQARIEQLEAKKAAEDASTGSAADVVTPEAIADIVGRWTNIPVSRLMSSEKEKLLRMERILTENVVGQPEAVKAVANAIRLSRSGLANAQRPIASFLFAGPSGTGKTLLSKTLATLLFDSPDAMIRIDGSEYSEKHSIARLIGAPPGYIGHDAGGQLTEYVRRKPYSIILIDEIEKACREFVTLFLQVLDDGRLTDGQGRVVDFRNSVIIMTSNLGAAYLNDMGDGPVRPETRTLVMGAIQGHFPPEFVNRIDEIVIFRALSQKNVLKIVDIRLKEVLERLAERKITIDIDDVAKSYLSSAGYSPAYGARPLNRAIQSELLNPLSIMILSEQVRFDGPHNRLNIIPNHEATETQGMDVDYDDDDIEIEEMD

SEQ ID NO: 7265 - DNA, 2757 bp, Triticum aestivum
  CDS (1)..(2757)
atgaacccggacaacttcacgcacaagaccaacgaggcgctggtggcggcgcacgaggcggcgtcggaggccggccacgcgcagatcacgccgctgcacctggcggcggcgctggcggcggacaagtcgggcatcctgcgccaggccgtcgcgggggcgtccggcgggaacgcgtccgcgggggactcgttcgagcgcgtgctctccggcgcgctcaagaagctgccgtcgcagtcccccccgccggactccgtgccggcctccacggcgctcatcaaggccatccggcgcgcgcagtccgcgcagaagaagcgcggggactcccacctcgccgtcgaccagctgctcatgggcctcctcgaggacgcgcagatcgccgactgcctcaaggaggccggcgtgtccgcctcgcgggtgcgcgccgagctcgagaagctccgcggcggggacaactcgcgcaaggtcgagtccgcctccggcgacaccaacttccaggcgctcaagacgtacggccgcgacctcgtcgaggtggccggcaagctcgaccccgtcatcggccgcgacgaggagatccgccgcgtcgtgcgcatcctctcacgccgcaccaagaacaaccccgtcctcatcggcgagcccggcgtgggcaagacggccgtcgtggagggcctcgcgcagcgcgtcgtgcgcggggacgtgcccagcaacctgctcgacgtccgcctcgtcgcgctcgacatgggcgcgctcgtcgccggcgccaagtaccgcggcgagttcgaggagcggctcaaggccgtgctcaaggaggtggaggaggccgagggcaaggtcatcctcttcatcgacgagatacacctcgtcctcggcgccgggaggacggaggggtccatggacgccgccaacctgttcaagccgatgctcgccaggggccagctccggtgcatcggcgccaccacgctggaggagtaccgcaagtacgtcgagaaggacgccgcgttcgagcggcggttccagcaggtgtacgtggccgagccgagcgtcgccgacaccatcagcatcctgcgagggctcaaggagaagtacgaggggcaccacggcgtgcgcatccaggaccgcgccatcgtcgtcgcggcgcagctctcggcgaggtacatcatgggccggcacctgccggacaaggccatcgacctggtggacgaggcgtgcgccaacgtgagggtgcagctggacagccagccggaggagatcgacaacctggagaggaagcggattcagctggaggtggagctgcacgcgctggagaaggagaaggacaaggccagcaaggcccggctggtggaggtgaggaaggagctggacgacctgagggacaagctgcagccgctgacgatgaagtacaggaaggagaaggagcggatcgacgagatccggaagctgaagcagcggcgcgaggagctgcagttcacgctgcaggaggcggagcggcgcatggacctggcccgcgtcgccgacctcaagtacggcgcgctccaggagatcgacgccgccatcgccaagctggagggcgagaccggcgagaacctgatgctcaccgagaccgtcggccccgagcagatcgcggaggtggtgagccggtggaccggcatcccggtgacccggctcgggcagaacgacaaggagcggctcgtcggcatggcggacaggctgcacacgagggtggtcgggcagacggaggccgtgaacgccgtcgccgaggcggtgctgaggtccagggcggggcttgggcggccgcagcagcccaccgggtcgttcctcttcctgggcccgaccggcgtgggcaagaccgagctcgccaaggccctcgccgagcagctgttcgacgacgagaacctgctcgtccgcatcgacatgtccgagtacatggagcagcactccgtcgcccgcctcatcggagcgccacctggctatgtcgggcacgaggagggcgggcagctgacggagcaggtgaggaggaggccgtacagcgtgatcctgttcgacgaggtggagaaggcgcacgtggcggtgttcaacacgctcctccaggtgctggacgacggccggctgaccgacgggcaaggcaggacggtggacttccggaacaccgtgatcatcatgacctccaacctcggcgccgagcacctcctcgccgggatggtgggcaagaactccatgaaggtcgcgcgcgacctcgtcatgcaggaggtgaggaggcacttcaggccggagctgctgaaccggctggacgagatcgtcgtcttcgacccgctgtcccacgagcagctgaggaaggtcgctcgcctgcagatgaaggacgtggccgtccggctcgccgagcgcggcgtcgccctggccgtcaccgacgctgcgctggacgtcatcctgtctctggcctacgacccggtgtatggcgctcggccgatcaggaggtggatcgagaagcgggtggtgacgcagctgtccaagatgctgatccaggaggagatcgacgagaactgcacggtgtacatcgacgccgccaacaaggacgagctggcctaccgggtggaccgcagcggcgggctggtgaacgccgagacggggcagaggtccgacatcctcatccaggtgcccaacggcgccctcggcggcggcaaaggcggcgaggcggccaaggccgtgaagaagatgcgggtcatggaggacggggacgaggacggcatggacgaagatgtttga

SEQ ID NO: 7266 - protein, 918 aa, Triticum aestivum
MNPDNFTHKTNEALVAAHEAASEAGHAQITPLHLAAALAADKSGILRQAVAGASGGNASAGDSFERVLSGALKKLPSQSPPPDSVPASTALIKAIRRAQSAQKKRGDSHLAVDQLLMGLLEDAQIADCLKEAGVSASRVRAELEKLRGGDNSRKVESASGDTNFQALKTYGRDLVEVAGKLDPVIGRDEEIRRVVRILSRRTKNNPVLIGEPGVGKTAVVEGLAQRVVRGDVPSNLLDVRLVALDMGALVAGAKYRGEFEERLKAVLKEVEEAEGKVILFIDEIHLVLGAGRTEGSMDAANLFKPMLARGQLRCIGATTLEEYRKYVEKDAAFERRFQQVYVAEPSVADTISILRGLKEKYEGHHGVRIQDRAIVVAAQLSARYIMGRHLPDKAIDLVDEACANVRVQLDSQPEEIDNLERKRIQLEVELHALEKEKDKASKARLVEVRKELDDLRDKLQPLTMKYRKEKERIDEIRKLKQRREELQFTLQEAERRMDLARVADLKYGALQEIDAAIAKLEGETGENLMLTETVGPEQIAEVVSRWTGIPVTRLGQNDKERLVGMADRLHTRVVGQTEAVNAVAEAVLRSRAGLGRPQQPTGSFLFLGPTGVGKTELAKALAEQLFDDENLLVRIDMSEYMEQHSVARLIGAPPGYVGHEEGGQLTEQVRRRPYSVILFDEVEKAHVAVFNTLLQVLDDGRLTDGQGRTVDFRNTVIIMTSNLGAEHLLAGMVGKNSMKVARDLVMQEVRRHFRPELLNRLDEIVVFDPLSHEQLRKVARLQMKDVAVRLAERGVALAVTDAALDVILSLAYDPVYGARPIRRWIEKRVVTQLSKMLIQEEIDENCTVYIDAANKDELAYRVDRSGGLVNAETGQRSDILIQVPNGALGGGKGGEAAKAVKKMRVMEDGDEDGMDEDV

SEQ ID NO: 7267 - DNA, 2757 bp, Triticum aestivum
  CDS (1)..(2757)
atgaacccggacaacttcacgcacaagaccaacgaggcgctggtggcggcgcacgaggcggcgtcggaggccggccacgcgcagatcacgccgttgcacctggcggcggcgctggcggcggacaagtcgggcatcctgcggcaggccgtcgcgggggcgtccggcgggaatgcgtccgcgggggactcgttcgagcgcgtgctcgccggcgcgctcaggaagctgccgtcgcagtcgccgccgccggactccgtgccggcctccacggcgctcatcaaggccatccgccgcgcgcagtcggcgcagaagaagcgcggggactcgcacctcgccgtcgaccagctgctcatgggcctcctcgaggacgcgcagatcgccgactgcctcaaggaggccggcgtgtccgcctcgcgggtgcgcgccgagctcgacaagctccgcggcggggacaactcgcgcaaggtcgagtccgccttcggcgacaccaccttccaggcgctcaagacgtacggccgcgacctcgtcgaggtggccggcaagctcgaccccgtcatcggccgcgacgaggagatccgccgcgtcgtgcgcatcctctcgcgccgcaccaagaacaaccccgtcctcatcggcgagcccggcgtcggcaagacggccgtcgtcgagggcctcgcgcagcgcgtcgtgcgcggggacgtgcccagcaacctgctcgacgtccgcctcgtcgcgctcgacatgggcgcgctcgtcgccggcgccaagtaccgcggcgagttcgaggagcggctcaaggccgtgctcaaggaggtggaggaggccgacggcaaggtcatcctcttcatcgacgagatacacctcgtcctcggcgccgggaggacggaggggtccatggacgcggccaacctcttcaagcccatgctcgccaggggccagctccggtgcatcggcgccaccacgctggaggagtaccgcaagtacgtcgagaaggacgccgcgttcgagcgacggttccagcaggtgtacgtggccgagccgagcgtcgccgacaccatcagcatcctgcgagggctcaaggagaagtacgaggggcaccacggcgtgcgcatccaggaccgcgccatcgtcgtcgcggcgcagctctcggccaggtacatcatgggccgccacctgccggacaaggccatcgacctggtggacgaggcgtgcgccaacgtgagggtgcagctggacagccagccggaggagatcgacaatctggagcggaagcggattcagctggaggtggagctgcacgcgctggagaaggagaaggacaaggccagcaaggcccggctggtggaggtgaggaaggagctggacgacctgagggacaagctgcagccgctgaccatgaagtacaggaaggagaaggagcggatcgacgagatccggaagctgaagcagcggcgggaggagctgcagttcacgctgcaggaggccgagcggcgcatggacctggcacgcgtcgccgacctcaagtacggcgccctccaggagatcgacgccgccattgcgaagctggagggcgagaccggcgagaacctgatgctcaccgagaccgtcggccccgagcagatcgcggaggtggtgagccggtggaccggcatcccggtgacccggctcgggcagaacgacaaggagcgcctggtcggcatggcggacaggctgcacacgagggtggtcgggcagacggaggccgtgaacgccgtcgccgaggcggtgctgaggtccagggcggggcttgggcggccgcagcagcccaccgggtcgttcctcttcctgggcccgaccggcgtgggcaagacagagctcgccaaggccctcgccgagcagctgttcgacgacgagaacctgctcgtccgcatcgacatgtccgagtacatggagcagcactccgtcgctcgcctcatcggcgcgccaccaggctatgtcggacacgaggagggcgggcagctgacggagcaggtgaggaggaggccgtacagcgtgatcctgttcgacgaggtggagaaggcgcacgtggcggtgttcaacacgctcctccaggtgctggacgacggccggctgaccgacgggcaaggccggacggtggacttccggaacaccgtgatcatcatgacctccaacctcggcgccgagcacctcctcgccgggatggtgggcaagaactccatgaaggtcgcccgcgacctcgtcatgcaggaggtgaggaggcacttcaggccggagctgctgaaccggctggacgagatggtgatcttcgacccgctgtcccacgagcagctgaggaaggtcgcccgcctgcagatgaaggacgtggccgtccggctcgccgagcgcggcgtcgcactggccgtcaccgacgccgcgctggacgtcatcctgtcgctggcctacgatccagtgtatggcgctcggccgatcaggaggtggatcgagaagagggtggtgacgcagctgtccaagatgctgatccaggaggagatcgacgagaattgcactgtgtacatcgacgccgccgacaaggacgagctggcctaccgggtggaccgcagcggcgggctggtgaacgccgagacggggcagaggtccgacatcctcatccaggtgcccaacggcgccctcggcggcggcggcggcggcgaggcggccaaggccgtgaagaagatgagggtcatggaggacggggacgaggacggcatggacgaagatgtttga

SEQ ID NO: 7268 - protein, 918 aa, Triticum aestivum
MNPDNFTHKTNEALVAAHEAASEAGHAQITPLHLAAALAADKSGILRQAVAGASGGNASAGDSFERVLAGALRKLPSQSPPPDSVPASTALIKAIRRAQSAQKKRGDSHLAVDQLLMGLLEDAQIADCLKEAGVSASRVRAELDKLRGGDNSRKVESAFGDTTFQALKTYGRDLVEVAGKLDPVIGRDEEIRRVVRILSRRTKNNPVLIGEPGVGKTAVVEGLAQRVVRGDVPSNLLDVRLVALDMGALVAGAKYRGEFEERLKAVLKEVEEADGKVILFIDEIHLVLGAGRTEGSMDAANLFKPMLARGQLRCIGATTLEEYRKYVEKDAAFERRFQQVYVAEPSVADTISILRGLKEKYEGHHGVRIQDRAIVVAAQLSARYIMGRHLPDKAIDLVDEACANVRVQLDSQPEEIDNLERKRIQLEVELHALEKEKDKASKARLVEVRKELDDLRDKLQPLTMKYRKEKERIDEIRKLKQRREELQFTLQEAERRMDLARVADLKYGALQEIDAAIAKLEGETGENLMLTETVGPEQIAEVVSRWTGIPVTRLGQNDKERLVGMADRLHTRVVGQTEAVNAVAEAVLRSRAGLGRPQQPTGSFLFLGPTGVGKTELAKALAEQLFDDENLLVRIDMSEYMEQHSVARLIGAPPGYVGHEEGGQLTEQVRRRPYSVILFDEVEKAHVAVFNTLLQVLDDGRLTDGQGRTVDFRNTVIIMTSNLGAEHLLAGMVGKNSMKVARDLVMQEVRRHFRPELLNRLDEMVIFDPLSHEQLRKVARLQMKDVAVRLAERGVALAVTDAALDVILSLAYDPVYGARPIRRWIEKRVVTQLSKMLIQEEIDENCTVYIDAADKDELAYRVDRSGGLVNAETGQRSDILIQVPNGALGGGGGGEAAKAVKKMRVMEDGDEDGMDEDV

SEQ ID NO: 7269 - DNA, 2730 bp, Nicotiana tabacum
  CDS (1)..(2730)
atgaatcctgaaaaattcacccacaagactaacgaggcccttgctggggcactcgagctagcactatccgcagggcatgctcaatttacgcctctgcatatggctgtggccttaatatctgatcacaatggtatttttcgacaagcgattgtcaatgctggtgggaatgaagaagtagctaattcagtggagcgggtattgaatcaagcgatgaagaagctaccttctcaaacaccggctcctgacgaaatcccacctagcacttcccttatcaaggtgttacgccgagcacaatcgtcgcagaagtctcgtggtgacagccatttagcagtggatcagttgattttaggactgctagaagactcccaaattggagatcttttgaaagaagctggagtgagtgcatcaagagtgaaatcagaggtagagaaacttagaggaaaggaaggaagaaaagtcgaaagtgcttcaggggacaccacattccaagcactcaacacttatggccgtgatcttgtggaacaagcaggaaagcttgatcccgtgattggtagggatgaagaaattagaagagtcgttcggattttatcaaggaggactaagaacaacccggttcttattggagagcccggtgtgggtaaaacagcagttgttgaagggctagcacagaggattgtacgtggtgatgttccaagtaatttagctgatgttaggcttatagcattggatatgggagcgctagttgctggagctaagtacagaggtgaatttgaagagaggctgaaggctgtgctgaaagaagttgaagaagcggaagggaaagtaatacttttcattgacgagatacatttagtcctcggtgctggtcggacagaagggtctatggatgctgctaatctgtttaagccaatgctagccagaggtcaattacggtgcattggtgcaactacactcgaggagtacaggaagtatgttgagaaggatgctgcatttgagaggcgtttccagcaggtgtatgttgctgagcctagtgttgctgacactattagtattctccgtgggttgaaggagaggtatgaagggcatcatggtgtcaaaattcaggacagagctcttgtagtggctgcccagctctcatctcggtacattacaggtcgacatctgccagataaggctattgacctagttgatgaagcttgtgcaaatgttagagttcagcttgatagtcaacctgaggaaattgacaatcttgagaggaagagaattcagctagaggttgaacttcacgctctcgagaaggaaaaagacaaagctagcaaagcacgtctcatagaagtgaggaaagaacttgatgatttgagagacaaactccaacctttgatgatgaggtacaagaaagagaaggaaaggatagatgagctgcgcaggctcaagcaaaagcgcgatgagctcatctatgctttacaagaagctgaaaggagatatgatctggcgagggcagcagatctgagatatggggcaattcaagaagtggaaactgcaatagcaaatcttgagagtacctcagctgaaagtacaatgctaacagagactgtgggtcctgatcagattgcggaagttgtgagtcgttggactggtattccggtctcaaggcttggtcagaatgagaaagagaaactgattggtcttggcgatagattgcaccaaagagtggtcgggcaagatcatgcagttagagctgttgctgaagccgtgttaaggtccagagctggtttaggaaggccacagcaaccaactggttcattccttttcttggggccaactggtgttggaaagacagagctcgctaaagctcttgcagagcagctctttgatgatgataaactgatgatcagaatagacatgtccgagtacatggaacaacactctgtttcccggctgattggtgctccaccaggttatgttgggcatgatgagggaggacaacttactgaagctgttaggaggcggccttacagtgttgtgctatttgatgaagttgagaaagcccatcctgcagtgtttaatacattgcttcaagttctggatgatggaaggttaacagatggtcaaggccgcacagttgatttcaccaactccgtgattattatgacttcaaacttgggagcagagtatctgttgtctggattaatgggcaaatgtaccatggagacagctcgtgaaatggtcatgcaggaggtgcgaaagcagtttaagcccgagctgctgaatcggctggatgagattgttgtgtttgatcctctgtcccacaagcagttgaggcaagtatgccgctaccagatgaaggacgttgcactacggctggctgagaggggtattgcattgggcgttactgaggcagctccagatgtcatactcacagagagttatgacccggtttatggtgcaagacctattaggagatggttggagaggaaggtggtgaccgagctatccaagatgctcgtgaaggaggagattgatgagaactcaacggtttacatagatgctggggtcagcgggaaagatctaacctacagggtggagaagaatggagggcttgtgaatgctgccaccgggcaaaaatctgatatattgattcagcttcctaatggtcccaggagtgatgctgtccaagcagtcaagaagatgaggattgaagaaattgaagatgacgaaatggaagattga

SEQ ID NO: 7270 - protein, 909 aa, Nicotiana tabacum
MNPEKFTHKTNEALAGALELALSAGHAQFTPLHMAVALISDHNGIFRQAIVNAGGNEEVANSVERVLNQAMKKLPSQTPAPDEIPPSTSLIKVLRRAQSSQKSRGDSHLAVDQLILGLLEDSQIGDLLKEAGVSASRVKSEVEKLRGKEGRKVESASGDTTFQALNTYGRDLVEQAGKLDPVIGRDEEIRRVVRILSRRTKNNPVLIGEPGVGKTAVVEGLAQRIVRGDVPSNLADVRLIALDMGALVAGAKYRGEFEERLKAVLKEVEEAEGKVILFIDEIHLVLGAGRTEGSMDAANLFKPMLARGQLRCIGATTLEEYRKYVEKDAAFERRFQQVYVAEPSVADTISILRGLKERYEGHHGVKIQDRALVVAAQLSSRYITGRHLPDKAIDLVDEACANVRVQLDSQPEEIDNLERKRIQLEVELHALEKEKDKASKARLIEVRKELDDLRDKLQPLMMRYKKEKERIDELRRLKQKRDELIYALQEAERRYDLARAADLRYGAIQEVETAIANLESTSAESTMLTETVGPDQIAEVVSRWTGIPVSRLGQNEKEKLIGLGDRLHQRVVGQDHAVRAVAEAVLRSRAGLGRPQQPTGSFLFLGPTGVGKTELAKALAEQLFDDDKLMIRIDMSEYMEQHSVSRLIGAPPGYVGHDEGGQLTEAVRRRPYSVVLFDEVEKAHPAVFNTLLQVLDDGRLTDGQGRTVDFTNSVIIMTSNLGAEYLLSGLMGKCTMETAREMVMQEVRKQFKPELLNRLDEIVVFDPLSHKQLRQVCRYQMKDVALRLAERGIALGVTEAAPDVILTESYDPVYGARPIRRWLERKVVTELSKMLVKEEIDENSTVYIDAGVSGKDLTYRVEKNGGLVNAATGQKSDILIQLPNGPRSDAVQAVKKMRIEEIEDDEMED

SEQ ID NO: 7271 - DNA, 2781 bp, Solanum lycopersicum
  CDS (1)..(2781)
atgatggctagagctttagttcagtcaacaaacattctaccttcagttgctggtgaaagggctggacaattcaatggatcccggaaagatcaaagaactgttagaatgctatgtaatgtaaaatgttgttcctcaaggctgaacaattttgcaggactgcgagggtgcaacgcattagatacactactagtaaaatctggagaaactctccattcgaaagtggcagctgcaacttttgtcagacggccacgagggtgccgatttgtcccaaaagcaatgtttgagcggttcactgagaaagcaataaaagtcattatgcttgcccaagaagaggccagacgactaggtcacaactttgttgggacagaacagatcctgctgggtcttattggtgagggaactggtattgctgctaaggttcttaaatccatgggaattaatttgaaagatgctcgtgtggaagtagagaagatcattggcaggggtagtggatttattgcagtggaaatcccttttactcctcgtgcaaagcgtgttctagaactatctctggaggaagcccgccaactagggcataattatattggctccgagcacttgttacttggactgttgcgcgaaggtgaaggtgtggctgcccgtgttcttgaaaacttgggtgctgaccccactaacattcgcacacaggtgatacggatggttggcgagagtagtgaggctgttggtgctagtgttggaggtggaacttctggcctaaagatgcctacattggaggagtacggcaccaatttgacaaagttagctgaagaggggaaactagatcctgtagttggaagacaggctcaaatcgagcgtgttactcaaatcttgggtcgccgtaccaaaaacaacccttgccttattggagaaccaggtgttggaaaaactgctattgccgaagggctagctcaaagaattgctaatggtgatgtccctgaaacaatagaaggaaagaaggtcataacacttgatatgggattgcttgttgctgggacaaaataccgtggagagtttgaggaaagactgaagaaactaatggaggaaattaaacaaagtgatgaaataatactgtttattgatgaagtacacacattgattggagctggagctgcagagggagcaattgatgctgcaaacatcttgaaacctgccctggctagaggcgagctacagtgtattggagccacaaccctggatgagtacagaaagcacattgagaaagaccctgcactagagagaaggttccagccagttaaagtccctgaaccttctgtggatgaaaccatacagatcttgaaagggcttcgggagaggtatgagattcatcacaagctccattacactgatgaggcaatagaggccgctgccaagctttctcaccagtacatcagtgaccgctttctgcctgataaagcaattgacttgattgatgaagctggttcccgtgttcgacttcgtcatgcacagctccctgaggaagcaagagagctggaaaaggagcttcgccagattacaaaggagaaaaatgaagctgtccgcggtcaagattttgagaaggctggggagttgcgtgatagagaaatggatcttaaggcacaaatctcagccttgatagacaaaaacaaagagaagagcaaggcagaatctgaggcaggagatgcagcaggtcccatagtgacagaggcagatattcagcacattgtctcttcctggaccggcattcctgtagagaaggtctcaactgacgaatctgatcgcctcctaaaaatggaagaaacacttcatacccgagtcattggccaggatgaagcagtaaaagccattagtcgcgctatcagacgtgcccgtgttggcctcaagaatcccaaccgacctattgccagtttcatcttttctggtccaactggtgttgggaagtcagaactggcaaagtctttagcaacgtactactttggttctgaagaagcaatgattcggcttgatatgagtgagtttatggaaagacacactgtgtctaaactcatcggttcaccccctgggtatgttggttacactgaaggtggtcaattaactgaagctgttaggcgtcgaccttatacagttgtgctctttgatgagattgagaaggctcatcctgatgtcttcaacatgatgcttcaaattcttgaagatggaagattgacagacagcaaaggcagaactgtcgacttcaagaatacactcctcatcatgacatcgaatgttggaagcagtgtgatagagaaaggaggtcgtcgtataggttttgatctagattttgacgagaaggatagtagttacaaccgtatcaagagcttggtgactgaggagttgaaacagtacttcaggccagagtttttaaacagattgagtgagatgattgtattccgtcagctcactaagttggaggtgaaggagattgccgatatcatgcttaaggaggtctttgtgaggttgaagaataaggagatagaactccaagtgacagagaggtttagagatagggtagttgatgaaggatataacccaagctatggagctagaccattgaggagagctattatgagactgctagaggatagtatggccgagaagatgcttgcaggtgagatcaaagaaggtgattcagtaattgtggatgtggattcagatggcaacgtcaccgttctcaatggcactagtggtgctccctcagattcagctcctgagcctatccttgtgtag

SEQ ID NO: 7272 - protein, 926 aa, Solanum lycopersicum
MMARALVQSTNILPSVAGERAGQFNGSRKDQRTVRMLCNVKCCSSRLNNFAGLRGCNALDTLLVKSGETLHSKVAAATFVRRPRGCRFVPKAMFERFTEKAIKVIMLAQEEARRLGHNFVGTEQILLGLIGEGTGIAAKVLKSMGINLKDARVEVEKIIGRGSGFIAVEIPFTPRAKRVLELSLEEARQLGHNYIGSEHLLLGLLREGEGVAARVLENLGADPTNIRTQVIRMVGESSEAVGASVGGGTSGLKMPTLEEYGTNLTKLAEEGKLDPVVGRQAQIERVTQILGRRTKNNPCLIGEPGVGKTAIAEGLAQRIANGDVPETIEGKKVITLDMGLLVAGTKYRGEFEERLKKLMEEIKQSDEIILFIDEVHTLIGAGAAEGAIDAANILKPALARGELQCIGATTLDEYRKHIEKDPALERRFQPVKVPEPSVDETIQILKGLRERYEIHHKLHYTDEAIEAAAKLSHQYISDRFLPDKAIDLIDEAGSRVRLRHAQLPEEARELEKELRQITKEKNEAVRGQDFEKAGELRDREMDLKAQISALIDKNKEKSKAESEAGDAAGPIVTEADIQHIVSSWTGIPVEKVSTDESDRLLKMEETLHTRVIGQDEAVKAISRAIRRARVGLKNPNRPIASFIFSGPTGVGKSELAKSLATYYFGSEEAMIRLDMSEFMERHTVSKLIGSPPGYVGYTEGGQLTEAVRRRPYTVVLFDEIEKAHPDVFNMMLQILEDGRLTDSKGRTVDFKNTLLIMTSNVGSSVIEKGGRRIGFDLDFDEKDSSYNRIKSLVTEELKQYFRPEFLNRLSEMIVFRQLTKLEVKEIADIMLKEVFVRLKNKEIELQVTERFRDRVVDEGYNPSYGARPLRRAIMRLLEDSMAEKMLAGEIKEGDSVIVDVDSDGNVTVLNGTSGAPSDSAPEPILV

SEQ ID NO: 7273 - DNA, 2772 bp, Solanum lycopersicum
  CDS (1)..(2772)
atggctagagctctagttcagtcaacaagcatcccatcgtcagttgctggtgaaaggacaaccaaattcaatggatctgggaaaacaaaaagagctgttacaatgctatgcaatgcacaatcatcttcacttacactgagggattttacaggattgcgaggatgcaacgcaatagatacactagttagatctggagaaactctccaatccaaagtagctgctgcaacttatgtcagacggccacgaggttgccgatttgtaccaaaagcaatgtttgagcgcttcacagagaaggcgataaaagtcattatgcttgcacaagaagaggccagacgacttggtcacaattttgttggcactgagcagatcttgttgggtctaattggtgagggaactggtattgctgccaaggttcttaaatcgatggggatcaatttgaaagatgctcgtgtggaagtggaaaagataattggaaggggtagtgggtttgttgctgttgagatcccttttacccctcgtgccaagcgtgttctggaactctctctggaggaagcccgccagctagggcataactatattggttcggagcacttgctacttggattgctacgtgaaggtgaaggtgtggctgcccgtgttcttgaaaacttgggtgctgaccccagcaacatccgcactcaggtgatccggatggttggtgagagtaatgaggctgttggtgctagcgttggaggtggaacttctggccaaaaaatgccaacactggaggagtatggaacaaatttgacaaaattggcggaagagggaaaattggaccccgttgttggaagacagccgcaaattgaacgggtcactcaaatcttgggtcggcggactaagaacaacccttgtcttattggtgaaccaggtgttggcaaaacagctattgctgagggtttggcacaaagaattgcaaatggtgatgtccctgaaacaattgaggggaagaaggtgataactcttgatatgggattgcttgttgctggaacaaaataccgtggagagtttgaggaaaggctaaaaaagttgatggaggaaattaagcagagtgatgaaataatactatttatcgatgaagtgcacacattgattggagctggagcagcagagggggccatcgatgctgcaaacatcttgaaacctgccctagctcgaggtgaactacagtgtatcggagctactacactggatgaatacagaaagcatattgagaaagatcctgcactagagaggagattccaaccagttaaggtccctgaacctactgttgatgaaactatacagattctgaaagggcttcgtgagaggtatgaaattcatcacaaacttcgttacactgacgaagacttagtggctgctgctcagctctcataccagtacatcagtgaccgatttctgcctgacaaagcaattgatttgattgatgaagctggttctcgtgttcgacttcgccatgctcagctccccgaggaagcaaaagagctcgagaaagaacttcgtcagataacaaaggagaagaatgaagctgttcgtggtcaagatttcgaaaaggctggggaattacgtgatagagaaatggatctgaaggcacagatcacagccctcatagacaaaaacaaagaggtgagcaaggctgaaagtgaggctgcagatacaggtccacttgtgacagaagcagatattcagcacatcgtctcttcttggactggtatccctgttgagaaggtctccactgacgaatctgaccgtctcctaaaaatggaagaaacacttcacacacgaatcattggccaggatgaagctgtcaaagccattagtcgcgctattcgacgtgcacgagttgggctcaagaatcccaacagacctattgctagtttcatcttttccggtcccactggtgttgggaaatcagaactggcaaaggcactggctgcatattactttggttctgaagaagcaatgatccggcttgatatgagtgagttcatggaaagacacactgtctctaaactcattggatccccccctggttatgttggttacacagagggtggtcaattgactgaagctgttaggcgtcgaccttatacagttgtgctctttgatgagattgagaaggctcatcctgatgtcttcaacatgatgcttcaaattcttgaagatggaagattgacagacagcaagggtagaactgtagatttcaagaacacacttctcatcatgacatcaaatgttggaagtagtgtaattgagaaaggtggccgtcgtataggttttgatctcgaccttgatgagaaggatagcagttacaatcgcatcaagagcttagtgacagaagaattgaagcagtacttcaggccagagtttttgaacagattggatgagatgattgtattccgtcagctcactaagttagaggttaaggagatagctgatatcatgcttaaggaggtctttgagaggttgaaagttaaggagatagaacttcaagtgacagagaggtttagagacagggtggttgacgagggatacaaccctagctatggagcacgacctctgagaagagctattatgagacttttagaggacagcatggctgagaaaatgcttgcaaatgagattaaagaaggtgattcagttatcgtggacgttgattcagatggcaatgtgactgtcctcaatggaagtagtggtactccctcggatccggctcctgagcctatccccgtttag

SEQ ID NO: 7274 - protein, 923 aa, Solanum lycopersicum
MARALVQSTSIPSSVAGERTTKFNGSGKTKRAVTMLCNAQSSSLTLRDFTGLRGCNAIDTLVRSGETLQSKVAAATYVRRPRGCRFVPKAMFERFTEKAIKVIMLAQEEARRLGHNFVGTEQILLGLIGEGTGIAAKVLKSMGINLKDARVEVEKIIGRGSGFVAVEIPFTPRAKRVLELSLEEARQLGHNYIGSEHLLLGLLREGEGVAARVLENLGADPSNIRTQVIRMVGESNEAVGASVGGGTSGQKMPTLEEYGTNLTKLAEEGKLDPVVGRQPQIERVTQILGRRTKNNPCLIGEPGVGKTAIAEGLAQRIANGDVPETIEGKKVITLDMGLLVAGTKYRGEFEERLKKLMEEIKQSDEIILFIDEVHTLIGAGAAEGAIDAANILKPALARGELQCIGATTLDEYRKHIEKDPALERRFQPVKVPEPTVDETIQILKGLRERYEIHHKLRYTDEDLVAAAQLSYQYISDRFLPDKAIDLIDEAGSRVRLRHAQLPEEAKELEKELRQITKEKNEAVRGQDFEKAGELRDREMDLKAQITALIDKNKEVSKAESEAADTGPLVTEADIQHIVSSWTGIPVEKVSTDESDRLLKMEETLHTRIIGQDEAVKAISRAIRRARVGLKNPNRPIASFIFSGPTGVGKSELAKALAAYYFGSEEAMIRLDMSEFMERHTVSKLIGSPPGYVGYTEGGQLTEAVRRRPYTVVLFDEIEKAHPDVFNMMLQILEDGRLTDSKGRTVDFKNTLLIMTSNVGSSVIEKGGRRIGFDLDLDEKDSSYNRIKSLVTEELKQYFRPEFLNRLDEMIVFRQLTKLEVKEIADIMLKEVFERLKVKEIELQVTERFRDRVVDEGYNPSYGARPLRRAIMRLLEDSMAEKMLANEIKEGDSVIVDVDSDGNVTVLNGSSGTPSDPAPEPIPV

SEQ ID NO: 7275 - DNA, 2643 bp, Anabaena sp
  CDS (1)..(2643): transl_table=11
atgcagcctacagatcccaataaatttactgataaagcctgggaagtcattgtcaaatctcaggatatagttcgtgcatatcaacaacaacaactagacgttgaacatttaattcttgctctgatagaagatcctactagtttagctgtgcggattttgggtcgcgcagaaattgacccgattcgcttacaacagcaattagaagcttttacccagcgtcaaaccaaagtaggcaaaagtgaccaactttacctcggtcgtagcttggatgttatgcttgaccgcgccgaggaaattagggagcggatgaaggatggctacatttctgtagaacatatgctcctagcttttgtggatgatgaacgtgttggtaggaaggtactcaaaggttttaatgtagacagtgccaagatagaagcaagtatcaaagccgttcgtggtagccaaaaagtgacagaccaaaacccagaatcccgctatgaagcattacagaaatttggtagggatttaacagaacaggcaaagtcgggtaagttagacccagtgattggacgagatgacgaaattcgtcgggtaattcaggtgttatctcgtcggagtaaaaataatcccgtcttgattggtgaacctggggtgggtaagacagcgatcgctgaagctttggcacagcgtatagttaatggggatgtcccggaatctctgaaaaaccgtcaattaatctctctcgatatcggtagtttgattgctggggcaaaatatcggggtgaatttgaagaccgattaaaagccgtcctccgggaagttacggaatcaaacggtaatattgtattatttattgatgaactacataccgtcgtcggcactggttccaaccaacaaggggcaatggatgcaggtaacttgctcaaacccatgctggcaaggggtgagttgcggtgtattggggcgacaactttagatgagtttcgtaaattcattgaaaaagacgcagctttagaacgacgttttcaacaggtgtacgtagaccaaccgagtgtggaaaatacaatctccattttgcgcgggttgaaggaacgctacgaagtccatcacaatgtgaaaatttccgattccgcactagtagccgcagcaactttatcagctcgttacattgctgaccgcttcctaccagataaagccattgatttagtcgatgaagccgcagcccaattaaaaatggaaatcacttccaaaccagcagacttggaagccattgaccgccgcttgatgcagctagaaatggaaaagctctccttggcgggagaggagaaagtagcagcgcctactaaggaacgtttgcagcgaattgagttagaaatcaccaatttaactgaaaaacagcaggatttaaacaatcaatggcaaggtgaaaagcaggtactagaagccattagtttgttaaagaaagaagaagacgctttaagggtgcagattgagcaagcagaacgggcttacgatttgaataaagcggcgcagttgaagtatggcaaactagaaggagtacagcgcgatcgcgaagctaaagaagcgaaactcttagaactacaaagtcaaggttctaccttgttgcgtgaacaagtcaccgaagccgacatcgccgaaatcgtcgctaagtggacaggtatccccgtaaatcgtctgttggaatcagaacggcaaaaactcctacaactcgaaagccacttacatcaacgggtgataggacaacaggaagccgtggaagcagtatcagccgctattcgtcgcgcccgtgcgggaatgaaagaccccaaccgtcccatcggttcatttctatttatggggccgactggtgtaggtaaaaccgaactcgcccgcgctttagcccagttcctctttgacgctgatgatgctttggtgcgcttggatatgtctgagtacatggaaaaacattctgtctcccgcttagttggcgcgcctcctggttatgtaggctacgaagaaggtgggcaactttccgaagcagtccgccgacatccttattctgtggtgttattggatgaagtcgaaaaagcacaccccgatgtgttcaatattttattgcaagtattagatgatgggagaattactgattcccaaggcagaacagtagattttcgtaataccgtcattgtcatgaccagtaacatcggtagcgaacatattttagacgtttccggtgatgatacccagtatgagacaatgcgaaatcgggtcatggatgccttgcgatcgcacttccgccccgaatttctcaaccgtgttgatgatacaattcttttccacgccctcagccgttctgagatgagccacatcatccgcattcaactaaaacgagtggaaagtctcctcagagatcaaaaaatctcctttgaaatctctccagccgcctgtgatttcctcgtagaaaaaggctatgacccagtttacggcgcacgtcccctaaaacgagccattcagagagaaatcgaaaaccccctcgccaccaaaatcttagaaaatacctttatctccggtgacaccatttacatagaccaagatgaaaacggtttaagtttcactaacaaagcaccagtaaaagtttcggtaacacaaatcacaacctag

SEQ ID NO: 7276 - protein, 880 aa, Anabaena sp
MQPTDPNKFTDKAWEVIVKSQDIVRAYQQQQLDVEHLILALIEDPTSLAVRILGRAEIDPIRLQQQLEAFTQRQTKVGKSDQLYLGRSLDVMLDRAEEIRERMKDGYISVEHMLLAFVDDERVGRKVLKGFNVDSAKIEASIKAVRGSQKVTDQNPESRYEALQKFGRDLTEQAKSGKLDPVIGRDDEIRRVIQVLSRRSKNNPVLIGEPGVGKTAIAEALAQRIVNGDVPESLKNRQLISLDIGSLIAGAKYRGEFEDRLKAVLREVTESNGNIVLFIDELHTVVGTGSNQQGAMDAGNLLKPMLARGELRCIGATTLDEFRKFIEKDAALERRFQQVYVDQPSVENTISILRGLKERYEVHHNVKISDSALVAAATLSARYIADRFLPDKAIDLVDEAAAQLKMEITSKPADLEAIDRRLMQLEMEKLSLAGEEKVAAPTKERLQRIELEITNLTEKQQDLNNQWQGEKQVLEAISLLKKEEDALRVQIEQAERAYDLNKAAQLKYGKLEGVQRDREAKEAKLLELQSQGSTLLREQVTEADIAEIVAKWTGIPVNRLLESERQKLLQLESHLHQRVIGQQEAVEAVSAAIRRARAGMKDPNRPIGSFLFMGPTGVGKTELARALAQFLFDADDALVRLDMSEYMEKHSVSRLVGAPPGYVGYEEGGQLSEAVRRHPYSVVLLDEVEKAHPDVFNILLQVLDDGRITDSQGRTVDFRNTVIVMTSNIGSEHILDVSGDDTQYETMRNRVMDALRSHFRPEFLNRVDDTILFHALSRSEMSHIIRIQLKRVESLLRDQKISFEISPAACDFLVEKGYDPVYGARPLKRAIQREIENPLATKILENTFISGDTIYIDQDENGLSFTNKAPVKVSVTQITT

SEQ ID NO: 7277 - DNA, 2613 bp, Streptomyces avermitilis
  CDS (1)..(2613): transl_table=11
gtggacgccgagctgaccaacaggagccgggacgccatcaacgcggccaccaacagggccgtgtccgaggggcacccggatctcacccccgcgcatttgctgctggcgctgctggggggcaaggacaacgagaacatcacggacctgctggccgcggtcgacgcggaccaggccgccgtgcgcgccggcaccgagcgtgtcctggccaaactgccgagcgtgaccggttccaccgtcgcgcccccgcagcccaaccgcgagctgctcgcggtcgtcgccgacgcgtcgcagagggcacaggacctcggcgacgacttcctgtcgaccgagcatctgctcatcgggatcgccgcgaacggcggcgcggccggcgacgtactctcccagcagggcgccagtgcgaaaaagctgctggaggcgttccagaagaccaggggagggcgccgggtgacgaccccggatcccgagggccagtacaaggcgctcgaaaagttcggtaccgacttcaccgccgccgcgcgggacggcaagctcgaccccgtcatcgggcgggaccaggagatccggcgggtcgtgcaggtgctcagccgccgcaccaagaacaatcccgtcctcatcggtgagcccggcgtcggcaagaccgccgtcgtcgagggactcgcccagcggatcgtgaagggcgacgtcccggagtccctcaagaacaagcggctggtcgcgctcgacctcggcgccatggtggccggggcgaagtaccgcggtgagttcgaggagcggctgaagaccgtgctcgccgagatcaaggactccgacgggcagatcatcaccttcatcgacgagctgcacaccgtcgtgggggccggcgccggcggtgactccgcgatggacgccggcaacatgctcaagcccatgctcgcccgcggcgagctgcgcatggtcggcgccacgacgctcgacgagtaccgcgagcggatcgagaaggacccggcgctggagcggcgcttccagcaggtgctcgtcgccgagccctccgtcgaggacaccatcgcgatcctgcgcgggctcaaggggcgctacgaggcccaccacaaggtgcagatcgcggacagcgccctggtggccgccgcggcgctctccgaccggtacatcacctcccgcttcctgcccgacaaggccatcgacctcgtcgacgaggcggcctcccgcctccgcatggagatcgactcgtccccggtcgagatcgacgaactccagcgtcaggtcgaccggctcaagatggaggagctggcgatcggcaaggagaccgacgccgccagcagggagcgtctggagaagctgcgccgcgacctcgccgacaaggaggaggagctgcgcggactcaccgcccgctgggagaaggagaagcagtccctcaaccgcgtcggtgagctgaaggagaagctcgacgaactgcgcggccaggccgaacgcgcccagcgcgacggcgacttcgacaccgcgtccaagctgctgtacggcgagatcccggccctggaaagggacttggaggaggcctccgaggcggaggaggaagccgcccgggacaccatggtgaaggaggaggtcggccccgacgacatcgcggacgtggtcggctcctggacgggcatcccggccggccggctcctcgagggcgagacgcagaaactcctgcgcatggaggaggagctggggcaccggctcatcgggcagtcggaggccgtgcaggcggtgtccgacgccgtacggcgcacacgagccggaatcgccgacccggaccgcccgaccggttccttcctcttcctcggcccgaccggtgtcggcaagaccgaactcgccaaggccctcgccgacttcctcttcgacgacgagcgggccatggtccgcatcgacatgagcgagtacggcgagaagcacaccgtcgcccggctggtgggcgccccgcccggctatgtcgggtacgaggagggcggccagctcaccgaggccgtgcgccggcgtccgtacagcgtcgtactcctcgacgaggtcgagaaggcgcacccggaggtcttcgacatcctgctccaggtgctggacgacggacgactgacggacggccaggggcggacggtcgacttccgcaacaccatcctgatcctcacctcgaacctgggcagccagttcctgagcgggcacggcccggccgagccgcagacctcggaagaggagaagaagcggcaggtcctggaggtcgtacgggcctccttcaagccggagttcctcaaccggctcgacgacctggtcgtcttctcggcgctgaaccgtcaggagctggagcgcattgccaagctccagatcgaccggctggcccagcggctcgcccagcgtcggctccgcctggaggtcaccgacgcggcgctggcctggctcgcggaggagggcaacgacccggcgtacggcgcccgcccgctgcgccgcctcgtccagaccgccatcggcgaccgcctcgcgaaggagatcctggcgggcgaggtcaaggacggcgacacggtacgggtggacgccttcggtgagggcctgatcgtgggcccggcgaccggcaagacgctgtaa

SEQ ID NO: 7278 - protein, 870 aa, Streptomyces avermitilis
MDAELTNRSRDAINAATNRAVSEGHPDLTPAHLLLALLGGKDNENITDLLAAVDADQAAVRAGTERVLAKLPSVTGSTVAPPQPNRELLAVVADASQRAQDLGDDFLSTEHLLIGIAANGGAAGDVLSQQGASAKKLLEAFQKTRGGRRVTTPDPEGQYKALEKFGTDFTAAARDGKLDPVIGRDQEIRRVVQVLSRRTKNNPVLIGEPGVGKTAVVEGLAQRIVKGDVPESLKNKRLVALDLGAMVAGAKYRGEFEERLKTVLAEIKDSDGQIITFIDELHTVVGAGAGGDSAMDAGNMLKPMLARGELRMVGATTLDEYRERIEKDPALERRFQQVLVAEPSVEDTIAILRGLKGRYEAHHKVQIADSALVAAAALSDRYITSRFLPDKAIDLVDEAASRLRMEIDSSPVEIDELQRQVDRLKMEELAIGKETDAASRERLEKLRRDLADKEEELRGLTARWEKEKQSLNRVGELKEKLDELRGQAERAQRDGDFDTASKLLYGEIPALERDLEEASEAEEEAARDTMVKEEVGPDDIADVVGSWTGIPAGRLLEGETQKLLRMEEELGHRLIGQSEAVQAVSDAVRRTRAGIADPDRPTGSFLFLGPTGVGKTELAKALADFLFDDERAMVRIDMSEYGEKHTVARLVGAPPGYVGYEEGGQLTEAVRRRPYSVVLLDEVEKAHPEVFDILLQVLDDGRLTDGQGRTVDFRNTILILTSNLGSQFLSGHGPAEPQTSEEEKKRQVLEVVRASFKPEFLNRLDDLVVFSALNRQELERIAKLQIDRLAQRLAQRRLRLEVTDAALAWLAEEGNDPAYGARPLRRLVQTAIGDRLAKEILAGEVKDGDTVRVDAFGEGLIVGPATGKTL

SEQ ID NO: 7279 - DNA, 2616 bp, Synechococcus elongatus
  CDS (1)..(2616): transl_table=11
atgcaaccatctaatccaaatcaatttaccgaaaaagcatgggcagcgatcgcccgcacgccggatctggccaagcaggcacagcatcagaatctggaaagtgaacacctgatgaaatcgctgctagagcaagagggactggcgacacaaattttccaaaaggctggctgttcggtgcagcgaattcgggatctgaccgacgagtttattagccgtcagcccaaaatcagtcatcccagcggcgtttaccttggacagagcctcgacaaacttctcgatcgcgccgaagaggcccgcaaacagtttggcgatgagtttatctcaattgagcacttggtgttggcctttgcccaagacgatcgctttggcaagaaactctttcaggacattggccttagcgaaaaagtgctgcgggaagcaattcagcaaattcgtggctcccaaaaagtgacggatcaaaacccagagggtaaatacgcggcactggaaaaatatggccgtgatctgacactcttggctcgccaggggaaactggatccggtgattggccgcgatgatgaaatccgccgcgtgattcagattctctcccgccgcaccaaaaataacccagtactgattggggagccgggggtggggaaaaccgcgattgctgaaggcctggcacagcggattgtggccagggatgtgcccgattccctgcgcgatcgccagttgattgccctggacatgggcgccttaattgccggtgccaagtatcgtggtgaatttgaagagcgcctgaaagctgttcttaaggaagtcacagattccaacggtcaaatcattctctttattgatgagattcacaccgttgttggcgcaggggcaacccaaggagcgatggatgccggcaatctcctcaaacccatgctggcacggggggaactgcgctgcattggcgccaccaccctagatgagtaccgcaaatacattgagaaggatgcggcccttgaacggcgcttccagcaggtctatgtggatcaacccagtgtggaggacaccatctccattttgcggggcctcaaggaacgctatgagatccaccatggtgtcaaaatttccgatacggccttggtggcagcagcgacactctcggcccgctacattagcgatcgcttcttacccgacaaagccattgacttggtggatgaagcggcggccaaattaaaaatggaaatcacctcgaaacctgaggaactcgatgaaattgaccgcaaaatcctgcaattggagatggagcggctctcgctgcaaaaagaaacctcggcggcttcccgcgatcgccttgagaaactcgaaagagagctagccgacctcaaggaggagcaaagccgcctcaatgcccagtggcaagcggaaaaagaagtgattgaccgtctccaatccatcaaagaggagatcgaaaaagtcaacatcgagatccaacaagcggaacgcaactacgaccttaaccgtgccgccgaactcaaatacggtaaactcacagaactccacaaaaaactggcggaagccgaagccaaactgcgggagattcaagtggggggtcgctccctattgcgggatgaggtgaccgaggccgacattgctgaaatcatctccaaatggaccggcatccccgtgagcaaactggtggagtcggaagcccaaaaactgctgcaccttgaagaagagctgcacaaacgggtggttggtcaggatgaggcggtctccgccgtcgccgaggccattcagcgctcccgtgctgggctagcggatcccaatcgtcccattgccagcttcatcttcctggggccaacgggggtcggtaaaacggaattggctaaagccttggccgcctttatgtttgatactgaagaggcgctggtgcgcattgatatgtccgagtacatggaaaaacatgccgtgtctcggttgattggggcaccccctggttatgtgggctatgacgaaggcggtcaactcacggaagcgattcgccgccgtccctatgccgtcgttctcttcgacgagatcgaaaaagcccatcctgatgtcttcaacgtgttcctgcaaattcttgatgatggccgcgtcactgattcccaagggcgcaccgtggactttaagaacacgatcatcatcatgaccagcaatattggttcccagtacattctcgatgtggccggcgatgacagtcgctactcagaaatgtacaaccgcgttatggaggcgatgcgggcccacttccgacccgaattccttaaccgcgtggatgaatttatcatcttccacagcctgcgcaaggatcaattgcggcaaattgttcaattgcaggtgcagcggttgcagcaacgcctgagcgatcgccacattaccttgtccctcactgagaaggcgatcgacttcttggccgaagtgggttacgaccctgtctatggtgcccgtccgctgaaacgggccatccagaaacaactggaaacccccattgccaaagccatcctgcggggcgacttcttcgatggcgatacgattctggtggatgtgggcgaggacgaacgcctcagcttccggcgccaagtggaactcgccaccgtctag

SEQ ID NO: 7280 - protein, 871 aa, Synechococcus elongatus
MQPSNPNQFTEKAWAAIARTPDLAKQAQHQNLESEHLMKSLLEQEGLATQIFQKAGCSVQRIRDLTDEFISRQPKISHPSGVYLGQSLDKLLDRAEEARKQFGDEFISIEHLVLAFAQDDRFGKKLFQDIGLSEKVLREAIQQIRGSQKVTDQNPEGKYAALEKYGRDLTLLARQGKLDPVIGRDDEIRRVIQILSRRTKNNPVLIGEPGVGKTAIAEGLAQRIVARDVPDSLRDRQLIALDMGALIAGAKYRGEFEERLKAVLKEVTDSNGQIILFIDEIHTVVGAGATQGAMDAGNLLKPMLARGELRCIGATTLDEYRKYIEKDAALERRFQQVYVDQPSVEDTISILRGLKERYEIHHGVKISDTALVAAATLSARYISDRFLPDKAIDLVDEAAAKLKMEITSKPEELDEIDRKILQLEMERLSLQKETSAASRDRLEKLERELADLKEEQSRLNAQWQAEKEVIDRLQSIKEEIEKVNIEIQQAERNYDLNRAAELKYGKLTELHKKLAEAEAKLREIQVGGRSLLRDEVTEADIAEIISKWTGIPVSKLVESEAQKLLHLEEELHKRVVGQDEAVSAVAEAIQRSRAGLADPNRPIASFIFLGPTGVGKTELAKALAAFMFDTEEALVRIDMSEYMEKHAVSRLIGAPPGYVGYDEGGQLTEAIRRRPYAVVLFDEIEKAHPDVFNVFLQILDDGRVTDSQGRTVDFKNTIIIMTSNIGSQYILDVAGDDSRYSEMYNRVMEAMRAHFRPEFLNRVDEFIIFHSLRKDQLRQIVQLQVQRLQQRLSDRHITLSLTEKAIDFLAEVGYDPVYGARPLKRAIQKQLETPIAKAILRGDFFDGDTILVDVGEDERLSFRRQVELATV

SEQ ID NO: 7281 - DNA, 2697 bp, Synechocystis sp
  CDS (1)..(2697): transl_table=11
atgcaacctactgatccaaccaaatttactgaacaagcctgggacgccattgttaaatcccaagaagtagcccgtcgttataagaacacaaatttggaagtagagcatattctgctggcgttgttggagcaggatatgggtttggcggcaaggattttccagcgggcggcggtggatggcgagggactacggcaacagttggaaattttcaccaaccggcaacccaagcaggcttatgtagaacaactttacctggggcgtagtttggatgtgatgctagaccgggccgatgccgcccgtagtagctgggaagataaattcatttccgttgaacatttactggtggggtttgcagaggacgaccgggtggggcgcaaaaccctccgcgcgtttaaccttgacccccaggatttagagttggccatcaaagcgattcgaggttcccaaaaggtgacggagccaaatcaagaagaaaaatatgaagcgttggataaatacggacgagatctgacggagcaggcccgccagggtaagctagacccagtgatcggtcgagatgaggaaattcgtcgagttattcaagtactctctcggcgttccaaaaataaccctgtcctgatcggtgaaccgggggtgggcaaaacggcgatcgccgaaggtttggcccaacggattatcaatggcgacgtaccagaatcattaaaaaatcggcagttaatttccctggatatgggcagtttaattgccggggctaaatatcggggggaatttgaagaaagactgcggtcagtgatgaaggaagtgaccaattccgatgggcaaatcatcttattcattgatgaagtccataccgtagtgggagccggtggtcgcgaaggttctgggtccatggatgcagggaatttgctcaagcccatgttagcccggggggagctgcggtgcattggggccaccacattggatgaataccgcaaaaacatcgaaaaagatcctgctttagaaagaagatttcaacaggtttacgtcaagcaacctagcgtggatgatacgatttccatcctgcggggtttgaaggaaaaatatgaagtacaccatggggtcaaaatcaccgactccgccctagtagcagcagctaccctttcccatcgctatatccaagatcgatttttgcccgacaaggcgattgatttagtggacgaagcagccgcccgattaaaaatggaaattacttccaaaccggtggaattagaggatattgaccgacgcttaatgcaactacaaatggaaaaactttccctagaaggggaagaaaaacgtcctggtttaggagctgacaaatcttccaaagaaagactagaaaaaattcagcaggaaattactgaattagagggtcagcaacaggaattatccggtcaatggctgtcggaaaaacagatgctggaagaaattaacaccctcaaagaaaaggagcaagagctaagacttcaggtagaaaaagctgagcgggccactgattgggaaaaggccgccaaaattaagtacggagagttagaagtcctccaacatgacattgaagaaaaagaaagtaaattactagaaattcaaggctccggtaatactcttttgcgggaacaggtaacggaatcggacattgccgaaattgtcgccggttggacgggcatccccatgaaccgtctcatggaaacggaacggcaaaaattattgcaattggaaggtcacctccatcagcgagtgatcggtcagaaggaggcagtagcggcagtttctgcggccatacgtcgggctagggccggcatgaaggaccccagtcgccccattggctcttttctgtttatggggcccacgggggtaggtaaaacggaattggctcgggccttggccgggtttctgtttgacagcgaagaagccatggtgcggattgatatgtccgaatatatggaaaaacacgccgtttcccgtttaattggagctccccccggttacgtgggctacgaggaagggggacaattatcggaagcagtgcgccgtcgtccctattccgttgtgttgttggacgaagtggaaaaagcccatttagacgtgtttaatattttgctgcaggtcttggatgatggccgcattaccgattcccaggggcgggtggtggattttcgcaacaccattatcgtcatgaccagtaacattggcagtgaccatattctcagcctttccgccgatgatgccgactacgacaaaatgcagaaacaggtattacaatccctgcgcaaacatttccgtccggaatttctcaaccgtattgatgatctaattattttccatacgttgaaacgggatgagttgcgtcgcattgtcgtcctacaaattaaacgcatcgagaagttattagacgagcaaaaaatcacgctttctctttccgatgctgccctggatcacatcgtcagtgctggttacgatcccacctacggagcaagacctttaaaacgtgctattcaacgacagttggaaaatcctattgccactaaaatcttagaaaatactttcgttgcaggggacaaaattctcattgattgtgtggatggtcagttaatctttgataaagaaatagagcccacaacattaccagaagagccagaagaaaatatcacagcggtggaagtcgaggttctttcttcataa

SEQ ID NO: 7282 - protein, 898 aa, Synechocystis sp
MQPTDPTKFTEQAWDAIVKSQEVARRYKNTNLEVEHILLALLEQDMGLAARIFQRAAVDGEGLRQQLEIFTNRQPKQAYVEQLYLGRSLDVMLDRADAARSSWEDKFISVEHLLVGFAEDDRVGRKTLRAFNLDPQDLELAIKAIRGSQKVTEPNQEEKYEALDKYGRDLTEQARQGKLDPVIGRDEEIRRVIQVLSRRSKNNPVLIGEPGVGKTAIAEGLAQRIINGDVPESLKNRQLISLDMGSLIAGAKYRGEFEERLRSVMKEVTNSDGQIILFIDEVHTVVGAGGREGSGSMDAGNLLKPMLARGELRCIGATTLDEYRKNIEKDPALERRFQQVYVKQPSVDDTISILRGLKEKYEVHHGVKITDSALVAAATLSHRYIQDRFLPDKAIDLVDEAAARLKMEITSKPVELEDIDRRLMQLQMEKLSLEGEEKRPGLGADKSSKERLEKIQQEITELEGQQQELSGQWLSEKQMLEEINTLKEKEQELRLQVEKAERATDWEKAAKIKYGELEVLQHDIEEKESKLLEIQGSGNTLLREQVTESDIAEIVAGWTGIPMNRLMETERQKLLQLEGHLHQRVIGQKEAVAAVSAAIRRARAGMKDPSRPIGSFLFMGPTGVGKTELARALAGFLFDSEEAMVRIDMSEYMEKHAVSRLIGAPPGYVGYEEGGQLSEAVRRRPYSVVLLDEVEKAHLDVFNILLQVLDDGRITDSQGRVVDFRNTIIVMTSNIGSDHILSLSADDADYDKMQKQVLQSLRKHFRPEFLNRIDDLIIFHTLKRDELRRIVVLQIKRIEKLLDEQKITLSLSDAALDHIVSAGYDPTYGARPLKRAIQRQLENPIATKILENTFVAGDKILIDCVDGQLIFDKEIEPTTLPEEPEENITAVEVEVLSS

SEQ ID NO: 7283 - DNA, 2640 bp, Streptomyces avermitilis
  CDS (1)..(2640): transl_table=11
atggacatgaaccgtctcacccagaagtcccaggaagccctccaggaggcccagaccgcggccggccgcatggggcacaccgaggtcgacggggaacacctgctgctcgcacttctcgatcaggaggacggtctgatcccgcggttgctgcaacaggccggcaccgagccgaaggaactgcgcgcggccgtgcgcgaggaactctcccaccgcccgaaggcgaccggccccggcgcggcacccggccaggtcttcgtcacccagcgcctcgcccggctgctcgacgccgccgagcgggaggccaaacgcctcaaggacgagtacgtgtccgtggagcacctcctgctcgcgctggctgaggagagctcttcgaccgccgccgggctactgctcaaacaggccggcatcaccagggactcgttcctgagcgcgctcacccaggtccgcggcaaccagcgggtcacctccgccaaccccgaagtggcctacgaggctctggagaagtacggccgcgacctggtcctcgaggctcggtccgggcggctggacccggtcatcggccgggacgcggagatccgccgcgtgacccagatcctcagccgcaagaccaagaacaaccccgtcctcatcggcgaccccggcgtcggcaagaccgccatcgtcgagggcctggcccagcgcatcgttcgcggcgacgtccccgagggcctgcgcgacaagacggtgttcgccctcgacatgggctccctggtcgccggcgccaagtaccgcggggagttcgaggaacgcctcaaggccgtgctcagcgaggtcaaggccgccgaggggcggatcctgctcttcgtcgacgaactccacaccgtcgtaggagcgggcgccgcggaaggggccatggacgcgggcaacatgctcaagccgatgctcgcccgcggcgaactccacatgatcggcgccaccaccctcgacgagtaccgcaagcacatcgagaaggacgccgccctcgaacgccgcttccagcaggtcctggtcgacgagccgagcgtggaggacaccatctccatcctgcgcggactgcgcgaacgcctcgaggtcttccacggcgtgaagatccaggacaccgcgctggtctccgcggccaccctcagccaccgctacatcaccgatcggttcctgcccgacaaggccatcgacctcgtcgacgaggcgtgcgcccggctgcgtaccgagatcgactcgatgcccgcggaactcgacgagatcacccgccgcgtcacccgcctggagatcgaggaagcggccctgtccaaggagagcgaccccgccagcaagacccgcctggaggagctgcgcagggaactggccgacctgcgcggcgaggccgacgccaaacacgcccagtgggaggccgaacggcaggcgatccgccgcgtgcaggaactgcgccaggaactggagcaggtccgccacgaggcggaggaggccgaacgcgcctacgacctcaaccgcgccgccgaactccgctacggccgcctccaggacctggagcgccgactcgccgcggaggaggagcaactggccgccaagcaaggggagaaccggctgctgcgcgaggtcgtcaccgaggaggagatcgccgagatcgtcgccgcctggaccggcatccccgtcgcccgcctccaggagggcgaacgcgagaaactgctgcgcctcgacgagatcctgcgcgagcgcgtcatcggccaggacgaagccgtcaaactcgtcaccgacgccatcatccgcgcccgctccggcatccgcgaccctcgccgccccatcggctcgttcatcttcctcggccccaccggcgtcgggaagaccgagctggccaagaccctcgcccggactctgttcgactccgaggagaacatggtccgcctcgacatgagcgaataccaggagcggcacaccgtcagccggctcatgggcgcaccgcccggatacgtcggctacgaggaaggcggccagctcaccgaggccgtacgccgcaagccgtactcggtcgtgctgttcgacgagatcgagaaggcgcacaccgatgtcttcaacaccctgctgcagatcctcgacgacggccgcatcaccgacgcccagggccgcaccgtcgacttccgcaacaccgtgatcatcatgacgtccaacatcggctccgagcaccttctcgacggcgccaccgccgaaggtgagatcaagcccgacgcccgcgccctggtgatgggcgagctgcgcgggcacttccgcccggagttcctcaaccgcgtcgacgacatcgtgctgttcaaaccgctgggtgagcggcagatcgagcggatcgtggaactgcagttcgacgagctgcggcagcggctcgccgaacgccgcatcaccgtcgaactcaccgacgccggccgggaagtgatcgcccaccagggctacgacccggtgtacggggcccggccgctgcgccgctacatctcccacgaggtcgagacactggtcggacgcgccctgctgcgcggcgacgtccaggacggcgcgacggtccgcgtcgacgccgagcacggagagctggtggtcacctacgaccagcccgaggacgtgaagggagcgtgggcggcatga

SEQ ID NO: 7284 - protein, 879 aa, Streptomyces avermitilis
MDMNRLTQKSQEALQEAQTAAGRMGHTEVDGEHLLLALLDQEDGLIPRLLQQAGTEPKELRAAVREELSHRPKATGPGAAPGQVFVTQRLARLLDAAEREAKRLKDEYVSVEHLLLALAEESSSTAAGLLLKQAGITRDSFLSALTQVRGNQRVTSANPEVAYEALEKYGRDLVLEARSGRLDPVIGRDAEIRRVTQILSRKTKNNPVLIGDPGVGKTAIVEGLAQRIVRGDVPEGLRDKTVFALDMGSLVAGAKYRGEFEERLKAVLSEVKAAEGRILLFVDELHTVVGAGAAEGAMDAGNMLKPMLARGELHMIGATTLDEYRKHIEKDAALERRFQQVLVDEPSVEDTISILRGLRERLEVFHGVKIQDTALVSAATLSHRYITDRFLPDKAIDLVDEACARLRTEIDSMPAELDEITRRVTRLEIEEAALSKESDPASKTRLEELRRELADLRGEADAKHAQWEAERQAIRRVQELRQELEQVRHEAEEAERAYDLNRAAELRYGRLQDLERRLAAEEEQLAAKQGENRLLREVVTEEEIAEIVAAWTGIPVARLQEGEREKLLRLDEILRERVIGQDEAVKLVTDAIIRARSGIRDPRRPIGSFIFLGPTGVGKTELAKTLARTLFDSEENMVRLDMSEYQERHTVSRLMGAPPGYVGYEEGGQLTEAVRRKPYSVVLFDEIEKAHTDVFNTLLQILDDGRITDAQGRTVDFRNTVIIMTSNIGSEHLLDGATAEGEIKPDARALVMGELRGHFRPEFLNRVDDIVLFKPLGERQIERIVELQFDELRQRLAERRITVELTDAGREVIAHQGYDPVYGARPLRRYISHEVETLVGRALLRGDVQDGATVRVDAEHGELVVTYDQPEDVKGAWAA

SEQ ID NO: 7285 - DNA, 2664 bp, Synechococcus elongatus
  CDS (1)..(2664): transl_table=11
atgcaaccaacggatccaacaaagtttactgataaagcgtgggaagcgattgttaagtcccaagatgtggcccgggaataccgcagccaatatctggaaacagagcacgtcatgattgccttactgcgggaagagggacttggtcaagtgattcttgagcggtcggatattgacaccgaatgggtgctcaagcgactgatggattttgctaggcaacagccccgcgttcccgcaggcagcgaactctactgtggtcgtagtttggatgcgctccttgatgaggccaatcgcctccgccaagaggaagaagatcaattcatttccattgagcatcttttactggcttttgtgggcgatcgccgcattggtcaacgtcttttccgtgccctaaattgcgatcgccaacagttggctgccaccgtcaaagccattcgcggtgcccaaaaggttttagatcaaaaccccgaaaataaatacgctgcccttgaaaagtacggtcgtgatctcaccgaagcggcccgccaaggcaaactggatccggtcattggccgtgatgaagaaattcgccgcgttattcaagttctctcccgccgcacaaaaaataatccagttctcattggtgaaccgggcgttggtaaaaccgccattgctgaaggtctggctcaacggattatcaacggcgatgtaccagaatccctaaaaaatcggcggttgatttccctggacctggggagtttggtggcgggggccaagtttcgcggtgactttgaagatcgcctcaaggctgttctccacgaagtcacccattccgaaggtcaaattgttctctttattgatgaactgcacacggttgttggcgccggtgcgaatcaaaactcgtcgatggatgccagcaacctcctcaaaccgatgttggcgcggggagagctgcgctgcattggcgccaccaccctagatgaatatcgcaaatatattgagaaagatgctgccttagaacgccgctttcagcaggtgtatattggccagcccagtgtggaggatacgatttcaattctgcgcggcctcaaggatcgctacgaaattcaccacaacgttaaaattaccgattcggcattggtggccgcagcaatgctttcagatcgctatattagcgatcgctacctccccgataaggccattgacctcgtcgatgaggcagccgccaagctcaaaatggaaattaccaccaagcccgctgaactggaggcccttgagcggcgcctgcggcaactggaaatggaaagactgtccctcaaacaggaggagagcctgcccctcagccaggcgccactacaggccactcgcgatcgcctgcagcgcatcgaagcggaaatcgcccaactgcaaccgcgacaacaggccatgcaggcccgctggcaagcagaaaaagaactcctggagcgcatcaacagcctcaaggaagaagaagaccaagtgaagttgcaaattgagcaagcagagcgggactacaacctcaacaaagccgcgcaactcaaatatggtcgtttagaaaccctccaacgggaactggaggccactgaagcacaacttttagaacttcaggccgcagggggcacctttttgcgcgatcaagtcaccgaagctgacattgccgaaattgttgccaagtggacaggaattcccctgcaaaaactcatggcctcagaacgccaaaaactcctgcagttggaacaagtcctccatcagcgggtgattggtcaaagcgatgccgtggctgccgtcgctgctgccatccgccgcgcgcgagctggcatgaaagaccctgcccgtcccattggttcattcctctttatgggacccacaggcgtgggcaaaaccgaactggcccgtgcccttgccgaagccctctttgatgatgaaaatgccttggtgcgcattgatatgtcggagtacatggaaaaacatgccgtctcccgcatgattggcgcaccgccgggatatgttggctttgacagtggcggtcaactcaccgaagccatccgccgtcgtccctatgccgtggttctgtttgatgaggtcgaaaaagcccatcccgaagtctttaatgtgctcttgcaggtgctggatgatggccgcattaccgattcccaagggcggacggtggacttccgcaacaccgtgatcattatgaccagtaacctgggcagtgagcatatcttagatttggcggcggatgacagccgctatgaggaaatgcgccaacgggtgctccaaagtgcccaaaagtattttcgccccgaatttctcaaccgcattgatgacgtgattctcttccacgggctagggcggactgaactggctcagattgctcaaattcaactgcgacgcgtggaaaaactccttgcagatcaaaaaattcacctgcgccttaccccagcagcgctagatcatttagtggcggtgggctttgatccagtctatggggcacgtcctctaaagcgcgcgattcaacgggaattggagaaccccctcgccgtgaagcttcttgaggaggtctttacccccggcgatacgattttggtagatttggtgggtagtgagttgacctttagggcagtgagccctgcagggacaggcgatcgcgacaccgtcagcgcctcctga

SEQ ID NO: 7286 - protein, 887 aa, Synechococcus elongatus
MQPTDPTKFTDKAWEAIVKSQDVAREYRSQYLETEHVMIALLREEGLGQVILERSDIDTEWVLKRLMDFARQQPRVPAGSELYCGRSLDALLDEANRLRQEEEDQFISIEHLLLAFVGDRRIGQRLFRALNCDRQQLAATVKAIRGAQKVLDQNPENKYAALEKYGRDLTEAARQGKLDPVIGRDEEIRRVIQVLSRRTKNNPVLIGEPGVGKTAIAEGLAQRIINGDVPESLKNRRLISLDLGSLVAGAKFRGDFEDRLKAVLHEVTHSEGQIVLFIDELHTVVGAGANQNSSMDASNLLKPMLARGELRCIGATTLDEYRKYIEKDAALERRFQQVYIGQPSVEDTISILRGLKDRYEIHHNVKITDSALVAAAMLSDRYISDRYLPDKAIDLVDEAAAKLKMEITTKPAELEALERRLRQLEMERLSLKQEESLPLSQAPLQATRDRLQRIEAEIAQLQPRQQAMQARWQAEKELLERINSLKEEEDQVKLQIEQAERDYNLNKAAQLKYGRLETLQRELEATEAQLLELQAAGGTFLRDQVTEADIAEIVAKWTGIPLQKLMASERQKLLQLEQVLHQRVIGQSDAVAAVAAAIRRARAGMKDPARPIGSFLFMGPTGVGKTELARALAEALFDDENALVRIDMSEYMEKHAVSRMIGAPPGYVGFDSGGQLTEAIRRRPYAVVLFDEVEKAHPEVFNVLLQVLDDGRITDSQGRTVDFRNTVIIMTSNLGSEHILDLAADDSRYEEMRQRVLQSAQKYFRPEFLNRIDDVILFHGLGRTELAQIAQIQLRRVEKLLADQKIHLRLTPAALDHLVAVGFDPVYGARPLKRAIQRELENPLAVKLLEEVFTPGDTILVDLVGSELTFRAVSPAGTGDRDTVSAS

SEQ ID NO: 7287 - DNA, 2688 bp, Synechococcus sp
  CDS (1)..(2688): transl_table=11
atgcagcccaccgaccccaatcgttttacagaccaagcctgggatgcgatcgtcgaatcgcaaactgtggctcgccaactgcggcaacagcagctggaagtggagcacgtcctcctggccttgctcgatcaggagtcgggggtagctgcagaaattttggcgaaagcaggggtggcagttgccaacctgcggcaacccctcgaagactttgcacgacggcagcctcgcaatgcctcgggtacgcagctctacctaggacgcggcctcgatcgcctgctggacttagcagaacgggcgcgagaactctggcaagacgagttcatcggcgttgagcatttgctgatgggcttcgtggaggacgatcgcatcggtcgtcgcttggcgcagggtctcaaactcgatgccaaaacactcgagacaacgattcaagcgttgcgatcgcccgctgccgatgaggctgaagcagaagagagcgaacccagctatcccttcctcagcaagtacggtcgcgatctgacagcgctggcggaacaggaaaaactcgatccggtgattggccgtgatctggaaattcgtcgcgtcattcaagtgctatcgcggcgcagtaagaacaatcccgtcctgattggtgaaccgggtgtcggcaaaactgcgatcgccgaaggcttggcccagcggattgttgccggtgaagtaccggattcgctcaagcaacggcggctgatcagcctcgatatgggttccctgattgctggtgccaaatatcgcggtgagttcgaggagcggctgcgggcagttctgcacgaggtcacccactccgatggccaaatggtgctgttcatcgacgagctacacaccgtcgtcggagctggggcaggtcagcaaggcagcgccatggatgcgggcaacctgctcaagccgatgctggcgcggggcgaattgcgctgcattggcgcgacaacgaccgatgaatatcgccgcacgatcgagaaggatccagccctcgaacgacgcttccaacaggtctacgtcagccagcccagcgtcgaagacacgatcgcaattctgcgcggcctcaaggaacgctacgagggccaccacggcgtcaagattaccgacggcgctctgatggcagcggctaaactctcccatcgctacatcagcgatcgcttcttgcccgataaagcgatcgacctgatcgacgaagcctcagcgcaactgaagatggagatcacctccaaacccagcgagctggaggatttggaacgacggctcctgcaactggaaatggagcaactgtcacttagcggcgagaacggacaggccagcgttcacagcgatcgccttcagcaaatccagactgagctgcaaacgctgcaagaacagcaagcccgactcaatcaacagtggcagcaggaaaagcaactactggaagaactcggccgcctgcaggaggaagaagaaaccctacgtcagcaggttaatcaggccgaacgcgagcatgacctcaacaaaggtgctgagctgaaatttgggcaactggaagccctgcaacaacagcggcaggcgatcgaggagcagattcaagccctgcacgccaatgggcaaaccttgctgcgcgagcaggtagaagaagccgatattgccgaaatcgtggcgcgttggaccaatattccggtgcaacgtttgctggagtcggagcgccagaagctgctccagctcgaaagtttcttgcaccaacgggtgatcggccaagatgaagcggtcgtcgccgtcgctgcggcgattcggcgagcacgagcggggatgaaagatcccagccgcccgatcgggtcgttcctgttcttggggcccacgggtgtcggtaaaaccgagctagctcgcgccctcgccaactgtctgttcgatgccgaagatgcgctgattcgcttcgacatgtcggagtacatggagaagaattcgatctcgcgcctgattggggcgccccccggctacatcggctacgaagaaggcgggcagctctcagaagccatccggcgccatccctacgcggtagtgttgttcgacgaagtcgagaaagcgcatcccgatgtgtttaacctactgctgcaggtgctcgacgatggccggatcaccgactcgcaaggccgcaccatcgacttctgcaacgccgtgattgtgatgaccagcaacattggcagccagttcatcctggagatgggtgaagaggaagccagcctcgacgcggtggagctgaaagtgctgggagcgctgcggcaacatttccggccagaatttctcaaccggatcgacgacacaatcctgttccaaccgctttctcgcggacagttgcagcagattgtggacatccaattgcagcggctcaaacgactgctggcggagcaggcgatcgctctcaacgtcacaccagcagcggcagccaatctggccgatcgcggctacgaccccgtctacggcgcacgccccctgaagcgggcaatccagcggctaatcgaaaatcccgtcgcttcactgattcttgaacagcaatttgacgccggtgatgcactgatcgtcgatgtcgatgccgagggacagctgcaatttcaagtcagtaaacccgttacagccactgttgtcgagccggatgacagccctgcgatcgcagtggaagccattccctcttag

SEQ ID NO: 7288 - protein, 895 aa, Synechococcus sp
MQPTDPNRFTDQAWDAIVESQTVARQLRQQQLEVEHVLLALLDQESGVAAEILAKAGVAVANLRQPLEDFARRQPRNASGTQLYLGRGLDRLLDLAERARELWQDEFIGVEHLLMGFVEDDRIGRRLAQGLKLDAKTLETTIQALRSPAADEAEAEESEPSYPFLSKYGRDLTALAEQEKLDPVIGRDLEIRRVIQVLSRRSKNNPVLIGEPGVGKTAIAEGLAQRIVAGEVPDSLKQRRLISLDMGSLIAGAKYRGEFEERLRAVLHEVTHSDGQMVLFIDELHTVVGAGAGQQGSAMDAGNLLKPMLARGELRCIGATTTDEYRRTIEKDPALERRFQQVYVSQPSVEDTIAILRGLKERYEGHHGVKITDGALMAAAKLSHRYISDRFLPDKAIDLIDEASAQLKMEITSKPSELEDLERRLLQLEMEQLSLSGENGQASVHSDRLQQIQTELQTLQEQQARLNQQWQQEKQLLEELGRLQEEEETLRQQVNQAEREHDLNKGAELKFGQLEALQQQRQAIEEQIQALHANGQTLLREQVEEADIAEIVARWTNIPVQRLLESERQKLLQLESFLHQRVIGQDEAVVAVAAAIRRARAGMKDPSRPIGSFLFLGPTGVGKTELARALANCLFDAEDALIRFDMSEYMEKNSISRLIGAPPGYIGYEEGGQLSEAIRRHPYAVVLFDEVEKAHPDVFNLLLQVLDDGRITDSQGRTIDFCNAVIVMTSNIGSQFILEMGEEEASLDAVELKVLGALRQHFRPEFLNRIDDTILFQPLSRGQLQQIVDIQLQRLKRLLAEQAIALNVTPAAAANLADRGYDPVYGARPLKRAIQRLIENPVASLILEQQFDAGDALIVDVDAEGQLQFQVSKPVTATVVEPDDSPAIAVEAIPS

SEQ ID NO: 7289 - DNA, 2619 bp, Synechocystis sp
  CDS (1)..(2619): transl_table=11
atgcaacccacagatcctaataaatttacggagaaagcttgggaggcgatcgccaaaacaccggagattgctaaacagcatcgacaacagcaaattgagacggaacacctactcagtgccctactagaacaaaatggtctggccaccagcatctttaataaggctggggcgagcattccccgagttaacgatcaagttaatagctttattgcccaacagccaaaattaagtaatccgagtgaatcgatttatttaggccgcagtctcgataaattgttggacaatgcggaaatagccaagtctaaatatggagacgactatatttccatcgagcacttgatggcggcttacggccaagatgaccgcctgggcaaaaacttatatcgagaaattggcctaacagaaaataagttggcagaaattatcaagcaaattagaggaacccaaaaagtgaccgatcaaaatccagagggcaaatacgaatcccttgaaaaatatgggcgagatttaacggaattagcccgggaaggtaaactagatcctgtcattggccgggatgaagaagtgcggcgcaccattcagatcctttcccgccgcacaaaaaataaccctgtgttaattggggaaccgggggttggtaaaacggcgatcgccgaaggtttagcccaaagaattattaaccatgacgtaccggaatcattgcgggatcgcaaactaatttccctcgatatgggggcgttaattgccggggcaaaataccggggggaatttgaagaaagacttaaagcggtacttaaagaagttaccgacagccaggggcaaattattctctttattgacgaaattcataccgttgtcggcgctggggccacccaaggagccatggatgcgggcaacttattgaaacccatgttagcccggggtgctttgcgttgtatcggggccaccactttagatgaatatcgcaaatatatcgaaaaagatgcggctttggaacgacgtttccaggaagttttagtggatgaacccaatgtattagataccatttccattctccggggattaaaagaacgctatgaagtacaccacggcgtaaaaattgccgatagtgccctggtagcggcggccatgttgtccaatcgttacatcagtgatcgttttctgccggataaagctattgatttagtagacgaagcagcggccaaattaaaaatggaaatcacctccaaaccagaggaattagatgaagttgaccggaaaattctccaactagaaatggagcgtttatctttacaacgggaaaatgattctgcttccaaggagcggctagaaaaattggagaaagagttggctgattttaaagaagaacagtctaaacttaatggccaatggcagtcggaaaaaacggttattgatcaaattcgtactgttaaggaaaccatcgaccaggtgaacctagaaattcaacaggcccaacgggattacgactacaataaagcagcggagttacagtatggcaaattaactgatttacagcggcaagtggaagctttggaaacccaattggcggagcaacaaacctctggcaaatccctcttacgggaagaagttttagagtctgacattgctgaaattatctcgaaatggaccggcattcccatcagtaaattggtggaatcggaaaaagaaaaactgctccacttggaagatgaactacacagccgagtgattggtcaggatgaagcggtaaccgccgtagccgaagccattcaacgctcccgagctggtctttccgatcctaatcgtcccaccgctagctttatttttctgggccccacaggggtcgggaaaactgagttagcgaaggctttggcgaaaaatttattcgacacggaagaagccctggtgcggattgatatgtctgaatatatggaaaaacacgctgtttcccgtttaatgggggcccctccgggctatgtgggctatgaagaagggggacaattgacggaagcaattcgccgccggccctattcggtcattctttttgacgagattgaaaaagcccatggggatgtgtttaacgtcatgctccaaatcctggatgatggccgtttaaccgatgcccaaggccatgtggtggacttcaaaaatacgattatcattatgaccagtaacctgggctcccaatacattttggatgtggcgggggatgatagtcgttatgaagaaatgcggagccgagttatggatgtaatgcgggaaaacttccgcccagaatttctcaatcgggtggatgaaacgattattttccatggcttacaaaaatccgagttacgatccattgtccaaattcaaattcagtctttggctacccgtttggaggaacaaaaattaactttgaagttaacggataaagccctagattttctggctgccgtgggctatgaccccgtttatggggcccgacctttaaaacgagccgtccaaaaatacctagaaacggcgatcgccaagggaattttacggggggattacaaacctggtgagaccattgtggtggatgaaaccgacgaacgcctcagttttaccagtttaaggggggatttagtcatcgtttag

SEQ ID NO: 7290 - protein, 872 aa, Synechocystis sp
MQPTDPNKFTEKAWEAIAKTPEIAKQHRQQQIETEHLLSALLEQNGLATSIFNKAGASIPRVNDQVNSFIAQQPKLSNPSESIYLGRSLDKLLDNAEIAKSKYGDDYISIEHLMAAYGQDDRLGKNLYREIGLTENKLAEIIKQIRGTQKVTDQNPEGKYESLEKYGRDLTELAREGKLDPVIGRDEEVRRTIQILSRRTKNNPVLIGEPGVGKTAIAEGLAQRIINHDVPESLRDRKLISLDMGALIAGAKYRGEFEERLKAVLKEVTDSQGQIILFIDEIHTVVGAGATQGAMDAGNLLKPMLARGALRCIGATTLDEYRKYIEKDAALERRFQEVLVDEPNVLDTISILRGLKERYEVHHGVKIADSALVAAAMLSNRYISDRFLPDKAIDLVDEAAAKLKMEITSKPEELDEVDRKILQLEMERLSLQRENDSASKERLEKLEKELADFKEEQSKLNGQWQSEKTVIDQIRTVKETIDQVNLEIQQAQRDYDYNKAAELQYGKLTDLQRQVEALETQLAEQQTSGKSLLREEVLESDIAEIISKWTGIPISKLVESEKEKLLHLEDELHSRVIGQDEAVTAVAEAIQRSRAGLSDPNRPTASFIFLGPTGVGKTELAKALAKNLFDTEEALVRIDMSEYMEKHAVSRLMGAPPGYVGYEEGGQLTEAIRRRPYSVILFDEIEKAHGDVFNVMLQILDDGRLTDAQGHVVDFKNTIIIMTSNLGSQYILDVAGDDSRYEEMRSRVMDVMRENFRPEFLNRVDETIIFHGLQKSELRSIVQIQIQSLATRLEEQKLTLKLTDKALDFLAAVGYDPVYGARPLKRAVQKYLETAIAKGILRGDYKPGETIVVDETDERLSFTSLRGDLVIV

SEQ ID NO: 7291 - DNA, 2625 bp, Agrobacterium tumefaciens
  CDS (1)..(2625): transl_table=11
atgaatattgataaatactccgagcgcgttcgcggttttctgcaatcggcgcaaacctttgcgctcgccgaaaatcatcagcagttctcgcccgaacatgttctgaaagttctgcttgatgatgagcagggcatggccgcatcgctgatcgagcgtgcgggcggcgacgccaaggaagcgcgtctcgccaatgacgcggcccttgcaaaattgcccaaggtatccggcggcaatggcggcctttcgctgacggctccgctcgccaaggtattttcgaccgcagaagaccttgccaagaaggccggcgacagtttcgtgaccgtcgagcgtcttctgcaggcgcttgcgatcgaaagctccgcttccacctcggcttccctgaaaaaagcgggtgcgaccgcacaggcgctcaatcaggtcatcaacgacattcgcaagggccgcacggccgatagcgccaatgccgaacagggctttgacgcgctgaagaaatatgcgcgcgacctgacggaggaagcccgcgagggtagactcgaccccgtcatcggtcgtgacgacgaaattcgtcgcaccatccaggtcctgtcgcgccgcaccaagaacaatcccgtgctgatcggtgaaccgggcgtcggtaaaacggcgattgccgaaggccttgcgctgcgcatcgtcaatggcgacgtgccggagagcctgaaggacaaaaagctgatggcgctcgatatgggcgcgctgatcgccggtgcgaaatatcgcggtgagttcgaagagcgcctgaaggctgtgctgaacgaggtgcaggccgaaaatggcggcatcatcctgttcatcgatgagatgcacaccctggtcggcgccggcaaggccgatggcgccatggatgcgtccaacctgctgaaacctgcgcttgcccgcggtgagctgcactgcgtcggcgccaccacgctcgatgaatatcgcaagcatgtggagaaggatccagcccttgcccgccgtttccagcccgttctggtggatgaaccgaacgtcgaggatacgatctcgatcctgcgcggtctgaaggaaaaatacgaacagcaccacaaggtccgcatctcggattcggccctggttgcggctgcgacgctttccaaccgttacattaccgaccggtttctgcccgacaaggcaatcgacctgatggacgaggccgcttcgcgtcttcgcatgcaggtggattccaagccggaagaactggacgaactggatcgtcgcatcatccagctgaagatcgagcgcgaagccctgaagcaggaaacggaccagtcctccgtcgaccgtttgaggaagctcgaggacgaactggccgatacggaagaaaaggcagatgcgctgacggcccgctggcaggcggaaaagcagaagctcggccacgccgccgacctgaagaagcggctggatgaagcccgaaacgaactggcaatcgcccagcgcaatggccagttccagcgtgccggcgagttgacctacggcatcattcccggcctcgaaaaggaactggcagcggcggaagcccgcgatagcagcggtgccggttcgatggttcaggaagtggtgacgccggacaatattgcccatgtcgtctcccgctggaccggcattccggtcgacaagatgctggaaggccagcgcgaaaagctgttgcgcatggaagacgagctcgccaagtccgttgtcgggcagggtgaggccgttcaggcggtgtccaaggcggttcgccgttcgcgcgccggcctgcaggatcctaaccggccgatcggttcgttcatctttctcggcccgacgggtgtgggcaagaccgagctgaccaagtcgctcgcccgcttcctgttcgacgacgaaaccgcgatggtccgcctcgatatgtcggaatatatggagaaacactccgttgcccggctgatcggtgcacctccgggctatgtcggctacgaagagggcggtgccctgacggaagcggttcgccgccggccctatcaggtcgtgttgttcgatgagatcgaaaaagcgcatccggatgtcttcaacgtcctgctgcaggtgctggatgatggccgcctgaccgatggccagggccgcaccgtcgatttcaagaacaccatcatcatcatgacctcaaacctcggttcggaattcatgacgcagatgggcgacaacgacgatgtggattcggttcgcgaacttgtcatggaacgggttcggtcgcatttccggccggaattcctcaaccgcatcgacgatatcatcctgttccatcgcctgcggcgtgacgaaatgggtgcgatcgtggaaatccagttgaagcgccttgtctcgcttctggccgatcgcaagatcacgctcgaactggatgaggatgctcgcagctggcttgccaacaagggttacgatccggcttatggtgcgcggccgctgaagcgggtgatccagaaatcggttcaggaccggctggcggaaatgatcctcggcggtgaaatccccgatggttcgcgggtcaaggtaacttcgggcaccgaccggttgctgttcaaggtcaagcccgccaagggtgaggccgagactgaaacggccgatgcggcataa

SEQ ID NO: 7292 - protein, 874 aa, Agrobacterium tumefaciens
MNIDKYSERVRGFLQSAQTFALAENHQQFSPEHVLKVLLDDEQGMAASLIERAGGDAKEARLANDAALAKLPKVSGGNGGLSLTAPLAKVFSTAEDLAKKAGDSFVTVERLLQALAIESSASTSASLKKAGATAQALNQVINDIRKGRTADSANAEQGFDALKKYARDLTEEAREGRLDPVIGRDDEIRRTIQVLSRRTKNNPVLIGEPGVGKTAIAEGLALRIVNGDVPESLKDKKLMALDMGALIAGAKYRGEFEERLKAVLNEVQAENGGIILFIDEMHTLVGAGKADGAMDASNLLKPALARGELHCVGATTLDEYRKHVEKDPALARRFQPVLVDEPNVEDTISILRGLKEKYEQHHKVRISDSALVAAATLSNRYITDRFLPDKAIDLMDEAASRLRMQVDSKPEELDELDRRIIQLKIEREALKQETDQSSVDRLRKLEDELADTEEKADALTARWQAEKQKLGHAADLKKRLDEARNELAIAQRNGQFQRAGELTYGIIPGLEKELAAAEARDSSGAGSMVQEVVTPDNIAHVVSRWTGIPVDKMLEGQREKLLRMEDELAKSVVGQGEAVQAVSKAVRRSRAGLQDPNRPIGSFIFLGPTGVGKTELTKSLARFLFDDETAMVRLDMSEYMEKHSVARLIGAPPGYVGYEEGGALTEAVRRRPYQVVLFDEIEKAHPDVFNVLLQVLDDGRLTDGQGRTVDFKNTIIIMTSNLGSEFMTQMGDNDDVDSVRELVMERVRSHFRPEFLNRIDDIILFHRLRRDEMGAIVEIQLKRLVSLLADRKITLELDEDARSWLANKGYDPAYGARPLKRVIQKSVQDRLAEMILGGEIPDGSRVKVTSGTDRLLFKVKPAKGEAETETADAA

SEQ ID NO: 7293 - DNA, 2601 bp, Bacillus anthracis
  CDS (1)..(2601): transl_table=11
atggacttaaatcaaatgacaacaaaaacacaagaggcgattatgagtgcccaatctttagcggtatctcatcaccatcaagaagtagatactgttcatctcttgtttacattattagaagagcaggatgggctagcagtacgtatttttcaaaaaatgaatgtcgatatagaagcattaaaacaaggcgtagaaaatttaattaagaaaaagccttccgtaacgggaagcggtgcagaagcaggtaaattatatataacaggtgccctgcaacaactgcttgtaagagcaggaaaagaagcagagaaattgcaagatgattacatttcagtggaacatgtattacttgcttttactgaagaaaaaggcgatataagccaattgtttacaagatttcatattacgaaagacaacttattacagtctttaatgacagttcgggggaatcaaagagtgactagccaaaatccagaagcaacttatgaagcgttagaaaaatatggtcgtgatttagtggcggaagtgaaagcagggaaaattgaccctgttatcggccgcgatagtgaaattcgccgcgtaatccgcattctttcacgtaaaacgaaaaataaccctgttttaattggtgagccaggtgttggtaaaacagcaatcgttgaagggttagcacagcgtattgtgaagaaggatgtacctgaaggattaaaagatagaacaatctttgcgttagatatgagtgcgcttgtagctggtgcgaaattccgtggtgagttcgaagagcgtttgcaagctgtattaaatgaaattaaaaagagtgaaggtcgcattttactattcattgatgaacttcacacaatcgtcggcgctggaaaaacagaaggtgcgatggatgcagggaatatgttaaaaccgatgcttgcgcgtggtgaactgcattgtattggggcgacaaccctagatgaatatcgtaaatatattgagaaagatccagcactagaaagacgtttccaacaagtattagcagaagaaccaactgttgaagatacaatttctattttacgtggtttaaaagagcgttttgaaatttatcacggtgtaaatattcatgaccgcgcaattgtagcagcatcagttttatcagatcgatatatttcagatcgtttcttaccggataaagcaattgatcttgttgacgaagcgtgcgcaacaattcgtacagaaattgattctatgccgacagaattagatgaagtaacgcgccgcattatgcagctagaaattgaagaagcggctcttggaaaagagaaggactttggtagccaagaacgcctcaaaacattgcaacgtgaattatcggatttaaaagaagtggcaagtagcatgagagcgaaatgggagaaagaaaaagaagatattcacaaagttcgtgacttacgtgaacatttagagcgtctgcgccgtgaattagaagaagcagaaggtaattacgatttaaatagagcagcggaacttcgccacggaaaaattcctgcaattgaaaaagagttaaaagaagcagaagaaatgggcgcaaataataaacaagaaaatcgtttattacgtgaggaagtaagtgaagaagagattgctgatattgtttcacgctggactggtattcctgtcgcaaaactcgttgaaggtgaacgtgagaaattattacgcttagagcaaattttatcagaacgtgttatcggacaagaggaagcggtaagcttagtatcagatgcagttcttcgtgcgcgcgctggtattaaagacccgaaccgtccaattggttccttcatcttcttaggaccgactggtgttggtaaaacagagcttgccaaaacgttagcacagtctttatttgatagtgaagagcaaatgattcgtatcgatatgtctgagtatatggagaaacacgctgtgtcacgcttaattggtgcccctcctggatatgttggatatgaagagggcggtcaattaacagaagcagtaagacgtaaaccgtattccgttattttattagacgaaatcgaaaaagcgcatccagaagtattcaatattttattacaaatgttagatgacggacgcattacagattcgcaaggtcgtacagtggactttaaaaatacagttattattatgacttcaaatattggatctgctcatttattagatggattagaagaagatggctccattaaagaagaatcaagagaacttgtaatgggacaattgagaggacatttccgaccagagttcttaaaccgcgtcgacgaaattattttattcaaacctcttacaacgaatgaaattaaaggtattgttgataaaattgtaaaagaattacaaggtcgtttagctgaccgtcatattacggtaaaattaacagaagcagcgaaagaatttgttgtagaagctggctttgatccgatgtacggagctcgtccattaaaacgatatgtacagcgtcaagttgaaacgaaattagcgagagaattaattgcaggtacgattactgacaatagtcatgtagtggttgatgtagaaaataacgaattagtcgttcatgtgaaataa

SEQ ID NO: 7294 - protein, 866 aa, Bacillus anthracis
MDLNQMTTKTQEAIMSAQSLAVSHHHQEVDTVHLLFTLLEEQDGLAVRIFQKMNVDIEALKQGVENLIKKKPSVTGSGAEAGKLYITGALQQLLVRAGKEAEKLQDDYISVEHVLLAFTEEKGDISQLFTRFHITKDNLLQSLMTVRGNQRVTSQNPEATYEALEKYGRDLVAEVKAGKIDPVIGRDSEIRRVIRILSRKTKNNPVLIGEPGVGKTAIVEGLAQRIVKKDVPEGLKDRTIFALDMSALVAGAKFRGEFEERLQAVLNEIKKSEGRILLFIDELHTIVGAGKTEGAMDAGNMLKPMLARGELHCIGATTLDEYRKYIEKDPALERRFQQVLAEEPTVEDTISILRGLKERFEIYHGVNIHDRAIVAASVLSDRYISDRFLPDKAIDLVDEACATIRTEIDSMPTELDEVTRRIMQLEIEEAALGKEKDFGSQERLKTLQRELSDLKEVASSMRAKWEKEKEDIHKVRDLREHLERLRRELEEAEGNYDLNRAAELRHGKIPAIEKELKEAEEMGANNKQENRLLREEVSEEEIADIVSRWTGIPVAKLVEGEREKLLRLEQILSERVIGQEEAVSLVSDAVLRARAGIKDPNRPIGSFIFLGPTGVGKTELAKTLAQSLFDSEEQMIRIDMSEYMEKHAVSRLIGAPPGYVGYEEGGQLTEAVRRKPYSVILLDEIEKAHPEVFNILLQMLDDGRITDSQGRTVDFKNTVIIMTSNIGSAHLLDGLEEDGSIKEESRELVMGQLRGHFRPEFLNRVDEIILFKPLTTNEIKGIVDKIVKELQGRLADRHITVKLTEAAKEFVVEAGFDPMYGARPLKRYVQRQVETKLARELIAGTITDNSHVVVDVENNELVVHVK

SEQ ID NO: 7295 - DNA, 2601 bp, Bacillus cereus
  CDS (1)..(2601): transl_table=11
atggacttaaatcaaatgacaacaaaaacacaagaggcgattatgagtgctcaatctttagcggtatctcatcatcatcaagaagtagatactgttcatctcttgtttacattattagaagagcaagatgggctagcagtacgtatttttcaaaaaatgaatgtcgatatagaagcgttaaaacaaggtgctgaaggtttaattaagaaaaagccctctgtaacgggaagcggtgcagaagcaggtaaattatatataacaggtgctttgcaacaactgcttgtaagagcaggaaaagaagcagaaaaattgcaagatgattacatttcagttgaacatgtattacttgcttttactgaagaaaaaggcgatataaaccaattatttacaagatttcatattacgaaagataacttattacagtctttaatgacagttcgggggaatcaaagagtgactagtcaaaatccagaagcaacttatgaagcgttagaaaaatatggtcgtgatttagtggcggaagtaagagcggggaaaattgaccctgttatcggccgcgatagtgaaattcgccgcgtaatccgcattctttcacgtaaaacgaaaaacaacccagttttaattggtgaaccaggtgttggtaaaacagcaatcgttgaagggttagcacagcgtattgtgaaaaaggatgtacctgaaggattaaaagatagaacaatctttgcattagatatgagtgcgcttgtagctggagcgaaattccgcggtgagtttgaggagcgtctccaagctgtattaaatgaaattaaaaagagtgaaggtcgtattttactattcattgatgaacttcacacaatcgtcggcgctggtaaaacagaaggcgcaatggatgcaggaaatatgttaaaaccgatgcttgcgcgtggtgaactgcattgtatcggggcgacgacgttagatgaatatcgtaaatatattgagaaagatccagcgctagaaagacgtttccaacaagtattagcagaagaaccaactgttgaagatacaatttccattttacgtggtttaaaagagcgctttgaaatttatcatggtgtaaatattcatgaccgcgcgattgtagcagcatcagttttatcagatcgatatatttcggaccgtttcttaccagataaagcaattgatcttgtcgatgaagcgtgtgcaacaattcgtacagaaatcgattctatgccgacagaattagatgaagtaacgcgccgcattatgcagctagaaattgaagaagcggctcttggaaaagaaaaggactttggtagccaagaacgtctaaaaacgttgcaacgtgaattatcggatttaaaagaagttgcaagtggtatgagagccaaatgggagaaagaaaaagaagatattcacaaagttcgtgacttacgtgaacatttagagcgtctgcgccgtgaattagaagaagcagaagggaattacgatctaaataaagcagcggaacttcgccacggaaaaattcctgcaattgaaaaagagttaaaagaagcagaagaaatgggcgcgcataataaacaagaaaatcgtttattacgtgaggaagtaagtgaagaagaaattgctgatattgtttcacgttggactggtattcctgttgcaaaacttgttgaaggtgaacgcgagaaattactacgtttagagcaaattttatcagagcgtgtcatcggacaagaggaagcggtaagcttagtatcagacgcagttcttcgtgcgcgcgctggtattaaagacccgaaccgtccaattggttccttcattttcttaggacctactggtgttggtaaaacagaacttgcaaaaacgttagcgcagtcattattcgatagtgaagaacaaatgattcgtattgatatgtctgagtatatggagaaacacgctgtgtcacgcttaattggtgcgcctcctggatatgttggatatgaagagggcggtcaattaacagaagcggtaagacgtaaaccgtattccgttattttattagacgaaatcgaaaaagcacatccagaagtattcaacattttattacaaatgttagatgacggtcgcattacagattcgcaaggacgtacagtagactttaaaaacacggttattattatgacttcaaatattggatctgctcatttattagatggattagaagatgatggctccattaaagaggaatcaagagagcttgttatgggacaattaagaggacatttccgaccagagtttttaaaccgtgtcgacgaaattattttattcaaacctcttacaacgaatgaaattaaaggtattgttgataaaattgtaaaagaattacaaggtcgtttagctgaccgtcacattacggtagaattaacagacgcagcgaaagagtttgttgtcgaagctggcttcgatccgatgtacggagcccgtccattaaaaagatatgtacagcgtcaagttgagacgaaattagcgagagaattaattgcaagtacgattactgacaatagtcatgtagtggttgatgtagaaaataacgagttagttgttcatgtgaagtaa

SEQ ID NO: 7296 - protein, 866 aa, Bacillus cereus
MDLNQMTTKTQEAIMSAQSLAVSHHHQEVDTVHLLFTLLEEQDGLAVRIFQKMNVDIEALKQGAEGLIKKKPSVTGSGAEAGKLYITGALQQLLVRAGKEAEKLQDDYISVEHVLLAFTEEKGDINQLFTRFHITKDNLLQSLMTVRGNQRVTSQNPEATYEALEKYGRDLVAEVRAGKIDPVIGRDSEIRRVIRILSRKTKNNPVLIGEPGVGKTAIVEGLAQRIVKKDVPEGLKDRTIFALDMSALVAGAKFRGEFEERLQAVLNEIKKSEGRILLFIDELHTIVGAGKTEGAMDAGNMLKPMLARGELHCIGATTLDEYRKYIEKDPALERRFQQVLAEEPTVEDTISILRGLKERFEIYHGVNIHDRAIVAASVLSDRYISDRFLPDKAIDLVDEACATIRTEIDSMPTELDEVTRRIMQLEIEEAALGKEKDFGSQERLKTLQRELSDLKEVASGMRAKWEKEKEDIHKVRDLREHLERLRRELEEAEGNYDLNKAAELRHGKIPAIEKELKEAEEMGAHNKQENRLLREEVSEEEIADIVSRWTGIPVAKLVEGEREKLLRLEQILSERVIGQEEAVSLVSDAVLRARAGIKDPNRPIGSFIFLGPTGVGKTELAKTLAQSLFDSEEQMIRIDMSEYMEKHAVSRLIGAPPGYVGYEEGGQLTEAVRRKPYSVILLDEIEKAHPEVFNILLQMLDDGRITDSQGRTVDFKNTVIIMTSNIGSAHLLDGLEDDGSIKEESRELVMGQLRGHFRPEFLNRVDEIILFKPLTTNEIKGIVDKIVKELQGRLADRHITVELTDAAKEFVVEAGFDPMYGARPLKRYVQRQVETKLARELIASTITDNSHVVVDVENNELVVHVK

SEQ ID NO: 7297 - DNA, 2601 bp, Bacillus cereus
  CDS (1)..(2601): transl_table=11
atggacttaaatcaaatgacaacaaaaacacaagaggcgattatgagtgcccaatctttagcggtatctcatcatcaccaagaggtggatactgttcatctattacttgcattattagaagagcaagatggattagcagtacgtatatttcaaaaaatgaatgttgatatagaagcattaaagcaaggtgctgaaagtttaattaaaaagaaaccttctgtaacggggagcggtgcagaagttgggaaattgtatgtaacgagcgctctgcaacaacttcttgtaagagcaggaaaagaagcagaaaaactgcaggatgattacatttcagtagaacatgtattgcttgctttttctgaagaaaaaggcgatataaatcaattatttacaagattgcatattacgaaagataacttattacagtctttaatgacagttcgggggaatcaaagagtgacgagtcaaaatccagaagcaacttatgaagcgttagaaaaatatggccgtgatttagtggcggaagtgagagcagggaaaatcgatcctgtaatcggccgtgatagtgaaatacgacgtgtaattcgtattctttcacgtaaaacgaaaaacaatcctgttttaattggggagccaggtgttggtaaaacagcaatcgttgaagggctagcacagcgtatcgtgaaaaaggatgtacctgaaggattgaaagatagaacgatttttgcgttagatatgagtgcgctcgtagcaggtgcgaaattccgtggtgagttcgaagagcgtctgcaagctgtattaaatgaaattaaaaagagtgaaggacgcattttattattcattgatgaacttcatacaatagttggagcgggtaaaacagagggagccatggatgcaggaaatatgttaaaaccgatgcttgcgcgcggtgaactgcattgtatcggggcgacgacgctcgatgaatatcgcaaatatattgagaaagatccagcgctagaaagacgtttccaacaagtattagcagaagaaccaactgttgaagatacaatttccattttacgtggattaaaagaacgctttgaaatttatcacggtgtaaatattcatgaccgtgcgattgtagcagcgtcagttttatcagatcgatatatttcagatcgcttcttacccgataaagcaattgaccttgttgatgaagcgtgtgcaacaattcgtacagaaattgattctatgccaacagaattagatgaagtaacgcgccgcattatgcagctggaaattgaagaagcggctcttgggaaagaaacggatcgtggtagccaagagcgtctaaaaacattgcaacgtgaattatcggatttaaaagaagttgcaagtggcatgagagcgaaatgggagaaagaaaaagaagacattcacaaagttcgtgacttacgtgaacatttagaacgtttgcgtcgtgaattagaagaagcagaaggcaattacgatttaaataaagcagcggaacttcgtcacgggaaaattcccgcaattgaaaaagagttaaaagaagcggaagaaatgggcgcgcataataaacaagaaaatcgtttattacgtgaggaagtaagtgaagaagaaattgcagatattgtttcacgctggactggtattcctgttgcgaaactcgtggaaggtgaacgcgagaaattattacgcttagagcaaatcttatcagagcgtgtcatcggacaagaggaagcagtaagcttagtgtcagacgcagttcttcgtgctcgcgctggtattaaagatccgaaccgcccgattggttctttcatcttcttaggaccaacaggtgttggtaaaacagaacttgcaaaaacgttagcccagtctttattcgatagtgaagagcaaatgattcgcattgacatgtctgagtatatggaaaaacacgccgtgtctcgcttaattggtgcacctcctggatatgtaggatatgaagaaggcggtcaattaacagaagcggtaagacgtaaaccatattccgttgttttattagatgaaattgaaaaagcacatccagaagtattcaacattttattacaaatgttagatgatggacgcattacagattcgcaaggtcgtacagtggactttaaaaatacagttattattatgacttcaaatattggatctgctcatttactagatggattagaagaagatggttccattaaagaggaatcaagagaccttgtaatggggcaattaagaggacatttccgccctgaatttttaaaccgtgtggatgaaattattttattcaaacctcttacaacgaatgaaattaaaggcattgttgataaaattgtaaaagaactacaaggtcgtctagctgaccgtcacattacagtagaattaacagatgcagcaaaagaatttgttgtggaagcaggtttcgacccaatgtacggagctcgtccattaaaacgatacgtacagcgtcaagtggaaacgaaattagcacgagaattaattgcaggaacaattactgataatagtcacgtagttgttgatgtagaaaataacgagttagtcgttcatgtgaaataa

SEQ ID NO: 7298 - protein, 866 aa, Bacillus cereus
MDLNQMTTKTQEAIMSAQSLAVSHHHQEVDTVHLLLALLEEQDGLAVRIFQKMNVDIEALKQGAESLIKKKPSVTGSGAEVGKLYVTSALQQLLVRAGKEAEKLQDDYISVEHVLLAFSEEKGDINQLFTRLHITKDNLLQSLMTVRGNQRVTSQNPEATYEALEKYGRDLVAEVRAGKIDPVIGRDSEIRRVIRILSRKTKNNPVLIGEPGVGKTAIVEGLAQRIVKKDVPEGLKDRTIFALDMSALVAGAKFRGEFEERLQAVLNEIKKSEGRILLFIDELHTIVGAGKTEGAMDAGNMLKPMLARGELHCIGATTLDEYRKYIEKDPALERRFQQVLAEEPTVEDTISILRGLKERFEIYHGVNIHDRAIVAASVLSDRYISDRFLPDKAIDLVDEACATIRTEIDSMPTELDEVTRRIMQLEIEEAALGKETDRGSQERLKTLQRELSDLKEVASGMRAKWEKEKEDIHKVRDLREHLERLRRELEEAEGNYDLNKAAELRHGKIPAIEKELKEAEEMGAHNKQENRLLREEVSEEEIADIVSRWTGIPVAKLVEGEREKLLRLEQILSERVIGQEEAVSLVSDAVLRARAGIKDPNRPIGSFIFLGPTGVGKTELAKTLAQSLFDSEEQMIRIDMSEYMEKHAVSRLIGAPPGYVGYEEGGQLTEAVRRKPYSVVLLDEIEKAHPEVFNILLQMLDDGRITDSQGRTVDFKNTVIIMTSNIGSAHLLDGLEEDGSIKEESRDLVMGQLRGHFRPEFLNRVDEIILFKPLTTNEIKGIVDKIVKELQGRLADRHITVELTDAAKEFVVEAGFDPMYGARPLKRYVQRQVETKLARELIAGTITDNSHVVVDVENNELVVHVK

SEQ ID NO: 7299 - DNA, 2589 bp, Bacteroides thetaiotaomicron
  CDS (1)..(2589): transl_table=11
atgaactttaacaattttaccatcaaatctcaagaagcggtacaggaggccgtaaatctcgtacaaagtcggggacaacaggcgattgaacctgctcatatcctacatggagtaatgaaggtaggcgaaaatgtgactaacttcatctttcaaaaattaggaatgaacgggcaacaggtagctctagtcgttgacaaacagatcgaatctctgcctaaagtatccggaggagaaccttacctaagcagagaatctaatgaagtattgcagaaggcaacccagtattctaaagaaatgggagatgaatttgtttcattagaacatattctactggctttgctaactgtgaaaagtaccgtatccaccatcttgaaagatgccggaatgacggaaaaagaattgcgtaacgctatcaatgaactcagaaaaggagaaaaagttacttctcaatccagtgaagacaactatcagtcattggagaaatacgctatcaatctgaacgaagccgcccgcagcggcaaactggaccctgtaatcggacgtgacgaagaaatccgacgggtactgcaaatattaagccgccgaaccaagaacaatccgatcttgattggtgaaccgggtacaggtaagacagctatcgtagaaggattggcgcatcgtatcctccggggagacgtacccgaaaacctgaaaaacaaacaggtctactctctcgatatgggagcattggttgcaggagcaaaatataaaggagaattcgaagagcgactaaaatcagtagtcaatgaggttaagaaatcagaaggtgatataatcttgtttattgatgagattcatacactggtaggcgccggcaaaggcgaaggagcaatggatgctgcaaatattctgaaaccggcattggcacgtggagaactacgttcgatcggtgcaaccactctcgacgaatatcagaagtatttcgagaaagataaagcattggaacgtcgtttccagattgtacaggtagatgaaccggatactctgagtaccatttccatccttcgtggattgaaagaacgctacgagaaccatcatcatgtacgtatcaaagacgatgccatcatagcagctgtagaactgagcagccgttacatcactgaccgtttcttgccggacaaagcaatcgacctgatggatgaagcagcagccaaactacgtatggaagtagattccgttccagaagaattggatgaaatctcacgtaagatcaaacagttagaaatcgaacgtgaagccattaagcgtgaaaatgataagccgaaactggaaattatcggcaaagaactggccgaactaaaagaagttgagaagtccttcaaagctaaatggcaaagtgaaaaaacgctgatggataaaatccagcaaaacaaagtggaaatagagaatctgaagttcgaggcagagaaagcggaacgtgaaggagactatggaaaagttgccgaaatccgttacggaaagctccaggctttggacaaagagatagaagatacgcaggagaaacttcgtggtatgcaaggtgataaagccatgatcaaagaagaagtggatgctgaagacatcgctgacgttgtttcacgctggacgggcatccctgtcagcaaaatgatgcaaagtgagaaagataaattattgcatttggaagacgaactccatcaacgagtgattggacaggacgaagcaattgaagcggttgcagatgccgtacgtcgtagccgtgccggattacaggatcccaaacgcccgatcggttcttttattttccttggaacgaccggtgtcggtaaaactgaactggcaaaggcattggcggaattcctctttgacgatgaatcgatgatgacacgtatagatatgagcgagtatcaagaaaagcatagtgtttctcgtttggtcggagcacctccgggatacgttggatacgatgaaggcggccagctgacagaagccattcgccggaaaccttactcagttgttttgtttgacgaaatagaaaaagcgcatccggatgttttcaatatcctgttgcaagtactggatgacggacgactcactgacaacaaaggaagagtagtcaacttcaaaaacaccatcatcatcatgacttcaaatatgggaagttcttatatacaaagtcagatggagaaactgagcggttcaaataaggaagaagttatcgaagaaacgaagaaggaagtgatgaatatgctaaagaaaaacattcgtccggaattcctgaatcgtattgatgaaacaatcatgttcctgccgctgacggaaactgaaatcagacaaattgtactcttacaaatcaaaggtgtacaaaagatgcttgcagaaaacggagttgaactggaaatgacagatgctgctttgaatttcttatcccaggtaggatatgatcctgaatttggagcccgtccggtaaaaagagctatccagcgttatttactgaacgatctgtcgaaaaagttattgtctcaggaagtcgacagaagcaaagcaatcattgttgactcaaacggagacggattagtattcagaaactaa

SEQ ID NO: 7300 - protein, 862 aa, Bacteroides thetaiotaomicron
MNFNNFTIKSQEAVQEAVNLVQSRGQQAIEPAHILHGVMKVGENVTNFIFQKLGMNGQQVALVVDKQIESLPKVSGGEPYLSRESNEVLQKATQYSKEMGDEFVSLEHILLALLTVKSTVSTILKDAGMTEKELRNAINELRKGEKVTSQSSEDNYQSLEKYAINLNEAARSGKLDPVIGRDEEIRRVLQILSRRTKNNPILIGEPGTGKTAIVEGLAHRILRGDVPENLKNKQVYSLDMGALVAGAKYKGEFEERLKSVVNEVKKSEGDIILFIDEIHTLVGAGKGEGAMDAANILKPALARGELRSIGATTLDEYQKYFEKDKALERRFQIVQVDEPDTLSTISILRGLKERYENHHHVRIKDDAIIAAVELSSRYITDRFLPDKAIDLMDEAAAKLRMEVDSVPEELDEISRKIKQLEIEREAIKRENDKPKLEIIGKELAELKEVEKSFKAKWQSEKTLMDKIQQNKVEIENLKFEAEKAEREGDYGKVAEIRYGKLQALDKEIEDTQEKLRGMQGDKAMIKEEVDAEDIADVVSRWTGIPVSKMMQSEKDKLLHLEDELHQRVIGQDEAIEAVADAVRRSRAGLQDPKRPIGSFIFLGTTGVGKTELAKALAEFLFDDESMMTRIDMSEYQEKHSVSRLVGAPPGYVGYDEGGQLTEAIRRKPYSVVLFDEIEKAHPDVFNILLQVLDDGRLTDNKGRVVNFKNTIIIMTSNMGSSYIQSQMEKLSGSNKEEVIEETKKEVMNMLKKNIRPEFLNRIDETIMFLPLTETEIRQIVLLQIKGVQKMLAENGVELEMTDAALNFLSQVGYDPEFGARPVKRAIQRYLLNDLSKKLLSQEVDRSKAIIVDSNGDGLVFRN

SEQ ID NO: 7301 - DNA, 2568 bp, Bdellovibrio bacteriovorus
  CDS (1)..(2568): transl_table=11
atgacgcgaaaaagccaggaggccatgcaggccgccgcgagattggctgagcgcaaaagcagcccctctgtagagccggaacaccttctgatggagctggtgcagcagaccgaaggcatagttccgcgcattctcgacaaattgaatgttcctcaggcccagttccttgcggaattgcggaccaaaattgataaattccctcaggtgacgggcggcgggcaaaagatgtttgccagccctcgccttgaaaagatctttcaggcggccgaaaccgaagctcaggagtggggtgattcctatatctccaccgagcacttctttatggccatgcttaaaggcggggactctgagctgaacgggctgtttaagaaaaacaaagtcacggcggaggcggcacgcacggccctgactgaaattcgcggaaaacaaaaagtgacggatgatgatcctgaaaacaagtacgaggttctgaacaagtatgcccgtgatctgaccgctttggcggccgagggcaagctggatccggtggtggggcgtgatgaagaaatccgccgtgtggtgcaggttctttcccgtcgcaccaaaaacaacccggtccttattggggagcctggggtgggtaaaaccgccattgccgaaggcctggctttgcgtatcatcaaacaggacgtgccggacaatctgattggcaaaaaactgatgtccctggatatgggggcgttgatcgcgggcgctaagtaccgcggggaatttgaggaccgtctgaaagcggtgatcaaagaagtcacctccagtgatggccagattattctgttcatcgacgaactgcacaccctggtgggcgcgggtaaaaccgagggcgccatggatgcagggcagttgctgaagccggccctggcgcgcggtgaattgcgctgtattggtgccaccactttggatgagtatcgcaagtacatcgaaaaggatgcggctttggaaagacgcttccagactgtgatggtcgaggaaccaagtgttgaagacgccatcaccatcttgcgtggcctgaaggaaaagtacgaagtccaccacggtattcgcatcacggatgcggccttggtgtcggcggtgaaattgtctcatcgttacatcaccaaccgtttcctgccggacaaggcgatcgatttgatcgacgaagcggccagcaagctgggtattgaaacccgctcggtgccggaagaagtcgacaagatcgaacgcgagctgatgcagttgcgcattgaaaaagaggcgctgaaaaaagaaaaagacgaaagcgcccgcgagcgtctggcggtgattgataaagaaatcaccgagctgaacgccaagaaccagttgctgcgggaacaatgggaatttgaaaaaggcggcattgagggcattaaaaaactcaaagccgacatcgaggacctgaaggtggccgtggctaaagccgagcgcgagggcgatctgggcaaggcggccgaactgaaatacggaaagcttcctgaggccgagaaaaaactcaaagccctggaggagcgcagcaaggaaggcgcgaaatcctcttcagaaaaccgcatgctgaaagaagaagtcggtcctgaagatgtggccgaagtcgtcgcgaagtggacgggtattccagtcagcaaaatgctggaaagtgaatcccagaaactgctgcacatggaagattctctgaaacaccgtgtggtgggtcaggatcatgccctgacgattgtggccgatgccattcgccgggcacgggccgagatttcagacccgaaccgtccgatcggaacctttatgttcctgggtccgacaggtgtgggtaaaactgaaaccgtgaaggccttggccgaattcctgttcgatgacgaacaagccgttgtccgtatcgacatgagtgaatatatggaaaaacacgctgtgtcccgtttgatcggcgcgcctccgggctatgtcggttatgaagagggtggccagctgacggaatcagtccgtcgccgtccgtacagtgtggtgctgctggatgaggttgaaaaagcccatccggatgtgttcaacatcctgttgcaggttctggatgacggtcgtttgaccgacggtcaggggcgcacggtggatttcaaaaacaccgtgctgatcatgacctcgaacgtgggatcgcagtcgattctggatccgggtatgtcggaaaatcagaaacgtgaagcggtcaacgaagctttgcgtgaaagattccgtccagagttcctgaaccgtattgatgagatcgtgatgttcaagtccctgggcgaagcgcagatttccggcatcgtgaaggtgcagttggatctggtcgcacagcgactgagagcaaaaaagatcggcatcgacttcaatcaggaggccatcgacttcctggcgaagaaaggctacgacccgatttacggtgcaagacctttgaaacgtgtgattcagaccgaacttctgaatccactttccaaagagatcatctcgggcaaagtcaaagccggagacaccatccacgtcaaagccaacggaagcaccctgaccttctaa

SEQ ID NO: 7302 - protein, 855 aa, Bdellovibrio bacteriovorus
MTRKSQEAMQAAARLAERKSSPSVEPEHLLMELVQQTEGIVPRILDKLNVPQAQFLAELRTKIDKFPQVTGGGQKMFASPRLEKIFQAAETEAQEWGDSYISTEHFFMAMLKGGDSELNGLFKKNKVTAEAARTALTEIRGKQKVTDDDPENKYEVLNKYARDLTALAAEGKLDPVVGRDEEIRRVVQVLSRRTKNNPVLIGEPGVGKTAIAEGLALRIIKQDVPDNLIGKKLMSLDMGALIAGAKYRGEFEDRLKAVIKEVTSSDGQIILFIDELHTLVGAGKTEGAMDAGQLLKPALARGELRCIGATTLDEYRKYIEKDAALERRFQTVMVEEPSVEDAITILRGLKEKYEVHHGIRITDAALVSAVKLSHRYITNRFLPDKAIDLIDEAASKLGIETRSVPEEVDKIERELMQLRIEKEALKKEKDESARERLAVIDKEITELNAKNQLLREQWEFEKGGIEGIKKLKADIEDLKVAVAKAEREGDLGKAAELKYGKLPEAEKKLKALEERSKEGAKSSSENRMLKEEVGPEDVAEVVAKWTGIPVSKMLESESQKLLHMEDSLKHRVVGQDHALTIVADAIRRARAEISDPNRPIGTFMFLGPTGVGKTETVKALAEFLFDDEQAVVRIDMSEYMEKHAVSRLIGAPPGYVGYEEGGQLTESVRRRPYSVVLLDEVEKAHPDVFNILLQVLDDGRLTDGQGRTVDFKNTVLIMTSNVGSQSILDPGMSENQKREAVNEALRERFRPEFLNRIDEIVMFKSLGEAQISGIVKVQLDLVAQRLRAKKIGIDFNQEAIDFLAKKGYDPIYGARPLKRVIQTELLNPLSKEIISGKVKAGDTIHVKANGSTLTF

SEQ ID NO: 7303 - DNA, 2670 bp, Bifidobacterium longum
  CDS (1)..(2670): transl_table=11
atggaacagaagttcaccactatggcccaagaagccgtcggcgacgcgattcagagtgcgtccgccgcaggaaacgcgcaggtcgagaccctgcacgtcatggatgcgctgctgcgccaggaaaacggcgtggcgcgctctctgatcgaggccgcgggcggggacccgcaggccatcggcgcggcggtgcgcaacgctttggtcgcgctgccgagcgcatccggatccagcacctcgcagccacaggccagccgccagctgaccgccgccatcgcccaggctgagaaggaaatgcagcagatgggcgacgaatacgtctccaccgaacatctgcttatcggcatcgcggccagcaagccgaaccagtcggccgaaatcctggagaagaacggcgtcaccgcagcctccctgcgcaaggccgtacccggcgtgcgtggtggcgcgaaggtcaccagcccggacgcggaaggctcgtacaaggccctggagaagtactccaccgacctgacggccgccgccaaggaaggcaagctggacccggtcatcggacgtgaccaggaaatccgccgcgtgattcagatcctctcccgtcgtaccaagaacaacccggtgctgatcggcgagcccggcgtcggcaagaccgccgtcgtggaaggcctggcccagcgtatcgtggcgggcgacgtgcccaccaccctgcaaggcaagaagctcatctcccttgacctaggctccatggtggccggctcgaagtaccgtggcgagttcgaggagcgcctgaagagcgtcctgaacgaaatcaagaacgcggacggccagatcatcaccttcatcgacgagattcacaccatcgtcggcgcgggtgcggccgaaggctcgatggacgccggcaatatgctgaagcctatgctggcccgtggcgagctgcgcctgatcggcgcgaccacgctggacgagtaccgcgagaacatcgaaaaggatccggcattggaacgccgtttccaacaggtgttcgtgggcgagccgagcgtggaagacaccatcgccatcctgcgtggcctgaagcagcgttacgaggcgcaccacaaggtgacgatcggcgatgacgcgctggtcgccgccgcgaccctctcgaaccggtacatctcaggccgtcagctgccggacaaggccatcgacctggtcgatgaggcggctgcccacctgcgtatggagctcgactcctcgcctgaggagatcgatgagctgcagcgcaaggtgacccgtcttgaaatggaggaaatgcagctcaagaaggccgaggatcctgcgtccaaggagcgtctgggcaagctgcaagccgaacttgcggacacccgtgagaagctcagcggtctcaaggcgcgttgggatgcggaacaggctggccacaacaaggtcggcgacctgcgtgccaagctcgacgacctgcgcgtgcaggcggataagtatacccgtgaaggcaacttggcggaggcctcgaagattctgtacggcgagattccgtccattcagaaggagcttgccgccgcggagagcgcggatgctgaatctgctgatgccagcgcggccaacccggccgatgagccgatggtcccggaccgtgtggacgccgactcggtggctgagatcgtctccgactggaccggcattcccgtcggccgcctgatgcagggcgaaaacgagaagctgctgcacatggaggactacctcggcaagcgtgtgatcggccagaaggaagccatcgccgccgtgtccgacgcggtgcgccgttcgcgtgccggcatctccgacccgaaccgtccgaccggatcgttcctgttcctcggccccaccggtgtgggcaagaccgaactggccaaggcgctcgccgacttcctgttcgacgacgagaaggccatggtccgcatcgacatgtccgaatacatggagaaggcttcggtctcgcgcctgattggcgcggcgccgggctacgtgggctacgagcagggcggccagctgaccgaggccgtgcgccgtcgcccgtattccgtggtgctgttcgacgaggtcgagaaggccaacccggagatcttcgacgtgctgctgcaggtacttgacgatggtcgcctgaccgatggccagggaaggaccgtggacttcaagaacacgatcctgattatgacctctaacctcggctcgcagttcctcgtgaacgaggacatggacgccgacgccaagaaaaaggccgtgatggacgctgtccacatgaacttcaagccggagttcctgaaccgtctggacgacatcgtcatgttccacccgcttacgcgcgaggagcttggcggcatcgtggatatccaggtggctggcgtgtcccagcgtctgaccgatcgccgcatcacgctggacgtcaccgactcggctcgcgaatggcttgccaacaccggttacgacccggcttatggcgctcgtccgctgcgccgcctggtacagaccgaagtgggcgaccagctggcccgtatgctgctggccggcaaggtccacgacggtgacaccgtgctcgtcgaccagaccggcggcgaacatctggagctctccgcttgggcgagcgaccagattgtctccgacaatccggacgtgagcgtggacaacgtcaccgaagacaagtga

SEQ ID NO: 7304 - protein, 889 aa, Bifidobacterium longum
MEQKFTTMAQEAVGDAIQSASAAGNAQVETLHVMDALLRQENGVARSLIEAAGGDPQAIGAAVRNALVALPSASGSSTSQPQASRQLTAAIAQAEKEMQQMGDEYVSTEHLLIGIAASKPNQSAEILEKNGVTAASLRKAVPGVRGGAKVTSPDAEGSYKALEKYSTDLTAAAKEGKLDPVIGRDQEIRRVIQILSRRTKNNPVLIGEPGVGKTAVVEGLAQRIVAGDVPTTLQGKKLISLDLGSMVAGSKYRGEFEERLKSVLNEIKNADGQIITFIDEIHTIVGAGAAEGSMDAGNMLKPMLARGELRLIGATTLDEYRENIEKDPALERRFQQVFVGEPSVEDTIAILRGLKQRYEAHHKVTIGDDALVAAATLSNRYISGRQLPDKAIDLVDEAAAHLRMELDSSPEEIDELQRKVTRLEMEEMQLKKAEDPASKERLGKLQAELADTREKLSGLKARWDAEQAGHNKVGDLRAKLDDLRVQADKYTREGNLAEASKILYGEIPSIQKELAAAESADAESADASAANPADEPMVPDRVDADSVAEIVSDWTGIPVGRLMQGENEKLLHMEDYLGKRVIGQKEAIAAVSDAVRRSRAGISDPNRPTGSFLFLGPTGVGKTELAKALADFLFDDEKAMVRIDMSEYMEKASVSRLIGAAPGYVGYEQGGQLTEAVRRRPYSVVLFDEVEKANPEIFDVLLQVLDDGRLTDGQGRTVDFKNTILIMTSNLGSQFLVNEDMDADAKKKAVMDAVHMNFKPEFLNRLDDIVMFHPLTREELGGIVDIQVAGVSQRLTDRRITLDVTDSAREWLANTGYDPAYGARPLRRLVQTEVGDQLARMLLAGKVHDGDTVLVDQTGGEHLELSAWASDQIVSDNPDVSVDNVTEDK

SEQ ID NO: 7305 - DNA, 2619 bp, Blochmannia floridanus
  CDS (1)..(2619): transl_table=11
atgagattagatcgttttgatcgaagttttcaattagcgttatctgatgcccaatctattgctattggtaaggataatcaatttatagaacctgttcatgtaatgtatacttttttaaaggaaaaaaaatataaatcgatacgtaatttgttaatacatgcaggatcaaatgtagatcaattatataaatctgtggaacaagtgtgtaatgatttgccacgggtagaaagtgttgatggagatagagaggtgcaatgctctcatgctttagtaaaaattttaaatttatgtgataaattagcgcaaaaatatcacagtaatattattttttcagaagtatttattatagctgctcttcaatcacaagatgttttaagtattttgttaaaaaaatctggtattgttaaagaattattagaaaaattagtacaatatgaacagagtaattattctattcatgatgatagttttaaaaatagaacacaaatattagaacaatttactgtagatataacttctcttgctgaacaaaataatcttgatcctgtaattggtagggatgaagaaattagaagaacaattcaagttttgcaaaggcgtactaaaaataatcctgttcttataggaaatccaggagtgggtaaaactgctattgtggaggggttggctcaacgtattatcaataaagaggttccagagggattaaaaaatagtcgaatattatctttagatatagccgcgttgttagctggtactaaatatcggggagaatttgaagagcgttttaaaaaagtattgtatgctgtatctaaagataataatactattttatttattgatgagttgcatgttatggttggagctggaaaaacagatggatctatggatgctagtaatatgattaaaccaaaattagcaagaggtgaattacattgtgttggtgcgactactcttgatgaatatagtagatatattgaaaaagatgctgctttagaaagacgttttcaaaaaatatttattattgaacctaatattgaaaatactatagctattttaagagggctgaaggaacgttatgagttgcatcataatgtacatatcactgatcctgcgatagtagccgcagctactttatcgaatagatatatttcagatcgtcaattaccagataaggctattgatttaattgatgaagcagcatctagtattcgtattcaaattgattctaaaccagaagatttggataggcttgatcgtcgtattatacaattgaaattagagtgtcaggcgttgaaaaaagagtcagatgagttaagcaaaaaacgtttagagattttaagtatggaattgtcacagaaagaacaggagtatagtgtacttgaatcagaatggaaacgtgaaaggagttctttatttgatattcaaaatataaaatcagatttagagaaagcaaagactattttagatcagtctcgtcgtattggcgatttggctcaaatgtcagaattacaatatggacgtataccagaattggaaaagaagttgtttaatgcaattcaatctagtaataaaaaaatgcgtctattgcgtaattatgtgtctgaggtagaaattgctgaggtgttgtccaaatggacaggtatacctatatctaggatattagcaaatgaaaagaataaattgttaaatatggagacaatattacatcagttagtaattgggcaagatgaggcagtacgagttatatcgaatgcgattcgtagaagtcgatctggattatcagatcctaagaggcctataggttcttttatgtttttaggaccaactggtgttggtaagactgagttatgtaaagcattatcacaatttttgtttgatactgacaatgctatggtgcgtattgatatgtctgaatttatggaaaaacattcggtttcaaaattacttggagctcctcccggttatattggttatgaaagtggagcttatttaactgaatctatacgtcgtcgcccttattctatagtattattagacgaaattgaaaaagctcatttagatgtttttaatattttattacaagttttagatgatggaagattaacagataatcaaggtcgtatggtggattttaataatactgttataattatgacatctaatttaggttcagatttgattcaaaaaaaatttgatatatcagattatgatactatgaagaaaactgtgttaaatgtagttaatcaatattttcgaccggaattcattaatagaatagatgaaatagtagtatttcatcctcttagcatcaaacatcttattgatattgcaaatattcaattgaagtatttatattctagattagaagagagaggttatcctagaactggtattaccaacaaagcattattatttttatctaaaattggttttgatcctatatatggtgcacgtcctttaaaacgtattatacaacaatacattgagaatccgttatctcaaaagatattatccgatgatttattaccgggaagaagtattactatagatgttcaaaatgataatattgtatttattcagaatgatgttatagatgataaggatatctatataaattga

SEQ ID NO: 7306 - protein, 872 aa, Blochmannia floridanus
MRLDRFDRSFQLALSDAQSIAIGKDNQFIEPVHVMYTFLKEKKYKSIRNLLIHAGSNVDQLYKSVEQVCNDLPRVESVDGDREVQCSHALVKILNLCDKLAQKYHSNIIFSEVFIIAALQSQDVLSILLKKSGIVKELLEKLVQYEQSNYSIHDDSFKNRTQILEQFTVDITSLAEQNNLDPVIGRDEEIRRTIQVLQRRTKNNPVLIGNPGVGKTAIVEGLAQRIINKEVPEGLKNSRILSLDIAALLAGTKYRGEFEERFKKVLYAVSKDNNTILFIDELHVMVGAGKTDGSMDASNMIKPKLARGELHCVGATTLDEYSRYIEKDAALERRFQKIFIIEPNIENTIAILRGLKERYELHHNVHITDPAIVAAATLSNRYISDRQLPDKAIDLIDEAASSIRIQIDSKPEDLDRLDRRIIQLKLECQALKKESDELSKKRLEILSMELSQKEQEYSVLESEWKRERSSLFDIQNIKSDLEKAKTILDQSRRIGDLAQMSELQYGRIPELEKKLFNAIQSSNKKMRLLRNYVSEVEIAEVLSKWTGIPISRILANEKNKLLNMETILHQLVIGQDEAVRVISNAIRRSRSGLSDPKRPIGSFMFLGPTGVGKTELCKALSQFLFDTDNAMVRIDMSEFMEKHSVSKLLGAPPGYIGYESGAYLTESIRRRPYSIVLLDEIEKAHLDVFNILLQVLDDGRLTDNQGRMVDFNNTVIIMTSNLGSDLIQKKFDISDYDTMKKTVLNVVNQYFRPEFINRIDEIVVFHPLSIKHLIDIANIQLKYLYSRLEERGYPRTGITNKALLFLSKIGFDPIYGARPLKRIIQQYIENPLSQKILSDDLLPGRSITIDVQNDNIVFIQNDVIDDKDIYIN

SEQ ID NO: 7307 - DNA, 2598 bp, Bordetella bronchiseptica
  CDS (1)..(2598): transl_table=11
atgcgattcgacaaacttaccaccaagttccagcaggccctggcggacgcgcaaagcctggccgcccgtaacgatcatccctatatcgagcccgtccatgtgctggcggccctgttgggcgaccccgacagcggcgcggccagcctgctggcgcgcgccggcgtcgccgtcaaccgcgtgcagccggccatcgacagcgccctgaagggcctgccgcaggtgcagggcgaggacaacgtccaggtcgggcgcgagctgcaaagcgtgctcgtgcgcaccgacaaggaggccgcgcggcgcggcgacacctacatcgccagcgagctgttcctgctggcgctggccgacgacaagggcgacgccggccgcatcctgcgcgaggcgggcctgcagaagaaggccctggaagcggccatcgacgccgtgcgcggcggcgagaacgtctcgggcgcggaaggcgagtccaaccgcgaggcgctgtccaagtacacgctggacctcaccgagcgcgcccgccagggcaagctggatccggtcatcggccgcgacgacgaaatccgccgcaccatacagatcctgcagcgccgcaccaagaacaaccccgtgctgatcggcgaacccggcgtcggcaagaccgccatcgtcgaagggctggcgcaacgcatcgtcaacgacgaggtgcccgagacgctgcgcggcaagcgcgtgctctcgctggacctggcggcgctgcttgccggcgccaagttccgtggcgagttcgaggaacgcctgaaggccgtgctcaaggagctggcccaggacgacggccagaacatcgtcttcatcgacgaactgcacaccatggtcggggcgggcaaggccgaaggggccatggacgccggcaacatgctcaagccggcgctggcgcgcggcgagctgcattgcatcggcgccaccacgctggacgaataccgcaagtacatcgaaaaggatgccgcgctcgagcgccgcttccagaaggtgctggtcggcgagcccgacgtggaatccaccatcgccatcctgcgcgggctgcaggagcgctacgagctgcaccacggcgtcgagatcaccgatccggccatcgtggcggcggccgagctgtcgcaccgctacattaccgaccggttcctgcccgacaaggcaatcgacctgatcgacgaggccggcgcgcgcatccgcatggaaatcgactccaagcccgaagtgatggaccgcctggaccggcgcatcatccagctcaagatcgaacgcgaagccgtcaagaaggaaaccgacgacgcctccatgcgccgcctggccgtgatcgaggaagagctggagaagctgcagcgcgaatacaacgactacgaggaaatctggaaagccgagaaggccgccgtgcagggcacgcaggccatcaaggaagagatcgaccgcgtgcgcgccgagatggccgaactgcagcgcaagggccagttcgacaagctggccgagctgcaatacggcaagctgcccgagctcgaggcgcgcctgaaggccgccgacagcgccgagcgcgaggccggcgaatccgacagcggcaagccgcgcctgttgcgcacccaggtgggcgccgaggaaatcgccgaggtcgtctcgcgcgccaccggcatcccggtggccaagatgatgcagggcgaacgcgacaagctgctgcgcatggaagatttcctgcacaagcgcgtcgtgggccaggacgaagccgtgcggctggtttccgatgccatccggcgttcgcgcgcgggcctggcggatccgtcgcgtccgtatggttcgttcctgttcctcgggcccaccggcgtgggcaagacggagctgacccgtgccctggcggatttcctgttcgactccgaagagcacatgatccgcatcgacatgagcgagttcatggagaagcattccgtggcgcgcctgatcggcgcgccgccgggatacgtgggctacgaagaagggggctacctgaccgaggcggtgcgccgcaagccgtacagcgtgatcctgctcgacgaggtcgaaaaggcgcatcccgacgtgttcaacgtgctgctgcaggtgctcgacgacggccgcctgaccgacggccaggggcgcacggtggacttccgcaatacggtcatcgtcatgacgtccaaccttgggtcgcagcatatacaaagcatggcgggcaagccgtacgaggtcatcaaggaagtcgtgtgggacgagctcaagcatacgttccgccccgagttcctgaaccgtatcgatgaagtcgtggtcttccatggcctggaagcccagcacatcgagtccatcgcccggatccagctcaagcggctgggcgagcgtctcgagaagcaggagatgcgcctggacgtgtccgatgcggcgctggcggaaatcgcacgctcgggcttcgacccggtgttcggcgcccggccgctcaagcgggccatccagcagcagatcgagaacccggtcgccaagctgattctcgaaggcgtgttcggaccgcgcgatgtggtgccggtcgactggcaggacggcaagttcgtcttcacgcgcactttgcaataa

SEQ ID NO: 7308 - protein, 865 aa, Bordetella bronchiseptica
MRFDKLTTKFQQALADAQSLAARNDHPYIEPVHVLAALLGDPDSGAASLLARAGVAVNRVQPAIDSALKGLPQVQGEDNVQVGRELQSVLVRTDKEAARRGDTYIASELFLLALADDKGDAGRILREAGLQKKALEAAIDAVRGGENVSGAEGESNREALSKYTLDLTERARQGKLDPVIGRDDEIRRTIQILQRRTKNNPVLIGEPGVGKTAIVEGLAQRIVNDEVPETLRGKRVLSLDLAALLAGAKFRGEFEERLKAVLKELAQDDGQNIVFIDELHTMVGAGKAEGAMDAGNMLKPALARGELHCIGATTLDEYRKYIEKDAALERRFQKVLVGEPDVESTIAILRGLQERYELHHGVEITDPAIVAAAELSHRYITDRFLPDKAIDLIDEAGARIRMEIDSKPEVMDRLDRRIIQLKIEREAVKKETDDASMRRLAVIEEELEKLQREYNDYEEIWKAEKAAVQGTQAIKEEIDRVRAEMAELQRKGQFDKLAELQYGKLPELEARLKAADSAEREAGESDSGKPRLLRTQVGAEEIAEVVSRATGIPVAKMMQGERDKLLRMEDFLHKRVVGQDEAVRLVSDAIRRSRAGLADPSRPYGSFLFLGPTGVGKTELTRALADFLFDSEEHMIRIDMSEFMEKHSVARLIGAPPGYVGYEEGGYLTEAVRRKPYSVILLDEVEKAHPDVFNVLLQVLDDGRLTDGQGRTVDFRNTVIVMTSNLGSQHIQSMAGKPYEVIKEVVWDELKHTFRPEFLNRIDEVVVFHGLEAQHIESIARIQLKRLGERLEKQEMRLDVSDAALAEIARSGFDPVFGARPLKRAIQQQIENPVAKLILEGVFGPRDVVPVDWQDGKFVFTRTLQ

SEQ ID NO: 7309 - DNA, 2598 bp, Bordetella parapertussis
  CDS (1)..(2598): transl_table=11
atgcgattcgacaaacttaccaccaagttccagcaggccctggcggacgcgcaaagcctggccgcccgtaacgatcatccctatatcgagcccgtccatgtgctggcggccctgttgggcgaccccgacagcggcgcggccagcctgctggcgcgcgccggcgtcgccgtcaaccgcgtgcagccggccatcgacagcgccctgaagggcctgccgcaggtgcagggcgaggacaacgtccaggtcgggcgcgagctgcaaagcgtgctcgtgcgcaccgacaaggaggccgcgcggcgcggcgacacctacatcgccagcgagctgttcctgctggcgctggccgacgacaagggcgacgccggccgcatcctgcgcgaggcgggcctgcagaagaaggccctggaagcggccatcgacgccgtgcgcggcggcgagaacgtctcgggcgcggaaggcgagtccaaccgcgaggcgctgtccaagtacacgctggacctcaccgagcgcgcccgccagggcaagctggatccggtcatcggccgcgacgacgaaatccgccgcaccatacagatcctgcagcgccgcaccaagaacaaccccgtgctgatcggcgaacccggcgtcggcaagaccgccatcgtcgaagggctggcgcaacgcatcgtcaacgacgaggtgcccgagacgctgcgcggcaagcgcgtgctctcgctggacctggcggcgctgcttgccggcgccaagttccgtggcgagttcgaggaacgcctgaaggccgtgctcaaggagctggcccaggacgacggccagaacatcgtcttcatcgacgaactgcacaccatggtcggtgcgggcaaggccgaaggggccatggacgccggcaacatgctcaagccggcgctggcgcgcggcgagctgcattgcatcggcgccaccacgctggacgaataccgcaagtacatcgaaaaggatgccgcgctcgagcgccgcttccagaaggtgctggtcggcgagcccgacgtggaatccaccatcgccatcctgcgcgggctgcaggagcgctacgagctgcaccacggcgtcgagatcaccgatccggccatcgtggcggcggccgagctgtcgcaccgctacattaccgaccggttcctgcccgacaaggcaatcgacctgatcgacgaggccggcgcgcgcatccgcatggaaatcgactccaagcccgaagtgatggaccgcctggaccggcgcatcatccagctcaagatcgaacgcgaagccgtcaagaaggaaaccgacgacgcctccatgcgccgcctggccgtgatcgaggaagagctggagaagctgcagcgcgaatacaacgactacgaggaaatctggaaagccgagaaggccgccgtgcagggcacgcaggccatcaaggaagagatcgaccgcgtgcgcgccgagatggccgaactgcagcgcaagggccagttcgacaagctggccgagctgcaatacggcaagctgcccgagctcgaggcgcgcctgaaggccgccgacagcgccgagcgcgaggccggcgaatccgacagcggcaagccgcgcctgttgcgcacccaggtgggcgccgaggaaatcgccgaggtcgtctcgcgcgccaccggcatcccggtggccaagatgatgcagggcgaacgcgacaagctgctgcgcatggaagatttcctgcacaagcgcgtcgtgggccaggacgaagccgtgcggctggtttccgatgccatccggcgttcgcgcgcgggcctggcggatccgtcgcgtccgtatggttcgttcctgttcctcgggcccaccggcgtgggcaagacggagctgacccgtgccctggcggatttcctgttcgactccgaagagcacatgatccgcatcgacatgagcgagttcatggagaagcattccgtggcgcgcctgatcggcgcgccgccgggatacgtgggctacgaagaagggggctacctgaccgaggcggtgcgccgcaagccgtacagcgtgatcctgctcgacgaggtcgaaaaggcgcatcccgacgtgttcaacgtgctgctgcaggtgctcgacgacggccgcctgaccgacggccaggggcgcacggtggacttccgcaatacggtcatcgtcatgacgtccaaccttgggtcgcagcacatacaaagcatggcgggcaagccgtacgaggtcatcaaggaagtcgtgtgggacgagctcaagcatacgttccgccccgagttcctgaaccgtatcgatgaagtcgtggtcttccatggcctggaagcccagcacatcgagtccatcgcccggatccagctcaagcggctgggcgagcgtctcgagaagcaggagatgcgcctggacgtgtccgatgcggcgctggcggaaatcgcacgctcgggcttcgacccggtgttcggcgcccggccgctcaagcgggccgtccagcagcagatcgagaacccggtcgccaagctgattctcgaaggcgtgttcggaccgcgcgatgtggtgccggtcgactggcaggacggcaagttcgtcttcacgcgcactttgcaataa

SEQ ID NO: 7310 - protein, 865 aa, Bordetella parapertussis
MRFDKLTTKFQQALADAQSLAARNDHPYIEPVHVLAALLGDPDSGAASLLARAGVAVNRVQPAIDSALKGLPQVQGEDNVQVGRELQSVLVRTDKEAARRGDTYIASELFLLALADDKGDAGRILREAGLQKKALEAAIDAVRGGENVSGAEGESNREALSKYTLDLTERARQGKLDPVIGRDDEIRRTIQILQRRTKNNPVLIGEPGVGKTAIVEGLAQRIVNDEVPETLRGKRVLSLDLAALLAGAKFRGEFEERLKAVLKELAQDDGQNIVFIDELHTMVGAGKAEGAMDAGNMLKPALARGELHCIGATTLDEYRKYIEKDAALERRFQKVLVGEPDVESTIAILRGLQERYELHHGVEITDPAIVAAAELSHRYITDRFLPDKAIDLIDEAGARIRMEIDSKPEVMDRLDRRIIQLKIEREAVKKETDDASMRRLAVIEEELEKLQREYNDYEEIWKAEKAAVQGTQAIKEEIDRVRAEMAELQRKGQFDKLAELQYGKLPELEARLKAADSAEREAGESDSGKPRLLRTQVGAEEIAEVVSRATGIPVAKMMQGERDKLLRMEDFLHKRVVGQDEAVRLVSDAIRRSRAGLADPSRPYGSFLFLGPTGVGKTELTRALADFLFDSEEHMIRIDMSEFMEKHSVARLIGAPPGYVGYEEGGYLTEAVRRKPYSVILLDEVEKAHPDVFNVLLQVLDDGRLTDGQGRTVDFRNTVIVMTSNLGSQHIQSMAGKPYEVIKEVVWDELKHTFRPEFLNRIDEVVVFHGLEAQHIESIARIQLKRLGERLEKQEMRLDVSDAALAEIARSGFDPVFGARPLKRAVQQQIENPVAKLILEGVFGPRDVVPVDWQDGKFVFTRTLQ

SEQ ID NO: 7311 - DNA, 2598 bp, Bordetella pertussis
  CDS (1)..(2598): transl_table=11
atgcgattcgacaaacttaccaccaagttccagcaggccctggcggacgcgcaaagcctggccgcccgtaacgatcatccctatatcgagcccgtccatgtgctggcggccctgttgggcgaccccgacagcggcgcggccagcctgctggcgcgcgccggcgtcgccgtcaaccgcgtgcagccggccatcgacagcgccctgaaaggcctgccgcaggtgcagggcgacgacaatgtccaggtcgggcgcgagctgcaaagcgtgctcgtgcgcaccgacaaggaggccgcgcggcgcggcgacacctacatcgccagcgagctgttcctgctggcgctggccgacgacaagggcgacgccggccgcatcctgcgcgaggcgggcctgcagaagaaggccctggaagcggccatcgacgccgtgcgcggcggcgagaacgtctcgggcgccgaaggcgagtccaaccgcgaggcgctgtccaagtacacgctggacctcaccgagcgcgcccgccagggcaagctggatccggtcatcggccgcgacgacgaaatccgccgcaccatacagatcctgcagcgccgcaccaagaacaaccccgtgctgatcggcgaacccggcgtcggcaagaccgccatcgtcgaagggctggcgcaacgcatcgtcaacgacgaggtgcccgagacgctgcgcggcaagcgcgtgctctcgctggacctggcggcgctgcttgccggcgccaagttccgtggcgagttcgaggaacgcctgaaggccgtgctcaaggagctggcccaggacgacggccagaacatcgtcttcatcgacgaactgcacaccatggccggggcgggcaaggccgaaggcgccatggacgccggcaacatgctcaagccggcgctggcgcgcggcgagctgcattgcatcggcgccaccacgctggacgaataccgcaagtacatcgaaaaggatgccgcgctcgagcgccgcttccagaaagtgctggtcggcgagcccgacgtggagtccaccatcgccatcctgcgcgggctgcaggagcgctatgagctgcaccacggcgtcgagatcaccgatccggccatcgtggcggcggccgagctgtcgcaccgctacatcaccgaccggttcctgcccgacaaggcaatcgacctgatcgacgaggccggcgcacgcatccgcatggaaatcgactccaagcccgaagtgatggaccggctggaccggcgcatcatccagctcaagatcgaacgcgaagccgtcaagaaggaaaccgacgacgcctccatgcgccgcctggccgtgatcgaggaagagctggagaagctgcagcgcgaatacaacgactacgaggaaatctggaaagccgagaaggccgccgtgcagggcacgcaggccatcaaggaagagatcgaccgcgtgcgcgccgagatggccgaactgcagcgcaagggccagttcgacaagctggccgagctgcaatacggcaagctgcccgagctcgaggcgcgcctgaaggccgccgacagcgccgagcgtgaagccggcgaatccgacagcggcaagccgcgcctgttgcgcacccaggtgggcgccgaggaaatcgccgaggtcgtctcgcgcgccaccggcatcccggtggccaagatgatgcagggcgaacgcgacaagctgctgcgcatggaagatttcctgcacaagcgcgtcgtgggccaggacgaagccgtgcggctggtttccgatgccatccggcgttcgcgcgcgggcctggcggatccgtcgcgcccgtacggttcgttcctgttcctcgggcccaccggcgtgggcaagaccgagctgacccgtgccctggcggatttcctgttcgattccgaagagcacatgatccgcatcgacatgagcgaattcatggagaagcattccgtggcgcggctgatcggcgcgccgccgggatacgtgggctacgaagaagggggctacctgaccgaggcggtgcgccgcaagccgtacagcgtgatcctgctcgacgaggtcgaaaaggcgcaccccgacgtgttcaacgtgctgctgcaggtgctcgacgacggccgcctgaccgatggtcaggggcgcacggtggacttccgcaacacggtcatcgtcatgacgtccaaccttgggtcgcagcacatacaaagcatggcgggcaagccgtacgaggtcatcaaggaagtcgtgtgggacgagctcaagcacacgttccgccccgagttcctgaaccgtatcgatgaagtcgtggtcttccatggcctggaagcccagcacatcgagtccatcgcccggatccagctcaagcggctgggcgagcgtctcgagaagcaggagatgcgcctggacgtgtccgatgcggcgctggcggaaatcgcacgttcgggcttcgacccggtgttcggcgcccggccgctcaagcgagccatccagcagcagatcgagaatccggtcgccaagctgattctcgaaggcgtgttcggaccgcgcgatgtggtgccggtcgactggcaggacggcaagttcgtcttcacgcgcactttgcaataa

SEQ ID NO: 7312 - protein, 865 aa, Bordetella pertussis
MRFDKLTTKFQQALADAQSLAARNDHPYIEPVHVLAALLGDPDSGAASLLARAGVAVNRVQPAIDSALKGLPQVQGDDNVQVGRELQSVLVRTDKEAARRGDTYIASELFLLALADDKGDAGRILREAGLQKKALEAAIDAVRGGENVSGAEGESNREALSKYTLDLTERARQGKLDPVIGRDDEIRRTIQILQRRTKNNPVLIGEPGVGKTAIVEGLAQRIVNDEVPETLRGKRVLSLDLAALLAGAKFRGEFEERLKAVLKELAQDDGQNIVFIDELHTMAGAGKAEGAMDAGNMLKPALARGELHCIGATTLDEYRKYIEKDAALERRFQKVLVGEPDVESTIAILRGLQERYELHHGVEITDPAIVAAAELSHRYITDRFLPDKAIDLIDEAGARIRMEIDSKPEVMDRLDRRIIQLKIEREAVKKETDDASMRRLAVIEEELEKLQREYNDYEEIWKAEKAAVQGTQAIKEEIDRVRAEMAELQRKGQFDKLAELQYGKLPELEARLKAADSAEREAGESDSGKPRLLRTQVGAEEIAEVVSRATGIPVAKMMQGERDKLLRMEDFLHKRVVGQDEAVRLVSDAIRRSRAGLADPSRPYGSFLFLGPTGVGKTELTRALADFLFDSEEHMIRIDMSEFMEKHSVARLIGAPPGYVGYEEGGYLTEAVRRKPYSVILLDEVEKAHPDVFNVLLQVLDDGRLTDGQGRTVDFRNTVIVMTSNLGSQHIQSMAGKPYEVIKEVVWDELKHTFRPEFLNRIDEVVVFHGLEAQHIESIARIQLKRLGERLEKQEMRLDVSDAALAEIARSGFDPVFGARPLKRAIQQQIENPVAKLILEGVFGPRDVVPVDWQDGKFVFTRTLQ

SEQ ID NO: 7313 - DNA, 2640 bp, Bradyrhizobium japonicum
  CDS (1)..(2640): transl_table=11
atgaacatcgagaagtataccgaacgctccaggggcttcatccagtccgcgcagtcgcttgcggtgcgcgaggggcaccagcagttttcgaccctgcacgttctgaaagtgctgctggacgacaatgaggggctcgctgccggtctgatcgaccgtgccggcggcaactcccgcgcaattttgaaggcgaccgaggacgccctgaacaaggtgccgaaggtctccggcggcggcgccgggcagatctatctggcgcccgagctcgcacgcaccttcgatgccgccgaaaaggccggcgagaaggccggcgacagttttgtcaccgtcgagcggctgctgctcggcctcacgctggagaagaccagcgaggccggcacgatcctcagcaagggtggtgtcaccccgcaaaacctcaacgcggcgatcgaggccctgcgcaagggccgcacggccgactcggcgaccgccgagaacgcctatgacgcgctgaagaaatatgcccgcgacctgacccaggccgcgcgcgacggcaagctcgacccggtcatcggccgcgacgaggagatccgccgcaccatccaggtgctctcgcgccggaccaagaacaatcccgtcctgatcggtgagcccggcgtcggcaagaccgccatcgccgagggcctcgcgctgcgcatcgtcaacggtgacgtgccggagagcctgaaggacaagaagctgctctcgctcgacttgggcgcactgatcgccggcgcgaaataccgcggcgagttcgaggaacggctgaaggccgtgctccaggaggtgaccgggagcgagggcacctttatcctgttcatcgacgagatgcacacgctgatcggggccggcaagggcgacggcgcgatggacgcatcgaacctgctgaagccggcgctcgcccgcggcgagctgcactgcatcggcgcgaccacgctcgacgagtatcagaagcatgtcgagaaggacgcggcgctggcgcggcgcttccagccgatcttcgtcagcgagccctcggtcgaggacaccatctcgatcctgcgcggactgaaggacaagtacgagcagcaccatggcgtgcggatcaccgattccgcgcttgttgcctccgcgacattgtccaaccgctacatcaccgaccgcttcctgccggacaaggcgatcgacctcatggacgaggccgccgcgcgcctgaagatgcaggtcgattcgaagccggaggagctcgattcgatggatcgggaaatcatccggctgaagatcgaacaggaagcattgaagaaggagagcgacgccggttcgaagagccgcctgcagacgcttgaaaaggaactcgtcgagctcgaggaaaaatccgcgtcgttgacggcgcgctggagcgcggagaagaacaagctctccgatgcgcagaagctcaaggccgagctcgacggcttgcgtgtcgagctcgccaatgcccagcgccgcggcgaattccagaaggccggcgagctggcctatggccggatccccgagctcgaacggcagctcgcggacatcgaggccaaggagaactccggcgagatgatggaggaggcggtcaccgccaatcacatcgcgcaggtggtctcgcgctggaccggcgtgcccgtcgacaagatgctggagggcgagaaggacaagcttctgaagatggaggactccctcggcaagcgcgtcgtcggccaggccgaagccgtccatgcggtcgcaaccgccgtgcgccgctcccgcgccggcctccaggacccgaaccggccgatgggctcgttcatgttcttgggccccaccggcgtcggcaagaccgagctgaccaaggccctggcggagtacctgttcaacgacgagaccgcgatggtccgcctcgacatgtccgagtacatggagaagcattcggtctcgcggctgatcggcgcgcctccgggctatgtcggctatgacgagggcggcgcgctcaccgaagcggtgcggcgccggccctaccaggtcgtgctgttcgacgagatcgagaaggcgcatcctgacgtcttcaacgtcctgttgcaggtgctcgacgacggccgcctgaccgatggccagggccgcaccgtcgatttccgcaacacgctgatcatcatgacctcgaacctcggttcggagttcttggtgaatcaacccgagggcgaagacacgtcggccgtgcgcgagcaggtgatgggaatggtgcggggacatttccgccccgaattcctcaaccgtgtcgacgagatcatcctgttccatcgcttgcagaggagcgagatgggccggatcgtcgagatccagttcgcccggctgcagaagctgctgaccgatcgcaagatcgtgctgacgctcgacggcgcggcccgcgactggctcgccgccaagggctgggatcccgcctacggcgcacggccgctcaagcgggtgatccagcgctacctccaggacccgctcgccgagatgatcctggccggcgacgtcaaggacggcgacaacgtcgcgatctcgtccgaaggcaacgtgctgaccttcaacggcaaggccccgcaaaccgcggagatcgcccagttcgaggcgccggcgtcgaagcggaagctgaactga

SEQ ID NO: 7314 - protein, 879 aa, Bradyrhizobium japonicum
MNIEKYTERSRGFIQSAQSLAVREGHQQFSTLHVLKVLLDDNEGLAAGLIDRAGGNSRAILKATEDALNKVPKVSGGGAGQIYLAPELARTFDAAEKAGEKAGDSFVTVERLLLGLTLEKTSEAGTILSKGGVTPQNLNAAIEALRKGRTADSATAENAYDALKKYARDLTQAARDGKLDPVIGRDEEIRRTIQVLSRRTKNNPVLIGEPGVGKTAIAEGLALRIVNGDVPESLKDKKLLSLDLGALIAGAKYRGEFEERLKAVLQEVTGSEGTFILFIDEMHTLIGAGKGDGAMDASNLLKPALARGELHCIGATTLDEYQKHVEKDAALARRFQPIFVSEPSVEDTISILRGLKDKYEQHHGVRITDSALVASATLSNRYITDRFLPDKAIDLMDEAAARLKMQVDSKPEELDSMDREIIRLKIEQEALKKESDAGSKSRLQTLEKELVELEEKSASLTARWSAEKNKLSDAQKLKAELDGLRVELANAQRRGEFQKAGELAYGRIPELERQLADIEAKENSGEMMEEAVTANHIAQVVSRWTGVPVDKMLEGEKDKLLKMEDSLGKRVVGQAEAVHAVATAVRRSRAGLQDPNRPMGSFMFLGPTGVGKTELTKALAEYLFNDETAMVRLDMSEYMEKHSVSRLIGAPPGYVGYDEGGALTEAVRRRPYQVVLFDEIEKAHPDVFNVLLQVLDDGRLTDGQGRTVDFRNTLIIMTSNLGSEFLVNQPEGEDTSAVREQVMGMVRGHFRPEFLNRVDEIILFHRLQRSEMGRIVEIQFARLQKLLTDRKIVLTLDGAARDWLAAKGWDPAYGARPLKRVIQRYLQDPLAEMILAGDVKDGDNVAISSEGNVLTFNGKAPQTAEIAQFEAPASKRKLN

SEQ ID NO: 7315 - DNA, 2796 bp, Brucella melitensis; identical to SEQ ID NO: 6753
  CDS (172)..(2796): transl_table=11

SEQ ID NO: 7316 - protein, 874 aa, Brucella melitensis
MNIEKYTERVRGFIQSAQTFALSSGNQQFTPEHILKVLIDDDEGLAASLVERAGGRVGDVRMGLQSALEKLPKVSGGNDQLYLSQPLAKVFSLAEELASKAGDSFVTVERLLTALAMEKSAKTSEILSAAGVTPTALNRVINDMRKGRTADSASAESNYDALKKYARDLTEDARAGKLDPVIGRDEEIRRTIQVLSRRTKNNPVLIGEPGVGKTAIAEGLALRIVNGDVPESLKDKQLMALDMGALIAGAKYRGEFEERLKAVLSEVQTAAGQIILFIDEMHTLVGAGKTDGAMDASNLLKPALARGELHCVGATTLEEYRKYVEKDAALARRFQPVFVDEPTVEDTISILRGLKEKYEQHHKVRVSDSALVAAAMLSNRYITDRFLPDKAIDLVDEAASRLRMQVDSKPEELDEIDRRIMQLKIEREALKVETDAASKDRLQRIEKELSDLEEESAELTAKWQAEKQKLGLAADLKRQLEEARNALAIAQRNGEFQKAGELAYGTIPQLEKQLADAESQENKGSLLEETVTPDHVAQVISRWTGIPVDRMLEGEREKLLRMEDEIGKRVVGQGEAVQAISKAVRRARAGLQDPNRPIGSFIFLGPTGVGKTELTKALASFLFQDDTAMVRIDMSEFMEKHSVSRLIGAPPGYVGYEEGGVLTEAVRRRPYQVILFDEIEKAHPDVFNVLLQVLDDGRLTDGQGHTVDFRNTVIIMTSNLGAEYLVNLGENDDVETVRDDVMGVVRASFRPEFLNRVDEIILFHRLRREDMGAIVDIQMQRLQYLLSDRKITLQLEDDAREWLANKGYDPAYGARPLKRVIQKEVQDPLAERILLGDILDGSLVKITAGSDRLNFRPISGAFSAAEPEREDEKA

SEQ ID NO: 7317 - DNA, 2625 bp, Brucella suis
  CDS (1)..(2625): transl_table=11
atgaatatcgaaaaatatacagaacgggtccgcggcttcatccagtctgcccagaccttcgcgctttcctccggcaatcagcaattcactccagaacatatcctgaaggttctcatcgacgacgatgaggggttggcggcgtcgctggtcgagcgggctggcggacgggttggcgatgtgcgcatgggcctgcaaagcgcgcttgaaaaactgccgaaagtttcgggtggcaatgaccagctctatctttcgcagcctcttgccaaggtgttctcgcttgccgaggaactggccagcaaggcgggtgacagcttcgtcaccgtcgagcgcctcctgacggcgctggcgatggaaaaatccgccaaaacctccgagatactttctgctgcgggcgtcaccccgacggcattgaacagggttatcaacgatatgcgcaaaggccgcaccgccgattccgcctcagccgaaagcaattatgatgctttgaagaaatatgcgcgcgatctgacggaagacgcacgcgcgggcaagcttgatccggtcatcggccgcgatgaggaaatccgccgcacgatccaggttctgtcacgccgcaccaagaacaatccggtgctgatcggtgagccgggcgtgggcaagaccgcaatcgcggaaggtctggcgctgcgcatcgtcaatggcgacgtgcccgaatcgctgaaggacaagcaattgatggcgctcgacatgggcgcgctgattgcgggcgccaaatatcgcggcgaattcgaggaacgcctgaaggccgttctctcggaagtgcagacggctgccgggcagatcatcctcttcatcgacgaaatgcacacattggtcggcgcgggcaagacggatggcgcaatggatgcgtcgaaccttttgaagcctgctctggcgcgcggtgaattgcattgcgtcggcgccaccacgcttgaggaatatcgcaaatatgtggagaaggacgccgcccttgcgcgccgtttccagcccgtttttgtcgatgagccaacagtggaggacacaatctccattctgcgtggcctgaaggagaaatacgagcagcaccataaggtgcgcgtgtcggactccgcgctggtggctgcggcaacgctctcaaaccgctatatcaccgaccgtttcctgccggacaaggccatcgaccttgtggatgaggctgcatcgcgcctgcgtatgcacgtcgattccaagccggaagaactggacgagatcgatcgccgcatcatgcagctcaagatcgagcgcgaagcactgaaggtggaaacggacgccgcttccaaggaccgcttgcagcgcattgaaaaggaactgagcgatcttgaggaagaatcagccgaactgaccgccaagtggcaggcggaaaagcagaagcttgggcttgctgccgatctcaagcgtcagcttgaagaggcacgcaatgcacttgccattgcgcagcgcaatggtgagtttcagaaagcgggcgagcttgcctatggcacgatcccgcaactggaaaagcaacttgctgatgcggaaagtcaggaaaacaagggttccctcctggaagaaaccgtgacgccggaccatgtggcgcaggtcatttcgcgctggaccggcattccggttgaccggatgctggaaggtgagcgcgaaaagctgttgcgcatggaagacgagatcggcaagcgcgtcgtcggccagggcgaggcggtgcaggccatatccaaggcggtgcgccgtgcccgtgccggtctgcaggacccgaaccggcccatcggctcgttcatcttcctcggccccactggcgtcggcaagacggaactcaccaaggcgctcgcctcgttcctgttccaggatgataccgcaatggtgcgtatcgatatgtcggaattcatggaaaagcattccgtgagccgccttatcggtgctcctcccggctatgtcggctatgaagagggtggtgtgctgaccgaagctgtccggcgcaggccctatcaggtgatcctgttcgacgagattgaaaaggcgcacccggatgtcttcaatgttctgttgcaggtgctggacgacggacgcctgacggacggccagggccgcacggttgatttccgcaatacggtcatcatcatgacgtcaaacctcggcgcggaatatctcgtcaatctgggcgaaaacgatgatgtcgagactgttcgcgatgatgtgatgggcgtggtccgtgcttcgttccggccggaattcctcaaccgtgttgatgaaatcatcctgttccaccggctgcgccgcgaagacatgggtgcaattgtcgatatccagatgcagcgtctccaatatctgctttccgatcgcaagatcaccttgcagcttgaggacgacgcccgcgaatggctcgccaacaaggggtatgacccggcctatggcgcgcgcccgctgaagcgcgtaatccagaaggaagtgcaggatccgctggccgaacgtatcctgcttggtgatattctcgacggttccctcgtcaagatcactgccggttcggatcggctcaatttccgtccgatcagcggtgcgttcagcgcggcggagccggaaagagaagacgagaaagcctga

SEQ ID NO: 7318 - protein, 874 aa, Brucella suis
MNIEKYTERVRGFIQSAQTFALSSGNQQFTPEHILKVLIDDDEGLAASLVERAGGRVGDVRMGLQSALEKLPKVSGGNDQLYLSQPLAKVFSLAEELASKAGDSFVTVERLLTALAMEKSAKTSEILSAAGVTPTALNRVINDMRKGRTADSASAESNYDALKKYARDLTEDARAGKLDPVIGRDEEIRRTIQVLSRRTKNNPVLIGEPGVGKTAIAEGLALRIVNGDVPESLKDKQLMALDMGALIAGAKYRGEFEERLKAVLSEVQTAAGQIILFIDEMHTLVGAGKTDGAMDASNLLKPALARGELHCVGATTLEEYRKYVEKDAALARRFQPVFVDEPTVEDTISILRGLKEKYEQHHKVRVSDSALVAAATLSNRYITDRFLPDKAIDLVDEAASRLRMHVDSKPEELDEIDRRIMQLKIEREALKVETDAASKDRLQRIEKELSDLEEESAELTAKWQAEKQKLGLAADLKRQLEEARNALAIAQRNGEFQKAGELAYGTIPQLEKQLADAESQENKGSLLEETVTPDHVAQVISRWTGIPVDRMLEGEREKLLRMEDEIGKRVVGQGEAVQAISKAVRRARAGLQDPNRPIGSFIFLGPTGVGKTELTKALASFLFQDDTAMVRIDMSEFMEKHSVSRLIGAPPGYVGYEEGGVLTEAVRRRPYQVILFDEIEKAHPDVFNVLLQVLDDGRLTDGQGRTVDFRNTVIIMTSNLGAEYLVNLGENDDVETVRDDVMGVVRASFRPEFLNRVDEIILFHRLRREDMGAIVDIQMQRLQYLLSDRKITLQLEDDAREWLANKGYDPAYGARPLKRVIQKEVQDPLAERILLGDILDGSLVKITAGSDRLNFRPISGAFSAAEPEREDEKA

SEQ ID NO: 7319 - DNA, 2574 bp, Campylobacter jejuni
  CDS (1)..(2574): transl_table=11
atggcaaatatacaagattttttaactgataatatgctttcaaaccttgaaagtgcagcatctttagctatacattctaaaaataatgaagttgtacctttacatcttttatgggctttaagcgtagatagtacaagtattttaaatcaaattttaaataaattaaatatttctaaagaagccttagagcttgaaattaaaagcagaatttcaaaacttgcaacgagttcaaatgtaaaccgtgaaaatatacgcttttccaatgaacttataaattcattagaaaatgctaaaggattaatgagtgctaatggagatagttatttaagtgtggatacttggcttataagtgaaagtcaaaaaagtcctattaaagaaattttggcgcaatttttagatttaagagaatttcaaaaagagcttgaaagtctaagagcgggacgaaaaatggatagcaaaacaagcgatgaaactttagatagcttaaataaatttggtatagatttaaccttaaaagcaagcgagggtaaacttgatcctgttataggcagagaagaagaaatcgaacgtttgatgcaaattttaatacgtaaaaccaaaaataaccctatacttttaggtgaaccaggcgtaggaaaaacagctatagtagaagctttagcacaaagaattattaaaaaagatgttccaaaatctttgcaaaataaaaaagtcatcgctcttgatatgagtgctttaattgcaggtgcaaaatacagaggagaatttgaagatagattaaaagctgtggttaatgaagtgataaaaagtgaaaatatcattctttttatcgatgaaattcacactatagtaggagctggagcgagtgaaggcagcatggatgcggcaaatattttaaaacctgctcttgcaagaggtgaactccataccataggcgcaactactttaaaagaatatcgtaaatattttgaaaaagatgcagccttgcaacgccgttttcaacctgtaaatgtaggtgagccaagtgttaatgaggctttggctatgttaaggggtataaaagaaaagcttgaaattcatcataatgtaaccataaatgatagtgctttagtagccgcagctaaactttcaaagcgttatatagcagatcgttttttacctgataaggccattgatttaatcgatgaagctgcagctgaactgaaaatgcaaattgaaagcgaaccaagttctttaagaaaagtacgcaaagatatagaaactttagaagttgaaaatgaagctttaaaaatggaaaatgatgaaaaaaatcaaaaaagactcgatgaaatcgcaaaagaactagctaatttaaaagaaaaacaaaatgccctaaattcacagtttgaaaatgaaaaaagtgtttttgatggcataagtgctaagaaaaaagaaattgatctgcttaaaaatgaagcttctttggctaaagctagaggtgaatttcaaaaagcagccgagctagagtatggaaaaattccaagtcttgaaaaagaagtagaaattttagaagataaatggaaaaaaatgagtgaaaatggagttttacttaaaaatcaagtagatgaggatttggttgctggaattttaagcaaatggacgggtattagcgtgcaaaaaatgttaacttctgaaaaacaaaaattcttagaagtggaaaaacatttaaaagaaagtgtcataggacaagataaggccttaagtgctttagctagagccattaaacgtaacaaagcagggcttaatgcggacaataaacctataggaagctttttatttttagggccaacaggggtaggaaaaacacaatcggctaaagctttggcaaaatttttatttgatgatgaaaaagcaatgattcgctttgatatgagtgaatttatggaaaaacatagtgtttcaagactcttaggtgcgcctccaggatatataggacatgaagaaggtggagagcttactgaagccgtacgaagaaaaccttatagcgtgcttttgtttgatgaagttgaaaaagcacataaagatgtatttaatgtgcttttagggattttagatgatggtagagcaaccgatagcaaaggtgtaacagtggattttaaaaataccattatcattctaacttctaatatcgcctcaaacgctattatgaatttaagcggaaaagaacaagaagatgcggtaaaaaatgagttaaaaaatttctttaaacctgagtttttaaaccgtttagatgatattatcacctttaatccacttggaaaagatgaagcttatgaaatagtcaagcttttatttaaagatttacaaatgagcttagaaaacaagggaataaaagcaagtttaagcgaaaatgcagcccttttaatcgctaaagatggttttgaccctgattttggtgctagacctttaagaagagctatttatgatcttatagaagataaattaagcgatatgatacttgctgatgaacttcatgaaaatgatagcattatcattgatgcaaaagatgatgaaataatcatcaaaaaagcttaa

SEQ ID NO: 7320 - protein, 857 aa, Campylobacter jejuni
MANIQDFLTDNMLSNLESAASLAIHSKNNEVVPLHLLWALSVDSTSILNQILNKLNISKEALELEIKSRISKLATSSNVNRENIRFSNELINSLENAKGLMSANGDSYLSVDTWLISESQKSPIKEILAQFLDLREFQKELESLRAGRKMDSKTSDETLDSLNKFGIDLTLKASEGKLDPVIGREEEIERLMQILIRKTKNNPILLGEPGVGKTAIVEALAQRIIKKDVPKSLQNKKVIALDMSALIAGAKYRGEFEDRLKAVVNEVIKSENIILFIDEIHTIVGAGASEGSMDAANILKPALARGELHTIGATTLKEYRKYFEKDAALQRRFQPVNVGEPSVNEALAMLRGIKEKLEIHHNVTINDSALVAAAKLSKRYIADRFLPDKAIDLIDEAAAELKMQIESEPSSLRKVRKDIETLEVENEALKMENDEKNQKRLDEIAKELANLKEKQNALNSQFENEKSVFDGISAKKKEIDLLKNEASLAKARGEFQKAAELEYGKIPSLEKEVEILEDKWKKMSENGVLLKNQVDEDLVAGILSKWTGISVQKMLTSEKQKFLEVEKHLKESVIGQDKALSALARAIKRNKAGLNADNKPIGSFLFLGPTGVGKTQSAKALAKFLFDDEKAMIRFDMSEFMEKHSVSRLLGAPPGYIGHEEGGELTEAVRRKPYSVLLFDEVEKAHKDVFNVLLGILDDGRATDSKGVTVDFKNTIIILTSNIASNAIMNLSGKEQEDAVKNELKNFFKPEFLNRLDDIITFNPLGKDEAYEIVKLLFKDLQMSLENKGIKASLSENAALLIAKDGFDPDFGARPLRRAIYDLIEDKLSDMILADELHENDSIIIDAKDDEIIIKKA

SEQ ID NO: 7321 - DNA, 2580 bp, Caulobacter crescentus
  CDS (1)..(2580): transl_table=11
atgaatatcgacctctattccgaccgcgccaaacaggcggtccagtcggcccagagcctcgcgctcgcccggggccatcagcagttcgcgcccgaacacattctcaaggtcctgctcgaggagaaggacgggctttcccgcgccctgatccagagcgccggcggccgccccgaccagttggacggcggcgtcgagaccctgctggccaagaccccgcgcgtcgacggcgccggcggccagctctacatgaagcccgacaccgcgcgtgtgttcgccgaggccgaaaagtcggccaaggcggcgggcgacgcctttgtcaccaccgagcgcctgctgatcgccatcgccaaggaaggcggcgaggcggccaagctcttcaaggaggccggcgtctcggcccagagcctggagaccgccgccaacgccatgcgcaagggccgcaccgccgacagcgccaacgccgaggaaggctatgaggcgctcaagcgctacgcccgcgacctgacggcggccgcgcgcgacggcaagctcgaccccgtgatcggccgcgacgaagagatccgccgcacgatccaggtcctgtcgcgccgcaccaagaacaaccccgtcctgatcggcgagccgggcgtgggcaagaccgccatcgtcgagggcctcgctctgcgcatcgtcaacggcgacgtgcccgaaagcctgaaggacaagaagctcttgtcgctggacatgggcagcctgatcgccggcgcgaaatatcgcggcgagttcgaggagcggctgaaggccgtgctcggcgaagtcaccgccgccgagggttcgatcatcctgttcatcgacgagatgcacaccctggtcggggccgggaagggcgacggggcgatggacgcctccaacctcctgaagcccgccctggcgcgcggcgagctgcactgcgtgggcgccaccacgctggacgagtaccgcaagcacgtcgagaaggacgcggccctggctcgccggttccagccggtgttcgtcagcgagccgacggtggaagacaccgtctcgatcctgcgcggcctgaaggagaagtacgaggtccaccacggggtgcggatcagcgacagcgccatcgtcgccgccgcgacccttagcaaccgctacatcgccgaccgcttcctgcccgacaaggccatcgatctcgtcgacgaggcctccagccgcgtgcgcatgcagatcgactccaagcccgaagagctggacgagatcgaccggcgtctggtgcagctgaagatcgagcgcgaggctctgtccaaggaaaccgacgcggcctccaagcagcgcctggagaacctggaggtcgagatcgacgacctgcagttccgctccgacgagatgaccgcccgctggaaggccgagaaggagaaggtcggcggcgccgcccaggcccgtgaggcgctcgaccgcctgcgcgccgacctcgccaacgcccagcgcgccggcgacttcgcccgcgccggccagatccagtacggcgagatcccggccctggagcgccgcctggccgaggccgaagccggcgacacccaggccctgacccccgaagtggtcgacgccgagcagatcgccgccgtggtcagccgctggaccggcgttccggtcgagaagatgctggaaggcgagcgcgagaagctgctcaagatggaggacgaactgcgcggtcgcgtggtcggccaggacgaggcgctcgaagccgtgtccgacgccgtacgccgggcgcgcgcgggtctgcaggatccgtccaagccgatcggctcgttcctgttcctgggccccacgggcgtgggcaagaccgagctgacaaagagcctggccgagttcctgttcgccgacgaggcggccatcacccggatggacatgtccgagtacatggaaaagcactcggtcagccgcctgatcggcgcgcctcccggctatgtcggctatgacgagggcggggcgctgaccgaggcgatccgtcgtcgtccctaccaggtcgtgctgttcgacgagatcgagaaggctcaccccgacgtcttcaacgtgctgctgcaggtgctggacgacggtcgcctgaccgacggtcagggccgcacggtcgacttccgcaacacgctgatcatcatgaccagcaacctgggcgccgaatacctggcgagccaggaagacggcgaggacgtcgaagcggtccggccgatggtgatgaatacggtgcgcggccacttccggcctgagttcctcaaccggatcgacgagatcatcctgttcaagcgcctgtcgcgccacaacatgggcgacatcgttcgcatccagctgcagcgcgtcgaaaagctgctggccgatcgccgcatggccctggccctggacgccgaggccctgaactggctggccgacaagggctatgaccccgtctacggcgcgcgccccttgaagcgcgtgatccagaaggaactggtcgacccgatcgccaagaaactgctggccggcgagatcgaggacggcggggtgatcgccgtcggggtcacggacgggcagctgtcgttcggaaaagcggtgctgcagtaa

SEQ ID NO: 7322 - protein, 859 aa, Caulobacter crescentus
MNIDLYSDRAKQAVQSAQSLALARGHQQFAPEHILKVLLEEKDGLSRALIQSAGGRPDQLDGGVETLLAKTPRVDGAGGQLYMKPDTARVFAEAEKSAKAAGDAFVTTERLLIAIAKEGGEAAKLFKEAGVSAQSLETAANAMRKGRTADSANAEEGYEALKRYARDLTAAARDGKLDPVIGRDEEIRRTIQVLSRRTKNNPVLIGEPGVGKTAIVEGLALRIVNGDVPESLKDKKLLSLDMGSLIAGAKYRGEFEERLKAVLGEVTAAEGSIILFIDEMHTLVGAGKGDGAMDASNLLKPALARGELHCVGATTLDEYRKHVEKDAALARRFQPVFVSEPTVEDTVSILRGLKEKYEVHHGVRISDSAIVAAATLSNRYIADRFLPDKAIDLVDEASSRVRMQIDSKPEELDEIDRRLVQLKIEREALSKETDAASKQRLENLEVEIDDLQFRSDEMTARWKAEKEKVGGAAQAREALDRLRADLANAQRAGDFARAGQIQYGEIPALERRLAEAEAGDTQALTPEVVDAEQIAAVVSRWTGVPVEKMLEGEREKLLKMEDELRGRVVGQDEALEAVSDAVRRARAGLQDPSKPIGSFLFLGPTGVGKTELTKSLAEFLFADEAAITRMDMSEYMEKHSVSRLIGAPPGYVGYDEGGALTEAIRRRPYQVVLFDEIEKAHPDVFNVLLQVLDDGRLTDGQGRTVDFRNTLIIMTSNLGAEYLASQEDGEDVEAVRPMVMNTVRGHFRPEFLNRIDEIILFKRLSRHNMGDIVRIQLQRVEKLLADRRMALALDAEALNWLADKGYDPVYGARPLKRVIQKELVDPIAKKLLAGEIEDGGVIAVGVTDGQLSFGKAVLQ

SEQ ID NO: 7323 - DNA, 2604 bp, Chlamydia muridarum
  CDS (1)..(2604): transl_table=11
atggagaagttttcagacgcggtcagcgaggccttagaaaaggcttttgagttagccaaagatgctaagcattcttatgtaacagaaaatcatttgctaaagagtcttttgcaaaacccaggttctttgttctgtttagttatcaaggatgtgcatgggaatctaggactattaacttctgctgtggatgacgctttgcatagagagccaactgtggttgagggtgcagctattcccaaaccatcgccaagtttacagcaattattgctaaacgctcaagaagaagctcgaagtatgggggatgaatatctctctggagatcacttgttattagctttttggaaaactaccaaagagccttttgcttcatggagaaaaacagtaaaaacttctccggaagctttgaaagaattaatcatcaaattaagacaaggaagtcgtatggactcgcccagtgccgaagaaaatctaaaagggttagagaaatactgtaaaaatctgactattcttgcaagagaaggcaaattggatcctgtgatcggtcgagatgaagagattaggcgtacgatacaggtcctttctagacgaaccaagaataatcccatgttgataggagagcctggggttggaaagactgcgattgccgaaggacttgctcttcggattgtgcaaggagatgttccagaaagtttaaaggataagcatctctacgtgctagatatgggagcgctgattgctggtgcgaaatatcgaggagaatttgaagagcgtttgaaaagcgttctgaaaggagtagaagcttcggaaggagcatgcattctatttatcgacgaggtacataccttagttggggcaggagccacagatggggctatggatgctgcaaatttattaaagccagctttagctcgaggaacgttgcactgtattggggcaacgactttgaatgaatatcagaagtacatcgaaaaggatgctgctttagaaagacgtttccaacctatttttgtcaccgagccctccttggaagatgccgtttttattcttcgaggattacgagaaaagtacgaaatttttcatggggtacgcattacagaaggagctttgaatgctgctgtagttctttcttatcgttatattacggatcgttttcttccagacaaggcgattgatttgatcgatgaggctgctagtttgattcgtatgcagataggaagtttacctttgcctatcgatgaaaaagagcgggaattgtcagctttgattgttaagcaagaggctattaagcgggagcaggctcctgcttatcaggaagaagccaatgaaatgcaaaaagctatcgatcgcgttaaagaagagctggcggctttacggttgcgctgggatgaagaaaaagggttaattgcgggattaaaagagaaaaaaaattctttagaaaatttaaaatttgcagaagaagaagctgagaggaccgcggactacaacagagtagcggaacttcgctatagtctcattccttcacttgaaaaagaaattcgtttggcggaagaagctttgaatcagagagatgggcgtcttttgcaggaagaggtggatgagcggttaattgctcaagttgttgccaattggactgggatccctgtgcaaaaaatgttagaaggagagtctgagaagttattagtcttggaagaatctttggaagaacgggtggtaggacagccgtttgcgattactgctgttagtgattctattcgatctgctcgagtaggtttaagcgatccacagcgtccactaggtgtgtttctctttttagggcctacaggagtcgggaaaacggaacttgctaaggccttagcagagcttttattcaataaagaagaagctatgattcggtttgatatgaccgaatatatggaaaaacattctgtttcaaaattaataggctctcctccaggatatgtaggttacgaagaggggggtagcctttccgaagccttaagaaggcgtccttattctgtagttctttttgatgagatagagaaagctgacaaagaagtatttaatattttgttacaaatttttgatgacggaattcttactgatagcaagaaacgtaaagtaaactgtaagaatgctcttttcattatgacatctaatattgggtcacaagaattggcggattattgtgcgaagaaggggactatagtcgataaagaggctgtgttatctgtcgttgctcctgcactaaaaaattattttagtccggaatttatcaaccggatagatgaaatccttccatttgttcctttgactacagaagatattgtcaaaatcgtaggcattcaaatgaatcgagtggctttgcgtttgttagaaagaagaatttcattaacttgggatgattctgtggttctatttcttagcgagcaaggttatgatggtgcttttggggctcgtcctttgaaacgtttgattcaacaaaaagtggtgactatgttgtctaaggctcttttgaagggggatattaaatccggcatgtcagtagagcttactatggccaaggatgttgttgtttttaaaactaaaacaaattctgtggtgtag

SEQ ID NO: 7324 - protein, 867 aa, Chlamydia muridarum
MEKFSDAVSEALEKAFELAKDAKHSYVTENHLLKSLLQNPGSLFCLVIKDVHGNLGLLTSAVDDALHREPTVVEGAAIPKPSPSLQQLLLNAQEEARSMGDEYLSGDHLLLAFWKTTKEPFASWRKTVKTSPEALKELIIKLRQGSRMDSPSAEENLKGLEKYCKNLTILAREGKLDPVIGRDEEIRRTIQVLSRRTKNNPMLIGEPGVGKTAIAEGLALRIVQGDVPESLKDKHLYVLDMGALIAGAKYRGEFEERLKSVLKGVEASEGACILFIDEVHTLVGAGATDGAMDAANLLKPALARGTLHCIGATTLNEYQKYIEKDAALERRFQPIFVTEPSLEDAVFILRGLREKYEIFHGVRITEGALNAAVVLSYRYITDRFLPDKAIDLIDEAASLIRMQIGSLPLPIDEKERELSALIVKQEAIKREQAPAYQEEANEMQKAIDRVKEELAALRLRWDEEKGLIAGLKEKKNSLENLKFAEEEAERTADYNRVAELRYSLIPSLEKEIRLAEEALNQRDGRLLQEEVDERLIAQVVANWTGIPVQKMLEGESEKLLVLEESLEERVVGQPFAITAVSDSIRSARVGLSDPQRPLGVFLFLGPTGVGKTELAKALAELLFNKEEAMIRFDMTEYMEKHSVSKLIGSPPGYVGYEEGGSLSEALRRRPYSVVLFDEIEKADKEVFNILLQIFDDGILTDSKKRKVNCKNALFIMTSNIGSQELADYCAKKGTIVDKEAVLSVVAPALKNYFSPEFINRIDEILPFVPLTTEDIVKIVGIQMNRVALRLLERRISLTWDDSVVLFLSEQGYDGAFGARPLKRLIQQKVVTMLSKALLKGDIKSGMSVELTMAKDVVVFKTKTNSVV

SEQ ID NO: 7325 - DNA, 2604 bp, Chlamydia trachomatis
  CDS (1)..(2604): transl_table=11
atggagaaattttcagatgcagtaagcgaagccttagaaaaggcgtttgagttagctaaaaactctaagcattcctacgtgacagaaaaccatttgctgaaaagtcttttgcaaaatccaggttccctattttgtttggtcattaaggatgtgcacggtaatcttggtttgcttacttctgctgtggacgacgccttacgcagagaaccaactgtagtcgagggaaccgctgttgctagtccttctccaagtttacagcagttgttgctcaatgcgcatcaagaagctagaagtatgggtgacgaatatctatcaggggatcatttgttactagctttttggcgatcgactaaagagccttttgcttcttggagaaaaactgtaaaaactacctctgaagcgttgaaagaattaattactaaattaagacaaggaagtcgtatggactcacctagtgctgaagaaaatctgaaaggattagagaaatactgcaaaaatttgactgtacttgcaagagaaggcaagcttgatcctgtgattggtcgagatgaagagattagacgtacgatacaggttctttctagacgaacaaagaataatcctatgttgataggggagcccggagttgggaaaacagcaatcgctgaaggacttgctcttcgcatagtgcaaggggatgttccagagagtttaaaggaaaagcatctgtatgtactggatatgggagctttgattgcaggtgccaagtatcgaggagagtttgaagagcggttaaaaagtgtattgaagggtgtagaagcttctgaaggcgagtgtatcctattcattgatgaagtgcatactttagtaggagcgggagctacagatggagctatggatgcagcgaatctattaaagcctgctttagcacgaggcactttgcattgtattggcgctacgactttgaatgaataccaaaaatatatagagaaagacgcggctttggaacggcgtttccagcctatttttgtaacagaaccttctttggaagatgctgtattcattctccgggggttaagggaaaaatatgaaatttttcatggtgtgcgcattacagaaggggctttgaatgcagctgtagttctttcttatcgttacatcacagaccgatttcttcctgataaggcgattgacctaattgatgaggctgcgagtttaatccgtatgcaaataggaagtttacctctgcctattgatgaaaaggaaagagaattatcagctttaatcgtgaaacaagaagctattaaacgcgagcaagcaccagcttatcaggaagaggctgaagacatgcaaaaagcaattgaccgggttaaggaagagctggccgctttacgcttgcgctgggatgaagaaaaaggattaattacaggattaaaagaaaagaagaatgctttagaaaatttaaaatttgccgaagaggaagctgagcgtactgccgattacaatcgggtggcagaactacgctatagtttgattccttctttggaggaagaaattcatttagctgaggaagctttaaatcaaagagatgggcgcctgcttcaagaggaagttgatgagcggttgattgcgcaagttgttgcgaattggactggaatccctgtgcaaaaaatgttggagggagaatctgaaaagttattggtgttggaggagtctttagaagaaagggttgttggacaacctttcgctattgccgcagtcagtgattcgattcgagctgctcgagtaggattgagtgatccgcagcgtcctctaggagtgtttctatttcttggacctacaggggtagggaaaactgagcttgctaaagcattagcagagcttttatttaataaggaagaagcgatgattcggtttgacatgaccgaatatatggaaaaacattccgtttccaaattgataggatctcctccagggtatgtaggatatgaagaaggagggagtctctcagaagctttaagaagacgaccttattctgttgttctttttgatgagatagaaaaagcagataaagaagtatttaatattttattgcagatttttgatgatgggattcttacggatagcaagaagcgtaaggtaaattgtaagaatgctcttttcattatgacatcaaatattggttcgcaagagcttgctgattattgtactaagaaaggaactatcgtagacaaagaagctgtgctatctgttgttgcccctgcgcttaaaaattattttagtccagaatttatcaatcgtatcgatgacattctgcctttcgttcctttgactacggaagacattgtaaaaattgtcggtattcaaatgaatcgggttgctttacgtttgctggaaagaaaaatttcgttaacttgggatgattctttagtgctatttctcagtgagcaaggttatgacagcgcttttggagctcgccctctgaagcgtttgatacagcaaaaagtagtgactatgttgtctaaagctcttttgaaaggagatatcaaacctggaatggcggtggagcttactatggcaaaagatgtagttgtgtttaaaattaaaacaaatccagctgtgtag

SEQ ID NO: 7326 - protein, 867 aa, Chlamydia trachomatis
MEKFSDAVSEALEKAFELAKNSKHSYVTENHLLKSLLQNPGSLFCLVIKDVHGNLGLLTSAVDDALRREPTVVEGTAVASPSPSLQQLLLNAHQEARSMGDEYLSGDHLLLAFWRSTKEPFASWRKTVKTTSEALKELITKLRQGSRMDSPSAEENLKGLEKYCKNLTVLAREGKLDPVIGRDEEIRRTIQVLSRRTKNNPMLIGEPGVGKTAIAEGLALRIVQGDVPESLKEKHLYVLDMGALIAGAKYRGEFEERLKSVLKGVEASEGECILFIDEVHTLVGAGATDGAMDAANLLKPALARGTLHCIGATTLNEYQKYIEKDAALERRFQPIFVTEPSLEDAVFILRGLREKYEIFHGVRITEGALNAAVVLSYRYITDRFLPDKAIDLIDEAASLIRMQIGSLPLPIDEKERELSALIVKQEAIKREQAPAYQEEAEDMQKAIDRVKEELAALRLRWDEEKGLITGLKEKKNALENLKFAEEEAERTADYNRVAELRYSLIPSLEEEIHLAEEALNQRDGRLLQEEVDERLIAQVVANWTGIPVQKMLEGESEKLLVLEESLEERVVGQPFAIAAVSDSIRAARVGLSDPQRPLGVFLFLGPTGVGKTELAKALAELLFNKEEAMIRFDMTEYMEKHSVSKLIGSPPGYVGYEEGGSLSEALRRRPYSVVLFDEIEKADKEVFNILLQIFDDGILTDSKKRKVNCKNALFIMTSNIGSQELADYCTKKGTIVDKEAVLSVVAPALKNYFSPEFINRIDDILPFVPLTTEDIVKIVGIQMNRVALRLLERKISLTWDDSLVLFLSEQGYDSAFGARPLKRLIQQKVVTMLSKALLKGDIKPGMAVELTMAKDVVVFKIKTNPAV

SEQ ID NO: 7327 - DNA, 2580 bp, Chromobacterium violaceum
  CDS (1)..(2580): transl_table=11
atgcgattcgacaagctgaccaccaagttccagcaggcgctgggggatgcccagagcctcgccgtggcgaacgacaacccatacatcgagccgcagcacctgctgctggccatgctggacgacgccgaagccggcgtcggcggcctgctggcgcgcgccggcgtcaacgtgccggcgctgaaggccggtctcaagcaggcgatcgaccgcctgccgcgggtgcagggccatggcggcgagatcaccgtgtcgcgcgatctggccaatctgctcaacatcgccgacaagatcgcgatgaagctgggcgacgaattcatcgccagcgagctgtatctgtccgcgctgtcacaggacaagggcgaggccggccgcttgctgaaagagcacggcggcaatcacgcgtccatccaggcggcgatagacgcggtgcgcggcggcgagagcgtcaacagcgccgacgccgaaggccagcgcgaggcgctgaagaaatacaccatggatctgaccgagcgcgcccgccagggcaagctggacccggtgatcggccgcgacgacgaaatccgccgcgcgatccaggtattgcagcgccgcaccaagaacaacccggtgctgatcggtgagccgggcgtgggcaagaccgccatcgtcgaaggtctggcgcagcggatcgtcaacggcgaagtgccggaaagcctgaagaacaagcgcctgctggtgctggacctggcggcgctgatcgccggcgccaagtaccgcggcgagttcgaggagcggctgaaggcggtgctgaacgacctctccaaggacgacggccagacgctgatcttcatcgacgaaatccacaccctggtgggcgcgggcaaggccgacggcgcgatggacgccggcaacatgctgaagccggcgctggcgcgcggcgagctgcactgcatcggtgccaccacgctggacgagtaccgcaagtacatcgagaaggacgccgcgctggagcgccgcttccagaaggtgctggtgggcgagccgtcggtggaggacaccatcgccatcctgcgcggcctgcaggaaaagtacgaaatccaccacggcgtggacatcaccgacccggccatcgtcgccgcggcggaactgtcccagcgctacatcaccgaccgcttcctgccggacaaggcgatcgacctgatcgacgaggccgccagccgcatcaagatggagctggactccaagccggaggcgatggacaagcttgaccgcaggctgatccaactgaagatcgagcgcgaagcggtgaacaaggaaagcgacgaagccagccagaaacggctgaagctgatcgaggacgagatcgccgagctgtcgcgcgaatacgccgacctggaagagatctggaaggccgagaaggccgcccagcagggctcgcagagcatcaaggaggagatcgaccgcctgaaggtggacatggaggagctcaagcgcaagggcgactggcagaaattggcagaactgcagtacggcaagctgccgcagctcgaggcgcggctgaaggaggccgagtccgccggcgacaagggcgaggccaagcccaaccgcctgctgcgcacccaggtgggcgccgaggagatcgccgaggtggtcagccgggccaccggcatcccggtgtccaagatgttgaccggcgagcgcgaaaagctgctgaagatggaggatgtgctgcaccagcgcgtggtcgggcaggacgaggcggtcagcgcggtggccgacgccatccgccgctcgcgctccggcctggccgatcccaacaagccgtacggctccttcctgttcctgggaccgaccggcgtcggcaagaccgagctgtgcaagacgctggccagcttcctgttcgacagcaaagaccacctgatccgcatcgacatgtccgagtacatggagaagcattcggtggcgcggctgatcggcgcgccgcccggttacgtcggctacgaggaaggcggctatctcaccgagcaggtgcgccgcaagccgtacagcgtgatcctgctggacgaggtggaaaaggcgcatccggacgtgttcaacgtgctgctgcaggtgctggacgacggccggctcacagatggccagggccgcaccgtggacttcaagaacacggtgatcgtgatgacgtcgaacatcggcagccagcagatccaggcgatggccaccgacgattaccaggtgatcaagctcgccgtgatggcggaagtgaagacgcagttccggccggaattcatcaaccgcatcgacgaggtggtggtgttccacggcctggacgagaaacacatccagtccatcgcccgcatccagttgaagagcctggaaaaccgcttggccaagctggagctgagcctgcagatcagcgacgaggcgctggcgctgttgtccgaagccggtttcgacccggtctacggcgcgcggccgctgaagcgggcgatccaggccgagctggaaaacccgctggccaaggccatcctggccggcaagtacccgccgaaagccacggtgatggtggaagcccggaacggacaactggctttcgcctga

SEQ ID NO: 7328 - protein, 859 aa, Chromobacterium violaceum
MRFDKLTTKFQQALGDAQSLAVANDNPYIEPQHLLLAMLDDAEAGVGGLLARAGVNVPALKAGLKQAIDRLPRVQGHGGEITVSRDLANLLNIADKIAMKLGDEFIASELYLSALSQDKGEAGRLLKEHGGNHASIQAAIDAVRGGESVNSADAEGQREALKKYTMDLTERARQGKLDPVIGRDDEIRRAIQVLQRRTKNNPVLIGEPGVGKTAIVEGLAQRIVNGEVPESLKNKRLLVLDLAALIAGAKYRGEFEERLKAVLNDLSKDDGQTLIFIDEIHTLVGAGKADGAMDAGNMLKPALARGELHCIGATTLDEYRKYIEKDAALERRFQKVLVGEPSVEDTIAILRGLQEKYEIHHGVDITDPAIVAAAELSQRYITDRFLPDKAIDLIDEAASRIKMELDSKPEAMDKLDRRLIQLKIEREAVNKESDEASQKRLKLIEDEIAELSREYADLEEIWKAEKAAQQGSQSIKEEIDRLKVDMEELKRKGDWQKLAELQYGKLPQLEARLKEAESAGDKGEAKPNRLLRTQVGAEEIAEVVSRATGIPVSKMLTGEREKLLKMEDVLHQRVVGQDEAVSAVADAIRRSRSGLADPNKPYGSFLFLGPTGVGKTELCKTLASFLFDSKDHLIRIDMSEYMEKHSVARLIGAPPGYVGYEEGGYLTEQVRRKPYSVILLDEVEKAHPDVFNVLLQVLDDGRLTDGQGRTVDFKNTVIVMTSNIGSQQIQAMATDDYQVIKLAVMAEVKTQFRPEFINRIDEVVVFHGLDEKHIQSIARIQLKSLENRLAKLELSLQISDEALALLSEAGFDPVYGARPLKRAIQAELENPLAKAILAGKYPPKATVMVEARNGQLAFA

SEQ ID NO: 7329 - DNA, 2598 bp, Clostridium acetobutylicum
  CDS (1)..(2598): transl_table=11
atggatgttgataaattaacattaaaagttcagcaagctataaatgattgtcaaactatagctgtaaggtataatcatcaacaaattgatacaatccacctttttatggcaattatatcccaagaagatggacttataccaaacatattaggcaaaatgggtgctgatgtggagactgttaaaagagatacagaagctgaacttgatagaatgcctaaagtacttggagaaggtgcacaaaatgcttctatttatgctacaagaagatttgaagaggtatttgtaaggggagaaaaaatatcaagagattttaaagatttatatataagtgtagagcatgttatgcttgcattaatggacatagatagtggagcaataaagagcattttagataaaaacaatatttctaaaaaagaatttttaaaagcactcagggaagtaaggggaaaccaaagagttgatacttcagatcctgagggtacttatgatgcgctaaataaatatggaagagatcttgttaaagatgcaaaaaaacacaaattagatccagttataggtagagacgaagaaataagaagagttataagaatactatcacgaagaaccaaaaataacccagtgctaattggtgaaccaggagttggtaaaactgctatagtagagggacttgcagagagaattgtaagaggagatgtcccagaggggttaaaaaacaaaataatattttctcttgatatgggatcattggttgctggtgcaaaatacagaggtgaatttgaggagagacttaaagctgtattgaaggaagttgagagaagtgaagggaagataattctctttatagatgaaattcatactatagttggggctggaaaaacagaaggcgcaatggatgctggaaatataataaaaccaatgcttgctaggggagaacttcactgtataggggctacaacctttgatgagtacagaaagtatatagaaaaagacaaggctcttgaaagaagattccaaaaggttcagatagatgaacctacagttgatgatgctatatcaatacttagaggactgaaagaaagatttgaaatacaccatggagttagaatacatgataatgcaatagttgcagctgcaaagttgtctgatagatatataacaggaaggtttttgccagataaagcaatagacttaattgatgaagctggggcaatggtaagaatggaaatagatagtatgccaactgaattggatatgctgaaaagaaaaatatttcaaatggagatagaaaaagaggctttaagtaaggaaagtgataaattttctcgtgaaaggcttgaatccatacaaaaagaacttagtgatttaaaagataaagataaagcaatgacagctaaatacgacaaagaaaaagctcaaatacaaggtataaaggaacttaaaacaaaattagatgaaataagaggtcagattgaaaaagcggaaagagaatatgacttgaataaggcagcagaacttaaatatggtgaggtgccaaagcttgaacatgaaattgaagaaaaagaaaatctgataaaacaaaatgggcaaaatgcaatgcttaaagaagaagtaacagaagaacaagtttctaatatagtttcaaaatggactggaatacctgtttcaaaattggttgaaggtgaaagaaataagttaatgagactttcagatgagcttgaaaaaagagtagtaggtcaaactgaagctgttaaatcagttgcggatgctgttattagagcaagagcagggcttaaagatatgagtaaacctataggctcatttatattcttgggtccaacaggagttggaaaaacagaactcgccaaaaccttagcaagagttatgtttgatagtgaagataatataataagaattgatatgtcagagtacatggaaaagtattccgtgtcaaggcttataggatcacctccaggatatgtaggatatgaagaaggaggacagcttacagaagctgttagaagaaaaccatatagtgtaatactatttgatgaaatagaaaaggcacatagtgatgtattcaatatattccttcaaatatttgatgatggaagacttacagataataagggcaatacaattgattttaaaaattccataattataatgacctccaatataggcagtgagcaccttcttaataataagggggtatcaaatgttgatgaggaaactaaagataaagtcatgaatgaattaaagggtagatttaagcctgaatttttaaatagacttgatgatataattatgtttaagccactatccattaatgaaataggaaaaataattgatatattccttgaaaatataaaatcaaagcttaaagaaaaaaatataaagattgatattgctgaggaagctaaaaaaatcatagcagaagaaggatatgatcctgtttatggtgcaagaccattgaagagatatatagagaatactattgaaactcatatagctaaaatgtttatatcaggagagatttcagagggtgacatcttgaaaatagagggctctgattcgaagcttacaatagtaaaaaaataa

SEQ ID NO: 7330 - protein, 865 aa, Clostridium acetobutylicum
MDVDKLTLKVQQAINDCQTIAVRYNHQQIDTIHLFMAIISQEDGLIPNILGKMGADVETVKRDTEAELDRMPKVLGEGAQNASIYATRRFEEVFVRGEKISRDFKDLYISVEHVMLALMDIDSGAIKSILDKNNISKKEFLKALREVRGNQRVDTSDPEGTYDALNKYGRDLVKDAKKHKLDPVIGRDEEIRRVIRILSRRTKNNPVLIGEPGVGKTAIVEGLAERIVRGDVPEGLKNKIIFSLDMGSLVAGAKYRGEFEERLKAVLKEVERSEGKIILFIDEIHTIVGAGKTEGAMDAGNIIKPMLARGELHCIGATTFDEYRKYIEKDKALERRFQKVQIDEPTVDDAISILRGLKERFEIHHGVRIHDNAIVAAAKLSDRYITGRFLPDKAIDLIDEAGAMVRMEIDSMPTELDMLKRKIFQMEIEKEALSKESDKFSRERLESIQKELSDLKDKDKAMTAKYDKEKAQIQGIKELKTKLDEIRGQIEKAEREYDLNKAAELKYGEVPKLEHEIEEKENLIKQNGQNAMLKEEVTEEQVSNIVSKWTGIPVSKLVEGERNKLMRLSDELEKRVVGQTEAVKSVADAVIRARAGLKDMSKPIGSFIFLGPTGVGKTELAKTLARVMFDSEDNIIRIDMSEYMEKYSVSRLIGSPPGYVGYEEGGQLTEAVRRKPYSVILFDEIEKAHSDVFNIFLQIFDDGRLTDNKGNTIDFKNSIIIMTSNIGSEHLLNNKGVSNVDEETKDKVMNELKGRFKPEFLNRLDDIIMFKPLSINEIGKIIDIFLENIKSKLKEKNIKIDIAEEAKKIIAEEGYDPVYGARPLKRYIENTIETHIAKMFISGEISEGDILKIEGSDSKLTIVKK

SEQ ID NO: 7331 - DNA, 2601 bp, Clostridium perfringens
  CDS (1)..(2601): transl_table=11
atgaatgcagataaaatgacattaagagtacaacaaagcttaaatgatgcttatgaaatagcagttaaatataataatcaacaattagatataattcacttattttcagcattagtaaatcaaaaagatggtttaattcctaatatatttgaaaaaatgggtgttaatatagattcattaaaaagagacattcatgttcaaatagatagaatgcctaaggttttaggagaagcggcacaatcatcaggggttactgctacaagaagaataaatgaagtattaataaaggcagaagaaatttcaaaacaatttgaagattcatatataagtgttgagcatgtaatgcttgcaatgatagatatagataaaaatggagctgtaggagaaatcttaagaaaaaataacataactaaagatggattcctaaaggttttaaatgaagttagaggaagtcaaagagtggattcacaagatccagaaggaacttatgaagctttagataaatacggtactaatttaatagaacttgtaaaacaacataaattagatcctgttataggaagagatgaagaaataagaagagctgttagaattctttcaagaaaaactaagaacaatccaatactaataggagaacctggagttggtaaaactgctatagttgaaggattagcagaaagaattgtaagaggagatgtgccagaaggactaaaggataaggtaattatctcattagatatgggtgcattaatagctggtgctaaatacagaggagaatttgaagaaagattaaaagctgttttaaaagaagttcaaagttcagaaggaaaaatacttttattcatagatgaaattcatacaattgtaggcgctggtaaaacagatggtgcaatggatgcaggaaacttaattaaaccaatgcttgcaagaggagaacttcactgcataggagccacaacttttgacgaatatagacaatatatagaaaaggataaagctctagagagaagattccaacctgtaatagttgaagaaccaacagttgaagaaactgtatctattttaagaggattaaaagaaagatttgaaattcaccatggaattagaatccatgactcagcaatagtagctgctgcaaaactttctcatagatatattcaagatagatatttaccagataaggctatagatttaatagatgaagctggtgctatgataagaagtgaaatagattctcttccaactgaattagatattataagaagaaagatcttaatgcttgaaactgaaaaggaagctttatcaaaagaaaatgatgatgcatctaaggaaagattagttgccttagaaaaagagcttgcagagcttcaagataaaaatgatgagatgacaattaaatatgaaaaagaaaaatctcatatttcagcagttagggacttaaaggctgaattagatgaagcaagaggattagctgaaaaatatgaaagagaatatgatttaaataaagttgcagaacttaaatatggaaaaattccagagcttgaacgtaaaataaaagaacaagaagcaagtatggaaaaagataatgaaaatgctttattaaaagaagaggttactgaaaatgaaatttcagaaataatctcaaaatggactggaattcctgttacaaaactagttgaaagtgaaagagaaaaacttttaagactagaagaagaattaagagaaagagtaataggtcaagatgaggctacaactgcagttgctaatgctgtaataagagcaagagcaggtcttaaagatgaaagaaaaccaataggatcatttatattcttaggacctactggagttggtaaaacagaacttgcaaaaactttagctagaaatttatttgatagtgaagacaatatagtaagaatagatatgtctgaatatatggaaaaacatgcagtatctagattaataggacctcctccaggatatgtaggatatgaagaagggggacaattaacagaggctgttagaagaaacccatattcagtaatattatttgatgaaatagaaaaagcacatgatgatgtatttaacttattccttcaaatattagatgatggtagattaacagataataaaggtaaaactgttgatttcaaaaacactataataattatgacttctaatataggtagtggatacttattagaaaataaatctggtgaaggtatagaagatgatattagagaaaatgttatgaatgaaatgaagttaagattcaaaccagaattcttaaacagagtagatgatatcataatgtttagacctttaagcagtgaaggaattaagaaaataatagatatcttcttaagagatgttgaaaatagattaagagaaagaaatataactcttgaagttactgatagagctaaggaaatattagctgaagaaggatatgatccagtatatggagctagaccattaaagagatatataagtaatgtcttagaaactgaaatagctaagaagataattgcaggagaaatttatgatggatctgttgctttaatagatggagtagatggaaaaattatagtttctagaaaataa

SEQ ID NO: 7332 - protein, 866 aa, Clostridium perfringens
MNADKMTLRVQQSLNDAYEIAVKYNNQQLDIIHLFSALVNQKDGLIPNIFEKMGVNIDSLKRDIHVQIDRMPKVLGEAAQSSGVTATRRINEVLIKAEEISKQFEDSYISVEHVMLAMIDIDKNGAVGEILRKNNITKDGFLKVLNEVRGSQRVDSQDPEGTYEALDKYGTNLIELVKQHKLDPVIGRDEEIRRAVRILSRKTKNNPILIGEPGVGKTAIVEGLAERIVRGDVPEGLKDKVIISLDMGALIAGAKYRGEFEERLKAVLKEVQSSEGKILLFIDEIHTIVGAGKTDGAMDAGNLIKPMLARGELHCIGATTFDEYRQYIEKDKALERRFQPVIVEEPTVEETVSILRGLKERFEIHHGIRIHDSAIVAAAKLSHRYIQDRYLPDKAIDLIDEAGAMIRSEIDSLPTELDIIRRKILMLETEKEALSKENDDASKERLVALEKELAELQDKNDEMTIKYEKEKSHISAVRDLKAELDEARGLAEKYEREYDLNKVAELKYGKIPELERKIKEQEASMEKDNENALLKEEVTENEISEIISKWTGIPVTKLVESEREKLLRLEEELRERVIGQDEATTAVANAVIRARAGLKDERKPIGSFIFLGPTGVGKTELAKTLARNLFDSEDNIVRIDMSEYMEKHAVSRLIGPPPGYVGYEEGGQLTEAVRRNPYSVILFDEIEKAHDDVFNLFLQILDDGRLTDNKGKTVDFKNTIIIMTSNIGSGYLLENKSGEGIEDDIRENVMNEMKLRFKPEFLNRVDDIIMFRPLSSEGIKKIIDIFLRDVENRLRERNITLEVTDRAKEILAEEGYDPVYGARPLKRYISNVLETEIAKKIIAGEIYDGSVALIDGVDGKIIVSRK

SEQ ID NO: 7333 - DNA, 2598 bp, Clostridium tetani
  CDS (1)..(2598): transl_table=11
atggatatagaaaaattaacactaaaagttcagcaaacaataaatgattctcaaaaaattgcagtaaagtataatcatcagcaattagagccatttcatctttttgcagctttagtttttcaagaagacggattaatcccaaatattttagggaaaatgaatataaatataaaagttttaagagatgaaataaaaagagaattaaatgaaatgcctaaggtattaggagatggagcgcaaaatagtggagtatatgctactagatcctttgaagaaatttttattagagcagaaagtatagctaaggattttaaggattcatatattagcgtggaacatataatgctttctctaatgcaaggaaggtctacttctattaaaaagatattagataaatttaatataagaaaagataagtttttaaatgtattacagcaggtgagaggaaaccaaagagttgatactcaggatcctgaaggaacttatgaggctttagtaaaatacggaagaaacttaatagaagatgctaaaaaacataaattagatcctgttataggtagagatgaagaaataagaagaattgtaagaattctttcaagaagaactaaaaataatccagtattaataggagatccgggagttggtaagacagctattattgaaggacttgctgaaagaatagtaagaggagatgtaccagaagggctaaagaataaaattatattttccttagatatgggtgctttaattgcaggagctaaattcagaggagaatttgaagagagattaaaagctgtacttaaggaagtcgaaaatagccaaggaaaaattatattattcatagacgaaatacacaatatagttggagcaggaaaaactgaaggatctatggatgcaggtaatttaataaaaccaatgttagctagaggagagctaaattgtattggagctactacctttgatgaatatagaaaatatatagaaaaagataaggcattagaaagaagatttcaaccagtaattatagatgaaccaacagtagaggatactatatcaataataagaggtcttaaggaaagatttgaaatacatcatggaataagaattcatgattcagctatcgtggcagcagcaaaattatctcaaagatatataacagacagatatcttccggataaggctattgacctaatagatgaagcaggggctatgataagaactgaaatagatagcttaccaacagaactagattctataaagaggaaaatatttcaaatggagatagaaaaagaagctctagctaaagaaaaagatagtagatcaaaagaaagattggaagatttagaaaaagaattaagcaatttaaaagaaaaagataaagagatgactgcaaaatatgaaaaagaaaaagaacaaataattaatatgagaaatttaaagcaaaagctagatgaagttaagggacagttagaaaaagcagaaagagagtatgatctaaataaagtagcagaattaaaatatggtataataccagggattaaaagtcaaatagaggaaaaagaaattcttataaaagaaaatagtcaagggaatatgctaaaagaagaagtaacagagaatgagatatctaaaataatatctcattggacaggaataccagtaacaaaacttattgaaggagagaaagacaaattattaagattagaagatgaacttaagagtagagttataggtcaagatgaagcagtagaagctgtttcaaatgctgtattaagagcaagagctggtatgaaagatcctcaaaaaccaataggatcatttatatttttgggaccaactggagttggtaagactgaattagctaaaactctatgcaaaaatttatttgatagtgaagaaaatataataagaatagatatgtcagagtatatggaaaagtattctgtatccagattaatcggagctcctccaggatatgtaggatatgaagaaggtggtcaacttacagaggcagttagaagaaaaccttattctgtaatacttttcgatgaaatagaaaaagctcatgatgatgtgtttaatatattcttgcaaatattagatgatggaagattaacagataataaaggaaaaacagttgactttaagaattgtataataataatgacatctaatataggtagttcctatcttttagaaaataaaaaagaagacggaatagatgaaacagttaaaaataaagtatctaatgccttaaaggatagatttaaaccagaatttttaaatagattagatgatataataatgtttaaaccacttacaaatagagaaataactaaaataatagatatattcctacaagatattgaaaataggctaaaagatagaaatataactttgattgtaacagaaaatgcgaaagaacttatggcaaaagaaggatatgatgcaatttatggagctagacctttaaaaagatatattgaaaatatattagaaactaaaatagcaaaacaaataataaaaggagatatatacgaaggatgtaaaataggagtagacataaaaggtgaagaaataataataggaaaaatataa

SEQ ID NO: 7334 - protein, 865 aa, Clostridium tetani
MDIEKLTLKVQQTINDSQKIAVKYNHQQLEPFHLFAALVFQEDGLIPNILGKMNINIKVLRDEIKRELNEMPKVLGDGAQNSGVYATRSFEEIFIRAESIAKDFKDSYISVEHIMLSLMQGRSTSIKKILDKFNIRKDKFLNVLQQVRGNQRVDTQDPEGTYEALVKYGRNLIEDAKKHKLDPVIGRDEEIRRIVRILSRRTKNNPVLIGDPGVGKTAIIEGLAERIVRGDVPEGLKNKIIFSLDMGALIAGAKFRGEFEERLKAVLKEVENSQGKIILFIDEIHNIVGAGKTEGSMDAGNLIKPMLARGELNCIGATTFDEYRKYIEKDKALERRFQPVIIDEPTVEDTISIIRGLKERFEIHHGIRIHDSAIVAAAKLSQRYITDRYLPDKAIDLIDEAGAMIRTEIDSLPTELDSIKRKIFQMEIEKEALAKEKDSRSKERLEDLEKELSNLKEKDKEMTAKYEKEKEQIINMRNLKQKLDEVKGQLEKAEREYDLNKVAELKYGIIPGIKSQIEEKEILIKENSQGNMLKEEVTENEISKIISHWTGIPVTKLIEGEKDKLLRLEDELKSRVIGQDEAVEAVSNAVLRARAGMKDPQKPIGSFIFLGPTGVGKTELAKTLCKNLFDSEENIIRIDMSEYMEKYSVSRLIGAPPGYVGYEEGGQLTEAVRRKPYSVILFDEIEKAHDDVFNIFLQILDDGRLTDNKGKTVDFKNCIIIMTSNIGSSYLLENKKEDGIDETVKNKVSNALKDRFKPEFLNRLDDIIMFKPLTNREITKIIDIFLQDIENRLKDRNITLIVTENAKELMAKEGYDAIYGARPLKRYIENILETKIAKQIIKGDIYEGCKIGVDIKGEEIIIGKI

SEQ ID NO: 7335 - DNA, 2550 bp, Corynebacterium diphtheriae
  CDS (1)..(2550): transl_table=11
atggctggttttaaccccacaacgaaaactcaagaggcattgcaagaggcgctgcagaaggcgtcggccgcaggtaatccggatatccgtccggagcacctccttgctgcgattttaggccaagaagatggcattgctattccggtattgcgcgctacgggcgtggaccccgatgtggttcgccgtgaagcagaagcattggtggccaagctgccaaaggctgaaggtgccaacttggcaaacccgaactttaaccgtgatgcgttaagcgttttaaacaacgcccaggagttggcgggtgagttaggcgacgagtacgtttctaccgaggtgctgctggctgcggtggcccgtgggactaacgatgctgccgagttgctgaccaagcgcggtgctacttacgacgtcatcaagggtgttttcccttcggtacgcggtaataagaaggtgactacggagtctccagaggatcagttccaagcattagagaagtactccactgacctgactgcgcgggcgcgggaaggcaaaattgatccggttattggccgtgatcaggagattaggcgtgtggttcaggtgctttctcgccgcactaagaacaatcctgttcttattggtgagcctggtgtgggcaagacggccatcgtcgaaggtcttgcgcgccgcattgtggcaggggatgtgccggagtcgctgaagggtaaaactctgattagcttggatcttggttccatggtggctggtgctaagtaccgtggtgaatttgaggagcgtttgaaggcggttctcgacgaaatcaagtctgctgagggcgagatcatcacctttatcgacgagctgcacaccattgtgggcgctggtgctaccggcgattccgctatggatgcaggcaatatgattaagccgctgttggctcgtggcgagctgcgtttggtgggtgctaccaccttggatgagtaccgcaaatacattgagaaggatgctgcgctggagcgtcgttttcagcaggtctttgtcggtgagccttcggtagaagatgccgtgggtattttgcgtggcttgaaggagcgctacgaggtgcaccatggtgtacggatccaggattcggcgttggtggctgctgctacgctgtcggatcgctatatcaccagcaggttcttgccggataaggctattgacttggtggatgaggctgcatcgcggttacgcatggagatcgattcttcgccgcaggagatcgatgagctggaacgtattgtgcgtcgccttgagattgaggaagtagcgctgtcgaaggaaacggacgctgcgtcgaaggatcgcttgatcaagttgcgtcaggagcttgccgacgagcgcgagaagctcggtgagcttgtggcacggtggaacaacgagaagggcgcgattaataaggttcgcgaagccaaggaagagctggagcggctgcgctcggagtcggaaatcgcggaacgcgacggcgactacggcaaggtagctgagctgcgctatggccggatccctgagctggaaaagcaggtcgctgaggccgaggaacacaccgtggaaaccaccatgctgagcgaggaggttactccagacaccattgctgaggtggtgtcggcgtggactggtattcctgccggcaagatgttgcagggtgagacggagaagctgctcaacatggaggctgagctaggcaaacgtgtggttggccagtcggaggctgtggttgcggtgtctgatgcggtgcgtcgtgcccgtgccggcgtggcggatccgaaccgtccgacaggttccttcctcttcctgggccctacgggcgtgggtaagacggagctagccaaggcccttgcggagttcatgtttgacgatgatcgtgcgatggtacgcattgatatgtcggagtatggcgagaagcatgcggtcgctcgtttggtcggtgcccctccaggatatgtgggttacgaccaaggcggtcagctcacagaggctgttcgacgtcgcccgtacaccgtcgttcttttcgacgaggtggaaaaggcacacccagatgtgtttgacatcctgctgcaggtcctcgacgagggccggttaacagatggccaaggccgcacagtggacttccgtaatacagtactgatcctgacgtctaacctaggtgccggtggcacaaaagacgagatgatggatgctgtaaagcgggcgtttaagccagagtttgtgaaccgccttgatgatgtggtgatctttgatccgctgagccaagagcagctcacacacattgtggagattcagattgcgcagctggcacagcgtcttgccgctcgtcgtttgacgttggcagtgtcggattctgcgaagttgtggcttgcggagcgcggttatgagccggcttacggtgctcgtccgttgcgtcgattgatccagcaggctattggcgatcagttggctaagaagctgttgtctggtgaggttcgcgatggtagcgaggttcatgtggatgcggatttggacaatgatgggttggttattagcgcctcgtag

SEQ ID NO: 7336 - protein, 849 aa, Corynebacterium diphtheriae
MAGFNPTTKTQEALQEALQKASAAGNPDIRPEHLLAAILGQEDGIAIPVLRATGVDPDVVRREAEALVAKLPKAEGANLANPNFNRDALSVLNNAQELAGELGDEYVSTEVLLAAVARGTNDAAELLTKRGATYDVIKGVFPSVRGNKKVTTESPEDQFQALEKYSTDLTARAREGKIDPVIGRDQEIRRVVQVLSRRTKNNPVLIGEPGVGKTAIVEGLARRIVAGDVPESLKGKTLISLDLGSMVAGAKYRGEFEERLKAVLDEIKSAEGEIITFIDELHTIVGAGATGDSAMDAGNMIKPLLARGELRLVGATTLDEYRKYIEKDAALERRFQQVFVGEPSVEDAVGILRGLKERYEVHHGVRIQDSALVAAATLSDRYITSRFLPDKAIDLVDEAASRLRMEIDSSPQEIDELERIVRRLEIEEVALSKETDAASKDRLIKLRQELADEREKLGELVARWNNEKGAINKVREAKEELERLRSESEIAERDGDYGKVAELRYGRIPELEKQVAEAEEHTVETTMLSEEVTPDTIAEVVSAWTGIPAGKMLQGETEKLLNMEAELGKRVVGQSEAVVAVSDAVRRARAGVADPNRPTGSFLFLGPTGVGKTELAKALAEFMFDDDRAMVRIDMSEYGEKHAVARLVGAPPGYVGYDQGGQLTEAVRRRPYTVVLFDEVEKAHPDVFDILLQVLDEGRLTDGQGRTVDFRNTVLILTSNLGAGGTKDEMMDAVKRAFKPEFVNRLDDVVIFDPLSQEQLTHIVEIQIAQLAQRLAARRLTLAVSDSAKLWLAERGYEPAYGARPLRRLIQQAIGDQLAKKLLSGEVRDGSEVHVDADLDNDGLVISAS

SEQ ID NO: 7337 - DNA, 2559 bp, Corynebacterium efficiens
  CDS (1)..(2559): transl_table=11
atgagttcattcaatccaactaccaagacctccgaggccatgcaggcagccctgcagcaggcctccgccaacggcaaccccgacatccgtccggcccacctcctggtggccatcctggaccaggccgacggtgtggccgccccggtgctgaccgccgccggtgttgatcccaagaccatcctggccgaggcgcagaaactggtcgatggctaccccaaggcctccggctccaacctggccaaccccaacttcaaccgtgatgccctcaatgcgctgaccgcctcccaggaactcgccggtgaactcggtgatgaatacgtctccacggaggtcctcctcgcaggcatcgcgcgcggcaagtccgatgccgctgacctgctcaagggcaagggggcaacctatgatgccatcaaggccgccttccagtccgtccgtggttcccagaaggtcacctcccaggatcccgaggggcagttccaggcgctggagaagtactccaccgacctgaccaaactcgcccgcgagggcaagatcgatcccgtgatcgggcgtgaccaggagatccgtcgtgtggtccaggtgctcagccgccgcaccaagaacaacccagtcctcatcggcgagcccggtgtgggtaagaccgcaatcgtggagggactggcccgtcgcatcgtcgccggtgacgtcccggagtccctcaagggcaagaccctgatcagcctggatctgggatccatggtcgccggtgcgaaataccgtggtgaattcgaggagcgactcaaggctgtcctcgatgagatcaagggtgccaacggtgagatcgtcaccttcatcgatgagctgcacaccatcgtcggtgcgggtgcctccggtgagtcagccatggatgccggcaacatgatcaagccgctgctcgcccgtggtgagctgcgtctggtcggtgccaccaccctcaatgagtaccgcaagtacatcgagaaggacaccgccctggaacgtcgtttccagcaggtatacgtcggtgagccgagcgtggaggataccgtgggtatcctgcgtggactcaaggaacgctatgaggtccaccacggtgtccgcatccaggactccgcgctggtggccgccgccgagctgtcccaccggtacatcaccagccgtttcctgcccgacaaggccatcgacctggtcgatgaggccgcctcacgcctgcgcatggagatcgactcctcgccgcaggaaatcgatgagctcgagcgcatcgtccgtcgcctcgagatcgaggaggtcgccctgaccaaggagaccgacgtcgcctcccgcgagcgtctggaacgcctgcgttccgagcttgccgacgaacgcgagaaactctccgagctcaaggcccgctggcagaacgagaaggccgtcatcgatgatgtgcgcaaattcaaggaggaactcgaggcactgcgctccgagtccgacatcgccgagcgcgagggcgattatggccgcgttgctgagctgcgttacggtcgcatccccgagctggagaagaagatcgccgaggcggaggagaagatcggtggtgccgacaactccatgctcaccgaggaggtcaccccggaggtcatcgccgaggttgtctccgcctggacgggtatccccgcgggcaagatgatgcagggtgagaccgagaaactgctcaacatggaacggttcctgggcaagagggtcgtcggccagcacgaggcggtcaccgcggtgtccgatgcggtgcgccgttcccgtgcgggtgtggcggatccgaaccgtccgaccggttccttcctgttcctcggccccaccggtgtgggtaagacggagctggccaaggcggtctccgagttcctcttcgatgatgagcgtgccatggtgcgcatcgacatgtccgagtactccgagaagcactcggtggcacgcctggtcggtgcccctccgggatacgtcggctacgaccagggtggtcagctcaccgaggcggtgcgacgtcgtccgtacacgacggtgctgttcgacgaggtggagaaggcccacccggacgtcttcgacatcctcctgcaggtactcgatgacggtcgtctcaccgacggccagggtcgcacggtggacttccgcaacaccatcctgatcctgacctccaacctgggtgccggcggcacacgggagcagatgatggatgcggtgaagatggccttcaagccggagttcatcaaccggctcgatgacatcgtggtcttcgacccgctgtcccaggaacagctggccagcatcgtcgagatccagatcagtcagctggccgagcgtctgtcggaccgtcgcctcaccctgcgggtctcggatgcggcgaagctgtggctggccgagcgtggttacgatccggcctatggtgcccgcccgctgcgcaggctcatccagcaggccatcggtgaccagctggccaaggaactgctggccggggagatccgcgacggtgaccgcgtgcttgtcgacgtcgccgacggtggccagtacctggctgtctcccgggagcactaa

SEQ ID NO: 7338 - protein, 852 aa, Corynebacterium efficiens
MSSFNPTTKTSEAMQAALQQASANGNPDIRPAHLLVAILDQADGVAAPVLTAAGVDPKTILAEAQKLVDGYPKASGSNLANPNFNRDALNALTASQELAGELGDEYVSTEVLLAGIARGKSDAADLLKGKGATYDAIKAAFQSVRGSQKVTSQDPEGQFQALEKYSTDLTKLAREGKIDPVIGRDQEIRRVVQVLSRRTKNNPVLIGEPGVGKTAIVEGLARRIVAGDVPESLKGKTLISLDLGSMVAGAKYRGEFEERLKAVLDEIKGANGEIVTFIDELHTIVGAGASGESAMDAGNMIKPLLARGELRLVGATTLNEYRKYIEKDTALERRFQQVYVGEPSVEDTVGILRGLKERYEVHHGVRIQDSALVAAAELSHRYITSRFLPDKAIDLVDEAASRLRMEIDSSPQEIDELERIVRRLEIEEVALTKETDVASRERLERLRSELADEREKLSELKARWQNEKAVIDDVRKFKEELEALRSESDIAEREGDYGRVAELRYGRIPELEKKIAEAEEKIGGADNSMLTEEVTPEVIAEVVSAWTGIPAGKMMQGETEKLLNMERFLGKRVVGQHEAVTAVSDAVRRSRAGVADPNRPTGSFLFLGPTGVGKTELAKAVSEFLFDDERAMVRIDMSEYSEKHSVARLVGAPPGYVGYDQGGQLTEAVRRRPYTTVLFDEVEKAHPDVFDILLQVLDDGRLTDGQGRTVDFRNTILILTSNLGAGGTREQMMDAVKMAFKPEFINRLDDIVVFDPLSQEQLASIVEIQISQLAERLSDRRLTLRVSDAAKLWLAERGYDPAYGARPLRRLIQQAIGDQLAKELLAGEIRDGDRVLVDVADGGQYLAVSREH

SEQ ID NO: 7339 - DNA, 2559 bp, Corynebacterium glutamicum
  CDS (1)..(2559): transl_table=11
atgagttcattcaatccaactaccaaaaccaatgaagccatgcaggctgctcttcagcaggcatcctcggctggcaaccctgatattcgtccagctcacctgttggctgccatcttggagcaaactgatggcgtagcagcgccagtcctcatggctactggtgtggatcctaaggagatcctcgcagaggccaagaagttggttgcttcttaccccaaggcttctggcgccaatatggctaatccaaacttcaaccgggatgccctcaatgcgttcactgcagctcaggagcttgccggtgagttgggcgatgagtacgtctcaaccgaagtacttcttgccggtatcgctcgcggaaagtctgatgctgcggatctgttgaccaacaagggtgcaacctatgacgccatcaaagaggctttcccttcggttcgtggatctcagcgtgtcaccactcaggatccagagggacagttccaggctttggaaaagtactccactgacctgaccaagcttgctcgtgaaggcaagattgatcctgttattggccgtgaccaggaaattcgtcgcgtcgttcaggtgcttagccgtcgtaccaagaacaaccctgttctgatcggtgagccaggtgtcggtaaaaccgccatcgtggaaggccttgcacgccgcatcgttgctggtgacgttccagaatccctcaagggcaaaactctgatcagtcttgatcttggttccatggttgccggcgctaagtatcgcggtgaattcgaggagcgactgaaggctgttctggatgagatcaagggagctaacggcgaagtcgttaccttcatcgatgagctgcacaccatcgtcggcgctggtgcttcgggtgaatccgccatggatgccggaaacatgattaagccactgcttgcccgcggtgagctgcgcttggttggtgccaccacgctgaatgagtaccgcaagtacatcgaaaaggacgctgccctggagcgtaggttccagcaggtttatgtcggtgagccaacggtagaagatgccatcggtattcttcgtggattgaaggaacgctacgaggtccatcacggtgtccgcatccaggactccgcactggtcgccgcagctgaactctcaaaccgctatatcaccagccgtttccttcctgataaggctattgacttagttgatgaggcagcatcacgcctgcgcatggagattgattcttcacctcaggaaatcgatgagctggagcgtatcgtccgccgcctcgagatcgaagagatggcgctgtccaaggaatccgatgcagcttccaaggaacgtctagaaaagctgcgctcggaacttgctgatgaacgcgaaaagctctctgagttgaaggctcgttggcagaatgagaaaactgctattgacgatgtccgtgagatgaaggaagagctggaagcgctgcgttctgagtcggatattgcagaacgtgacggcaattatggtcgtgtcgcagagctgcgctacggccgaatccctgagctggaaaagcagatcgaggatgcagaatccaaggtcgaggtcaatgaaaatgccatgctcactgaggaggtcacgccagacacgatcgccgatgtggtttccgcatggacgggcattcctgcaggcaagatgatgcagggtgagaccgagaagctgctcaacatggagcgcgtcttgggcaaccgtgtggtcggtcagctagaagcggtaactgcagtgtctgacgcggtgcgtcgttcacgcgcgggtgttgccgatccaaaccgtccaactggttccttcctgttccttggacctaccggcgtcggtaagactgagctggccaaggctgtcgcggagttcctcttcgatgatgatcgcgccatgatccgcatcgatatgtccgaatacggtgagaagcactcggttgctcgtctggtcggtgcccctccgggatacgtcggctatgaccagggcggtcaactcactgaggcagtgcgccgtcgtccgtacaccgtcgtgcttttcgacgaggtggagaaggctcaccctgatgtcttcgatatcctcctgcaggttctcgacgagggtcgcctcaccgacggccaaggccggaccgtggatttccgcaacaccatcttgatcctcacctctaacctgggcgcaggcggtactcgcgaacaaatgatggatgctgtgaagatggcattcaagcctgagttcgtgaaccgtctcgatgatgttgtgatcttcgatcgtttgtcccctgagcagctgaccagcatcgttgatatccagatcaagcagctgactgaccgtttggctggccgcaggcttaaccttcgagtcagcgacagcgcgaaggcttggctggcggagcgtggctacgaccctgcttatggtgctcgtccgttgcgcaggctgatccagcaggccatcggtgatactttggctaaggaactgctggcaggcaacgtccgtgatggcgatggtgtgcttgtcgacgtcgccgacggcggccagaagctcgacgtttccagggcggtctaa

SEQ ID NO: 7340 - protein, 852 aa, Corynebacterium glutamicum
MSSFNPTTKTNEAMQAALQQASSAGNPDIRPAHLLAAILEQTDGVAAPVLMATGVDPKEILAEAKKLVASYPKASGANMANPNFNRDALNAFTAAQELAGELGDEYVSTEVLLAGIARGKSDAADLLTNKGATYDAIKEAFPSVRGSQRVTTQDPEGQFQALEKYSTDLTKLAREGKIDPVIGRDQEIRRVVQVLSRRTKNNPVLIGEPGVGKTAIVEGLARRIVAGDVPESLKGKTLISLDLGSMVAGAKYRGEFEERLKAVLDEIKGANGEVVTFIDELHTIVGAGASGESAMDAGNMIKPLLARGELRLVGATTLNEYRKYIEKDAALERRFQQVYVGEPTVEDAIGILRGLKERYEVHHGVRIQDSALVAAAELSNRYITSRFLPDKAIDLVDEAASRLRMEIDSSPQEIDELERIVRRLEIEEMALSKESDAASKERLEKLRSELADEREKLSELKARWQNEKTAIDDVREMKEELEALRSESDIAERDGNYGRVAELRYGRIPELEKQIEDAESKVEVNENAMLTEEVTPDTIADVVSAWTGIPAGKMMQGETEKLLNMERVLGNRVVGQLEAVTAVSDAVRRSRAGVADPNRPTGSFLFLGPTGVGKTELAKAVAEFLFDDDRAMIRIDMSEYGEKHSVARLVGAPPGYVGYDQGGQLTEAVRRRPYTVVLFDEVEKAHPDVFDILLQVLDEGRLTDGQGRTVDFRNTILILTSNLGAGGTREQMMDAVKMAFKPEFVNRLDDVVIFDRLSPEQLTSIVDIQIKQLTDRLAGRRLNLRVSDSAKAWLAERGYDPAYGARPLRRLIQQAIGDTLAKELLAGNVRDGDGVLVDVADGGQKLDVSRAV

SEQ ID NO: 7341 - DNA, 2580 bp, Coxiella burnetii
  CDS (1)..(2580): transl_table=11
atgcgaattgataaattcaccacagcattccaaacggcgttagcagacgcgcaatctttggccgttggtcgcgatcatcaatttatagaacctgcgcatgtgatgaaagtattgctagaacaaacgcaaggcaccgtggcgccattgttagagcaatcaaaagtcaatttatcacgtttgattgatggcgttaacaaggccatcgacagctatcctcaagtagaaggaaccggcggagaagttcatgtgtcccgcgaattaagcaaaattttaacgctgatggataaatttgctcagcaaaataaggatcaatacatttcctcggaatggttcattcccgccgcgctcgaagccaaaggtcaattgcgagatgtgttaatagaggccggtgctgataaaaaagccattgaaaaaaatatcatgaacttgcgcaagggtgaacgagtgactgagcaaagcgctgaagatcaacggcaggcattggcgaaatacactattgatctcaccgaaaaagctgaaactggaaaactggatcccgtcattggacgcgacgaagaaattcgccgaacggtacaagtgctacagcggcgcaccaaaaataatcctgttctcatcggtgaaccgggcgtgggtaaaacagcgattgtggaagggttagcgcaacgtatcgtcaacggtgaagtgccggaaggtttgaaacagaaacgattactggcgctagatatgggcgcattaatcgccggggctaaatttcgaggagaatttgaagagcgtttaaaagccgtattaaaagatatcgctaaggaggaaggtcgggttattttatttatcgatgaattgcacaccatggtgggagcgggtaaggcggaaggtgcgatggatgccggtaatatgttaaaacccgcgttggcccgcggcgagcttcattgtgtgggtgcaaccaccttggatgaataccgcaaatacattgaaaaagatgccgcattagaacggcgatttcaaaaagtattggttgaggagccttcaacggaagatgccatcgctattttaagaggtttgaaggaacgttacgaagtgcatcatggcgttgaaattaccgatcctgcgattattgcagcagccacgttatctcaacgctatattaccgatcgaaatcttcccgacaaagcgattgatttaattgatgaagcagccagtcaaattcgtatggaaatggattccaaacctgtcgaactggatcgtttggagcgacggttaattcagctaaaaattgagcgtgaagctttaaaaaaagaaaccgatgaagcttcaaaaaaacggttgtccgatcttgaaaccgaaattaaaaacgttgaaaaagaatattctgatctcgaagaagtgtggaaaagtgaaaaagcttcattgcacggtactcaacaaattaaagaggaattggaacaggcgcggattgaattggaagccgctggacgtgctggtgatttggcgcgaatgtccgagctgcaatatggaatcatcccagagcttgataaaaaattaaaagcggcttcccagaaagaagagcaattccatgatcataaattattacgcagtcgagtgaccgaagaagaagtcgccgaagtcgtctcgaaatggacacatattcctgtgtcgaaaatgttggagggcgagcgcgagaaattattgcatatggaaactgaattgcataaacgcgtcattggtcaggacgaagccgtgaacgccgtggcaaatgcgattcgccgttctcgggcgggattgtccgaccctaatcgccccgtaggttcgtttttattcttaggcccgacaggggtggggaaaactgagctatgcaaagcattggccgtctttttgtttgatacggaagatgcgatggtgcggattgatatgtctgaatttatggaaaagcattcagtcgctcgattaatcggcgcaccgccaggatacgtgggttacgaagaggggggctatttaacagaggctatccgccgtcggccttattcggttattttattagatgaaattgaaaaagcacataacgacgtatttaacgttttgctgcaagtgttggatgacggtcgattaacggacggtcagggtcgaacggtggattttcgcaataccgtcattgtaatgacttctaatctcgggtctgatttgattcgggaattctcgggtgaaaactacgataaaatgaaagacgccgtgatggaagtggtcgcacaacatttccgacctgagtttattaatcgcattgatgaagctgttgtttttcattctttgaaaaaagagcaaattcgcaatattgcgattattcaaatcgatcgaattaaaaaacgcttgaaagaaaaagattatcagctcacgatcagtgatgacgcgctcgattatttatcagagctgggttacgatccggtttatggcgcacgaccgctaaaacgggtgctgcaacaacaactcgaaaatccactctcccagaaaatcttggaagggaaatttgtgcctggctcattaattaacattgagaaaaagggcgaacaattagaatttaaggaagcatga

SEQ ID NO: 7342 - protein, 859 aa, Coxiella burnetii
MRIDKFTTAFQTALADAQSLAVGRDHQFIEPAHVMKVLLEQTQGTVAPLLEQSKVNLSRLIDGVNKAIDSYPQVEGTGGEVHVSRELSKILTLMDKFAQQNKDQYISSEWFIPAALEAKGQLRDVLIEAGADKKAIEKNIMNLRKGERVTEQSAEDQRQALAKYTIDLTEKAETGKLDPVIGRDEEIRRTVQVLQRRTKNNPVLIGEPGVGKTAIVEGLAQRIVNGEVPEGLKQKRLLALDMGALIAGAKFRGEFEERLKAVLKDIAKEEGRVILFIDELHTMVGAGKAEGAMDAGNMLKPALARGELHCVGATTLDEYRKYIEKDAALERRFQKVLVEEPSTEDAIAILRGLKERYEVHHGVEITDPAIIAAATLSQRYITDRNLPDKAIDLIDEAASQIRMEMDSKPVELDRLERRLIQLKIEREALKKETDEASKKRLSDLETEIKNVEKEYSDLEEVWKSEKASLHGTQQIKEELEQARIELEAAGRAGDLARMSELQYGIIPELDKKLKAASQKEEQFHDHKLLRSRVTEEEVAEVVSKWTHIPVSKMLEGEREKLLHMETELHKRVIGQDEAVNAVANAIRRSRAGLSDPNRPVGSFLFLGPTGVGKTELCKALAVFLFDTEDAMVRIDMSEFMEKHSVARLIGAPPGYVGYEEGGYLTEAIRRRPYSVILLDEIEKAHNDVFNVLLQVLDDGRLTDGQGRTVDFRNTVIVMTSNLGSDLIREFSGENYDKMKDAVMEVVAQHFRPEFINRIDEAVVFHSLKKEQIRNIAIIQIDRIKKRLKEKDYQLTISDDALDYLSELGYDPVYGARPLKRVLQQQLENPLSQKILEGKFVPGSLINIEKKGEQLEFKEA

SEQ ID NO: 7343 - DNA, 2598 bp, Desulfovibrio vulgaris
  CDS (1)..(2598): transl_table=11
atggatatcggaaagttcaccgagaagtcacagcaggcactggcagaggcccagaacatcgccgtccgcttcggtcatcaggaagtggatgccgaacaccttgccgacgccctcgtcaggcaggagcaggggcttgtgcccagattgctcgaccgcatggggcagaagcccgaagcctttgccgaggcgctcgagcgcgaactcggcaagcgtcccgccgtcagcgggccgggggcggcaccggggcagatattcgtctcgaagcgactcaacgccgtactggtgaaggcgcaggacttcgcgcggcagctgaaggacgaatatgtcagcgtagagcatatcttctgtgtgcttctcgaagaacccgcttccaccatcatggggcgcatcgcccgcgagttctcgctcagccgcgagaaggtgctcggtgtgctggaggatgtgcgcggttcgcagcgcgtcacgtccgccaaccctgaagacacctacgaggcgcttcagaagtatggtcgcgacctcgtggaggaggcgcgcaagggcaaactcgaccccgtcatcgggcgtgacgccgagattcgccgggtcatccgcatcctttcaaggcgcaccaagaacaaccccgtgctcatcggcgaggctggcgtgggcaagacggccatcgtcgaaggtctggcccaccgcatcctcaagggcgacgtgcccgaaggcctgaaggagcgtggcctgttcgcgctggacatgggggcactcatcgccggggccaagtaccgcggcgaattcgaggaacgcctcaaggcggtgctcaaggaggtcgagaagtccgagggccgcatcatcatgttcatcgacgagttgcacaccatcgtcggtgcgggcaagaccgacggcgccatggatgccagcaacctgctcaagcccatgctggcgcggggcgagttgcattgcatcggcgcgaccaccctcgacgaataccgcaagtacatcgagaaggacccggcccttgaacggcgcttccagcctgtgctcgtcgacgagccgaccatagaggacgccatctccatcctgcgtggcctgaaggagcgtttcgaggtgcaccacggcgtgcgcatcagcgactcggccatcgtcgaagcggtgacgctctcgcatcggtacatcaccgacaggcaactgccggacaaggccatcgacctcatcgacgaggctgccgccctcatccgtaccgagatagattcgctgcccgccgaccttgacgaggccaaccgcaagatcatgcagcttgagatcgagcgtgaagccttgcggcgcgagactgatgtcgcctctcgagaacgcctggaacggctggagaacgaactcgccgacctgcgggcagagcagacggccctgctttcgcaatgggagcgcgagaagggttccatcgaccacgtgcggagcatcaaggaggatatcgagcgcacccgtcacgccatcgaggaggccgagcgcgcctacgacctcaaccgggcggcggagttgaagtattcgcgcctgctcgaactcgagcggcaactcgaatccgccgagaagggcgggcatgacgagacgcggctgctcaaggaggaggtgcgtcccgacgacatcgccgaaatcgtcgcgcggtggacgggtatcccggtgacacgcctgctcgaatcggagcgcgagaagctgttgcgcctagccgatgtgctgcatgagcgcgtggtcgggcaggaagaggccgtagacgccgtatccgaagctgtgcttcgtgcacgtgccgggctctcagacccttcgcggcccatcggttcgttcattttccttggccccacgggcgtcggcaagactgagctttgcaagaccctggcggaggccctgttcgataccgaagagaacatcgttcgcctcgacatgagcgagtacatggagaagcacgcggtggcgcggctcatcggagcccctcccggctatgtgggctacgacgagggcgggcaactcaccgaggcggtgcggcgcaagccctacagcgtggtgctgttcgacgaggtagagaaggcccaccctgatgtgttcaacacccttctccagatactggacgacgggcggctgacagacagccacgggcggacagtggactttcgcaacaccatcatcatcatgacctcgaacatcggctcaccctacatgctggacggcatcagcgaagggggcgagttcctttccggcgttcgtgagaaggtgatggaggagttgcgcaggcacttccggcccgagttcctgaaccgcgtggatgagaccgtgctcttcaagccgttgctgcccgcccagatagcccgcatcgtcgagcttcttcttggcaggttgcgcgggcgccttgccgagcgcaagatcgacatccgtctcggtgatgtggcgcgcgacttcatcgccaaggccgcctacgaccccgtgtacggtgcccggccgttgcggcgctacctgcaacacaacatcgaaactccccttgcccgcaagctcatcgccggtgaattgcgcgatggcacgacggtggaagtggacgtggtcgatgatgccctgtcgttccgaatcgaataa

SEQ ID NO: 7344 - protein, 865 aa, Desulfovibrio vulgaris
MDIGKFTEKSQQALAEAQNIAVRFGHQEVDAEHLADALVRQEQGLVPRLLDRMGQKPEAFAEALERELGKRPAVSGPGAAPGQIFVSKRLNAVLVKAQDFARQLKDEYVSVEHIFCVLLEEPASTIMGRIAREFSLSREKVLGVLEDVRGSQRVTSANPEDTYEALQKYGRDLVEEARKGKLDPVIGRDAEIRRVIRILSRRTKNNPVLIGEAGVGKTAIVEGLAHRILKGDVPEGLKERGLFALDMGALIAGAKYRGEFEERLKAVLKEVEKSEGRIIMFIDELHTIVGAGKTDGAMDASNLLKPMLARGELHCIGATTLDEYRKYIEKDPALERRFQPVLVDEPTIEDAISILRGLKERFEVHHGVRISDSAIVEAVTLSHRYITDRQLPDKAIDLIDEAAALIRTEIDSLPADLDEANRKIMQLEIEREALRRETDVASRERLERLENELADLRAEQTALLSQWEREKGSIDHVRSIKEDIERTRHAIEEAERAYDLNRAAELKYSRLLELERQLESAEKGGHDETRLLKEEVRPDDIAEIVARWTGIPVTRLLESEREKLLRLADVLHERVVGQEEAVDAVSEAVLRARAGLSDPSRPIGSFIFLGPTGVGKTELCKTLAEALFDTEENIVRLDMSEYMEKHAVARLIGAPPGYVGYDEGGQLTEAVRRKPYSVVLFDEVEKAHPDVFNTLLQILDDGRLTDSHGRTVDFRNTIIIMTSNIGSPYMLDGISEGGEFLSGVREKVMEELRRHFRPEFLNRVDETVLFKPLLPAQIARIVELLLGRLRGRLAERKIDIRLGDVARDFIAKAAYDPVYGARPLRRYLQHNIETPLARKLIAGELRDGTTVEVDVVDDALSFRIE

SEQ ID NO: 7345 - DNA, 2607 bp, Enterococcus faecalis
  CDS (1)..(2607): transl_table=11
atgaatattgaaaaaatgacaaccacgctacaagaggcgattgctgaagctcaaaaagttgcggtgacacgtcaacatcaagaaattgatatcgcacatttatggaaaatttttcttcaaccaaaccattttggacgtaatttttacacagatgctggtttagatgttgacgcatttgaacgagaagtagataacgcgttagatgaatatccaagtgtggcaggcggtaatgtgcaatatggtcaaaatttaagtcaaaatttgttccatttattgcaagaagctgattcacttcgagaagaattccaagatgaatttttatcaaccgaaattgtacttttagctttaatgaaattgaaaaattatcgtttaacaaaatatttaatgcaacaaggcattacggaaaaagagttaagaaaaaatattgaagagatgagaggaggagatcgtgtgacttctcaaaaccaggaagaacaatataaagcactagaaaaatacggtgttgacttagtacaacaagtaaaagcaggaaaacaagatccaatcattggtcgtgacgaagaaattcgtgacgttattcggattttatcaagaaaaactaaaaataatccagtcttaattggtgaaccaggtgttggtaaaacagcgattgttgaaggattagcacaacgaatcgttcgtaaagatgttcccgaaaacttaaaagataaaaccattttttctttagatatgggcgccttaattgcgggagcaaaattccgtggcgaatttgaagaacggttaaaagctgttttaaaagaagtgaaaaaaagtgatggcaaaatcattttattcattgatgaaattcataatatcgtcggagctggtaaaacagaaggcagtatggacgccggaaatttattaaaaccgatgctagcacgtggtgaattgcatttaatcggtgccacaacgcttgatgaatatcgccaatatatggaaaaagataaagccttagaacgtcgtttccaaaaagtattagtcaaagaaccaacagtagaagatacaatttctattttgcgtggcttaaaagaacgatttgaaattcaccacggcgtgaatattcatgacaatgctttagttgctgccgctactttatccgatcgctatattactgatcgtttcttaccagataaagcgattgacttagtcgatgaagcaagcgcaacgattcgagtggaaatgaattcgatgccaacagagctcgatcaagtaacacgtcggttaatgcaactagaaattgaagaagcggccttgaaaaaagaatcagatgatgcaagtaaaaaacggttagccaacttgcaagaagaattagcagatttgcgtgaagaagccaactcaatgaaaatgcaatgggaaacggaaaaagaagaagttaatgcggtttccaataaacgtgcagagattgataaagcaaaacacgaattagaagatgctgaaaataattatgatttagaacgagctgctgttttgcgtcatggaacaattccgcaattagaacatgaattgaaagaattggaagaaaagaacgctaaagataacgtcaaaatggtacaagaatcggttactgaaaacgaaattgcgcaagtggtcggtcgtttaactggcattcctgtgacaaaattagttgaaggcgaacgagaaaaattaatgaaactgaatgaaacattacacaaacgtgtgattggtcaagatgaagccgtcgatgctgttagtgatgcggtgattcgttcaagagcaggcttacaagatccaaatcgcccactcggttcgttccttttcctaggaccaactggtgttggtaaaacagaacttgctaaagctttagctgaagatttgtttgattctgaagatcatatggtacggattgacatgagtgaatacatggaaaaacatgccgtgtctcgtttggttggtgcccctccaggctatgttggttatgaagaaggtggccagttaacggaagctgttcgtcgaaacccttatacaattgtcttattagacgaaattgaaaaagcgcacccagatgtctttaatatcttattacaagttttagatgatggtcgtttgacagattctaaaggtcgggtcgttgattttaaaaatacagttttaattatgacaagtaacatcggctctcagcttttattggaaggtgtgacacctgaaggaacaattccagaagaagttgaaaatcaagtcatgaatattctaaaaggacactttaaaccagagttcttaaacagaattgatgataccattttatttacaccattaagcttggataatgtgaaaggaatcattggtaaaatgaccgcacaacttgctcatcgtttagagcaacaagaaattgtgttggaaatcactgatgaagctaaaacatggattgctgaaaatgggtatgagccagcttatggagctcgtccgttaaaacgtttcattactcgcgaagtcgaaacaccattagcaaaagaaattgtttctggacgagtaatgccaaaaacaaaagtcacgattagtctattagacaatcaattagtttttgaaaatgaaccgatagaagaagtgtaa

SEQ ID NO: 7346 - protein, 868 aa, Enterococcus faecalis
MNIEKMTTTLQEAIAEAQKVAVTRQHQEIDIAHLWKIFLQPNHFGRNFYTDAGLDVDAFEREVDNALDEYPSVAGGNVQYGQNLSQNLFHLLQEADSLREEFQDEFLSTEIVLLALMKLKNYRLTKYLMQQGITEKELRKNIEEMRGGDRVTSQNQEEQYKALEKYGVDLVQQVKAGKQDPIIGRDEEIRDVIRILSRKTKNNPVLIGEPGVGKTAIVEGLAQRIVRKDVPENLKDKTIFSLDMGALIAGAKFRGEFEERLKAVLKEVKKSDGKIILFIDEIHNIVGAGKTEGSMDAGNLLKPMLARGELHLIGATTLDEYRQYMEKDKALERRFQKVLVKEPTVEDTISILRGLKERFEIHHGVNIHDNALVAAATLSDRYITDRFLPDKAIDLVDEASATIRVEMNSMPTELDQVTRRLMQLEIEEAALKKESDDASKKRLANLQEELADLREEANSMKMQWETEKEEVNAVSNKRAEIDKAKHELEDAENNYDLERAAVLRHGTIPQLEHELKELEEKNAKDNVKMVQESVTENEIAQVVGRLTGIPVTKLVEGEREKLMKLNETLHKRVIGQDEAVDAVSDAVIRSRAGLQDPNRPLGSFLFLGPTGVGKTELAKALAEDLFDSEDHMVRIDMSEYMEKHAVSRLVGAPPGYVGYEEGGQLTEAVRRNPYTIVLLDEIEKAHPDVFNILLQVLDDGRLTDSKGRVVDFKNTVLIMTSNIGSQLLLEGVTPEGTIPEEVENQVMNILKGHFKPEFLNRIDDTILFTPLSLDNVKGIIGKMTAQLAHRLEQQEIVLEITDEAKTWIAENGYEPAYGARPLKRFITREVETPLAKEIVSGRVMPKTKVTISLLDNQLVFENEPIEEV

SEQ ID NO: 7347 - DNA, 2598 bp, Geobacter sulfurreducens
  CDS (1)..(2598): transl_table=11
atgatcagacctgagaaaatgaccataaagacccaggaagccttggccggagcccagcaactggccgcacggcagggtaatggctccatcgagccggagcaccttctggtctcgctccttgagcaggaaggggggctcattgccccgatcattcagaaagtgggaggtgcaccggccgcactgcggagcgctgcggatgtgttggtgaaaaggcttccccaggtgagcggggccacggcccaggcctatctgtcgccggccctcaaccggattctcgacgcggcccagcgcgaagccgataccatgaaggatgaattcgtctccaccgagcatctcctcctcggcttctttgccgaccggcagtgcgcggcagcccgggcgcttcttgatgcaggagtcagccgggataacgtcctggcggccctgatggagatccgcgggggagagcgggttaccgaccagaaccccgaggatacttatcaggccttggccaagtatgcccgcgacctgaccgatttggcccgtcagggaaagctcgacccggttatcggccgcgacgacgagatccggcgggtgctccaggtgctgtcccggcgaacaaagaacaacccggtcctgatcggtgagcctggggtgggaaagaccgccatcgtggaggggcttgcgcagcggatcgtctccggtgatgtgcctgagaccctcaaggataagcggctcgttgctctcgatatgggtgcgctcattgccggtgccaagtaccgcggtgaattcgaggagcgcctcaaggcggtcatcagggaggtggccaagtctgagggcaaggtgatcctgttcatcgacgagcttcacaccttggtcggggccggtgctgccgagggggccatggatgcgtccaacatgctcaaaccggcgcttgcccggggagagctccactgcatcggtgccacgacgctcaatgaatatcgcaagtacatcgagaaggacgcggctcttgaacggcggttccagcaggtctataccggcgaaccgtcggttgaggacactatcgcgatcctgcgcgggctcaaggaaaagtacgagaactatcacggcataaggatcaaggacagcgccatcattgcggccgccaccctgtcggaccgctacatcaccgaccgctttctccccgataaggcaatcgacctgatcgatgaggccgcctcacgtttgaggatcgagatcgattccatgcctacggaaatcgatgaggttgagcggaggatcattcaactggagatcgaaaaacaggccttgctgcgggagagccaagatcctcactctctggagcggctgaaaaaactcgccgacgaactggaggaactcaaggctaagtcggccgagctcaaggggcactggcagcgggagaaggatatcatcggccgggtaagttcgctcaggcaacggctcgaagagaagagggaagaagcgaaaaaggccgagcgcgaaggcaatctggcccggacggctgagatccgctacggtgagatcccggctatcgagaaagaaatcgccgacaggagcgcggagctggaggatatccgcaaggaaggaaagatgctgccggaggaagtggatggcgagctggtggccgagatcgtttcccggtggaccggtattccggtttcccgcatgatggagggcgaggcggacaagctggtgcatatggaggaccggctgataacccgggtcgtcggccaggatgaggcactcgtcctggtggcaaacgccatccgccgggcccggtccggtctctcggaccccaatcgccctattggctcgttcctgtttctggggcccaccggtgtcggcaaaaccgaaaccgccaaggccctggcggagttcctgttcaacgacgaccaggccatcgttcgcatcgacatgagcgagtatcaggaaaagcacaccgttgcccgactcatcggcgctccgccgggctatgtgggatacgaagaaggggggcagcttaccgaggcggtcaggcggcgaccctattccatcgtcctcttcgacgagatcgaaaaggctcatccggaggtcttcaatgtgctcctccaggtgctggacgacgggcggctcaccgatgggcaggggcgtactgtcgatttccgcaacacggtcatcatcatgacgagcaaccttggttcccaatggattcagcagtacggttccagcgactacgcacgcatgaaggccatggtcaccgagacgctcaaggagggattcaaaccagaattcctcaaccgcatcgacgaaatcgtgatctatcatgcgcttccccttgagcagatcaagaagatcgtcgatatccaggtggaatgtctgaagcagcgactcgctgatcggcgcatcgtccttgaactgagcgacaaggcccgggaatacctgagccgcgagggctatgaccccgcctacggtgcccggcccctcaagcggacgatccagcgaaagatccaagacccgctggccctggcgcttctggaaggaaagtttcaggaaggggatacggtcagggtcgacctgtccgtgtcgggggaggagcttgtcatcacgaagaaatag

SEQ ID NO: 7348 - protein, 865 aa, Geobacter sulfurreducens
MIRPEKMTIKTQEALAGAQQLAARQGNGSIEPEHLLVSLLEQEGGLIAPIIQKVGGAPAALRSAADVLVKRLPQVSGATAQAYLSPALNRILDAAQREADTMKDEFVSTEHLLLGFFADRQCAAARALLDAGVSRDNVLAALMEIRGGERVTDQNPEDTYQALAKYARDLTDLARQGKLDPVIGRDDEIRRVLQVLSRRTKNNPVLIGEPGVGKTAIVEGLAQRIVSGDVPETLKDKRLVALDMGALIAGAKYRGEFEERLKAVIREVAKSEGKVILFIDELHTLVGAGAAEGAMDASNMLKPALARGELHCIGATTLNEYRKYIEKDAALERRFQQVYTGEPSVEDTIAILRGLKEKYENYHGIRIKDSAIIAAATLSDRYITDRFLPDKAIDLIDEAASRLRIEIDSMPTEIDEVERRIIQLEIEKQALLRESQDPHSLERLKKLADELEELKAKSAELKGHWQREKDIIGRVSSLRQRLEEKREEAKKAEREGNLARTAEIRYGEIPAIEKEIADRSAELEDIRKEGKMLPEEVDGELVAEIVSRWTGIPVSRMMEGEADKLVHMEDRLITRVVGQDEALVLVANAIRRARSGLSDPNRPIGSFLFLGPTGVGKTETAKALAEFLFNDDQAIVRIDMSEYQEKHTVARLIGAPPGYVGYEEGGQLTEAVRRRPYSIVLFDEIEKAHPEVFNVLLQVLDDGRLTDGQGRTVDFRNTVIIMTSNLGSQWIQQYGSSDYARMKAMVTETLKEGFKPEFLNRIDEIVIYHALPLEQIKKIVDIQVECLKQRLADRRIVLELSDKAREYLSREGYDPAYGARPLKRTIQRKIQDPLALALLEGKFQEGDTVRVDLSVSGEELVITKK

SEQ ID NO: 7349 - DNA, 2619 bp, Gloeobacter violaceus
  CDS (1)..(2619): transl_table=11
atgcagcccaacaacccgaaccaattcaccgagaaggcctgggatgcgatcgtccgcaccaccgaggtagctaaggagtaccgccagcagcagctggagagcgaacatctttttaaggcgctcctggatcaagacggggggttggccggttcgatttttaccaaggcgggtgtgaacctgacgaagcttggcgagcgggtcgagcagtttatcaaccgccagcccaaactcaccaaccccggccagagcgtctacctcggccgcagcctcgacgcgctgttggatcgcgccgagggtttccgcaaagagtacggcgacgattttatttcgatcgagcacctggtgctggccttcgccaaggacgtgcgcttcggacagcagattctgcgtgaattcagcctcgatgaagcgaagcttaaagcggtcgtggcccaggtgcgcggcaaccagaaggtgaccagccagaatcctgaaagcacctacgagtcgctcgataaatacggccgggatctgacccaattggcccgcgaaggcaagctcgatccggtgatcggccgcgacgaggagattcgccgcaccatccagattctctcgcgccgcaccaaaaataaccccgtactgattggcgaacccggcgtgggcaagacggccatcgccgaggggctcgcccagcgcatcgtcagcggcgatgtgcccgagtcgctccagggccgcaagctgatcgccctcgacatgggagcactgattgccggatctaagtaccggggcgaatttgaagaacggctcaaggcggtcctcaacgaggtgaccaagtccgaggggcagatcgtcctttttatcgacgaaattcacacggtcgtgggtgcgggtgccacccagggcgccatggacgcgggcaatttgctcaagccgatgctggcccgcggcgaactgcgctgcattggggctacgaccctcgatgaataccgcaaatacatcgagaaagacgctgccctggagcgccgcttccagcaggtctacgtcgatcaacccacggtcgaggacaccatttcgattctgcgcggcctcaaagagcgctacgaagtccaccacggtgtgcgcatctccgacagcgccctggtggcggcggcggtgctttctcatcgctacatcagcgaccgttttttgcccgacaaagcgatcgacttgatggacgaggcggcggccaagctcaagatggaaatcacctccaagcccgaggccctcgacgaggtcgaccgcaagatcctgcagctggagatggagcggctgtcgctggccaaggagtccgacgccgcctcgcgcgatcgtctggagcggcttgaaaaagaactggccgacctcaaagaagagcagcgctccctcaacgcccagtggcaggccgagaaggacatcatcgaccaggtccaggccgtcaaagaagaaatcgaccaagtcaacgtccagatccagcaggccgagcgcgactacgacctcaaccgcgccgccgaactgaaatacggcaaactgtccgaattgcaaaagcgcctcgacgcggccgacaaacaactgagcgagacccagaccagtggccggtcgctgttgcgcgaggaggtcaccgaggaggacatcgccgaaatcatctccaagtggaccggcatcccggtgagcaaactggtggcgagcgaacgcgagaagctgttgcacctcgaagacgagttgcacaagcgggtggtggggcaggaagaagcggtgcggattgtctctgaagccattcagcgatcgcgcgccggacttgcagacccgaaccggccgatcgcgagctttatttttctggggccgaccggcgtgggcaagaccgagcttgccaaggcgctcgcgtcgtttttgttcgacgacgagaatgccatggtgcgcatcgacatgtccgagtacatggagaagcacagcgtctcgcggctgattggtgcccccccaggctacgtgggctacgacgaaggcggccagctcaccgaggcggtgcgccgccggccctacgcggtggtgctctttgacgagatcgaaaaagcccacaacgacgtcttcaacgtgctgttgcaggtgctcgacgacgggcggatcaccgattcgcagggccgcacgatcgatttcaaaaacgcagtgatcatcatgaccagcaacatcggctccgatgcgatcttgcgcctgggcggcaacgacgcctactacgagcagatgcgcgaggaggtgatgcgcgccatgcaggtccacttccggccggaatttctcaaccgcgtcgatgacatcatcatcttccgcaacctgcgccgcgatcagctcgccgccatcgtcaagctgcagatcgcacggctggagaagcggctggccgatcgcaagatcaccctcaagctcagcgaggccgccatcgactacatcgtcgaggcgggctacgacccggtctacggtgcgcgccccctcaagcgggccatccagaatgaactggtcaacccgctcgcccggggattgctcaagggggattttaacgacggcgacaccatctttgtcgacatcgagaacgaaaggcccgtcttccgccgcctaagcgccatgccggttgtctag

SEQ ID NO: 7350 - protein, 872 aa, Gloeobacter violaceus
MQPNNPNQFTEKAWDAIVRTTEVAKEYRQQQLESEHLFKALLDQDGGLAGSIFTKAGVNLTKLGERVEQFINRQPKLTNPGQSVYLGRSLDALLDRAEGFRKEYGDDFISIEHLVLAFAKDVRFGQQILREFSLDEAKLKAVVAQVRGNQKVTSQNPESTYESLDKYGRDLTQLAREGKLDPVIGRDEEIRRTIQILSRRTKNNPVLIGEPGVGKTAIAEGLAQRIVSGDVPESLQGRKLIALDMGALIAGSKYRGEFEERLKAVLNEVTKSEGQIVLFIDEIHTVVGAGATQGAMDAGNLLKPMLARGELRCIGATTLDEYRKYIEKDAALERRFQQVYVDQPTVEDTISILRGLKERYEVHHGVRISDSALVAAAVLSHRYISDRFLPDKAIDLMDEAAAKLKMEITSKPEALDEVDRKILQLEMERLSLAKESDAASRDRLERLEKELADLKEEQRSLNAQWQAEKDIIDQVQAVKEEIDQVNVQIQQAERDYDLNRAAELKYGKLSELQKRLDAADKQLSETQTSGRSLLREEVTEEDIAEIISKWTGIPVSKLVASEREKLLHLEDELHKRVVGQEEAVRIVSEAIQRSRAGLADPNRPIASFIFLGPTGVGKTELAKALASFLFDDENAMVRIDMSEYMEKHSVSRLIGAPPGYVGYDEGGQLTEAVRRRPYAVVLFDEIEKAHNDVFNVLLQVLDDGRITDSQGRTIDFKNAVIIMTSNIGSDAILRLGGNDAYYEQMREEVMRAMQVHFRPEFLNRVDDIIIFRNLRRDQLAAIVKLQIARLEKRLADRKITLKLSEAAIDYIVEAGYDPVYGARPLKRAIQNELVNPLARGLLKGDFNDGDTIFVDIENERPVFRRLSAMPVV

SEQ ID NO: 7351 - DNA, 2571 bp, Haemophilus ducreyi
  CDS (1)..(2571): transl_table=11
atgaatttcgaaaaatttacaactaaattgcaagaagcattaaatgaagcacaatcattagcagtcgccaaagataatgcctatattgaaccggttcatttactttatgccttagtaaaacaacaagatggtgcaatcgccccgttatttactaccttaaatgtatcaacccaaacgttaatcaacgagttagaactgatcttaaatcaattaccacaagtaaccggcacaacaacacaagcatcacaacaacttattcgtttattaaatcaaacggctaaattagcccaacaatttaacgacagctttatttcatcagaattatttttactggctgcattagatgatcatggcagcttaggtaaattatttaaagcatttggcttaacaaaagaaaacgtcacgcaagcaatcagccaaatgcgaggaggagagagtgtgaacaatcagaatgcagagcaaacaagacaagcattacaaaaatataccattgatttaactgaacgcgccaaaacaggcaaattagatcccgtgattggccgtgatgaagaaattcgccgtaccgtacaagtattacaacgcagaactaaaaataatcccgtattaatcggcgaacccggagtgggtaaaaccgccattgttgaaggcctagcacaacgtattgtgaatggagaagtaccagaaggtttaaaaaataaacgcgtattatcattagatatgggcgcacttattgcgggagcaaaatatcgaggtgaatttgaagaacgtttaaaagcggtattaaatgaactcgccaaagaagaagggcaagttattttatttattgacgaaattcatacgatggtaggcgcgggtaaaaccgatggcgcaatggatgctggcaacctattaaaaccaagtttagcgcgcggtgaattacattgcgttggcgcaactaccctagatgaatatcgacaatatattgaaaaagatgccgcgctagaacgccgtttccaaaaagttttagttgatgaaccaagtgttgaagacaccattgctattttacgtggcttaaaagaacgttatgaaattcatcatcacgtacaaattactgatccagccattgtagctgctgcaacgctttctcatcgttatattagcgatcgccaattaccggataaagcgattgatttaattgatgaagcagcttctagtttacgtatggaaatagattctaaaccagagccattagataaactcgagcgccgtattattcaattaaaattggaacgccaagcgctccaaaaagaaaaagatgaagctagtcgccaacggcttgcaaaattagatgaagaaatgaccgctaaagcacaagaatattcagcacttgaagaagtgtggaaagcggaaaaatctgctttacttggcacacaacatcttaaaacagaattagaaaatgcacgcattgcaatggatcaagccaaacgtgcagataattttgaaaaaatgtcagaattacaatatggcaccattccagcattagaaaaacagctgcaagacgccattaaacgtgaagaggaaaacaatgatcaccatttgttacgtactaaagtaaccgaagaagaaattgcagaagtattatcaaaagcgacaggaattccgatcacaaaaatgatggaaggcgaaaaagaaaaattactgcgtatggaacaagtattacatagccgagttatcgggcaaaatgaggccgtagaagcagtagcaaatgcgattctccgtagccgtgcagggcttgctgatccaaataaacccattggttcatttttattccttgggccaaccggggtcggtaaaactgagctaagcaaaacattagccaactttttatttgatgatgaaaatgccatcgtgcggatcgatatgtcagaatttatggaaaaacatagcgtatcacgcttagtcggggcacctcccggctatgtaggttatgaacaagggggctatttaactgaagcagttcgtcgccgtccatattctgtagtcttactagatgaagtagaaaaagcccaccctgatgtgtttaatatcttattacaagtattagatgacgggcgtttaaccgatggacaaggtagaacggtggatttccgcaacactgtagtaattatgacttcaaatttaggcgcacatttgatccaagaaaatgcagaaatcacttatttagcgatgaaagaaatggtaatgtcagtggtaagtcaacacttccgccctgaatttatcaaccgtattgatgaaaccgtggtcttccatccactcgatcaacagcatattcgtgccattgctaatattcaattacagcggttgatacgacggcttgctgaacgtggctaccaagtgacaataagtgataccgccttagatcatatcagccaagcgggcttcgactctttatttggtgctcgtccattaaaacgtgcgatccaacaagagcttgaaaaccctcttgcacaacaaatattaagtggcaaattattgccaaataatcctgtgattattgattatcaagataatcacatcattgctaaacaatga

SEQ ID NO: 7352 - protein, 856 aa, Haemophilus ducreyi
MNFEKFTTKLQEALNEAQSLAVAKDNAYIEPVHLLYALVKQQDGAIAPLFTTLNVSTQTLINELELILNQLPQVTGTTTQASQQLIRLLNQTAKLAQQFNDSFISSELFLLAALDDHGSLGKLFKAFGLTKENVTQAISQMRGGESVNNQNAEQTRQALQKYTIDLTERAKTGKLDPVIGRDEEIRRTVQVLQRRTKNNPVLIGEPGVGKTAIVEGLAQRIVNGEVPEGLKNKRVLSLDMGALIAGAKYRGEFEERLKAVLNELAKEEGQVILFIDEIHTMVGAGKTDGAMDAGNLLKPSLARGELHCVGATTLDEYRQYIEKDAALERRFQKVLVDEPSVEDTIAILRGLKERYEIHHHVQITDPAIVAAATLSHRYISDRQLPDKAIDLIDEAASSLRMEIDSKPEPLDKLERRIIQLKLERQALQKEKDEASRQRLAKLDEEMTAKAQEYSALEEVWKAEKSALLGTQHLKTELENARIAMDQAKRADNFEKMSELQYGTIPALEKQLQDAIKREEENNDHHLLRTKVTEEEIAEVLSKATGIPITKMMEGEKEKLLRMEQVLHSRVIGQNEAVEAVANAILRSRAGLADPNKPIGSFLFLGPTGVGKTELSKTLANFLFDDENAIVRIDMSEFMEKHSVSRLVGAPPGYVGYEQGGYLTEAVRRRPYSVVLLDEVEKAHPDVFNILLQVLDDGRLTDGQGRTVDFRNTVVIMTSNLGAHLIQENAEITYLAMKEMVMSVVSQHFRPEFINRIDETVVFHPLDQQHIRAIANIQLQRLIRRLAERGYQVTISDTALDHISQAGFDSLFGARPLKRAIQQELENPLAQQILSGKLLPNNPVIIDYQDNHIIAKQ

SEQ ID NO: 7353 - DNA, 2571 bp, Haemophilus influenzae
  CDS (1)..(2571): transl_table=11
atgaacattgaaaaatttacgacaaaattccaagaagcgttaagcgaacgacaatcacttgctatcggaaaagacaatcaatttattgaacctgtgcatttattgaccgcacttttaaatcaacagggcggctctattgcgccaattttgacagcaagtggcgtaaatgtggctttattgcgtaatgaattaaagacagaactaaataaattgccgcaagtgattggcaatggcggtgatgtacaactttcacgccagcttattaatctacttaatttatgcgataaattcgcacagcaaaaccaagataaatttatttcgagcgaattgtttttgtttgcagctttagaagaacgaggaacgatcagcgatattttgaaaaagtgcggtgcgaaaaaagaacaaatttcgcaagctattcagcacattagagggggacaaaacgtgaacgatcaaaatgcagaagaaagcagacaagcgcttgaaaaatatacgattgatttaaccgctcgtgcagaaagtggcaaacttgatcctgtaattgggcgtgatgaagaaattcgtcgagccattcaagtattacaacgtcgtaccaaaaataaccctgtgttaattggtgaaccaggtgtagggaaaacggcgattgtcgaaggcttggcacagcgcatcgtaaacggcgaagtgccagaaggtttgaaaaataaacgtgtgctttcattagatatgggggcgttgattgctggtgcgaaatatcgtggtgaatttgaagaacgtttaaaagcagtactcaatgaactttcgaaagaagaaggtcgcgttatcctctttattgacgaaattcatactatggtcggcgcgggtaaaaccgatggtgcgatggatgcgggtaatttgttaaaaccaagtttggcacgaggcgaattacattgcgtgggtgcaactactttagatgaatatcgtcaatatatcgaaaaagatgccgcacttgaacgccgtttccaaaaagtctttgtggacgaaccaagtgtagaagataccattgcgatcttacgtggtttgaaagaacgttatgaaattcatcatcacgtggatattactgacccagcaattgtcgctgcagcaacgctttcacatcgttatatttccgatcgtcagttaccagataaagccattgatttgatcgatgaagcagcgtctagcattcgtatggaaatagattctaaacctgaaccgcttgatcgtcttgaacgtcgtattatccaattaaaattggaacaacaagcgttacaaaaagaagaagacgaagcaagtcgcaaacgtttagaaatgttagagaaagaattggctgaaaaagaacgtgaatacgccgaacttgaagaagtatggaaatctgaaaaagcaacgctttctggctctcaacatattaaacaagagttagatactgcaaaaaccgaactagaacaagctcgtcgcgcgggtgatttagcgaaaatgtctgagttgcaatatggccgcatccctgatcttgaaaagcaacttgagcaagctgaaaccagcgaaggaaaagaaatgacgcttttacgctatcgcgtcacagatgaagaaatcgcagaagtgctttctaaagccacaggcattcctgtatcaaaaatgatggaaggcgagaaagaaaaactcttgcgtatggaagatgaactacataaacgagtgattggtcaagaagaagcggttgatgcggtagcaaacgcgattcgtcgtagtcgtgcaggtctttccgatcctaatcgcccaattggttctttcttgttcctagggccaacaggtgttgggaaaacagagctttgcaaaactttggctaaattcttgtttgatagtgaagatgcgatggtgcgtattgatatgtcagagtttatggaaaaacacagtgtttctcgtttagttggtgcgcctccaggctatgtcggctatgaagaaggcggttatttaactgaagctgttcgtcgtcgtccatattcagtgatcttattagatgaagttgaaaaagcacacgcagatgtattcaatatcttattacaagtgttggatgatggtcgtttaactgatggtcaaggtcgtactgtggacttccgtaacactgtggttattatgacctctaacttgggttctgatttaatccaaggtaataaagacgaaagctatagcgaaatgaaagccttagtgatgtcagtggtaagccaacatttccgcccagaattcatcaaccgtattgacgaaaccgtggtattccatccacttggtaaagaaaatatccgtgcgattgcaagtatccaattagaacgcttagcaaaacgtatggaaactcgtggatacgaattggtgtttaccgatgctttattagacttcattggcgaagtgggatacgacccaatttatggtgcacgtccattgaaacgtgctattcaacaagaaattgaaaacagcttggcacaacaaattctatctggtgcgttattacctggtaaggttgttaccattgattatgccaacgcagaagttcaagcgagacaatag

SEQ ID NO: 7354 - protein, 856 aa, Haemophilus influenzae
MNIEKFTTKFQEALSERQSLAIGKDNQFIEPVHLLTALLNQQGGSIAPILTASGVNVALLRNELKTELNKLPQVIGNGGDVQLSRQLINLLNLCDKFAQQNQDKFISSELFLFAALEERGTISDILKKCGAKKEQISQAIQHIRGGQNVNDQNAEESRQALEKYTIDLTARAESGKLDPVIGRDEEIRRAIQVLQRRTKNNPVLIGEPGVGKTAIVEGLAQRIVNGEVPEGLKNKRVLSLDMGALIAGAKYRGEFEERLKAVLNELSKEEGRVILFIDEIHTMVGAGKTDGAMDAGNLLKPSLARGELHCVGATTLDEYRQYIEKDAALERRFQKVFVDEPSVEDTIAILRGLKERYEIHHHVDITDPAIVAAATLSHRYISDRQLPDKAIDLIDEAASSIRMEIDSKPEPLDRLERRIIQLKLEQQALQKEEDEASRKRLEMLEKELAEKEREYAELEEVWKSEKATLSGSQHIKQELDTAKTELEQARRAGDLAKMSELQYGRIPDLEKQLEQAETSEGKEMTLLRYRVTDEEIAEVLSKATGIPVSKMMEGEKEKLLRMEDELHKRVIGQEEAVDAVANAIRRSRAGLSDPNRPIGSFLFLGPTGVGKTELCKTLAKFLFDSEDAMVRIDMSEFMEKHSVSRLVGAPPGYVGYEEGGYLTEAVRRRPYSVILLDEVEKAHADVFNILLQVLDDGRLTDGQGRTVDFRNTVVIMTSNLGSDLIQGNKDESYSEMKALVMSVVSQHFRPEFINRIDETVVFHPLGKENIRAIASIQLERLAKRMETRGYELVFTDALLDFIGEVGYDPIYGARPLKRAIQQEIENSLAQQILSGALLPGKVVTIDYANAEVQARQ

SEQ ID NO: 7355 - DNA, 2580 bp, Helicobacter hepaticus
  CDS (1)..(2580): transl_table=11
atgaatttatttgaaaaattaacaaaccaaatgaaagaaacgcttgatagtgcagcttcgcttgccttacattcaagtaatcaagaaatttctcttgcacatatatattgggcgcttttaagtaatcatcaaagtgtgctcaatcaggctttgaataaaatgaatattgataaaactgcgcttgagcttcaagcgcgcagtgaagtagataaacttcccaaaagctcacaggtgcaaaaagagaatctaagtatcagtaaagagctttcaagtgcgcttaatcttgctcaaggcgaggcaattaagaatggtgatagttttattgcagtagatatgtttttaatcgctaatcttaaagagagcacttttgtagctatatttaagcctcttgtggatattgcagagtttaaaaagacattactaagtctaagaggggagagcaagatagaatctcaaagtggtgatgataatttggaatctttaagtaaatttggcattgatttaacccaaaaagcattagaaaacactcttgaccctgttatagggcgcgatgatgagattaatgcaatgatgcagattctcatacgtaaaagtaaaaataatcctattttattgggagagccaggtgtgggaaaaactgctgtggtagagggtttagcacagcgaattgtggcaaaggctgtgcctacaagtttgcagaataaaaagctcattgcccttgatatgagcgcacttattgctggagcaaaatatcgcggagagtttgaagaacgacttaaaaatgttgttgatgaagtgaaaaaagctggaaatattattttatttattgatgagattcacactattgtgggtgctggggcaagtgaagggagtatggacgcagcaaatatacttaaacctgctcttgcacgaggggagcttcacactattggtgcaactacgttaaaggagtatcgcaagtattttgaaaaagatgctgcacttacacggcgatttcagcctataaatgtcaatgaaccaagcattaatgaggcattacaaattttgcgagggattaagccaaatttagaggcgcaccataatgtcaatattacagatgctgcacttgtagcagcagccaagctttcaagtcgatatattaccgataggtttttgcctgataaggcgattgatttgattgatgaggcagcagcagagctgaagatgcaaatagaatctgaacccttagagctaagcaagattaaaaaacacattgccaatcttgaagttgaaaaacaagcactcaatatggaaaaaacaaatgtcaatgaggcgcgtgtgctagagattgataaggaattggagaatttgcgtgaggaaaaaatgagcttagagggcaaatttgagcaagaaaagagcgtttttacgcgtattgctacaataaaagcggagcttgatagcctaaaaagagaatctgaacttgctaaacgaagtggagattataacaaagcggctgaaattgattatggtaaaatccctgatattcaggcacaggaagcagccttgcataaacaatgggaagaaatgcagcaaaatggcactttgcttaaaaatgctgttacacaagagagtattgcgggagttgttagtcgctggagtgggattccaattaaaaaaatgctccaaagccaaaaggagcgcattttaggcatagaatctgaacttgccaaaagtgtagtaggacaagatgatgcaataaaagccattgctagagcaatcaaacgcaataaagccggattaaatgatgcctctcgccctattgggagctttttatttttaggaccaacaggtgtaggtaaaacacaatgtgcaaaaactttagcagagtttttatttgataatgccaaatcacttgtgcgtattgatatgagtgaatatatggaaaaacacgctgtaagtaggcttgtaggagcacctccgggctatgtaggctatgaagaaggtggcgtgcttactgaagccataagacgtaaaccttatagtattgtgctttttgatgaggtggaaaaagcccatcctgatgtgtttaatatccttttgcaagtgcttgatgatgggcgattgactgatagtaagggtgtgagcgtggattttagcaatacgattattattttaacaagcaatattgcaagtgataaaattatggagattggggataagcaagagcgccaaaaggctgtgaaagaagcacttaaaatgtattttaaaccagaatttttaaatcgccttgatgatgtagttgtgtttaatccgctcggacttgctgatattactcaaattgtggatattatgtttaagtctttggctaaaagggcgttggagaaaggtattaatgttacccttagtcaagaggctagagagcatattgcccaagtaggctttgatagcgtatatggcgcgcgtccgctaaaaagggcattatatgaagaggttgaggatagattagcagatttgattttgcgtgatgagattaaagagggtgatagagtgaattttgcgcttaaaaatggcgaaatttgcacacatatagaaaaagaatag

SEQ ID NO: 7356 - protein, 859 aa, Helicobacter hepaticus
MNLFEKLTNQMKETLDSAASLALHSSNQEISLAHIYWALLSNHQSVLNQALNKMNIDKTALELQARSEVDKLPKSSQVQKENLSISKELSSALNLAQGEAIKNGDSFIAVDMFLIANLKESTFVAIFKPLVDIAEFKKTLLSLRGESKIESQSGDDNLESLSKFGIDLTQKALENTLDPVIGRDDEINAMMQILIRKSKNNPILLGEPGVGKTAVVEGLAQRIVAKAVPTSLQNKKLIALDMSALIAGAKYRGEFEERLKNVVDEVKKAGNIILFIDEIHTIVGAGASEGSMDAANILKPALARGELHTIGATTLKEYRKYFEKDAALTRRFQPINVNEPSINEALQILRGIKPNLEAHHNVNITDAALVAAAKLSSRYITDRFLPDKAIDLIDEAAAELKMQIESEPLELSKIKKHIANLEVEKQALNMEKTNVNEARVLEIDKELENLREEKMSLEGKFEQEKSVFTRIATIKAELDSLKRESELAKRSGDYNKAAEIDYGKIPDIQAQEAALHKQWEEMQQNGTLLKNAVTQESIAGVVSRWSGIPIKKMLQSQKERILGIESELAKSVVGQDDAIKAIARAIKRNKAGLNDASRPIGSFLFLGPTGVGKTQCAKTLAEFLFDNAKSLVRIDMSEYMEKHAVSRLVGAPPGYVGYEEGGVLTEAIRRKPYSIVLFDEVEKAHPDVFNILLQVLDDGRLTDSKGVSVDFSNTIIILTSNIASDKIMEIGDKQERQKAVKEALKMYFKPEFLNRLDDVVVFNPLGLADITQIVDIMFKSLAKRALEKGINVTLSQEAREHIAQVGFDSVYGARPLKRALYEEVEDRLADLILRDEIKEGDRVNFALKNGEICTHIEKE

SEQ ID NO: 7357 - DNA, 2571 bp, Helicobacter pylori
  CDS (1)..(2571): transl_table=11
atgaatttatttgaaaaaatgactgaccaattgcatgagactttagacagcgcgctcgctttagccttacaccataaaaacgctgaagtaacgcccatgcacatgctttttgccatgctcaataattcccaaggcattctcattcaagccttacaaaaaatgcctgtggatattcaagctttaaggcttagcgttcaaagcgagttgaataagttcgctaaagtttcacaaatcagcaagcaaaatatccaattaaaccaagctttaatccaaagtttagaaaacgctcaaggcttgatggctaaaaggggcgattctttcatcgctaccgatgtgtatcttttggcgaatatgggtctttttgaaagcgttctaaagccttatttagacgctaaggaattgcaaaaaactttagaatctttaagaaaaggcaggactattcaggataaaaacgacgattccaatttggaaagtttggaaaaatttggcattgatttgacgcaaaaagccctagaaaataagctggatcccgtgatcggaagagatgaagaaatcattcgcatgatgcaaattttgataagaaaaacaaaaaataaccctattttactgggcgagcctggagtggggaaaacggcggttgtggaagggttagcccaacgcattatgaataaagaagtgcctaaaacgcttttaaacaaacgagttattgctttagatctaagcttattggtggctggagcgaaatacagaggcgagtttgaagagcgcttgaaaaaggtgattgaagaagttaaaaaaagcgcgaatgtgattttatttattgatgaaatccacacgatcgtgggggctggggctagtgaggggggcatggatgcggctaacattttaaaacccgcgctcgctaggggggaattgcacacgattggagcgaccactttaaaagaataccgcaagtattttgaaaaagacatggcattgcaaaggcgtttccaacccattttactcaatgagcctagcatcaatgaagctttacagattttaagagggttaaaagaaactttagaaacgcaccataatatcactatcaatgactccgcgctcatagcgagcgctaaactctctagccgttatattaccgataggtttttacccgataaggcgattgatttgattgatgagggggcggctcaattaaaaatgcaaatggaatcagagccggcaaaactctctagcgttaaacgctccatccaaagattagaaatggaaaaacaagcccttgaaatggaaaaaaaagagagcaatgccaaacgcatgcaagaaatccttaaagaattgagcgatttgaaagaagaaaaaatccaattagaagcgcaatttgaaaacgaaaaagaagtgtttaaagaaatttcacgcttgaaaatggaaatggaaagtttgaaaaaagaggctgagaggtttaagcgcaatggggattaccagcaagcgggtgaaattgaatactctaaaatccctgaaaataaaaagaaagaagaagaattgcaacgtaaatgggaagcgatgcaacaaaacggggcgttattgcaaaacgctttaaccgaaaacaacatcgctgagatcgtgagccaatggacgcacatccccgtccaaaaaatgctccaaagcgaaaaaaatagggttttaaacattgaaagcgaattgcaaaaaagggtggtagggcaagaaaaagcgatcaaagcgatcgctaaagcgattaaaaggaataaggccggccttagcgatagcaacaagcccatagggagtttcctctttttagggccaacaggcgtgggtaaaaccgagagcgctaaagctttggcgcaattcttgtttgatagcgataaaaatcttatacgaattgacatgagcgaatacctagaaaagcatgccatgagccgtcttattggggccgctcctgggtatgtgggctatgaagaaggcgggcaattgaccgaagcggtacgcagaaaaccttatagcgtggtgctgttagacgaagtggaaaaagcccatccggatgtgtttaacctcttgttgcaggttttagatgaaggacatttaaccgatagtaagggcgtgagggtggatttcaaaaacacgattttgatcttaaccagcaatgtggctagtggtgcgcttttggaagaaaatttgagtgaagccgagaagcaaaaagcgattaaagagagcttgaggcaattctttaagccggaatttttaaaccgcttagatgaaatcatctcctttaacgccctagatagtcatgctgtcattaatatcgtggggatactttttgaaaacattcaaaaaaaagcgcttgaaaggggcattaatataaccctagacgaagaggcaaaagaattgatcgccgaagcgggatttgacagattctatggcgctagacccttaaagcgcgcgctctatgaaatggtagaagacaagctcgctgaactcattttagaggataaagttaaagagaatgacagcgtggcatttgtggtagaaaataacgagattgtgcctaagattaagtga

SEQ ID NO: 7358 - protein, 856 aa, Helicobacter pylori
MNLFEKMTDQLHETLDSALALALHHKNAEVTPMHMLFAMLNNSQGILIQALQKMPVDIQALRLSVQSELNKFAKVSQISKQNIQLNQALIQSLENAQGLMAKRGDSFIATDVYLLANMGLFESVLKPYLDAKELQKTLESLRKGRTIQDKNDDSNLESLEKFGIDLTQKALENKLDPVIGRDEEIIRMMQILIRKTKNNPILLGEPGVGKTAVVEGLAQRIMNKEVPKTLLNKRVIALDLSLLVAGAKYRGEFEERLKKVIEEVKKSANVILFIDEIHTIVGAGASEGGMDAANILKPALARGELHTIGATTLKEYRKYFEKDMALQRRFQPILLNEPSINEALQILRGLKETLETHHNITINDSALIASAKLSSRYITDRFLPDKAIDLIDEGAAQLKMQMESEPAKLSSVKRSIQRLEMEKQALEMEKKESNAKRMQEILKELSDLKEEKIQLEAQFENEKEVFKEISRLKMEMESLKKEAERFKRNGDYQQAGEIEYSKIPENKKKEEELQRKWEAMQQNGALLQNALTENNIAEIVSQWTHIPVQKMLQSEKNRVLNIESELQKRVVGQEKAIKAIAKAIKRNKAGLSDSNKPIGSFLFLGPTGVGKTESAKALAQFLFDSDKNLIRIDMSEYLEKHAMSRLIGAAPGYVGYEEGGQLTEAVRRKPYSVVLLDEVEKAHPDVFNLLLQVLDEGHLTDSKGVRVDFKNTILILTSNVASGALLEENLSEAEKQKAIKESLRQFFKPEFLNRLDEIISFNALDSHAVINIVGILFENIQKKALERGINITLDEEAKELIAEAGFDRFYGARPLKRALYEMVEDKLAELILEDKVKENDSVAFVVENNEIVPKIK

SEQ ID NO: 7359 - DNA, 2604 bp, Lactococcus lactis subsp
  CDS (1)..(2604): transl_table=11
atggacatcgaaaaaatgacaacaacgatgcaagaagcacttggttcagcgcaacaaattgcgcaagttcgtcatcaccaagtgattgaagttccacatttatggcgaatttttgttcaacctaatagttttggggcgaacttttataaagatttagggattgacctagatgactatacaaatttaattgaaaaagaaattgacaaaattaattcagtagaaggttcaaatattacttatggtcaaaacctaagtccagatttgttccaaatatttactgaagcagacaaaattgcgcaaaaaatgggcgatgaatacttatcaactgagattattctccttgccctctttgaattaaaacaaaatccattgaccagttatttggttagccatggactaacaaaagcaaaagcgcaagctgcaattgaaaaattacgcggaggtgataaagtgaccagtcaaaatgcagaagaaacatacaaagcacttgaaaaatatggggtagatctcgttgctcaagttaaatcaggtaaacaagatcctgtcattggacgtgatgaagaaattcgtgatgtcattcgagtgctttctcgtaaaacaaaaaataaccccgttcttattggtgaacctggggttggtaaaacagccattgttgaaggattggcacaaaggattgtcagaaaagacgttcctgaaaatctgaaagataaaacaatcttttcacttgatatgggtgccctgattgcaggagcgaaatatcgtggtgaatttgaagaacgtttgaaagcagtccttaatgaagtgaaaaaatcagatggacaaattatcctctttattgatgaacttcatacgattgttggtgcaggtaaaacagaaggttcaatggacgctgggaaccttttaaaaccaatgcttgcacgtggtgaactccatttgattggggcaactaccttggatgaatatcgtaaatacatggaaacagataaagcacttgaacgtcgtttccaaaaggtattggttactgaacctactgttgaagatacaatttcaatcttgcgtggtctaaaagaacgttttgaaattcaccatggagtgaccattcatgataatgctttagtcgcagcagcaaccctttcaaatcgttatattactgaccgatttttaccagataaagccattgacttggttgatgaagccagtgcaacaattcgtgtagaaatgaattcactcccaactgaacttgaccaagctaatcgtcgcttgatgcaattagaaattgaagaagcggccctcaaaaaagaacgagatgatgcttctaagaaacgtcttgaaattatacgtggtgaaattgctgaacttcgagaagaaaataatcaactcaaagctcaatgggaagctgagaaaaaagaagtgggcaatatttctgaaaaacgaaatgaattagaacatgctcgccacgaattggaagaagctcaaaatgaaggaaacttagaaaaagcagcagcccttcgttatggtaaaattcctgaaattgaaaaagaactcaaagctattgaagaaaaagcaaaatcagatgatttatccttagttcaagaatcagtcactgaagaacaaatcactgaagttgttggacgcatgacaggtattccaattaccaaattggttgaaggtgaacgtgaaaaattacttcacttgccagaaacactgcatcaaagggtcgttggacaagatgaagctgttgaagccgtatctgatgccattattcgtgcgcgtgcaggaattcaagaccctaatcgtccacttggctcattcctcttcctcggtccaactggggtaggtaagaccgaactcgcgaaagctttggctgaaaatctctttgattcagaagaacatatggttcggattgacatgagtgaatatatggaaaaacactcagtttctcggttagtcggagcacctccaggatatgtcggttacgatgaaggaggccaattgactgaagctgttcgtcgtaatccttatacaatcatcttgcttgatgaaatcgaaaaagcacatccagatgtcttcaatatcttgttgcaagttttggatgacggccgtttgactgactctaaaggtgttctcgttgactttaagaacacagtgttgattatgacttcaaatgtcggttctcaatatttgcttgataatgttggagaaaatggtgaaatttcggaagaaacaactgaaaacgtgatgtctcaacttcgggcacatttcaaaccagaatttctaaatcgaattgatgataccattcttttcaaaccattggcacttgaggatattaagaatattatcgttaaaatgactagccaactttcacatcgtcttgaagaaatggatgttcaacttgagttgagtgaagaagtaaaagtttggattgccgaaaatgcttatgaaccagcttatggtgcacgtccactcaaacgttatttgacaaaagtcatcgaaaatccattagctaagctgattatcggaggaaaaattccaccaaaatcaaaagttattgtaacgcttgtagaaaacaagattgactttgatattcaaacgattgctgaataa

SEQ ID NO: 7360 - protein, 867 aa, Lactococcus lactis subsp
MDIEKMTTTMQEALGSAQQIAQVRHHQVIEVPHLWRIFVQPNSFGANFYKDLGIDLDDYTNLIEKEIDKINSVEGSNITYGQNLSPDLFQIFTEADKIAQKMGDEYLSTEIILLALFELKQNPLTSYLVSHGLTKAKAQAAIEKLRGGDKVTSQNAEETYKALEKYGVDLVAQVKSGKQDPVIGRDEEIRDVIRVLSRKTKNNPVLIGEPGVGKTAIVEGLAQRIVRKDVPENLKDKTIFSLDMGALIAGAKYRGEFEERLKAVLNEVKKSDGQIILFIDELHTIVGAGKTEGSMDAGNLLKPMLARGELHLIGATTLDEYRKYMETDKALERRFQKVLVTEPTVEDTISILRGLKERFEIHHGVTIHDNALVAAATLSNRYITDRFLPDKAIDLVDEASATIRVEMNSLPTELDQANRRLMQLEIEEAALKKERDDASKKRLEIIRGEIAELREENNQLKAQWEAEKKEVGNISEKRNELEHARHELEEAQNEGNLEKAAALRYGKIPEIEKELKAIEEKAKSDDLSLVQESVTEEQITEVVGRMTGIPITKLVEGEREKLLHLPETLHQRVVGQDEAVEAVSDAIIRARAGIQDPNRPLGSFLFLGPTGVGKTELAKALAENLFDSEEHMVRIDMSEYMEKHSVSRLVGAPPGYVGYDEGGQLTEAVRRNPYTIILLDEIEKAHPDVFNILLQVLDDGRLTDSKGVLVDFKNTVLIMTSNVGSQYLLDNVGENGEISEETTENVMSQLRAHFKPEFLNRIDDTILFKPLALEDIKNIIVKMTSQLSHRLEEMDVQLELSEEVKVWIAENAYEPAYGARPLKRYLTKVIENPLAKLIIGGKIPPKSKVIVTLVENKIDFDIQTIAE

SEQ ID NO: 7361 - DNA, 2604 bp, Lactobacillus plantarum
  CDS (1)..(2604): transl_table=11
atgaatccagaacaatttacagaaagtttacaacaagccttacaacaggcacaacaaatcgcacaaacacggcgccatcaagaaattggggtgccccatctatttaagtttttaacgcaaccaggcgaactggttcggcagatctttagtgaggccggcgctgatttagaccaattacaaacagagctcgaccgtgagctggatgacattgccgttgttagcggtggtaacgttcagtacggtggcagtatgagcagtagtctagctacgctgatgcaggctgccgatgctaagcgcaaagcgttaggtgatgattaccttgcgaccgacactttggctttagcgctgatggatcaaactggtgatcagttgaccaaatacttgaatcagcaaggcatcacggcaggacaagtcaagaatgccgttgatcgtattcgcgggggccaacgggtcacgtcacgtaatcaggaagatcagtatcaagctttggaaaagtacggcgtcgacttggttaagcaggcgcgccaggggaatcaagatccagtaattggccgggacgaagagattctggatgttattcggatcttgtcacgaaagacgaaaaataatcctgtcttgattggtgaaccgggagttgggaaaactgccatcgtggaaggcctagcgcaacgaattgttcgtggtgatgtgccggagaacttaaaagataagacgttgttctcgctagatatggggtccctgattgccggggcgaagtatcgtggtgaatttgaagaacgactcaaagccgtcctcaaggaaatcaagaagagcgatgggcagatcatcatgttcatcgatgaaatccataatatcgttggtgctggtaagacagaaggcagtatggacgccggtaacttgttgaaaccaatgttggcgcggggagaacttcatttgatcggggccacgacgttagatgaatatcgtcagtacatggaaaaggacaaggcgctcgagcggcggttccaaaaagtattggttgctgaaccgagtgttgaagatacaattagtattttacgtggcttaaaggaacgctttgaaatccatcatggtgttcggattcatgataacgccttagtggccgctgccaagttatctgatcgttatattacggatcgttacttgccagataaggccttagatttagtagatgaggcttctgctgaaattcgggtcgaaatgaactccaacccaacggaattagaccaagtcaaccgacaattaatgcgtttagaggtcgaggaagccgccttaaagaaggaaactgacgatgcctccgttaaacggctagcggatgtacaaaaagaactcgccagcgcaaaggaaaaacagcggactttatccgaacgctgggacagtgaaaagaagagtctccaagcgttaagcgacaaaaagtcggcgttagacaaagctaagcacgacttggaaaatgctgaaaataattatgatctggaacaagcagctaagttgcagcacgggacgattccaaagctggaacaagagttgaaggccatggaagccaatgatcatcatgaagattggttagttgaggaatccgtcacgccagatcagattgcaaacgtggtttcccggatgacaggaatcccagtagccaaactggttgccggtgagcgggagaaattattacacttggcggaccatttgcatgaacgagtggttggtcaggatgcggcggtcgatgccgtttcggatgccgtattacgttcgcgggccggtttgcaagatcctaatcgtcccctgggttcttttatgtttttaggcccaactggggttggtaagacggaattagcgaaagcattggctgagaatttgtttgacgccgatgatcatatggttcggatcgatatgagtgaatatatggagaaagagtccgtttcgcgattggtcggggcggcaccgggctacgttggttacgaagaaggcggtcagttgaccgaagctgtccggcgtaatccgtactcgatcgtgttattcgatgaaattgaaaaggcgcatccagatgtgtttaacatcttgttacaagtattggatgacggtcggttgacggatggtcaaggacggaccgtcgacttcaaaaataccatcttgattatgacgtcgaacttaggatcagagttgctactggcgggggttgatgaccagggtcacttgtcggccgacacccatcaacaggttatgcagctggttcaaagtcgattcaaaccggaatttttgaaccgaatcgatgacatcattatgttcacgccactacaattgggcgcgattgaggaaattgtggtgaaattgattgatcggttgtctgcccgtctccaagatcgtgagattacactgaaaatttctgacgaagcgaagaagtggatcgctaagcaggggtatgaaccggcatacggtgcccggccgctccggcgctttatcacgaatcacgtcgaaacaccgctggcaaaagagatcattgcggggcgcgtggcaccaaaatcgacagtcgccattaatttgatggacgatcacttagtcttcgaaaaccaatcgacccagccggcataa

SEQ ID NO: 7362 - protein, 867 aa, Lactobacillus plantarum
MNPEQFTESLQQALQQAQQIAQTRRHQEIGVPHLFKFLTQPGELVRQIFSEAGADLDQLQTELDRELDDIAVVSGGNVQYGGSMSSSLATLMQAADAKRKALGDDYLATDTLALALMDQTGDQLTKYLNQQGITAGQVKNAVDRIRGGQRVTSRNQEDQYQALEKYGVDLVKQARQGNQDPVIGRDEEILDVIRILSRKTKNNPVLIGEPGVGKTAIVEGLAQRIVRGDVPENLKDKTLFSLDMGSLIAGAKYRGEFEERLKAVLKEIKKSDGQIIMFIDEIHNIVGAGKTEGSMDAGNLLKPMLARGELHLIGATTLDEYRQYMEKDKALERRFQKVLVAEPSVEDTISILRGLKERFEIHHGVRIHDNALVAAAKLSDRYITDRYLPDKALDLVDEASAEIRVEMNSNPTELDQVNRQLMRLEVEEAALKKETDDASVKRLADVQKELASAKEKQRTLSERWDSEKKSLQALSDKKSALDKAKHDLENAENNYDLEQAAKLQHGTIPKLEQELKAMEANDHHEDWLVEESVTPDQIANVVSRMTGIPVAKLVAGEREKLLHLADHLHERVVGQDAAVDAVSDAVLRSRAGLQDPNRPLGSFMFLGPTGVGKTELAKALAENLFDADDHMVRIDMSEYMEKESVSRLVGAAPGYVGYEEGGQLTEAVRRNPYSIVLFDEIEKAHPDVFNILLQVLDDGRLTDGQGRTVDFKNTILIMTSNLGSELLLAGVDDQGHLSADTHQQVMQLVQSRFKPEFLNRIDDIIMFTPLQLGAIEEIVVKLIDRLSARLQDREITLKISDEAKKWIAKQGYEPAYGARPLRRFITNHVETPLAKEIIAGRVAPKSTVAINLMDDHLVFENQSTQPA

SEQ ID NO: 7363 - DNA, 2583 bp, Leptospira interrogans serogroup Icterohaemorrhagiae serovar
  CDS (1)..(2583): transl_table=11
atgaaattagataaacttacatccaaattaaacgaagcgatttataacgcacaagcgtctgccgaaaaattgggaaatccggaaattagtgaagaacatattttaaaggaagttctatcacagccggacggacttgtacctcttttaatttctaaactcaatctgagtccaaaatcatttttggaaagtacagaaaatgctttgggaaaacaaccgaaagtaggaggaaatacgtctgcagatgtaggcttttcgcgttcggcggtttcacttttaaaagccgccgatgaagtaagaaaagaattaaaagacgagtatctttctacggaccatatcttactcgggctcatgaaaaacggtactgggtcgttaaaaactgagtttttaaaattaggattagaatatcataaattacttaaaatcactttggaaaatagaaagggaaaaacaatcatggacgactcgccagaaggaaaaacggatgcacttgcaaagtatgcaaaaaacctaaatgaacttgccaaacaaggaaaattagatcctgtcataggaagagacgaggaaattagaaggacaatacaagttttatctagaagaacaaaaaacaatcctgtgcttattggagaaccaggagttggaaaaactgcaatcgtggaagggctagctaacaaaatcgttcaaggagaagtgcctgaaggaatcaaaaataaaacactttataccttggacttaggttccatgatcgccggggctaaatatagaggggaatttgaagacagactcaaagcgttgttagacgaggtcaaatcttcagacggagaagtgattttattcatagacgaaattcatactcttgtaggcgctggagccacagaaggagcattagatgcttctaatatgttaaaacccatgcttgctagaggagaactacgttgtataggtgcaactactctaaaagaatatcagaaatatatagagaaagacgcggctttagaaagaaggtttcaacctgtttatgtcaaggaaccttccgtagaggaaaccgtaacgattttaagagggcttaaggggcgttacgaattacatcatggaattagaatattagattctgctttgattgctgccgctacactttctaatcgttatatatccgatcgatttcttccagataaggcggtggacttgatcgatgaggcctcttctaaaatgaggattgagatagattctatgcccgaggaactcgatcgtgcaaacaaaaggattcaatctctaaagatagaaagagaagctctaaaaaaagaacaggatacggcttcgaaagaaagattaaaaactctcgaaagggatttatccgaacaagagcaaaattttcaaactttaaaggcgagatgggatttagaaaaatctaaaattggtcgtttgaaacaaattaaagaagaaatagaaaagtataaaaatttagaagcggaagcagaaagaagaggagagattaatcgagtggctgagattcgctacggaaagttagtagatcttcaaaaagaactcgaatccgcaaacgaagaattaaaaaaacaagaaagtgcttccagacttttaaaagaagaagtctccgaagaggatatagcgaatatagtctctcgttggactggaattccagtttctaaaatgcttcaaggcgaaagggcaaaacttcttttgatggaggatgtattaaaaaccaaagtgatcggacaggatcatgctcttagactcgtttcggaagcggtacagagatctagggccggaattgcagatccaaatcgtcccataggaacgtttttatttcttggacctactggagtaggaaagaccgaaactgcaaaagcactcgccgaattcttgtttgacgatgtaaacgcgatgacccggatcgatatgagtgaatacatggaggctcattccgtagccaggctgatcggtgcacctccgggttatgtaggatacgatgaaggaggacagcttacggaagcggttcgaagaagaccatattctttgatactttttgacgagattgaaaaagcaaatccggaagtattcaacattttccttcagattttagatgaaggaagattgaccgatggaaagggacgtaacgttgattttaagaatacggtgatcattcttacttcgaatataggctccgaaattttaggatcttctgaatacacttcggaagaaaaagaaagattggtggaacaaagattaaaaaagcattttaaaccagaatttttaaatcgaattgacgaagtaattttgtttcattcgattacggattccgtgattcataaaattgcggatattcaattagaaggtttgagacaaaaggcgaaagaaaacgggctggacgtaagttttacaaacgagttaaaagattatgtttctaaagccggttttgacgcagaatatggagccagacctctcaaacgtttgatccaaagagaagtaggaaatgcactgagtcgatatatattagacggtaagtttacaaacgggcaaaacgtaaccgtggattatagacagggaaaggtagttgttgtagtttaa

SEQ ID NO: 7364 - protein, 860 aa, Leptospira interrogans serogroup Icterohaemorrhagiae serovar
MKLDKLTSKLNEAIYNAQASAEKLGNPEISEEHILKEVLSQPDGLVPLLISKLNLSPKSFLESTENALGKQPKVGGNTSADVGFSRSAVSLLKAADEVRKELKDEYLSTDHILLGLMKNGTGSLKTEFLKLGLEYHKLLKITLENRKGKTIMDDSPEGKTDALAKYAKNLNELAKQGKLDPVIGRDEEIRRTIQVLSRRTKNNPVLIGEPGVGKTAIVEGLANKIVQGEVPEGIKNKTLYTLDLGSMIAGAKYRGEFEDRLKALLDEVKSSDGEVILFIDEIHTLVGAGATEGALDASNMLKPMLARGELRCIGATTLKEYQKYIEKDAALERRFQPVYVKEPSVEETVTILRGLKGRYELHHGIRILDSALIAAATLSNRYISDRFLPDKAVDLIDEASSKMRIEIDSMPEELDRANKRIQSLKIEREALKKEQDTASKERLKTLERDLSEQEQNFQTLKARWDLEKSKIGRLKQIKEEIEKYKNLEAEAERRGEINRVAEIRYGKLVDLQKELESANEELKKQESASRLLKEEVSEEDIANIVSRWTGIPVSKMLQGERAKLLLMEDVLKTKVIGQDHALRLVSEAVQRSRAGIADPNRPIGTFLFLGPTGVGKTETAKALAEFLFDDVNAMTRIDMSEYMEAHSVARLIGAPPGYVGYDEGGQLTEAVRRRPYSLILFDEIEKANPEVFNIFLQILDEGRLTDGKGRNVDFKNTVIILTSNIGSEILGSSEYTSEEKERLVEQRLKKHFKPEFLNRIDEVILFHSITDSVIHKIADIQLEGLRQKAKENGLDVSFTNELKDYVSKAGFDAEYGARPLKRLIQREVGNALSRYILDGKFTNGQNVTVDYRQGKVVVVV

SEQ ID NO: 7365 - DNA, 2601 bp, Listeria innocua
  CDS (1)..(2601): transl_table=11
atggatttacaaaaatttacccaacaagtccagcaaacaattgcggacgcacaaaatctagctattgcatcagaacatcaagaaattgacgttatacatgtttttaaagtgttattaactgagagtgactttgcaaaacgcgcatatgatgtagcagaagttaatgttgaggcacttcaaaaagtagtagacgaatctttaagaaaaattcctgttgtttcaggaagcggagtgaactatggccaagcaatgagtcaagcacttttccaactaatgagagatgcagaaaaagaacaaaaacaattagacgatgattttgtatcgacagaacatcttatcttagctgtaatggaccaaaagtcaaaccccatcacagtcgaattaaaaaagcaaaataaatctaaaaaacaaattaacgaagcaattttaaaaatcagaggagggaaaaaagtgacttctcaaaatgcagaggaaaactatgaagctttaacaaaatatggacgagatttagtcgcggaagtaagaagcgggaaacttgatccagtgattggacgcgacgcagaaattcgtaatgtcatccgaattttatcaagaaaaacaaaaaataatccagttctaattggtgaaccaggtgttggtaaaacagcaattgtggaaggtttagcacaacgtattgtcagaaaagacgttccagaaggattgaaagataaaacaattatttcccttgatattggttcccttattgctggggctaagtatcgtggtgaatttgaagaacgtttaaaagcagtactccaagaagtaaaacaaagcgatggacaaattttgctctttatagatgaaattcatacaattgtcggcgcaggtaaaacagatggagctatggatgctggaaacatgttgaaacctatgcttgcaagaggtgaacttcactgtatcggcgcaacaactttggacgaataccgccaatatatcgaaaaagatgctgcactagaaagacgtttccaaaaagtacttgttccagaaccaaccgtggaagatacagtttccattttacgtggtttaaaagaacgttttgaaatccatcatggggtaaatattcatgataatgccttagttgccgcagctagcctttctaatcgttacattacggatcgttttttaccggataaagcaattgatttagtagatgaagcgtgtgcaactattcgtgtcgaaattgactctatgccaagtgaacttgatgaagtaacaagaaaagtcatgcagctagaaattgaagaagcggcattaaaagaagaaaaagacccagcaagtgaacggcgcttagagatgttacagcgagaactagctgactataaagaagaagcaaataaaatgaagtctaaatgggaatccgaaaaaagcgaaatcagtaaaattcgtgaagttcgtgaacaaatcgatcatctgcgtcatgaattagaagaagcagagaacaactacgatttaaataaagctgctgaacttcgccacggtaaaattccagcagtagaaaaagaattattagcattagaaacggaaaatcgcgaaaaaacagcccaagaagatcgaattttacaagaagaagtaacagaaaatgaaatcgctgaaattgttggacgatggactggaataccagtgactaagttagtagaaggagaacgcgaaaaactgcttaaattagccgatgttcttcatcaaaaagtaattggtcaagacgacgcggttcagttagttagtgatgcagtattacgtgctcgtgcggggattaaagatccaaaacgaccaatcggatcctttattttcttaggcccaaccggtgttggtaaaacggaactagccaaagcattagcctataatatgtttgattctgaagatcatatgattcgaattgatatgtctgaatacatggagaaacattccgtatcaagacttgtcggggctcctccaggttatgttggatatgaggaaggcggacaacttaccgaagctgtaagacgcaacccatattcgattgtcttacttgatgaaatcgaaaaagcccatccagacgtatttaatatccttttacaagtacttgacgatggtcggattacggattcacaagggcgcttaattgactttaaaaacaccgtaatcattatgacgtctaatatcggctctaatttattacttgaaagaaccgaagaaggtgaaatctcgcctgaactagaatcagacgtaatgcaaattttgcaaagtgaatttaaaccagaattcttaaaccgggtagatgatattattctatttaaaccacttacactcgctgatattaaaggcattgtggaaaaattagtagaagaacttcaaattcgccttgctgatcaagaaattacgattactatttcagataacgcaaaagcctttattgcagaagaagcttatgacccagtatacggtgcgcgtccactgaaacgatatattgtgcgtcatgtcgaaacgcctcttgcaagagaaattgtatctggtaaaattatgccgcattcttccgttgaaattgatttacaagataaagaatttacttttaaagtcacagaataa

SEQ ID NO: 7366 - protein, 866 aa, Listeria innocua
MDLQKFTQQVQQTIADAQNLAIASEHQEIDVIHVFKVLLTESDFAKRAYDVAEVNVEALQKVVDESLRKIPVVSGSGVNYGQAMSQALFQLMRDAEKEQKQLDDDFVSTEHLILAVMDQKSNPITVELKKQNKSKKQINEAILKIRGGKKVTSQNAEENYEALTKYGRDLVAEVRSGKLDPVIGRDAEIRNVIRILSRKTKNNPVLIGEPGVGKTAIVEGLAQRIVRKDVPEGLKDKTIISLDIGSLIAGAKYRGEFEERLKAVLQEVKQSDGQILLFIDEIHTIVGAGKTDGAMDAGNMLKPMLARGELHCIGATTLDEYRQYIEKDAALERRFQKVLVPEPTVEDTVSILRGLKERFEIHHGVNIHDNALVAAASLSNRYITDRFLPDKAIDLVDEACATIRVEIDSMPSELDEVTRKVMQLEIEEAALKEEKDPASERRLEMLQRELADYKEEANKMKSKWESEKSEISKIREVREQIDHLRHELEEAENNYDLNKAAELRHGKIPAVEKELLALETENREKTAQEDRILQEEVTENEIAEIVGRWTGIPVTKLVEGEREKLLKLADVLHQKVIGQDDAVQLVSDAVLRARAGIKDPKRPIGSFIFLGPTGVGKTELAKALAYNMFDSEDHMIRIDMSEYMEKHSVSRLVGAPPGYVGYEEGGQLTEAVRRNPYSIVLLDEIEKAHPDVFNILLQVLDDGRITDSQGRLIDFKNTVIIMTSNIGSNLLLERTEEGEISPELESDVMQILQSEFKPEFLNRVDDIILFKPLTLADIKGIVEKLVEELQIRLADQEITITISDNAKAFIAEEAYDPVYGARPLKRYIVRHVETPLAREIVSGKIMPHSSVEIDLQDKEFTFKVTE

SEQ ID NO: 7367 - DNA, 2601 bp, Listeria monocytogenes
  CDS (1)..(2601): transl_table=11
atggatttacaaaaatttacacaacaagtccagcaaacaattgcggacgcacaaaatctagctattgcatcagaacatcaagaaattgacgttgcacacgtttttaaagtgttattaacagaaagcgactttgcaaagcgagtctatgatgtagcggaagttgatacagatgcacttcaaaaagtaatagagaatactttggaaaaaatcccagtagtttcaggaagtggcgtgaattatggccaagcaatgagccaagctcttttccaactaatgagggatgcagaaaaagaacaacaacaattagaagatgattttgtctcaacagaacatcttatcttagctgttatggatcaaaaatcgaatccaattacagccgagcttaaaaatcaacataaagctaaaaaacaaattaaagaagcaattttaaaaatcagaggagggaaaagagtgacttctcaaaatgcagaagaaaactatgaagctttaacaaaatatggtcgtgatttagtcgcggaagttagaagcggcaaactcgatccagtaatcggacgcgatgcagaaattcgtaacgttatccgaattttatctagaaaaacaaaaaacaatccagttctaataggtgaaccaggtgttggtaaaacagccattgtcgaaggattagcgcaacgtatcgttcgaaaagacgtgccagaaggactgaaagataaaacgattatctcactcgacattggttcccttattgctggagctaagtaccgcggtgaatttgaagaacgattgaaagcagtactccaagaagtaaaacaaagtgatggtcaaattttactctttattgatgaaattcatacgattgtcggcgcaggtaaaacagacggcgcaatggacgcaggaaatatgttaaaaccgatgcttgcccgcggagaactgcactgcatcggtgcaactacattggatgaatatcgccaatatatcgaaaaagatgctgcactagaaagacgtttccaaaaagtgcttgtcccagaaccaacagtggaagatacggtttccattttacgcgggttaaaagaacgttttgaaattcatcacggggtaaatattcatgacaatgctttagttgcagctgcgagtctttctaatcgttatattactgaccgcttcttgccggacaaagcaattgacttagtagatgaagcatgcgcaactattcgtgtcgaaattgactcgatgccaagtgaactcgatgaagtaactagaaaagtaatgcaattagaaattgaggaagcagcactaaaagaagaaaaagatccagcgagtgaacgccgtttagaaatattgcaacgcgagctggctgactacaaagaagaagccaaccaaatgaagtccaaatgggaatccgagaaaaacgaaatcagtaaaattcgtgaggtccgggagcaaatcgaccatttacgccatgaattagaagaagcagaaaataattatgatttaaacaaagcagcagaattacgccacggtagaatcccggctgtggaaaaagaattgcttgagttagaagcagaaaatcgcgaaaaaacagcacaagaagatcggattttacaagaagaagtaacagaaaatgaaattgcagaaatcgtcggacgttggacagggattccggtgactaaattagtagaaggagaacgcgaaaaactgcttaaattagcagatgtccttcatcaaaaagtaattggtcaagatgatgccgtccaattagtgagtgatgctgtcttacgagctcgtgcaggaattaaagatccgaaacgcccaataggctcctttattttcttaggaccaacaggtgtgggtaaaacagaacttgctaaagcacttgcatttaatatgtttgattccgaagatcacatgattcgaattgatatgtctgaatacatggagaaacattccgtatcaagacttgtcggagctcctccaggttacattggttatgaggaaggtggtcaacttactgaagctgtaagacgaaacccttattcgatcgtcctacttgatgaaatcgaaaaagctcatccagatgtatttaacatactattacaagtacttgacgatggacgtatcacagattcacaaggtcgattaattgattttaaaaatacagtaattattatgacgtcaaatattggctctaatttattacttgaaagaaccgaagaaggcgaaatttcaccggaattagaatcagatgtaatgcaaattttacaaagtgaatttaaaccagaattcttaaaccgcgtagatgatattattctatttaaaccactaacacttgctgatattaaaggtattgtggagaaattagtagaagaacttcaaatccgtttagccgaccaagaaattacaatcactatttccgatgatgcaaaagcctttattgcggaggaagcttatgatccggtatacggagcacgaccacttaaacgctatattgtgcgtcatgtcgaaacaccacttgcaagagaaattgtctctggtaaaatcatgccacattcatccgtggaaattgatttagcagataaagaatttacttttaaagtcacagaataa

SEQ ID NO: 7368 - protein, 866 aa, Listeria monocytogenes
MDLQKFTQQVQQTIADAQNLAIASEHQEIDVAHVFKVLLTESDFAKRVYDVAEVDTDALQKVIENTLEKIPVVSGSGVNYGQAMSQALFQLMRDAEKEQQQLEDDFVSTEHLILAVMDQKSNPITAELKNQHKAKKQIKEAILKIRGGKRVTSQNAEENYEALTKYGRDLVAEVRSGKLDPVIGRDAEIRNVIRILSRKTKNNPVLIGEPGVGKTAIVEGLAQRIVRKDVPEGLKDKTIISLDIGSLIAGAKYRGEFEERLKAVLQEVKQSDGQILLFIDEIHTIVGAGKTDGAMDAGNMLKPMLARGELHCIGATTLDEYRQYIEKDAALERRFQKVLVPEPTVEDTVSILRGLKERFEIHHGVNIHDNALVAAASLSNRYITDRFLPDKAIDLVDEACATIRVEIDSMPSELDEVTRKVMQLEIEEAALKEEKDPASERRLEILQRELADYKEEANQMKSKWESEKNEISKIREVREQIDHLRHELEEAENNYDLNKAAELRHGRIPAVEKELLELEAENREKTAQEDRILQEEVTENEIAEIVGRWTGIPVTKLVEGEREKLLKLADVLHQKVIGQDDAVQLVSDAVLRARAGIKDPKRPIGSFIFLGPTGVGKTELAKALAFNMFDSEDHMIRIDMSEYMEKHSVSRLVGAPPGYIGYEEGGQLTEAVRRNPYSIVLLDEIEKAHPDVFNILLQVLDDGRITDSQGRLIDFKNTVIIMTSNIGSNLLLERTEEGEISPELESDVMQILQSEFKPEFLNRVDDIILFKPLTLADIKGIVEKLVEELQIRLADQEITITISDDAKAFIAEEAYDPVYGARPLKRYIVRHVETPLAREIVSGKIMPHSSVEIDLADKEFTFKVTE

SEQ ID NO: 7369 - DNA, 2565 bp, Meiothermus ruber
  CDS (1)..(2565): transl_table=11
atgaatctggagcgctataccgaacaagcccgccaggccattgcccaaagccaggtgctggcccgggagtcggcccattcgaagatcgacctgccgcacctggccgcggtgatgctgcgggacgctgcgggtctgccggccaagattgtgcaaaaagccgggcagaacccccagaatatctaccaggccgcccagagcgaactgggtcggctgcccaaggtttcgggcaccgagggggggcagtacctctcgtcccgcctggcctcggcgctggggcgggctgaaaagctggccgatgagctgaaagatcgctttgtggccctggacacgctgcttctggccctggccgagaccgggtatggggggttgcaggccagcgcggttcggcaagccctacaggagatcagaggaggaagaaccgtgaacagcgaacacgccgaaggaacctacaacgccctcgagcagtacggcctcgacctgacccgccaggccgaggagggcaagctcgaccccgtgatcgggcgcgatgaagagatccggcgggtaattcaaattctgctgcgccgcaccaagaacaacccggtgctgataggcgaaccgggggtgggtaagaccgccgtggtggagggcttggcccagcgcatcgtgaagggcgacgtgcccgaggggctcaagggcaagcgcatcgtgagcctgcagatgggctcgctgctggccggggccaagtaccgcggcgagtttgaagagcggctcaaggccgtcatccaggagaccgtgcagagcgcgggccagattattctattcatcgacgagattcacaccgtggtgggggccggcaaggccgagggcgcggtggacgcgggcaacatgctcaagccggccctggcccggggcgagctacacctgatcggggccaccaccctcgacgagtaccgcgagatcgagaaagacccggccctggagcgccgcttccagccggtgtttgtggacgagcccagcctcgaggagaccgtcagcatcctgcgcggcatcaaggagaagtacgaggtgcaccacggggtgcgcatctccgacccggcgctcatcgcggcagcccagctttcgcaccgctacatcgccgaccgcaagctgcccgacaaggccatcgacctggtggacgaggcggcggcccggctgcgcatggccctcgagagcagccccgaaagcattgatgccctgaaccgccggaagctccagctcgagatcgagcgcgaggccctgaaaaaggagaccgacgccgagagcaagttcaggctgggcgaactggaaaaagaaattgcagatctggaagaggaaattcgcaagcagcaggccgagtgggaggccgagcgcgagattatgcagaagctccgcgcggcccagcagcgcctggacgaggtgcgcacccagatcgagcaggccgagcgggcctacgacctgaacaaagccgccccacttcgctacggcgagctgccaaagctcgagcaggaggtcaacgaactggccgaccgcatggccggggcccagtttgtgcggcccatggtgaccgaggaggacatcgccgccattgtctcgcgctggacgggcatcccggtggctaagctgatggagggtgagcgcgagaagctcctgcgcctcgaggacgaactgcacaagcgggtggtgggccaggacgaggccatcgtggcggtggccgatgccatccggcgggcccgcgccggcctcaaagaccccaaccggcccatcggctccttcctcttcctgggccccaccggggtgggcaagaccgagctggccaaaaccctggccgccagcctcttcgacaccgaagagaacatggtgcgcatcgacatgtcggagtaccaggagaagcacaccgtggcccgcctgattggggcccctcccggctacgtgggctacgaggagggcggccagctcaccgaggcggtgcgccgccggccctactcggtgatcctcttcgacgagatcgagaaggcccaccccgacgtgttcaacgtcctgctccaggtgctcgacgacggccgcctgaccgacggccagggccgcacggtggacttccgcaacaccgtgattatcctcacctccaacatcggctcgcccctcatcttcgagggcatccagtcgggccagagctacgagaccatccgcgagcgggtttttggggtgctgcaacagcacttccgccccgagttcctcaaccgcctcgacgagattgtggtcttccgcccgctggccagggagcagatcgcggccatcgtgcagatccagctcgaggcggtgcgcaagcgcctggccgaacgccggattaccctcgagctctcacaagaggccctcgacttcctggcccagcgcggctacgacccggtctttggggcccggcccttgaagcgggtgatccagcgggaactcgagacccccctctcgcgtaagattctggcgggcgaggtggccgatggcgcccatctgtacgtgggcagcggccccctgggcctcaccttcgaggcgcgcccgaccgcggtggcctaa

SEQ ID NO: 7370 - protein, 854 aa, Meiothermus ruber
MNLERYTEQARQAIAQSQVLARESAHSKIDLPHLAAVMLRDAAGLPAKIVQKAGQNPQNIYQAAQSELGRLPKVSGTEGGQYLSSRLASALGRAEKLADELKDRFVALDTLLLALAETGYGGLQASAVRQALQEIRGGRTVNSEHAEGTYNALEQYGLDLTRQAEEGKLDPVIGRDEEIRRVIQILLRRTKNNPVLIGEPGVGKTAVVEGLAQRIVKGDVPEGLKGKRIVSLQMGSLLAGAKYRGEFEERLKAVIQETVQSAGQIILFIDEIHTVVGAGKAEGAVDAGNMLKPALARGELHLIGATTLDEYREIEKDPALERRFQPVFVDEPSLEETVSILRGIKEKYEVHHGVRISDPALIAAAQLSHRYIADRKLPDKAIDLVDEAAARLRMALESSPESIDALNRRKLQLEIEREALKKETDAESKFRLGELEKEIADLEEEIRKQQAEWEAEREIMQKLRAAQQRLDEVRTQIEQAERAYDLNKAAPLRYGELPKLEQEVNELADRMAGAQFVRPMVTEEDIAAIVSRWTGIPVAKLMEGEREKLLRLEDELHKRVVGQDEAIVAVADAIRRARAGLKDPNRPIGSFLFLGPTGVGKTELAKTLAASLFDTEENMVRIDMSEYQEKHTVARLIGAPPGYVGYEEGGQLTEAVRRRPYSVILFDEIEKAHPDVFNVLLQVLDDGRLTDGQGRTVDFRNTVIILTSNIGSPLIFEGIQSGQSYETIRERVFGVLQQHFRPEFLNRLDEIVVFRPLAREQIAAIVQIQLEAVRKRLAERRITLELSQEALDFLAQRGYDPVFGARPLKRVIQRELETPLSRKILAGEVADGAHLYVGSGPLGLTFEARPTAVA

SEQ ID NO: 7371 - DNA, 2547 bp, Mycobacterium leprae
  CDS (1)..(2547): transl_table=11
gtggactctttcaacccgaccaccaaaatgcaggtggctctaacttcagcgctgcaggcagcgtcgtccgcaggtaatcccgagatcagacctgtgcatttgctattggcgatgctcatgcaaaacgacggaatcgccgcaccgttgttggagactgtcggtgtggagcccgacatcgttcgcaatgaggcacagcggctcctggagcgattaccccaggccagcggctgcagctcgcagccgcagttgtcgcgagagtcgttggctgccatcaccaccgctcagcagctcgctaccgagatggacgacgagtacgtgtcgaccgagcacctgatgctagggttagccatgggcgactccgatgtcgcgaagctgcttaccgggcacggtgcctcgccgcaggtgttacgggaggcgttcgtcaagatacgtggcagtgcccgagtcactagctccgatcccgagttcacctatcaagcgttggagaagtactccacagatctgaccgcccagtccggcgaaggcaaacttgacccagttatcgggcgcgacaacgagatccgtcgtgttgtgcaggtgctgtcccgtcgcaccaagaacaacccggtgcttatcggcgagcctggtgtcggcaagaccgcgatcgtggagggcttggctcagcgcatcgttgccggcgatgtgccggagagcctgcgtgacaagaccttggtagcgctggatctcgggtcaatggtggctggcgccaagtatcgcggcgagttcgaacaacgactcaaggtcgtgctcgacgacatcaaattctctgctggacagatcatcacgtttatcgatgagttgcacactatcgtcggagccggtgcgactggtgagtcggcgatggatgctggcaacatgatcaagccgatgctggcccgtggcgaattgcgcctggtcggcgccaccacgcttgacgagtaccgcaggtacatcgagaaggatgcagcgctggagcggcgcttccagcagatcttcgtcggcgagccgtcggtggaggacactgttggcatcctgcgtgggctgaaggaccgttacgaggtgcaccacggtgtgcgcatcaccgactctgctctggtagctgcggcagccctctccgaccgttatatcaccgcccggttcctgccggacaaggccatcgacctggtcgacgaagcggctagccggttacgcatggagatcgactcgcggcctgtcgagatcgacgaggttgagcggctggtgcgtcgcttcgagatcgaagagatggctcttgtgaacgaagaagacgaagcatccaaggagcgtttggagacgttgcgtgcggaactggctgaccagaaggagcggctcgccgagctaaccgcgaggtggcagaatgaaaagaacgcgatagatgtcgtccgagaacttaaggaacagttggagacgttgcgcggggaatccgagcgtgctgagcgtgacggtgacctggccaaggccgctgagctgcggtatgggcgcatccccgaggttgaaaagaagctggaagcggcggtgccgacggcccaggcccgcgaggacgtgatgctcaaggaagaggtcggtcctgacgatatcgccaacgtggtgtcagcgtggaccggcataccggctggccggttgttggagggcgagaccgccaagctgctgcgtatggaggacgaactgggcaagcgtgtggtcgggcagaagaaggcagtgcacgcggtctctgacgcggtgcgacgctcgcgggccggggttgccgaccctaaccggccgaccggctcgtttttgtttcttggcccgaccggtgtcggcaagaccgagctggccaaagcactggctgatttcctgtttgacgaccagcgcgcgatggtccgtgtggacatgagcgagtacggtgagaagcattcggtggcccgtctggtgggtgcaccgcccggctacattggccacgatcagggtggtcagctgaccgaggcggtgcgccgacggccttacacggtggtgcttttcgacgaggtcgaaaaggcccactcggatgtcttcgatgtgctactgcaggtgctcgacgaaggccgtttgactgacgggcagggccgcacggtcgactttcgcaacacgatccccatcttgacctccaacctggggtcgggcggcagcgaggagcaggtaatggcagcggtgcgctcggtgttcaagccggagttcatcaaccgcctcgacgacgtactgatcttcgacgggctcaaccccgaagagttggtgcggattgtcgacattcagcttgagcagcttggcaagcggctcgcgcagcggcggcttcaactggaggtttcgttgccggctaagcgctggttggcacagcacggcttcgatcctgtatacggcgcccggccattgcgtcgactggtacagcaagcgatcggcgatcaattggctaaaatgctgctggccggcgaggtgcatgacggggacacccttccggtcaacgtcagacccgacggggaggcgttgatcctgggctga

SEQ ID NO: 7372 - protein, 848 aa, Mycobacterium leprae
MDSFNPTTKMQVALTSALQAASSAGNPEIRPVHLLLAMLMQNDGIAAPLLETVGVEPDIVRNEAQRLLERLPQASGCSSQPQLSRESLAAITTAQQLATEMDDEYVSTEHLMLGLAMGDSDVAKLLTGHGASPQVLREAFVKIRGSARVTSSDPEFTYQALEKYSTDLTAQSGEGKLDPVIGRDNEIRRVVQVLSRRTKNNPVLIGEPGVGKTAIVEGLAQRIVAGDVPESLRDKTLVALDLGSMVAGAKYRGEFEQRLKVVLDDIKFSAGQIITFIDELHTIVGAGATGESAMDAGNMIKPMLARGELRLVGATTLDEYRRYIEKDAALERRFQQIFVGEPSVEDTVGILRGLKDRYEVHHGVRITDSALVAAAALSDRYITARFLPDKAIDLVDEAASRLRMEIDSRPVEIDEVERLVRRFEIEEMALVNEEDEASKERLETLRAELADQKERLAELTARWQNEKNAIDVVRELKEQLETLRGESERAERDGDLAKAAELRYGRIPEVEKKLEAAVPTAQAREDVMLKEEVGPDDIANVVSAWTGIPAGRLLEGETAKLLRMEDELGKRVVGQKKAVHAVSDAVRRSRAGVADPNRPTGSFLFLGPTGVGKTELAKALADFLFDDQRAMVRVDMSEYGEKHSVARLVGAPPGYIGHDQGGQLTEAVRRRPYTVVLFDEVEKAHSDVFDVLLQVLDEGRLTDGQGRTVDFRNTIPILTSNLGSGGSEEQVMAAVRSVFKPEFINRLDDVLIFDGLNPEELVRIVDIQLEQLGKRLAQRRLQLEVSLPAKRWLAQHGFDPVYGARPLRRLVQQAIGDQLAKMLLAGEVHDGDTLPVNVRPDGEALILG

SEQ ID NO: 7373 - DNA, 2547 bp, Mycobacterium paratuberculosis
  CDS (1)..(2547): transl_table=11
gtggactctttcaacccgaccaccaagacgcaagcggcgttgaccgcggcgctgcaggcggcctcggccgccggcaaccccgagatccggcccgcccacctgctgatggccctgctgacgcaggcggacgggatcgccgcgccgttattggaggccgtgggtgtcgagcccgccaccattcgcgccgaggccgagcgcatgctggcccggctgccgcaggccagcggcgccagctcgcaaccgcagctgtcccgcgagtcgctggccgccattaccaccgcccagcacctggccaccgagctggacgacgaatacgtctccaccgagcacctgatggtgggcctggccaccggcgactccgacgtcgccaagctgctcaccgggcacggcgcgtccccgcaggccctgcgggaggccttcgtcaaggtgcgcggcagcgcccgggtcaccagccccgaccccgaggccacttaccaggcgctggagaagtactccaccgacctcaccgcgcgggcccgcgagggcaagctcgacccggtcatcggccgtgacaacgagatccgccgcgtcgtgcaggtgctctcccgtcgcaccaagaacaacccggtgctcatcggtgagcccggcgtcggcaagaccgcgatcgtcgagggcctggcccagcgcatcgtggccggcgacgtgccggaaagcctgcgcgacaagaccgtcatcgcgctggacctcggctcgatggtggccggcgccaaataccgcggcgagttcgaggaacggctcaaggccgtcctcgacgacatcaagaactccgccgggcagatcatcacgttcatcgacgagctgcacaccatcgtcggcgccggcgcgaccggcgagggcgcgatggacgccggcaacatgatcaagccgatgctggcccgcggggagctgcgcctggtcggcgccaccacgctcgacgagtaccgcaaatacatcgagaaggacgccgcgctggagcgccgcttccagcaggtgttcgtcggcgagccgtcggtggaggacaccgtcggcatcctgcgcgggctcaaggaccgctacgaggtgcaccacggggtgcgcatcaccgactcggcgctggtcgccgccgccacgctgtccgaccgctacatcaccgcccgcttcctgcccgacaaggccatcgacctggtcgacgaggccgccagccggctgaagatggagatcgactcgcggcccgtcgagatcgacgaggtcgagcggctggtgcgccgcctcgagatcgaggagatggccctggccaaggaggaggacgaggcgtccaaggagcggctggaaaagctgcgctccgagctggccgaccagaaggaaaagctggccgaactgaccacccgctggcagaacgagaagaacgccatcgacgtcgtccgcgagctcaaggagcagctggaaacgctgcgcggcgagtccgaccgcgccgagcgcgacggcgacctggccaaggccgccgagctgcgctacggccggatcccggaggtggagaagaagctcgaggccgcgctgccccaggccgaggcccgcgagaacgtgatgctcaaggaggaggtcgggcccgacgacatcgccgaggtggtgtcggcgtggaccgggatcccggccgggcggatgctcgagggcgagaccgcgaagctgctgcgcatggaggacgagctgggcaagcgcgtcgtcgggcagaagcgggccgtgcaggcggtgtccgacgcggtgcggcgcgcccgggccggcgtggccgacccgaaccggccgaccgggtcgttcatgttcctgggacccaccggtgtcggtaagaccgagctggccaaggcgctggccgacttcctgttcgacgacaagcgggcgatggtccgtatcgacatgagcgaatacggcgagaagcactcggtggcccgcctggtcggcgcgccgccgggctacatcggctacgaccagggcggtcagctgaccgaggcggtgcgccggcgtccctacacggtgatcctgttcgacgagatcgagaaggcgcacccggacgtgttcgacgtgctgctgcaggtgctcgacgagggccggctcaccgacgggcagggccgcaccgtcgacttccgcaacaccatcctgatcctgacctccaacctggggtcgggtggcagcgaggagcaggtgatggccgcggtgcgctcggcgttcaagcccgagttcatcaaccggctcgacgacgtcatcatcttccacggcctcgagcccggcgagctggtgcagatcgtcgacatccagctggcccagctgcagaagcggctggcgcagcgccggctcacgctggaggtgtcgctgccggccaagcagtggctggcccaccgcggcttcgacccggtctacggcgcccggccgctgcgccggctggtgcagcaggccatcggcgaccagctggccaagcagttgctggccggtcaggtgcacgacggcgacaccgtcccggtcaacgtcagcccggacggcgactcgctgatcctgggctag

SEQ ID NO: 7374 - protein, 848 aa, Mycobacterium paratuberculosis
MDSFNPTTKTQAALTAALQAASAAGNPEIRPAHLLMALLTQADGIAAPLLEAVGVEPATIRAEAERMLARLPQASGASSQPQLSRESLAAITTAQHLATELDDEYVSTEHLMVGLATGDSDVAKLLTGHGASPQALREAFVKVRGSARVTSPDPEATYQALEKYSTDLTARAREGKLDPVIGRDNEIRRVVQVLSRRTKNNPVLIGEPGVGKTAIVEGLAQRIVAGDVPESLRDKTVIALDLGSMVAGAKYRGEFEERLKAVLDDIKNSAGQIITFIDELHTIVGAGATGEGAMDAGNMIKPMLARGELRLVGATTLDEYRKYIEKDAALERRFQQVFVGEPSVEDTVGILRGLKDRYEVHHGVRITDSALVAAATLSDRYITARFLPDKAIDLVDEAASRLKMEIDSRPVEIDEVERLVRRLEIEEMALAKEEDEASKERLEKLRSELADQKEKLAELTTRWQNEKNAIDVVRELKEQLETLRGESDRAERDGDLAKAAELRYGRIPEVEKKLEAALPQAEARENVMLKEEVGPDDIAEVVSAWTGIPAGRMLEGETAKLLRMEDELGKRVVGQKRAVQAVSDAVRRARAGVADPNRPTGSFMFLGPTGVGKTELAKALADFLFDDKRAMVRIDMSEYGEKHSVARLVGAPPGYIGYDQGGQLTEAVRRRPYTVILFDEIEKAHPDVFDVLLQVLDEGRLTDGQGRTVDFRNTILILTSNLGSGGSEEQVMAAVRSAFKPEFINRLDDVIIFHGLEPGELVQIVDIQLAQLQKRLAQRRLTLEVSLPAKQWLAHRGFDPVYGARPLRRLVQQAIGDQLAKQLLAGQVHDGDTVPVNVSPDGDSLILG

SEQ ID NO: 7375 - DNA, 2580 bp, Neisseria meningitidis serogroup A
  CDS (1)..(2580): transl_table=11
atgcgatacgacaaattaaccgccaaattccaacaggcccttgcagaagctcagagtttggcgttggctgcggacagcagctatctggaagcgggctttgtgctgaaagccctgcttgacgaccaaaacagcggtgctgccgcgctcttggctcatgcgggcgtgaacgtgccgcaggtgaaacagcgtttgcagcagcatttgaacagcctgccgaaagtgtccggccagggcggcgacattctgcccagccgcgaattgcaggcggtgttgaacctgatggacaaagccgcaaccaaacgcggcgatgcctatatcgccagtgaacttttcctgcttgccttggtgcagcagaacgatgcggccggcaaaattttgaaagaagccggcgcgaccgaacaaaacatcaatgccgcgattgacgcggtacgaggaggacaaaacgtgaacgatgccaatgccgaagaccaacgcgatgctttgaaaaaatatacgctcgatctgacccaacgcgcccgagacggtaagctcgaccccgttatcggccgtgacgacgaaatccgccgtgcgattcaggtattgcaacgccgtaccaaaaacaaccctgtgctgattggcgaaccgggcgtgggtaaaaccgccatcgtcgaaggtttggcacaacgcatcgtcaacggcgaagtacccgaatccctgcgcaacaaacgcctactggttttggacttggcggcattgattgccggcgcgaaatatcgcggcgaatttgaagaacgcttgaaaggcgtgttgaacgacttggcgaaagacgacggcaacactctgattttcatcgacgaaatccatactttggtcggcgcaggcaaaaccgacggtgcgatggatgcgggcaatatgctgaaaccggctttggcacgtggcgaattgcactgtatcggcgcgaccaccttggacgaataccgccaatacatcgaaaaagacgcggcactcgaacgccgcttccaaaaagtattggttggcgagccaagtgtagaagacaccatcgctatcttgcgcggtttacaggagcgttatgaaatccaccacggtatcgacattaccgaccccgccatcgttgctgccgcagaattgagcgaccgctacatcaccgaccgcttcctgcccgacaaagcgattgatttgattgacgaagccgccagccgtgtcaagatggaaaaagaaaccaagccggaagcaatggacaaaatcgaccgccgtctaattcagcttcggatggaaaaggcgcacgttgaaaaagaaaaagacgatgccagcaaaaaacgtttggaactgatagacgaggaaatcaacggtctgcaaaaagaatacgccgatttagacgaaatctggaaagccgaaaaagcaatttcagacggtgctgctaatattaagaaacaaattgacgaagtcaaaattaaaatcgaacaggcaaaacggcaaggcgatttggcactggcttcaaaattgatgtatgaagatttggagcatttggaaaaacagcgtgcagccgccgaacgggcagatacggacagcacaaaaccggcaaacaaactcttgcgtaataatgtcggcgcagaggaaatcgcagaggtggtttcccgtatgaccggcattcccgtatccaaaatgatggaaggcgaacgcgacaaactgctgaaaatggaagaagtattgcaccgccgcgtggtcggacaggacgaagccgtgcgtgccgtgtccgacgctatccgccgcagccgctccggtcttgccgatccgaacaagccttacggcagcttcctgttcttgggcccgaccggcgtgggtaaaaccgagttgtgtaaagccctggcaggctttctgttcgacagcgaagatcatctgattcgcatcgatatgtccgaatatatggaaaaacacgccgttgcccgcttaatcggcgcgcctccgggttatgtcggctacgaagaaggcggctacctgaccgaacaagtgcgccgcaaaccgtacagcgtgattctgctggacgaagtggaaaaagcccatcccgatgtgttcaacatcctgctgcaagtattggatgacggtcgtttgaccgacgggcaaggcaggacggtagattttaaaaataccgtgattgtgatgacttccaacatcggcagccagcacatccaacaaatgggcattcaggattacgaagcggtaaaagaagttgtgatggaggatgtgaaagaacatttccgtcctgaaatgatcaaccgcatcgacgaagtggtcgtgttccacggtttggatcaggcaaacatccgcagcattgcgaaaatccagctcaaaggtttggaaaaacgtttggaaaaacaaaacctgcgcctggctgtttccgatgccgcactggacatcatcgccaaagccggtttcgacccgatttacggcgcacgtccgctcaaacgcgccatccagtcggaaatcgaaaacccgctggcaaaagccctgcttgccggaaactatgcgcccgaaagcgaaatcagggtggaagccgacggcgacagactgaaatttgcctga

SEQ ID NO: 7376 - protein, 859 aa, Neisseria meningitidis serogroup A
MRYDKLTAKFQQALAEAQSLALAADSSYLEAGFVLKALLDDQNSGAAALLAHAGVNVPQVKQRLQQHLNSLPKVSGQGGDILPSRELQAVLNLMDKAATKRGDAYIASELFLLALVQQNDAAGKILKEAGATEQNINAAIDAVRGGQNVNDANAEDQRDALKKYTLDLTQRARDGKLDPVIGRDDEIRRAIQVLQRRTKNNPVLIGEPGVGKTAIVEGLAQRIVNGEVPESLRNKRLLVLDLAALIAGAKYRGEFEERLKGVLNDLAKDDGNTLIFIDEIHTLVGAGKTDGAMDAGNMLKPALARGELHCIGATTLDEYRQYIEKDAALERRFQKVLVGEPSVEDTIAILRGLQERYEIHHGIDITDPAIVAAAELSDRYITDRFLPDKAIDLIDEAASRVKMEKETKPEAMDKIDRRLIQLRMEKAHVEKEKDDASKKRLELIDEEINGLQKEYADLDEIWKAEKAISDGAANIKKQIDEVKIKIEQAKRQGDLALASKLMYEDLEHLEKQRAAAERADTDSTKPANKLLRNNVGAEEIAEVVSRMTGIPVSKMMEGERDKLLKMEEVLHRRVVGQDEAVRAVSDAIRRSRSGLADPNKPYGSFLFLGPTGVGKTELCKALAGFLFDSEDHLIRIDMSEYMEKHAVARLIGAPPGYVGYEEGGYLTEQVRRKPYSVILLDEVEKAHPDVFNILLQVLDDGRLTDGQGRTVDFKNTVIVMTSNIGSQHIQQMGIQDYEAVKEVVMEDVKEHFRPEMINRIDEVVVFHGLDQANIRSIAKIQLKGLEKRLEKQNLRLAVSDAALDIIAKAGFDPIYGARPLKRAIQSEIENPLAKALLAGNYAPESEIRVEADGDRLKFA

SEQ ID NO: 7377 - DNA, 2580 bp, Neisseria meningitidis serogroup B
  CDS (1)..(2580): transl_table=11
atgcgatacgacaaattaaccgccaaattccaacaagcccttgcagaagctcagagtttggcgttggctgcggacggcagctatctggaagcgggctttgtgttaaaagccctgcttgacgaccaaaacagcggagccgccgcgctcttggctcatgcgggcgtgaacgtgccgcaggtgaaacagcgtttgcagcagcatttaaacagcctgccgaaagtgtccggtcagggcggcgatattctgcccagccgagaattgcaggcggtgttgaacctgatggacaaagctgccaccaaacgcagcgatgcctatattgccagcgaacttttcctgcttgccttggtacagcagaacgatgcgaccggcaaaattttgaaagaagccggcgcgaccgaacaaaacatcaatgccgcgattgacgcagtacgaggaggacaaaacgtgaacgatgccaatgccgaagaccaacgcgatgctttgaaaaaatatacgcttgacctgacccagcgcgcccgcgacggcaaacttgaccccgttatcggtcgtgacgacgaaatccgccgcgcgattcaggtattgcaacgccgtaccaaaaacaaccctgtgctgattggtgagccgggtgtgggtaaaaccgccattgttgaaggcttggcgcaacgtatcgtcaacggcgaagtacctgaatccctgcgtaacaaacgcttgctggttttggatttggcggctttgattgccggcgcgaaataccgcggcgaatttgaagaacgcttgaaaggcgtgttgaacgatttggcgaaagacgacggcaacactctgattttcattgatgaaatccatactttggtcggcgcgggcaaaaccgacggcgcgatggacgcgggcaatatgctgaaaccggctttggcacgtggcgaattgcactgtatcggcgcgaccactttggacgaataccgccaatacatcgaaaaagatgcggcactcgaacgccgcttccaaaaagtattggttggcgagccaagcgtggaagacaccatcgctattttgcgcggtttacaggagcgttatgaaatccaccatggtatcgatattaccgaccctgctatcgttgccgcagcggagttgagcgaccgctacattaccgaccgcttcctgcccgataaagcgattgatttgattgacgaagccgccagccgtgtcaagatggaaaaagaaaccaagccggaagcaatggacaaaatcgaccgccgtctaattcagcttcggatggaaaaggcgcacgttgaaaaagaaaaagacgatgccagcaaaaaacgtttggaactgatagacgaggaaatcaacggtctgcaaaaagaatacgccgatttagacgaaatctggaaagccgaaaaagcaatttcagacggtgctgctaatattaagaaacaaattgacgaagtcaaaattaaaatcgaacaggcaaaacggcaaggcgatttggcactggcttcaaaattgatgtatgaagatttggagcatttggaaaaacagcgtgcagccgccgaacgggcagatacggacagcacaaaaccggcaaacaaactcttgcgtaataatgtcggcgcagaggaaatcgcagaggtggtttcccgtatgaccggcattcccgtatccaaaatgatggaaggcgaacgcgacaaactgctgaaaatggaagaagtattgcaccgccgcgtggtcggacaggacgaagccgtgcgtgccgtgtccgacgctatccgccgcagccgctccggtcttgccgatccgaacaagccttacggcagcttcctgttcttgggcccgaccggcgtgggtaaaaccgagttgtgtaaagccctggcaggctttctgttcgacagcgaagatcatctgattcgcatcgatatgtccgaatatatggaaaaacacgccgttgcccgcttaatcggcgcgcctccgggctatgtcggctacgaagaaggcggctacctgaccgaacaagtgcgccgcaaaccgtacagcgtgattctgctggacgaagtggaaaaagcccatcccgatgtgttcaacatcctgctgcaagtattggatgacggccgcttgaccgacggacaaggtcgcaccgtggacttcaaaaataccgttatcgtgatgacttccaatattggtagccaacatatccaacaaatgggcattcaggattacgaagcggtgaaagaagttgtgatggaggatgtgaaagaacatttccgccccgaaatgatcaaccgcatcgacgaagtggtcgtgttccacggactggatcaggataatatccgcaacattgcgaaaatccagctcaaaggcttggaaaaacgtttggaaaaacaaaacctgcgcctggctgtttccgatgccgcactggacatcatcgccaaagccggtttcgacccgatttacggcgcacgtccgctcaaacgcgccatccagtcggaaatcgaaaacccgctggcaaaagccctgcttgccggaaactatgcgcccgaaagcgaaatcagggtggaagccgacggcgacagactgaaatttgcctga

SEQ ID NO: 7378 - protein, 859 aa, Neisseria meningitidis serogroup B
MRYDKLTAKFQQALAEAQSLALAADGSYLEAGFVLKALLDDQNSGAAALLAHAGVNVPQVKQRLQQHLNSLPKVSGQGGDILPSRELQAVLNLMDKAATKRSDAYIASELFLLALVQQNDATGKILKEAGATEQNINAAIDAVRGGQNVNDANAEDQRDALKKYTLDLTQRARDGKLDPVIGRDDEIRRAIQVLQRRTKNNPVLIGEPGVGKTAIVEGLAQRIVNGEVPESLRNKRLLVLDLAALIAGAKYRGEFEERLKGVLNDLAKDDGNTLIFIDEIHTLVGAGKTDGAMDAGNMLKPALARGELHCIGATTLDEYRQYIEKDAALERRFQKVLVGEPSVEDTIAILRGLQERYEIHHGIDITDPAIVAAAELSDRYITDRFLPDKAIDLIDEAASRVKMEKETKPEAMDKIDRRLIQLRMEKAHVEKEKDDASKKRLELIDEEINGLQKEYADLDEIWKAEKAISDGAANIKKQIDEVKIKIEQAKRQGDLALASKLMYEDLEHLEKQRAAAERADTDSTKPANKLLRNNVGAEEIAEVVSRMTGIPVSKMMEGERDKLLKMEEVLHRRVVGQDEAVRAVSDAIRRSRSGLADPNKPYGSFLFLGPTGVGKTELCKALAGFLFDSEDHLIRIDMSEYMEKHAVARLIGAPPGYVGYEEGGYLTEQVRRKPYSVILLDEVEKAHPDVFNILLQVLDDGRLTDGQGRTVDFKNTVIVMTSNIGSQHIQQMGIQDYEAVKEVVMEDVKEHFRPEMINRIDEVVVFHGLDQDNIRNIAKIQLKGLEKRLEKQNLRLAVSDAALDIIAKAGFDPIYGARPLKRAIQSEIENPLAKALLAGNYAPESEIRVEADGDRLKFA

SEQ ID NO: 7379 - DNA, 2592 bp, Nitrosomonas europaea
  CDS (1)..(2592): transl_table=11
atgcggtttgacaaattcaccaccaagtttcaacaggcactcgccgatgcgcaaagcatggcgctgggtcaggatcatccctatatcgaaccgcagcatctgctgctcgccctgatgcagcaggatgacggcagcatcacttctctgctgcagcgcgccggtgtgaatgcccaaccattgcgccaagcactgacgcaaagcctcaaacttctgcctaaagtggaaggtacgggcggagaaatcaatgtttcccgcgatctggccaatctgctcaatctgacggacaaggaagcgcagaaaagaggagatcagtacatcgcctcggaaatgttcctgctggcagcgctggaagacaaaggagaaaccggacgattgctgaaacaatatggagcgacacgtgctgcgctggaacaggcggtcgattccgtgcgtggcggagaaaaggtgaccgatgccgaagcagaaggcagtcgtgaagcattgaagaaatacacattggatctgactgagcgtgctcggtcaggcaagctcgatcccgtgatcggacgcgatgatgaaatccggcgcacgattcaggtgctgcagcggcgcaccaaaaataacccggtcctgattggcgagcccggggtcgggaaaacggcaatcgtggaaggattggcacagcgcatcgtcaacggggaagtacctgaaacactgaaaaacaagcgggtgctgtcactggatatggcagcgctgctggcaggtgccaaataccgcggagaattcgaggaacgattgaaagccgtgctgaaagaattggcgcaggatgaaggccgcaccatcgtgttcatcgatgaactgcatacgatggtgggagccggcaaggcggaaggtgccatggatgcgggcaacatgctcaaaccggcgctggcacgcggagaactgcactgcgtaggcgcaaccacactggatgaatatcgcaaatatgttgaaaaggacgccgcactggaacgccgtttccagaaagtgctggtggatgagcccggcgttgaagcaacgattgccattctgcgcggtctgcaggagaaatatgaattgcaccacggcgtggaaatcaccgatccggctatcgtggcagcagccgaactctcccatcgctatatcactgaccgctttctgccggacaaagccatcgatctgattgacgaagctgcagcacgcattcgcatggagcaggattccaaaccggaagtcatggataagctcgaccggcgtctgatccagctgaaaatcgaacgtgaggctgtcaggaaagaaaaggatgatgcttctaaaaaacgcctggcattgcttgaagaagaaatcagcaaactggaacgggaatatgctgatctggatgaaatactgaaagcagagaagtcccgtgcaaaaggctcacaggaaatcaaggaagaactggataaactacgccgtgaagaggaagctgcccgacgcaagggagatctgcagagagcttctgaattactgtatggccgtattccgcaattggaagcacagcttgccgaacagctccatcacgccgaatcggccgaggaagctgtacaaccaaagttattccgtacccaggtaggtgccgaagaaatcgccgaagtcgtttcgcgtgcaaccggcattccggtttccaagatgatgcagggtgagcgtgagaaattgctgttcatggaagacaagttgcatgaacgtgtcatcggccaggatgaagccgtccgcctggtttccgatgcaatccgccgctcacgctccgggcttgctgatcccaatcgcccgtatgggtctttcctgtttctggggccgaccggggtgggcaagaccgagctgtgcaaagcactggcaggatttctgttcgattccgaggaacacctgatccgggtagatatgtccgaattcatggagaaacattcggtcgcacgcctgatcggtgcgccaccgggatatgtcggctatgaggagggcggttatctgactgaacaggtgcggcgcaaaccctattccgtcattttgctcgatgaagtggaaaaagcgcatccggatgtattcaatgtcctgctgcaggtgctggatgacggacggatgacggatggtcagggccgtaccgtggatttcaagaatacggttatcgtcatgacttccaacctgggttcacaaatgatccagcaaatgagcggagacgattaccaggtcatcaaactggcagtgatgggagaggttaaaacctatttccggcctgaattcatcaatcgtatcgacgaagtagtcgttttccatgcactgggtgaagcgcatatcaaatcgattgcccggattcagctgagcaacctgggcaaaagactggcacaaatggaaatgaaactggtagtttcagaaccggcactgaccaaactggccgaagtcgggttcgatccggtattcggtgcacggccgctgaaacgagccattcaggctcagatcgaaaatccgttggcgaaagagctgctggaaggccatttttctgccggagatactattctggtggaatacagtaacggccacatgcaatttaccgcacaacgttaa

SEQ ID NO: 7380 - protein, 863 aa, Nitrosomonas europaea
MRFDKFTTKFQQALADAQSMALGQDHPYIEPQHLLLALMQQDDGSITSLLQRAGVNAQPLRQALTQSLKLLPKVEGTGGEINVSRDLANLLNLTDKEAQKRGDQYIASEMFLLAALEDKGETGRLLKQYGATRAALEQAVDSVRGGEKVTDAEAEGSREALKKYTLDLTERARSGKLDPVIGRDDEIRRTIQVLQRRTKNNPVLIGEPGVGKTAIVEGLAQRIVNGEVPETLKNKRVLSLDMAALLAGAKYRGEFEERLKAVLKELAQDEGRTIVFIDELHTMVGAGKAEGAMDAGNMLKPALARGELHCVGATTLDEYRKYVEKDAALERRFQKVLVDEPGVEATIAILRGLQEKYELHHGVEITDPAIVAAAELSHRYITDRFLPDKAIDLIDEAAARIRMEQDSKPEVMDKLDRRLIQLKIEREAVRKEKDDASKKRLALLEEEISKLEREYADLDEILKAEKSRAKGSQEIKEELDKLRREEEAARRKGDLQRASELLYGRIPQLEAQLAEQLHHAESAEEAVQPKLFRTQVGAEEIAEVVSRATGIPVSKMMQGEREKLLFMEDKLHERVIGQDEAVRLVSDAIRRSRSGLADPNRPYGSFLFLGPTGVGKTELCKALAGFLFDSEEHLIRVDMSEFMEKHSVARLIGAPPGYVGYEEGGYLTEQVRRKPYSVILLDEVEKAHPDVFNVLLQVLDDGRMTDGQGRTVDFKNTVIVMTSNLGSQMIQQMSGDDYQVIKLAVMGEVKTYFRPEFINRIDEVVVFHALGEAHIKSIARIQLSNLGKRLAQMEMKLVVSEPALTKLAEVGFDPVFGARPLKRAIQAQIENPLAKELLEGHFSAGDTILVEYSNGHMQFTAQR

SEQ ID NO: 7381 - DNA, 2607 bp, Protochlamydia amoebophila
  CDS (1)..(2607): transl_table=11
atgaatcaaaatttcacagatcatgttgcggaagctattcaagccgcttttgcagaagcacaacgtttaaatcacacagaagttactgaaaatcacctgctatgggcttttctcaaagataaagaaggatatttttactcgcttttaaatgggctggggacaaatccgcaaaaattatttcaagagactgaaaacaatattcaccatttaccaacttactcgggtggagggcaagccccaaatccttccagaagcctacaaagtcgcattgtcgatgctcaaaatatcgctcaaagctggaaagatacttatacgagcagcgatcattttttaatctcttattggaaaaatggtggagatccttttgcttcttggaaaaagaaaactactatctctttagaaaagctggaagaacaaataaaaaaaattcgaggtgatcgtcatatggactctcctagctccgaatcaaatttacaagctctagaaaaatattgcaaaaatctcacagatctggctcgtcaaggtaagctcgaccctgtgattggaagagatgaagaaattagacgaaccatgcaagttttgtgtagacgaaccaaaaataatcctatgcttattggagatccgggagttggtaaaacagcgattgctgaaggattagctcaacgcatagtccagcaagatattcccgattctttaaaaaataaacagctacttgcgttggatatgggaagtttaattgccggtacaaagtaccgaggagaatttgaagaaaggctgaaaggtattttacaagacattgagaaaagcgaagggcagatcatcctttttattgatgaagtgcatactttaattggagctggcgcgacagatggagcgatggatgccgccaatttattgaaacccgcacttgcgagaggtattttacattgcatcggagcgactacccttaacgaatatcaaaaatacattgaaaaggatgctgctcttgaaagacgctttcaacttgtcttagttaatgaaccaactatagaagactcgattgcaattttgagaggtttaagagaaagatatgaaatttaccatggggtgcatatcacagagtctgcgatccacgctgccgtgttattgtcttctcgctacattacagatcgtcgtctgcccgacaaagcaatcgatttgatcgacgaatcagctagcttaattcgtatgcaactcggaagccgccctcttcccatcgacaataaagaacgagagctggcgggcctaattgtggaacaagaagcgatgaaacgagaaagcactcccctagctaaaaatgaagtagaaaaattagaagggcgcattgctcaaatcaaggaagaactgaaaattttacgtgagcaatgggatcaagagaaaaaaattatcgaatctttaaaagagaaaaaagacaaacttgagaaattgcgttttgaagaagaagctgcagaacgtaaagccgactataaccgtgtagcagagctgcgctacaatttgatccctcaactacaaaaagagattgaagaggcacagactcagcttaataacaaacctaatagacttttgcaggaagaagtagacgagtccctcattgctcaaatcgtttctaaatggacgggtatccccgttcataaaatgttagagggtgaagctgagcgtctcttacatcttgaaaacgaacttgaaaaaagagttgttggtcaagaaatagctgtttcagctgtgagtgaagcaattcgtcgttcaaggtctggactaagtgatcctaatcggccaatgggtgtttttcttttcctgggtccgacaggcgttggcaaaacagagcttgctaaagcgttagcttttcaattgtttaaccaagatgaagcattgattcggctagacatgtctgaatacatggaaaaacacacggtttctaaattgattggctcccctcccgggtatattgggtatgaggaaggagggcaattaacagaggcgctgcgaagaaggccttatgccgttgttctgtttgatgagattgaaaaagctcaccctgatgtatttaatattttacttcaggtgttcgatgatggacgcttaacagatagtaaagggcgtgtagtcaattgtaaaaatgccctcttcatcatgacatcaaatattggatctgacctcttattagaaaagatggagcaaaacaaacaaggccttgctaaagacgaaattatgttggtcttagatcctgtaatcaaaaaacatttccgcccagaatttattaaccgcttagacgatattcttccttttgttcctctacgtgaacatgatatggaaaaaattgtcgtcattcaactgaatttacttgctaagcgtttaaaagatcgagatgtcgaattaatgtggacacctcaagcattggcacacttagccaaagaaggatatgatcctcattttggagcacgtccattaaaaaggtatattcagcaagaagttattaatcagttatcgactgcaatcttggaaggtaaaattcctcctcatagccatatcaaacttgaattggaaggaaacacaattcgatttaaatcgtttgctggaggaaaaaattaa

SEQ ID NO: 7382 - protein, 868 aa, Protochlamydia amoebophila
MNQNFTDHVAEAIQAAFAEAQRLNHTEVTENHLLWAFLKDKEGYFYSLLNGLGTNPQKLFQETENNIHHLPTYSGGGQAPNPSRSLQSRIVDAQNIAQSWKDTYTSSDHFLISYWKNGGDPFASWKKKTTISLEKLEEQIKKIRGDRHMDSPSSESNLQALEKYCKNLTDLARQGKLDPVIGRDEEIRRTMQVLCRRTKNNPMLIGDPGVGKTAIAEGLAQRIVQQDIPDSLKNKQLLALDMGSLIAGTKYRGEFEERLKGILQDIEKSEGQIILFIDEVHTLIGAGATDGAMDAANLLKPALARGILHCIGATTLNEYQKYIEKDAALERRFQLVLVNEPTIEDSIAILRGLRERYEIYHGVHITESAIHAAVLLSSRYITDRRLPDKAIDLIDESASLIRMQLGSRPLPIDNKERELAGLIVEQEAMKRESTPLAKNEVEKLEGRIAQIKEELKILREQWDQEKKIIESLKEKKDKLEKLRFEEEAAERKADYNRVAELRYNLIPQLQKEIEEAQTQLNNKPNRLLQEEVDESLIAQIVSKWTGIPVHKMLEGEAERLLHLENELEKRVVGQEIAVSAVSEAIRRSRSGLSDPNRPMGVFLFLGPTGVGKTELAKALAFQLFNQDEALIRLDMSEYMEKHTVSKLIGSPPGYIGYEEGGQLTEALRRRPYAVVLFDEIEKAHPDVFNILLQVFDDGRLTDSKGRVVNCKNALFIMTSNIGSDLLLEKMEQNKQGLAKDEIMLVLDPVIKKHFRPEFINRLDDILPFVPLREHDMEKIVVIQLNLLAKRLKDRDVELMWTPQALAHLAKEGYDPHFGARPLKRYIQQEVINQLSTAILEGKIPPHSHIKLELEGNTIRFKSFAGGKN

SEQ ID NO: 7383 - DNA, 2568 bp, Pasteurella multocida
  CDS (1)..(2568): transl_table=11
atgaatatcgaaaaatttacgacaaaatttcaacaagcactgcaagaggcgcaatctttagccattggcaaagataaccaatttattgaacccgtccatttactcaccgccttgttaaatcaacaaggtggttccactgcgccaattttaacagcaagtggggcaaacttaccgctcttgcgtaatgaattaaatgccgagctcagtaaattaccacaagtgtcaggcagcggtggtgatgtacaagtttcacggagtttagtgaatctattaaacttgtgcgacaagttagcacagcaacgccaagataaatttatttcctctgaattgtttttactggcagcgttagaagacaaaacacttggtgatgtgttgaaaaagtgcggtgtgaaaaaagaaaatttacaacaggcaatagagaaagtccgtggcggacaaaatgtgaatgatccaaatgcggaagaaagtcgccaagcgttagaaaaatatacgattgatttaaccgcgcgtgcagaaagcggcaaacttgaccccgtgattgggcgtgatgaagaaattcgtcgtgccattcaagtattacaacgccgtaccaaaaacaacccagtgttaatcggtgaaccgggcgtggggaaaactgcgattgtcgaagggctggcgcaacgcattgttaatggtgaagtacccgaaggcttgaaaaataagcgcgttctgtctttagatatgggggcattgattgccggtgcaaaataccgtggtgaatttgaagaacgtttaaaagcggtgttaaatgaactgtcaaaagaagaaggacgcgtgattctctttattgatgaaattcacaccatggtgggggcagggaaaaccgatggcgcgatggatgccggtaacttgctcaaaccaagcttagcccgtggggaattacactgcgtgggggcgacaacactagatgaatatcgtcaatacatagagaaagatgccgcccttgagcgtcgtttccaaaaagtgtttgttggtgagccaacggtggaagataccattgcgatcttacgtgggttaaaagaacgttacgaaatccaccaccatgttcaaattactgaccctgcgattgtggcggcagcgaccctttctcatcgttatgtatctgatcgtcagctacctgataaagcgattgatttaattgatgaagcagcatcgagcattcgtatggaaattgactctaaacctcagccgttagatcgtttagagcgccgtatcattcaattaaaattagagcaacaagcgctacaaaaagaagatgatgatgcgagtcgtaaacgtttagcaatgcttgaaaaagaattaggtgaaaaagaacgtgaatatgcagaattagaagatgtttggaaagctgaaaaagccgccctttcaggtacacagcatattaaagcggagctagacagtgccaaaacacaaatggaacaagctcgccgtgccagtgacttcgcaaaaatgtcggaattacaatacggagtgatccccgcgctagaaaaacaattggcgcaagcagaatccgctgaaggcaaagaaatgactttactgcgctatcgtgtgaccgacgaggaaattgccgaagtgctttcgcgtgcaactggtattcctgtggcgaagatgatggaaggggaaaaagaaaaactcttacgtatggaagaagaattgcacaaacgagtgattggtcaacatgaagccattgaagcagtatcgaatgcaattcgccgtagccgtgccgggttatccgatccaaatcgtccaattggatcgttcttgttcttaggtccaaccggggtcgggaaaacagaactttgtaaaacccttgccaatttcctgtttgatgacgaaaacgcgatggtgcgtattgatatgtcagaatttatggaaaaacacagtgtttcacgcttagtgggcgcccctccgggttatgtgggttacgaagaaggaggctatttaaccgaagccgttcgtcgtcgcccttattccgtgatcttgcttgatgaagtggaaaaagcacaccatgatgtgtttaacattttattacaagtgttagatgatggacgcttaactgatggacaagggcgcactgtggatttccgcaatactgtagtaatcatgacatctaacttaggctcacacttgatccaagaaaacagtacattggattacccaagtatgaaagagttagtgatgtctgtggtgggacaacatttccgcccagaatttatcaaccgtattgatgaaaccgtcgtcttccacccattaggtaaagaaaacattcgtgagattgcgacaatccaacttgctcgcttaatcaaacgtatggaaagccatggttatcaattacacttcaccgatgcttgcttagacttcattggcgaagtaggttacgatccggtgtatggcgcacgtccgttaaaacgtgcaattcaacaagaaattgagaacccgttggcacaacaaattctgtcaggcaaattattaccgaatcaattagtcaccattgactatgttgacggaaaagtgattgccaatcagtaa

SEQ ID NO: 7384 - protein, 855 aa, Pasteurella multocida
MNIEKFTTKFQQALQEAQSLAIGKDNQFIEPVHLLTALLNQQGGSTAPILTASGANLPLLRNELNAELSKLPQVSGSGGDVQVSRSLVNLLNLCDKLAQQRQDKFISSELFLLAALEDKTLGDVLKKCGVKKENLQQAIEKVRGGQNVNDPNAEESRQALEKYTIDLTARAESGKLDPVIGRDEEIRRAIQVLQRRTKNNPVLIGEPGVGKTAIVEGLAQRIVNGEVPEGLKNKRVLSLDMGALIAGAKYRGEFEERLKAVLNELSKEEGRVILFIDEIHTMVGAGKTDGAMDAGNLLKPSLARGELHCVGATTLDEYRQYIEKDAALERRFQKVFVGEPTVEDTIAILRGLKERYEIHHHVQITDPAIVAAATLSHRYVSDRQLPDKAIDLIDEAASSIRMEIDSKPQPLDRLERRIIQLKLEQQALQKEDDDASRKRLAMLEKELGEKEREYAELEDVWKAEKAALSGTQHIKAELDSAKTQMEQARRASDFAKMSELQYGVIPALEKQLAQAESAEGKEMTLLRYRVTDEEIAEVLSRATGIPVAKMMEGEKEKLLRMEEELHKRVIGQHEAIEAVSNAIRRSRAGLSDPNRPIGSFLFLGPTGVGKTELCKTLANFLFDDENAMVRIDMSEFMEKHSVSRLVGAPPGYVGYEEGGYLTEAVRRRPYSVILLDEVEKAHHDVFNILLQVLDDGRLTDGQGRTVDFRNTVVIMTSNLGSHLIQENSTLDYPSMKELVMSVVGQHFRPEFINRIDETVVFHPLGKENIREIATIQLARLIKRMESHGYQLHFTDACLDFIGEVGYDPVYGARPLKRAIQQEIENPLAQQILSGKLLPNQLVTIDYVDGKVIANQ

SEQ ID NO: 7385 - DNA, 2574 bp, Photorhabdus luminescens subsp
  CDS (1)..(2574): transl_table=11
atgcgtctggatcgtcttactaataaattccagcttgctctcgctgacgcccagtcctttgcacttgggcatgataatcagttcatcgaaccaattcacttaatgagttcactgttaaaacaagagggtggctctattcgcccattattaacgtcaattggaatcgatgcgggccgtttcagcaatcagcttgagctggctttagaacgcttgccgcgggtacagggtattggtggtgatgtacaaccatccaatgacttagttcgtcatttaaatctgtgtgacaaactggcacaaaaagccggggataattttatctcctctgaattatttgttctggcagcattggaagaacgtggcacattaagtgacatattgaaagctgttggcgcaacaaaagaaaaaatcactaaggcaatagaacaaatgcgtggtggtgaaaaagttgatgatcagggagcggaagatcaacgccaagccctgaaaaaatacactattgatctcactgaacgtgctgaacaaggcaaacttgatccggtgattggccgtgatgaagaaattcgccgcaccattcaggtattacaacgccgtaccaaaaataacccggttttaattggtgaacccggggttggtaaaactgccattgtggaagggcttgctcaacgaatcattaatggtgaagttcctgaggggttgaaaaataagcgagtcctttccttggatatgggcgcgctgttagcaggggctaaatatcgtggtgaattcgaagagcgtttgaaaggtgtgttgaatgaccttgctaaacaggaaggcaatgtcattctgtttattgacgaattgcatactatggttggtgccggtaaggctgatggggcaatggatgctggtaacatgttaaaacccgccttggcccgtggtgaacttcactgtgttggtgcaacaacactggatgaatatcgtcaatatattgaaaaagatgcagcgctggaacgccgtttccaaaaagtctatgttgcagaaccttccgtagaggacactatcgctattttgcgcggtctgaaagagcgttatgagttacatcatcatgtacaaattaccgaccctgcaattgtcgcggcagcaacattatctcatcgttatatctcggaccgtatgttgccggataaagctatcgacttgatcgatgaagcgggtgccagtttacgtatgcaaatggattcaaaaccggaagcgctggaccgtttggaacgccgggttatccaattgaagttggaacagcaggcgctgaaaaaagagtctgatgatgccagtaaaaaacggcttgaaatgcttaatgaagagctgctcgtaaaagaacgcgaatactctgaactagaagaagagtggaaagctgaaaaagcagcacttacgggtactcagcacataaaagcggaattggaaaatgcccgtatcagtttagaacaggcacgccgcagtggtgatttagcgaagatgtctgaaattcagtatggaaaaatacctggattggaaaaacaacttgccgcagccacacaagctgaaagtaagcatatgaaactgcttcgtaacaaagttaccgatgcggaaattgcagacattcttgctcgttggacgggtattcctgttgccagaatgcttgagagtgaaaaagataaactgttgcgcatggagcaagagctgcataaacgtgtcattggtcaggatgaggcagtcaatgcaatatctaatgcgattcgccgtagccgtgctggattggctgatccaaaccggccgattggctcattcctgttccttggtccaaccggtgttggtaaaactgagttgtgtaaggcgttagcgaatttcctgtttgacagcgatgatgcaatggtgcgtatcgatatgtctgaatttatggaaaaacatgccgtatcacggttggtaggagcaccgccgggatatgttggttatgaagaaggtggttatctaacagaagcggttcgtcgtcgaccttattccgttattttgcttgatgaagtggaaaaagcgcactcggatgtattcaatatcttattacaggtgctggatgatggtcgattgactgatgggcaaggtcgtactgtcgatttccgtaacacggttgtcatcatgacttctaatctcgggtcggacatgatccaagagcgttttggtagtctaaattatgatgaaatgaaagatatagtgatgggaattgttagccataatttcagacctgaatttattaaccgtattgatgaagctgttgtattccatccattagggcgtcggcatttgtcagcgattgcagatatccaattgcaacgtttatacaagcgactggaagaacgtggttatcaggttacgattactcagcaagcgttggaaatattggcagaagccgggttcgatcctgtttacggagcacggccattgaagcgagctatccagcaggaaatcgaaaacccactagctcaaaagatactttccggccaactattgccaggaaaaccagttactctggatgtggaaaatagccatatcgtagcaaagcaataa

SEQ ID NO: 7386 - protein, 857 aa, Photorhabdus luminescens subsp
MRLDRLTNKFQLALADAQSFALGHDNQFIEPIHLMSSLLKQEGGSIRPLLTSIGIDAGRFSNQLELALERLPRVQGIGGDVQPSNDLVRHLNLCDKLAQKAGDNFISSELFVLAALEERGTLSDILKAVGATKEKITKAIEQMRGGEKVDDQGAEDQRQALKKYTIDLTERAEQGKLDPVIGRDEEIRRTIQVLQRRTKNNPVLIGEPGVGKTAIVEGLAQRIINGEVPEGLKNKRVLSLDMGALLAGAKYRGEFEERLKGVLNDLAKQEGNVILFIDELHTMVGAGKADGAMDAGNMLKPALARGELHCVGATTLDEYRQYIEKDAALERRFQKVYVAEPSVEDTIAILRGLKERYELHHHVQITDPAIVAAATLSHRYISDRMLPDKAIDLIDEAGASLRMQMDSKPEALDRLERRVIQLKLEQQALKKESDDASKKRLEMLNEELLVKEREYSELEEEWKAEKAALTGTQHIKAELENARISLEQARRSGDLAKMSEIQYGKIPGLEKQLAAATQAESKHMKLLRNKVTDAEIADILARWTGIPVARMLESEKDKLLRMEQELHKRVIGQDEAVNAISNAIRRSRAGLADPNRPIGSFLFLGPTGVGKTELCKALANFLFDSDDAMVRIDMSEFMEKHAVSRLVGAPPGYVGYEEGGYLTEAVRRRPYSVILLDEVEKAHSDVFNILLQVLDDGRLTDGQGRTVDFRNTVVIMTSNLGSDMIQERFGSLNYDEMKDIVMGIVSHNFRPEFINRIDEAVVFHPLGRRHLSAIADIQLQRLYKRLEERGYQVTITQQALEILAEAGFDPVYGARPLKRAIQQEIENPLAQKILSGQLLPGKPVTLDVENSHIVAKQ

SEQ ID NO: 7387 - DNA, 2586 bp, Photobacterium profundum
  CDS (13)..(2586): transl_table=11
ttgggagaactcatgcgtcttgaccgatttacaagcaaatttcaaatggcgatatttgatggacagtcgttggctttagggcgagatcatcagtacatcgaaccagcacacctgatggtggcgttacttaatcaggatggaagtactattcgtccgttgctaacaatgttgaatgtcgatatctctcagttacgttcgcgcttaggggagttactcgatcatttacctaaagtaacgggtattggcggtgaagtgcagttatcaaacgatatgggcttattgctgaatatgtgtgataagttggctcagaaacgtaaagacaaattcatttcatcagaattatttattttggcggctgtcgatgacaaaggttcgttaggtaaactgctaaaagaactcggcttaacagcggctaaaattgaacaagctattaatcaggtacgtggtggacaaaaagtcgatgatcaaaatgcggaagaaaatcgtcaagcattagaaaaattcaccattgatttaacggaacgggcagagcaaggcaagctcgatcctgttattgggcgtgatgatgaaatacgccgcaccatccaagtgcttcagcgcagaactaaaaataaccccgttattattggtcaacctggtgtaggtaaaacagccattgttgaagggctagcccagcgaattgtgaatggtgaagtacctgaggggctacgtcataaacgggtactttctctagatatgggctctttgattgctggtgctaaatatcgaggagagtttgaagagcgtttaaaatcagtcttaaacgaactttctcaagaagaaggcagtgtgattttattcattgatgaattacacaccatggttggagcgggtaaaggcgaaggctcaatggatgctggtaatatgctaaaaccggcattagcacggggtgaattacattgtgtaggcgccacaacccttgatgaatatcgacaatatatagagaaagatgcagcgctagagcgtcgtttccaaaaagtgctggtggatgaaccgacagtagaagacacgatagctattctacgaggcctgaaagagcgctatgaattgcatcaccatgtcgaaattaccgatcctgccatcgttgcggcggcgcgtttatcacatcgctatgtctcagatcgacagttacccgataaagcgatcgatttgattgatgaagctgcgtcgagtattcgcatgcaaattgattcaaagcctgaatcgctcgatcgtttagagcgtcgaattattcaattaaaaattgaacagcaagcactcagtaaagagagtgatgcggcaagtcaaaaacgccttaatgatatttgtgaagaacttgatgttaaagaacgtgaatatgcagaactagaagaagtgtggaatgctgaaaaagccgccctttctggtactcaacatattaaatctgaacttgagcaagcacgtatgaatatggaggttgcgcgacgagctggtgatctgaaccgtatgtcagaattgcagtatggcaaaataccggaactcgaaaagcaactggatctagcagctcaagcagaaatgcaagaaatgagcttattgaagaacaaggttacggatgctgaaatagcagaagtactctctaagcaaactggtattcctgtcgccaaaatgctggaaggcgaacgtgataagttattgcgtatggaagatgaattacatcaacgtgtaataggacaaaatgaagcggtcgaggctgtggcgaatgccattagacgaagtcgtgctggtttgtcagatccgaaccgtccgattggatcgttcttattcttaggtccaactggtgtgggtaaaacggaactgtgtaaaacactggcaaacttcatgtttgatagtgaagacaacatggtgcgtatcgacatgtcagaatttatggaaaagcattctgttgcacggttagtcggggcacctcctggttatgttggttatgaagaaggcggctatttaactgaagcggttcgtcgtcgtccttattctgtcattttgttggatgaagtcgagaaagcacatcctgatgttttcaatattttactgcaagtactggatgatggtcgattgactgatgggcaggggcgtacggttgattttcgaaataccgttatcatcatgacctctaatcttggttcagatcggattcaggaaaattttggtaatttaaactatgaaggtatcaaaaatatggtacttgaggttgttagtcagtactttcgacctgaatttatcaaccgagtcgatgagactgttgttttccatccgttagggcaagaaaatattaaacacattgctagcattcaaattgagcgtttagttaatcgtttaaaagaaaaagactacgaactgacggttcaagaaagtgctttagactttgttgcgaaagctggttttgaccctgtatacggtgcgcgaccattaaagcgtgctattcaacagtatatagagaaccctctcgctcaagagatcctctctggtaagttggagacaggtaagccaatcgacttactgattgaagatgagcatctggtaacgaagcaataa

SEQ ID NO: 7388 - protein, 857 aa, Photobacterium profundum
MRLDRFTSKFQMAIFDGQSLALGRDHQYIEPAHLMVALLNQDGSTIRPLLTMLNVDISQLRSRLGELLDHLPKVTGIGGEVQLSNDMGLLLNMCDKLAQKRKDKFISSELFILAAVDDKGSLGKLLKELGLTAAKIEQAINQVRGGQKVDDQNAEENRQALEKFTIDLTERAEQGKLDPVIGRDDEIRRTIQVLQRRTKNNPVIIGQPGVGKTAIVEGLAQRIVNGEVPEGLRHKRVLSLDMGSLIAGAKYRGEFEERLKSVLNELSQEEGSVILFIDELHTMVGAGKGEGSMDAGNMLKPALARGELHCVGATTLDEYRQYIEKDAALERRFQKVLVDEPTVEDTIAILRGLKERYELHHHVEITDPAIVAAARLSHRYVSDRQLPDKAIDLIDEAASSIRMQIDSKPESLDRLERRIIQLKIEQQALSKESDAASQKRLNDICEELDVKEREYAELEEVWNAEKAALSGTQHIKSELEQARMNMEVARRAGDLNRMSELQYGKIPELEKQLDLAAQAEMQEMSLLKNKVTDAEIAEVLSKQTGIPVAKMLEGERDKLLRMEDELHQRVIGQNEAVEAVANAIRRSRAGLSDPNRPIGSFLFLGPTGVGKTELCKTLANFMFDSEDNMVRIDMSEFMEKHSVARLVGAPPGYVGYEEGGYLTEAVRRRPYSVILLDEVEKAHPDVFNILLQVLDDGRLTDGQGRTVDFRNTVIIMTSNLGSDRIQENFGNLNYEGIKNMVLEVVSQYFRPEFINRVDETVVFHPLGQENIKHIASIQIERLVNRLKEKDYELTVQESALDFVAKAGFDPVYGARPLKRAIQQYIENPLAQEILSGKLETGKPIDLLIEDEHLVTKQ

SEQ ID NO: 7389 - DNA, 2652 bp, Plectonema boryanum
  CDS (31)..(2652): transl_table=11
  misc_feature (311)..(311): n is a, g, c or t
atgcacgatcgacatagaagggggaacacgatgcagccgaccaactcagaaaaatttaccgaaaaagtctgggaagcaatctaccgaactcaagagatgtataaacaggcgcaacaacagcagatcgagacggagcatctgatgaaagctctgctcgaacaagatggcttagcaatcagcatcttcaacaaactcgctgtccccgtcgatcgagtgcgcgatcgtaccgatgattttattcgtcgtcagcccaaagtttctggaagtggaacctcggtatactgggggcgccgcgccgatgccttgctcgntcgggctgaagaatatcgcaagcaattcgaggacagctttatctcgatcgaacatcttttgctaggttacgcccaagatagtcggttcggaaaagcattgctgtcagaatttagataccccgatgaagcaaaattaagaaacgcgatcgaacaagttcggggaaatcaaaaagtgaccgaccagactcctgaaaacaaatacgaatccctagaaaaatacgggcgtgatttgacccagtatgctcgcgaagggaaactcgatccggtcattggacgagacgacgaaatccgacgcacgatccagatcttgtcccgtcgcaccaaaaacaatccggttttgatcggtgaacccggtgttggtaaaaccgcgatcgctgaaggtcttgctcagcgaattctcagtggagatgtcccgcaatccctaaaagaccgcaaactgatcgccctagatatgggcgcactgattgcaggtgcaaaataccgaggcgaatttgaggaacgcttgaaagccgttctcaaagaagtcaccgattctcgtggcaacatcattctgtttatcgacgaaattcataccgtggttggtgcaggtgcaactcaaggcgcgatggatgccggaaacctgctgaagccgatgctggcacgaggcgagttgcgctgtatcggtgcaacgaccttagacgaatatcgcaaatacatcgagaaagatgcagccttagagcggcgcttccagcaagtcttcgtcgatcagccgagtgttgaagacacgatctcgattctgcgcggactaaaagagcggtacgaagttcaccacggggtgaaaatctccgactctgcgttagttgctgctgcaaccctttcgactcgatatatcagcgatcgcttccttcccagcaaagcgatcgacctcgtagacgaagcggctgccaaactcaaaatggagattacgtcgaagccagaagaactcgatgaagtcgatcgtaaagttctccagcttgagatggaacgactttcgttgcagaaagagaacgatgcaggatctcgcgatcgcttagaacgattagagcgtgaacttgccgatttcaaagaagatcagtccaagttaaatgctcaatggcaagccgagaaaagcgtcatcacagatcttcagaagctcaaagaagaaatcgatcgagtcaaccttgaaatccagcaagccgaacgcgattacgatctcaaccgcgcggctgaactgaagtacggcaagctcaacgaactcaatcgtaaagttgaagaaacggaatcccaactgtctcaaatacagaaatcgggagcgacgctgctccgtgaagaagttcttgaatcagacattgctgaaatcatttccaaatggacgggtatccccgttagtaaactcgttgaatctgaaatgcaaaagctcttgcagcttgacgatgttttacatcagcgcgtgattggacaagacgaagcggtgacggcagtttccgatgcaattcagcgatcgagagccggactttctgatccaaatcgtccaacggctagcttcattttcttaggaccaacaggagttggtaaaactgagcttgcaaaagcactcgctgctttcttattcgacaccgaagaagcaatggttcggatcgacatgtccgaatacatggagaagcattctgtttctcgcttaattggtgcgcctcctggatatgtcggctatgaagaaggcggacaactcacggaagcggttcgtcgtcgtccttactcggtgattctgtttgatgaaatcgagaaagcccatcccgatgtcttcaatgtgatgctgcaaattctcgatgatggtcgcgtgacagactcccaaggtcgcaccgtagatttcaagaacacaattatcatcatgacctcgaacatcggttcgcagtacatctttgaatacggtggtgatgacgatcgctatgaggaaattctatcgagagtgatggaagcaatgctatcgaacttccgtcctgagttcttgaaccggattgatgagatcatcatcttccacagtctgcaaaaggctcaactccgcgagatcgtcaagattcaaacgcatcgcttagaaagtcgcttagcaaggaagatgtccctgaagctctccgatgcagcactcgatttcttagcagagggctttgatccagtttacggagcacgtccactgaagcgggcaattcagcgggagttggaaacaacgatcgccaaagaaattctacgcagcaacttcactgaaggcgatactatcttcgtcgatgtcggtgaaacggagcgcttagaattcaaacgcttgccttctgaagtgttgaccacgcaatag

SEQ ID NO: 7390 - protein, 873 aa, Plectonema boryanum
  misc_feature (94)..(94): The Xaa at location 94 stands for Ala, Asp, Gly, or Val.
MQPTNSEKFTEKVWEAIYRTQEMYKQAQQQQIETEHLMKALLEQDGLAISIFNKLAVPVDRVRDRTDDFIRRQPKVSGSGTSVYWGRRADALLXRAEEYRKQFEDSFISIEHLLLGYAQDSRFGKALLSEFRYPDEAKLRNAIEQVRGNQKVTDQTPENKYESLEKYGRDLTQYAREGKLDPVIGRDDEIRRTIQILSRRTKNNPVLIGEPGVGKTAIAEGLAQRILSGDVPQSLKDRKLIALDMGALIAGAKYRGEFEERLKAVLKEVTDSRGNIILFIDEIHTVVGAGATQGAMDAGNLLKPMLARGELRCIGATTLDEYRKYIEKDAALERRFQQVFVDQPSVEDTISILRGLKERYEVHHGVKISDSALVAAATLSTRYISDRFLPSKAIDLVDEAAAKLKMEITSKPEELDEVDRKVLQLEMERLSLQKENDAGSRDRLERLERELADFKEDQSKLNAQWQAEKSVITDLQKLKEEIDRVNLEIQQAERDYDLNRAAELKYGKLNELNRKVEETESQLSQIQKSGATLLREEVLESDIAEIISKWTGIPVSKLVESEMQKLLQLDDVLHQRVIGQDEAVTAVSDAIQRSRAGLSDPNRPTASFIFLGPTGVGKTELAKALAAFLFDTEEAMVRIDMSEYMEKHSVSRLIGAPPGYVGYEEGGQLTEAVRRRPYSVILFDEIEKAHPDVFNVMLQILDDGRVTDSQGRTVDFKNTIIIMTSNIGSQYIFEYGGDDDRYEEILSRVMEAMLSNFRPEFLNRIDEIIIFHSLQKAQLREIVKIQTHRLESRLARKMSLKLSDAALDFLAEGFDPVYGARPLKRAIQRELETTIAKEILRSNFTEGDTIFVDVGETERLEFKRLPSEVLTTQ

SEQ ID NO: 7391 - DNA, 2592 bp, Porphyromonas gingivalis
  CDS (1)..(2592): transl_table=11
atgaacattaacaactacacaatcaaatcgcaggaggctctacagcaggctgtggagctgacccgtcggcacggacagcaggccatcgaaccgcagcacctgctcaaggccgttatggatcagggcgaaagcctgaccgatttcctttttgccaagatggggctgaacaagggcagtatcgccacggctgtggacaaactgatagagaaactgccccatgtatcgggtggcgaaccctatctgtcgcatgagaccaatcaggtgctacaggcagcggaggacgcagcgcaccggatgaaggacaaatacgtctctttggagcacatcgtgctggctattctgactacgcgatgcgaggcgtccactctgctcaaggatgccggagccaccgaacagcttctgcagtcggccatcgaagagcttcggaaggggcgcaacgtgaccagtcagagtgcggaggaacagtacaatgcactggagaaatatgccgtcaatctctgtcagcgtgctcgcgatggcaagttggatcccgtgatcggtcgcgatgacgagatcaggcgagtgctgcaaattctctctcgacgcaccaagaacaatcctatccttatcggtgagccgggggtgggcaagacggccatagccgagggcttggcttacaggatcgtgcgtggcgacgtgccggagaatctgcgcaacaagcagatattctctctcgacatgggtgccttgatcgccggagccaaatacaaaggtgaattcgaggaaaggctgaaagccgtggtaaacgaagtgaccggtgccgagggggaaatcatccttttcatagatgagatccacacccttgtcggagccggcaagagcgaaggcgcgatggacgctgccaacatactgaagccggccctggctcggggcgaactccgtgccatcggtgccaccacgctggacgaataccgcaaatacttcgagaaggacaaggctctggaacgacgcttccagatggtgatggtggacgagccggacgagctaagctccatctccatcctccggggtttgaaggagaaatacgagaatcaccacaaagtgcggatcaaggatgatgccatcattgcggccgtgaagttgtcgcaccgctacattacggagcggttcctgcccgacaaggccatcgacctgatggatgaggctgcggctcgtctgcgtatggaagtggattcgctgccggaggagctggacgagatctcgcgcaggatcaagcaacttgagatcgaacgcgaagccatcaagcgagagaatgacgaagagaaggtacagttcctcgacagggaaatagccgaactcaaggagaaagaggcctcggagaaagcccaatggcagaacgaaaaagatcggatcaatcagattcagcagctcaagatagatatagaggagctgaagtttcaggccgatcgtgccgaacgggagggcgattacggacgagtggccgagatacgctacggactcatcaagcagaaagagacggagatcgacacgatacagcagcagctgcacgaattgcagcgtggcggctccatgatcaaggaggaagtggaggccgacgacatagccgacatcgtgtcgcgctggacgggtatccccgtcagccgcatgctccagagcgagcgcgacaagctgcttcatctggaggacgagctgcacaagcgcgtgatcggtcaggacgaagccatccgtgccgtggccgatgccgtccgtcgcagccgggcaggccttcaggatcccaagcgtccgatcggttcgttcatcttcctcggtactacgggggtgggcaagacggagttggcacgtgccttggccgaattgctcttcgatgatgagagcatgcttacgcgaatagacatgagcgagtatcaggagaagttcagtgccacgcgtctgatcggtgcgcctccggggtatgtgggctatgacgagggtggccaattgacggaagccattcgccgcaagccttattccgtggtgcttttcgatgaaatagaaaaagctcacccggatgtgttcaacgtattgctgcaagtcctcgacgatggccgcctgaccgacaacaaggggcatgtggtaaacttcaagaatacgctcatcatcatgacgtcgaacctcggttcggacatcattcgcgagcggatgcagaacctcacggcggagaatcgccggtccctcacggcccggacggccgatgaggtgatgcagctactcaagcatacgatccgccccgagtttctgaaccgtatcgacgagaccatcgtcttcacgccactgaccgagaaggagatctacgagatcgtccgcttgcagctcgatggtatcgtgcgccaactggccgataacgacgtggtgctccactatacggaggctgtcgtgacctttgccgctcgcgagggatatgatccgcagttcggagcgcgtcctgtgaagcgagtcctgcagcgattcgtcctcaacgagctgagcaaggcactcttggccgatacggtggacagtacacgtcccgtcctcatcgattgcatagacggatcaatcgtcttccgcaacgaatag

SEQ ID NO: 7392 - protein, 863 aa, Porphyromonas gingivalis
MNINNYTIKSQEALQQAVELTRRHGQQAIEPQHLLKAVMDQGESLTDFLFAKMGLNKGSIATAVDKLIEKLPHVSGGEPYLSHETNQVLQAAEDAAHRMKDKYVSLEHIVLAILTTRCEASTLLKDAGATEQLLQSAIEELRKGRNVTSQSAEEQYNALEKYAVNLCQRARDGKLDPVIGRDDEIRRVLQILSRRTKNNPILIGEPGVGKTAIAEGLAYRIVRGDVPENLRNKQIFSLDMGALIAGAKYKGEFEERLKAVVNEVTGAEGEIILFIDEIHTLVGAGKSEGAMDAANILKPALARGELRAIGATTLDEYRKYFEKDKALERRFQMVMVDEPDELSSISILRGLKEKYENHHKVRIKDDAIIAAVKLSHRYITERFLPDKAIDLMDEAAARLRMEVDSLPEELDEISRRIKQLEIEREAIKRENDEEKVQFLDREIAELKEKEASEKAQWQNEKDRINQIQQLKIDIEELKFQADRAEREGDYGRVAEIRYGLIKQKETEIDTIQQQLHELQRGGSMIKEEVEADDIADIVSRWTGIPVSRMLQSERDKLLHLEDELHKRVIGQDEAIRAVADAVRRSRAGLQDPKRPIGSFIFLGTTGVGKTELARALAELLFDDESMLTRIDMSEYQEKFSATRLIGAPPGYVGYDEGGQLTEAIRRKPYSVVLFDEIEKAHPDVFNVLLQVLDDGRLTDNKGHVVNFKNTLIIMTSNLGSDIIRERMQNLTAENRRSLTARTADEVMQLLKHTIRPEFLNRIDETIVFTPLTEKEIYEIVRLQLDGIVRQLADNDVVLHYTEAVVTFAAREGYDPQFGARPVKRVLQRFVLNELSKALLADTVDSTRPVLIDCIDGSIVFRNE

SEQ ID NO: 7393 - DNA, 2595 bp, Prochlorococcus marinus
  CDS (1)..(2595): transl_table=11
atggatataaaaactgacaatttcactgaagaatcatggtcttcaatacttcaagcacaatcaaatgcaaaaggatttcaccatcaatacatagaaactgagcatcttttaaaatccttaattcaagagaatgatcttgcaaaaagcattattaaaaaatgcaatggatcaatagatcaaattaaaatgcatttaaatgattttataaagaatcagcctaaattaaaagaacgtcctgaaaatttattcattggtaaacatcttcagaagacaataaatgaatcagatcaaataaagcagtcttttgacgatgactttatttctattgaacacttgttaattgctctctcaaaagatcaaagatgctgcaataaaatacttattcatgaaaaaatagaccctgaaatacttttaaaatcaatagcagaaatcagagggaatcaaaaggtgaccgatcaaaatccggaatcaaaatatgaatctcttaagaagtatggcagagatcttacttctgcagcccgagaaggaattctagatccagtaataggaagagatgacgaaattagaagaactattcaaatccttagtcgcagaactaaaaataaccctgtattaataggtgagcctggcgttgggaaaactgcaatagtggaaggcctcgcacaaagaattatcaatggtgatgtaccgtcggctctacaaaatcgtcaattaatcgctctggatatgggagctcttattgcaggtgcaaagtatcgaggagagtttgaagaaagattaaaggcagtcctaaaagaagtgacatcatcacaaggacaaattgtcctttttatagatgaaattcatacagttgttggagctggtgctacagggggcgcaatggatgcaagcaatctgcttaagccaatgctcgcaagaggggaattgcgctgcataggtgcaacaacaataaatgaacatcgccaacatattgagaaagatccagcattagaaagacgtttccaacaagtcttaataagcgaaccatccattgaagatacaatatcaattcttaggggattaaaagaaaaatatgaagttcaccatggagtaagaatatcggatagtgctttagttgcagcagctgtgctaagcaatagatatatatcagagcgttatctgcctgataaagcaatagacctaatagatgaatctgcttctaaattaaaaatggaaatcacatcaaagccagaagagttagatgagatagaccgtaaaataattcaattgcaaatggaaaagctttcattaaaaagagaatcaaatttagcaagtcaagaaaaattaaatgcaatagacaatggattgaacgaactgaagagtaagcaaagttctttaaataagcaatggcaagaagaaaaagagtctataaatactctttcgttcttaaaagaagaaatcgaaaaagttcaacttcaaattgaacaggccaagagagattatgatttaaacagagcagcagaacttgaatatggaactttaaactccttacaaaataaattaaagcaaaaagaggatttaattatggtcaataataataatgatcaaaaaagtctacttttaagagaggaagtaactgaaaatgatataaccgaagtgatcgcaaaatggacatcaatacccttaacaaaacttttaaaatcagatatagaaaagctattagatcttgaagacaaattaaactcaaaagtaattggtcaaaagcaagcagttcaagctgtagcagattcaatacagcgctcaaggactggtcttagtgatccaagtaggcctatgggaagctttttacttctagggcctacgggtgtaggcaagactgagttatctaaatctctagctaaagaattatttgatagtgaaaaagcaatgattagaattgatatgtctgaatacatggaaaaacattctattagtcgactaataggagcaccccctggatatgtgggatatgagtcaggaggacaattgtcagaggctgttagaagaaacccttattcagtaattctttttgatgaagtagaaaaagcaaattctgatgtattaaacataatgcttcaaatacttgacgaaggaagattaactgatggtaaaggtaaaaatataaactttaaaaatacaattattattcttacaagcaatgtgggtagtgaatcaataatagaaatgaccaataagaaaaacgaatacgaactgatagaagaagttgtgaggaatcaattaaaaaattattttaagcctgaatttctaaatagattagatgaacaaattatctttaaaagtcttaagaaagaagatttaaaaaaaattgttaaattacaaatagacaaagtaaaagcgagattgaaagacaagggattagaaatcgaattaaatgaaaaagtaatagattggattgccgataaaggatataatcctatatatggtgccaggccaattaaaagaataattcagacaaaattagaaactaaactggctaaaatgatacttaaaagcaaatcagaggaacgctcacattatcaattagatattattgacgatcaaatagtctttaactaa

SEQ ID NO: 7394 - protein, 864 aa, Prochlorococcus marinus
MDIKTDNFTEESWSSILQAQSNAKGFHHQYIETEHLLKSLIQENDLAKSIIKKCNGSIDQIKMHLNDFIKNQPKLKERPENLFIGKHLQKTINESDQIKQSFDDDFISIEHLLIALSKDQRCCNKILIHEKIDPEILLKSIAEIRGNQKVTDQNPESKYESLKKYGRDLTSAAREGILDPVIGRDDEIRRTIQILSRRTKNNPVLIGEPGVGKTAIVEGLAQRIINGDVPSALQNRQLIALDMGALIAGAKYRGEFEERLKAVLKEVTSSQGQIVLFIDEIHTVVGAGATGGAMDASNLLKPMLARGELRCIGATTINEHRQHIEKDPALERRFQQVLISEPSIEDTISILRGLKEKYEVHHGVRISDSALVAAAVLSNRYISERYLPDKAIDLIDESASKLKMEITSKPEELDEIDRKIIQLQMEKLSLKRESNLASQEKLNAIDNGLNELKSKQSSLNKQWQEEKESINTLSFLKEEIEKVQLQIEQAKRDYDLNRAAELEYGTLNSLQNKLKQKEDLIMVNNNNDQKSLLLREEVTENDITEVIAKWTSIPLTKLLKSDIEKLLDLEDKLNSKVIGQKQAVQAVADSIQRSRTGLSDPSRPMGSFLLLGPTGVGKTELSKSLAKELFDSEKAMIRIDMSEYMEKHSISRLIGAPPGYVGYESGGQLSEAVRRNPYSVILFDEVEKANSDVLNIMLQILDEGRLTDGKGKNINFKNTIIILTSNVGSESIIEMTNKKNEYELIEEVVRNQLKNYFKPEFLNRLDEQIIFKSLKKEDLKKIVKLQIDKVKARLKDKGLEIELNEKVIDWIADKGYNPIYGARPIKRIIQTKLETKLAKMILKSKSEERSHYQLDIIDDQIVFN

SEQ ID NO: 7395 - DNA, 2598 bp, Prochlorococcus marinus
  CDS (1)..(2598): transl_table=11
atgcaacctacagcggatcaatttaccgaaaaaggctgggcagcaatcgttttggcccaacaacttgcccaacaacgcaagcaccagcaactggaaacagagcatttgttgttgtcactgctccagcaaaacgctttggccggaagaatcctggaaaaagcaggtgtgtcgatcggcaacttgcaaacagccgtggaggcacacctgcaagaacagcccactatgcaggctgcgccagactctgtctatctgggcaagggagtcaatgatcttctcgatcaagctgagaaacataagcaagcttttggcgatagtttcatctcgattgaacatctgttacttgcattggccggggacaatcgttgcggccgtaagttgctcaatcaagcgggcgtggatgccggcaaactaaaggttgcaattgacgcggtacgcggaaaccagaaggtgaccgatcagaacccagaaggaacttacgaatctctcgaaaaatatggcagagacctgagtgctgctgctcgcgaaggcaaactcgaccctgtcatcggaagggacgatgagattcgacgcacgattcagattcttagtaggcgcaccaaaaacaaccctgtcctcattggggagccaggggtgggaaaaaccgcaattgttgaaggcctcgcacagcggattgttaatggcgatgtacctgcagcccttcagaacagacagttaatcacccttgatatgggtgctttgattgcaggggcgaaatatcgaggtgaattcgaagagcgactcaaggcggtgctcaaagaagttaccgcctctgaaggacaaatcgtactttttattgatgaaatccatactgttgtaggagctggagcgaccggtggggcaatggatgccagcaatctgcttaagccaatgctggctcgaggggaactgcgctgcattggtgcaacgaccctcgatgagcaccgacagcacatcgaaaaagaccccgctttagaaagaagattccaacaagtgcttgtggatcaacccacagtgcaagacacgatctccatcctgcgtggtctcaaagaacgctacgaagtgcatcatggtgtgcgcattgctgataacgccctagttgctgcagctgtgctcagtagccgatatattgccgatcgctttttgccagataaagccatcgatttgatggatgaatctgctgcacggctgaaaatggaaatcacttccaagcctgaggaaattgatgaaatcgatcgcaagattgtgcagctcgagatggagaagctttccctaggacgtgagtccgactccgttagcaaggaaaggttggaaaaactagaacgcgaacttgctgaattagcagagcaacaaagtgccctcaatgcacagtggcaacaagaaaaaggtgcgattgacgacctttcttcgctcaaagaagaaatcgaacgggtgcaattgcaagtggagcaagccaagcgcagctacgacctcaacaaggcagctgaactggagtatggaactctggcgggattgcagaaacaactcagcgagaaagaaactgccctggcccaagatggagaggcaggcgataaatcactgctgcgagaggaggttacggaagatgatattgctgatgtcatcgctaaatggaccgggattcccgtcgccaagcttgtgcagtcggaaatggaaaagctgcttggacttgaagcagaactccaccaacgtgtgattggccaagaacaggctgtgcaagctgttgcggatgcgattcagcgttctagggcaggtttaagtgatcccaaccgcccgatcgcaagttttttatttctaggccccactggtgtcggtaaaacggagctatccaaggcattggcctctcaactgtttgacagcgaggcggctttggttcgaatcgatatgtctgagtatatggagaagcacagtgtcagcagactgattggggcccctccgggttatgtgggctatgaggccggtggacagctcaccgaagccgtacgcagacgcccttatgcggtaatcctgttcgatgaagtggagaaggcacaccaagatgtgttcaatgtgatgttacagatccttgatgatggacgtgtcaccgatggtcagggtcgcacagttgattttacaaatacggtgctaattcttaccagtaatattggcagccagtcgattctcgacttgggaggcgatgatagtcaatacagggaaatggagcggcgagttcatgatgctttgcacgctcattttaggcctgagtttctcaaccgcctggatgaaacaatcatctttcatagtctcaggcgcgaggaactgcgtcagatcgttgcccttcaggtcaatcggctgcgtgagcgtctttgcgatcgcaagcttggcctagagatcagtgatacagcagctgattggctcgccaatgctggctatgaccctgtttatggggctagaccccttaagcgagcgatacaacgcgagcttgaaactccaatagccaaaagtatcctggcgggcctttatggagatagtcagattgtgcatgtggatgtggatgtggatcaggagcgtctgagttttcgctaa

SEQ ID NO: 7396 - protein, 865 aa, Prochlorococcus marinus
MQPTADQFTEKGWAAIVLAQQLAQQRKHQQLETEHLLLSLLQQNALAGRILEKAGVSIGNLQTAVEAHLQEQPTMQAAPDSVYLGKGVNDLLDQAEKHKQAFGDSFISIEHLLLALAGDNRCGRKLLNQAGVDAGKLKVAIDAVRGNQKVTDQNPEGTYESLEKYGRDLSAAAREGKLDPVIGRDDEIRRTIQILSRRTKNNPVLIGEPGVGKTAIVEGLAQRIVNGDVPAALQNRQLITLDMGALIAGAKYRGEFEERLKAVLKEVTASEGQIVLFIDEIHTVVGAGATGGAMDASNLLKPMLARGELRCIGATTLDEHRQHIEKDPALERRFQQVLVDQPTVQDTISILRGLKERYEVHHGVRIADNALVAAAVLSSRYIADRFLPDKAIDLMDESAARLKMEITSKPEEIDEIDRKIVQLEMEKLSLGRESDSVSKERLEKLERELAELAEQQSALNAQWQQEKGAIDDLSSLKEEIERVQLQVEQAKRSYDLNKAAELEYGTLAGLQKQLSEKETALAQDGEAGDKSLLREEVTEDDIADVIAKWTGIPVAKLVQSEMEKLLGLEAELHQRVIGQEQAVQAVADAIQRSRAGLSDPNRPIASFLFLGPTGVGKTELSKALASQLFDSEAALVRIDMSEYMEKHSVSRLIGAPPGYVGYEAGGQLTEAVRRRPYAVILFDEVEKAHQDVFNVMLQILDDGRVTDGQGRTVDFTNTVLILTSNIGSQSILDLGGDDSQYREMERRVHDALHAHFRPEFLNRLDETIIFHSLRREELRQIVALQVNRLRERLCDRKLGLEISDTAADWLANAGYDPVYGARPLKRAIQRELETPIAKSILAGLYGDSQIVHVDVDVDQERLSFR

SEQ ID NO: 7397 - DNA, 2565 bp, Pseudomonas aeruginosa
  CDS (1)..(2565): transl_table=11
atgcgaatagaccgtttgaccagcaagctgcaactggcgctctccgacgcccagtccctggccgttggccatgaccatccggccatcgagccggtgcacctgctttccgccctgctcgagcagcaaggcggttcgatcaagcccctgctgatgcaggtcggcttcgatatcgccgccctgcgcagcggcctcaacaaagaactcgacgcgctgccgaagatccagagcccgaccggcgacgtgaacctgtcccaggatctcgcacgcctgctcaaccaggctgaccgcctggcccagcagaagggcgaccagttcatctccagcgagctggtattgctggccgcgatggacgagaacaccaggctcggcaagctgctgctcggccagggcgtgtcgcgcaaggcgctggagaatgccgtggccaacctgcgtggcggcgaagcggtgaacgacccgaacgtcgaggagtcgcgccaggcgctggacaagtacaccgtcgacatgaccaagcgcgccgaggaaggcaagctcgacccggtgatcggtcgcgacgacgagatccgccggaccatccaggtcctgcagcggcggaccaagaacaacccggtgctgatcggcgaacccggcgtcggcaagaccgccatcgtcgagggcctggcccagcgcatcatcaacggcgaagtgccggacggcctcaaggacaagcgcctgctggccctggacatgggggcgctgatcgccggtgccaagttccgcggcgagttcgaggaacgcctgaaggcggtcctcaacgaactgggcaagcaggaaggccgggtcatcctgttcatcgacgaactgcacaccatggtcggcgccggcaaggcggaaggtgccatggacgccggcaacatgctcaagccggctctggcgcgcggcgagctgcactgcgtcggtgctactaccctcgacgagtatcgccagtacatcgagaaggatgccgcgctggagcgccgcttccagaaggtgctggtggacgaaccgagcgaggaagacaccatcgccatcctccgtggcctcaaggaacgctatgaagtgcaccacggggtgagcatcaccgacggcgcgatcatcgccgcggccaagctgtcgcaccgctacatcaccgatcggcaactgccggacaaggccatcgacctgatcgacgaggccgccagccgcatccgcatggagatcgactccaagccggaggaactggatcgtctcgaccgtcgcctgatccagctgaagatcgagcgcgaggcgctgaagaaggaagacgacgaagccaccaggaagcgcctggccaagctggaggaggatatcgtcaagctcgagcgcgaatacgccgacctcgaggagatctggaagtccgagaaggccgaggtgcagggctcggcgcagatccagcagaagatcgagcaggccaagcaggagatggaggcggcgcggcgcaagggcgacctcgagagcatggcgcgcatccagtaccagaccatcccggacctggaacgcagcctgcagatggtcgaccagcacggcaagaccgagaaccagttgctgcgcaacaaggtgaccgacgaggaaatcgccgaagtggtttccaagtggaccggtatcccggtgtcgaagatgctcgagggcgagcgcgagaagctgctgcgcatggagcaggagctgcatcggcgagtgatcggccaggacgaggcggtagtcgccgtgtccaacgccgtgcgccgttcgcgcgccggcctcgccgatccgaaccggccgagcggctcgttcctcttcctcggcccgaccggggtgggcaagaccgagttgtgcaaggcgctggccgagttcctcttcgataccgaggaggcgctggtgcggatagatatgtccgagttcatggagaaacactcggtggcccgcctgatcggcgcgcctccgggctacgtcggcttcgaggaaggcggctacctgaccgaggcgatccgccgcaagccctactcggtggtgctgctggacgaggtggagaaggcccatccggatgtattcaacattctcctccaggtgctcgaggacggacgcctgaccgacagtcacgggcgtacggtggacttccgcaacaccgtggtggtgatgacctccaacctcggttcggcgcagatccaggagctggccggcgaccgcgaggcgcaacgtgccgcagtgatggacgcggtcaatgcgcacttccgtccggaattcatcaaccggatcgacgaagtggtggtgttcgagccgctggctcgcgagcagatcgccggcatcgccgagatccagctcggtcgcctgcgcaagcgcctggccgagcgcgagctgagcctggaactgagccaggaggcgctggacaagctgattgccgtcggcttcgacccggtctatggcgcacgcccgctgaagcgggccatccagcgctggatcgagaacccgctggcgcaactgatcctggccggcaaattcgcgccgggtgccagtatctcggcgaaggtggaaggcgacgagatcgtcttcgcctga

SEQ ID NO: 7398 - protein, 854 aa, Pseudomonas aeruginosa
MRIDRLTSKLQLALSDAQSLAVGHDHPAIEPVHLLSALLEQQGGSIKPLLMQVGFDIAALRSGLNKELDALPKIQSPTGDVNLSQDLARLLNQADRLAQQKGDQFISSELVLLAAMDENTRLGKLLLGQGVSRKALENAVANLRGGEAVNDPNVEESRQALDKYTVDMTKRAEEGKLDPVIGRDDEIRRTIQVLQRRTKNNPVLIGEPGVGKTAIVEGLAQRIINGEVPDGLKDKRLLALDMGALIAGAKFRGEFEERLKAVLNELGKQEGRVILFIDELHTMVGAGKAEGAMDAGNMLKPALARGELHCVGATTLDEYRQYIEKDAALERRFQKVLVDEPSEEDTIAILRGLKERYEVHHGVSITDGAIIAAAKLSHRYITDRQLPDKAIDLIDEAASRIRMEIDSKPEELDRLDRRLIQLKIEREALKKEDDEATRKRLAKLEEDIVKLEREYADLEEIWKSEKAEVQGSAQIQQKIEQAKQEMEAARRKGDLESMARIQYQTIPDLERSLQMVDQHGKTENQLLRNKVTDEEIAEVVSKWTGIPVSKMLEGEREKLLRMEQELHRRVIGQDEAVVAVSNAVRRSRAGLADPNRPSGSFLFLGPTGVGKTELCKALAEFLFDTEEALVRIDMSEFMEKHSVARLIGAPPGYVGFEEGGYLTEAIRRKPYSVVLLDEVEKAHPDVFNILLQVLEDGRLTDSHGRTVDFRNTVVVMTSNLGSAQIQELAGDREAQRAAVMDAVNAHFRPEFINRIDEVVVFEPLAREQIAGIAEIQLGRLRKRLAERELSLELSQEALDKLIAVGFDPVYGARPLKRAIQRWIENPLAQLILAGKFAPGASISAKVEGDEIVFA

SEQ ID NO: 7399 - DNA, 2565 bp, Pseudomonas putida
  CDS (1)..(2565): transl_table=11
atgcgaatagaccgtttaaccagcaagctgcaacttgcaatatccgatgcccagtctttggccgttggcatggaccaccctgccatcgagcccgtgcacctgttacaggcgctgctcgaacagcagggcggctccatcaaaccgctgctgatgcaggtaggcttcgacatcaatggcctgcgccaggggctggtgaaagagctcgaccaactgccgaaaatacagaaccctaccggcgacgtgaacatgtcgcaggacttggcacgtctgcttaaccaggcagaccgcctggcacagcagaagggcgaccagttcatttccagcgagctggtgctgttggccgccatggacgaaaacagcaagctcggcaagctgctgctgagccagggcgtgagcaagaaagcgctggaaaatgccatcaacaacctgcgtggcggcgcggcagtgaatgacgccaacgccgaggaatcgcgccaggcgctggacaaatacaccgtcgacctgaccaagcgtgccgaagagggcaagctggacccggtcattggccgtgacgatgaaatccgccgtaccgtgcaggtgctgcaacgccgtaccaagaacaacccggtgctgatcggtgagcctggcgtgggtaaaaccgccatcgccgaaggcctggcccagcgcatcatcaatggtgaagtgcccgacggcctcaaaggcaagcgcctgttggcgctggacatgggcgcgctaattgccggtgccaagtaccgcggtgagttcgaagagcgcttgaaaagcctgctgaacgaactgtccaagcaggaaggccagatcatcctgttcatcgacgaactgcacaccatggtcggcgccggcaaaggcgagggcgccatggacgccggcaacatgctcaagccggccctggcccgcggcgagctgcattgcgtaggtgccaccacgctgaacgagtaccgccagttcatcgaaaaggacgccgccctggagcgccgtttccagaaggtgctggtcgaggagccgagcgaggaagacaccatcgccatcctgcgtggcctgaaagagcgctatgaagtgcaccacaaggtggccatcaccgacggtgcaatcatcgctgcggccaagctcagccatcgctacatcaccgaccgccagctgccggacaaggccattgacctgatcgacgaagcggccagccgcatccgcatggagatcgactccaagccggaagtgctcgaccgccttgatcgccgcctgatccagctgaaggtggagtcgcaggcgctgaagaaagaagaagacgaagcggcgaaaaagcgcctggagaagctgaccgaggaaatcgagcggctggagcgtgagtattccgacctggaagaaatctgggcttcggagaaagctgaagtgcagggctcggcgcagatccagcaaaagatcgagcagtctcgccaggagctggaagccgcccgtcgcaaaggcgacctgaaccgcatggccgaactgcagtacggggtgatcccggacctggagcgcagcctgcagatggtcgaccagcacggcaagaccgacaaccagttgctgcgcaacaaggtcaccgaggaagaaattgccgaagtggtatcgaaatggaccggcattcctgtggccaagatgctcgaaggcgagcgtgagaagctgctgaagatggaagagctgctgcaccagcgcgtgattggccagagcgaggcggtaaccgccgtagccaacgccgtacgccgctcgcgtgccgggctgtccgacccgaaccggccaagtggttcgttcctgttcctcggcccgaccggtgtgggcaagaccgaactgtgcaaggcgctggccgagttcctgttcgacaccgaagaggcgatggtgcgcatcgacatgtccgaattcatggagaagcactccgtcgcgcgcctgatcggtgcaccaccaggctatgtagggtatgaagagggcggttacctgaccgaggccgtgcggcgcaagccttactcggtggtgctgctggacgaggtggaaaaagcccacccggatgtgttcaacgtgctgttgcaggtgctggaagacggccgcctgaccgacagccacgggcgcaccgtggacttccgcaacaccgtgatcgtgatgacctccaacctgggctcggcgcagattcaggaactggtgggtgaccgcgaggcacagcgtgcggcagtgatggatgcggtgggggcgcacttccgtccggaattcatcaaccgcatcgacgaagtggtggtgttcgagcctttgggccgcgagcagattgccggtattacagaaatccagctcggccgcctgcgcagccgcctgctggagcgcgaactgtcgttgagcctgagcccagaggcgttggacaagctgattgccgtgggttatgacccggtgtacggcgcgcggccgctgaagcgtgcgatccagcgctggatcgagaacccgctggcgcagctgattctggccggcaagttcctgcccggtacggcgatcaccgccaaggtggaaggcgacgaaatcgtctttggctga

SEQ ID NO: 7400 - protein, 854 aa, Pseudomonas putida
MRIDRLTSKLQLAISDAQSLAVGMDHPAIEPVHLLQALLEQQGGSIKPLLMQVGFDINGLRQGLVKELDQLPKIQNPTGDVNMSQDLARLLNQADRLAQQKGDQFISSELVLLAAMDENSKLGKLLLSQGVSKKALENAINNLRGGAAVNDANAEESRQALDKYTVDLTKRAEEGKLDPVIGRDDEIRRTVQVLQRRTKNNPVLIGEPGVGKTAIAEGLAQRIINGEVPDGLKGKRLLALDMGALIAGAKYRGEFEERLKSLLNELSKQEGQIILFIDELHTMVGAGKGEGAMDAGNMLKPALARGELHCVGATTLNEYRQFIEKDAALERRFQKVLVEEPSEEDTIAILRGLKERYEVHHKVAITDGAIIAAAKLSHRYITDRQLPDKAIDLIDEAASRIRMEIDSKPEVLDRLDRRLIQLKVESQALKKEEDEAAKKRLEKLTEEIERLEREYSDLEEIWASEKAEVQGSAQIQQKIEQSRQELEAARRKGDLNRMAELQYGVIPDLERSLQMVDQHGKTDNQLLRNKVTEEEIAEVVSKWTGIPVAKMLEGEREKLLKMEELLHQRVIGQSEAVTAVANAVRRSRAGLSDPNRPSGSFLFLGPTGVGKTELCKALAEFLFDTEEAMVRIDMSEFMEKHSVARLIGAPPGYVGYEEGGYLTEAVRRKPYSVVLLDEVEKAHPDVFNVLLQVLEDGRLTDSHGRTVDFRNTVIVMTSNLGSAQIQELVGDREAQRAAVMDAVGAHFRPEFINRIDEVVVFEPLGREQIAGITEIQLGRLRSRLLERELSLSLSPEALDKLIAVGYDPVYGARPLKRAIQRWIENPLAQLILAGKFLPGTAITAKVEGDEIVFG

SEQ ID NO: 7401 - DNA, 2565 bp, Pseudomonas syringae pv
  CDS (1)..(2565): transl_table=11
atgcgtatcgacagattgaccagtaaattacagttagcgttatcggattcccagtcgctggccgtcggcctcgaccatcccgccatcgagcctgcgcatttgatgcaggcactgctcgaacagcagggcggttccatcaagccattgctgctgcaagtcggcttcgatatcaacagcctgcgcaaggaactgagcgctgagctggaccgactgcccaaaatccagaacccgaccggcgacgtgaatatgtcgcaggacctggcgcgcctgctcaatcaggccgaccgcctggcgcagcagaagggcgatcagttcatttccagcgagctggtgctgctcgctgcaatggatgagaacagcaagctcggcaagttgttgctggggcagggcgtcagcaagaaggccctggaaaatgccatcaataacctgcgcggcgaaggtgccgtcaatgacccgaacatcgaagagtcgcgtcaggcgctcgacaagtacaccgttgacctgaccaagcgcgccgaagagggcaagctagacccggtgattggccgtgatgacgagatccgtcgcaccattcaggttctgcaacgccgaaccaaaaacaatccggtgctgatcggtgagcccggtgtgggtaaaaccgccatcgccgaaggtctggcgcagcgcatcatcaatggcgaggtgccggatggcctgcgcggcaagcgtctgctgtcgctggacatgggcgcactgattgccggtgccaagtaccgtggcgagttcgaagagcgcttgaagtcgctgctcaacgagctgtccaagcaggaaggccagatcatcctgttcatcgacgaattacacaccatggtcggcgcgggcaagggcgagggctcgatggacgcgggcaacatgctcaagccggcactggctcggggcgagttgcactgcgtcggcgccaccacgctcaacgagtaccgccaatatatcgagaaggacgccgcgcttgagcgtcgtttccagaaagtgctggtggacgagccgagcgaagaggacaccattgcaattctgcgtggcctgaaagagcgctatgaagtgcatcacaaggttgcgatcaccgacggcgcgatcatcgctgcggccaagctgagccatcgctacatcaccgatcgtcagttgccggacaaggccattgacctgattgacgaagcggccagccgcattcgcatggagatcgactccaagcccgaagtgctcgaccgtcttgagcgacgtctgattcagctgaaagtcgaagctcaggcgctcaagaaggaaaaggacgaggcagccatcaaacgcctggaaaaactccaggaagaaatcgtgcgccttgagaaggaatacgccgatctcgaagaaatctggacttcggaaaaagccgaagtcaccggttctgcgcagatccagcagaaaatagagcagtcccgtcaggaactggaagcggcgcgtcgccgtggcgacctgaaccgcatggccgagttgcagtacggcatcatcccggacctggaacgcagcctgcaaatggtcgatcagcacggcaagcccgagaaccagttgctgcgcagcaaagtgaccgaagaagaaattgccgaagtcgtctccaaatggaccggtattcctgtgtcgaagatgctggagggcgagcgcgagaagctgttgcgcatggaaaccctgctgcataaccgggtgatcggtcaggaagaggcggtagtggcggtttccaacgccgtgcggcgctcgcgtgccgggttgtccgaccctaatcgcccaagcggctcgttcatgttcctcggccccaccggcgtgggtaaaaccgaactgtgcaaggcgctggccgaatttctgttcgacaccgaagaggcgatggtgcgaatcgacatgtccgagttcatggagaaacattccgtggctcgcctgatcggtgcaccacccggctatgtcggttacgaagagggcggctacctgaccgaagccgtgcgtcgcaagccgtactcggtgatcctgctcgatgaggtggagaaggcgcactccgatgtcttcaacatcctgctgcaggtgcttgaagacggacgcctgaccgacagccacgggcggacagtggatttccgtaataccgtgatcgtcatgacctccaacctgggctcggcgcagatccaggaactggtgggtgatcgcgaggcgcagcgtgcggcggtaatggacgcagtcagcacgcacttccgtccggagttcgtcaaccggatcgacgaggtggtgatcttcgagcccttggcgcgtgatcagattgccggtatcaccgatatccagcttggccgtctgcgcaagcgtctggccgagcgcgagctgacaatggtgctgagccccgaggcgctcgacaagctgattgccgtcggttacgacccggtctatggcgcacggccactcaagcgcgccattcagcgctggatcgaaaacccgctggcgcaactgatcctctcgggtggcttcgagccgggcagcagcatcaccggcaaggtggtcgacgacgagatcgtgtttggctga

SEQ ID NO: 7402 - protein, 854 aa, Pseudomonas syringae pv
MRIDRLTSKLQLALSDSQSLAVGLDHPAIEPAHLMQALLEQQGGSIKPLLLQVGFDINSLRKELSAELDRLPKIQNPTGDVNMSQDLARLLNQADRLAQQKGDQFISSELVLLAAMDENSKLGKLLLGQGVSKKALENAINNLRGEGAVNDPNIEESRQALDKYTVDLTKRAEEGKLDPVIGRDDEIRRTIQVLQRRTKNNPVLIGEPGVGKTAIAEGLAQRIINGEVPDGLRGKRLLSLDMGALIAGAKYRGEFEERLKSLLNELSKQEGQIILFIDELHTMVGAGKGEGSMDAGNMLKPALARGELHCVGATTLNEYRQYIEKDAALERRFQKVLVDEPSEEDTIAILRGLKERYEVHHKVAITDGAIIAAAKLSHRYITDRQLPDKAIDLIDEAASRIRMEIDSKPEVLDRLERRLIQLKVEAQALKKEKDEAAIKRLEKLQEEIVRLEKEYADLEEIWTSEKAEVTGSAQIQQKIEQSRQELEAARRRGDLNRMAELQYGIIPDLERSLQMVDQHGKPENQLLRSKVTEEEIAEVVSKWTGIPVSKMLEGEREKLLRMETLLHNRVIGQEEAVVAVSNAVRRSRAGLSDPNRPSGSFMFLGPTGVGKTELCKALAEFLFDTEEAMVRIDMSEFMEKHSVARLIGAPPGYVGYEEGGYLTEAVRRKPYSVILLDEVEKAHSDVFNILLQVLEDGRLTDSHGRTVDFRNTVIVMTSNLGSAQIQELVGDREAQRAAVMDAVSTHFRPEFVNRIDEVVIFEPLARDQIAGITDIQLGRLRKRLAERELTMVLSPEALDKLIAVGYDPVYGARPLKRAIQRWIENPLAQLILSGGFEPGSSITGKVVDDEIVFG

SEQ ID NO: 7403 - DNA, 2589 bp, Ralstonia solanacearum
  CDS (1)..(2589): transl_table=11
atgcgtttggacaaactgaccacccgcttccaggaagcgttggccgacgcgcaaagcctggcgttgggcaacgacaatccgtatatcgaaccgctccatctgctgctggcgatgctgcgccagcccgacggggccaccaagaacctgctggcgcgcgcgggcgtcaacgccaaggggctcgagatcgcgctcgacaacgcgatcaagcgcctgccgcaagtgcagggcggcgaacaggtgcaggtcggccgggacctgggcagcctgctgcaggccacggagaaagagggcatcaagcgcggtgaccagttcatcgcgagcgagctgttcctgctggccgtggccgacgacaagggcgaggccggccgcgtcgcgcgcgagcacgggctggcgcgccgtgcgctggaggcggccatcgatgccgtgcgcggcggccagaccgtcggcagcgccgaggccgagagccagcgcgaggcgctcaagaagtacaccatcgacctgaccgagcaggcgcgcatcggcaagctcgacccggtcattggccgcgacgacgagatccgccgcgcgatccagatcctgcagcgccgcaccaagaacaacccggtgctgatcggcgagccgggcgtgggcaagaccgccatcgtcgagggcctggcgcagcgcatcatcaacggcgaggtgcccgagagcctgaagaacaagcgcgtgctggtgctcgacatggcgggcctgctggccggcgccaagtaccgcggcgagttcgaggagcggctgaaggccgtgctcaacgatatcgccaaggaagagggccagaccatcctcttcatcgacgagatccacaccatggtgggcgcgggcaaggccgagggcgcgatcgatgccggcaacatgctcaagccggcgctggcgcgcggcgagctgcactgcatcggcgcgaccacgctggatgagtaccgcaagtacatcgaaaaggatgccgcgctggagcgccgcttccagaaggtgttggtcgacgagccgagcgtggaggcgaccatcgccatcctgcgcggcctgcaggagaaatacgagctgcaccacggcgtggagatcaccgacccggcgatcgtggcggcggccgagctgagccatcgctacatcaccgaccgcttcctgcccgacaaggccatcgacctgatcgacgaggcggccgcgcgcatcaagatggaaatcgactcgaaacccgaggcgatggacaagctcgaccgccggctgatccagctgaagatcgagcgcgaggcggtgaagaaggaaaccgacgaggcgtcgcagaagcggctggagctgatcgagcaggaaatcgagcggctgcagaaggagtacgccgacctcgaagagatctggaaggccgagaagggcgcggcgcagggcgcggcggcggtgaaggaagagatcgaccgggtcaagctggagatcgcccggctgcagcgcgagggcaagctcgacaaggtggccgagctgcagtacggcaggctgcccgagctggaaggcaagctgaaggccgccaccgcggcggaagccagcggccagaggccgcccaacaagctgctgcgcacgcaggtgggcgccgaagagattgccgaggtggtcagccgcgccacgggcatccccgtgtcgaagatgatgcagggcgagcgcgacaagctgctgcgcatggaagaccgcctgcacgagcgcgtggtcggccaggacgaggcggtgcggctggtgtcggacgccatccggcgctcgcgcgcgggcatcgcggacgagaacaagccttacggctcgttcctgttcctgggcccgacgggcgtgggcaagaccgaactgtgcaaggcgctggccggcttcctgttcgactcggaggagcacctgatccgcatcgacatgagtgagttcatggagaagcattcggtgagccgcctgatcggcgcgccgccgggctacgtcggctacgaggagggcggctacctgaccgaggccgtgcgccgcaagccgtacagcgtggtgctgctggacgaggtcgagaaggcgcatccggatgtgttcaacatcctgctgcaggtgctggacgacggccgcctgaccgatggccagggccgcacggtggacttcaagaacacggtgatcgtgatgacgtccaacctgggctcgcagctgatccagcagatggcgtccgagtcgcccgatgtgatcaaaggtgcggtgtggcaggaggtgaagacgcatttccggcccgagttcctgaaccgcatcgacgaggtggtggtgttccacgcgctcgaccagggccacatcgagtcgatcgcgcgcatccagctgcagcggctggcggcccgcctggcgcacatggacctgacgctggagatcagcgacccggcggtcgccaagctggcctcggcggggtacgacccggtgttcggcgcgcggccgctcaagcgcgcgatccagcagcagatcgagaacccggtcgcgcggatgatcctggaaggccggttcacgccgaaggacgtggtgccggtggattaccacgacggccacttcaccttcgatcgtgtcgtgcgctga

SEQ ID NO: 7404 - protein, 862 aa, Ralstonia solanacearum
MRLDKLTTRFQEALADAQSLALGNDNPYIEPLHLLLAMLRQPDGATKNLLARAGVNAKGLEIALDNAIKRLPQVQGGEQVQVGRDLGSLLQATEKEGIKRGDQFIASELFLLAVADDKGEAGRVAREHGLARRALEAAIDAVRGGQTVGSAEAESQREALKKYTIDLTEQARIGKLDPVIGRDDEIRRAIQILQRRTKNNPVLIGEPGVGKTAIVEGLAQRIINGEVPESLKNKRVLVLDMAGLLAGAKYRGEFEERLKAVLNDIAKEEGQTILFIDEIHTMVGAGKAEGAIDAGNMLKPALARGELHCIGATTLDEYRKYIEKDAALERRFQKVLVDEPSVEATIAILRGLQEKYELHHGVEITDPAIVAAAELSHRYITDRFLPDKAIDLIDEAAARIKMEIDSKPEAMDKLDRRLIQLKIEREAVKKETDEASQKRLELIEQEIERLQKEYADLEEIWKAEKGAAQGAAAVKEEIDRVKLEIARLQREGKLDKVAELQYGRLPELEGKLKAATAAEASGQRPPNKLLRTQVGAEEIAEVVSRATGIPVSKMMQGERDKLLRMEDRLHERVVGQDEAVRLVSDAIRRSRAGIADENKPYGSFLFLGPTGVGKTELCKALAGFLFDSEEHLIRIDMSEFMEKHSVSRLIGAPPGYVGYEEGGYLTEAVRRKPYSVVLLDEVEKAHPDVFNILLQVLDDGRLTDGQGRTVDFKNTVIVMTSNLGSQLIQQMASESPDVIKGAVWQEVKTHFRPEFLNRIDEVVVFHALDQGHIESIARIQLQRLAARLAHMDLTLEISDPAVAKLASAGYDPVFGARPLKRAIQQQIENPVARMILEGRFTPKDVVPVDYHDGHFTFDRVVR

SEQ ID NO: 7405 - DNA, 2607 bp, Rhizobium loti
  CDS (1)..(2607): transl_table=11
atgaaccttgagaagtactccgagcgcgtgcgcggcttcatccagtccgcgcagacgatggcgctctcccgtaatcaccagcaattcacccccgaacacattttgaaggtgctcgtcgacgatgacgagggcctggccgcctcgctgatcgagcgcgccggcggcaatgtccgtgacgtcaagctcggcgtcgagacggcactcgaggcaatgccaaaggtcgaaggcggcaacggccagctctatctggcgcagccgctggccaaggtgttctcgacggccgaagaactggccaagaaggccggtgacagcttcgtcacggtcgagcggctgctgcaggcgctcaccatggagaagtcggcaaagaccgccgacatcctggccaaggctggcgtcaccgcgcaggcgcttaaccaggtcatcaacgatgtccgcaagggccgcaccgccgattcggccagtgccgagcaaaactatgacgcgctgaagaagtacgcacgtgatctcacggctgatgcccgtgcgggcaagctggacccggtgatcggccgtgacgacgagatccgccgcaccatccaggtgctctcgcgccgaaccaagaacaatccggtgctgatcggcgagccaggcgtcggcaagacggcgatcgccgaaggcctggcgctgcgcatcgtcaatggcgacgtgccggaatcgctgaaggacaagcaactgatggcgctcgacatgggcgcgctgatcgccggcgccaaatatcgcggcgaattcgaggagcggctgaaggctgtgctctccgaagtgacctcggccaatggcaacatcatcctgttcatcgacgagatgcacacgctggtcggcgccggcaaggcggatggcgcgatggatgcgtcgaacctgttgaagccggcgctggcgcgcggtgaactgcactgcgtcggcgcgaccacgctcgatgaataccgcaaacatgtcgagaaggatccggcactggcacgccgcttccagcccgtcttcgtcgacgagccgacggttgaggacaccgtctccatcctgcgcggcttgaaggaaaaatacgagcagcaccacaaggtgcgtatctcggactcggcgctggtggcggcggcaacgctgtccaaccgctatatcgccgaccgcttcctgccggacaaggcgatcgacctggtcgacgaagccgcttcgcggctcaggatgcaggtcgattccaagcccgaggcgctggatgagatcgaccgccgcatcatgcagctcaagatcgagcgcgaggcgctgaaggtcgagacggacgatgcctcgaaggaccggctcgtccgcctggagaaggagcttgtcggccttgaggaggaatcgaccgagatcaccgccaagtggcaggccgagaagcagaagctcgggcttgcggccgacttgaagaagcagctcgacgaggcacgcaacgagctcgccattgcccagcgcaagggcgagttccagcgcgccggcgagctcgcctatggcaagatcccggaactggaaaagaagctgaaggaagccgaagcccaggacggcaaggccggcatggtcgaggaagtggtcacccccgaccacgtcgcccatatcgtctcgcgctggaccggcattccagtcgacaagatgctgcagggcgagcgcgacaagttgctgcgcatggaagacgagatcggcaagcgggttgttggccagggcgaggcggtgcaggccgtttccaaggcggtgcggcgcgcccgtgccggcctgcaggatccgaaccggccgatcggctcgttcatcttcctggggccgacgggcgtcggcaagaccgaactgaccaaggcgctggcaagcttcctgttcgacgacgacagcgccatggtgcgcatcgacatgtcggagttcatggagaagcactcggtcgcccggctgatcggcgcgcctcccggctatgtcggctatgaggagggtggtgcgctgaccgaagcggtgcggcgccggccctatcaggtcgtgctgttcgacgaaatcgagaaggcgcatcccgatgtcttcaacgtgctcttgcaggtgctggacgacggccggctcaccgacgggcagggccgcacggtcgatttccgcaacacgctgatcatcatgacgtcgaacctcggcgccgaatatcttgtcaatctcggcgaagaccaggatgtcgatgccgtgcgcgacgaggtgatgggcgtggtcagggcatcgttccggccggaattcctcaaccgcgtcgacgaggtgatcctgttccaccggctgcgccgcaaggacatggaccgcatcgtcgagatccagttcaagcggctggaaagcctgctcgtcgatcgcaagatcacgctgtcgctggatcacgaggcaatcgagtggctggcggccaagggctacgacccggcctatggcgcgcggccgttgaagcgggtgatgcagaaggaactgcaggatccgctggcggagaagatcctgctcggcgagattctcgacggttcgaccgtcaaggtcacgtccggttccgaccggctgaacttccgctcgaagccgacggtcgtcgcgaccgaagcggcggcctga

SEQ ID NO: 7406 - protein, 868 aa, Rhizobium loti
MNLEKYSERVRGFIQSAQTMALSRNHQQFTPEHILKVLVDDDEGLAASLIERAGGNVRDVKLGVETALEAMPKVEGGNGQLYLAQPLAKVFSTAEELAKKAGDSFVTVERLLQALTMEKSAKTADILAKAGVTAQALNQVINDVRKGRTADSASAEQNYDALKKYARDLTADARAGKLDPVIGRDDEIRRTIQVLSRRTKNNPVLIGEPGVGKTAIAEGLALRIVNGDVPESLKDKQLMALDMGALIAGAKYRGEFEERLKAVLSEVTSANGNIILFIDEMHTLVGAGKADGAMDASNLLKPALARGELHCVGATTLDEYRKHVEKDPALARRFQPVFVDEPTVEDTVSILRGLKEKYEQHHKVRISDSALVAAATLSNRYIADRFLPDKAIDLVDEAASRLRMQVDSKPEALDEIDRRIMQLKIEREALKVETDDASKDRLVRLEKELVGLEEESTEITAKWQAEKQKLGLAADLKKQLDEARNELAIAQRKGEFQRAGELAYGKIPELEKKLKEAEAQDGKAGMVEEVVTPDHVAHIVSRWTGIPVDKMLQGERDKLLRMEDEIGKRVVGQGEAVQAVSKAVRRARAGLQDPNRPIGSFIFLGPTGVGKTELTKALASFLFDDDSAMVRIDMSEFMEKHSVARLIGAPPGYVGYEEGGALTEAVRRRPYQVVLFDEIEKAHPDVFNVLLQVLDDGRLTDGQGRTVDFRNTLIIMTSNLGAEYLVNLGEDQDVDAVRDEVMGVVRASFRPEFLNRVDEVILFHRLRRKDMDRIVEIQFKRLESLLVDRKITLSLDHEAIEWLAAKGYDPAYGARPLKRVMQKELQDPLAEKILLGEILDGSTVKVTSGSDRLNFRSKPTVVATEAAA

SEQ ID NO: 7407 - DNA, 2607 bp, Rhizobium meliloti
  CDS (1)..(2607): transl_table=11
atggatatcgaaaaatattcggaacgcgtccgcggtttcctgcagtcggcccagacctatgcgctggccgaagggcaccagcaatttacgccggagcacgttctcaaggtattgctcgacgacgatcagggcatggcggcttcgcttatcgagcgcgccggcggcaatgcgcgggaagccaaggtcggtacggccgcagctttggcgaagcttccgaaggtgaccggcggcaacggctcggtctatctgtcgcagccgctcgccaaggttttcaccgcagccgaagatgcggccaagaaggccggcgacagcttcgtaaccgtcgaacgcctgctcctggcgctggcgatcgaaagctcggccgcgacggcgtcgatcctctccaaggccggcgtcacgccgacgaagctcaaccaggtcatcaacgaaatccgcaagggccgcaccgccgacagcgccaatgccgaacaaggcttcgattcgctcaagaaatatgcgcgcgatctgaccgccgaggcgagggaaggcaagctcgatccggtgatcggccgcgacgacgagattcgccgaacgatccaggtgctctcgcgccggacgaagaacaatcccgtgctgatcggcgagccgggcgtcggcaagaccgccatcgcggaaggcctggcgctcaggatcgtcaacggcgatgtgcctgaaagcctgaaggacaagcgcctgatggcgctcgacatgggcgcgctgatcgccggtgcgaagttccgcggtgaattcgaagagcggctcaaggccgtgctgaacgaagtgcgctcggaaggtggcgagatcatcctcttcatcgatgaaatgcacacactggtcggtgcaggcaaggcggacggggctatggatgcctcgaacctcctgaagcccgcgcttgcccgcggcgaactgcactgcgtcggcgcgacgacgctcgacgaataccgcaagcatgtcgagaaggacgcagcccttgcccgccggttccagccggtgatggtcgaggaaccgacggtcgaggatacgatctcgatcctgcgcggcctgaaggaaaaatacgagcagcaccacaaggtgcggatctccgattccgcgctggttgcggctgcggcactttccaaccgctacatcaccgatcgtttccttccggacaaggcgatcgacctcatggacgaggcagcctcgcgcctcaggatgcaggtcgattcgaagccggaagaactcgacgaactcgacaggcgcgtcattcaactgaagatcgaacgtgaggccttgaaaaaggagaccgacgtttcctccaaggatcgccttgccaagctcgaactcgatctgtcttcgctcgaagaggaggcagccgcattgacggcgcgctggcaggccgagaagcagaagctcgggcaggccgccgatctcaagaaacagctcgacgaagcgcgcaacgagctgcagatcgcacagcgcaagggcgaattccagcgggcaggggagcttgcctacggggtgatcccgaatctcgaaaaggaactggccgaagcggaaagccaggatggtgccagcgccaacccgatggtgcaggaggtcgtgacccctgacaacatcgcccatatcgtgtcacgctggaccggcattccggtcgacaagatgctggaaggcgagcgcgacaagctgctcaggatggaagacgagctggcgaaatgggtcgtcggtcagggtgatgccgtgcaggctgtctcgcgggcggttcgccgttcgcgcgcagggcttcaggatccgaaccggccgatcggctccttcatcttcctgggtccgaccggcgtcggcaagacggagctcaccaaggcgcttgcccgcttcctcttcgacgacgaaaccgcgctgatgcggatcgacatgtccgagtacatggagaagcattcggtcgcccgcctgatcggcgcgcctcccggctatgtcggttacgaggagggtggggcgctgacggaatcggtccgccgccggccctatcaggtcgtgctgttcgacgagatcgagaaggcgcatccggatgtctttaacgtgcttctgcaggtgcttgacgatgggcgtctgaccgatggtcaggggcgcacggtcgacttcaagaacacgatgatcatcatgacctccaacctcggtgcggaatacctgaccgcactcggcgaaaacgaggacagcgatgcggttcgcgatcaggtcatggaagtggtgagagccgctttccgtccggaatttctgaaccgcgtcgacgagatcatactgttccaccggctgcgccgctcggaaatgggcgcgatcgtcgacattcagctcgaaaggctgcgcaagctcctctcggatcgcaagatcacgctcgagctcgaggacgatgcccgcgttttcctggcggacaggggctacgatccggcctacggcgctcgccccctgaagcgggcgatccagaaatacgttcaggacccgctggccgaaaaagtgctgcagggcgagttcccggatggctcggtgatcaaggtcgttgccggttccgaccgtctgaacttcaagcgcggggcaggggcgaacaaggaagccgcgtaa

SEQ ID NO: 7408 - protein, 868 aa, Rhizobium meliloti
MDIEKYSERVRGFLQSAQTYALAEGHQQFTPEHVLKVLLDDDQGMAASLIERAGGNAREAKVGTAAALAKLPKVTGGNGSVYLSQPLAKVFTAAEDAAKKAGDSFVTVERLLLALAIESSAATASILSKAGVTPTKLNQVINEIRKGRTADSANAEQGFDSLKKYARDLTAEAREGKLDPVIGRDDEIRRTIQVLSRRTKNNPVLIGEPGVGKTAIAEGLALRIVNGDVPESLKDKRLMALDMGALIAGAKFRGEFEERLKAVLNEVRSEGGEIILFIDEMHTLVGAGKADGAMDASNLLKPALARGELHCVGATTLDEYRKHVEKDAALARRFQPVMVEEPTVEDTISILRGLKEKYEQHHKVRISDSALVAAAALSNRYITDRFLPDKAIDLMDEAASRLRMQVDSKPEELDELDRRVIQLKIEREALKKETDVSSKDRLAKLELDLSSLEEEAAALTARWQAEKQKLGQAADLKKQLDEARNELQIAQRKGEFQRAGELAYGVIPNLEKELAEAESQDGASANPMVQEVVTPDNIAHIVSRWTGIPVDKMLEGERDKLLRMEDELAKWVVGQGDAVQAVSRAVRRSRAGLQDPNRPIGSFIFLGPTGVGKTELTKALARFLFDDETALMRIDMSEYMEKHSVARLIGAPPGYVGYEEGGALTESVRRRPYQVVLFDEIEKAHPDVFNVLLQVLDDGRLTDGQGRTVDFKNTMIIMTSNLGAEYLTALGENEDSDAVRDQVMEVVRAAFRPEFLNRVDEIILFHRLRRSEMGAIVDIQLERLRKLLSDRKITLELEDDARVFLADRGYDPAYGARPLKRAIQKYVQDPLAEKVLQGEFPDGSVIKVVAGSDRLNFKRGAGANKEAA

SEQ ID NO: 7409 - DNA, 2700 bp, Rhodopirellula baltica; identical to SEQ ID NO: 6787
  CDS (55)..(2700): transl_table=11

SEQ ID NO: 7410 - protein, 881 aa, Rhodopirellula baltica
MAFRIDKLTTQAQNVVAEAQAQATSAGNAEIDPLHVLSAAVNQRDGITTPLLEKINVDVPKLKSLLTSELEKLPHASGMGQARVSAKLQAALEASATSAESLKDEYVSTEHLLVGLARTDNKAKNLLSLLGVSDNDLLTAMSQIRGSARVTDPNAESTYQALEKFGIDLTQLAQSGKLDPVIGRDNEIRRVIQVLSRRTKNNPVLIGQPGVGKTAIAEGLALRIFEGDVPQSLKGKKVVSLDMGALVAGAKFRGDFEERLKSVLREVKDSDGKVILFIDELHLVVGAGNAEGSADAANLLKPELARGALRCIGATTLDEYRQHIEKDAALERRFQPVFVGEPNVEDTVAILRGLKPRYESHHGVRITDSALVAAANLSDRYIADRFLPDKAIDLIDEAASRLAMEKESVPEPIDRLQRRLRQLELVHRQLVDEQEASAVDKRVEVEEEMESAKAELASLKEQWETEKMGLDDVQSVRQEVDQLQHRFAQLDADAKEKQLRGESPEDAYSEMLQVQSRLRELQARIDEAEKHDDSADQTKEEPGDEKRRLLRKEVTEEEIAEVVSTWTGVPVTRMMETERAKLLVMEERLHQRVVGQDEAVTAVSDAVRRSRSGLQDPNRPIGSFLFLGPTGVGKTELCKALAEVMFDDESAMVRIDMSEFMERHSVSRLIGAPPGYVGYEEGGKLTEAVRRRPYAVILLDEMEKAHPDVFNVLLQVLDDGRLTDGQGRTVNFTNTVVVMTSNVGSQVIQRVTEEGGGEDEMRQAVEDALKARFLPEFLNRIDDTVIFHPLQQTQIRRIVQLQLEELRSRLAANGLSFEITDAAIDQIAEVGYDPAYGARPLKRVIQREVQNPLASAILKNSYAEGTTIKIDHDGDQFVFSG

SEQ ID NO: 7411 - DNA, 2640 bp, Rhodopseudomonas palustris
  CDS (1)..(2640): transl_table=11
atgaacgttgaaaaatataccgaacgtgtgcgcggcttcatccagtcagcgcaatcgctggcgatgcgcgagggccatcagcagttctcgccgctgcacattctgaaagttctgctcgacgattccgaagggctcgcgggtggtctgatcgaccgcgccggcggcaattcgcgtgcgatcctgaaggcgaccgaggaggcgctcggcaagatgccgaaggtgtccggctcgggcgccggccaagtctatctggccccggcgaccgcccgggcgttcgacgctgccgagaaggcggccgaaaaggcgggcgacagcttcgtcaccgtcgagcggctgcttctcgcgctgtcgctcgataaggacagcgaggccggtcagctgctcaccaagggcggcgtcaccccgcagaacctcaatgccgccatcaacgccctgcgcaagggccgtaccgcggattcggcgacggccgagaacgcctatgacgcgctgaagaaatacgcccgcgacctcacccaggcggcacgcgacggcaagctcgacccggtgatcggccgcgacgaggaaattcgccgcaccatccaggttctgtcgcggcgcaccaagaacaacccggtgctgatcggcgaacccggcgtcggtaagaccgcgatcgtcgaaggcttggcgctgcgcattctcaacggcgacgtgcccgagagcctgaaggacaagaagctgctggcgctcgacatgggcgcgctgattgcgggtgcgaagtatcgcggcgagttcgaagagcggctgaaggccgtgctcaacgaggtcaccgcggccgagggcggcatcatcctgttcatcgacgagatgcacaccctggtcggcgccggcaaggcggacggcgcgatggacgcgtcgaatctgctcaagcccgcgcttgcccgtggcgagctgcactgcatcggcgcgaccacgctcgatgaatatcgcaagcacgtcgagaaggacgccgcactggcgcggcgcttccagccggtgttcgtgtccgagccgacggtcgaggacaccgtctcgatcctgcgcggcctgaaggacaaatacgagcagcaccacggcgtgcgcatcgccgactcggcgctggtggcggccgtcacgctttccaaccgctacatcaccgaccgcttcctccccgacaaggcgatcgacctgatggacgaggccgcggcgcggctgaagatgcaggtcgactccaagcccgaagaactcgactcgatggaccgcgagatcgtgcggctgaagatcgagcaggaggcgttgaagaaggaaaccgatccgggctcgaaggcgcgcctggtgacgctggagaaggagcttgccgatctcgaagagaagtcggcggcgttgacccagcgttggagtgccgagaagaacaagctgtcggatgcccagaagctgaagagcgaactcgacgctctgcggattgaactcgccaacgcgcagcgccgcggtgagtatcagcgcgcgggcgagctcgcctatggccggattccggagcttgagaagaagatcgctgagatcgaagccaacgagaactcgggcgcgatggtggaggaggcggtcaccgccaatcacatcgcccaggtggtgtcgcgctggaccggcgtgccggtcgacaagatgctcgaaggcgagaaggaaaagctgctgcggatggaagagcagctcggccagcgcgtggtcgggcagttcgaagccgtgcatgcggtctcgaccgcggtccgccgtgctcgcgccggcctgcaggacccgaaccgtccgatgggctcgttcatgttcttaggccccaccggcgtcggcaagaccgagctgaccaaggcgctcgccgagtatctgttcgacgacgagaccgcgatggtccgcatcgacatgtcggagttcatggagaagcactccgtggcccggctgatcggcgcacctcccggctatgtcggctacgacgaaggcggtgtgctgaccgaagcggtgcggcgccggccctaccaggtgatcctgttcgacgagatcgagaaggcgcatccggacgtgttcaacgtgctgctgcaggtgctcgatgacggccgcctgaccgatggtcagggccgcaccgtggacttccgcaacacgctgatcgtgatgacctcgaacctcggctcggagtatctggtcaaccagcccgagggcgaggacaccggcgcggtgcgcgagcaggtgatggggatggtgcgggcgcacttccgccccgaattcctcaaccgcgtcgacgagatcatcctgttccaccgcttgcagaagagcgagatggggcggatcgtcgacatccagttcgcgcggctcaccaagctgctcgaggaccgcaagatcgtgctcgatctcgatgctgcggcccgcgactggctcgccgagaagggctgggatccggcttacggcgcccgtccgctgaagcgggtgatccagcgcagcgtccaggacccgctcgccgagatgatcctggaaggctctgtcaaggatggcgaccacgtcgcgatctcggccgagggcggcgtgctgaccttcaacggcaagccgccgcacaccgccgaggtcgagccgttcacgggccgtccgccgaagcggatgctgaactga

SEQ ID NO: 7412 - protein, 879 aa, Rhodopseudomonas palustris
MNVEKYTERVRGFIQSAQSLAMREGHQQFSPLHILKVLLDDSEGLAGGLIDRAGGNSRAILKATEEALGKMPKVSGSGAGQVYLAPATARAFDAAEKAAEKAGDSFVTVERLLLALSLDKDSEAGQLLTKGGVTPQNLNAAINALRKGRTADSATAENAYDALKKYARDLTQAARDGKLDPVIGRDEEIRRTIQVLSRRTKNNPVLIGEPGVGKTAIVEGLALRILNGDVPESLKDKKLLALDMGALIAGAKYRGEFEERLKAVLNEVTAAEGGIILFIDEMHTLVGAGKADGAMDASNLLKPALARGELHCIGATTLDEYRKHVEKDAALARRFQPVFVSEPTVEDTVSILRGLKDKYEQHHGVRIADSALVAAVTLSNRYITDRFLPDKAIDLMDEAAARLKMQVDSKPEELDSMDREIVRLKIEQEALKKETDPGSKARLVTLEKELADLEEKSAALTQRWSAEKNKLSDAQKLKSELDALRIELANAQRRGEYQRAGELAYGRIPELEKKIAEIEANENSGAMVEEAVTANHIAQVVSRWTGVPVDKMLEGEKEKLLRMEEQLGQRVVGQFEAVHAVSTAVRRARAGLQDPNRPMGSFMFLGPTGVGKTELTKALAEYLFDDETAMVRIDMSEFMEKHSVARLIGAPPGYVGYDEGGVLTEAVRRRPYQVILFDEIEKAHPDVFNVLLQVLDDGRLTDGQGRTVDFRNTLIVMTSNLGSEYLVNQPEGEDTGAVREQVMGMVRAHFRPEFLNRVDEIILFHRLQKSEMGRIVDIQFARLTKLLEDRKIVLDLDAAARDWLAEKGWDPAYGARPLKRVIQRSVQDPLAEMILEGSVKDGDHVAISAEGGVLTFNGKPPHTAEVEPFTGRPPKRMLN

SEQ ID NO: 7413 - DNA, 2574 bp, Rickettsia conorii
  CDS (1)..(2574): transl_table=11
atgaatattgataaatttactgcacatgctaaatcagtgatagctagtagccaattacttgctgctaaaaatgatcatcagcaaatattacctttgcatttattatctagtcttttaagtgaagaaacaggtataattcaaacccttattaataatactggcggtaatataaacttattaaaagatcaagttcagctagaactaaataaaatcccaaaagttcaggttgagggagggggacaagtttattcttctgctgaagctcttaaagttttagaaaaagctagtagcattgctaaagacaatggggatagctttgtaaccatagagcgtatatttgaagcattaacgtatgataatactatagccggtaaaattttaacgaataatggaattaataataaaaaaatagcaacagctattttacagtttcgtaaaggcaaaaaagcagataccgaatcggcagaaaatagttacgatgctttaaagaaatacggcagagacgtaacagagcttgccgaaagcggtaagcttgatccgataattggacgtgatgaagaaataagaagaacggtgcaggtactatcacgacgtatgaaaaataatcctgtattgattggagaacctggagtcggtaaaactgctataatagaggggcttgcacaacgaatatttagtaaggacgtacctgaatcgcttattaattgccgtattattgagcttgatatgggagctttaatagcgggagctaaatatcgaggcgaatttgaagaacgtcttaaagcagtgcttagcgaaatcaaagaatcaagcggtgaaattattttatttatcgatgaattgcatctattagtcggtacgggaaaaaccgacggtgctatggatgcctcgaatttactaaagccgatgcttgctcgtggtgagctgcattgtatcggtgctactactttagatgaatatcgtaaatatatcgagaaagatgcggcacttgctcgtcgttttcagcctgtttacgtgagtgagccgacggttgaggatactatatcaatacttagaggaattaaagaaaaatatgagctgcatcatgcagtgcgaatttccgatagtgcaatagttgcagcagcgacgttatcaaaccgttatattaccgatcgttatttacctgataaagctattgatttgattgatgaagcttgtagccgtatgaaaatagagctatcaagtaaaccagaagagcttgatgagctggaccgtcgtattattcagataaaaatagagcttgcagcacttaaaaaagaaaatgacgagcattctaaaaagaaaatagagcatttaactacagcattagaaaaattagagtctcaatcctatgatatgggagctaaatggcaagctgaaaagtctaaactacagcaaacacaaaagctcaaagaagaactagaccgtagccgaaacgagcttgaacgtgccgaacgtgatgctaatctcgctaaagctagtgagctaaaatacggaattatacctgagattatgaaaaagcttcaggaagccgaaagtatggataataaagggctgttaaaagaaattgtatcggaaagcgatatagcaagtattatctctcgtattactggtattccaattgatacgatgctatcaagtgaacgtgagcgtctgcttgtgatggagcagaaattacgagaatcggtaatagggcaggataaggcaattaaaggtgttagtgatgcggtaagaagatcacgtgcagggattcaagatattaaccgcccgcttggttcgttcttattcttaggaccgaccggagtcggtaaaaccgagcttaccaaagccttagctggttttctttttgatgaccgtaatgcaatacttcgtatagatatgtcagaatatatggagaagcacgctatttctcgcctgataggagctcctcccggctatatcggatatgatcaaggcggagtgttgacggaggcagtaagacgccgtccttatcaggtaatattatttgatgaggttgaaaaagcccatcccgacatatttaatattatgctgcaaatacttgatgagggaagattaacagatagtcaaggtataacggttgattttaagaatactataatagttttaacgtctaatttaggtgctgagatactcgttaatcagaaagaggacgaagatacatataaagtaaaggatgaggttatggaatatgtaaaagcagtatttaaacctgagtttttaaacagactagacgagattatattattccatcgcctaaatcgtaataatattcatgatatagttaagatacagcttgaaagtttaaagaaaattttactagcacaaaatattattcttgaatttgatgaatctgcattaaattatttagccgaaaaaggttatgatccaagctttggagcaagacccttaaaacgtcttatccagcgggaaatacaaaataatttagccaaaatgattttagcaggtgaaataagtagcggtaaaacggttaaaataaattcaaaggataaagaattgaaggtaacaatgagttga

SEQ ID NO: 7414 - protein, 857 aa, Rickettsia conorii
MNIDKFTAHAKSVIASSQLLAAKNDHQQILPLHLLSSLLSEETGIIQTLINNTGGNINLLKDQVQLELNKIPKVQVEGGGQVYSSAEALKVLEKASSIAKDNGDSFVTIERIFEALTYDNTIAGKILTNNGINNKKIATAILQFRKGKKADTESAENSYDALKKYGRDVTELAESGKLDPIIGRDEEIRRTVQVLSRRMKNNPVLIGEPGVGKTAIIEGLAQRIFSKDVPESLINCRIIELDMGALIAGAKYRGEFEERLKAVLSEIKESSGEIILFIDELHLLVGTGKTDGAMDASNLLKPMLARGELHCIGATTLDEYRKYIEKDAALARRFQPVYVSEPTVEDTISILRGIKEKYELHHAVRISDSAIVAAATLSNRYITDRYLPDKAIDLIDEACSRMKIELSSKPEELDELDRRIIQIKIELAALKKENDEHSKKKIEHLTTALEKLESQSYDMGAKWQAEKSKLQQTQKLKEELDRSRNELERAERDANLAKASELKYGIIPEIMKKLQEAESMDNKGLLKEIVSESDIASIISRITGIPIDTMLSSERERLLVMEQKLRESVIGQDKAIKGVSDAVRRSRAGIQDINRPLGSFLFLGPTGVGKTELTKALAGFLFDDRNAILRIDMSEYMEKHAISRLIGAPPGYIGYDQGGVLTEAVRRRPYQVILFDEVEKAHPDIFNIMLQILDEGRLTDSQGITVDFKNTIIVLTSNLGAEILVNQKEDEDTYKVKDEVMEYVKAVFKPEFLNRLDEIILFHRLNRNNIHDIVKIQLESLKKILLAQNIILEFDESALNYLAEKGYDPSFGARPLKRLIQREIQNNLAKMILAGEISSGKTVKINSKDKELKVTMS

SEQ ID NO: 7415 - DNA, 2577 bp, Rickettsia prowazekii
  CDS (1)..(2577): transl_table=11
atgaatattgataaatttactgcacatgctaaatcagttatagctaatcatcaatctcttgctattaaaaatgatcatcagcagatattacctttgcatttattatctagtcttttaagtgaagaaacaggtataattcaggccctgattaataatataggaggtaatataaacttattaaaagatcaagtgcagctagagttaaataaaataccaaaaattcaggttgatggaggtggccaaatttattattctgctgaagatctgaaagtattagaaaaatcgagtagtatcgctaaagatagcggggatagttttgtaacaatagagcgtatatttgaagcattaacttatgataatactatagccggtaaaattttaacgaataatgggattaatagtaaaaaactagccacagctattttacatcttcgtaaaggcaaaaaagcagatactgaatctgcagaaaataattatgatgctctaaagagatatggtagagatgtaacagagcttgctgaaaatggtaagcttgatccgattatcgggcgtgatgaagaaataagaagagcagtgcaggtgttatcacgacgtatgaaaaacaatcctgtattgataggtgcgccaggagttggtaaaactgctataatagaggggcttgcacaacgtatatttagtaaggatgtacctgaaacacttattaactgtcgtattattgagcttgatataggagcattaatagcaggtgctcaatatcgaggtgaatttgaaaaacgtcttaaagcagtgcttagtgaaattaaagaatcaagtggtgaaattattttgtttatcgatgaattgcatctattagttggtactggaaaagttgatggtgctatggatgcctcaaatttattaaaacctatgcttgcccgtggtgagttacactgtataggtgctactactttagatgaatatcgtaaatatatagagaaagatgctgcgcttgctcgtcgtttccaacctgtttatgtaggtgagcctagtgtagaagatacgatatcaatactaagaggaattaaagaaaaatatgagcttcatcatgctgtgcgaatttctgatagtgcaatagttgctgcagcgacgttatcgaatcgttatattaccgatcgttatttacctgataaagctattgatttgattgatgaagcttgtagtcgtatgaaaattgaattgtcaagtaaacctgaagagcttgacgagttagatcgtcgtattattcagataaagattgagcttgcagcgcttaaaaaggaaaatgatgaacattctaaaaagaaaattactagtttaaccgaggaactcaaaaagttagaatctaaatcatatgatatgaatactaaatggcaggcggaaaaatctaaactacagcaggctcagaaacttaaagaagaattagaacaagctagaatcgatttagaacgggctgagcgtgatgctaatctcgctaaagcgagtgagttaaaatacggaatcatacctgagattatgaataagcttcaggaagctgaaaatatggataataaagggctgttaaaagaaattgtatcggaaagcgatatagcaagtattatctcacgtattactggtattccaattgatacgatgctatcgagtgagcgtgagcgtttgcttgtgattgagcagaagctgtgtgaatcagttataggacaggatgaagcaattaaaggtgtaagtgatgcggttagaagatcacgttcagggattcaagatattaatcgtcctcttggttcattcttattcttaggacctactggtgtgggtaaaactgagcttactaaagcgttagctggctttttattcgatgaccgtaatgctctactccgtatagatatgtcagaatatatggagaagcattctatttctcgtctgataggagcaccaccaggttatatcggatatgatcaaggtggagtgttaacagaatcagtaagacgccgtccttatcaagtaatattatttgatgaagttgaaaaagcacatctagatatatttaatattatgttacaaatacttgatgaaggaagattaacagatagtcaaggtataacggttgattttaaaaatactattatagtcttaacatctaatttaggtgctgagatactagttaatcagaaagagggtgaagatacatataaagtaagggatgaggttatgcaatatgtgagagcagtattcaaaccagaatttctaaataggttagatgaaattatattatttcatcgcctaaatcgtaataatattcatgatatagttaagatccagcttggaagcttaaagaaaattttgttacaacagaatattattcttgaatttgatgaatctgctttaaattatttagctgaaaaaggttatgatccaagttttggtgcaagacctttaaaacgtcttattcagagagaaatacaaaataatttagccaagatgattttggcaggtgaaataagtagtggtaatacagtaaaaatacgtagagaaaaggaagagctaagtatcaatataattgattaa

SEQ ID NO: 7416 - protein, 858 aa, Rickettsia prowazekii
MNIDKFTAHAKSVIANHQSLAIKNDHQQILPLHLLSSLLSEETGIIQALINNIGGNINLLKDQVQLELNKIPKIQVDGGGQIYYSAEDLKVLEKSSSIAKDSGDSFVTIERIFEALTYDNTIAGKILTNNGINSKKLATAILHLRKGKKADTESAENNYDALKRYGRDVTELAENGKLDPIIGRDEEIRRAVQVLSRRMKNNPVLIGAPGVGKTAIIEGLAQRIFSKDVPETLINCRIIELDIGALIAGAQYRGEFEKRLKAVLSEIKESSGEIILFIDELHLLVGTGKVDGAMDASNLLKPMLARGELHCIGATTLDEYRKYIEKDAALARRFQPVYVGEPSVEDTISILRGIKEKYELHHAVRISDSAIVAAATLSNRYITDRYLPDKAIDLIDEACSRMKIELSSKPEELDELDRRIIQIKIELAALKKENDEHSKKKITSLTEELKKLESKSYDMNTKWQAEKSKLQQAQKLKEELEQARIDLERAERDANLAKASELKYGIIPEIMNKLQEAENMDNKGLLKEIVSESDIASIISRITGIPIDTMLSSERERLLVIEQKLCESVIGQDEAIKGVSDAVRRSRSGIQDINRPLGSFLFLGPTGVGKTELTKALAGFLFDDRNALLRIDMSEYMEKHSISRLIGAPPGYIGYDQGGVLTESVRRRPYQVILFDEVEKAHLDIFNIMLQILDEGRLTDSQGITVDFKNTIIVLTSNLGAEILVNQKEGEDTYKVRDEVMQYVRAVFKPEFLNRLDEIILFHRLNRNNIHDIVKIQLGSLKKILLQQNIILEFDESALNYLAEKGYDPSFGARPLKRLIQREIQNNLAKMILAGEISSGNTVKIRREKEELSINIID

SEQ ID NO: 7417 - DNA, 2577 bp, Rickettsia typhi
  CDS (1)..(2577): transl_table=11
atgaatattgataaatttactgcacatgctaaatcagttatagctaatcatcaatctcttgctattaaaaatgatcatcagcagatattacctttgcatttattatctagtcttttaagtgaagaaacaggtataattcaagcccttattaataatataggaggtaatatacacttattaaaagatcaagtacagctagagttaaataaaataccaaaaattcaggttgatggaggtggacaaatttattattctgctgaagatcttaaagtattagaaaaatcacgtagtattgctaaagatagcggggatagttttgtaacaatagagcgtatatttgaagcattaacttatgataatactatagccggtaaaattttaacgaataatgggattaatagtaaaaaactagccgcagctattttacatcttcgtaaaggcaaaaaagcagatactgaatctgcagaaaatagttatgatgctctaaagagatatggtagagatgtaacagagcttgctaaaaatggtaagcttgatccgataatcgggcgtgatgaagaaataagaagagcagtgcaggtactatcacgacgtatgaaaaacaatcctgtattgataggtgcaccaggagttggtaaaactgctataatagaggggcttgcacaacgcatatttaataaggatgtgcctgaaacacttattaactgccgtattattgagcttgatataggagcattaatagcaggggctcaatatcgaggggaatttgaaaaacgtcttaagtcagtgcttagtgaaattaaagaatcaagcggtgaaattattttgtttattgatgaattgcatctattagttggtactggaaaagttgagggtgctatggatgcctcaaatttattaaaacctatgcttgcacgtggtgagttacactgtataggtgctactactttagacgaatatcgtaaatatatagagaaggatgctgcgcttgctcgtcgtttccaacctgtttatgtaggtgagcctagcgtagaagatacgatatcaatacttagaggaatcaaagaaaaatatgaacttcatcatgctgtgcgaatttctgatagtgcaatagttgcagcagcgacgttatcaaatcgttatattactgatcgttatttacctgataaagctattgatttaattgatgaagcttgtagtcgtatgaaaattgaattgtcaagtaaacctgaagaacttgacgagctagatcgtcgtattattcagataaagattgagcttgcagcacttaaaaaggaaaatgatgaacattctaaaaagaaaattactagtctaactgaagaactcaaacagttagactctaaatcatatgatatgaatactaaatggcaggcggcaaaatctaaactacagcaagcccagaaacttaaagaagaattagaacaagctagaattgatctagaccgtgctgagcgtgatgctaatctcgctaaggctagtgaattaaaatacggaattatacctgagattatgaacaaacttcaagcagctgaaaatatggataataaagggctgttaaaagaaattgtatcagaaagtgatatagcaagtattatctcgcgtattactggtattccaattgatacgatgctatcaagtgagcgtgagcgtttacttgtgattgagcagaaactgtctgaatcagtcataggacaggatgaggcaattaaaggtataagtgatgcagttagaagatcacgttcagggattcaagatattaatcgtccgcttggttcattcttattcttaggacctactggtgtaggtaaaactgagcttactaaagcgttagctggctttttattcgatgatcgtaatgctctacttcgtatagatatgtcagaatatatggagaaacattctatttctcgtctgataggagcgccaccaggttatataggatatgatcaaggtggggtgttaacggaatcagtaagacgccgcccttatcaagtaatattatttgatgaagttgaaaaagcacatctagacatatttaatattatgttacaaatacttgatgaaggaagattaacaaatagtcaaggtataacagttgattttaaaaatactattatagtattaacatctaatttaggtgctgagatactagttaatcagcaagaagatgaagatacatataaagtaaaggatgaggttatgcaatatgttagagcagtatttaaaccagaatttctaaataggttagatgaaattatattatttcatcggctaaatcgtaataatatttatgatatagtaaagatacagcttggaagcttaaagaaaattttgctacaacagaatattattcttgaatttaatgaatctgctttaaattatttagctgaaaaaggctatgatccaagttttggagcaagacctttaaaacgtcttatccagagagaaatacaaaataatctagccaagatgattttggcaggtaaaataagtagtggtaatacagtaaaaatagctagagaaaaggaagagctaaggatcgagataattgattaa

SEQ ID NO: 7418 - protein, 858 aa, Rickettsia typhi
MNIDKFTAHAKSVIANHQSLAIKNDHQQILPLHLLSSLLSEETGIIQALINNIGGNIHLLKDQVQLELNKIPKIQVDGGGQIYYSAEDLKVLEKSRSIAKDSGDSFVTIERIFEALTYDNTIAGKILTNNGINSKKLAAAILHLRKGKKADTESAENSYDALKRYGRDVTELAKNGKLDPIIGRDEEIRRAVQVLSRRMKNNPVLIGAPGVGKTAIIEGLAQRIFNKDVPETLINCRIIELDIGALIAGAQYRGEFEKRLKSVLSEIKESSGEIILFIDELHLLVGTGKVEGAMDASNLLKPMLARGELHCIGATTLDEYRKYIEKDAALARRFQPVYVGEPSVEDTISILRGIKEKYELHHAVRISDSAIVAAATLSNRYITDRYLPDKAIDLIDEACSRMKIELSSKPEELDELDRRIIQIKIELAALKKENDEHSKKKITSLTEELKQLDSKSYDMNTKWQAAKSKLQQAQKLKEELEQARIDLDRAERDANLAKASELKYGIIPEIMNKLQAAENMDNKGLLKEIVSESDIASIISRITGIPIDTMLSSERERLLVIEQKLSESVIGQDEAIKGISDAVRRSRSGIQDINRPLGSFLFLGPTGVGKTELTKALAGFLFDDRNALLRIDMSEYMEKHSISRLIGAPPGYIGYDQGGVLTESVRRRPYQVILFDEVEKAHLDIFNIMLQILDEGRLTNSQGITVDFKNTIIVLTSNLGAEILVNQQEDEDTYKVKDEVMQYVRAVFKPEFLNRLDEIILFHRLNRNNIYDIVKIQLGSLKKILLQQNIILEFNESALNYLAEKGYDPSFGARPLKRLIQREIQNNLAKMILAGKISSGNTVKIAREKEELRIEIID

SEQ ID NO: 7419 - DNA, 2574 bp, Salmonella typhi
  CDS (1)..(2574): transl_table=11
atgcgtctggatcgtcttactaacaaattccagcttgctcttgccgatgcccagtcgctcgcgctggggcacgacaaccaattcatcgaacctcttcatttaatgagcgccttgctgaaccaggaagggggatcgatacgtcctttattaacctccgccggcattaatgctggccagttgcgcactgctatcgatcaggcgctgagccgtttaccgcaggtggaaggcaccggcggcgacgtacagccttcttcggaactggtacgcgtactgaacctttgcgacaagctggcgcaaaaacggggggacaattttatttcgtcagagctgtttgttctggcggcgcttgagtctcgcggcacgttaaccgatctgctgaaatcagccggtgcgactacggccaatatcactcaggcaattgaacagatgcgcggaggtgaaagcgtgaacgatcaaggggctgaagaccaacgtcaggccttgaaaaaatataccgtcgatctgaccgagcgggctgaacaaggtaagcttgacccggtaattggtcgtgatgaagaaattcgccgtaccattcaggtattgcaacgtcgtactaaaaacaacccggtgttaatcggtgagccaggcgtaggtaaaaccgccattgttgaagggctggcgcaacgtattatcaacggtgaagtaccggaaggcctgaaaggccgtcgcgtgctggcgctggatatgggcgcgctggtggccggggcgaaatatcgcggcgaatttgaagagcgtctgaaaggcgtgctgaacgacctcgcaaaacaggaaggcaacgtcatcctgtttatcgacgagctgcacaccatggttggcgcaggtaaagctgatggcgccatggatgccggtaacatgctgaaaccggcgctggcacgtggggaactgcactgtgtgggcgccaccacgctggacgaatatcgtcagtacatcgaaaaagacgcggcgctggaacgtcgattccagaaagtgttcgtggcagagccgtcggtggaagacaccattgcgattttgcgtggtctgaaagagcgttatgaactgcatcaccatgtgcagatcactgacccggcgattgtggcggcggcaacattatctcaccgctatatcgccgaccgtcagttaccggataaagctatcgacctcatcgatgaagcggcatccagcattcgtatgcagattgactcgaagccggaggagctggacaggctcgaccgccgcattattcagctcaaactggaacagcaggcgttgatgaaagagtctgacgaggcgagtaaaaaacgtctcgatatgctgaatgaagaactggacgataaagagcgtcagtactctgagttagaagaagagtggaaagcggaaaaagcgtcgctctctggtacgcaaactattaaagcggagctggagcaggcgaagatcgccatcgagcaggcgcgtcgcgttggcgacctcgcgcgaatgtctgaactgcagtacggcaaaattccggagctggaaaaacagctggaagccgcgacccagtcggaaggtaaaaccatgcgtctgttacgtaacaaagtaacggatgcggaaattgccgaagtgctggcgcgctggaccggtattccggtttccagaatgctggaaggcgaacgtgaaaaactgttgcgtatggaacaagagttacacagccgtgtgatcgggcagaatgaagccgttgaagcagtatcgaacgccatacgccgtagccgcgcggggctgtccgatccgaaccgtccgattggttccttcctgttccttgggccgaccggggtcggtaaaaccgaactgtgtaaagcgctggctaactttatgttcgacagcgacgacgcgatggtgcgtatcgacatgtctgagtttatggagaaacactccgtgtctcgtttggtcggggcgcctccaggatatgtcggctatgaagaaggcggttatttgacggaagcggtgcgccgtcgcccttattccgtcatcttgttggatgaagtggaaaaagcgcatccggatgtattcaacattctgttgcaggtgctggacgacggtcgactgactgacgggcaggggagaacggtcgacttccgtaatacggtggtcattatgacttctaacctcggttccgatctcattcaggagcgctttggcgaactggattacggtcgaatgaaagagatggtgctgggtgtggttagccaaaacttccgtccggaatttatcaaccgtattgatgaagttgtggtattccatccgttaggtgagcaacacatcgcttctattgctcagatccagctgcagcgtctgtacaaacgtctggaagaacgtggttatgaaatccatatctccgacgaggcgctgaaactgttgagcgccaacggttacgatccggtctacggggcgcgtccgttaaaacgtgctattcaacagcagatcgaaaacccactggcgcagcaaatcctgtctggtgaactggttcctggcaaagtgattcgccttgaagccaatgatgatcgtattgtggcagtgcagtaa

SEQ ID NO: 7420 - protein, 857 aa, Salmonella typhi
MRLDRLTNKFQLALADAQSLALGHDNQFIEPLHLMSALLNQEGGSIRPLLTSAGINAGQLRTAIDQALSRLPQVEGTGGDVQPSSELVRVLNLCDKLAQKRGDNFISSELFVLAALESRGTLTDLLKSAGATTANITQAIEQMRGGESVNDQGAEDQRQALKKYTVDLTERAEQGKLDPVIGRDEEIRRTIQVLQRRTKNNPVLIGEPGVGKTAIVEGLAQRIINGEVPEGLKGRRVLALDMGALVAGAKYRGEFEERLKGVLNDLAKQEGNVILFIDELHTMVGAGKADGAMDAGNMLKPALARGELHCVGATTLDEYRQYIEKDAALERRFQKVFVAEPSVEDTIAILRGLKERYELHHHVQITDPAIVAAATLSHRYIADRQLPDKAIDLIDEAASSIRMQIDSKPEELDRLDRRIIQLKLEQQALMKESDEASKKRLDMLNEELDDKERQYSELEEEWKAEKASLSGTQTIKAELEQAKIAIEQARRVGDLARMSELQYGKIPELEKQLEAATQSEGKTMRLLRNKVTDAEIAEVLARWTGIPVSRMLEGEREKLLRMEQELHSRVIGQNEAVEAVSNAIRRSRAGLSDPNRPIGSFLFLGPTGVGKTELCKALANFMFDSDDAMVRIDMSEFMEKHSVSRLVGAPPGYVGYEEGGYLTEAVRRRPYSVILLDEVEKAHPDVFNILLQVLDDGRLTDGQGRTVDFRNTVVIMTSNLGSDLIQERFGELDYGRMKEMVLGVVSQNFRPEFINRIDEVVVFHPLGEQHIASIAQIQLQRLYKRLEERGYEIHISDEALKLLSANGYDPVYGARPLKRAIQQQIENPLAQQILSGELVPGKVIRLEANDDRIVAVQ

SEQ ID NO: 7421 - DNA, 2574 bp, Shewanella oneidensis
  CDS (1)..(2574): transl_table=11
atgcgactcgatcgtatgaccaataaatttcagcttgccatctcagatgcccagtcgttagctcttgggcgtgatcatcagtttatcgaaccgctacatttgatgatggcgctgctcaaccaggattctggttctatccatcctttattaacccaagctggtattcgggtgagtgcattgcgttcgcttttgagccaagagcttgagcgtcttccccaagttgaaggcactggcggcgatgtacagttatcccaagggttaattcgtttattaaacctttgcgataaattggcgcaaaagcgtaaagacaaatatatctccagcgaattgttcgttctcgcggcgcttgagggctgcgatgcactagcgcaatgcctcaaaaaatccggcgcgaccaaagagctgatggaacaaaccattgagcaagtgcgtggtgggcaaaaagtggatgatcccaatgcggaagatcaacgccaagcgctgaaaaagtttaccgtcgatcttactgaacgtgctgagcagggcaaactcgatcctgtgattggccgtgatgatgaaattcgtcgcacgattcaagtcttgcaacgtcgaactaaaaataaccctgtgcttattggtgagcctggggtgggtaaaacggccattgtcgaagggcttgctcagcggattgtgaacggtgaagtacctgaaggtattaaaaataaacgtgttttatccttagatatgggggcattaattgcgggcgctaaataccggggagagttcgaggagcgtttaaaagccgtgcttaacgagctggcgcaggaagaaggccaagtgatcctctttatcgacgagctacacactatggtgggcgcgggcaagggcgatggcgcaatggatgcgggcaatatgttaaaacctgctttggctcgtggcgatctccactgcgtaggggctactactctcgacgagtatcgccaatatattgaaaaagatgccgcccttgagcgtcgtttccaaaaagtattagtggatgagccaagcgttgaagacaccatcgcgattttgcgtggcttgaaagagcgttatgagctgcatcaccatgtggaaattaccgatccagcgattgtggcggcggcgacgatgtcgcaccgttatgtgtcggatcgtaaattacctgataaagccatcgatttaattgacgaagcggcatcgagcatccgtatgcagatggattccaagcctgaatccctcgacaggctcgaacgtcgtgctatccagctcaaactggaggagcaagcgttagccaaagaaaatgatgaggcgagtcgtcgaaggctagatcatttgcaagaggaattgcgtgacgttgaagctaaggcttctgagctgagcgaaatctggcgtaccgaaaaggctgcccttgctggtactcagcatattaaagccgatttggaacaagcgcggctggacttagaagtcgcgcgccgcgcaggtgatttaactcgtatgtctgaattgcaatatggccgcattccagagcttgaaaagcagctggatttagcatcgcaagctgaaatgcaggatatgaccctgctgcgtaataaagtcaccgacttagaaattgccgaagtattgtctaaggcaacgggtattcctgtgtctaagatgctcgaaggcgagcgtgaaaaactgttgcagatggaagtggcattacatgagcgtgtgattggccaaaatgaagctgtagatgcggtcgccaatgcgattcgtcgcagccgagctgggcttgccgatccaaatcgcccgattggttcgttcctgtttttaggaccaactggtgtgggtaaaactgagctgtgtaagtcgttagctagattcttatttgatagtgaatcagccttagtgcgcatcgacatgtccgagtttatggaaaaacatgcagtttcacgtttggttggtgctcctcctggatatgttggttatgaagagggcggttacttaactgaagcagttcgtcgtaagccttattcagtgattttgctcgatgaggtggaaaaggcgcaccctgacgtgttcaacattttgctgcaagtattggatgatggccgcttaaccgatggtcaaggtcgcactgtcgactttagaaatacggtgatcatcatgacctcgaacttaggttccgacattatccaagaaggattcggccatttaagttacagcgaaatgaagagcgcggtgatgaatgtggtgacccatagctttagacccgagttcttaaaccggatcgatgagtctgtggtattccatcccttggatgcagaaaatatcaagcatattgcttctatccaaattgcttcattgcgtaagcgtttggcagagaaagactataccctggagatcaccgacgaggcattatcgttgatcgcagaaattggtttcgaccctgtctatggtgcaagaccactaaaacgagccttgcaacaagagatggaaaatccgctagcgcaaaaactactgcgtggtgatttgctacccggcaaacctatcaaggtcagctgtgtggatggtgaactggtatttgagcaataa

SEQ ID NO: 7422 - protein, 857 aa, Shewanella oneidensis
MRLDRMTNKFQLAISDAQSLALGRDHQFIEPLHLMMALLNQDSGSIHPLLTQAGIRVSALRSLLSQELERLPQVEGTGGDVQLSQGLIRLLNLCDKLAQKRKDKYISSELFVLAALEGCDALAQCLKKSGATKELMEQTIEQVRGGQKVDDPNAEDQRQALKKFTVDLTERAEQGKLDPVIGRDDEIRRTIQVLQRRTKNNPVLIGEPGVGKTAIVEGLAQRIVNGEVPEGIKNKRVLSLDMGALIAGAKYRGEFEERLKAVLNELAQEEGQVILFIDELHTMVGAGKGDGAMDAGNMLKPALARGDLHCVGATTLDEYRQYIEKDAALERRFQKVLVDEPSVEDTIAILRGLKERYELHHHVEITDPAIVAAATMSHRYVSDRKLPDKAIDLIDEAASSIRMQMDSKPESLDRLERRAIQLKLEEQALAKENDEASRRRLDHLQEELRDVEAKASELSEIWRTEKAALAGTQHIKADLEQARLDLEVARRAGDLTRMSELQYGRIPELEKQLDLASQAEMQDMTLLRNKVTDLEIAEVLSKATGIPVSKMLEGEREKLLQMEVALHERVIGQNEAVDAVANAIRRSRAGLADPNRPIGSFLFLGPTGVGKTELCKSLARFLFDSESALVRIDMSEFMEKHAVSRLVGAPPGYVGYEEGGYLTEAVRRKPYSVILLDEVEKAHPDVFNILLQVLDDGRLTDGQGRTVDFRNTVIIMTSNLGSDIIQEGFGHLSYSEMKSAVMNVVTHSFRPEFLNRIDESVVFHPLDAENIKHIASIQIASLRKRLAEKDYTLEITDEALSLIAEIGFDPVYGARPLKRALQQEMENPLAQKLLRGDLLPGKPIKVSCVDGELVFEQ

SEQ ID NO: 7423 - DNA, 2574 bp, Shigella flexneri
  CDS (1)..(2574): transl_table=11
atgcgtctggatcgtcttactaataaattccagcttgctcttgccgatgcccaatcacttgcactcgggcacgacaaccaattcatcgaaccacttcatttaatgagcgccctgctgaatcaggaagggggttcggttagtcctttattaacatccgctggcataaatgctggccagttgcgcacagatatcaatcaggcattaaatcgtttaccgcaggttgaaggtactggtggtgatgtccagccatcacaggatctggtgcgcgttcttaatctttgcgacaagctggcgcaaaaacgtggtgataactttatctcgtcagaactgttcgttctggcggcacttgagtctcgcggcacgctggccgacatcctgaaagcaacaggggcgaccaccgccaacattactcaagcgattgaacaaatgcgtggaggtgaaagcgtgaacgatcaaggtgctgaagaccaacgtcaggctttgaaaaaatataccatcgaccttaccgaacgagccgaacagggcaaactcgatccggtgattggtcgtgatgaagaaattcgccgtaccattcaggtgctgcaacgtcgtactaaaaataacccggtactgattggtgaacccggcgtcggtaaaactgccatcgttgaaggtctggcgcagcgtattatcaacggcgaagtgccggaaggattgaaaggccgccgcgtactggcgctggatatgggcgcgctggtggctggggcgaaatatcgcggtgagtttgaagaacgtttaaaaggcgtgcttaacgatcttgccaaacaggaaggcaacgtcatcctgtttatcgacgaattacataccatggtcggcgcgggtaaagccgatggcgcaatggacgccggaaacatgctgaaaccggcgctggcgcgtggtgaattgcactgcgtaggtgccacgacgcttgacgaatatcgccagtacatcgaaaaagatgctgcgctggaacgtcgtttccagaaagtgtttgttgccgagccttctgttgaagataccattgcgattctgcgtggcctgaaagaacgttacgaattgcaccaccatgtgcaaattactgacccggcaattgttgcagcagcgacgttgtctcatcgctacattgctgaccgtcagctgccggataaagccatcgacctgatcgatgaagcagcatccagcattcgtatgcagattgactcaaaaccagaagaactcgaccgactcgatcgtcgtatcatccagctcaaactggaacaacaggcgttaatgaaagagtctgatgaagccagtaaaaaacgcctggatatgctcaacgaagaactgagcgacaaagaacgtcagtactccgagttagaagaagagtggaaagcagagaaggcatcgctttctggtacgcagaccattaaagcggaactggaacaggcgaaaatcgctattgaacaggctcgccgtgtgggggacctggcgcggatgtctgaactgcaatacggcaaaatcccggaactggaaaagcaactggaagccgcaacgcagctcgaaggcaaaactatgcgtctgttgcgtaataaagtgaccgatgccgaaattgctgaagtgctggcgcgttggacggggattccggtttctcgcatgatggaaagcgagcgcgaaaaactgctgcgtatggagcaagaactgcaccatcgcgtcattggtcagaacgaagcggttgatgcggtatctaacgctattcgccgtagccgtgcggggttggcggatccaaatcgcccgattggttcattcctgttcctcggcccaacgggtgtggggaaaactgagctttgtaaggcgctggcgaactttatgtttgatagcgacgaggcgatggtccgtatcgatatgtccgaatttatggagaaacactcggtgtctcgtctggttggtgcgcctccgggatatgtcggttatgaagaaggtggctacctgaccgaagctgtgcgtcgtcgtccgtattccgtcatcctgctggatgaagtggaaaaagcgcatccggatgtcttcaatattctgttgcaggtactggatgatgggcgtctgactgacgggcaggggagaacggtcgacttccgtaatacggttgtcattatgacctctaacctcggttccgatctgattcaggaacgcttcggtgaactggattatgcgcacatgaaagagctggtgctcggtgtggttagccataacttccgtccggaattcattaaccgtattgatgaagtggtggtcttccatccgctgggtgaacagcacattgcctcgattgcgcagattcagttgaaacgtctgtacaaacgtctggaagaacgtggttatgaaatccacatttctgacgaggcgctgaaactgctgagcgagaacggttacgatccagtctatggtgcacgtcctttgaaacgtgctatccagcagcagatcgaaaacccgctggcacagcaaatactgtctggtgaattggttccgggtaaagtgattcgcctggaagttaatgaagaccggattgtcgctgtccagtaa

SEQ ID NO: 7424 - protein, 857 aa, Shigella flexneri
MRLDRLTNKFQLALADAQSLALGHDNQFIEPLHLMSALLNQEGGSVSPLLTSAGINAGQLRTDINQALNRLPQVEGTGGDVQPSQDLVRVLNLCDKLAQKRGDNFISSELFVLAALESRGTLADILKATGATTANITQAIEQMRGGESVNDQGAEDQRQALKKYTIDLTERAEQGKLDPVIGRDEEIRRTIQVLQRRTKNNPVLIGEPGVGKTAIVEGLAQRIINGEVPEGLKGRRVLALDMGALVAGAKYRGEFEERLKGVLNDLAKQEGNVILFIDELHTMVGAGKADGAMDAGNMLKPALARGELHCVGATTLDEYRQYIEKDAALERRFQKVFVAEPSVEDTIAILRGLKERYELHHHVQITDPAIVAAATLSHRYIADRQLPDKAIDLIDEAASSIRMQIDSKPEELDRLDRRIIQLKLEQQALMKESDEASKKRLDMLNEELSDKERQYSELEEEWKAEKASLSGTQTIKAELEQAKIAIEQARRVGDLARMSELQYGKIPELEKQLEAATQLEGKTMRLLRNKVTDAEIAEVLARWTGIPVSRMMESEREKLLRMEQELHHRVIGQNEAVDAVSNAIRRSRAGLADPNRPIGSFLFLGPTGVGKTELCKALANFMFDSDEAMVRIDMSEFMEKHSVSRLVGAPPGYVGYEEGGYLTEAVRRRPYSVILLDEVEKAHPDVFNILLQVLDDGRLTDGQGRTVDFRNTVVIMTSNLGSDLIQERFGELDYAHMKELVLGVVSHNFRPEFINRIDEVVVFHPLGEQHIASIAQIQLKRLYKRLEERGYEIHISDEALKLLSENGYDPVYGARPLKRAIQQQIENPLAQQILSGELVPGKVIRLEVNEDRIVAVQ

SEQ ID NO: 7425 - DNA, 2610 bp, Staphylococcus aureus
  CDS (1)..(2610): transl_table=11
atggatataaataaaatgacatatgctgttcaaagtgctttacaacaagcagttgaactgagtcagcaacataaattacaaaatatagaaattgaggcaattttaagcgctgccttaaatgaaagtgaaagcttatataaaagtattttagaacgagcaaatattgaggtagatcaattaaacaaagcttatgaagacaaactaaacacgtatgcatctgtagaaggtgacaatatacaatatggtcaatatattagccaacaagcaaaccaattgataactaaggctgaatcatacatgaaagaatatgaagatgaatatatttcaatggagcatattttacgttcggcaatggacattgatcaaacaacaaaacattatataaataataaagtagaagttatcaaagaaattattaaaaaagtaagagggggaaatcacgtgacatcacaaaatccagaagttaattacgaagcattagctaaatatggccgcgacttagtagaagaagttagacaaggtaaaatggatcctgttataggaagagatgaagaaattcgaaatacgattcgtattttaagtcgtaaaactaaaaacaaccctgtgctcattggtgaaccaggtgttggtaaaactgcaattgttgaaggattagcgcaacgtatagttaagaaagatgtgccagaatcattattagataaaactgtttttgagttagatttaagcgcattagtagcgggcgctaaatatcgtggtgaatttgaagagagattaaaagcagtcctaaaagaagttaaagagtctgatggtagaattatattatttattgatgaaatccatatgcttgtaggtgctggtaaaacagatggtgccatggatgcaggcaacatgctaaaaccaatgttagcacgaggagagttacattgtattggtgcaacaactttaaatgaatatcgagaatatattgaaaaagattcggcattagagcgtcgtttccaaaaagtagcagttagtgagcctgatgttgaagatacaatttcaattttacgtggtttaaaagaacgatatgaagtgtatcatggtgtgcgtattcaagatagagccttagttgctgccgctgaattgtctgatcgttacatcactgatcgttttttaccagataaagcgattgatttagttgaccaagcatgtgcaacaattcgtacggaaatgggatcaaatccaactgaattggatcaagttaatagacgtgtcatgcaattagaaattgaagaaagcgcacttaaaaatgaatctgacaatgcgagcaaacagagattacaagaactacaagaagagcttgccaatgaaaaagagaaacaagcagcacttcaatctcgtgtagaatcagaaaaagaaaaaatagcaaatttacaagaaaaacgtgcgcaactagatgaaagtagacaagcgttggaagatgcacaaacaaataacaatttagaaaaagctgctgaactacaatatggaacaattcctcaattggaaaaagaacttagagaattagaggataatttccaagatgagcaaggtgaagatacagatcgaatgattcgtgaagttgtaacagacgaagaaattggcgatattgtcagccaatggacaggcataccagtttcaaaattagttgaaacagaacgtgaaaaattacttcacttaagtgacatcttgcataaacgtgttgtaggtcaagataaagcggttgacctggtttcagatgcagtagttagagcaagagcaggtattaaagatccaaacagacctattggtagtttcttattcctaggtccaactggagtaggtaaaactgaattagctaaatcattagctgcatcattatttgattctgaaaaacatatgattcgtattgatatgagtgaatatatggaaaaacatgcagtatcaagattgataggggcacctccaggatatattggacatgatgaagggggtcaattaactgaagcggttcgtcgtaatccatactcagttatcttattagatgaggttgaaaaagcgcatactgacgtctttaatgtattattgcaaattttagatgaaggccgtttaactgattctaaaggacgtagcgttgattttaaaaatactattattattatgacaagtaatattggatctcaagttttattagaaaacgtaaaagagactggtgaaattacagaatcaacagaaaaagctgttatgacaaatttaaatgcatatttcaaaccagaaattttgaatcgtatggatgacatcgtattatttaaacctctatctattgatgacatgagtatgattgtagacaaaatattaacgcaattaaatataagattattagaacagcgaatctcaattgaagtttctgatgatgctaaagcttggctaggtcaagaagcttatgaacctcaatacggtgcaagaccattaaaacgttttgtacaacgccaaattgaaacaccattagcacgtatgatgattaaagagggattcccagaaggtacaacgattaaagttaatttaaattcagacaataacttaacgtttaatgttgaaaaaattcatgaataa

SEQ ID NO: 7426 - protein, 869 aa, Staphylococcus aureus
MDINKMTYAVQSALQQAVELSQQHKLQNIEIEAILSAALNESESLYKSILERANIEVDQLNKAYEDKLNTYASVEGDNIQYGQYISQQANQLITKAESYMKEYEDEYISMEHILRSAMDIDQTTKHYINNKVEVIKEIIKKVRGGNHVTSQNPEVNYEALAKYGRDLVEEVRQGKMDPVIGRDEEIRNTIRILSRKTKNNPVLIGEPGVGKTAIVEGLAQRIVKKDVPESLLDKTVFELDLSALVAGAKYRGEFEERLKAVLKEVKESDGRIILFIDEIHMLVGAGKTDGAMDAGNMLKPMLARGELHCIGATTLNEYREYIEKDSALERRFQKVAVSEPDVEDTISILRGLKERYEVYHGVRIQDRALVAAAELSDRYITDRFLPDKAIDLVDQACATIRTEMGSNPTELDQVNRRVMQLEIEESALKNESDNASKQRLQELQEELANEKEKQAALQSRVESEKEKIANLQEKRAQLDESRQALEDAQTNNNLEKAAELQYGTIPQLEKELRELEDNFQDEQGEDTDRMIREVVTDEEIGDIVSQWTGIPVSKLVETEREKLLHLSDILHKRVVGQDKAVDLVSDAVVRARAGIKDPNRPIGSFLFLGPTGVGKTELAKSLAASLFDSEKHMIRIDMSEYMEKHAVSRLIGAPPGYIGHDEGGQLTEAVRRNPYSVILLDEVEKAHTDVFNVLLQILDEGRLTDSKGRSVDFKNTIIIMTSNIGSQVLLENVKETGEITESTEKAVMTNLNAYFKPEILNRMDDIVLFKPLSIDDMSMIVDKILTQLNIRLLEQRISIEVSDDAKAWLGQEAYEPQYGARPLKRFVQRQIETPLARMMIKEGFPEGTTIKVNLNSDNNLTFNVEKIHE

SEQ ID NO: 7427 - DNA, 2610 bp, Staphylococcus epidermidis
  CDS (1)..(2610): transl_table=11
ttggatattaatcaaatgacatatgctgtacaaggtgccttacaaaaagcagtcgcgtacagtaaagaatatgaattacaaaacattgaagttgaagcattgttaaaagctgcaatgaatgaaaatgatagtttatttaaaagtatattagaacgagcaaatattgatgttgatcaattaataaaagcatacgataatcaattaagtcattatccaactgtacaaggtgacaatgttcagtatggacagtatattagtgctaaaacaaatgaattattagacaaagccgagaaatatatgaagtcctatgaagatgagtttatttctatggagcatatattacgtgcagccatagatactgatgaaactactcaaaaatgggtcggcaataaagtagaagtgataaaagaaattataactaaagttagagggggaaatcatgtgacatctcaaaatccagaagtaaactatgaagctttagaaaaatatggtcgtgatcttgtagaagaagtacgtcaaggtaaaatggaccctgtcatcggtagagatgaagaaatacgtaatacaattcgtatattaagtcgaaaaacaaaaaataatccggttttaatcggtgaaccaggtgtaggtaaaactgcaattgttgaaggtttagcacaacgaattgtacgtaaagacgttccagaatcattactcgataaaacgattttcgagcttgatttaagtgccttagttgcaggtgcaaaatatagaggtgaatttgaagaacgtttaaaagcagtattgaaagaagtaaaagaatctgaaggtcgaatcatcttattcattgatgaaattcatatgttagtaggcgctggtaaaactgatggtgctatggacgcaggaaacatgttgaaaccaatgcttgcgcgtggtgaattgcattgtataggtgctacgacattaaatgaatatcgtgaatatattgaaaaagattcagcattagaacgtcgtttccaaaaagttggggtcagtgaacctgatgttgaggatacaatatcaattttacgtggtctaaaagaacgttatgaggtctaccatggtgtacgtatacaagaccgtgcacttgttgcagcggctgagctatctgatagatatattaccgatagatttttgccagataaagctatagatttagtcgaccaagcgtgtgcgacaatacgtacagaaatgggatcaaatccaacagagttagaccaagtaaatcgtcgagtaatgcaattagaaattgaagaaagtgccttgaaaaatgaatctgataacccaagtaaacatcgtttagaagagcttcaagaggaattatctaatgaaaaagaaaaacaatcctctttaaaatcacgtgttgaacaagaaaaagaaaaaattgctaaagtacaagaaaaacgtgctgaactagatagtagtcgtcaagctcttgaagatgcacaaacagaaggtaatcttgaaaaagcagcagaattacaatatggtacaattccgcaattagaaaaagaattgcaaaaatttgaggaagcctttcaagatgaaactggcgaagatagtgaaagaatgattcgtgaagtcgtttcagatgaagaaataggcgacatagttagtcaatggacaggtatacctgtatctaaacttgtggaaacagaaagagaaaagctattaagtttaagtgacatcttacacaaacgtgtagtaggtcaagataaagcagttgatttagtatcagacgcagtagttagagcacgtgctggaattaaagatccgaatagaccaatcggaagtttcttattcttaggacctactggagtaggtaaaactgaattagcaaaatcgcttgcttcatcacttttcgattctgaaaaacatatgattagaattgatatgagcgaatatatggaaaaacatgctgtatcacgtttaattggtgcacctccaggttatgtaggtcacgatgaaggtggtcaattaactgaagcagttagacgtaatccatactcagttattttgttagacgaagttgaaaaagcacatagcgatgtttttaatgtattacttcaaatactagatgaaggtcgtcttacggattctaaaggtagaagtgttgactttaaaaataccattatcatcatgactagtaatattggttcacaagtattacttgaaaatgtaaaagatgctggtgaaattagtgatgatacagagaaagcagttatggacagtctacatgcatacttcaaacctgaaatattaaatcgtatggatgacatcgtgttatttaaaccattatcagttaatgatatgagtatgattgtagataaaattttaacacaattaaatatgagattattagatcaacatatctcaattgaagtgacagaagaagcgaaaaaatggctaggtgaagaagcgtatgaaccacaatttggtgcaagaccattaaaacgctttgttcaacgacaaatagaaactccaattgcacgtatgatgattaaagaaagtctacctgaaggtacaataattaaagtagatttaaatgacaataaagaacttgattttaaggttgttaaacctacgtcttaa

SEQ ID NO: 7428 - protein, 869 aa, Staphylococcus epidermidis
MDINQMTYAVQGALQKAVAYSKEYELQNIEVEALLKAAMNENDSLFKSILERANIDVDQLIKAYDNQLSHYPTVQGDNVQYGQYISAKTNELLDKAEKYMKSYEDEFISMEHILRAAIDTDETTQKWVGNKVEVIKEIITKVRGGNHVTSQNPEVNYEALEKYGRDLVEEVRQGKMDPVIGRDEEIRNTIRILSRKTKNNPVLIGEPGVGKTAIVEGLAQRIVRKDVPESLLDKTIFELDLSALVAGAKYRGEFEERLKAVLKEVKESEGRIILFIDEIHMLVGAGKTDGAMDAGNMLKPMLARGELHCIGATTLNEYREYIEKDSALERRFQKVGVSEPDVEDTISILRGLKERYEVYHGVRIQDRALVAAAELSDRYITDRFLPDKAIDLVDQACATIRTEMGSNPTELDQVNRRVMQLEIEESALKNESDNPSKHRLEELQEELSNEKEKQSSLKSRVEQEKEKIAKVQEKRAELDSSRQALEDAQTEGNLEKAAELQYGTIPQLEKELQKFEEAFQDETGEDSERMIREVVSDEEIGDIVSQWTGIPVSKLVETEREKLLSLSDILHKRVVGQDKAVDLVSDAVVRARAGIKDPNRPIGSFLFLGPTGVGKTELAKSLASSLFDSEKHMIRIDMSEYMEKHAVSRLIGAPPGYVGHDEGGQLTEAVRRNPYSVILLDEVEKAHSDVFNVLLQILDEGRLTDSKGRSVDFKNTIIIMTSNIGSQVLLENVKDAGEISDDTEKAVMDSLHAYFKPEILNRMDDIVLFKPLSVNDMSMIVDKILTQLNMRLLDQHISIEVTEEAKKWLGEEAYEPQFGARPLKRFVQRQIETPIARMMIKESLPEGTIIKVDLNDNKELDFKVVKPTS

SEQ ID NO: 7429 - DNA, 2610 bp, Staphylococcus epidermidis
  CDS (1)..(2610): transl_table=11
ttggatattaatcaaatgacatatgctgtacaaggtgccttacaaaaagcagtcgcgtacagtaaagaatatgaattacaaaacattgaagttgaagcattgttaaaagctgcaatgaatgaaaatgatagtttatttaaaagtatattagaacgagcaaatattgatgttgatcaattaataaaagcatacgataatcaattaagtcattatccaactgtacaaggtgacaatgttcagtatggacagtatattagtgctaaaacaaatgaattattagacaaagccgagaaatatatgaagtcctatgaagatgagtttatttctatggagcatatattacgtgcagccatagatactgatgaaactactcaaaaatgggtcggcaataaagtagaagtgataaaagaaattataactaaagttagagggggaaatcatgtgacatctcaaaatccagaagtaaactatgaagctttagaaaaatatggtcgtgatcttgtagaagaagtacgtcaaggtaaaatggaccctgtcatcggtagagatgaagaaatacgtaatacaattcgtatattaagtcgaaaaacaaaaaataatccggttttaatcggtgaaccaggtgtaggtaaaactgcaattgttgaaggtttagcacaacgaattgtacgtaaagacgttccagaatcattactcgataaaacgattttcgagcttgatttaagtgccttagttgcaggtgcaaaatatagaggtgaatttgaagaacgtttaaaagcagtattgaaagaagtaaaagaatctgaaggtcgaatcatcttattcattgatgaaattcatatgttagtaggcgctggtaaaactgatggtgctatggacgcaggaaacatgttgaaaccaatgcttgcgcgtggtgaattgcattgtataggtgctacgacattaaatgaatatcgtgaatatattgaaaaagattcagcattagaacgtcgtttccaaaaagttggggtcagtgaacctgatgttgaggatacaatatcaattttacgtggtctaaaagaacgttatgaggtctaccatggtgtacgtatacaagaccgtgcacttgttgcagcggctgagctatctgatagatatattaccgatagatttttgccagataaagctatagatttagtcgaccaagcgtgtgcgacaatacgtacagaaatgggatcaaatccaacagagttagaccaagtaaatcgtcgagtaatgcaattagaaattgaagaaagtgccttgaaaaatgaatctgataacgcaagtaaacatcgtttagaagagcttcaagaggaattatctaatgaaaaagaaaaacaatcctctttaaaatcacgtgttgaacaagaaaaagaaaaaattgctaaagtacaagaaaaacgtgctgaactagatagtagtcgtcaagctcttgaagatgcacaaacagaaggtaatcttgaaaaagcagcagaattacaatatggtacaattccgcaattagaaaaagaattgcaagaatttgaggaagcctttcaagatgaaactggcgaagatagtgaaagaatgattcgtgaagtcgtttcagatgaagaaataggcgacatagttagtcaatggacaggtatacctgtatctaaacttgtggaaacagaaagagaaaagctattaagtttaagtgacatcttacacaaacgtgtagtaggtcaagataaagcagttgatttagtatcagacgcagtagttagagcacgtgctggaattaaagatccgaatagaccaatcggaagtttcttattcttaggacctactggagtaggtaaaactgaattagcaaaatcgcttgcttcatcacttttcgattctgaaaaacatatgattagaattgatatgagcgaatatatggaaaaacatgctgtatcacgtttaattggtgcacctccaggttatgtaggtcacgatgaaggtggtcaattaactgaagcagttagacgtaatccatactcagttattttgttagacgaagttgaaaaagcacatagcgatgtttttaatgtattacttcaaatactagatgaaggtcgtcttacggattctaaaggtagaagtgttgactttaaaaataccattatcatcatgactagtaatattggttcacaagtattacttgaaaatgtaaaagatgctggtgaaattagtgatgatacagagaaagcagttatggacagtctacatgcatacttcaaacctgaaatattaaatcgtatggatgacatcgtgttatttaaaccattatcagttaatgatatgagtatgattgtagataaaattttaacacaattaaatatgagattattagatcaacatatctcaattgaagtgacagaagaagcgaaaaaatggctaggtgaagaagcgtatgaaccacaatttggtgcaagaccattaaaacgctttgttcaacgacaaatagaaactccaattgcacgtatgatgattaaagaaagtctacctgaaggtacaataattaaagtagatttaaatgacaataaagaacttgattttaaggttgttaaacctacgtcttaa

SEQ ID NO: 7430 - protein, 869 aa, Staphylococcus epidermidis
MDINQMTYAVQGALQKAVAYSKEYELQNIEVEALLKAAMNENDSLFKSILERANIDVDQLIKAYDNQLSHYPTVQGDNVQYGQYISAKTNELLDKAEKYMKSYEDEFISMEHILRAAIDTDETTQKWVGNKVEVIKEIITKVRGGNHVTSQNPEVNYEALEKYGRDLVEEVRQGKMDPVIGRDEEIRNTIRILSRKTKNNPVLIGEPGVGKTAIVEGLAQRIVRKDVPESLLDKTIFELDLSALVAGAKYRGEFEERLKAVLKEVKESEGRIILFIDEIHMLVGAGKTDGAMDAGNMLKPMLARGELHCIGATTLNEYREYIEKDSALERRFQKVGVSEPDVEDTISILRGLKERYEVYHGVRIQDRALVAAAELSDRYITDRFLPDKAIDLVDQACATIRTEMGSNPTELDQVNRRVMQLEIEESALKNESDNASKHRLEELQEELSNEKEKQSSLKSRVEQEKEKIAKVQEKRAELDSSRQALEDAQTEGNLEKAAELQYGTIPQLEKELQEFEEAFQDETGEDSERMIREVVSDEEIGDIVSQWTGIPVSKLVETEREKLLSLSDILHKRVVGQDKAVDLVSDAVVRARAGIKDPNRPIGSFLFLGPTGVGKTELAKSLASSLFDSEKHMIRIDMSEYMEKHAVSRLIGAPPGYVGHDEGGQLTEAVRRNPYSVILLDEVEKAHSDVFNVLLQILDEGRLTDSKGRSVDFKNTIIIMTSNIGSQVLLENVKDAGEISDDTEKAVMDSLHAYFKPEILNRMDDIVLFKPLSVNDMSMIVDKILTQLNMRLLDQHISIEVTEEAKKWLGEEAYEPQFGARPLKRFVQRQIETPIARMMIKESLPEGTIIKVDLNDNKELDFKVVKPTS

SEQ ID NO: 7431 - DNA, 2574 bp, Streptomyces albus G
  CDS (1)..(2574): transl_table=11
gtggacgcagagctgaccaacaggagccgggacgcgctgaacgcggcgaccacccgggcggtttcggcgggcaacccggacctgaccccggcccacctgctcctggccctcctggaggggcaggacaacgagaacctggtcgacctcctggccgccgtcgagcggcgaccaggcggcgggtccgcgcgggcaccgagcgcgtccctcggctcgctccccggcgtcaccggctcgaccgtcgccccgccgcagcccaaccgggacctgctcgcggtcatcgccgacgccggccggcgcgccaaggacctgggcgacgagttcctctccaccgagcacctgctgatcggcatccggccaacggccaggccgccgaggtgctcaccgggcagggcgccgacgcccgagaagctgctggaggcattccagaacacacgaggaggacgccgggtgaccacgccccgacccgaggggcagtacaaggcgctggagaagttcggtacggacttcacggccgccgcccgtgagcggaagctcgacccggtcatcggccgggaccaggagatccgccgcgtcgtgcaggtgctctcgcggcgcaccaagaacaacccggtcctcatcggcgagcccggcgtcggcaagaccgccgtcgtggaggggctggcccagcgcatcgtcaagggcgacgtccccgagtcgctgaaggacaagcggctcgtctcgctcgacctcggcgcgatggtcgcgggcgccaagtaccgcggcgagttcgaggagcggctgaagacggtcctctccgagatcaaggagagcgacggccagatcgtcaccttcatcgacgagctgcacaccgtggtcggcgcgggcgcggcggactccgccatggacgcggggaacatgctcaagcccatgctggcccgcggcgagctgcgcatggtcggcgcgacgacgctcgacgagtaccgcgagcggatcgagaaggacccggcgctggagcgccgcttccagcaggtgctggtggccgagcccagcgtcgaggactccatcgcgatcctgcgcggcctcaagggccggtacgaggcgcaccacaaggtgcagatcgcggacagcgcgctggtggccgccgcgaccctctccgaccggtacatcacctcccggttcctgcccgacaaggccatcgacctggtcgacgaggcggcctcccggctgcgcatggagatcgactcctcgccgctggagatcgacgagctccagcgctcggtcgaccggctgaagatggaggagctggcgctcgaccgggagaccgacccggcctcccggcagcggctggagaagctccgccgcgacctcgccgaccgcgagaggagctgcgcggctcaccgcccgtgggagaaggagaagcagtccctcaaccgcgtcggcgagctgaaggagcgcctggacgaactgcgcggccaggccgaacgcgcccagcagcacggcgacttcgacaccgcctccaagctgctctacggcgagatccccaccctggagcgggacctgaggtggcgtccagccgaggaggaggccgccaaggacaccatggtcaaggaggaggtcggccccgacgacatcgcggacgtggtcggttcctggaccggcatcccggccgggcgcctgctggagggcgagacgcagaagctgctgcggatggaggccgagctgggccgccgcctgatcggccagagcgaggccgtccaggccgtctcggacgcggtgcgcacccgggccgggatcgccgacccggaccgcccgaccggctcgttcctcttcctcggcccgaccggcgtcggcaagaccgagctggccaaggcgctcgccgacttcctcttcgacgacgagcgggccatgatccgcatcgacatgagcgagtacggcgagaagcactcggtggcccgcctggtcggcgcgcctcccggctacgtcgggtacgaggagggcggccagctcaccgaggccgtgcggcgccgtccgtacagcgtggtgctgctggacgaggtggagaaggcgcaccccggagtcttcgacatcctgctccaggtgctggacgacgggcggctcaccgacgggcagggccggacggtcgacttccggaacaccatcctggtgctgaccagcaacctcggcagccagtacctggtcggctccgcgcccgaggaggagaagcggcggcaggtcatggaggtggtccgctcctccttcaagccggagttcctcaaccggctggacgacctggtgatcttctccgccctggacgaggacgagctggcccggatcgccgggctccagatcgccgggctggccaggcgcctcgccgaccgccgcctgagcctggacgtgacgcccgaggcgctggcctggctggccaaggaggggttcgacccggcgtacggcgcccggccgctgcgccgcctgatccagacggccatcggcgaccggctcgccaaggagatcctggccggcgaggtccgcgacggcgacacggtccgcgtcgaccgcgtcgaggacggcctcctcgtcggccgcgccgagggctga

SEQ ID NO: 7432 - protein, 857 aa, Streptomyces albus G
MDAELTNRSRDALNAATTRAVSAGNPDLTPAHLLLALLEGQDNENLVDLLAAVERRPGGGSARAPSASLGSLPGVTGSTVAPPQPNRDLLAVIADAGRRAKDLGDEFLSTEHLLIGIRPTARPPRCSPGRAPTPEKLLEAFQNTRGGRRVTTPRPEGQYKALEKFGTDFTAAARERKLDPVIGRDQEIRRVVQVLSRRTKNNPVLIGEPGVGKTAVVEGLAQRIVKGDVPESLKDKRLVSLDLGAMVAGAKYRGEFEERLKTVLSEIKESDGQIVTFIDELHTVVGAGAADSAMDAGNMLKPMLARGELRMVGATTLDEYRERIEKDPALERRFQQVLVAEPSVEDSIAILRGLKGRYEAHHKVQIADSALVAAATLSDRYITSRFLPDKAIDLVDEAASRLRMEIDSSPLEIDELQRSVDRLKMEELALDRETDPASRQRLEKLRRDLADRERSCAAHRPWEKEKQSLNRVGELKERLDELRGQAERAQQHGDFDTASKLLYGEIPTLERDLRWRPAEEEAAKDTMVKEEVGPDDIADVVGSWTGIPAGRLLEGETQKLLRMEAELGRRLIGQSEAVQAVSDAVRTRAGIADPDRPTGSFLFLGPTGVGKTELAKALADFLFDDERAMIRIDMSEYGEKHSVARLVGAPPGYVGYEEGGQLTEAVRRRPYSVVLLDEVEKAHPGVFDILLQVLDDGRLTDGQGRTVDFRNTILVLTSNLGSQYLVGSAPEEEKRRQVMEVVRSSFKPEFLNRLDDLVIFSALDEDELARIAGLQIAGLARRLADRRLSLDVTPEALAWLAKEGFDPAYGARPLRRLIQTAIGDRLAKEILAGEVRDGDTVRVDRVEDGLLVGRAEG

SEQ ID NO: 7433 - DNA, 2598 bp, Streptomyces coelicolor
  CDS (1)..(2598): transl_table=11
gtggacgccgagctgaccaaccggagccgggacgcgatcaacgcggccagcaaccgggccgtgaccgagggaaacgccgacctcacccccgcccacctgctcctcgccctgctccaggggcaggacaacgagaacatcaccgacctgctcgccgccgtcgaggccgacctcgccgccgtgcgcaccggcgccgagcgcatcgtcgccgggctgcccagcgtgaccgggtccaccgtcgcacccccgcaacccagccgtgagatgctcgccgtggtcgccgacgcccaggcacgcgccaaggaactcggggacgagtacctctccaccgagcacctgctcctcggcatcgccgcgaagggcggcgcggccggagaggtactggaggggcagggagccagtgcgaagaagctgcaggaggccttccgcaaggccaggggagggcgtcgcgtgaccaccgccgaccccgagggccagtacaaggccctggagaagttcggtaccgacctcaccgccgcagcccgggacgggaagctcgaccccgtcatcggacgggaccaggagatccggcgggtggtccaggtgctcagccggcggaccaagaacaaccccgtcctcatcggcgagcccggcgtcggcaagaccgccgtcgtcgaagggctcgcccagcggatcgtcaagggggacgtgcccgagtcgctgaaggacaagcggctggtcgcgctggacctcggcgccatggtcgccggggccaagtaccgcggtgagttcgaggagcggctgaagaccgtgctcgccgagatcaaggactccgacgggcaggtcgtcaccttcatcgacgagctgcacaccgtcgtgggcgccggcgccggcggggactccgccatggacgccgggaacatgctcaagcccatgctcgcgcgcggcgagctgcgcatggtgggcgccaccaccctcgacgagtaccgagagcggatcgagaaggaccccgccctggagcggcgcttccagcaggtgctggtcgccgagccgaccgtcgaggactccatcgccatcctgcgcggactcaagggacgctacgaggcccaccacaaggtgcagatcgcggacagcgcgctggtggccgccgcgagcctctccgaccggtacatcacctcgcgcttcctgcccgacaaggccatcgacctggtcgacgaggccgcctcccggctgcgcatggagatcgactcctctcccgtcgagatcgacgaactccagcgctccgtcgaccggctgaagatggaggagctggcgatcggcaaggagaccgacgccgcctccctggagcgcctggagcggctgcggcgcgacctcgccgacaaggaggaggagctgcgcggcctcaccgcccgctgggagaaggagaagcagtccctcaaccgggtcggcgagctgaaggagaagctcgacgaactgcgcgggcaggccgagcgcgcccagcgcgacggcgacttcgacaccgccagcaagctgctctacggcgagatcccggacctggaacgggacctggaggccgcctccgaggccgaggaagaggtcgcccgggacaccatggtcaaggaggaggtcggcgccgacgacatcgccgacgtcgtcgcctcctggaccggcatccccgccgggcgcctgctcgaaggggagacgcagaagctgctgcgcatggaggacgagctgggcaagcggctcatcggccagacccaggccgtgcgggccgtctccgacgccgtacggcgcagccgggccgggatcgccgacccggaccgcccgacgggttccttcctcttcctcggccccaccggcgtcggcaagaccgagctggccaaggcgctcgccgacttcctcttcgacgacgagcgggccatggtccgcatcgacatgtcggagtacagcgagaagcacagcgtggcccggctggtcggcgccccgcccgggtacgtcggctacgaggagggcggccagctcaccgaggccgtgcggcggcggccgtacaccgtcgtactgctcgacgaggtggagaaggcgcaccccgaggtcttcgacatcctgctccaggtgctggacgacggccggctcacggacggccagggccgcaccgtcgacttccgcaacaccatcctggtgctcacctccaacctgggcagccagtacctggtcgacccgacgaccggcgaggcggagaagaagcagcaggtcctggaggtggtccggtcctccttcaagccggagttcctcaaccggctcgacgacctggtggtcttctcggccctcagccaggaggagctgagccggatcgcacggctccagatcaacggcctggcccggcggctcgccgaacgccgcctcaccctggaggtcaccgacgaggccctcgcctggctggccgaggagggcaacgatccggcctacggcgcccgcccgctgcgccgcctcgtgcagaccgcgatcggcgaccggctcgcccgggagatcctctccggcgagatcaaggacggcgacacggtccgcgtggaccgcttcggcgacgagctgatcgtggggccggcgagcggcaagacgctgtag

SEQ ID NO: 7434 - protein, 865 aa, Streptomyces coelicolor
MDAELTNRSRDAINAASNRAVTEGNADLTPAHLLLALLQGQDNENITDLLAAVEADLAAVRTGAERIVAGLPSVTGSTVAPPQPSREMLAVVADAQARAKELGDEYLSTEHLLLGIAAKGGAAGEVLEGQGASAKKLQEAFRKARGGRRVTTADPEGQYKALEKFGTDLTAAARDGKLDPVIGRDQEIRRVVQVLSRRTKNNPVLIGEPGVGKTAVVEGLAQRIVKGDVPESLKDKRLVALDLGAMVAGAKYRGEFEERLKTVLAEIKDSDGQVVTFIDELHTVVGAGAGGDSAMDAGNMLKPMLARGELRMVGATTLDEYRERIEKDPALERRFQQVLVAEPTVEDSIAILRGLKGRYEAHHKVQIADSALVAAASLSDRYITSRFLPDKAIDLVDEAASRLRMEIDSSPVEIDELQRSVDRLKMEELAIGKETDAASLERLERLRRDLADKEEELRGLTARWEKEKQSLNRVGELKEKLDELRGQAERAQRDGDFDTASKLLYGEIPDLERDLEAASEAEEEVARDTMVKEEVGADDIADVVASWTGIPAGRLLEGETQKLLRMEDELGKRLIGQTQAVRAVSDAVRRSRAGIADPDRPTGSFLFLGPTGVGKTELAKALADFLFDDERAMVRIDMSEYSEKHSVARLVGAPPGYVGYEEGGQLTEAVRRRPYTVVLLDEVEKAHPEVFDILLQVLDDGRLTDGQGRTVDFRNTILVLTSNLGSQYLVDPTTGEAEKKQQVLEVVRSSFKPEFLNRLDDLVVFSALSQEELSRIARLQINGLARRLAERRLTLEVTDEALAWLAEEGNDPAYGARPLRRLVQTAIGDRLAREILSGEIKDGDTVRVDRFGDELIVGPASGKTL

SEQ ID NO: 7435 - DNA, 2583 bp, Streptococcus mutans
  CDS (1)..(2583): transl_table=11
atgatcgataaaatgactcagttagttgaagattctttagaagaagcaaaggaattggctattgctcatcgtaattatcagctggacattccccatttatgggctgtcttggtaaaacctgatcaatttgcttttcaattctatcaatctttagaaataaataccaatcagctgattgagattatcaataaagaaatagataaaatcccagtcctttcaagtacagaaaaaagcagttatgcacgtttatacagtcagcgtttaaaaaatttattggatgacgcgcatcaggaaatgattgatttaaaggatcaggtgctgactgtagaacacttgatcttggcactttttaaccaacaacgcaatcccattactgtttttttgcttgaacagggtctaaacaaagaaaaactttatcaaaagatgcataggattcgtaaagggaaacctgctatttcttccagtcaagaaactatttatgatgctttagaaaagtatgctgtcaacttaaatcagcgtgctttagatgaacctgttaataaaattattggtcgtcaggatgaaatgaatgatattattcgtattttatcgcgtaagaataagaataatgccgttttggttggtcattcaggtgttggaaaaacagccattattgaaggatttgttcagcggttagttaaaaatcaagttccgaaaaatttgcaaggtaaggtcatttacagtcttgacataggagccttgctggcaggaactaaataccgcggtgaatttgaagaacgttttaaagctcttctcaatgatattatagactcaaacggtcagattattcttttcatagatgaaattcattctattgtcagtgcaggacggacagagggttctgttgatgcggccagtattttgaagccgcttttggctagaggaaaaattagaattattggttccactacccatgcagaataccgtgaaagtattgaatacgatagggcgttagaaagacgttttcaaaggatcttagttcatgaaccagatcttgattataccatggaaattcttaaaggtctcaagcccatttatgaaaattttcatggtgtcagacttgaagaagatggcttggaagctgccgcaagcttgtccaagcgttatatttctgatcgctttttgccagataaggctctggatttaattgacgaagcctgtgctgctaagcggcttgcttctcatgcttatcccgtgcaaatgaccaatttgtctcagcaacttatttctgagaaaattcgtttattgcgtttgaccgattctgacactgacgataagtttaaattaaacaatcatcttgagcaattagaggagcaaaaaagccaattattagcaaattggcaaagggaaagagagctcctagatcaggtacaagagcttcgttcacatttaacggctttagaagagcaggctaatcttgctcttgaaaataatcaagtcgcagattatgtccgtctagaagatgaggaaataaggaaatgtcatcaaaagatgacagctttagaaaaggaacgtttagacagtcagaagataattaatgttactgtgactagagaagatatagcagctgttgttgaacgcttgacaggcatcaaagtacagggtgttatggaaaacgagcgtgatcgtctcttgcacttagaagaattattgcaccaaaaaattgttggtcaagatcaagccgtacaaaaggtatctcaggccatcattcgctctcgtgctggcattcaaaaccctaaacgtccaattggctccttcctctttttgggaccgactggtgtggggaaaacagcgcttgctaaacgtttggcggaagttctttttggcagtgaacttgagatggtgcgtctcgatatgtctgaatatatggaaaaacatgctgtctcacgtttagtaggaccaccaccaggttatgtcggatatgaagaaggaggccaattaactgaggctgttcgtcagcgtttatactctatcgtcctacttgatgagattgaaaaagctcatcctgatgtttttaataccttactgcaggttttagatgaagggcgtttgacggattcaaaagggcgaaccattgattttaaaaataccatcttaattatgaccagcaatattggctcaaccaatattttacaaagtctgcaagatagtggctgcattacttcagaagtccgttataaagttctagatgagctgaatcacagtttcagaccagagtttcttaatcggattgatgagacggtactctttaatgctctttctgaaaaagatatgacaggtgttgttaaggtcatggtttctgatttgcaagctcgcctcttagaacaagatattcatctgacattgactgaatcggtttatatcctcttagctaaagaaggttttgatgcagcttttggtgccagacccatgcagaggacaattatgcaaaagttagaaaaccctttggctttatatcttattcaaaatcagaaaaataaagaaaaagagacttttgtgacagtatctgttaaggataagaaactcaaattcacattctcatag

SEQ ID NO: 7436 - protein, 860 aa, Streptococcus mutans
MIDKMTQLVEDSLEEAKELAIAHRNYQLDIPHLWAVLVKPDQFAFQFYQSLEINTNQLIEIINKEIDKIPVLSSTEKSSYARLYSQRLKNLLDDAHQEMIDLKDQVLTVEHLILALFNQQRNPITVFLLEQGLNKEKLYQKMHRIRKGKPAISSSQETIYDALEKYAVNLNQRALDEPVNKIIGRQDEMNDIIRILSRKNKNNAVLVGHSGVGKTAIIEGFVQRLVKNQVPKNLQGKVIYSLDIGALLAGTKYRGEFEERFKALLNDIIDSNGQIILFIDEIHSIVSAGRTEGSVDAASILKPLLARGKIRIIGSTTHAEYRESIEYDRALERRFQRILVHEPDLDYTMEILKGLKPIYENFHGVRLEEDGLEAAASLSKRYISDRFLPDKALDLIDEACAAKRLASHAYPVQMTNLSQQLISEKIRLLRLTDSDTDDKFKLNNHLEQLEEQKSQLLANWQRERELLDQVQELRSHLTALEEQANLALENNQVADYVRLEDEEIRKCHQKMTALEKERLDSQKIINVTVTREDIAAVVERLTGIKVQGVMENERDRLLHLEELLHQKIVGQDQAVQKVSQAIIRSRAGIQNPKRPIGSFLFLGPTGVGKTALAKRLAEVLFGSELEMVRLDMSEYMEKHAVSRLVGPPPGYVGYEEGGQLTEAVRQRLYSIVLLDEIEKAHPDVFNTLLQVLDEGRLTDSKGRTIDFKNTILIMTSNIGSTNILQSLQDSGCITSEVRYKVLDELNHSFRPEFLNRIDETVLFNALSEKDMTGVVKVMVSDLQARLLEQDIHLTLTESVYILLAKEGFDAAFGARPMQRTIMQKLENPLALYLIQNQKNKEKETFVTVSVKDKKLKFTFS

SEQ ID NO: 7437 - DNA, 2565 bp, Thermus thermophilus
  CDS (1)..(2565): transl_table=11
atgaacctggaacgctggacccaagccgcccgcgaagccctggcccaggcgcaggtcctggcgcaaaggatgaagcaccaggccatagacctgccccacctctgggctgtcctcctgaaggacgaggggggcctcgcctggcgcctcttggagaaggcgggggccgaccccaaggcccttaaagagctccaggagcgggagctttcccgcctgcccaaggtggaaggggccgaggtgggccagtacctcacgagccgcctctccggggccttgaaccgggccgaggccctgatggaggagctcaaggaccgctacgtggcggtggacaccctggtcctggccttggcggaggccacgccggggcttccgggcctggaggccctgaagggggcgctcaaggaactgaggggagggagaaccgtgcagacggaacacgcggaaagcacctacaacgctttggagcagtacggcattgacctcacgcggcttgccgccgaggggaagctggaccccgtgatcggccgggacgaggagatccggcgggtgatccagatcctcctccggcgcaccaagaacaacccggtgctcatcggcgagcccggcgtggggaagacggccatcgtggagggcctggcccagcgcatcgtcaagggggacgtgcccgaaggcctcaagggcaagcggatcgtctccttgcagatgggctccctcctcgccggggccaagtaccggggcgagtttgaggagcgcttgaaggcggtgatccaggaggtggtccagtcccaaggggaagtcatcctcttcattgacgagctccacaccgtggtgggggcgggcaaggccgagggcgccgtggacgcgggcaacatgctgaagcccgccctggcccggggggagctcaggctcatcggggccaccaccctggacgagtaccgggagattgagaaggaccccgccctggagcgccgcttccagcccgtgtacgtggacgagcccacggtggaggagaccatctctatcctccggggcctcaaggagaagtacgaggtccaccacggggtgcgcatctccgacagcgccatcatcgccgccgccaccctctcccaccggtacatcacggaaaggcgccttcccgacaaggccattgacctcattgacgaggcggcggcccgcctgcgcatggccctggagagcgctcccgaggagattgacgccctggagcgcaagaagctccagctggagattgagcgggaggccctgaagaaggagaaggacccggactcccaggagcgcctcaaggccattgaggccgagatcgccaagctcacggaggagatcgccaagctccgggccgagtgggagagggagcgggagatcctgaggaagctccgcgaggcccagcaccgcctggacgaggtcaggcgggagattgagctcgccgagcggcagtacgacctgaaccgggccgccgagctccgctacggggagcttcccaagctggaggccgaggtggaggccctttcggaaaagctccggggcgcccgcttcgtccgcctcgaggtcaccgaggaggacatcgccgagatcgtctcccgctggaccgggatccctgtgtccaagctcctggaaggggagagggagaagcttttgaggcttgaggaggagctccacaagcgggtggtggggcaggacgaggccataagggccgtggccgacgccatccgccgggcgagggccggcctaaaggacccgaaccggcccatcggaagcttcctcttcctcgggcccacgggggtggggaagacggagctcgccaagaccctggccgccaccctctttgacaccgaggaggccatgatccgcattgacatgacggagtacatggagaagcacgccgtctcccgcctcatcggggccccgcccggctacgtgggctacgaggaggggggccagctcaccgaggcggtgcggaggaggccctactcggtcatcctctttgacgagattgagaaggcccaccccgacgtcttcaacatcctcctccagatcctggacgacggccgcctcaccgacagccacggccgcaccgtggacttccgcaacaccgtcatcatcctcacctccaacctggggagccccttgatcctcgagggcctccagaagggctggccctacgagaggatccgggacgaggtctttaaggtcttgcagcagcacttccgccccgagttcctgaaccgcctggacgagatcgtggtcttccggcccctcaccaaggagcagatccgccagatcgtggagatccagctctcctacctccgggcccgcctcgccgagaagcgcatctccctggagctcaccgaggccgccaaggacttcctggcggaaaggggctacgaccccgtcttcggggcaaggcccttgcggcgggtcatccagcgggagctggagacgcccctcgcccagaagatcctggccggcgaggtcaaggagggggaccgcgtgcaggtggacgtggggcccgcgggcctcgtgtttgccgtccccgcccgggtggaggcctga

SEQ ID NO: 7438 - protein, 854 aa, Thermus thermophilus
MNLERWTQAAREALAQAQVLAQRMKHQAIDLPHLWAVLLKDEGGLAWRLLEKAGADPKALKELQERELSRLPKVEGAEVGQYLTSRLSGALNRAEALMEELKDRYVAVDTLVLALAEATPGLPGLEALKGALKELRGGRTVQTEHAESTYNALEQYGIDLTRLAAEGKLDPVIGRDEEIRRVIQILLRRTKNNPVLIGEPGVGKTAIVEGLAQRIVKGDVPEGLKGKRIVSLQMGSLLAGAKYRGEFEERLKAVIQEVVQSQGEVILFIDELHTVVGAGKAEGAVDAGNMLKPALARGELRLIGATTLDEYREIEKDPALERRFQPVYVDEPTVEETISILRGLKEKYEVHHGVRISDSAIIAAATLSHRYITERRLPDKAIDLIDEAAARLRMALESAPEEIDALERKKLQLEIEREALKKEKDPDSQERLKAIEAEIAKLTEEIAKLRAEWEREREILRKLREAQHRLDEVRREIELAERQYDLNRAAELRYGELPKLEAEVEALSEKLRGARFVRLEVTEEDIAEIVSRWTGIPVSKLLEGEREKLLRLEEELHKRVVGQDEAIRAVADAIRRARAGLKDPNRPIGSFLFLGPTGVGKTELAKTLAATLFDTEEAMIRIDMTEYMEKHAVSRLIGAPPGYVGYEEGGQLTEAVRRRPYSVILFDEIEKAHPDVFNILLQILDDGRLTDSHGRTVDFRNTVIILTSNLGSPLILEGLQKGWPYERIRDEVFKVLQQHFRPEFLNRLDEIVVFRPLTKEQIRQIVEIQLSYLRARLAEKRISLELTEAAKDFLAERGYDPVFGARPLRRVIQRELETPLAQKILAGEVKEGDRVQVDVGPAGLVFAVPARVEA

SEQ ID NO: 7439 - DNA, 2580 bp, Treponema denticola
  CDS (1)..(2580): transl_table=11
atgaatatagataagtatacagttaaggcatcggaagccgttcaagaggcttcttcgcttgcccaaagagacgaccacagtcaggttgaaagtgaacatcttttgtatgttcttttagaacaagaggacggaattgttccgcctttagtagaaaaaatcggagtaagtcccgaaagtcttttggatgacctcgataaaatgcttgacagaaagccccgtgttacgggacagtccgctcaaacttatatttcgcccttacttgcaaaggtttttgcaaatgccgaaggctatgcagataaattaaaagacgaatatgtttctaccgaacatcttttgcttgccctaagcgaatctaaagacgaaacgggagaactcttgcgctcacggggtatcaatctaaaaaatctcctttccgcacttaaagaaatccgcggaaacaacagggtaacgagcgaaaatcccgaatctacattcagaagtttggaaaaattttgccgtgaccttacacagcttgcaaaaaacgaaaagatagatcccgtaatcgggcgggatgaagaaataaggcgggtaatgcaggttctttcccgtagaacaaaaaacaatcccgttttgatcggagaacccggagtcggaaaaacagccatagtcgaaggccttgcaaggcgtatcgtttcaggcgacgtgcccgacagcttaaagggaaaaagacttttatccctcgacctcggagccttggtcgcaggagcaaaattccgcggcgaatttgaagaaagattaaaggccgtaatttccgaagtgcaaaaatccgaaggccgagtcatcctctttatcgacgagcttcacacccttgtaggtgccggagcaagtgaaggttcgatggatgcttcaaacttattaaagccggcccttgcccgaggagagctcagggcgataggagccactaccctaaacgagtaccgaaaatacatcgaaaaagatgcagcccttgaacgccgcttccagcaggtttactgtcccgaacctacggttgaagacacaatagcaatcctgcgcggcttacaggaaaaatatgaagttcatcacggggtacgcataagggatgaggctctcatagcggcagccgtactttccaaccgttatatcacaaaccgctttttgcccgacaaggcgattgaccttgtagatgaggctgcaagccgtcttaaaatggaaatagaaagccagcctgtagagcttgatcaggttgagcgcaaaattcttcagttgaatatcgaaaaggtttctataggaaaagaaaacgatacggcctcaaaggaaaggcttttaaaacttgaagaagagttggcggagctttcttcaaaacggaatgcgatgcaggcccagtggcaaaacgaaaaagcccgcattaacgaatcccgcaaatacaaggaagaattggaacagctccgtatcgaagaaaccaagtacagccgagagggaaacttaaacaaggccgccgagctaaaatacggaaaaatccccgaactcgaaaagaagatagctgccgttactgccgagcttgaaaaaaaagccggtcagcagggacagcttttacgtgaagaggtttgcgaagaagacatagcccgaatcgtttcaatgtggacaggtattcccgttgcaaaaatgcttgcaagcgagatgcaaaaatttttacagcttgaaaaagttttacaagcccgcgtcgtcggacaagatgaagccgtaagggtagtttcggatgctataagaagaaacaaggcaggcctttccgatatgaaccgtcccttgggaagttttttatgtataggccccaccggtgtcggcaaaaccgaattggccagaaccctagccgattttttgttcaatgacgaaaaggcccttacccgaattgatatgagcgagtacatggaaaaacattccgtgagccgcctgataggagctccccccggatatgtgggttatgatgagggagggcagcttaccgaggccgtaagacggaggccctacagcgtaatcctctttgacgaaatcgaaaaagcgcatcaggatgtctttaacgtctttttgcagattttggatgacgggcgtcttaccgacggacaaggccgtgtagtcgattttaagaacacaattataattatgaccagcaacataggctccgagtatatattgaccgcaaaggatatgggaagcataaaagaagaaattaaccaaattctccgcgataattttaggcccgaatttttaaaccgcatcgacgaaatcctaacctttaacaggcttgaaaaagaacatatacgaaagatcgtcgatattcagctaaggtcagttgcagaacgcttgcaggcccgccggctaggcttaaaagtttcggataaggcgaaggattttcttgcagacataggttacgaccccatgttcggtgcccgccccctaaagagggctatacaggccgagcttgaaaacaaactcgcccgcgaagttctcgaaggtaaattccccgaaggaagcacaatactggttgacaagggagaaaatagccttatctttaagaagggataa

SEQ ID NO: 7440 - protein, 859 aa, Treponema denticola
MNIDKYTVKASEAVQEASSLAQRDDHSQVESEHLLYVLLEQEDGIVPPLVEKIGVSPESLLDDLDKMLDRKPRVTGQSAQTYISPLLAKVFANAEGYADKLKDEYVSTEHLLLALSESKDETGELLRSRGINLKNLLSALKEIRGNNRVTSENPESTFRSLEKFCRDLTQLAKNEKIDPVIGRDEEIRRVMQVLSRRTKNNPVLIGEPGVGKTAIVEGLARRIVSGDVPDSLKGKRLLSLDLGALVAGAKFRGEFEERLKAVISEVQKSEGRVILFIDELHTLVGAGASEGSMDASNLLKPALARGELRAIGATTLNEYRKYIEKDAALERRFQQVYCPEPTVEDTIAILRGLQEKYEVHHGVRIRDEALIAAAVLSNRYITNRFLPDKAIDLVDEAASRLKMEIESQPVELDQVERKILQLNIEKVSIGKENDTASKERLLKLEEELAELSSKRNAMQAQWQNEKARINESRKYKEELEQLRIEETKYSREGNLNKAAELKYGKIPELEKKIAAVTAELEKKAGQQGQLLREEVCEEDIARIVSMWTGIPVAKMLASEMQKFLQLEKVLQARVVGQDEAVRVVSDAIRRNKAGLSDMNRPLGSFLCIGPTGVGKTELARTLADFLFNDEKALTRIDMSEYMEKHSVSRLIGAPPGYVGYDEGGQLTEAVRRRPYSVILFDEIEKAHQDVFNVFLQILDDGRLTDGQGRVVDFKNTIIIMTSNIGSEYILTAKDMGSIKEEINQILRDNFRPEFLNRIDEILTFNRLEKEHIRKIVDIQLRSVAERLQARRLGLKVSDKAKDFLADIGYDPMFGARPLKRAIQAELENKLAREVLEGKFPEGSTILVDKGENSLIFKKG

SEQ ID NO: 7441 - DNA, 2637 bp, Treponema pallidum
  CDS (1)..(2637): transl_table=11
atgaacacagacaggtacacagtcaaagcaagcgaagcgctcaatgacgccatatctctggcagaagcggagaaccacggtcaagttgaggaggaacatctactccacgccctactttcccagaaagacgggattatctctccgctcattgaaaaaattggggcaaaaccggacttcctgtacgatgaattactccaatgcctgcgccgcaaaccacgtgttaccggtcctgccgcccaaacgcgctgtgcaccaacgctgagcaaagcctgtgcacgtgcagaacgcctcgcgctcaagaaccaagatgaatatgtctcctgcgaacatctcctgcttgccataagtgagacagatagcaacactgcacgtctccttcacagtcagggcattaccagtaaaactatcagtgccgccctcaaagatatacgcggcagcaagcgcgttacgagccaggatccagaatcaacattccagtgcttggagaaatactgccgagatcttactaccctcgcccgagaagaaaaaatagatccggttattggacgtgatgaagagatccggcgcgttatgcaggtactctcacgtcgtacaaaaaataacccagtgcttattggagaacccggcgtagggaaaaccgctattgtcgagggacttgcacgccgtatcgtttcaggagacgtaccagaaagcctcaagggaaagcgtttgctttcccttgacctcggcgcattggttgccggtgcaaagttccgcggggaatttgaagaacgactaaaagcggtaattgaagcggtacagaaaagcgacggtggcgttattttattcattgatgaactacacacgctcgtaggcgccggcgcaagtgagggatctatggatgcgtcgaaccttctgaaacctgcgcttgcgcgcggtgaattgcgttcaatcggcgcaaccacgctcaacgaatatcgcaaatatatcgaaaaggacgcagcgctcgaacgccgctttcagcaagtgtactgcgtacagcctacggtggaggacaccattgctatcctgcgcggtttgcaagaaaagtacgaagtgcatcacggggtacgtatcaaagatgaagcgcttgttgcagcaaccgttttgtctgaccgttacatcaccaaccgctttttaccagataaggcgattgatctggtggatgaagcagcaagccgcctgaaaatggaaattgaaagtcagcctgttgagctagaccaggtggagcgcaagatattacagctgaatatcgaaaaggcctctctccttaaagaaagtgatccggcttcaaaggaacgtttggaaaagttagaaaaagagctcgcaggcttcctagagcgccgtgctgcaatgcaggtccaatggcaaaatgagaaagggaggatagaagagtcacgccgctacaaagaggagcttgagcgtctccgcattgaggaaaccatgttttcacgtgaaggggacctgaacaaggctgcagaacttcggtatggcaaaattccagaacttgaaaaaaaaatcatgcttcttactgcagaagtagagaaaaaatccggtctagaaggacagctcttgcgcgaggaagtgtgtgaagaggacattgcgaaaattatttctatgtggaccggaattccggtatccaaaatgatggcaagcgagcaacagaaatatctgcagcttgagtcagtactcatgcaacgtgtggtagggcaggacgaagcagtgcgggtaatttccgacgcgattcgtcgtaataaggcaggactttctgatacgcgccgtcctcttggcagtttcttatgtgtcggtcccacgggggtaggaaagacagaacttgcacgtacgttagctgattttcttttcaacgatgagcgtgcactgacgcgtatcgatatgagtgaatacatggaaaaacacgcgatcagccgactcattggcgcgcccccggggtatgtgggctatgacgaggggggacaattgacagaagcggtacgacgtagaccctacagcgtacttctttttgatgaagtagagaaagcgcaccaggatgtgtttaatatattcctgcaaatactcgacgatgggcgcttgactgacggccaaggaagggtggtggatttccgcaacacgatcatcatcatgaccagcaatatcggatcagagcatattctttctgcacgcgagtcgcgcacacacacgtcggacttgcctgtacccgagacacaatctacagaagaacaaactctaccagagcagatacggggattactgcacacatactttcgcccagaattcttaaaccggattgacgaagtgttaatttttaagcgtctcacacggaaacatattcgcctcatcacagacatccaactgcagatggtagtggagcgtttggaaagtcgacatataaaacttcgtgtgcgtgacgcggcgaaagcctatcttgcggagcgcggatacgacgacactttcggagcacgaccactgaagcgtgcaatccaaacggaattggaaaatgccctagcgcgtgagattctcagtggccgattcagaggcggctcaactatcgtggtggatatgtgtaaagatgctctgtgtttcactgaacaaacatcctga

SEQ ID NO: 7442 - protein, 878 aa, Treponema pallidum
MNTDRYTVKASEALNDAISLAEAENHGQVEEEHLLHALLSQKDGIISPLIEKIGAKPDFLYDELLQCLRRKPRVTGPAAQTRCAPTLSKACARAERLALKNQDEYVSCEHLLLAISETDSNTARLLHSQGITSKTISAALKDIRGSKRVTSQDPESTFQCLEKYCRDLTTLAREEKIDPVIGRDEEIRRVMQVLSRRTKNNPVLIGEPGVGKTAIVEGLARRIVSGDVPESLKGKRLLSLDLGALVAGAKFRGEFEERLKAVIEAVQKSDGGVILFIDELHTLVGAGASEGSMDASNLLKPALARGELRSIGATTLNEYRKYIEKDAALERRFQQVYCVQPTVEDTIAILRGLQEKYEVHHGVRIKDEALVAATVLSDRYITNRFLPDKAIDLVDEAASRLKMEIESQPVELDQVERKILQLNIEKASLLKESDPASKERLEKLEKELAGFLERRAAMQVQWQNEKGRIEESRRYKEELERLRIEETMFSREGDLNKAAELRYGKIPELEKKIMLLTAEVEKKSGLEGQLLREEVCEEDIAKIISMWTGIPVSKMMASEQQKYLQLESVLMQRVVGQDEAVRVISDAIRRNKAGLSDTRRPLGSFLCVGPTGVGKTELARTLADFLFNDERALTRIDMSEYMEKHAISRLIGAPPGYVGYDEGGQLTEAVRRRPYSVLLFDEVEKAHQDVFNIFLQILDDGRLTDGQGRVVDFRNTIIIMTSNIGSEHILSARESRTHTSDLPVPETQSTEEQTLPEQIRGLLHTYFRPEFLNRIDEVLIFKRLTRKHIRLITDIQLQMVVERLESRHIKLRVRDAAKAYLAERGYDDTFGARPLKRAIQTELENALAREILSGRFRGGSTIVVDMCKDALCFTEQTS

SEQ ID NO: 7443 - DNA, 2574 bp, Vibrio cholerae
  CDS (1)..(2574): transl_table=11
atgcgtcttgacagatttacgagcaaatttcagatcgcgatttccgatgcccagtcattagcgctcggccgtgatcatcaatatatcgaacctgtgcacctgatggtggctctgctggatcaaaacggcagcccgatccgcccattactcaccatgcttaatgtggatgtgatgcaactgcgctccaaacttggcgaaatgctcgatcgtttacccaaagtcagtggtattggtggtgatgtacagctctcttcggcgcttggctcgctgtttaatctgtgtgataaggttgcgcaaaagcgtcaagatgcctacatctcctctgaaatctatctacttgctgcgattgaggacaaagggccactgggtcacttactcaaagagtttggactgaccgagaaaaaagtctctgaagcaatagagaagattcgtggtggacaaaaggttaatgacccgaatgcggaagagctgcgtcaagcgttggaaaaattcaccatcgatctgactgaacgcgctgagcagggcaaactcgatcctgtgatcggtcgtgatgatgaaattcgccgcaccattcaagtgctgcaacgccgtaccaagaacaatccggtgatcatcggtgaacccggtgtgggtaaaactgcgattgtggaaggcttggcgcagcgcatcattaataatgaagtaccagaaggcctgcgtggacggcgagtgttgtctttagatatgggcgcgctagtggcaggggcgaaataccgcggcgaatttgaagagcgcttgaaatcagtactcaatgagctagcgaaagaagaaggcaatatcatcctcttcattgatgagctgcacaccatggttggtgcggggaaaggcgaaggctcgatggatgccggcaacatgctcaaacccgctttggcgcgtggagaattgcactgtgtcggcgcaaccactttagatgagtaccgccaatacatcgaaaaagatccagcgttagagcgccgcttccaaaaagtgttggtggatgagcccacggtggaagataccatcgccatcttgcgtggattgaaagagcgttatgaactgcatcaccatgtcgaaatcacagatccagcgattgtggcggcagcgagcctatcgcatcgctatatttccgatcgccagttgcctgataaagcgatcgatttgatcgatgaagcggcttcaagcatccggatgcagattgactccaaaccagaagctctggataagcttgagcgcaaaatcatccaactgaaaatcgagcagcaagcgctctctaatgagcacgatgaagccagtgaaaaacgcttggcgatcttaaatgaagagctgcaagagaaagagcgtgattacgcggagttggaagaagtgtggaaagctgaaaaggcggcactctccggcacgcaacatattaaagcggcacttgaacaagcgcggatggatctggaagtcgctcgccgtgcgggggatttgaaccgcatgtcagagctgcaatatggtcgcattccagagctagaaaagcagcttgatctggctgcgcaagccgaaatgcaggaaatgactctgctacgtaataaagtgacggatgcagaaattgccgaagtgctttcaaaacagactggcattccagtatcaaaaatgctcgaagctgagaaagaaaagttgctgcgcatggaagacgtgctgcataaacgcgtgattggtcaaaaagaagcggtggaagtggtcgcgaatgcgatccgccgcagtcgcgcagggctttctgatccaaatcgtccgattggctccttcttattcttggggccaacaggggtcggtaaaaccgagctgtgtaaaaccttggctaacttcctgtttgacagtgaagatgccatggtacgtgtggatatgtcggaatttatggagaaacactcggttgctcgtttagtcggtgcgcctccaggttatgtcggctatgaagaaggtggctacttaacggaagctgtacgccgtaaaccttactcggtgattttgctcgatgaagtggaaaaggcgcacccagatgtcttcaatattctgctgcaagtcttggatgatggccgcttgacggacggacaagggcgcacggtcgattttcgaaataccgttgtgatcatgacctccaacttgggttcaagccgtatccaagaaaattttgcaaggttggattatcaaggtatcaaagaacaagtgatggacgtagtcagcaaacacttccgtcctgagttcttgaaccgagtggatgaaagtgtggtattccacccattaggacaagagcatatcaagtcgatcgcttctattcagttggcccgcctacgtcaacgtttggcagagcgagattaccaactagaggttgatgatgaggcgctggatctgattgctcatgtcggcttcgatccggtttatggtgctcgtccactgaaacgcgcgattcaacaaaatgtggaaaacccactggccaaatcgattctggctggtaagttcctgcctggttcacctattttactatcggtaaaagacgggaatattttcgcaagccagtag

SEQ ID NO: 7444 - protein, 857 aa, Vibrio cholerae
MRLDRFTSKFQIAISDAQSLALGRDHQYIEPVHLMVALLDQNGSPIRPLLTMLNVDVMQLRSKLGEMLDRLPKVSGIGGDVQLSSALGSLFNLCDKVAQKRQDAYISSEIYLLAAIEDKGPLGHLLKEFGLTEKKVSEAIEKIRGGQKVNDPNAEELRQALEKFTIDLTERAEQGKLDPVIGRDDEIRRTIQVLQRRTKNNPVIIGEPGVGKTAIVEGLAQRIINNEVPEGLRGRRVLSLDMGALVAGAKYRGEFEERLKSVLNELAKEEGNIILFIDELHTMVGAGKGEGSMDAGNMLKPALARGELHCVGATTLDEYRQYIEKDPALERRFQKVLVDEPTVEDTIAILRGLKERYELHHHVEITDPAIVAAASLSHRYISDRQLPDKAIDLIDEAASSIRMQIDSKPEALDKLERKIIQLKIEQQALSNEHDEASEKRLAILNEELQEKERDYAELEEVWKAEKAALSGTQHIKAALEQARMDLEVARRAGDLNRMSELQYGRIPELEKQLDLAAQAEMQEMTLLRNKVTDAEIAEVLSKQTGIPVSKMLEAEKEKLLRMEDVLHKRVIGQKEAVEVVANAIRRSRAGLSDPNRPIGSFLFLGPTGVGKTELCKTLANFLFDSEDAMVRVDMSEFMEKHSVARLVGAPPGYVGYEEGGYLTEAVRRKPYSVILLDEVEKAHPDVFNILLQVLDDGRLTDGQGRTVDFRNTVVIMTSNLGSSRIQENFARLDYQGIKEQVMDVVSKHFRPEFLNRVDESVVFHPLGQEHIKSIASIQLARLRQRLAERDYQLEVDDEALDLIAHVGFDPVYGARPLKRAIQQNVENPLAKSILAGKFLPGSPILLSVKDGNIFASQ

SEQ ID NO: 7445 - DNA, 2574 bp, Vibrio parahaemolyticus
  CDS (1)..(2574): transl_table=11
atgcgtcttgatagatttaccagtaagtttcaaatcgctatctctgatgctcaatcactagcgttagggcgcgatcatcagtacatcgagccagttcacttaatggtggctttgcttgatcaaaatggcagtccaattcgtccattgctgacaatgctggacgtggatgtaactcatctccgctcaaagctgggcgaaatgcttgatcgattaccaaaggtgagtggcatcggtggtgatgtgcagctttctagctcgatggggactttgttcaatctgtgtgacaaagtggctcaaaagcgtcaagactcctacatctcgtccgaagtcttcttgcttgcggcattagaagatcgcggtcctttagggcaactacttaaagaagtggggctcaccgagcaaaaagtgagtcaagcgattgaaaagatcagaggtggtcaaaaggtcaatgatccaaatgctgaagagctacgtcaggctcttgaaaaattcaccatcgatttaactgagcgagctgagcagggcaaattggatcctgttattggtcgagatgatgaaattcgtcgcacgattcaagtattgcaacgtcgcaccaaaaacaacccagtgatcatcggtgagcctggtgtgggtaaaaccgcaattgtggaaggcttggcgcagcgaatcgttaataacgaagtgccagaaggtctacgcggtcgccgtgttctatcactggatatgggtgcacttgttgctggcgcgaaataccgtggtgaatttgaagagcgtttaaaatcagtattgaatgaacttgctaaagaagaaggcaacgtcatcctcttcattgatgaactacacactatggtcggcgctggtaaaggtgaaggctcaatggatgcgggcaacatgctcaaaccagcattggctcgcggcgaacttcactgtgttggtgcaacaacattggatgagtaccgtcaatacatcgaaaaggatgctgcattagaacgtcgtttccaaaaagtgctggtggatgagccgacagtagaagatacggtggctattcttcggggtctgaaagagcgttatgagcttcatcaccatgtagaaattactgacccagcgattgttgcagcggcaagtttgtcgcaccgttatatttcggaccgtcagttgccagataaagccattgacttgatcgatgaagcggcttcaagcattcgtctacaaatagattcaaaaccagaatcattggataagcttgagcgtaaaatcatccaactaaaaattgagcaacaagcactaagtaacgagcacgatgaagcgagtgaaaagcgtctgcaagcattgaatgatgagttgaatgagaaagaacgcgaatacgcagagttagaagaggtttggaatacagaaaaagccgcactttctggtactcagcatattaaatctgaactagagcaagctcgcatggacatggagtttgcgcgtcgtgctggtgatctaaaccgaatgtctgagcttcaatacggtcgtattccggaattagagaagcaactagatttggcgactcaggctgaaatgcaagaaatgacgctgcttcgtaacaaagtaacagataacgaaatcgcagaagtgctttctaaacaaacgggcattccagtatctaagatgttagaagcggaaaaagagaaactacttcgcatggaagatgtgcttcacaatcgtgttgtagggcaaagcgaagcagttgcagtggtatcgaatgcgattcgtcgtagccgagctgggctttctgatccaaaccgaccaattggttccttcttattcttaggtccaactggtgtcggtaaaacggaattatgtaagacacttgcgagcttcatgttcgacagtgaagatgcaatggtacgtatcgacatgtcggagttcatggagaaacactcagtagcaagattagtgggtgcgcctccaggttacgttggttacgaagagggggggtatctaactgaagcggttcgtcgaaaaccatactcagtgatcttgttggatgaagtagaaaaagcacatccagatgtgttcaatattcttctgcaggtgcttgatgatggccgactcactgatggacaaggtcgtacggttgattttcgtaacaccgtcgtgatcatgacatcaaacttgggttcctctcgaatccaagagaacttcgccacattggactatcaaggtatcaagagtgaagtgatggatgtggttagtaaacacttccgcccagagttcttgaaccgtgttgacgaaatagtggtattccacccacttggtcaagagcacattaagtccattgcttctattcaattagaacgcttggcaaaacgactagaagaaaaagggtatcaattggaggtgtctgataaagcactcgacttgatcgcccaagtcggtttcgacccagtatacggtgcacgtcctttaaaacgtgcaattcaacagaatgtcgagaacccattagctaaatccattcttgctggtgaaatagttccagacaagaaagtgcagctaatcgttactaatgaccaaattctcgctcatcagtaa

SEQ ID NO: 7446 - protein, 857 aa, Vibrio parahaemolyticus
MRLDRFTSKFQIAISDAQSLALGRDHQYIEPVHLMVALLDQNGSPIRPLLTMLDVDVTHLRSKLGEMLDRLPKVSGIGGDVQLSSSMGTLFNLCDKVAQKRQDSYISSEVFLLAALEDRGPLGQLLKEVGLTEQKVSQAIEKIRGGQKVNDPNAEELRQALEKFTIDLTERAEQGKLDPVIGRDDEIRRTIQVLQRRTKNNPVIIGEPGVGKTAIVEGLAQRIVNNEVPEGLRGRRVLSLDMGALVAGAKYRGEFEERLKSVLNELAKEEGNVILFIDELHTMVGAGKGEGSMDAGNMLKPALARGELHCVGATTLDEYRQYIEKDAALERRFQKVLVDEPTVEDTVAILRGLKERYELHHHVEITDPAIVAAASLSHRYISDRQLPDKAIDLIDEAASSIRLQIDSKPESLDKLERKIIQLKIEQQALSNEHDEASEKRLQALNDELNEKEREYAELEEVWNTEKAALSGTQHIKSELEQARMDMEFARRAGDLNRMSELQYGRIPELEKQLDLATQAEMQEMTLLRNKVTDNEIAEVLSKQTGIPVSKMLEAEKEKLLRMEDVLHNRVVGQSEAVAVVSNAIRRSRAGLSDPNRPIGSFLFLGPTGVGKTELCKTLASFMFDSEDAMVRIDMSEFMEKHSVARLVGAPPGYVGYEEGGYLTEAVRRKPYSVILLDEVEKAHPDVFNILLQVLDDGRLTDGQGRTVDFRNTVVIMTSNLGSSRIQENFATLDYQGIKSEVMDVVSKHFRPEFLNRVDEIVVFHPLGQEHIKSIASIQLERLAKRLEEKGYQLEVSDKALDLIAQVGFDPVYGARPLKRAIQQNVENPLAKSILAGEIVPDKKVQLIVTNDQILAHQ

SEQ ID NO: 7447 - DNA, 2574 bp, Vibrio vulnificus
  CDS (1)..(2574): transl_table=11
atgcgtcttgatcgatttaccagcaaatttcaaatcgctatctctgatgcacaatcattggcgttagggcgcgatcatcaatacattgaacctgttcacttaatggtggcgctgcttgatcaaaacggcagccctattcgtccactgctgaccatcttaaatgtggatgtcactcacctacgttcaaaactcagcgaaatgctggatcgtttgcccaaagtgagcggtattggtggtgatgtacagctctcctcagccatgggcgcgatgtttaacttgtgcgataagattgcacaaaaacgccaagatgcttacatctcatctgaaatctttttgctcgcagcaatcgaagatagaggaccacttggccagctcttcaaagaacttggcttaactgaacagaaagtgagtcaagctatcgagcaaattcgcggtggtcaaaaagtgaatgatcaaaatgcggaagaacttcgccaagcgttagagaaatttaccattgatctgacggaacgtgcagaacagggcaaacttgaccctgtgattggacgtgacgatgaaattcgtcgcaccatccaagtattgcagcgtcgaaccaaaaacaaccccgtgatcattggtgagccaggtgttggtaaaaccgccattgttgaaggtttagcacaacgtatcatcaataacgaggtgcccgaaggtctgcgtggtcgccgagtattgtcactcgatatgggcgcgttggtggctggagcgaagtaccgtggtgaatttgaagagcgacttaaatcggtattgaatgagttgtctaaagaagaaggcaatatcatcctctttattgatgagcttcataccatggttggcgccggtaaaggtgaagggtcgatggatgcgggcaatatgctcaaacccgcattggcacgtggtgagttacattgtgtgggcgcaacgacacttgatgagtatcgtcagtatatcgagaaagatccggcacttgagcgccgcttccaaaaagtgctggttgatgaaccaacagtggaagacaccattgcaattttgcgtggtttaaaagaacgctatgagctgcatcatcatgttgaaattaccgatccagcgatcgttgctgcggccagtttgtcgcatcgctatgtttctgatcgtcaattaccggacaaagcgatcgacctcatcgacgaagccgcatccagtattcgcatgcagatcgattctaaacccgaagctttggataagttggagcgcaaaatcatccaacttaagatagagcagcaggcgctgagtaatgaacacgatgaagcgagtgaaaaacgtctgcgctcacttaacgaagagttgaatgagaaagagcgtgagtttgctgagttagaggaaatttggaatgcggaaaaagccgcgctgtctggcactcagcatattaaagcggcgttagagcaagcacgcatggatatggagtttgcaagacgagcgggggatcttagccgcatgtctgagcttcaatatggccgtattccagagcttgagaagcaacttgacctagcaacgcaagcagaaatgcaggaaatgaccttgttgaaaaacaaagtcaccgataatgaaattgcggaagtgctttccaagcaaacgggtatccctgtttccaaaatgcttgaagcagaaaaagaaaaactacttcgcatggaagaggtgctgcataaacgcgttattgggcagaaagaggcggtggaagttgttgcgaatgcaatacgtcgcagccgcgcgggtttgtccgatcccaataagccgattggttcgttcttattcttaggtccaaccggtgtggggaaaacggaactgtgcaaaacgttggcgaatttcatgttcgacagtgaagatgccatggtgcgtatcgacatgtccgagtttatggagaaacactcagtggcacgcttagtcggtgcacctcctggctatgtgggttatgaagaaggtggttacttaacggaagccgttcgacgtaagccttattcagtgattttgctcgacgaggtggaaaaggcgcatcctgatgtgttcaacatcctgctgcaagtcttggatgatggtcgattgacggatggacaaggtagaacagtggatttccgcaataccgtggtcatcatgacatcaaacctaggctccagccgcatccaagaaaacttcgctatgttggattaccaaggcatcaaagaacaggtgatggaagtggtgaccaagcacttcaggccggagtttttgaaccgtgttgatgagacagtggtcttccacccacttggtcaagaccatattaagtcgatcgcagcgattcaacttaaccgcttggcgaatcgcatggaagagcatggctatccgttggaagtgtctgataaagcgctcgaattgatcgcacaagttggttttgacccggtttacggagcaagaccattgaaacgagcgattcagcaaagtatcgaaaacccgctggcgaaatctattttggcaggttcagtgctaccggataagaaaatacagcttatcgtcaacaacgaccaaattgtggcacaccaatag

SEQ ID NO: 7448 - protein, 857 aa, Vibrio vulnificus
MRLDRFTSKFQIAISDAQSLALGRDHQYIEPVHLMVALLDQNGSPIRPLLTILNVDVTHLRSKLSEMLDRLPKVSGIGGDVQLSSAMGAMFNLCDKIAQKRQDAYISSEIFLLAAIEDRGPLGQLFKELGLTEQKVSQAIEQIRGGQKVNDQNAEELRQALEKFTIDLTERAEQGKLDPVIGRDDEIRRTIQVLQRRTKNNPVIIGEPGVGKTAIVEGLAQRIINNEVPEGLRGRRVLSLDMGALVAGAKYRGEFEERLKSVLNELSKEEGNIILFIDELHTMVGAGKGEGSMDAGNMLKPALARGELHCVGATTLDEYRQYIEKDPALERRFQKVLVDEPTVEDTIAILRGLKERYELHHHVEITDPAIVAAASLSHRYVSDRQLPDKAIDLIDEAASSIRMQIDSKPEALDKLERKIIQLKIEQQALSNEHDEASEKRLRSLNEELNEKEREFAELEEIWNAEKAALSGTQHIKAALEQARMDMEFARRAGDLSRMSELQYGRIPELEKQLDLATQAEMQEMTLLKNKVTDNEIAEVLSKQTGIPVSKMLEAEKEKLLRMEEVLHKRVIGQKEAVEVVANAIRRSRAGLSDPNKPIGSFLFLGPTGVGKTELCKTLANFMFDSEDAMVRIDMSEFMEKHSVARLVGAPPGYVGYEEGGYLTEAVRRKPYSVILLDEVEKAHPDVFNILLQVLDDGRLTDGQGRTVDFRNTVVIMTSNLGSSRIQENFAMLDYQGIKEQVMEVVTKHFRPEFLNRVDETVVFHPLGQDHIKSIAAIQLNRLANRMEEHGYPLEVSDKALELIAQVGFDPVYGARPLKRAIQQSIENPLAKSILAGSVLPDKKIQLIVNNDQIVAHQ

SEQ ID NO: 7449 - DNA, 2574 bp, Vibrio vulnificus
  CDS (1)..(2574): transl_table=11
atgcgtcttgatcgatttaccagcaaatttcaaatcgctatctctgatgcacaatcattggcgttagggcgcgatcatcaatacattgaacctgttcacttaatggtggcgctgcttgatcaaaacggcagccctattcgtccactgctgaccatcttaaatgtggatgtcactcacctacgttcaaaactcagcgaaatgttggatcgcttacccaaagtgagcggtattggtggtgatgtacagctttcctcagccatgggcgcgatgtttaacttgtgcgataagattgcacaaaaacgccaagatgcttacatctcatctgaaatctttttgctcgcagccatcgaagatagaggaccacttggccagctcttcaaagaacttggcttaactgaacagaaagtgagtcaagctatcgagcaaattcgcggtggtcaaaaagtgaatgatcaaaatgcggaagaacttcgccaagcgttagagaaatttaccattgatctgacggaacgtgcagaacagggcaaacttgaccctgtgattggacgtgacgatgaaattcgtcgcaccatccaagtattgcagcgtcgaaccaaaaacaaccccgtgatcattggtgagccaggtgttggtaaaaccgccattgttgaaggtttagcacaacgtatcatcaataacgaggtgcccgaaggtctgcgtggtcgccgagtgttgtcactcgatatgggcgcgttggtggctggagcgaagtaccgtggtgagtttgaagagcgacttaaatcggtattgaatgagttgtctaaagaagaaggcaatatcatcctctttattgatgagcttcataccatggttggcgccggtaaaggtgaaggttcgatggatgcgggcaatatgctcaaacccgcattggcacgtggtgagttacattgtgtgggcgcaacgacacttgacgagtatcgtcagtatatcgagaaagatccggcacttgagcgccgcttccaaaaagtgctggttgatgaaccaacagtggaagacaccattgcaattttgcgtggtttaaaagagcgctatgagctgcatcatcatgttgaaattaccgatccagcgatcgttgctgcggccagtttgtcgcatcgctatgtttctgatcgtcaattaccggataaagcgatcgaccttatcgacgaagccgcatccagtattcgcatgcagatcgattctaaacccgaagctctggataagttggagcgcaaaatcatccaacttaagatagagcaacaggcgctgagtaatgaacacgatgaagcgagtgaaaaacgtctgcgctcacttaacgaagagttgaatgagaaagagcgtgagtttgctgagttagaggaaatttggaacgcagaaaaagccgcgctgtctggcactcagcacattaaagcggcgttagagcaagcacgcatggatatggagtttgcgagacgagcgggggatcttagccgcatgtctgagcttcaatatggccgtattccagagcttgagaagcaacttgacctagcaacgcaagcagaaatgcaggaaatgaccttgttgaaaaacaaagtcaccgataatgaaattgcagaagtgctttctaagcaaacgggtatccctgtctccaaaatgcttgaagcagaaaaagaaaaactgcttcgcatggaagaggtgctgcataaacgtgttattgggcagaaagaggcggtggaagttgttgcgaatgcgatacgtcgcagccgggcgggcttgtccgatcccaataaaccgattggttcgttcttattcttaggtccaaccggtgtggggaaaacggaactgtgcaaaacgttggcgaatttcatgttcgacagtgaagatgccatggtgcgtatcgacatgtctgagtttatggagaaacactcagtggcacgcttagtcggtgcacctccgggctatgtgggttatgaagaaggtggatatttaacggaagcggttcgacgtaagccttattcagtgattttgctcgatgaagtggaaaaggcacaccctgatgtgttcaacatcctgctacaagtcttggatgacggtcgattgacggatggacaaggtagaacagtggatttccgcaataccgtggtcatcatgacatcaaacctaggctcaagccgcatccaagaaaacttcgctatgttggattaccaaggtatcaaagaacaggtgatggaagtggtgaccaaacacttcaggccggagtttttgaaccgtgttgatgagacagtggtcttccacccacttagtcaagatcatattaagtcgatcgcagcgattcaacttaaccgcttggcgaatcgcatggaagagcatggctatcagttggaagtgtccgataaagcgctcgaattgatcgcacaagttggttttgacccggtttacggagcaagaccattgaaacgagcgattcagcaaagtatcgagaacccactggcgaaatctattttggcgggctcggtgctaccggataagaaaatacagcttatcgtcaacaacgaccaaattgtggcacaccaatag

SEQ ID NO: 7450 - protein, 857 aa, Vibrio vulnificus
MRLDRFTSKFQIAISDAQSLALGRDHQYIEPVHLMVALLDQNGSPIRPLLTILNVDVTHLRSKLSEMLDRLPKVSGIGGDVQLSSAMGAMFNLCDKIAQKRQDAYISSEIFLLAAIEDRGPLGQLFKELGLTEQKVSQAIEQIRGGQKVNDQNAEELRQALEKFTIDLTERAEQGKLDPVIGRDDEIRRTIQVLQRRTKNNPVIIGEPGVGKTAIVEGLAQRIINNEVPEGLRGRRVLSLDMGALVAGAKYRGEFEERLKSVLNELSKEEGNIILFIDELHTMVGAGKGEGSMDAGNMLKPALARGELHCVGATTLDEYRQYIEKDPALERRFQKVLVDEPTVEDTIAILRGLKERYELHHHVEITDPAIVAAASLSHRYVSDRQLPDKAIDLIDEAASSIRMQIDSKPEALDKLERKIIQLKIEQQALSNEHDEASEKRLRSLNEELNEKEREFAELEEIWNAEKAALSGTQHIKAALEQARMDMEFARRAGDLSRMSELQYGRIPELEKQLDLATQAEMQEMTLLKNKVTDNEIAEVLSKQTGIPVSKMLEAEKEKLLRMEEVLHKRVIGQKEAVEVVANAIRRSRAGLSDPNKPIGSFLFLGPTGVGKTELCKTLANFMFDSEDAMVRIDMSEFMEKHSVARLVGAPPGYVGYEEGGYLTEAVRRKPYSVILLDEVEKAHPDVFNILLQVLDDGRLTDGQGRTVDFRNTVVIMTSNLGSSRIQENFAMLDYQGIKEQVMEVVTKHFRPEFLNRVDETVVFHPLSQDHIKSIAAIQLNRLANRMEEHGYQLEVSDKALELIAQVGFDPVYGARPLKRAIQQSIENPLAKSILAGSVLPDKKIQLIVNNDQIVAHQ

SEQ ID NO: 7451 - DNA, 2562 bp, Wolbachia pipientis wMel
  CDS (1)..(2562): transl_table=11
atggacttaaataaatttaccgaaaaagcaaaaagtctaattcaaagtgctcaaatgaaagcgttgggagctgggcatcagatttttatgcctgagcatttactaaaagtgatgcttgaagatgaatcaggtttagttcaggatttgataaacgcttgtggtggaaatgtgcagagtatttccgatgctgtggatagtgcaataaaaaagttgccagtaattgaaggtccaggaagtggtggccttcaactttcaagagaaatagcaaaagtttttgaagattcaattggtattgcaaagagaaataaagattcatttgttgctgtcgagcgtttactgcagggcctcactgcacaaaaagatgatactgtaggcaaaattctggcagagaatggtgtgactccacaaaaactgaactcagttgttgcagaaatgagaaagggcagcagtgcggactcgccaaacagtgaggaaaaattaaatgcggcaaagaaatatacaaaagatgttacagagcttgctatgcaaggaaagcttgatcctgtaattggtcgtgatgaagagatcagaagaactatgcaggtatcactgaggcggacaaaaaataatccagtgctgatcggtgaacctggtgttggaaaaactgcaatagttgaggggcttgcaaatagaattgttgcaaacgatgtaccacttggtttgcatgatgcaaaggtcttagctttggatcttggagcactaattgctggcactaagtttagaggagaatttgaagaaaggttaaaagcagttattaatgagctttcgagagcggagggaaaagttatcttgtttatagatgagcttcatactttagttggagcaggagcaacaagtggtgcaatggatgcctcgaatctgctgaagcctgctcttgcgcgtggagaagttcgctgtataggagccacaactttagatgaatatcgtcagcatatagaaaaagatcctgcacttgcaaggcgttttcagcctgtgtttatctctcaaccaactgaaactgataccatttcaatactcaggggtttgaaggaaagatatgaggtgcatcatggtataagaattacagacggtgcaataattgctgctgcaacgttatccaatagatatataacagataggtttttacctgataaagcaattgatttgattgatgaagcagcaagtagggtgagaattgaaatggatagcaagcctgaagttattgatgaacttgagagaaaggttatacagctaaagattgaagcagaggctctaaaaaaagaaagtgatgaaaattctaaacagcgtttaaaaaagataaatgaagagatcgaaaatctaaacagtaaatttgctgacttgaacagcaaatggcagatggaaaagaataaaatagctagaatacaagaaacagccgaaaaattagataacgctagaaaagagttggaattagttcagcgtagtgggaatttgggaagggcaggagagctgatgtatggtgtgatccctcagcttgagaatgaattaaaaaatcaggaaaaggttactgatagtttcttaaagaaagaagtgactggagatgatattgcaaacattgtttcaaagtggacgggaattccagttgataatatgatgcatagtgaaaaggaaaaactccttaacatggagaatgaaataggaagaagagtaatagggcagaaagatgcaatagaagcgataagtaatgcagttaggcgctcccgctctggggtgcaagataccaataagccttttggttcatttttatttttaggtccaactggagttggtaaaaccgaacttgcgaaagccttagctgaatttctgtttgacgatcaatcagcgcttttgcgttttgatatgtcagaatatatggaaaaacattctgtttcaaagttaattggcgcgcctccagggtatgttggctatgaacaaggtggcagattaactgaagcggtaagaagaaggccatatcaggttattctgtttgatgaaatcgagaaagcaaatccagatatatttaatctattgctgcaaatcttggatgagggtagactcactgatagtcatggtaaattaattgattttcgcaacaccatactgattttaacttctaatcttggcgctgagataatgctaaaagggaatgttgattctgtaagaaatgaagtgatgcaaatagttaaatcagcatttcgtccagaatttttaaacaggctggatgaaattattatattccacagtttaaccagagatgacatctataaaattatagatgttcaattttcttatttacaaaaaacacttgctaagcgtaaactgagtataagtttgttgcaggaagctaaagaactaatagcacaaactggctatgaccctgaatatggagcaaggcccttaaaaagggttatacaagagtgtattcaaaataatttagctaaattagttttatcaggggaagtagtagaaaatgatgagctaatagtgtacgctcttgataatgaaatcttagttaaaaaggtttaa

SEQ ID NO: 7452 - protein, 853 aa, Wolbachia pipientis wMel
MDLNKFTEKAKSLIQSAQMKALGAGHQIFMPEHLLKVMLEDESGLVQDLINACGGNVQSISDAVDSAIKKLPVIEGPGSGGLQLSREIAKVFEDSIGIAKRNKDSFVAVERLLQGLTAQKDDTVGKILAENGVTPQKLNSVVAEMRKGSSADSPNSEEKLNAAKKYTKDVTELAMQGKLDPVIGRDEEIRRTMQVSLRRTKNNPVLIGEPGVGKTAIVEGLANRIVANDVPLGLHDAKVLALDLGALIAGTKFRGEFEERLKAVINELSRAEGKVILFIDELHTLVGAGATSGAMDASNLLKPALARGEVRCIGATTLDEYRQHIEKDPALARRFQPVFISQPTETDTISILRGLKERYEVHHGIRITDGAIIAAATLSNRYITDRFLPDKAIDLIDEAASRVRIEMDSKPEVIDELERKVIQLKIEAEALKKESDENSKQRLKKINEEIENLNSKFADLNSKWQMEKNKIARIQETAEKLDNARKELELVQRSGNLGRAGELMYGVIPQLENELKNQEKVTDSFLKKEVTGDDIANIVSKWTGIPVDNMMHSEKEKLLNMENEIGRRVIGQKDAIEAISNAVRRSRSGVQDTNKPFGSFLFLGPTGVGKTELAKALAEFLFDDQSALLRFDMSEYMEKHSVSKLIGAPPGYVGYEQGGRLTEAVRRRPYQVILFDEIEKANPDIFNLLLQILDEGRLTDSHGKLIDFRNTILILTSNLGAEIMLKGNVDSVRNEVMQIVKSAFRPEFLNRLDEIIIFHSLTRDDIYKIIDVQFSYLQKTLAKRKLSISLLQEAKELIAQTGYDPEYGARPLKRVIQECIQNNLAKLVLSGEVVENDELIVYALDNEILVKKV

SEQ ID NO: 7453 - DNA, 2574 bp, Wolinella succinogenes
  CDS (1)..(2574): transl_table=11
atgaatgcgtttgaaaaaatgactcatcaactccgagagaccttagagcaggcgctctcgctcgctctgcacgctaaaaatcctgaggtggacttgccccatatggcgtgggcattgctcatcaactccacctcgattcttaatcaggccctcaacaagatgggagtggacaaaagcgccctagagctggaggctaaatcgctagtggatcgactccctcagagctcttcgctcaccaaggagaacatcaaaatttccaagcggctcgccgattctttgactcaagccgaggcgcttggagtgaaggggggcgataagtttattgcggtggacacttggcttttggctaacctcaaagaagagccgcttaaatcactattctccaaatatttggatgtgaatgagctcaaaaagaatctagaatcgattcgcggaggagccaaaattgagagcgcaacggatgatgagaatctagagagcctcgcaaagtatggaatcgacctcacccaaaaagcactagaaaacaagcttgatcccgtgattgggcgagatgaagagatttcgcgcatgatgcaaatcctcatccgaaagaccaaaaacaatcccattctcctaggagagccaggcgttggaaagaccgccgtggtggaaggattggcgcagagaatcatagccaaagaggttcccctctctcttcaaaacaagcgcgtcgtggctttggatatgagtgcgctcatcgcgggagcgaagtatcgtggcgaatttgaggatcgactcaaaaaagtggtggaagaggtcaaaaaggcgggaaatgtgattctctttattgatgagattcacaccatcgtgggagcgggagcgagcgaagggagtatggacgcggccaacattttaaagcctgccctagctagaggcgagcttcacaccatcggggcgacaacgctcaaggagtatcgcaaatattttgagaaggatgccgcactccagcgccgattccagcctatttttttaaatgagccaaccatcaacgaggcgcttcagattttgcgcggaatcaaagagcgccttgaggctcaccataatgtcaccatctatgatagcgctcttgtggccgccgccaagctctctagccgatacatcaccgatcgctatcttcccgataaagcgattgacctcattgatgaagccgcggcggagctgaagatgcaaatcgaatcagagcccacggagcttagcctcatcaagcgccaaatccagcgccttgaggtggagaaagaggcgcttctcatggagaaagagagcacccatagcgaggcaagaatcaaggagattcaagccgagttggagaatgctaaagagcgtcagcgcacgctgttggctcaatttgaaaacgaaaaagcggtttttaacgagatcgcttccatcaaggcgaaagccgatgagctaaggcgagaatcagagcttgccaagcgctcaggggactacaacaaagccgccgagattgattatggcaaaatccctgaattggagaatcgagaaaaagagctcaacacccaatggaatcgaatgcaagagagcggaaccctgctcaaaaatgccgtaagcgaagagagtatcgcagggattgtgagtcgatggacacaaattcctgtgaaaaagatgctccaaggcgagaaagagaaggtcttgggcgtggaagaggagcttcgcaaggatgttgtagggcaggacgaggcactccatgcgattgctagggcgatcaagcgcaacaaagcggggctatctgagaataaccgacccatcgggagctttctctttctaggtcccacgggcgtgggcaagacgcagagtgcgaaaaccttggccaaattcctctttgattcggataagaatctggtgagaatcgatatgagtgagtatatggagaagcacgccgcaagccgacttgttggagcaccgcctggatatgtgggttatgaagagggcgggcagctcaccgaggcgattcgccgtaagccctatagcgtggtgctctttgatgagatcgaaaaagcacatcccgatgtctttaatattcttcttcaggtgcttgatgatgggcgcttgacagacaacaaaggggtgacggtcgattttaggaacaccattatcatcctcacctccaatatcgctagcgataagatcatggaaaatagcgacaaagagaggcgtgaaagcgcggtgaaggcagagctcaagcgctactttaagccagagtttctcaatcgccttgatgatattatcatcttcaatcctttagggctggcgcagattgttgagattgtagagatcatgtttgaaggaatcagagagaaactcaaagagcgacagatcacgctagagctcacccaaagtgctaaagagcagattgccgaagtcggctttgatcctgtttatggggctagacccctaaagcgagcgctctatgaggaggtggaggatcggcttgcggagctgattttagaggataaaatctctgagggaagccatgtggtttttgatgcgcaagggggcaaaatcatagcgcgcatttga

SEQ ID NO: 7454 - protein, 857 aa, Wolinella succinogenes
MNAFEKMTHQLRETLEQALSLALHAKNPEVDLPHMAWALLINSTSILNQALNKMGVDKSALELEAKSLVDRLPQSSSLTKENIKISKRLADSLTQAEALGVKGGDKFIAVDTWLLANLKEEPLKSLFSKYLDVNELKKNLESIRGGAKIESATDDENLESLAKYGIDLTQKALENKLDPVIGRDEEISRMMQILIRKTKNNPILLGEPGVGKTAVVEGLAQRIIAKEVPLSLQNKRVVALDMSALIAGAKYRGEFEDRLKKVVEEVKKAGNVILFIDEIHTIVGAGASEGSMDAANILKPALARGELHTIGATTLKEYRKYFEKDAALQRRFQPIFLNEPTINEALQILRGIKERLEAHHNVTIYDSALVAAAKLSSRYITDRYLPDKAIDLIDEAAAELKMQIESEPTELSLIKRQIQRLEVEKEALLMEKESTHSEARIKEIQAELENAKERQRTLLAQFENEKAVFNEIASIKAKADELRRESELAKRSGDYNKAAEIDYGKIPELENREKELNTQWNRMQESGTLLKNAVSEESIAGIVSRWTQIPVKKMLQGEKEKVLGVEEELRKDVVGQDEALHAIARAIKRNKAGLSENNRPIGSFLFLGPTGVGKTQSAKTLAKFLFDSDKNLVRIDMSEYMEKHAASRLVGAPPGYVGYEEGGQLTEAIRRKPYSVVLFDEIEKAHPDVFNILLQVLDDGRLTDNKGVTVDFRNTIIILTSNIASDKIMENSDKERRESAVKAELKRYFKPEFLNRLDDIIIFNPLGLAQIVEIVEIMFEGIREKLKERQITLELTQSAKEQIAEVGFDPVYGARPLKRALYEEVEDRLAELILEDKISEGSHVVFDAQGGKIIARI

SEQ ID NO: 7455 - DNA, 2616 bp, Xanthomonas axonopodis pv; identical to SEQ ID NO: 6779
  CDS (31)..(2616): transl_table=11

SEQ ID NO: 7456 - protein, 861 aa, Xanthomonas axonopodis pv
MRMDKLTSRFQQALADAQSLAVGRDHNIIEPVHVLAALLDQSGGSTRPLLSQAGVNVPLLRERLGEALDTLPKVSGQEGNLSIGNDLNRLLNQTDKLAQQHGDAFIASEWFVLAAADDASPLGVALRAAGGDKKKIEAAIDKLRGGETVQSENAEEQRQALEKYTIDLTARAESGKLDPVIGRDEEIRRTIQVLQRRTKNNPVLIGEPGVGKTAIVEGLAQRIINGEVPEGLRGKRVLSLDMGALIAGAKFRGEFEERLKAVLSDLSKNEGQIILFIDELHTMVGAGKADGAMDAGNMLKPALARGELHCIGATTLDEYRKYIEKDAALERRFQKVFVGEPTVEDTIAILRGLKERYAVHHGVEITDPAIVAAATLSNRYITDRQLPDKAIDLMDEAASRIRMEIDSKPEELDRLERRLIQLKIQREMLKKEKDDASRQRLADLETDIDKLEREFYDLNELWKSEKAALQGTTKVKEQIEHAKLELEAAQRRQDYAKMSEIQYGVLPQLEKQMALANEVEHHDFKLVQDRVTAEEIAEVVSRWTGIPVNKMLEGERDKLLRMEDELHHRVVGQNEAIKVVSDAVRRSRAGLSDPNRPSGSFLFLGPTGVGKTELCKALADFLFDSTEAMIRIDMSEFMEKHSVARLIGAPPGYVGYEEGGYLTEAVRRRPYSLILLDEVEKAHPDVFNILLQVLDDGRLTDGQGRTVDFRNTVIVMTSNLGSHQIQELSGDDSAEAYTQMKAAVMGVVQAHFRPEFINRLDDIVVFHPLDKAQIKSIARIQLQGLEKRLAERGLKLDLDDAALEVLGSVGFDPVYGARPLKRAIQSQVENPLAQQILSGQYLSGDSVRVRADGGRLVFTKD

SEQ ID NO: 7457 - DNA, 2586 bp, Xanthomonas campestris pv
  CDS (1)..(2586): transl_table=11
atgcggatggacaagctcacctcgcggttccagcaggcgctggccgacgcgcaatcgctggccgtgggccgcgaccacaacatcatcgaacccgtgcacgtgctggccgccttgctcgaccagagcggcggcagcacgcgcccgctgctgtcgcagtccggcgtcaacgtgccggcactgcgcgagcgcctgggcgaagcgctggacaccctgcccaaggtgtccgggcaggaaggcaacctgtcgatcggcaacgatctcaatcgcctgctcaaccagaccgacaagctcgcccagcaacatggcgatgccttcatcgccagcgagtggttcgtgctggccgctgccgacgatgccagcccgctgggcgtggccttgcgcgcggccggtggcgacaagaagaagatcgaagcggccatcgataaattgcgcggtggcgaaacggtgcaatcggaaaatgccgaggagcagcgccaggcgctggagaagtacaccatcgacctgaccgcgcgcgcggagagcggcaagctcgatccggtgatcggccgcgacgaagaaatccgccgcaccatccaggtgttgcagcgacgcaccaaaaacaacccggtgctgatcggcgaaccgggcgtgggcaagaccgccattgtcgaaggcctggcgcaacgcatcatcaacggcgaggtgcccgaaggcctgcgcggcaagcgcgtgctgtcgctggacatgggcgcgctgattgccggtgccaaattccgcggcgaattcgaagaacgcctgaaggcggtgctcagcgacctgtccaagaacgaaggccagatcatcctgttcatcgatgagctgcacaccatggtcggcgccggcaaggccgatggcgcgatggatgccggcaacatgctcaagccggcgctggcgcgcggcgagctgcattgcatcggcgccaccacgctggacgaataccgcaagtacatcgaaaaagacgctgcgctggagcgccgtttccagaaagttttcgtgggcgagccgacggtggaagacaccatcgccatcctgcgcggcttgaaggagcgctacgcggtgcatcacggcgtggagatcaccgacccggcgatcgtggccgcggccaccttgtccaaccgctacatcaccgaccgtcagttgccggacaaggccatcgacctgatggacgaagccgcatcgcgcatccgcatggagatcgattccaagcctgaagagctcgaccgcctggagcgccgcctgatccagctcaagatccagcgcgagatgctcaagaaggaaaaggacgaggcctcgcggcaacgtctggccgatctggaaagcgacatcgacaagctcgagcgcgaattctccgacctcaacgaagtgtggaagtcggagaaggccgcgctgcagggcaccaccaagatcaaggagcagatcgagcacgccaagctggagctggaagcggcgcagcggcgccaggactacgccaagatgagcgagatccagtacggcgtattgccgcagctggaaaagcagatgctgctggccaacgaagtggagcatcacgacttcaagctggtgcaggaccgcgtgaccgccgaagaaatcgccgaggtggtgtcgcgttggaccggtatcccggtcaacaagatgctcgaaggcgagcgcgacaaactgctgcgcatggaagacgaactgcaccgccgcgtggtggggcaggaagaggcgatcaaggtggtgtccgatgcggtgcgccgctcgcgtgccggcctgtccgatcccaatcgtccgagcggttcgttcctgttcctgggcccgaccggcgtgggcaagaccgagctgtgcaaggcgttggcggatttcctgttcgacagcaccgaggccatgatccgcatcgacatgagcgagttcatggagaagcattcggtctcgcgcctgatcggtgcgcctccgggctatgtgggctacgaggagggcggttacctcaccgaggcggtgcggcggcgcccgtattcgctgatcctgctcgacgaagtggagaaggcgcacgccgatgtcttcaacatcctgttgcaggtgctcgacgatggccgcctcaccgacggccagggacgtaccgtggacttccgcaataccgtcatcgtgatgacctccaacctgggctcgcaccagatccaggagttgtccggcgacggcagcgccgaggcctacacgcagatgaaggcggcggtgatgggcgtggtgcaggcgcacttccgcccagaattcatcaaccggctcgacgacatcgtggtgttccatccgctggacaaggcgcagatcaagtcgatcgcgcgcatccagttgcagggcctggaaaagcgcctggccgaacgcggcctcaagctggacctggacgacccggcgctggaattgctgggcaatgtcggcttcgacccggtgtatggcgcgcgcccgctgaagcgtgcgatccagtcgcaggtggaaaacccgctggcccagcagattctctccggccagtacaccagcggcgacaccgtgcgtgtacgcaccgaaggtggacatctggcgtttaccaagggctga

SEQ ID NO: 7458 - protein, 861 aa, Xanthomonas campestris pv
MRMDKLTSRFQQALADAQSLAVGRDHNIIEPVHVLAALLDQSGGSTRPLLSQSGVNVPALRERLGEALDTLPKVSGQEGNLSIGNDLNRLLNQTDKLAQQHGDAFIASEWFVLAAADDASPLGVALRAAGGDKKKIEAAIDKLRGGETVQSENAEEQRQALEKYTIDLTARAESGKLDPVIGRDEEIRRTIQVLQRRTKNNPVLIGEPGVGKTAIVEGLAQRIINGEVPEGLRGKRVLSLDMGALIAGAKFRGEFEERLKAVLSDLSKNEGQIILFIDELHTMVGAGKADGAMDAGNMLKPALARGELHCIGATTLDEYRKYIEKDAALERRFQKVFVGEPTVEDTIAILRGLKERYAVHHGVEITDPAIVAAATLSNRYITDRQLPDKAIDLMDEAASRIRMEIDSKPEELDRLERRLIQLKIQREMLKKEKDEASRQRLADLESDIDKLEREFSDLNEVWKSEKAALQGTTKIKEQIEHAKLELEAAQRRQDYAKMSEIQYGVLPQLEKQMLLANEVEHHDFKLVQDRVTAEEIAEVVSRWTGIPVNKMLEGERDKLLRMEDELHRRVVGQEEAIKVVSDAVRRSRAGLSDPNRPSGSFLFLGPTGVGKTELCKALADFLFDSTEAMIRIDMSEFMEKHSVSRLIGAPPGYVGYEEGGYLTEAVRRRPYSLILLDEVEKAHADVFNILLQVLDDGRLTDGQGRTVDFRNTVIVMTSNLGSHQIQELSGDGSAEAYTQMKAAVMGVVQAHFRPEFINRLDDIVVFHPLDKAQIKSIARIQLQGLEKRLAERGLKLDLDDPALELLGNVGFDPVYGARPLKRAIQSQVENPLAQQILSGQYTSGDTVRVRTEGGHLAFTKG

SEQ ID NO: 7459 - DNA, 2586 bp, Xylella fastidiosa
  CDS (1)..(2586): transl_table=11
atgcggatggataagcttacttcgcgtttccagaatgcgttggctgatgcgcaatcgctggccgtcggtcgtgaccatactattattgagccggtgcatgttttttcggcattgcttgatcagcagggggggagtacacgtccgttgctcatgcaggccggtgtcaatgtgccattgctgcgtgagcggttgaccgagatacttgaggcattgccgaaagtgagtggtcagacggttaatgtctcacccagcaatgaattgagtcgtttgtttcatcggactgataagttagcgcagcagcatggcgatcagtttatggccagtgagtggttcgtgttggctgtggtcgatgatagtggggggctgggccaggcgttgcgtgctgctggtgcggaaaaaaagaagattgaggctgcgattgataaattgcgtggcggtgaaactgtccagactgagaatgcggaggagcagcgtcaagcgttggaaaagtacacgattgatctgactgccagggctgagagtggcaagcttgatccggtgattggtcgcgatgaggaaattcgccgcacgatacaggtattgcagcggcgtacaaaaaataatcctgtgctgattggtgagccgggtgtgggtaaaactgccattgtagaagggctggctcagcgcattgtcaatggtgaggttccggaagggttgcgcagtaagcgtctgctctcgctggatttgggagcgttgattgctggggccaagtttcgtggtgagtttgaggagcgcttgaagggggtgcttaacgatctcgctaagaatgaggggcgggtcattttgttcattgacgagctgcataccatggttggtgccggtaaagccgatggtgcgatggatgctggcaatatgctcaagccggcgttagcacgtggtgagttgcattgtatcggtgcgactacgttggatgagtatcgcaagtacattgagaaggatgcggcgttggaacgccgtttccagaaggtgtttgttggggagccgacggtggaggataccatcgcaattcttcgtggacttaaggaaaagtatgcgttgcaccacggtgtggaaatcactgatccggctattgttgctgcggctacgctgtctaatcgctacatcactgatcgtcagttaccagataaagcgattgacttgatggatgaggctgccagtcgtattcgtatggaaattgactccaagccggaagagcttgatcgtttggagcgtcggttgattcagttgaaaattcagcgtgagatgctgaagaaagaaaaggatgaggcgagcaagcagcgtttagccgatcttgagcgtgatattgaggttctggaccgtgaattttccgatctggaggaggtgtggagatcagaaaaagccgcgctacagggggcgactaagatcaaggagtcgatcgagcaggccaagcttgatttggaagccgcgcagcgccgtcaggactacgccaagatgagcgagattcagtatggtgtactccccgcgttggagaagcagctggtggcagcaagtcaggcggaacagcacgattttacgttggtgcaggagaaagtgactgctgaggagattgccgaggtagtcagtcgttggactggtattccagtgagcaagatgcttgagggcgagcgcgataagttgttgcgtatggaagctgatctaggccgacgtgtggttggtcaagaggaggcgatcaaggtggtatcggatgcggtacgccgttcgcgtactggtttgtctgatccaaatcgaccgagcggctcgttcctttttctgggtccgacgggtgttggtaagactgagttatgtaaggcgctggctgaatttttgttcgacagtcaagatgcaatggtccgcattgatatgagtgagttcatggaaaagcattctgtggcgcgcctgattggtgcgcctccgggctatgtgggttatgaggaaggaggttatcttactgaattggtgcgacgtcggccttactctctgattcttttggatgaagtggagaaggcgcatagtgatgtgttcaatattctgctgcaagtacttgatgatggacgcttgactgatggtcagggccgtactgttgattttcgcaataccgttattgtgatgacatcgaacttgggttcacatcagatccaagaactcagtggagacgattctccggaggtgtatacgcaaatgaaggcggcagtgatggaggtggtgcaggcgcattttcgcccagagttcattaacaggttggatgatattgttgttttccacccgttggacaaggcgcaaatcaagcagattgcgcggattcaactgcaggggcttgagaagcgtctcgctgaatctgagttgaaactagatttggatgatcgtgcgttggaattgcttggtaatgtcggatttgatcctgtatatggtgcccgcccgctgaagagagcgatccaatctcagctggagaatcccttagcgcagcagatcttagctgaagcgttcgtcagtggagatactgtgcaggtgggtgttgatggagggaagcttgtattcgctaaggtgtga

SEQ ID NO: 7460 - protein, 861 aa, Xylella fastidiosa
MRMDKLTSRFQNALADAQSLAVGRDHTIIEPVHVFSALLDQQGGSTRPLLMQAGVNVPLLRERLTEILEALPKVSGQTVNVSPSNELSRLFHRTDKLAQQHGDQFMASEWFVLAVVDDSGGLGQALRAAGAEKKKIEAAIDKLRGGETVQTENAEEQRQALEKYTIDLTARAESGKLDPVIGRDEEIRRTIQVLQRRTKNNPVLIGEPGVGKTAIVEGLAQRIVNGEVPEGLRSKRLLSLDLGALIAGAKFRGEFEERLKGVLNDLAKNEGRVILFIDELHTMVGAGKADGAMDAGNMLKPALARGELHCIGATTLDEYRKYIEKDAALERRFQKVFVGEPTVEDTIAILRGLKEKYALHHGVEITDPAIVAAATLSNRYITDRQLPDKAIDLMDEAASRIRMEIDSKPEELDRLERRLIQLKIQREMLKKEKDEASKQRLADLERDIEVLDREFSDLEEVWRSEKAALQGATKIKESIEQAKLDLEAAQRRQDYAKMSEIQYGVLPALEKQLVAASQAEQHDFTLVQEKVTAEEIAEVVSRWTGIPVSKMLEGERDKLLRMEADLGRRVVGQEEAIKVVSDAVRRSRTGLSDPNRPSGSFLFLGPTGVGKTELCKALAEFLFDSQDAMVRIDMSEFMEKHSVARLIGAPPGYVGYEEGGYLTELVRRRPYSLILLDEVEKAHSDVFNILLQVLDDGRLTDGQGRTVDFRNTVIVMTSNLGSHQIQELSGDDSPEVYTQMKAAVMEVVQAHFRPEFINRLDDIVVFHPLDKAQIKQIARIQLQGLEKRLAESELKLDLDDRALELLGNVGFDPVYGARPLKRAIQSQLENPLAQQILAEAFVSGDTVQVGVDGGKLVFAKV

SEQ ID NO: 7461 - DNA, 2586 bp, Xylella fastidiosa
  CDS (1)..(2586): transl_table=11
atgcggatggataagcttacttcgcgtttccagaatgcgttggctgatgcgcaatcgctggccgtcggtcgtgaccatactattattgagccggtgcatgttttttcggtattgcttgatcagcagggggggagtacacgtccgttgctcgtgcaggccggtgtcaatgtgccattgctgcgtgagcggttgaccgagatacttgaggcattgccgaaagtgagtggtcagacggttaatgtctcacccagcaatgaattgagtcgtttgtttcatcggactgataagttagcgcagcagcatggtgatcagtttatggccagtgagtggttcgtgttggctgtggtcgatgatagtggggggctgggccaggcgttgcgtgctgctggtgcggaaaaaaagaagattgaggctgcgattgataaattgcgtggtggtgaaactgtccagactgagaatgcggaggagcagcgtcaagcgttggaaaagtacacgattgatctgactgccagggctgagagtggcaagcttgatccggtgattggtcgtgatgaggaaattcgccgcacgatacaggtattgcagcggcgtacaaaaaataatcctgtgctgattggtgagccgggtgtgggtaaaactgccattgtagaagggctggctcagcgcattgtcaatggtgaggttccggaagggttgcgcagtaagcgtctgctctcgctggatttgggggcgttgattgctggggccaagtttcgtggtgagttcgaggagcgcttgaagggggtgcttaacgatctcgctaagaatgaggggcgggtcattttgttcattgacgagctgcataccatggttggtgccggtaaagccgagggtgcgatggatgctggcaatatgctcaagccggcgttagcacgtggtgagttgcattgtatcggtgcgactacgttggatgagtatcgcaagtacattgagaaggatgcggcgttggaacgccgtttccagaaggtgtttgttggggagccgacggtggaggataccatcgcaattcttcgtggacttaaggaaaagtatgcgttgcaccacggtgtggaaatcactgatccggctattgttgctgcggctacgctgtctaatcgctacatcactgatcgtcagttaccagataaagcgattgacttgatggatgaggctgccagtcgtattcgtatggaaattgactccaagccggaagagcttgatcgtttggagcgtcggttgattcagttgaaaattcagcgtgagatgctgaagaaagaaaaggatgaggcgagcaagcagcgtttagtcgatcttgagcgtgatattgaggttctggaccgtgaattttccgatctggaggaggtgtggagatcagaaaaagccgcgctacagggggcgactaagatcaaggagtcaatcgagcaggccaagcttgatttggaagccgcgcagcgccgtcaggactacgccaagatgagcgagattcagtatggtgtactccccgcgttggagaagcagctagtggcagcaagtcaggcggaacagcacgattttactttggtgcaggagaaagtgactgctgaggagattgccgaggtagtcagtcgttggactggtattccagtgagcaagatgcttgagggcgagcgcgataagttgttgcgtatggaagctgatctaggtcgacgtgtggttggtcaagatgaggcgatcaaggtggtatcggatgcggtgcgccgttcgcgtactggtttgtctgatccaaatcgaccgagcggctcgttcctttttctgggtccgacgggtgttggtaagactgagttatgtaaggcgctggctgaatttttgttcgacagtcaagatgcaatggtccgcattgatatgagtgagttcatggaaaaacattctgtggcgcgcctgattggtgcgcctccgggctatgtgggttatgaggaaggaggttatcttactgaattggtgcgacgtcggccttactctctgattcttttggatgaagtggagaaggcgcatagtgatgtgttcaatattctgctgcaagtacttgatgatggacgcttgactgatggtcagggccgtactgttgattttcgcaataccgttattgtgatgacatcaaacttaggttcacatcagatccaagaactcagtggagacgattctccggaggtgtatacgcaaatgaaggcggcagtgatgggggtggtgcaggcgcattttcgcccagaattcattaacaggttggatgatattgttgttttccacccgttggacaaggcgcaaatcaagcagattgcgcggattcaactgcgggggctagagaagcgtctcgctgaatctgagttgaaactagatttggatgatcgtgcgctggaattgcttggtaatgtcggatttgatcctgtatatggtgcccgcccgctgaagagagcaatccaatctcagctggagaatgccttagcgcagcagatcttagctggagcgttcgtcagtggagatactgtgcaggtgggtgttgatggagggaagcttgtattctctaaggtgtga

SEQ ID NO: 7462 - protein, 861 aa, Xylella fastidiosa
MRMDKLTSRFQNALADAQSLAVGRDHTIIEPVHVFSVLLDQQGGSTRPLLVQAGVNVPLLRERLTEILEALPKVSGQTVNVSPSNELSRLFHRTDKLAQQHGDQFMASEWFVLAVVDDSGGLGQALRAAGAEKKKIEAAIDKLRGGETVQTENAEEQRQALEKYTIDLTARAESGKLDPVIGRDEEIRRTIQVLQRRTKNNPVLIGEPGVGKTAIVEGLAQRIVNGEVPEGLRSKRLLSLDLGALIAGAKFRGEFEERLKGVLNDLAKNEGRVILFIDELHTMVGAGKAEGAMDAGNMLKPALARGELHCIGATTLDEYRKYIEKDAALERRFQKVFVGEPTVEDTIAILRGLKEKYALHHGVEITDPAIVAAATLSNRYITDRQLPDKAIDLMDEAASRIRMEIDSKPEELDRLERRLIQLKIQREMLKKEKDEASKQRLVDLERDIEVLDREFSDLEEVWRSEKAALQGATKIKESIEQAKLDLEAAQRRQDYAKMSEIQYGVLPALEKQLVAASQAEQHDFTLVQEKVTAEEIAEVVSRWTGIPVSKMLEGERDKLLRMEADLGRRVVGQDEAIKVVSDAVRRSRTGLSDPNRPSGSFLFLGPTGVGKTELCKALAEFLFDSQDAMVRIDMSEFMEKHSVARLIGAPPGYVGYEEGGYLTELVRRRPYSLILLDEVEKAHSDVFNILLQVLDDGRLTDGQGRTVDFRNTVIVMTSNLGSHQIQELSGDDSPEVYTQMKAAVMGVVQAHFRPEFINRLDDIVVFHPLDKAQIKQIARIQLRGLEKRLAESELKLDLDDRALELLGNVGFDPVYGARPLKRAIQSQLENALAQQILAGAFVSGDTVQVGVDGGKLVFSKV

SEQ ID NO: 7463 - DNA, 2574 bp, Yersinia pestis
  CDS (1)..(2574): transl_table=11
atgcgtctggatcgtcttaccagtaaattccagcttgccctcgccgatgcccagtctttagctcttgggcgcgacaaccagtttattgaaccgttacatttgatgagcgcactgcttaatcaggatggggggacggttcgccctttattgacctcggcagggattaatgttgcacgtttacgtagcgacattgagcaagctttaggtcgtcttcctcaagttgaaggcaccggcggtgatgttcaaccatcaaacgagctggttcgtgtattaaatctttgcgacaaattagcgcagaaacgttcggataagtttatctcttccgagctgttcgtcctggccgtacttgaagatcgtggcacgttaactgacatgttaaaggctgcaggtgcaaccgtcgctataatagataaggcaattgaaaccatgcgtggtggtgacaaagtcgatgatcagggtgctgaagatcagcgccaggcgttgaaaaaattcactatcgacctgactgagcgtgccgagcaaggcaaactcgatccggttattggccgtgatgaagaaattcgccgtactattcaggtattacaacgtcgaaccaaaaataacccagtgttgattggtgagcctggggtgggtaaaaccgctattgtggaaggtttggcgcaacgcattgtgaacggcgaagtgccagaaggcttgaagcataagcgtgtactctcattagatatggggtcgctgattgccggtgccaaatatcgtggtgaatttgaagagcgtttgaaaggcgtactgaacgacttatcaaaacaagaaggcagtgtgatcttgtttattgatgagttgcataccatggtcggtgccggtaaaggcgatggggcgatggatgccggtaacatgctgaaacctgcattagcgcgaggtgagttacattgtgtgggggccactaccctcgatgaataccgtcaatatatagagaaagatgctgcgctcgagcggcgtttccaaaaagtgtatgttgcggaaccaacggtagaagacactatcgctattttacgtgggctgaaagagcgctacgaactgcaccatcacgtgcagatcactgacccagctattgtggcagccgcaacattgtcacaccggtatatttctgatcgtcagttaccggataaagctatcgacctcattgatgaggcaggttccagcatccgtatgcaaatggattcaaaacccgaatcattggatcgtctagagcgccggattattcagcttaaactggaacagcaggccctaaaaaaagagtcagatgacgccagtaaaaaacggttggaaatgctcaatactgagttagagcaaaaagagcgtgaatattctgaactggaagaagagtggaaagcagaaaaagcttcactcaccgggactcagaatatcaagacggagttggaacaagctaaaatcaccttagaacaagctcgtcgagtaggtgatctggctcggatgtcagaacttcagtacggtacaatccctgagctggaaaaacagctggcggcggcaaccgcgctagaagggaaaaccatgaagttgctgcgtaaccgtgtcacagaaatcgaagttgctgaagtcctggctcgctggaccggtatcccggtatctcgcatgttgaaaagtgagcgggataagctgctacgtatggaacaggacttgcatcaacgagtcattgggcaagatgaagctgttgaagccgtctccaacgctatccgtcggagtcgcgcagggttgtctgatccaaaccgaccaattggttcgttcttattcttagggccaacgggggttggtaaaactgaattgtgtaaagcgttggcaacgttcttgttcgacagtgacgatgccatggtgcgaatcgacatgtccgagtttatggagaaacattccgtatcgcggttggtcggtgcacctcctggctatgttgggtatgaagaaggtggctatctgacggaagcggttcgtcgtcgtccttattctgtgattttgctggatgaagttgaaaaagcacatccagatgttttcaacatattgttacaggtattggatgatggtcgtttgaccgacgggcaggggagaactgtcgactttcgtaacacggtagtcattatgacctctaaccttggttcagatttgattcaggaacatttcggccaaatgaattacagcgaaatgaagacagtggttatggatgttgttagtcaccacttccgtcctgaatttattaaccgtatagatgaggttgttgtcttccacccacttggtcgggcgcacttggcttctattgccaacattcaactggagcgtttgtataaacgtctggaagaacgtggctatgaagtgaagattactcagcctgcattggaattcttgggtgaagctggcttcgaccctgtttatggggcgcggccattaaaacgtgcaattcagcaggaaattgagaacccgctggcacagcagatactttctggcaaactaataccgggaatccccgtgactttagatgttgaaaatgggcatattattgctaagcagtaa

SEQ ID NO: 7464 - protein, 857 aa, Yersinia pestis
MRLDRLTSKFQLALADAQSLALGRDNQFIEPLHLMSALLNQDGGTVRPLLTSAGINVARLRSDIEQALGRLPQVEGTGGDVQPSNELVRVLNLCDKLAQKRSDKFISSELFVLAVLEDRGTLTDMLKAAGATVAIIDKAIETMRGGDKVDDQGAEDQRQALKKFTIDLTERAEQGKLDPVIGRDEEIRRTIQVLQRRTKNNPVLIGEPGVGKTAIVEGLAQRIVNGEVPEGLKHKRVLSLDMGSLIAGAKYRGEFEERLKGVLNDLSKQEGSVILFIDELHTMVGAGKGDGAMDAGNMLKPALARGELHCVGATTLDEYRQYIEKDAALERRFQKVYVAEPTVEDTIAILRGLKERYELHHHVQITDPAIVAAATLSHRYISDRQLPDKAIDLIDEAGSSIRMQMDSKPESLDRLERRIIQLKLEQQALKKESDDASKKRLEMLNTELEQKEREYSELEEEWKAEKASLTGTQNIKTELEQAKITLEQARRVGDLARMSELQYGTIPELEKQLAAATALEGKTMKLLRNRVTEIEVAEVLARWTGIPVSRMLKSERDKLLRMEQDLHQRVIGQDEAVEAVSNAIRRSRAGLSDPNRPIGSFLFLGPTGVGKTELCKALATFLFDSDDAMVRIDMSEFMEKHSVSRLVGAPPGYVGYEEGGYLTEAVRRRPYSVILLDEVEKAHPDVFNILLQVLDDGRLTDGQGRTVDFRNTVVIMTSNLGSDLIQEHFGQMNYSEMKTVVMDVVSHHFRPEFINRIDEVVVFHPLGRAHLASIANIQLERLYKRLEERGYEVKITQPALEFLGEAGFDPVYGARPLKRAIQQEIENPLAQQILSGKLIPGIPVTLDVENGHIIAKQ

SEQ ID NO: 7465 - DNA, 2433 bp, Bacillus subtilis
  CDS (1)..(2433): transl_table=11
atgatgtttggaagatttacagaacgagctcaaaaagtactggcgctagcacaggaagaagcacttcggttaggtcataataacattggcactgagcatattttattaggactggtaagagaaggagagggcattgctgctaaagctcttcaagcgcttggactcggttcagaaaaaattcagaaagaagtagaaagtttgatcgggcgcgggcaggaaatgtctcaaacgattcattatactcctagagctaaaaaagtcattgagctttcaatggatgaggcaagaaaactcggtcattcttatgtgggaacagaacatattcttcttggtctgattcgtgaaggagaaggtgttgctgcgagagttctgaataatctcggtgtcagcttaaataaagcaagacagcaggtgctccagcttctaggaagtaatgaaacaggatcatcagcggcaggaacaaacagcaatgcgaatacgcctacgcttgacagcttggcaagagacttaactgctattgcgaaggaagacagccttgaccctgtaatcggcagaagcaaggagatccagcgtgtcattgaagtgttaagccgcagaacgaaaaacaaccctgttctcattggggaaccaggtgtaggtaaaacggctatcgcagaaggtttggcacagcaaattatcaataatgaagtacccgaaattttgcgtgataaacgtgtgatgacattagacatgggaacagttgttgccggcacaaaataccgcggagaatttgaggatcgcctgaagaaggtcatggatgaaattcgccaggcaggaaatatcattctattcatcgatgagctccatacattaatcggggcaggcggagcagaaggtgctattgatgcatctaatattttaaaaccttcacttgctcgtggcgaactccaatgtattggtgcaacgactcttgatgagtaccgtaaatatattgaaaaagatgcagcactggaacgccgttttcagccgattcaggttgatcagccatctgtagatgaaagtattcaaattttacaaggtctgcgtgacagatacgaagcccaccaccgcgtttctatcactgatgatgccattgaagctgcggttaagctttctgacagatatatttctgaccgcttccttccggataaagcaattgacttgatcgatgaagcgggttcaaaggtgagactgcgctcatttacaacgcctcctaacttaaaagagcttgagcagaagcttgatgaggttcgtaaagagaaggatgcggcagtgcaaagccaagagtttgaaaaagctgcttccttgcgtgatactgaacaacgcctgcgcgagcaagtagaggatacgaagaaatcatggaaagagaagcaagggcaggaaaactcagaggttactgtggatgatattgcgatggttgtatccagctggaccggtgtgcctgtatctaaaatcgcccaaactgaaactgataagcttctcaatatggaaaacattcttcactcccgtgtcatcggccaggatgaagcagttgtagcggttgcaaaagccgtcagacgtgcaagagcaggattgaaagatcctaaacgcccaatcggctcattcattttcttaggccctacaggtgtaggtaaaacagaacttgcacgagcacttgctgaatccatttttggcgatgaagaatccatgatcagaattgatatgtctgaatacatggaaaaacattcaacttcaagacttgttggttcacctccgggttatgtgggatatgatgaaggcggtcaattgacagagaaagtcagaagaaaaccttactctgtcgtgcttcttgatgagatcgagaaagcgcaccctgatgtcttcaatatccttctgcaagttcttgaagacggacgattgactgattctaaaggacgcacagtcgatttccgcaataccattctgatcatgacatcaaacgtcggagcaagtgagctaaaacgcaataaatatgtcggctttaacgttcaggatgaaactcaaaatcataaagacatgaaagataaagtgatgggtgaattaaaacgagcgttcagacctgagttcatcaaccgtattgatgaaatcattgtcttccattcacttgagaaaaaacatctcactgagattgtgtcattaatgtctgatcaattaacgaaacgcctgaaagaacaagatctttctatcgaattgacagatgctgcaaaagcgaaagtcgcggaagagggcgttgacctggaatacggtgcccgtccgttaagaagagcgatccaaaaacatgtcgaggatcgtttatctgaagaactcctcagaggaaatattcataaaggacagcatattgttcttgatgtagaagatggcgaatttgtcgtaaaaacgactgctaaaacgaattaa

SEQ ID NO: 7466 - protein, 810 aa, Bacillus subtilis
MMFGRFTERAQKVLALAQEEALRLGHNNIGTEHILLGLVREGEGIAAKALQALGLGSEKIQKEVESLIGRGQEMSQTIHYTPRAKKVIELSMDEARKLGHSYVGTEHILLGLIREGEGVAARVLNNLGVSLNKARQQVLQLLGSNETGSSAAGTNSNANTPTLDSLARDLTAIAKEDSLDPVIGRSKEIQRVIEVLSRRTKNNPVLIGEPGVGKTAIAEGLAQQIINNEVPEILRDKRVMTLDMGTVVAGTKYRGEFEDRLKKVMDEIRQAGNIILFIDELHTLIGAGGAEGAIDASNILKPSLARGELQCIGATTLDEYRKYIEKDAALERRFQPIQVDQPSVDESIQILQGLRDRYEAHHRVSITDDAIEAAVKLSDRYISDRFLPDKAIDLIDEAGSKVRLRSFTTPPNLKELEQKLDEVRKEKDAAVQSQEFEKAASLRDTEQRLREQVEDTKKSWKEKQGQENSEVTVDDIAMVVSSWTGVPVSKIAQTETDKLLNMENILHSRVIGQDEAVVAVAKAVRRARAGLKDPKRPIGSFIFLGPTGVGKTELARALAESIFGDEESMIRIDMSEYMEKHSTSRLVGSPPGYVGYDEGGQLTEKVRRKPYSVVLLDEIEKAHPDVFNILLQVLEDGRLTDSKGRTVDFRNTILIMTSNVGASELKRNKYVGFNVQDETQNHKDMKDKVMGELKRAFRPEFINRIDEIIVFHSLEKKHLTEIVSLMSDQLTKRLKEQDLSIELTDAAKAKVAEEGVDLEYGARPLRRAIQKHVEDRLSEELLRGNIHKGQHIVLDVEDGEFVVKTTAKTN

SEQ ID NO: 7467 - DNA, 2769 bp, Pisum sativum
  CDS (1)..(2769)
atggctagagttttggctcagtcacttagtgttcctggcctagtggctgggcacaaggacagtcaacataagggatcgggaaaatctaagagatcagtcaagacgatgtgtgctttgcgaacaagcggattaagaatgtcaggtttctcaggacttcgtactttcaatcatttgaatactatgatgagacctggactggattttcactcaaaggtatcaaaggcagtttcttcacggcgggcaagggctaagagattcattcctagagccatgtttgagcgtttcaccgagaaagcaatcaaagtgataatgctagctcaggaggaagcaagacgtcttggtcacaattttgtcggaactgagcagattcttttgggtcttattggtgaaggcactggtatcgccgccaaggttttaaagtctatgggaatcaaccttaaagatgcacgtgttgaagtggagaagataattggaaggggtagtggatttgttgctgtcgagattccatttactccccgtgcaaagcgtgtattggaactttcacaggaggaagctcgccaacttggtcacaattatattggatcagagcacttgcttctaggtcttcttcgagagggtgagggtgtagcagcacgtgttcttgaaaacttgggcgctgatcctactaatattcgcacacaggttattcgcatggtgggtgagagtgctgacagtgttaccgctactgttggctcaggaagtagtaacaacaaaacgccaactttggaggagtatggaaccaatttgaccaagctagcagaagagggaaagttggatcctgttgtgggaaggcagccacagattgagcgtgtcacccaaattttaggccgccgcaccaaaaataatccttgtcttattggagagcctggtgttgggaagacagcaattgctgaaggtcttgctcagcggattgctaatggtgatgtacctgaaacaatcgaaggaaaaaaggttataaccctcgatatgggtctgcttgtagctggaaccaaataccgtggtgagtttgaggagaggttgaagaaactgatggaagaaatcaaacaaagtgatgatattatactttttatcgatgaagtgcacactctaattggagcaggagcagctgaaggtgctattgatgctgctaacatactaaaaccagctcttgcaagaggtgaactacagtgtattggggccacaacattggacgaatacaggaagcatattgaaaaagacccagatttggagagacgattccagccagttaaagtaccagaaccaactgtagatgaaaccatacaaatactgaaaggacttagagaacgttatgagattcaccacaagctccgctatactgatgaggctcttatagctgctgcgcaactttcgtaccagtatatcagtgatcgatttttgcctgacaaagctatagatttggttgatgaagctggttcacgagtccgtcttcaacatgcacagttgccagaagaggcaaaagaacttgacaaggaggtcaggaagattgttaaggagaaagaggaatatgttcgcaaccaagactttgaaaaggctggagaactgcgtgataaagaaatggatctcaaggcacagatctcagcacttatagagaaaggcaaggagatgagcaaagcagagactgagacagcagatgaaggtcccattgtgactgaagttgacattcaacatattgtgtcctcctggacaggcattcctgttgataaagtctcagcagatgaatctgatcgtctcctcaagatggaagatactttacacaagcgaatcattggtcaggatgaagcagtgcaagccattagccgtgctatccgtcgagcccgagttggattgaagaaccctaatcgtccaattgccagcttcatcttttctggtccaactggtgtggggaagtctgaattggccaaagcattggctgcatactactttggctctgaagaagccatgattcgtcttgacatgagtgaatttatggaaaggcacacagtctccaaacttattggttcacctccaggatatgttggttacaccgaaggcggtcaattgactgaagcagttcgacgtcgtccttacactgttgtactctttgatgagattgagaaagcccatcctgatgtattcaacatgatgcttcaaatccttgaagatggaagactaacagacagcaagggtagaactgtggatttcaagaacacacttcttataatgacatcaaatgttggaagcagtgtgattgagaaaggaggccgccgaattggatttgatttggattacgatgagaaagatagcagttataatagaatcaagagcttggtgactgaggagctaaaacaatacttcaggccagagtttttgaataggttggatgaaatgattgttttcagacaactcacaaaattggaagtgaaggagatagcagacataatgctcaaggaggtgtttcaaagacttaagaccaaagaaattgaacttcaagtcacagaaagatttagggacagggtggttgatgaaggttataatcctagttacggagctaggcctctaagaagagccataatgcgacttttggaggatagcatggctgagaagatgctcgccagagagatcaaagagggtgattctgtcatagtggatgttgattctgatggtaaagtgattgttctcaacggtagcagcggcactccagagtcgttaccagaggctctttctatataa

SEQ ID NO: 7468 - protein, 922 aa, Pisum sativum
MARVLAQSLSVPGLVAGHKDSQHKGSGKSKRSVKTMCALRTSGLRMSGFSGLRTFNHLNTMMRPGLDFHSKVSKAVSSRRARAKRFIPRAMFERFTEKAIKVIMLAQEEARRLGHNFVGTEQILLGLIGEGTGIAAKVLKSMGINLKDARVEVEKIIGRGSGFVAVEIPFTPRAKRVLELSQEEARQLGHNYIGSEHLLLGLLREGEGVAARVLENLGADPTNIRTQVIRMVGESADSVTATVGSGSSNNKTPTLEEYGTNLTKLAEEGKLDPVVGRQPQIERVTQILGRRTKNNPCLIGEPGVGKTAIAEGLAQRIANGDVPETIEGKKVITLDMGLLVAGTKYRGEFEERLKKLMEEIKQSDDIILFIDEVHTLIGAGAAEGAIDAANILKPALARGELQCIGATTLDEYRKHIEKDPDLERRFQPVKVPEPTVDETIQILKGLRERYEIHHKLRYTDEALIAAAQLSYQYISDRFLPDKAIDLVDEAGSRVRLQHAQLPEEAKELDKEVRKIVKEKEEYVRNQDFEKAGELRDKEMDLKAQISALIEKGKEMSKAETETADEGPIVTEVDIQHIVSSWTGIPVDKVSADESDRLLKMEDTLHKRIIGQDEAVQAISRAIRRARVGLKNPNRPIASFIFSGPTGVGKSELAKALAAYYFGSEEAMIRLDMSEFMERHTVSKLIGSPPGYVGYTEGGQLTEAVRRRPYTVVLFDEIEKAHPDVFNMMLQILEDGRLTDSKGRTVDFKNTLLIMTSNVGSSVIEKGGRRIGFDLDYDEKDSSYNRIKSLVTEELKQYFRPEFLNRLDEMIVFRQLTKLEVKEIADIMLKEVFQRLKTKEIELQVTERFRDRVVDEGYNPSYGARPLRRAIMRLLEDSMAEKMLAREIKEGDSVIVDVDSDGKVIVLNGSSGTPESLPEALSI

SEQ ID NO: 7469 - DNA, 2736 bp, Arabidopsis thaliana
  CDS (1)..(2736)
atgaatccagagaaattcacacacaagacaaacgagacaattgctacagctcatgagctagctgtgaatgcaggacatgctcaattcactcctttgcatttagctggtgctttgatctctgatcccaccggtatatttcctcaagcaatctctagtgccggtggcgagaacgcagctcaatctgctgaaagagtgatcaatcaagccttgaagaagcttccttcacaatctcctccacctgatgatattccagcgagttctagtcttattaaggtcattcgtcgtgctcaagctgctcagaagtcacgaggtgatactcatttggctgttgaccagttgattatgggtcttcttgaagattctcaaatcagggatttgttgaacgaagtcggtgtagcgacggcgagggtaaagtctgaggttgagaagcttcgtgggaaagaagggaagaaagttgagagtgcttcaggggacacaaattttcaagctttaaagacttatggaagagatttggttgagcaagcagggaagcttgatcctgtgattggtcgtgatgaggagattagaagagtcgtgaggattctttcgaggagaacgaagaacaatcctgtgcttattggagagccaggagttggtaaaacagctgtggttgaaggtttagcacaaaggattgtgaaaggagatgtgcccaacagtcttactgatgtgagattaatttcgttggacatgggtgcgttagttgctggtgctaaataccgaggagagtttgaagaaaggttgaaatctgttttgaaagaagttgaggacgctgaaggcaaagtgattctctttattgatgagattcatttggttcttggtgctggcaaaactgaagggtcgatggatgcagctaatctgttcaagcccatgttagctagagggcagcttcgatgcattggtgctacaacgcttgaagaatacaggaaatatgttgagaaagatgctgcctttgagaggaggttccaacaagtctatgttgcggagccaagtgtgcctgacaccattagtatccttagaggactcaaggagaagtatgagggacatcatggtgtgcgaatccaagacagagctcttataaatgctgctcagctgtctgctcgttacataactggtcggcatttaccggataaagcaattgatttggttgatgaggcttgtgcgaatgtgagagtccagcttgatagtcaacctgaagagattgataaccttgaaaggaagaggatgcagctggaaattgaacttcacgccttggaaagggagaaggataaagccagcaaagctcgacttatagaggtgcggaaagagcttgatgacctgagagacaagcttcagcctctcacgatgaaatacagaaaggagaaagagagaattgatgagattcgaaggcttaaacagaaaagagaagagctcatgttttctttgcaggaggcagaacgaagatatgaccttgcaagagctgctgatctaagatatggcgcaattcaagaagtggaatctgcaattgcccaacttgaaggaacttcttctgaagagaatgtgatgctcacagaaaacgttgggcctgaacacattgctgaggttgtgagccgttggacagggattccagtgacgagacttggccaaaatgagaaggagaggttgattggtcttgctgataggttgcataagcgggttgtgggacagaatcaagcggtaaatgcagtttctgaggcaattctaaggtcaagggcaggacttggaaggccacaacagccaactggatcattcttattccttggaccaactggtgttggcaaaactgagctcgccaaggctcttgctgagcagctgtttgatgatgaaaacctcttagttcggattgatatgtcggaatatatggaacaacactctgtctctcgcctcattggggcaccaccagggtatgttggtcacgaggaaggtggacaactaactgaggctgtgaggaggcgaccttattgtgtcatactctttgatgaagtggagaaggctcatgttgctgtcttcaacactctgctccaagttttggatgatggtcgattgacagacgggcaaggcaggacagtcgatttcaggaactcggtgataatcatgacatcaaaccttggtgctgaacacctccttgcagggctaactgggaaagtaacaatggaagtggcccgggactgtgtgatgcgggaggtgaggaaacacttcagaccagagctcttgaacaggcttgacgagattgtggtgttcgaccccctttcacatgaccagttgaggaaagtagctcggcttcaaatgaaagacgttgctgtccggcttgctgaaagaggagttgctttggcagtcactgatgctgctttggactatatcttggcagagagttatgacccggtgtatggtgctaggcctataaggagatggatggagaagaaggtggtgacagaactgtcaaagatggttgtgcgtgaggaaatcgatgaaaactccactgtttacatagatgcaggcgctggtgatcttgtgtaccgggtagaaagtggaggtctagtggacgcttcaacaggcaagaagtcagatgtgctgattcatattgctaacgggccaaagagaagtgatgcagctcaggcggtgaagaagatgaggatcgaggaaatagaagatgacgataatgaggaaatgatcgaggattaa

SEQ ID NO: 7470 - protein, 911 aa, Arabidopsis thaliana
MNPEKFTHKTNETIATAHELAVNAGHAQFTPLHLAGALISDPTGIFPQAISSAGGENAAQSAERVINQALKKLPSQSPPPDDIPASSSLIKVIRRAQAAQKSRGDTHLAVDQLIMGLLEDSQIRDLLNEVGVATARVKSEVEKLRGKEGKKVESASGDTNFQALKTYGRDLVEQAGKLDPVIGRDEEIRRVVRILSRRTKNNPVLIGEPGVGKTAVVEGLAQRIVKGDVPNSLTDVRLISLDMGALVAGAKYRGEFEERLKSVLKEVEDAEGKVILFIDEIHLVLGAGKTEGSMDAANLFKPMLARGQLRCIGATTLEEYRKYVEKDAAFERRFQQVYVAEPSVPDTISILRGLKEKYEGHHGVRIQDRALINAAQLSARYITGRHLPDKAIDLVDEACANVRVQLDSQPEEIDNLERKRMQLEIELHALEREKDKASKARLIEVRKELDDLRDKLQPLTMKYRKEKERIDEIRRLKQKREELMFSLQEAERRYDLARAADLRYGAIQEVESAIAQLEGTSSEENVMLTENVGPEHIAEVVSRWTGIPVTRLGQNEKERLIGLADRLHKRVVGQNQAVNAVSEAILRSRAGLGRPQQPTGSFLFLGPTGVGKTELAKALAEQLFDDENLLVRIDMSEYMEQHSVSRLIGAPPGYVGHEEGGQLTEAVRRRPYCVILFDEVEKAHVAVFNTLLQVLDDGRLTDGQGRTVDFRNSVIIMTSNLGAEHLLAGLTGKVTMEVARDCVMREVRKHFRPELLNRLDEIVVFDPLSHDQLRKVARLQMKDVAVRLAERGVALAVTDAALDYILAESYDPVYGARPIRRWMEKKVVTELSKMVVREEIDENSTVYIDAGAGDLVYRVESGGLVDASTGKKSDVLIHIANGPKRSDAAQAVKKMRIEEIEDDDNEEMIED

SEQ ID NO: 7471 - DNA, 2727 bp, Saccharomyces cerevisiae
  CDS (1)..(2727)
atgaacgaccaaacgcaatttacagaaagggctctaacgattttgacgttggctcaaaaattggcttcggatcatcaacatccacaattacaacctatacatattctagctgccttcattgaaacgccagaagatggatcagtcccttacctacagaatctaattgagaagggccgttacgactatgatcttttcaagaaagtggttaatagaaatctagtaagaattcctcaacagcaacctgcacctgcggagataactccaagttatgctttggggaaagtccttcaagacgctgctaagattcaaaaacaacagaaggactcatttatagcgcaagaccatatattgtttgctctattcaatgattcgtctattcagcaaatatttaaggaagctcaagtagatattgaggccatcaagcaacaagctcttgaacttcgtggtaacactagaattgactctcgtggcgctgatacgaacacacctttggaatatttatcaaagtacgccattgatatgactgagcaggctcgtcaaggtaaacttgaccctgtcatcggccgtgaagaagaaataagaagcactattagagttttagcaagaagaattaagtccaacccatgtttaattggtgagccaggtatcggtaagaccgctattattgaaggtgttgctcaaagaatcattgacgatgacgttcccactatcttacaaggcgctaaattgttcagtctagatttggccgcattaaccgcaggtgctaaatacaaaggtgatttcgaagaaagattcaaaggtgttttgaaggaaatcgaagaatcaaagactctaattgtgttattcattgatgaaattcacatgttaatgggtaatggtaaggacgacgctgctaacatcttgaagccagctttgtccagaggccaattgaaggtcatcggtgccaccaccaataacgaatatagatctattgtggaaaaggatggtgcctttgaaagaagattccagaaaattgaagtcgctgaaccaagtgtgagacaaacagtggccatattgagaggtctgcaaccaaagtatgaaatacatcatggtgtaaggattctggatagcgccttagtcactgctgctcaattagccaagcgttacttgccatatagaagattgccagattctgctttggatttagttgatatttcttgtgctggtgtcgccgtcgcaagagattctaagccagaagaattggattccaaggaacgtcaattgcaattgattcaagtagagataaaagctctagagagagatgaagatgccgactccaccactaaagatagattaaagttagctaggcagaaggaagcttcattgcaagaagaattggaacctctaagacaacgttacaatgaagaaaagcatggccatgaagaattgacacaagctaaaaagaaattggatgaactggaaaacaaggcccttgatgctgaacgtagatatgatactgctaccgccgctgatttaaggtacttcgccatcccagatatcaaaaagcaaatcgaaaagcttgaagatcaggttgctgaggaagagagacgtgctggtgccaactccatgatccaaaatgtggtcgattcagacaccatttctgaaacagctgcaagattgactggtatccctgttaagaagttgtcagaatctgaaaatgaaaaattgattcatatggaacgtgacttatcatctgaagtcgtgggccaaatggatgccattaaagctgtttccaatgccgttagattgtctagatcaggtttagctaatccaaggcaaccagcatccttcttatttttaggtttgtccggttccggtaaaactgaattggctaaaaaagttgctggatttttgtttaatgatgaggacatgatgatcagggtcgattgttctgaattaagcgagaagtatgcggtctctaagttgttgggtaccacggcaggttatgtcgggtacgatgaaggtggctttttaactaaccaactgcaatacaaaccatactccgttttgttattcgatgaagtagaaaaggcacatcctgatgttttgactgtcatgctacaaatgttggatgacggtagaattacttctggtcaaggtaagacgatcgactgttccaattgtattgtcatcatgacttccaatctaggtgctgaatttatcaattctcaacaaggatcaaagatccaagaatctaccaagaatttggtcatgggtgctgttaggcaacatttcagaccagaatttttgaacagaatttctagtatagtcattttcaacaagctatctagaaaagctattcataagatcgtggatattcgtttgaaggaaattgaagagagattcgagcaaaatgataaacattacaagttgaatttaactcaagaggccaaggacttcttggccaaatatggttattccgatgatatgggtgcacgtccactgaacaggttaattcaaaacgaaattttgaacaaactggcactaaggatcttaaagaatgaaatcaaggataaggaaactgtcaatgtcgtcttgaagaagggtaaatctcgtgatgaaaatgttcctgaggaagctgaagaatgtctggaagttctaccaaatcacgaagctactataggggctgacacgttaggtgatgacgataatgaggacagtatggaaattgatgatgacctagattaa

SEQ ID NO: 7472 - protein, 908 aa, Saccharomyces cerevisiae
MNDQTQFTERALTILTLAQKLASDHQHPQLQPIHILAAFIETPEDGSVPYLQNLIEKGRYDYDLFKKVVNRNLVRIPQQQPAPAEITPSYALGKVLQDAAKIQKQQKDSFIAQDHILFALFNDSSIQQIFKEAQVDIEAIKQQALELRGNTRIDSRGADTNTPLEYLSKYAIDMTEQARQGKLDPVIGREEEIRSTIRVLARRIKSNPCLIGEPGIGKTAIIEGVAQRIIDDDVPTILQGAKLFSLDLAALTAGAKYKGDFEERFKGVLKEIEESKTLIVLFIDEIHMLMGNGKDDAANILKPALSRGQLKVIGATTNNEYRSIVEKDGAFERRFQKIEVAEPSVRQTVAILRGLQPKYEIHHGVRILDSALVTAAQLAKRYLPYRRLPDSALDLVDISCAGVAVARDSKPEELDSKERQLQLIQVEIKALERDEDADSTTKDRLKLARQKEASLQEELEPLRQRYNEEKHGHEELTQAKKKLDELENKALDAERRYDTATAADLRYFAIPDIKKQIEKLEDQVAEEERRAGANSMIQNVVDSDTISETAARLTGIPVKKLSESENEKLIHMERDLSSEVVGQMDAIKAVSNAVRLSRSGLANPRQPASFLFLGLSGSGKTELAKKVAGFLFNDEDMMIRVDCSELSEKYAVSKLLGTTAGYVGYDEGGFLTNQLQYKPYSVLLFDEVEKAHPDVLTVMLQMLDDGRITSGQGKTIDCSNCIVIMTSNLGAEFINSQQGSKIQESTKNLVMGAVRQHFRPEFLNRISSIVIFNKLSRKAIHKIVDIRLKEIEERFEQNDKHYKLNLTQEAKDFLAKYGYSDDMGARPLNRLIQNEILNKLALRILKNEIKDKETVNVVLKKGKSRDENVPEEAEECLEVLPNHEATIGADTLGDDDNEDSMEIDDDLD

SEQ ID NO: 7473 - DNA, 2439 bp, Candida albicans
  CDS (1)..(2439): transl_table=12
atgttatcatctagaataccaaaaggtaaactattaaaacaaacttctgccacaagctacttgaatctagctaaaagtataccaataacaactgctagatacagacccaaccagtattatgcaaatgaattagctaaacctaatgtatttaccattcacaacataccatcaccatgcttttcacaagttagaaatttccacctgtcatttcccaggaaacttcaaatgcaacagaccgaacaaggtgacaatcgaccagcgttagagaagtttggttctgatttgacccagttggccaaagaaggcaagttggatccagttattgggagagatcacgaaatccgccgtaccattcaaatattatcacgtcgaacaaagaataatcccgtcttgattggtaatgccggtactggtaaaactgcagtaatggagggtttggcacaaagaattattcgtggtgaagttcccgattcaatgaaagacaaacaaattattactttagatttggctggtatcattagtggagctaagtatcgtggggatttcgaaagtaaactcaaatcaatattgaaagaagtcgaggaaaagaatggcaaggttatcttgtttattgatgagttccatttattgatgggtttaggtaaagccgagggatcaatcgacgcttcaaatttgttgaagcctgccttggcaagaggtaaattgtcgatgtgtggagcaactaccatcgaagagtatagaaaatatgtggaaaaagatgctgctttagccagaagattttctcctgtcactgtgaatgaacctactggtgaagataccatatcaattttgcgaggtttaaaggaacgttatgaagttcaccatggggttcgtatcatggactcagcattagtcactgctgcattatattccaatagatatataacagacagatttttgccagataaagccattgatttagttgatgaagcaagttcaacattgcggttgcaacatgaatctcgaccagatgcaattgcaactttggaccgtcaaataatgactattgaaattgaattagaatctttgcggaaagaagaggatcaactttctattgatagaaaacacaaattggaaaaggaattggaggtgaagaaaagtgagttgaaggaattaacagaccaatgggagtcagaaaagcgtgcaatcgatgcagtgaaaaacgcaaagtctgagttagagaaagcaaaatacgagttggaacaggctacaagagaaggagattacgccagggcttccagaatccagtatgctagtattcctgaattacaagacaagatccaagagttgagcaaaaatgaacttgctgccaaatcatcgaatcttttgcatgactctgtgacgtccgaggatattgccggtgttatatcaaagatgacggggatccctgtgaacaatttgttgaaaggtgagaaggacaagttgttagatatgaatatacttttacgccaatcagttgttgggcaggacgaagccattgatgcagtctccgatgcagtcagattgcaacgtgcaggtttgaccagtgagaatcgtccaattgcatcctttatgtttttgggtcctactggtacaggaaaaacggaattgacaaaatcattagcacaattcttgtttaacgataagaacgctgtggttagattcgatatgtctgagttccaagaaaagcataccatttcgagattgataggttctcctcctgggtacgtgggatacgaagaaagtggtgagttgactgaagctgttagaagaaaaccatattcggtagtcttatttgatgagtttgagaaagcacacccagatctttccaaattattattacaagtattggatgaaggttcgttaacagattctcatggtaaaaagattgatttcaagaatacaattattgtaatgacatccaacattggccaagagattttgcttgctgataaaaacacctatgaggatggtcatatcaacagcgaagtcaaactgcaagttttagaaaatttgagacaccattatgctccagaattcttgaaccgtattgatgatatcgtggtctttaacagattgtcaaagacagctttgaaagaaattttagacatccgtttgagagaaatcggtgatcgtttggtcgacaaacgtattatattacaattaactgatgaagcaaaaacattgttgtgcgacatgggctatgatccaacttatggtgctcgtccacttaatagagtattgagaaagaaattgttagatccattggctatgcgtttgatcaagggacaagttcaagagaatgaaactgtcaaagtagaagtgaaagatcacaaaatttatgttgttccaaaccacagtgaagggacggttattgaaaaggaagaagactattttaaagaagataaggatgacaattaa

SEQ ID NO: 7474 - protein, 812 aa, Candida albicans
MLSSRIPKGKLLKQTSATSYLNLAKSIPITTARYRPNQYYANELAKPNVFTIHNIPSPCFSQVRNFHSSFPRKLQMQQTEQGDNRPALEKFGSDLTQLAKEGKLDPVIGRDHEIRRTIQILSRRTKNNPVLIGNAGTGKTAVMEGLAQRIIRGEVPDSMKDKQIITLDLAGIISGAKYRGDFESKLKSILKEVEEKNGKVILFIDEFHLLMGLGKAEGSIDASNLLKPALARGKLSMCGATTIEEYRKYVEKDAALARRFSPVTVNEPTGEDTISILRGLKERYEVHHGVRIMDSALVTAALYSNRYITDRFLPDKAIDLVDEASSTLRLQHESRPDAIATLDRQIMTIEIELESLRKEEDQLSIDRKHKLEKELEVKKSELKELTDQWESEKRAIDAVKNAKSELEKAKYELEQATREGDYARASRIQYASIPELQDKIQELSKNELAAKSSNLLHDSVTSEDIAGVISKMTGIPVNNLLKGEKDKLLDMNILLRQSVVGQDEAIDAVSDAVRLQRAGLTSENRPIASFMFLGPTGTGKTELTKSLAQFLFNDKNAVVRFDMSEFQEKHTISRLIGSPPGYVGYEESGELTEAVRRKPYSVVLFDEFEKAHPDLSKLLLQVLDEGSLTDSHGKKIDFKNTIIVMTSNIGQEILLADKNTYEDGHINSEVKSQVLENLRHHYAPEFLNRIDDIVVFNRLSKTALKEILDIRLREIGDRLVDKRIILQLTDEAKTLLCDMGYDPTYGARPLNRVLRKKLLDPLAMRLIKGQVQENETVKVEVKDHKIYVVPNHSEGTVIEKEEDYFKEDKDDN

SEQ ID NO: 7475 - DNA, 2436 bp, Saccharomyces cerevisiae
  CDS (1)..(2436)
atgttaagacaagctacaaaagcaccaatacaaaaatatttacagagaacgcaactattaaggcgaagtactccacgaatatacactattgtacagtgtaaaagatctatttgcagttttaatgcaagacctcgagtagccaataaacttctatcagatataaaaacaaatgcattaaatgaagtcgctatttcaacctgcgccctcaagagctcatatggattgcccaatttcaaaagaacgtacgtccaaatgaggatggatcccaatcagcaaccggaaaagccagctttagaacaatttggtacaaacttgacaaaattagcgcgcgacggtaaattagaccctgtcattggcagagacgaagaaatcgcaagagctattcaaattttatcaagaagaacaaaaaataatccatgtttgatcggtcgagctggtgtcggtaaaaccgcccttattgatgggttagctcaaagaattgttgctggggaggtccctgactcgttgaaagataaagatctagtagctttggatttgggatctttgattgctggcgccaaatatagaggtgaattcgaagaacgtttaaaaaaggttttagaagaaattgacaaggccaatggtaaggttattgttttcattgatgaagttcatatgctgcttggcttaggtaaaactgatggtagtatggatgcttctaacatcttaaagccaaaactggcccgtgggctacgttgtatctctgcaaccactcttgatgaattcaaaatcattgaaaaagatccggctttatcgagaaggtttcagcctatcttattgaatgagccgagcgtctccgatacgatttctatactaagaggtttaaaagaaaggtacgaggttcatcatggtgtaaggatcactgatacagctttagtgtctgctgcagttctttcaaatcgttatataacagacaggtttctacctgataaagccattgatctagttgacgaagcttgtgctgtactacgtttacaacatgaatccaaaccggatgaaatacagaaactggatcgtgctattatgaaaatacaaatagaactggaatctttaaagaaagagaccgaccctgtttccgtggaaagaagagaagcgttggaaaaggacctagaaatgaaaaatgatgaattaaacagattaacaaaaatatgggacgctgaaagagctgaaattgaatctatcaaaaatgctaaggcaaatttggaacaagcaagaattgagttggaaaagtgtcagagagagggtgattacactaaagcatccgagttgcgatattccagaattcctgacttggagaagaaggtagctttaagcgagaagagtaaggacggagataaagtaaatttacttcatgattcagttacttctgacgatatttctaaggttgttgccaaaatgactggtattcctacagaaacggtgatgaaaggcgacaaggaccgcctactgtatatggaaaattctttaaaagaaagagtcgttggccaagacgaggccattgctgctatttctgatgctgtacgtcttcaaagggctggtttgaccagtgaaaagagacctattgccagctttatgttcttaggtcctactggtactggtaaaacagaattgaccaaggctttagctgaattcctatttgatgacgaatcaaatgtgattcgttttgacatgtcagaatttcaagagaagcatactgtctctcgtttaatcggtgcacctccaggttacgtcttaagcgaatctggtggccaattaactgaggctgtcagaagaaagccttatgctgtcgttttatttgatgaatttgaaaaagcgcaccccgatgtttccaaactactgttgcaagtgttggatgaaggtaagctgaccgattccctaggccatcatgttgatttccgtaacacgatcattgtgatgacctcaaacattggacaagatattttattaaacgacacaaagttgggtgatgatggtaagattgacaccgcaaccaagaataaagttatcgaagcaatgaaaagatcctatccacctgagttcatcaatcgtattgatgatattctagttttcaataggctatccaagaaagttttgaggtcaattgttgatattagaattgcagaaattcaagatcgtttggccgaaaaaagaatgaaaattgatttaactgatgaagcgaaggattggctaactgacaaaggctacgatcaattatatggtgcaaggccattgaatagattaattcatagacagattttgaactccatggcaactttcttattaaaaggtcaaattagaaacggcgaaactgttagagtggtggttaaagatactaagcttgtcgtgctaccaaatcatgaagaaggcgaagttgttgaagaggaagctgaaaagtaa

SEQ ID NO: 7476 - protein, 811 aa, Saccharomyces cerevisiae
MLRQATKAPIQKYLQRTQLLRRSTPRIYTIVQCKRSICSFNARPRVANKLLSDIKTNALNEVAISTCALKSSYGLPNFKRTYVQMRMDPNQQPEKPALEQFGTNLTKLARDGKLDPVIGRDEEIARAIQILSRRTKNNPCLIGRAGVGKTALIDGLAQRIVAGEVPDSLKDKDLVALDLGSLIAGAKYRGEFEERLKKVLEEIDKANGKVIVFIDEVHMLLGLGKTDGSMDASNILKPKLARGLRCISATTLDEFKIIEKDPALSRRFQPILLNEPSVSDTISILRGLKERYEVHHGVRITDTALVSAAVLSNRYITDRFLPDKAIDLVDEACAVLRLQHESKPDEIQKLDRAIMKIQIELESLKKETDPVSVERREALEKDLEMKNDELNRLTKIWDAERAEIESIKNAKANLEQARIELEKCQREGDYTKASELRYSRIPDLEKKVALSEKSKDGDKVNLLHDSVTSDDISKVVAKMTGIPTETVMKGDKDRLLYMENSLKERVVGQDEAIAAISDAVRLQRAGLTSEKRPIASFMFLGPTGTGKTELTKALAEFLFDDESNVIRFDMSEFQEKHTVSRLIGAPPGYVLSESGGQLTEAVRRKPYAVVLFDEFEKAHPDVSKLLLQVLDEGKLTDSLGHHVDFRNTIIVMTSNIGQDILLNDTKLGDDGKIDTATKNKVIEAMKRSYPPEFINRIDDILVFNRLSKKVLRSIVDIRIAEIQDRLAEKRMKIDLTDEAKDWLTDKGYDQLYGARPLNRLIHRQILNSMATFLLKGQIRNGETVRVVVKDTKLVVLPNHEEGEVVEEEAEK

SEQ ID NO: 7477 - DNA, 3016 bp, Neurospora crassa
  CDS (1)..(2784)
atgacgtcgaaaatggaatttacagaccgggccaagaaggcattggaggatgccatggccctggcagagcaatacgcccactcgcaactcctccccgttcatctggcagtcgcgcttctcgaccctctcccagatccgagcaaggaccagcaaaatgcaccagccggggcaaccagctctctcttccgccaagtcattgagagagcccacggcgatccccagctgttcgaccgcgccctcaagaaggccctcgtccgcctccccagccaagaccctcctcccgaccatgtctcgatggctccttccttccatacagtcctgcgcaaggccaacgagctgcagaagacgcaaaaagacacatacattgccgtcgaccaccttatcacagccctggccgaggagccctcgatcatgaatgcgctcaaggaggccaacattcccaagccaaagctcgttaccgatgccatccaggccattcgcggtaccaagcgcgtcgactctcgcaatgctgacactgaagaggagcacgagaatctcgccaagttcaccattgatatgacagccatggccagggaaggcaagattgatcccgtcattggtcgtgaggaggaaattcggagagtgatccgtattctttcacgtcgtaccaagaacaaccctgtccttatcggtgagcctggtgtcggtaagactaccgtcgttgagggtctcgctcagcgcatcgtcaacgctgatgtgcccgacaatctggccaactgcaagcttctgtctcttgatgtcggtgccctggtggctggtagcaagtacaggggtgagtttgaagagcgcatgaagggagttctgaaggagatctccgagtccaaggagatgatcatccttttcatcgatgaaatccatttgctcatgggcgctggcgcgtccggagaaggtggcatggatgcggccaaccttttgaagccaatgctcgcccgtggtcagcttcactgcattggcgctaccaccctggccgagtaccgcaagtacatcgagaaggatgctgcctttgaacgtcgtttccagcaggtcattgtcaaggagccttccgtttctgagacaatctccattctacgtggtctcaaggagaagtacgaggtgcaccatggtgtcactatttccgatgctgccattgtggccgctgcaaatcttgcggcccgctacctcacttcccgcagacttcctgattcggctatcgatttgatcgacgaggcggctgccgcagtcagagtcgctcgagaatcgcagcccgaaatcatcgattccttggagcgcaagttgcgtcagctcaagattgagattcacgccttgtctcgcgagaaggatgaggcttccaaggctcgtcttgaacaggcgaagaaggatgccgagaatgtggaggaggagctcagacccctccgtgagaaatacgaacaggagaaacagagagccaaggctctccaggaagccaggatgaagcttgagagcttgagacaaaaggccgaagaggctagcagaatgggagatcacagccgtgctgctgatcttcagtattacgccatccccgagcaggaggcagtaatcaagaggcttgagaaggaaaaggctgcggctgacgctgcgctcaacgccgctgcggccgaaaccggcggtgccatgatcaccgatgtcgttggtcccgatcagatcaacgagattgtagcacggtggaccggtattcccgtcacacgcctcaagaccagcgagaaggagaagcttttgcacatggagaagcatctcagcaagattgttgtcggtcagaaggaggccgttcagtctgtgtccaacgctatcagactgcagcggtcgggtctctccaaccccaaccagcctcccagcttcctgttctgcggtccttcgggtaccggtaagactctgctcaccaaggctcttgccgagttcctgtttgatgatcctaaggccatgatccgtttcgacatgtctgagtatcaggagcgtcactctctcagccgcatgattggtgctcctcccggctacgtcggtcacgactctggtggccagctgactgaggcccttcgccgcaagccgttctccatccttctctttgacgaggttgaaaaggcagccaaggaggtcttgaccgttctgctacagctcatggatgacggtcgtatcacggacggtcagggcagagtcgtcgatgccaggaactgcatcgttgtcatgacgtctaacttgggtgctgagtacctttctcgtcccaacgccaaggacggcaagattgatccaaccactcgcgagcttgtcatgaacgccctgcgcaactacttccttcccgagttcctcaaccgtatcagctcaattgtcatcttcaaccgtctcactcgtcgcgagatccgcaagattgtcgagctacgcattgcggaaatccagaagcggctccaagacaacgatcgcaatgtcaaaatcgaggtgtcggaagaagccaaagacaagctgggtgctcttggttactcgccagcttatggcgctagaccactgcaacgtgtgcttgagaaggaggttctgaaccgcttggccgttttgatcctccgtggcagcatccgcgacggtgaggttgccagggttgtcgtccaagacggcaagattacagtccttcccaaccatcccgaggtcaatgatgaggacgacgaaatgatgttggatgaggaagacgcagttgacgaggttgcgccggaatctgagatggatgaggatctttacgacgactagatgtctaataggaaagatgactcagtcatgcgcgacgacgtagaggtggactaggaggattagtgaagaagataatcgtggacgccccgagtgttagggagacggaaatttggtatcatgacttgaggaatttgaaaatgggatagccttcggggtttaaagcatgcacattttgcatttggagtttggggcctgtatgtttaggtacgttacatgatatgaaacgaaagat

SEQ ID NO: 7478 - protein, 927 aa, Neurospora crassa
MTSKMEFTDRAKKALEDAMALAEQYAHSQLLPVHLAVALLDPLPDPSKDQQNAPAGATSSLFRQVIERAHGDPQLFDRALKKALVRLPSQDPPPDHVSMAPSFHTVLRKANELQKTQKDTYIAVDHLITALAEEPSIMNALKEANIPKPKLVTDAIQAIRGTKRVDSRNADTEEEHENLAKFTIDMTAMAREGKIDPVIGREEEIRRVIRILSRRTKNNPVLIGEPGVGKTTVVEGLAQRIVNADVPDNLANCKLLSLDVGALVAGSKYRGEFEERMKGVLKEISESKEMIILFIDEIHLLMGAGASGEGGMDAANLLKPMLARGQLHCIGATTLAEYRKYIEKDAAFERRFQQVIVKEPSVSETISILRGLKEKYEVHHGVTISDAAIVAAANLAARYLTSRRLPDSAIDLIDEAAAAVRVARESQPEIIDSLERKLRQLKIEIHALSREKDEASKARLEQAKKDAENVEEELRPLREKYEQEKQRAKALQEARMKLESLRQKAEEASRMGDHSRAADLQYYAIPEQEAVIKRLEKEKAAADAALNAAAAETGGAMITDVVGPDQINEIVARWTGIPVTRLKTSEKEKLLHMEKHLSKIVVGQKEAVQSVSNAIRLQRSGLSNPNQPPSFLFCGPSGTGKTLLTKALAEFLFDDPKAMIRFDMSEYQERHSLSRMIGAPPGYVGHDSGGQLTEALRRKPFSILLFDEVEKAAKEVLTVLLQLMDDGRITDGQGRVVDARNCIVVMTSNLGAEYLSRPNAKDGKIDPTTRELVMNALRNYFLPEFLNRISSIVIFNRLTRREIRKIVELRIAEIQKRLQDNDRNVKIEVSEEAKDKLGALGYSPAYGARPLQRVLEKEVLNRLAVLILRGSIRDGEVARVVVQDGKITVLPNHPEVNDEDDEMMLDEEDAVDEVAPESEMDEDLYDD

SEQ ID NO: 7479 - DNA, 3132 bp, Oryza sativa
  CDS (1)..(3132)
atgtcacgcgccaccgccgtgtccaggctcgcgcgcgccgcccgcgccgcggcggcggcgcggcgccaccacgctggcggccgggacccgctccgcgccctcgcgtcgctcgctggagacgcttccgcttccgctggtggtggggcgaggaggcccgcgtggttcgcgccgcccatgggccggctcggtggaggcgggctgctggttccgccgccgccgccgcagcggaggctgttccaccccacgcaggcggcgaggtacagcacctcgtcgtcgtctcagataactccaggagaatttactgagatggcctgggagggggttgtcggcgcggttgatgcagctagaatgtcgaagcaacaagtagtggaagcagagcacctgatgaaagctcttctggagcagaaggatggtttagcgcgcagaatattttcgaaagctggaatagataacacatctgtcctgcaagctactgatgagttcatctcgagacagccaaaggttgttggcgatacaagtggaccgatcattgggtcaagctttgtatcaattttggataatgcaaggaagcataagaaagaatatgctgatgagtttgtatctgttgagcacatattgcgagcattcacagaagataagaggtttggacaacagctgttcagagatctcaaaattggggagaatgagttgaaggaagctatctccgctgtacgtggcagtcagcgggtcacagatcagattgtttttctacagaggtatctctttgttcagctctctattcacaacttgaggggagactctgccaatggcaatggttttgtttcagccagatggtttttcatgttagcattaaaatgtacccagtgtgactgtttgataaccttaggaatcataactctttttatggtgctgcttccagatccggaggggaagtaccaggctctagagaagtatggtattgacatgacagaattagctcgacgtggaaaactggatcctgttattggccgtgatgatgaagtgcgacgatgcattcagatcctttgcaggagaactaagaataatcctgtaattattggtgagccaggagtcggcaaaactgctatcgctgaaggattggcacagcgtattgtgcggggagatgttcctgaacctttacagaatagaaagcttatttcattggacatgggagcattacttgctggggctaaattccaaggtcaatttgaagagagacttaaggctgttctgaaggagatcactgcctcgaatgggcagatcatcttgttcattgatgagatccacactattgttggtgcaggagcagcaggtggggcaatggatgctggtaatttgctgaagccaatgttaggtcggggtgaactccgttgcattggagcaacaacactagatgagtacaggaagtacattgagaaggatgctgctctggagcgtaggttccagcaggtttattgtggtgagccagcagttgaggatacaatctctatactgcgtggcctaagagagcggtatgaactgcaccatggtgtcaaaatatcagatggagctcttgtttctgcggctgttttatcagatcgctacatcactggacgttttttgcctgataaagctattgacctagttgatgaagcagctgctaagctgaaaatggagataacatcgaaacctattgaattggatgaggtagatagggaaatcataaggcttgaaatggagaagctctcattgaagaatgataccgataaagcctccaaacagcgactgagcaagcttgaagctgatctagaatctctgaagcagaagcagaaaaacctttcagaacattgggaatatgagaagtccttgatgactcgcataagatcgatcaaggaagagactgacagagttaacctggagattgaagctgctgagagagagtatgatttgaaccgtgcagctgagctcaagtacggaacacttctgtcgctacaaaaacagcttgaagaggctgagaacaaactcatggaattccagcagtcaggcaagtcaatgcttcgagaagaggtgactgatgttgacattgctgagattgttagcaagtggactggtattccagtgtcaaaccttcaacaatctgaaaaggaaaagctactgctattggaagatgtactccacaagagggttattggccaagatattgcagtgaagtcagtggctaatgcaatccgtcgttctagggcaggcctatcagaccctaaccgtcccatagcaagcttaatgtttatgggtccaacaggtgtaggaaagaccgaactggggaaaacactagctgaattccttttcaacacagagaatgctctaatacggattgatatgagcgagtacatggaaaagcatgccgtctcccgtttggttggagcccctcctggctatattggttatggggaagggggccaactgacagaagctgttcgtcgtaggccttattctgtggttcttttcgatgaaattgagaaagcgcaccaggatgtgttcaacatcttattgcaacttttggatgatggaagaataaccgactctcagggcagaacagtcagctttactaactgtgttatcatcatgacttcaaacattgggtcgccattgattcttgatacgcttagaaacacatcagacagcaaggaggcagtttatgaaataatgaagaagcaagtgattgacatggctcggcagtcattccggccagagtttttgaataggatagatgagtacattgtattccagccgctggacaccacagagataaatcgcatcgtggagatccagctgaaccgagtcaagaaccggctgaggcaacagaagattcatctgcagtacacaccagaagctgtggagcatcttggctctctcggctttgaccctaactacggtgctaggcctgtgaagagggtgatccagcagatggtagagaacgagatcgccctcagtgtcctgaagggcgacttcaaagaagacgacaccgtcctcgtcgacgtgagctccgtggcgatcgcgaaaggccttgctccacagaagaagcttgtcctccagaggttagagaatgcaaacttagagttagtcgccaatgactag

SEQ ID NO: 7480 - protein, 1043 aa, Oryza sativa
MSRATAVSRLARAARAAAAARRHHAGGRDPLRALASLAGDASASAGGGARRPAWFAPPMGRLGGGGLLVPPPPPQRRLFHPTQAARYSTSSSSQITPGEFTEMAWEGVVGAVDAARMSKQQVVEAEHLMKALLEQKDGLARRIFSKAGIDNTSVLQATDEFISRQPKVVGDTSGPIIGSSFVSILDNARKHKKEYADEFVSVEHILRAFTEDKRFGQQLFRDLKIGENELKEAISAVRGSQRVTDQIVFLQRYLFVQLSIHNLRGDSANGNGFVSARWFFMLALKCTQCDCLITLGIITLFMVLLPDPEGKYQALEKYGIDMTELARRGKLDPVIGRDDEVRRCIQILCRRTKNNPVIIGEPGVGKTAIAEGLAQRIVRGDVPEPLQNRKLISLDMGALLAGAKFQGQFEERLKAVLKEITASNGQIILFIDEIHTIVGAGAAGGAMDAGNLLKPMLGRGELRCIGATTLDEYRKYIEKDAALERRFQQVYCGEPAVEDTISILRGLRERYELHHGVKISDGALVSAAVLSDRYITGRFLPDKAIDLVDEAAAKLKMEITSKPIELDEVDREIIRLEMEKLSLKNDTDKASKQRLSKLEADLESLKQKQKNLSEHWEYEKSLMTRIRSIKEETDRVNLEIEAAEREYDLNRAAELKYGTLLSLQKQLEEAENKLMEFQQSGKSMLREEVTDVDIAEIVSKWTGIPVSNLQQSEKEKLLLLEDVLHKRVIGQDIAVKSVANAIRRSRAGLSDPNRPIASLMFMGPTGVGKTELGKTLAEFLFNTENALIRIDMSEYMEKHAVSRLVGAPPGYIGYGEGGQLTEAVRRRPYSVVLFDEIEKAHQDVFNILLQLLDDGRITDSQGRTVSFTNCVIIMTSNIGSPLILDTLRNTSDSKEAVYEIMKKQVIDMARQSFRPEFLNRIDEYIVFQPLDTTEINRIVEIQLNRVKNRLRQQKIHLQYTPEAVEHLGSLGFDPNYGARPVKRVIQQMVENEIALSVLKGDFKEDDTVLVDVSSVAIAKGLAPQKKLVLQRLENANLELVAND

SEQ ID NO: 7481 - DNA, 2817 bp, Oryza sativa
  CDS (1)..(2817)
atggaggtgtgctgctgctcgacgtcatcggccgtgcccgggaggaggttcgcggcggccggggcggcggcggcggcggtggcggcgaggtggggcgccgtgggggtcgggagggcggtggtgctggcgcacccgctgcgcccggcgccgcgcggcgggcacgcgcacgcgcagcaggcgggcgcgcggcgggcgcggcgcgcggtcgtcagggcggtgttcgagcggttcacggagcgggcggtgaaggcggtggtgctgtcgcagcgggaggccaaggggctcggggagggcgccgtggcgccgcgccacctgctgctggggctcatcgccgaggaccggtcggcgggcgggttcctctcgtcggggatcaacatcgagcgcgcgcgcgaggagtgccgcggcatcggcgccagggacttgacccccggcgcgccgtcgccgtccggctccgggctggaaatggacatacccttctccggcagctgcaagcgggtgttcgaggtcgccgtggagttctcccggaacatgggctgcagcttcatctccccggagcacctcgccctcgcgctcttcaccctcgacgatcccaccaccaacagcctcctcaggagcttgggagcggatccgagtcaactagcatcagtagcgcttacccgactccaagcggagcttgcgaaagattgcagagaacctgcaggagcatcatctttcaaagtacccaagaaatctcctgctggagctggaagatctgccttctcgaaatctttaaattcaaagaaagaaaagggtgcgcttgatcaattttgtttagatctgaccacacaagctagtggcgggtttattgatcctatcattggccgtgaggaggagattgaaagagtagttcagataatatgccgacggacaaagaacaatcctattcttttgggtgaggcaggtgttggcaaaactgcaatcgctgaagggttggctcttcgaattgcaaatggagatgtccccatttaccttgtggcaaagcgtataatgtcattggacgttggtctacttattgctggtgcaaaagaaagaggtgaactggagtccagggttactagtttaattcgtgaagtccgggaagcaggggatgttattcttttcattgatgaggttcacaatcttattggatctggcactgttggaaagggtaagggtgctggccttgacattggcaacttgctgaagcccccacttgctagaggtgaattgcagtgcattgcagctacaactctagatgaacacagaatgcattttgagaaggataaggctttggctcgccgcttccagccagtattagtagaggagcctagtcaggatgatgctgtgaagatattacttggtcttcgtgaaaaatatgaaacatatcacaaatgcaaatttaccttagaagccatcaatgcagcagtttatctgtcagcaagatatattcctgacaggcagctccctgacaaggccatcgatctgattgatgaagctggcagtagagctcgaatggaatcatttaataggaagaaagaagggcagtcttcaatcctcttaaagtcgccagatgaatactggcaagagataagagctgctcaaaacatgcatgaagtggtgtcatcaaaccagatgaagtattcccctcgtcaagagaatggcagtgctgccattaaagcaccaagcgaggacatgaatgagttgacatctgaactccaagttgaggaaccaattgtagttggaacagaggaaattgcaagagttgcctcattgtggtcagggataccagtccagcagttaactgctgatgatagaaagcttctcgtaggactagatggtgaactcagaaagcgtgtgattggtcaagatgatgctgttatggcaatatctagagcggtgaagagatcacgtgttggcctcaatgatcctgacagacctattgccactctacttttctgtggtccgacaggagttggtaaaactgagcttactaaagctctagcagctagttattttggatcggaatctgctatgcttagattagacatgagcgagtatatggagaggcacactgtgagcaagctcataggctctcctccagggtacatcggatatggtgaaactggtactctgacagaagctgtcaggagaaagccatttactgtagtattacttgatgagatagagaaagctcaccctgatattttcaacattcttctccaaatttttgaagatgggcatctgtcggactcacagggccgcagagtgtccttcaagaacacattgattgtcatgacatcaaatattggttctacatcaatttcaaagggaagacgaagcatgggtttcatgacagaagatactgaatcaagctcatatgttgcaatgaaatctctagtaatggaagagttgaaggcatttttccgtccagaattgctcaacagaatcgatgagatggttgtattccgtcccttagagaaaactcagatgctagcaattcttgatatcatcctacaagaagtgaagggtaggctgttagcccttggaataggcctcgaggtgtccgatgcaatgaaggacctgatttgcgaagaaggctatgacaagagctacggtgcgcggccactgaggagagccgtcacccacctgattgaggatgtgatcagcgaagcaattctatttggcgaatacaagcctggggacacgatactgatggatattgatgccggggggaaactttgcatgagccacctgaatgagaaggttgtccagttgtctgatccgacacggacattctga

SEQ ID NO: 7482 - protein, 938 aa, Oryza sativa
MEVCCCSTSSAVPGRRFAAAGAAAAAVAARWGAVGVGRAVVLAHPLRPAPRGGHAHAQQAGARRARRAVVRAVFERFTERAVKAVVLSQREAKGLGEGAVAPRHLLLGLIAEDRSAGGFLSSGINIERAREECRGIGARDLTPGAPSPSGSGLEMDIPFSGSCKRVFEVAVEFSRNMGCSFISPEHLALALFTLDDPTTNSLLRSLGADPSQLASVALTRLQAELAKDCREPAGASSFKVPKKSPAGAGRSAFSKSLNSKKEKGALDQFCLDLTTQASGGFIDPIIGREEEIERVVQIICRRTKNNPILLGEAGVGKTAIAEGLALRIANGDVPIYLVAKRIMSLDVGLLIAGAKERGELESRVTSLIREVREAGDVILFIDEVHNLIGSGTVGKGKGAGLDIGNLLKPPLARGELQCIAATTLDEHRMHFEKDKALARRFQPVLVEEPSQDDAVKILLGLREKYETYHKCKFTLEAINAAVYLSARYIPDRQLPDKAIDLIDEAGSRARMESFNRKKEGQSSILLKSPDEYWQEIRAAQNMHEVVSSNQMKYSPRQENGSAAIKAPSEDMNELTSELQVEEPIVVGTEEIARVASLWSGIPVQQLTADDRKLLVGLDGELRKRVIGQDDAVMAISRAVKRSRVGLNDPDRPIATLLFCGPTGVGKTELTKALAASYFGSESAMLRLDMSEYMERHTVSKLIGSPPGYIGYGETGTLTEAVRRKPFTVVLLDEIEKAHPDIFNILLQIFEDGHLSDSQGRRVSFKNTLIVMTSNIGSTSISKGRRSMGFMTEDTESSSYVAMKSLVMEELKAFFRPELLNRIDEMVVFRPLEKTQMLAILDIILQEVKGRLLALGIGLEVSDAMKDLICEEGYDKSYGARPLRRAVTHLIEDVISEAILFGEYKPGDTILMDIDAGGKLCMSHLNEKVVQLSDPTRTF

SEQ ID NO: 7483 - DNA, 2937 bp, Oryza sativa
  CDS (1)..(2937)
atggccgcagcgccgccgctcgccgcggggctccggcccgccatggcggcggcacaggcgccggtcgtcgccgcggcgtggggcgtgggcgctaggaggggggcggccttgtcgtcgtcggctcggtgtagggcgcttcggttgtcgagaggaggaggaggagggcgagatgggtgggtgcctcctcccgtggtggggaggatgccgccgcggacgctctccgtcaggtgcgccgccagcaatgggaggattacacaacaagagttcactgagatggcatggcaatcgattgtttcgtcgcctgaagtagcgaaagagagtaaacaccagattgtggagactgaacatctgatgaaatcattgctggagcaaaggaatgggctcgcccgtcgaatcttttctaaagctggagttgataatacaaggcttcttgatgccacagagaagttcatccagcggcagcctaaggtgttgggtgaagatcctggttccatgttgggacgtgacttggaagctctgatacaaagagcacgagactttaaaaaagagtatggtgattcatttgtttcggttgagcatctggtccttggttttgcggaggataaacgatttggaagacagctgttcaaggatttccagattaccgtacagtccttgaaaactgccattgaatcaataagagggaaacaaaatgtgattgatcaagatcctgagggaaaatatgaagctttggacaagtatggcaaggacctcacagccatggcacgtcaggggaaacttgacccggttataggaagagatgatgaaattcgtagatgcattcaaattttatctcggagaacaaagaataatccagttttgattggtgaacctggtgtggggaaaactgctatagctgaagggcttgctcagaggatagtgcaaggagatgttccgcaagctctaacaaaccgcagactaattgcacttgacatgggtgctttgattgctggggcaaaatatcgtggggaatttgaggataggctgaaggctgtactcaaggaagtcacagattctgatggacaaaccattcttttcattgatgagattcacactgttgttggagcaggtgcaacaaatggtgccatggacgctggtaatcttctaaaaccgatgcttggtaggggagagctacgttgtatcggtgccacaacccttgacgagtaccgcaaatatattgagaaggatcctgcattggagcgtcgcttccaacaagtttatgttgatcaaccttcagttgaagatacaatctcaatactccgtggattacgggagagatatgaattgcaccatggggtacgcatatcagacagtgcacttgtggcagcagctcttctctcagaccgttacattagtggacgatttctgccggacaaagcaattgatttggttgatgagtcagctgccaaattgaaaatggagataacttccaagccaactgctctagatgagattgatcgtgctgtaataaagcttgaaatggaacgtctctcactaacaaacgatacagacaaagcatcaagggacagactatctcgaattgaagcagaactgtcactattgaaagaaaagcagaaggacctgactgagcagtgggagcgtgagaagtcggtgatgactaagattcaatctattaaagaagagattgatagggtcaatgtggagatccagcaggccgaacgtgagtatgatctcaatcgtgctgctgaactgaagtatggcagtctgaacgcattgcagcgccagcttcaaacaacagagaaagagctagatgaatatcaaagttctgggaaatccatgctaagagaagaggtcacccaagatgatattgcagaaatagtgagcaggtggactggtattccagtatctaaactaaagcaatctgatagggagaagttgctgtatctagaggaagaactgcacaagcgtgttgttgggcaggatcctgcagtcaaagcagtttctgaggctattcagagatccagggctggtttgtccgatccaaatcgccccattgccagtttcatgttcatgggccctacaggagttggcaaaacggaactagcaaaagcccttgctgcttttatgttcaacactgaggaagctgttgttaggattgacatgagtgaatacatggagaagcattctgtctcaagactgattggtgcaccaccaggctatgttgggtatgaagagggtggtcagcttacggaagctgttcgtcggaggccatattccattatcttgtttgatgagattgagaaagcccatggagatgtattcaatgttttccttcaaatattggacgatggaagggttactgactcgcagggcaggaaagtgagcttcaccaacagtatcattatcatgacatccaatgttggttcacagttcatactaaacatggatgaagaaggtgggtcaactgattcagcctatgagaatataaagaagagggtgatggatgctgcaagatctgttttccgtccggagttcatgaatcggattgatgagtacattgtcttcaagccacttgagagggaacagatcaacagcattgtcaaattacagcttgcaagagtacaaaaaagaattgccgatcgcaagatcaaactcgaagtgtcgcctggagcagtcgaattcctgggaagccttggttacgatccgaattacggtgccaggccagtgaagcgagtgattcaacagtatgtggagaacgagctggcgaagggtatcctgagaggtgatttcaaggacgaggacagcatcctggtagacacccaggtcaccgtgccatctaatggtcagctccctcagcaaaagctcgttttccacaaaatgagtgaagaatccgcaccagctgctgctgaagacgagaaatttttgccggctgtttga

SEQ ID NO: 7484 - protein, 978 aa, Oryza sativa
MAAAPPLAAGLRPAMAAAQAPVVAAAWGVGARRGAALSSSARCRALRLSRGGGGGRDGWVPPPVVGRMPPRTLSVRCAASNGRITQQEFTEMAWQSIVSSPEVAKESKHQIVETEHLMKSLLEQRNGLARRIFSKAGVDNTRLLDATEKFIQRQPKVLGEDPGSMLGRDLEALIQRARDFKKEYGDSFVSVEHLVLGFAEDKRFGRQLFKDFQITVQSLKTAIESIRGKQNVIDQDPEGKYEALDKYGKDLTAMARQGKLDPVIGRDDEIRRCIQILSRRTKNNPVLIGEPGVGKTAIAEGLAQRIVQGDVPQALTNRRLIALDMGALIAGAKYRGEFEDRLKAVLKEVTDSDGQTILFIDEIHTVVGAGATNGAMDAGNLLKPMLGRGELRCIGATTLDEYRKYIEKDPALERRFQQVYVDQPSVEDTISILRGLRERYELHHGVRISDSALVAAALLSDRYISGRFLPDKAIDLVDESAAKLKMEITSKPTALDEIDRAVIKLEMERLSLTNDTDKASRDRLSRIEAELSLLKEKQKDLTEQWEREKSVMTKIQSIKEEIDRVNVEIQQAEREYDLNRAAELKYGSLNALQRQLQTTEKELDEYQSSGKSMLREEVTQDDIAEIVSRWTGIPVSKLKQSDREKLLYLEEELHKRVVGQDPAVKAVSEAIQRSRAGLSDPNRPIASFMFMGPTGVGKTELAKALAAFMFNTEEAVVRIDMSEYMEKHSVSRLIGAPPGYVGYEEGGQLTEAVRRRPYSIILFDEIEKAHGDVFNVFLQILDDGRVTDSQGRKVSFTNSIIIMTSNVGSQFILNMDEEGGSTDSAYENIKKRVMDAARSVFRPEFMNRIDEYIVFKPLEREQINSIVKLQLARVQKRIADRKIKLEVSPGAVEFLGSLGYDPNYGARPVKRVIQQYVENELAKGILRGDFKDEDSILVDTQVTVPSNGQLPQQKLVFHKMSEESAPAAAEDEKFLPAV

SEQ ID NO: 7485 - DNA, 2445 bp, Oryza sativa
  CDS (1)..(2445)
atgttgggacgtgacttggaagctctgatacaaagagcacgagactttaaaaaagagtatggtgattcatttgtttcggttgagcatctggtccttggttttgcggaggataaacgatttggaagacagctgttcaaggatttccagattaccgtacagtccttgaaaactgccattgaatcaataagagggaaacaaaatgtgattgatcaagatcctgagggaaaatatgaagctttggacaagtatggcaaggacctcacagccatggcacgtcaggggaaacttgacccggttataggaagagatgatgaaattcgtagatgcattcaaattttatctcggagaacaaagaataatccagttttgattggtgaacctggtgtggggaaaactgctatagctgaagggcttgctcagaggatagtgcaaggagatgttccgcaagctctaacaaaccgcagactaattgcacttgacatgggtgctttgattgctggggcaaaatatcgtggggaatttgaggataggctgaaggctgtactcaaggaagtcacagattctgatggacaaaccattcttttcattgatgagattcacactgttgttggagcaggtgcaacaaatggtgccatggacgctggtaatcttctaaaaccgatgcttggtaggggagagctacgttgtatcggtgccacaacccttgacgagtaccgcaaatatattgagaaggatcctgcattggagcgtcgcttccaacaagtttatgttgatcaaccttcagttgaagatacaatctcaatactccgtggattacgggagagatatgaattgcaccatggggtacgcatatcagacagtgcacttgtggcagcagctcttctctcagaccgttacattagtggacgatttctgccggacaaagcaattgatttggttgatgagtcagctgccaaattgaaaatggagataacttccaagccaactgctctagatgagattgatcgtgctgtaataaagcttgaaatggaacgtctctcactaacaaacgatacagacaaagcatcaagggacagactatctcgaattgaagcagaactgtcactattgaaagaaaagcagaaggacctgactgagcagtgggagcgtgagaagtcggtgatgactaagattcaatctattaaagaagagattgatagggtcaatgtggagatccagcaggccgaacgtgagtatgatctcaatcgtgctgctgaactgaagtatggcagtctgaacgcattgcagcgccagcttcaaacaacagagaaagagctagatgaatatcaaagttctgggaaatccatgctaagagaagaggtcacccaagatgatattgcagaaatagtgagcaggtggactggtattccagtatctaaactaaagcaatctgatagggagaagttgctgtatctagaggaagaactgcacaagcgtgttgttgggcaggatcctgcagtcaaagcagtttctgaggctattcagagatccagggctggtttgtccgatccaaatcgccccattgccagtttcatgttcatgggccctacaggagttggcaaaacggaactagcaaaagcccttgctgcttttatgttcaacactgaggaagctgttgttaggattgacatgagtgaatacatggagaagcattctgtctcaagactgattggtgcaccaccaggctatgttgggtatgaagagggtggtcagcttacggaagctgttcgtcggaggccatattccattatcttgtttgatgagattgagaaagcccatggagatgtattcaatgttttccttcaaatattggacgatggaagggttactgactcgcagggcaggaaagtgagcttcaccaacagtatcattatcatgacatccaatgttggttcacagttcatactaaacatggatgaagaaggtgggtcaactgattcagcctatgagaatataaagaagagggtgatggatgctgcaagatctgttttccgtccggagttcatgaatcggattgatgagtacattgtcttcaagccacttgagagggaacagatcaacagcattgtcaaattacagcttgcaagagtacaaaaaagaattgccgatcgcaagatcaaactcgaagtgtcgcctggagcagtcgaattcctgggaagccttggttacgatccgaattacggtgccaggccagtgaagcgagtgattcaacagtatgtggagaacgagctggcgaagggtatcctgagaggtgatttcaaggacgaggacagcatcctggtagacacccaggtcaccgtgccatctaatggtcagctccctcagcaaaagctcgttttccacaaaatgagtgaagaatccgcaccagctgctgctgaagacgagaaatttttgccggctgtttga

SEQ ID NO: 7486 - protein, 814 aa, Oryza sativa
MLGRDLEALIQRARDFKKEYGDSFVSVEHLVLGFAEDKRFGRQLFKDFQITVQSLKTAIESIRGKQNVIDQDPEGKYEALDKYGKDLTAMARQGKLDPVIGRDDEIRRCIQILSRRTKNNPVLIGEPGVGKTAIAEGLAQRIVQGDVPQALTNRRLIALDMGALIAGAKYRGEFEDRLKAVLKEVTDSDGQTILFIDEIHTVVGAGATNGAMDAGNLLKPMLGRGELRCIGATTLDEYRKYIEKDPALERRFQQVYVDQPSVEDTISILRGLRERYELHHGVRISDSALVAAALLSDRYISGRFLPDKAIDLVDESAAKLKMEITSKPTALDEIDRAVIKLEMERLSLTNDTDKASRDRLSRIEAELSLLKEKQKDLTEQWEREKSVMTKIQSIKEEIDRVNVEIQQAEREYDLNRAAELKYGSLNALQRQLQTTEKELDEYQSSGKSMLREEVTQDDIAEIVSRWTGIPVSKLKQSDREKLLYLEEELHKRVVGQDPAVKAVSEAIQRSRAGLSDPNRPIASFMFMGPTGVGKTELAKALAAFMFNTEEAVVRIDMSEYMEKHSVSRLIGAPPGYVGYEEGGQLTEAVRRRPYSIILFDEIEKAHGDVFNVFLQILDDGRVTDSQGRKVSFTNSIIIMTSNVGSQFILNMDEEGGSTDSAYENIKKRVMDAARSVFRPEFMNRIDEYIVFKPLEREQINSIVKLQLARVQKRIADRKIKLEVSPGAVEFLGSLGYDPNYGARPVKRVIQQYVENELAKGILRGDFKDEDSILVDTQVTVPSNGQLPQQKLVFHKMSEESAPAAAEDEKFLPAV

SEQ ID NO: 7487 - DNA, 2757 bp, Oryza sativa
  CDS (1)..(2757)
atggaggggtcgctagtccagtccgcgattgctccgaccatatacaggaggagcggcaccgcgcggttccgcgtgcgcgcgagggccacgatgatgcgtaccatgccaacacggaccctcaccctggggggtttccagggcctgcggcagacgaatttcctggactcgaggtcggtgattaagcgtgacttcggctctattgtcgcgagccagatttcacgcccccgagggttggggtcaagaggggtggtccgcgccatgtttgagcgcttcacggagaaggcaatcaaggtgatcatgcttgcacaggaagaagcgaggcgcctgggccacaactttgttgggacggagcaaattctactgggccttatcggtgagggcacaggaatcgcggcaaaggttctcaagtctatgggtatcaaccttaaggatgcccgtgtggaagttgagaagatcattggacgtggtagcgggtttgtggctgttgagatcccattcacgcctcgtgcaaagcgtgtcttggaactgtcacttgaagaagctcgccagctagggcataactatataggatctgagcacttacttctggggctacttcgtgagggtgaaggtgtagcagcacgggtactggaaagtcttggtgctgatccaaacaacattcgtacccaggtcataagaatggttggtgaaagcacagaagctgttggtgctggagttggtggcggaagcagtggccagaagatgcctacactcgaagagtatggcactaatttgactaagctggcagaagagggtaaactagacccagttgttggcaggcaggatcaaattgagcgtgtaactcaaattttgggaaggcggacaaagaacaacccttgcctaattggagaacctggtgttggaaagactgctattgctgaggggcttgcacaacgtatttccaatggtgacgttccagaaacaattgaaggaaagaaggttattactcttgacatggggctccttgttgctggtaccaagtaccgtggagagttcgaagaaagactgaagaaacttatggaggaaatcaaacaaaatgatgacattattctctttattgatgaagtgcacacgctaattggagcaggtgctgctgaaggtgcaattgatgctgccaacatcttgaaaccagctcttgctagaggtgaactgcagtgcattggtgccacaacacttgatgagtacaggaaacatattgagaaagatccagctttagagcgacggtttcaaccagttaaggttccagagccaactgttgatgaaacaatacaaatcttaagaggacttcgtgagcgatatgaactgcatcataagctgcgatacacagatgattctttaattgctgcagcacaattgtcataccagtatatcagtgatcgcttcctgcctgataaggctattgacttgattgatgaagcaggatctcgtgttaggctcaggcatgcacagctccctgatgaagccaaggagctggacaaagagcttcgacaggtaaccaaagacaagaacgaggctgtacgtggccaagattttgaaaaggctggggaattaagagatcgggaaatggaattgaaggcccaaattacagccattattgacaagagcaaggaaatggttaaagcagagactgaatccggtgaagtcggtccccttgttactgaggcagatattcagcatatcgtgtcctcttggactggaatacctgtggagaaagtctcatctgatgagtctgaccgtctccttaagatggaggagacactccatacgcgtatcattggtcaggatgaggctgtcaaagctattagccgtgccatccgccgtgctcgtgttggcctcaagaacccaaatcggcctattgctagcttcatcttctctggaccaactggtgtcggtaaatcagagttagcaaaggctcttgcagcctactactttggctcagaagaggccatgatcagactagacatgagtgagttcatggagaggcatacagtctccaagctcattggatcacctccaggttatgttggttacactgagggtggtcaactgacagaagcagttcgccgccgaccatacactgttgttctcttcgatgagattgaaaaggcacatcctgatgtcttcaacatgatgcttcagatcttagaagatggaagactaactgacagcaagggtcggactgttgatttcaagaacacactgttgatcatgacatcaaatgttggaagcagtgtcattgagaagggaggacggaagattggatttgaccttgactatgatgagaaagacaccagctacaataggattaagagcttggtgactgaagagctgaagcagtacttccgacctgagttcttaaacagattggacgagatgattgtgttccggcagcttaccaagctggaggttaaggagattgctgatattatgctcaaagaagtgtttgacaggctcaaggcaaaggacatcgacctccaggtgacagagaagttccgggatagagttgtcgacgaaggttacaacccaagctatggtgccaggcctctgcggcgtgctattatgaggcttctggaggacagcttggcggagaagatgttggctggcgaggtcaaggaaggtgactctgctattgttgatgtggattcagagggcaaggtgatagttcttaacggtggtagtggtgttccggaaccactggcacctgctctgagtgtctaa

SEQ ID NO: 7488 - protein, 918 aa, Oryza sativa
MEGSLVQSAIAPTIYRRSGTARFRVRARATMMRTMPTRTLTLGGFQGLRQTNFLDSRSVIKRDFGSIVASQISRPRGLGSRGVVRAMFERFTEKAIKVIMLAQEEARRLGHNFVGTEQILLGLIGEGTGIAAKVLKSMGINLKDARVEVEKIIGRGSGFVAVEIPFTPRAKRVLELSLEEARQLGHNYIGSEHLLLGLLREGEGVAARVLESLGADPNNIRTQVIRMVGESTEAVGAGVGGGSSGQKMPTLEEYGTNLTKLAEEGKLDPVVGRQDQIERVTQILGRRTKNNPCLIGEPGVGKTAIAEGLAQRISNGDVPETIEGKKVITLDMGLLVAGTKYRGEFEERLKKLMEEIKQNDDIILFIDEVHTLIGAGAAEGAIDAANILKPALARGELQCIGATTLDEYRKHIEKDPALERRFQPVKVPEPTVDETIQILRGLRERYELHHKLRYTDDSLIAAAQLSYQYISDRFLPDKAIDLIDEAGSRVRLRHAQLPDEAKELDKELRQVTKDKNEAVRGQDFEKAGELRDREMELKAQITAIIDKSKEMVKAETESGEVGPLVTEADIQHIVSSWTGIPVEKVSSDESDRLLKMEETLHTRIIGQDEAVKAISRAIRRARVGLKNPNRPIASFIFSGPTGVGKSELAKALAAYYFGSEEAMIRLDMSEFMERHTVSKLIGSPPGYVGYTEGGQLTEAVRRRPYTVVLFDEIEKAHPDVFNMMLQILEDGRLTDSKGRTVDFKNTLLIMTSNVGSSVIEKGGRKIGFDLDYDEKDTSYNRIKSLVTEELKQYFRPEFLNRLDEMIVFRQLTKLEVKEIADIMLKEVFDRLKAKDIDLQVTEKFRDRVVDEGYNPSYGARPLRRAIMRLLEDSLAEKMLAGEVKEGDSAIVDVDSEGKVIVLNGGSGVPEPLAPALSV

SEQ ID NO: 7489 - DNA, 2739 bp, Oryza sativa
  CDS (1)..(2739)
atgaatccggacaacttcacgcacaagaccaacgaggcgctcgtggcggcgcacgagatagcgtcggaggcggggcacgcgcagctgacgccgctgcacctggtggcggcgctggcggcggacaagggcgggatactccggcaggcgatctcgcaggcgtccggcggggacgccggcgcgccggactcgttcgagcgcgtggtgagcggggcgctcaagaagctgccctcgcagtcgccgccgccggacagcgtgccggcgtccacggcgctgatcaaggtcatccgccgcgcgcagtccgcgcagaagaagcgcggggactcccacctcgccgtcgaccagctgctgctgggcctcctggaggactcgctaatctccgactgcctcaaggaggccggcgtgtccgcggcgcgggtgcgcgccgagctcgagaagctccgtggcggggagggccgcaaggtggagtccgcgtccggcgacaccaacttccaggcgctcaagacctacggccgcgacctcgtcgagcaggccggtaagctcgaccccgtcattggccgcgacgaggagatccgccgcgtcgtgcgcatcctgtcgcgccgcacgaagaacaaccccgtactcatcggcgagcccggcgtcggcaagacggccgtcgtggagggcctcgcgcagcgcatcgtgcgcggggacgtgcccagcaacctgctcgacgtccgcctcatcgcgctcgacatgggcgcgctcgtcgccggcgccaagtaccgcggcgagttcgaagaacggctcaaggccgtgctcaaggaggtggaggaggccgagggcaaggtgatcctcttcatcgacgagatacacctcgtcctcggcgccgggaggacggagggctccatggacgcggccaacctgttcaagccaatgctcgcgaggggccagctccggtgcatcggcgccacgacgctggaggagtaccgcaagtacgtcgagaaggacgccgcgttcgagaggcggttccagcaggtgttcgtcgcggagccgagcgtcccggacaccatcagcatcctgcgaggcctcaaggagaagtacgaggggcaccacggtgtgaggatccaggaccgcgcgctcgtcgtcgccgcgcagctctcggcgaggtacatcatgggacgccacctgcctgacaaagcgatcgacctcgtcgacgaggcctgcgcgaacgtgagggtgcagctggacagccagccagaggagatcgacaacctcgagaggaagaggattcagctggaggtggagcaccacgcgctggagaaggagaaggacaaggcaagcaaggcccggcttgtcgaggtcaagaaagagctggacgatctgagggacaagctgcagccattgacgatgaagtacaggaaggagaaggagaggatcgacgagatcaggaagctgaagcagcgccgcgaggagctccagttcacgctgcaggaggccgagcgccggatggacctcgcccgcgtcgccgacctcaagtacggcgcgctccaggagatcgacgtcgccatcgcgaagctcgagagcgagacgggggagaacctgatgctcaccgagaccgtcggccccgagcagatcgccgaggtggtgagccgctggaccggcatcccggtgacccggctcggccagaacgacaaggagaggctcgtcggcctcgccgacaggctgcaccagagggtggtcggccaggcggaggccgtgagcgccgtcgccgaggcggtgctgaggtcgcgcgccggacttggccggccgcagcagcccaccggctcgttcctcttcctcggtcccaccggcgtcggcaagaccgagctcgccaaggccctcgccgagcagctgttcgacgacgagaacctgctcgtccgcatcgacatgtccgagtacatggagcagcactccgtcgctcgcctcatcggagcaccacctggctacgtcggccatgaggaaggtgggcagctgacggagcaagtgcggcggcggccgtacagcgtgatcctgttcgacgaggtcgagaaggcgcacgtcgcggtgttcaacactctgctccaggttctcgacgacgggaggctcaccgacgggcaaggccgcacggtggacttcaggaacaccgtgatcatcatgacctccaacctcggcgccgagcacctcctcgccggcatggtcggcaagaactccatgaaggtcgcccgtgaccttgtcatgcaggaggtgaggaggcacttccgtcctgagctcctgaaccggctcgacgagattgtgatattcgatcccctgtcccacgagcaactcaggaaggtcgcccgtctccagatgaaggacgtcgccgtccggctcgccgagaggggtgtcgccctggccgtcaccgacgccgcgctggacgtcattctgtctctgtcctatgatccggtttatggcgcgaggccgatcaggaggtggatcgagaagagggtggtgacgcagctgtccaagatgctgatccaggaggagatcgacgagaactgcacggtgtacatcgacgcggcgccgcacaaggacgagctggcctacagggtggacaaccgcggggggttggtgaacgccgagacggggcagaagtcggacatcctcatccaggtgcccaacggcgccgccaccgggagcgacgccgcgcaggcggtgaagaagatgaggatcatggaggacgaggacggcatggacgaagagtag

SEQ ID NO: 7490 - protein, 912 aa, Oryza sativa
MNPDNFTHKTNEALVAAHEIASEAGHAQLTPLHLVAALAADKGGILRQAISQASGGDAGAPDSFERVVSGALKKLPSQSPPPDSVPASTALIKVIRRAQSAQKKRGDSHLAVDQLLLGLLEDSLISDCLKEAGVSAARVRAELEKLRGGEGRKVESASGDTNFQALKTYGRDLVEQAGKLDPVIGRDEEIRRVVRILSRRTKNNPVLIGEPGVGKTAVVEGLAQRIVRGDVPSNLLDVRLIALDMGALVAGAKYRGEFEERLKAVLKEVEEAEGKVILFIDEIHLVLGAGRTEGSMDAANLFKPMLARGQLRCIGATTLEEYRKYVEKDAAFERRFQQVFVAEPSVPDTISILRGLKEKYEGHHGVRIQDRALVVAAQLSARYIMGRHLPDKAIDLVDEACANVRVQLDSQPEEIDNLERKRIQLEVEHHALEKEKDKASKARLVEVKKELDDLRDKLQPLTMKYRKEKERIDEIRKLKQRREELQFTLQEAERRMDLARVADLKYGALQEIDVAIAKLESETGENLMLTETVGPEQIAEVVSRWTGIPVTRLGQNDKERLVGLADRLHQRVVGQAEAVSAVAEAVLRSRAGLGRPQQPTGSFLFLGPTGVGKTELAKALAEQLFDDENLLVRIDMSEYMEQHSVARLIGAPPGYVGHEEGGQLTEQVRRRPYSVILFDEVEKAHVAVFNTLLQVLDDGRLTDGQGRTVDFRNTVIIMTSNLGAEHLLAGMVGKNSMKVARDLVMQEVRRHFRPELLNRLDEIVIFDPLSHEQLRKVARLQMKDVAVRLAERGVALAVTDAALDVILSLSYDPVYGARPIRRWIEKRVVTQLSKMLIQEEIDENCTVYIDAAPHKDELAYRVDNRGGLVNAETGQKSDILIQVPNGAATGSDAAQAVKKMRIMEDEDGMDEE

SEQ ID NO: 7491 - DNA, 2799 bp, Oryza sativa
  CDS (1)..(2799)
atggagagaaccctactgaacccgccgccgtctctccgatcgccggcatgccgtaccaccaccgccaccaggatcaggccctcctcctccatggctactatgatcccaacgcctccgccgatgcggcacgcccgcctcgtcaaggcatcggccgcgggccggcgagagctccacgctcccccgatcgcgccgccaatattactcggcctccgttcacccgcggcggcgtcgtacgggcgtgcgagcggcggcggcgggaggaggaggggggcgcgggtggtggcgaggatggggttcgacatgttcacggacaaggcgatcaaggcgatcatgatggcgcaggaggaggcgcggcggctggggcaccacgccgccggcagcgagcagctcctcctcggcgtcatcggggagggcaccggcatcggcgccaaggtgctcaggggcgccgggctcagcctcaaggcggcgcgcgccgaggtggagaagatggccgggaggggccccggcatggtccccatggagatcaagttcacccccgccgccaagaacgtcctccaggcctcccaagaagaagcgcaccagctagggcataactatgttggatctgaacacctcctacttgggttgctccgtgagcatggtgccgcgcttgttgtgctgaagaactttcaggctgatcccagcaacatccgcagtgaggttatccgaatgatcagtgacacctctgaagatcatcaacctgttagtgctgcagttgggggaggaagcagtacaactaagatacccacacttttagagtatggtactaatctgacaaaactagcagaggaggggaagctggatcctgttgtcggaaggcaaaaccaggttgaccgtgtagtgcagattctcggcaggcggaccaagaacaacccctgcctgattggagagcctggagtagggaaaacagcgatcgcggaagggctcgcgcagcgcattgctgcaggaaatgtgcctgaaacaatcgatgggaaaacggttatcacccttgatatgggtctacttgttgctggtacaaaataccgtggtgagtttgaggagagattgaagaagctgatggacgaagtgaagcagaatggtgagataattctcttccttgatgaagttcacaccctggtgggtgctggagcagctgaaggggccatcgacgctgccaacatcctgaagccagcgctagcaagaggtgaactacagtgtattggagccactaccattgatgaatacagaaagcacattgagaaagacccagcactggagaggcgttttcagcctgtcaaggtccctgagccaactgttgatgagaccataggaattctcaaaggtctccgggagcgatatgagatccatcataaggtccagtatactgatgagtcgttgatcgcagctgctcggctctcataccagtacatcagtgatcgtttcctcccggataaagcaattgacttggttgatgaagcaggttctcttgtcaggctgcgaaatgcccagctacctgatgaagctaaagaactcgagaagaagctcaagaagatcatggcagagaagagcgaagccatccgaagccaagacttcgagaaggcgggagcgcttcgcggcgaggaggtggagctcaagtcggagatcatgtcgctggtcgacaagagcaaggagatgagcaaggcggcggtggactccggcgagtcgccggggccgacggtgacggaggcggacgtccagcacatcgtctccagctggaccggcgtccccgtggagaaggtcaccgtcgacgagtcgagccgtctcctcgccatggagtcgtcgctgcaccggcgcatcgtcggccaggacgaggccgtgacggcgatcagccgcgccatccgccgcgcccgcgtcgggctccgcgacccgcgccgcccgatcgcgagcttcatcttcgccgggccgacgggggtcggcaagtcggagctcgccaaggcgctggcggcgtactactacggctcgccggaggccatggtgcggctcgacatgagcgagttcatggagaagcacacggtggcgaagctggtgggctcgccgccggggtacgtcggctacgccgagggcggccagctgacggaggcgatccggcggcgcccctacgccgtcgtgctgttcgacgaggtcgagaaggcgcaccccgacgtgttcaacatgatgctccagatcctcgacgatggccggctcacggacagcaaggggaggacggtggatttcaagaactcgctcatcatcatgacatccaacgtcggcagcggcgtcatcgagaagggcgggaggcagctcgggttcgccggcgatggcagcggcgacggcgggtacggggtgatcaagaacatggtggaggaggagatgaagcgctacttcaggccggagttcctgaaccggctggacgagatgatcgtgttccggcagctgacgaagctggaggtgaaggagatcgccgggatcatgctcgccgaggtcaccgggcggatcggcgggaaggggatcgggctgcaggtgacggagaggttcaaggagctcgtcgtcgagcaaggcttcgacccgagctacggcgcgcggccgctgcgccgggccatcatgcggctgctggaggacacgctcacggacaagatgctcgccggggagatctgcgccggcgactcggtgatcgtcgacgccgacggtgacgggaacgtcgtcgtggtcggccggcgcagcgccggcttgccggacctgaaatcgccggcgtttactgtctag

SEQ ID NO: 7492 - protein, 932 aa, Oryza sativa
MERTLLNPPPSLRSPACRTTTATRIRPSSSMATMIPTPPPMRHARLVKASAAGRRELHAPPIAPPILLGLRSPAAASYGRASGGGGRRRGARVVARMGFDMFTDKAIKAIMMAQEEARRLGHHAAGSEQLLLGVIGEGTGIGAKVLRGAGLSLKAARAEVEKMAGRGPGMVPMEIKFTPAAKNVLQASQEEAHQLGHNYVGSEHLLLGLLREHGAALVVLKNFQADPSNIRSEVIRMISDTSEDHQPVSAAVGGGSSTTKIPTLLEYGTNLTKLAEEGKLDPVVGRQNQVDRVVQILGRRTKNNPCLIGEPGVGKTAIAEGLAQRIAAGNVPETIDGKTVITLDMGLLVAGTKYRGEFEERLKKLMDEVKQNGEIILFLDEVHTLVGAGAAEGAIDAANILKPALARGELQCIGATTIDEYRKHIEKDPALERRFQPVKVPEPTVDETIGILKGLRERYEIHHKVQYTDESLIAAARLSYQYISDRFLPDKAIDLVDEAGSLVRLRNAQLPDEAKELEKKLKKIMAEKSEAIRSQDFEKAGALRGEEVELKSEIMSLVDKSKEMSKAAVDSGESPGPTVTEADVQHIVSSWTGVPVEKVTVDESSRLLAMESSLHRRIVGQDEAVTAISRAIRRARVGLRDPRRPIASFIFAGPTGVGKSELAKALAAYYYGSPEAMVRLDMSEFMEKHTVAKLVGSPPGYVGYAEGGQLTEAIRRRPYAVVLFDEVEKAHPDVFNMMLQILDDGRLTDSKGRTVDFKNSLIIMTSNVGSGVIEKGGRQLGFAGDGSGDGGYGVIKNMVEEEMKRYFRPEFLNRLDEMIVFRQLTKLEVKEIAGIMLAEVTGRIGGKGIGLQVTERFKELVVEQGFDPSYGARPLRRAIMRLLEDTLTDKMLAGEICAGDSVIVDADGDGNVVVVGRRSAGLPDLKSPAFTV

SEQ ID NO: 7493 - DNA, 2757 bp, Oryza sativa
  CDS (1)..(2757)
atgccgtgcgctatgctggtggcagcagcggttgaggtcgccgtcccaaccctggctgaggctgcagccttgggagccataggtgcaattctggcagggcccttaatgcagccaactaaggttcgatcccctgtcagagtaagaaatagcaatttgaagtgccatggaaccaagatgagatctccctcaatggtttcaatgtcccagagccagcgcatcaagataccgtcttatgtcggtctaagcacagtgcatactcctgcactactcacacctgtcattagctcgagatcgacaagaactttccaaaagacagcaaaaacaatacaagaacggtctcatgccgttatgcaaatccctgaatttacacctggcactggcttgagatcaaccaatgcgattcagagaacaacagaagtactgcagagacattctcatgttggtctaaggcagccacatgctggtcgtctaagagaaatgcatacagcttcaggtaggcctgtcattggcttgacaccaaccattgtgtctcagaagacaaccaaagtgccgaaacagcctcgtttcgtcgccagggcgattgataatttcagcagggaggtgatgaatgctatcgcggttgcacacgacgaagctcaatacattgcacatctcacaatcgggagcacgaacatcctgcttagcctcatttcacagtacatttgcattttcctcctggaaatcatactcaataaggcttacaaaatgttcagagctgctgttaggagagcaaccaggggagctaagttagccacacttatggagtatgggactaatctaacaaaattagcagaggagggtaaattggaccctgttgtcggaaggcagaagcagattgatcatgtcgtccagattctgagcagacggacaaagaacaacccttgcctgatcggagagcctggtgttggaaaaacagcaatcgcagaagggcttgctcagctcattgccacaggggacgttcctgaaacaattcaacagaaaacggttatctcacttgacatgggacttcttcttgctggtacgaaatatcgaggagagttggaagaaagactgaagaatatcttggaagaaatcaagcagaacggtgaaataatactattccttgacgaagtccacactctagtaacagcaggatcagcagaaggtgctattgatgctgctaatatttttaagccagcactggcaagaggtgaactacagtgtattggagccactacaattaatgaatacaggaagcacatcgagaaagatgctgcattagaaaggcgcttccaacctgtaaaaattccagagtcaacagttgatgagaccgtaggaattctgaaaggacttcgagagagatatcagggtcatcacaaggtccaatacactgatgaagcccttgttgcagctgctgaactctcccataagcacatcagagatcgttttctccctgacaaagccattgatctgatggatgaagcaggttcgatcgtcaggctaagaaatgcccagtgtaaaccatcgaagaaggttaatgatttggaggcagagctcaagaaaaccttgaaggagaagaatgatgccatcagcatacagaacttcagaagggcaaagcagcttcgcgatcatgagctgcagctcaggaccaacatctcagctctaactgacaagaaaacgcagatgatggagccagacgccattgccatgccagtggtcaccgaagacgacgtccggcacgccatctcaaggtggaccggcgtcccattgcacaaggtgtccatggacgaatcaagaaagctcctcaagctggaggaggccctgcatcgccgcgtcgtcggccagggcgaggcggtggcggcggtcagccgcgccatccgccgcgcccgcctcggcctcaagcaccccggccggcccgtcgcgagcctcgtgttcgccgggccaaccggcgtcggcaagtcggagctcgccaaggcgctcgcggcgtactactacggctcgtcggagtcggaggaggcggccatggtgcggctcgacatgagcgagtacatggagaagcacgcggtggcgaggctggtcggctcgccgccggggtacgtctggcacggcgagggtggccagctgacggaggcggtgcgacggcggccgcacgcggtggtgctgctcgacgaggtcgagaaggcgcaccgcgacgtgttcgacctgctgctgcaggtgctcgacgacggccgcctcaccgacgggaaggggaggacggtggacttcaagaacacgctcatcgtcatgacgaccaacatcggcagcagcctcatcgtcaacaacggcggcgacggcgccgccgccgccgggaggatcaagaacacggtgaccgacgagatgaagcgccacttccggcccgagttcctgaaccggctggacgaggtgatcatgttccagccactgaccgagctcgaggtcgggaagatcgccgggatcatgctggaggagttcgccgggagggtcagggagaaggggatcaagctgaaggtgacggacaagttcagggagctcgtcgtggaggagggattcgacccgagctacggcgcgaggccgctgaggcgggccgtcgtgcggctgctggaggacaccctcgcggagaagatgctcgccggagaggtcagagaaggggattcggtgatcgtcgacgccgattcagctgggaatgccgtggtcaggaggagcaacgccatgcctgcctag

SEQ ID NO: 7494 - protein, 918 aa, Oryza sativa
MPCAMLVAAAVEVAVPTLAEAAALGAIGAILAGPLMQPTKVRSPVRVRNSNLKCHGTKMRSPSMVSMSQSQRIKIPSYVGLSTVHTPALLTPVISSRSTRTFQKTAKTIQERSHAVMQIPEFTPGTGLRSTNAIQRTTEVLQRHSHVGLRQPHAGRLREMHTASGRPVIGLTPTIVSQKTTKVPKQPRFVARAIDNFSREVMNAIAVAHDEAQYIAHLTIGSTNILLSLISQYICIFLLEIILNKAYKMFRAAVRRATRGAKLATLMEYGTNLTKLAEEGKLDPVVGRQKQIDHVVQILSRRTKNNPCLIGEPGVGKTAIAEGLAQLIATGDVPETIQQKTVISLDMGLLLAGTKYRGELEERLKNILEEIKQNGEIILFLDEVHTLVTAGSAEGAIDAANIFKPALARGELQCIGATTINEYRKHIEKDAALERRFQPVKIPESTVDETVGILKGLRERYQGHHKVQYTDEALVAAAELSHKHIRDRFLPDKAIDLMDEAGSIVRLRNAQCKPSKKVNDLEAELKKTLKEKNDAISIQNFRRAKQLRDHELQLRTNISALTDKKTQMMEPDAIAMPVVTEDDVRHAISRWTGVPLHKVSMDESRKLLKLEEALHRRVVGQGEAVAAVSRAIRRARLGLKHPGRPVASLVFAGPTGVGKSELAKALAAYYYGSSESEEAAMVRLDMSEYMEKHAVARLVGSPPGYVWHGEGGQLTEAVRRRPHAVVLLDEVEKAHRDVFDLLLQVLDDGRLTDGKGRTVDFKNTLIVMTTNIGSSLIVNNGGDGAAAAGRIKNTVTDEMKRHFRPEFLNRLDEVIMFQPLTELEVGKIAGIMLEEFAGRVREKGIKLKVTDKFRELVVEEGFDPSYGARPLRRAVVRLLEDTLAEKMLAGEVREGDSVIVDADSAGNAVVRRSNAMPA

SEQ ID NO: 7495 - DNA, 2760 bp, Oryza sativa
  CDS (1)..(2760)
atggcaggcaccctgctccagccggttgccctcggaacaacttttgcaggccgtgtaagtggtcagcgatggaagtctcatggcacaaggaggcctccctcaatgttggcgatgtccttgagccgcccagttaagatggccgcatttgtcggtctgagatcggtgcatagcttctcagtcacgcctgtcaccaacttcagatcgacggttgcatcttacagatcaagacggggaaggcgtgctcgctttgtaaccagatcgatgtttgagaggttcactgagaaagctattaaggttataatgcttgcgcaagaagaggcaaggcggttgggccacaactttgtcggtactgagcaaattctcttgggtctgattggagaagggactggtattgctgctaaggtgctcaagtcaatgggcataaatctcaaggatgcacgtgtggaagtggagaagatcattgggaggggcaatggtttcgttgctgtcgaaataccattcacaccacgtgcaaaacgtgttttggagctttcattggaagaagctcgtcagctaggacacaactatattggatctgagcacttgcttcttggactgctccgtgagggtgaaggtgtagcagcccgtgtgctcgaaagccttggagccgatcctagcaatattcgcacgcaggttatccgaatgattggcgagactacagaagctgttggtgcaggagttggaggagggagtagtggcaataaaatgccaacacttgaggagtacggaactaatttaacaaaattagcagaggagggaaagctagatcctgttgttggaaggcaaccccagattgagcgtgtcgtacaaattctgggcagacgaacaaagaacaacccatgcttaattggagagcctggtgttggaaagacagcaattgcagaaggccttgctcaacgcatttctactggtgatgtgcctgaaacaattgaaggaaagaaggtcattacccttgatatgggacttcttgttgctggtacaaaataccgtggagaatttgaagaaagattaaagaagctgatggaagaaatcaagcagagtgatgagataatactatttattgatgaagtccacactctcataggagcaggagcagctgagggtgctattgacgctgctaacattttaaagccagcattagcaagaggagaactacagtgtattggagccaccacacttgatgaatacaggaagcatattgagaaagacccagcattagaaagacgtttccagcctgtaagagtgccagagccaacagttgatgaaaccatagaaattctcagagggcttcgggaacgatatgagatccatcataaacttcgttacactgatgatgctctgatttcagctgccaagctatcttatcaatacatcagtgatcgtttcctcccagataaagcaattgatttgattgatgaagcaggttcacgtgtaaggcttcgacatgcccaggttcctgaagaagctagagagcttgacaaggagctcaagcaaatcacaaaagataagaatgaagctgtccgtagccaggacttcgaaaaggctggagagttacgtgatcgtgaaatggaattgaaggcccagataacagctctcattgacaagagcaaggagatgagcaaagcagagactgaatcaggggagacagggccactggtcaatgaagcagatatccagcacattgtatcctcgtggactggtattccagtagagaaggtatcaagtgacgagtccgataagcttcttaagatggaagagactttgcatcagcgtgtcattggtcaagatgaggctgtgaaagccataagtcgctccatccgccgtgctcgtgtgggcctcaagaacccgaacaggccgattgcaagcttcattttcgcaggtccaaccggtgttggtaaatccgagctcgcaaaagcacttgcagcatattactttggatctgaggaggccatgatcaggcttgatatgagtgaattcatggagaggcacactgtatccaagttgattggttcacccccagggtatgttgggtacacggagggtggacagctgactgaggcagttcgacgcaggccatacacagtcgtgcttttcgacgagatcgaaaaggcgcatccagatgtattcaacatgatgctccagatcttggaagatggaaggctgactgacagcaagggaagaacagtggacttcaagaacacacttctcataatgacttcgaacgtcggaagcagcgtcatcgagaagggtggtcggaagataggtttcgatctcgattacgatgagaaggacagcagctacagcaggatcaagagccttgtcgtcgaggagatgaagcagtacttccgccccgagttcctcaaccgtctcgacgagatgatcgtcttcaggcaactcaccaagctggaggtcaaggagatcgccgagatcatgctcaaggaggtctttgacaggctcaaggccaaggacattgacctccaggtcaccgagaagttcaaggagcgtatcgttgacgaaggcttcaacccgagctatggtgcgaggccgctaaggagggccatcatgaggctcctggaggacagcctcgcggagaagatgctagctggggaggtgaaggagggtgattctgccattgtcgatgtggattccgaggggaaggtgattgtactgaatggccaaagtgggttgcctgagctttcaactccggctgtcactgtgtag

SEQ ID NO: 7496 - protein, 919 aa, Oryza sativa
MAGTLLQPVALGTTFAGRVSGQRWKSHGTRRPPSMLAMSLSRPVKMAAFVGLRSVHSFSVTPVTNFRSTVASYRSRRGRRARFVTRSMFERFTEKAIKVIMLAQEEARRLGHNFVGTEQILLGLIGEGTGIAAKVLKSMGINLKDARVEVEKIIGRGNGFVAVEIPFTPRAKRVLELSLEEARQLGHNYIGSEHLLLGLLREGEGVAARVLESLGADPSNIRTQVIRMIGETTEAVGAGVGGGSSGNKMPTLEEYGTNLTKLAEEGKLDPVVGRQPQIERVVQILGRRTKNNPCLIGEPGVGKTAIAEGLAQRISTGDVPETIEGKKVITLDMGLLVAGTKYRGEFEERLKKLMEEIKQSDEIILFIDEVHTLIGAGAAEGAIDAANILKPALARGELQCIGATTLDEYRKHIEKDPALERRFQPVRVPEPTVDETIEILRGLRERYEIHHKLRYTDDALISAAKLSYQYISDRFLPDKAIDLIDEAGSRVRLRHAQVPEEARELDKELKQITKDKNEAVRSQDFEKAGELRDREMELKAQITALIDKSKEMSKAETESGETGPLVNEADIQHIVSSWTGIPVEKVSSDESDKLLKMEETLHQRVIGQDEAVKAISRSIRRARVGLKNPNRPIASFIFAGPTGVGKSELAKALAAYYFGSEEAMIRLDMSEFMERHTVSKLIGSPPGYVGYTEGGQLTEAVRRRPYTVVLFDEIEKAHPDVFNMMLQILEDGRLTDSKGRTVDFKNTLLIMTSNVGSSVIEKGGRKIGFDLDYDEKDSSYSRIKSLVVEEMKQYFRPEFLNRLDEMIVFRQLTKLEVKEIAEIMLKEVFDRLKAKDIDLQVTEKFKERIVDEGFNPSYGARPLRRAIMRLLEDSLAEKMLAGEVKEGDSAIVDVDSEGKVIVLNGQSGLPELSTPAVTV

SEQ ID NO: 7497 - DNA, 2769 bp, Glycine max
  CDS (1)..(2769)
atggctagggttttggctcagtctattaatgtccctggtctattggctgagcataggcatggtcagcaaaaggaatcaggaaaattaaaaagatcgaccaaaatgatgagtgctttacgaacaaatggattaagaatgtcaggtttctcagggcttcgtactttcaatcctttggatactatgttgagacctggaatagattttcattctaaggtatccattgcaacttcttcacggcgagcaagagctaccagatgcgtgcccaaagccatgtttgagcgtttcactgagaaagcaatcaaagtaattatgctagcccaggaggaagcaagacgtcttggtcacaattttgttggaacagagcaaattctattgggtcttatcggcgaaggaactggtattgctgctaaggtgctaaagtcaatggggatcaacctcaaagatgcacgagtggaagtagaaaaaataattggaaggggtagtggatttgtggctgttgaaattccgtttactccccgggcaaagcgtgttttagaactttcactggaggaagctcgccaacttggtcacaattatattggatctgagcacctgcttctgggtcttcttcgagagggcgagggtgtagcagcacgtgttctggaaaatctgggtgctgatcctactaatattcgcacacaggttattcgcatggtgggtgagagtgctgacagtgttactgcaactgttggctcaggaagtagtggtaataagatgccaactttggaggagtatggtaccaatttgaccaagctagcagaagagggaaaattggatcctgttgtgggaaggcagccgcaaattgaacgcgtgactcaaattttaggtcgtcggactaaaaataatccttgtcttattggagaacctggtgttgggaagacagcaattgctgaaggtctcgctcagcggattgcaaatggtgatgtacctgaaaccatagagggaaaaaaggtcataacccttgacatgggtctgcttgttgccggaactaaatatcgtggtgagtttgaggagaggttgaagaaactgatggaagaaatcaaacaaagtgatgagataatactttttatcgatgaagtgcacactttgattggagcaggagcagcggaaggggcaattgatgctgctaacatactaaagccagctcttgcaagaggtgaactacagtgtattggagccacaacattagacgagtataggaagcacattgaaaaagatcctgctttggagagacgattccagccagttaaagtgccagagccaactgtagatgaaaccatacaaatactgaaaggacttagagagcgatatgaaattcaccacaagctccgctatactgatgaggctcttgtagctgctgcacagctgtcctaccagtatatcagtgatcgatttttgccagacaaagctatagatttgattgatgaagctggttcacgagtccggcttcaacatgcacagttacctgaagaagcaagagaacttgacaaggaggtcaggcagattattaaggagaaagaagaagctgttcgcaaccaagactttgaaaaggctggagagctacgtgatagagagatggatcttaaggcacagatctcaacacttgtagagaaaggcaaggagatgagcaaggcagagactgaggcaggggatgaaggtcctattgtgactgaagctgacatacagcatattgtctcatcctggactggtattcctgttgagaaagtctcaacagatgaatctgatcgcctcctgaagatggaagagactttacataagcgagtcattggtcaggatgaagcagttaaagccattagtcgggctatccgtcgagctcgggttggactaaaaaatcctaatcgtcccattgccagcttcatcttttctggtccaactggtgtggggaagtctgaattggccaaagcattggctgcatactactttggctccgaagaagctatgattcggcttgacatgagtgaattcatggaaaggcacactgtctccaaacttattggttcacctcctggatatgttggttacactgaaggtggtcaattgaccgaggcagttcggcgtcgtccttacactgttgtactgtttgatgagattgagaaagcccatcctgatgtgttcaacatgatgcttcagatcctggaagatggaagactaacagacagtaagggcagaacagtggatttcaagaacacacttcttataatgacatcaaatgttggaagcagtgtgattgagaaaggaggccgcaaaattggatttgatctggattacgatgagaaggatagcagttataacagaatcaagagcctggtaactgaggagctaaaacaatacttcaggccagaatttttgaatagattggatgaaatgattgtcttcaggcagctcacaaaactggaggtgaaggagattgctgacataatgctcaaagaggtgtttgatagactgaaggtgaaagatattgaacttcaagtgacagaaagattcagggacagagtggtggaggaaggttataaccctagttatggagctagacctctaagaagagccataatgcgacttttggaggacagcatggctgagaagatgcttgccagagagatcaaggagggcgactctgttatagtggatgttgattctgatggtaatgtgattgtgctcaatggtagcagcggagcccccgaatccttgccagagacgcttcctgtataa

SEQ ID NO: 7498 - protein, 922 aa, Glycine max
MARVLAQSINVPGLLAEHRHGQQKESGKLKRSTKMMSALRTNGLRMSGFSGLRTFNPLDTMLRPGIDFHSKVSIATSSRRARATRCVPKAMFERFTEKAIKVIMLAQEEARRLGHNFVGTEQILLGLIGEGTGIAAKVLKSMGINLKDARVEVEKIIGRGSGFVAVEIPFTPRAKRVLELSLEEARQLGHNYIGSEHLLLGLLREGEGVAARVLENLGADPTNIRTQVIRMVGESADSVTATVGSGSSGNKMPTLEEYGTNLTKLAEEGKLDPVVGRQPQIERVTQILGRRTKNNPCLIGEPGVGKTAIAEGLAQRIANGDVPETIEGKKVITLDMGLLVAGTKYRGEFEERLKKLMEEIKQSDEIILFIDEVHTLIGAGAAEGAIDAANILKPALARGELQCIGATTLDEYRKHIEKDPALERRFQPVKVPEPTVDETIQILKGLRERYEIHHKLRYTDEALVAAAQLSYQYISDRFLPDKAIDLIDEAGSRVRLQHAQLPEEARELDKEVRQIIKEKEEAVRNQDFEKAGELRDREMDLKAQISTLVEKGKEMSKAETEAGDEGPIVTEADIQHIVSSWTGIPVEKVSTDESDRLLKMEETLHKRVIGQDEAVKAISRAIRRARVGLKNPNRPIASFIFSGPTGVGKSELAKALAAYYFGSEEAMIRLDMSEFMERHTVSKLIGSPPGYVGYTEGGQLTEAVRRRPYTVVLFDEIEKAHPDVFNMMLQILEDGRLTDSKGRTVDFKNTLLIMTSNVGSSVIEKGGRKIGFDLDYDEKDSSYNRIKSLVTEELKQYFRPEFLNRLDEMIVFRQLTKLEVKEIADIMLKEVFDRLKVKDIELQVTERFRDRVVEEGYNPSYGARPLRRAIMRLLEDSMAEKMLAREIKEGDSVIVDVDSDGNVIVLNGSSGAPESLPETLPV

SEQ ID NO: 7499 - DNA, 2763 bp, Hordeum vulgare
  CDS (1)..(2763)
atggcagggaccttagtcctgccggttgctcttgagacaacttttgcaggccgtacaggcggtcgacactggaagtctcatggaaccaggaggactccctcaatgttggcaatgtcattaaaccgtcctgtaaggatggcagcatttgtcggtctgagatcggtacatagcttctcagctatgcgctcgtccaacttcaggtcaacagttgcatcttacagattctctagacggggaaggcgtgcttcttttgtaaccagagcgatgttcgagagatttactgagaaagctataaaggtcataatgctcgcacaagaggaagcgagacgcctgggtcacaactttgtcggaactgagcaagttctattgggtctggttggagaaggcactggtattgcggcgaaggtgcttaagtccatgggtataaatctgaaggatgcccgtgtggaagtggagaagatcattgggaggggcaacggttttgttgctgtcgaaataccattcacaccacgtgcaaaacgtgttttagagctttcattggaggaagctcgccagctaggacacaactatattgggtccgagcacttgcttcttggattgcttcgtgagggggaaggagtggcagctcgcgtacttgagtctcttggtgctgaccccagcaatattcgtacccaggttgtccggatgattggtgagacaacagaagctgttggtgctggagttgggggagggagcagtggtaacaagatgccgacacttgaggagtatgggactaatttaacaaaactagccgaggagggaaagctagatcctgttgttgggagggaaccacagattgaacgtgttgtacaaattttgggcagaagaaccaagaacaatccctgcttaattggagaacctggtgttggtaagacagctattgcagaagggcttgctcagcgcatttctaatggcgatgtgcctgagacgatagaggggaagaaggtcattacccttgatatgggacttcttgttgctggtacgaaataccgtggagaatttgaagaacggttgaagaaactgatggaagaaatcaaacagagcgatgagatcattctcttcatcgatgaagttcacaccctcataggagcaggagccgccgaaggtgctattgatgctgctaatattctaaagccagcattagcaagaggagaacttcagtgtattggagccaccacacttgatgaatacaggaagcatgttgagaaagacccagcattagaaagacgtttccagccagtaaaggtaccagagccaactgttgatgaaaccatagaaattctcagagggcttcgggaacgctatgagatccatcataaacttcgttacactgatgattctttgattgcggctgctaagctatcttatcaatatatcagtgatcgtttcctcccagataaagcaattgatttgatcgatgaagcaggttcacgtgttaggcttcgacatgcccaggttcctgaggaagccagagagcttgacaaggagcttaagcaaataacgaaagataaaaatgaagctgtccgtggccaggattttgagaaggctggagagttgcgagatcgtgaaatggaattgaaggcccagataacgaccttgattgacaagagcaaggagatgactaaagcggagactgagtcgggagagaccgggccgatggtgaatgaatcagatatccagcacattgtgtcgtcatggactggtatcccggtggagaaagtctcaactgacgaatctgataaacttcttaagatggaagagacattgcataagcgtgtcatcgggcaagatgaggctgtgaaagcaataagtcggtctgttcgccgtgctcgtgtaggactcaagagccccaaccgaccaattgcgagcttcatttttgcaggtcccacgggtgttgggaaatcagagcttgcaaagactctggcatcatattacttcggctctgaagaagccatgatccggctggatatgagtgagttcatggagaggcacactgtgtccaagttgatcggttcaccaccaggctatgtgggatacactgaaggtgggcagctgacggaggcggttcgacggcgaccatacagcgttgtgctttttgatgagattgaaaaagcgcatccggatgtgttcaacatgatgctccagatcctggaagatggaaggttaactgacagcaaggggagaacagtggacttcaagaacacgcttctgataatgacatcaaatgttggaagcagcgtgattgagaagggagggaggaagattgggttcgacctcgactcagacgagaaggacagcagctatggcaggatcaagagcttggtggtcgaggagatgaagcagtacttccgaccggagtttctcaaccgtctcgacgagatgatcgtcttcagacagctgaccaagctggaagtcaaagagatcgcgaacataatgctgcaggaggttttcaccaggctgaagagcaaggacatcaacctgcaggtgacggagaagttcaaggagcgggtcgtggacgaagggtacaaccctagctacggagcgcggccattgaggagggcgatcatgaggcttctggaggacagccttgcggagaagattttgggcggcgaggtcaaggagggcgactctgtgattgttgatgtggactcggaggggaaagtcattgtgctgaatggcgagaaccgactgccggaacttccaaccccggcggatgctgtataa

SEQ ID NO: 7500 - protein, 920 aa, Hordeum vulgare
MAGTLVLPVALETTFAGRTGGRHWKSHGTRRTPSMLAMSLNRPVRMAAFVGLRSVHSFSAMRSSNFRSTVASYRFSRRGRRASFVTRAMFERFTEKAIKVIMLAQEEARRLGHNFVGTEQVLLGLVGEGTGIAAKVLKSMGINLKDARVEVEKIIGRGNGFVAVEIPFTPRAKRVLELSLEEARQLGHNYIGSEHLLLGLLREGEGVAARVLESLGADPSNIRTQVVRMIGETTEAVGAGVGGGSSGNKMPTLEEYGTNLTKLAEEGKLDPVVGREPQIERVVQILGRRTKNNPCLIGEPGVGKTAIAEGLAQRISNGDVPETIEGKKVITLDMGLLVAGTKYRGEFEERLKKLMEEIKQSDEIILFIDEVHTLIGAGAAEGAIDAANILKPALARGELQCIGATTLDEYRKHVEKDPALERRFQPVKVPEPTVDETIEILRGLRERYEIHHKLRYTDDSLIAAAKLSYQYISDRFLPDKAIDLIDEAGSRVRLRHAQVPEEARELDKELKQITKDKNEAVRGQDFEKAGELRDREMELKAQITTLIDKSKEMTKAETESGETGPMVNESDIQHIVSSWTGIPVEKVSTDESDKLLKMEETLHKRVIGQDEAVKAISRSVRRARVGLKSPNRPIASFIFAGPTGVGKSELAKTLASYYFGSEEAMIRLDMSEFMERHTVSKLIGSPPGYVGYTEGGQLTEAVRRRPYSVVLFDEIEKAHPDVFNMMLQILEDGRLTDSKGRTVDFKNTLLIMTSNVGSSVIEKGGRKIGFDLDSDEKDSSYGRIKSLVVEEMKQYFRPEFLNRLDEMIVFRQLTKLEVKEIANIMLQEVFTRLKSKDINLQVTEKFKERVVDEGYNPSYGARPLRRAIMRLLEDSLAEKILGGEVKEGDSVIVDVDSEGKVIVLNGENRLPELPTPADAV

SEQ ID NO: 7501 - DNA, 2913 bp, Hordeum vulgare
  CDS (1)..(2913)
atggccgccgcgctcgccgcggacctccgcatctcctacccggccgccgccccggccccggccgtcgccgccgcggcgtggggcagcagcaggacggcgaagggcccgtcgtcgccccgcgtcgcgctcagggcggccaggggacgtggacggctcgccccggtgaccgggacgccgcggacggcgctctccgtcaggtgcaacgccagctcccgggacgggaggattacacagcaagagttcactgagatggcatggcagtccattgttctggcgcctgaagtggccaaagaaagcaagcaccagatcgttgagactgaacatttgatgaaatcattgctggagcagaggaacgggctcgcccgtcggatcttttccaaggctggagttgataacacaaggcttctcgaggccacggaaaagtacatccagcggcagcctaaggtattaggtgaagatcctggctcgatgttggggcgtgacttggaagctctgatacagagagcaagaaactataagaaagagtatggtgattcatttgtctcggttgagcacattgttcttggttttgcggatgataagcgatttggaagacagctgttcaaggacttccagatcaccgtcgaaaccttgaaaacagctattgaatccataagagggaagcagaatgtgattgatcaagatcctgagggcaagtatgaagctttggacaaatatgggaaagacctgacagctatggcacgtcaggggaagcttgacccagttataggaagggatgatgaaatccgtaggtgcattcagatcttgtcgcggagaacaaagaataatcctgttttgattggtgaacctggtgtggggaaaacggctatagctgaagggctcgctcagaggatagtgcaaggagatgtcccacaagcactgacaaaccgtcgactgattacacttgacatgggtgctttaattgctggtgcaaaatatcgaggagaatttgaggataggctgaaggctgtacttaaagaagtcacagattctgatggacaggtcattctctttattgatgagattcacactgttgttggagcaggtgccacttctggtgcaatggatgctggcaatcttctgaaaccaatgctcggaagaggggagctacgttgcattggcgcaacaaccctcgatgagtaccgcaaatatattgagaaagatccagcactggaacgccgcttccaacaagtgtatgttgatcaaccaacagttgaagatacagtgtcaatactccgaggattacgtgagagatatgaattgcaccatggagtccgcatatcagacagtgctcttgttgctgccgctgttttatcagatcgttacatcagcggacgatttttgcctgacaaagcaattgatttggtcgatgaatcagctgccaagttgaaaatggagataacatctaagccaactgttctggacgagattgatcgttctgtgcttaaacttgaaatggaacgtctctcactaacaaatgacacagacaaagcatcaagagacagactatctcgtattgaagcagaattgtcacttttgaaagaaaggcagaagggattgactgagcagtgggagcatgagaagtcggtgatgacaaagattcaatctattaaggaagagattgacaggttaaatgtggagatccagcaggccgagcgtgagtatgatctcaatcgtgctgctgaactgaagtatggtagtctgaatgcattgcagcgggaccttcaaaaaacagaggatgaactgaatgaatatcaaaattctgggaaatccatgctaagagaagaggtgacccaagatgatattgcagagattgtgagcaggtggacaggtattcccgtttccaagttaaagcaatccgacagagaaaagctgctgtatctggaggacgaactgcacaagcgtgtagtggggcaggatcctgcagtcaaagcagttgcagaggccattcagagatccagagctggtttgtccgatccaaaccggcccattgccagcttcatgttcatgggacctacaggagtgggcaaaacagaattggcgaaagccctcgcttcttttatgttcaacactgaggatgctgttgtcaggattgacatgagtgagtatatggagaaacactctgtctcaagactgattggtgcgccaccaggttatgttgggtacgaagagggtggccagcttacagaggctgtccgtaggaggccatactctgtggtcttgtttgatgagattgagaaagcccattcagatgtattcaatgttttcctgcaaatattggacgacggcagggttacagactcgcagggccggaaggtgagcttcaccaacagtatcattatcatgacatccaatgttggttcgcagtacatactgaatatggacgaagaaggtggagcaactgattcggcctacgagagtatgaagaagagagtgatggatgctgcaagatctgttttccgtcctgagttcatgaatcgtgtggacgagtacatcgtcttcaagcctcttgagaggaagcagataaacagcattgtgaaattacagttggcaagagtgcagaagaggatcgccgaccgcaagatcaaactcgacgtctcaccgtcagcaatcgagttcctgggaagccttggctacgaccccaactacggtgccaggccagtgaagcgagtgctccagcagtacgtggagaacgaactggccaagggtatcctcagaggcgagttcaaggacgaggacagcatctccgtcgacactcaggtgacggtgccgtcgaacggacagctcccccagcagaagcttgtcttccggaagatgaacgaggaatccaagccggctgctgctcaagacgagaagttcctgccgacagtctga

SEQ ID NO: 7502 - protein, 970 aa, Hordeum vulgare
MAAALAADLRISYPAAAPAPAVAAAAWGSSRTAKGPSSPRVALRAARGRGRLAPVTGTPRTALSVRCNASSRDGRITQQEFTEMAWQSIVLAPEVAKESKHQIVETEHLMKSLLEQRNGLARRIFSKAGVDNTRLLEATEKYIQRQPKVLGEDPGSMLGRDLEALIQRARNYKKEYGDSFVSVEHIVLGFADDKRFGRQLFKDFQITVETLKTAIESIRGKQNVIDQDPEGKYEALDKYGKDLTAMARQGKLDPVIGRDDEIRRCIQILSRRTKNNPVLIGEPGVGKTAIAEGLAQRIVQGDVPQALTNRRLITLDMGALIAGAKYRGEFEDRLKAVLKEVTDSDGQVILFIDEIHTVVGAGATSGAMDAGNLLKPMLGRGELRCIGATTLDEYRKYIEKDPALERRFQQVYVDQPTVEDTVSILRGLRERYELHHGVRISDSALVAAAVLSDRYISGRFLPDKAIDLVDESAAKLKMEITSKPTVLDEIDRSVLKLEMERLSLTNDTDKASRDRLSRIEAELSLLKERQKGLTEQWEHEKSVMTKIQSIKEEIDRLNVEIQQAEREYDLNRAAELKYGSLNALQRDLQKTEDELNEYQNSGKSMLREEVTQDDIAEIVSRWTGIPVSKLKQSDREKLLYLEDELHKRVVGQDPAVKAVAEAIQRSRAGLSDPNRPIASFMFMGPTGVGKTELAKALASFMFNTEDAVVRIDMSEYMEKHSVSRLIGAPPGYVGYEEGGQLTEAVRRRPYSVVLFDEIEKAHSDVFNVFLQILDDGRVTDSQGRKVSFTNSIIIMTSNVGSQYILNMDEEGGATDSAYESMKKRVMDAARSVFRPEFMNRVDEYIVFKPLERKQINSIVKLQLARVQKRIADRKIKLDVSPSAIEFLGSLGYDPNYGARPVKRVLQQYVENELAKGILRGEFKDEDSISVDTQVTVPSNGQLPQQKLVFRKMNEESKPAAAQDEKFLPTV

SEQ ID NO: 7503 - DNA, 2817 bp, Oryza sativa
  CDS (1)..(2817)
atggaggtgtgctgctgctcgacgtcatcggccgtgcccgggaggaggttcgcggcggccggggcggcggcggcggcggtggcggcgaggtggggcgccgtgggggtcgggagggcggtggtgctggcgcacccgctgcgcccggcgccgcgcggcgggcacgcgcacgcgcagcaggcgggcgcgcggcgggcgcggcgcgcggtcgtcagggcggtgttcgagcggttcacggagcgggcggtgaaggcggtggtgctgtcgcagcgggaggccaaggggctcggggagggcgccgtggcgccgcgccacctgctgctggggctcatcgccgaggaccggtcggcgggcgggttcctctcgtcggggatcaacatcgagcgcgcgcgcgaggagtgccgcggcatcggcgccagggacttgacccccggcgcgccgtcgccgtccggctccgggctggaaatggacatacccttctccggcagctgcaagcgggtgttcgaggtcgccgtggagttctcccggaacatgggctgcagcttcatctccccggagcacctcgccctcgcgctcttcaccctcgacgatcccaccaccaacagcctcctcaggagcttgggagcggatccgagtcaactagcatcagtagcgcttacccgactccaagcggagcttgcgaaagatggcagagaacctgcaggagcatcatctttcaaagtacccaagaaatctcctgctggagctggaagatctgccttctcgaaatctttaaattcaaagaaagaaaagggtgcgcttgatcaattttgtttagatctgaccacacaagctagtggcgggtttattgatcctatcattggccgtgaggaggagattgaaagagtagttcagataatatgccgacggacaaagaacaatcctattcttttgggtgaggcaggtgttggcaaaactgcaatcgctgaagggttggctcttcgaattgcaaatggagatgtccccatttaccttgtggcaaagcgtataatgtcattggacgttggtctacttattgctggtgcaaaagaaagaggtgaactggagtccagggttactagtttaattcgtgaagtccgggaagcaggggatgttattcttttcattgatgaggttcacaatcttattggatctggcactgttggaaagggtaagggtgctggccttgacattggcaacttgctgaagcccccacttgctagaggtgaattgcagtgcattgcagctacaactctagatgaacacagaatgcattttgagaaggataaggctttggctcgccgcttccagccagtattagtagaggagcctagtcaggatgatgctgtgaagatattacttggtcttcgtgaaaaatatgaaacatatcacaaatgcaaatttaccttagaagccatcaatgcagcagtttatctgtcagcaagatatattcctgacaggcagctccctgacaaggccatcgatctgattgatgaagctggcagtagagctcgaatggaatcatttaataggaagaaagaagggcagtcttcaatcctcttaaagtcgccagatgaatactggcaagagataagagctgctcaaaacatgcatgaagtggtgtcatcaaaccagatgaagtattcccctcgtcaagagaatggcagtgctgccattaaagcaccaagcgaggacatgaatgagttgacatctgaactccaagttgaggaaccaattgtagttggaacagaggaaattgcaagagttgcctcattgtggtcagggataccagtccagcagttaactgctgatgatagaaagcttctcgtaggactagatggtgaactcagaaagcgtgtgattggtcaagatgatgctgttatggcaatatctagagcggtgaagagatcacgtgttggcctcaatgatcctgacagacctattgccactctacttttctgtggtccgacaggagttggtaaaactgagcttactaaagctctagcagctagttattttggatcggaatctgctatgcttagattagacatgagcgagtatatggagaggcacactgtgagcaagctcataggctctcctccagggtacatcggatatggtgaaactggtactctgacagaagctgtcaggagaaagccatttactgtagtattacttgatgagatagagaaagctcaccctgatattttcaacattcttctccaaatttttgaagatgggcatctgtcggactcacagggccgcagagtgtccttcaagaacacattgattgtcatgacatcaaatattggttctacatcaatttcaaagggaagacgaagcatgggtttcatgacagaagatactgaatcaagctcatatgttgcaatgaaatctctagtaatggaagagttgaaggcatttttccgtccagaattgctcaacagaatcgatgagatggttgtattccgtcccttagagaaaactcagatgctagcaattcttgatatcatcctacaagaagtgaagggtaggctgttagcccttggaataggcctcgaggtgtccgatgcaatgaaggacctgatttgcgaagaaggctatgacaagagctacggtgcgcggccactgaggagagccgtcacccacctgattgaggatgtgatcagcgaagcaattctatttggcgaatacaagcctggggacacgatactgatggatattgatgccggggggaaactttgcatgagccacctgaatgagaaggttgtccagttgtctgatccgacacggacattctga

SEQ ID NO: 7504 - protein, 938 aa, Oryza sativa
MEVCCCSTSSAVPGRRFAAAGAAAAAVAARWGAVGVGRAVVLAHPLRPAPRGGHAHAQQAGARRARRAVVRAVFERFTERAVKAVVLSQREAKGLGEGAVAPRHLLLGLIAEDRSAGGFLSSGINIERAREECRGIGARDLTPGAPSPSGSGLEMDIPFSGSCKRVFEVAVEFSRNMGCSFISPEHLALALFTLDDPTTNSLLRSLGADPSQLASVALTRLQAELAKDGREPAGASSFKVPKKSPAGAGRSAFSKSLNSKKEKGALDQFCLDLTTQASGGFIDPIIGREEEIERVVQIICRRTKNNPILLGEAGVGKTAIAEGLALRIANGDVPIYLVAKRIMSLDVGLLIAGAKERGELESRVTSLIREVREAGDVILFIDEVHNLIGSGTVGKGKGAGLDIGNLLKPPLARGELQCIAATTLDEHRMHFEKDKALARRFQPVLVEEPSQDDAVKILLGLREKYETYHKCKFTLEAINAAVYLSARYIPDRQLPDKAIDLIDEAGSRARMESFNRKKEGQSSILLKSPDEYWQEIRAAQNMHEVVSSNQMKYSPRQENGSAAIKAPSEDMNELTSELQVEEPIVVGTEEIARVASLWSGIPVQQLTADDRKLLVGLDGELRKRVIGQDDAVMAISRAVKRSRVGLNDPDRPIATLLFCGPTGVGKTELTKALAASYFGSESAMLRLDMSEYMERHTVSKLIGSPPGYIGYGETGTLTEAVRRKPFTVVLLDEIEKAHPDIFNILLQIFEDGHLSDSQGRRVSFKNTLIVMTSNIGSTSISKGRRSMGFMTEDTESSSYVAMKSLVMEELKAFFRPELLNRIDEMVVFRPLEKTQMLAILDIILQEVKGRLLALGIGLEVSDAMKDLICEEGYDKSYGARPLRRAVTHLIEDVISEAILFGEYKPGDTILMDIDAGGKLCMSHLNEKVVQLSDPTRTF

SEQ ID NO: 7505 - DNA, 2739 bp, Zea mays
  CDS (1)..(2739)
atgaatccggacaacttcacccacaagacgaacgaggcgatcgtgggggcgcacgagattgcggtggaggccggccacgcgcagctcacgccgctgcacctggccgcagtgctggctgcggacaagggcggcatcctgcggcaggccatcacgggggcgtcggggggcgacggagcggccggggactcgttcgagcgcgtgctgaacaactcgctcaagaagctgccgtcgcagtccccgccgccggactccgtcccggcgtccacggcactgatcaaggtcatccgccgggcgcagtccgcgcagaaaaaacgcggggactctcacctcgccgtcgaccagctgctgctcggcctgctcgaggactcgcagatctccgactgcctcaaggaggccggcgtgtccgcggcgcgggtgcgcgccgagcttgagaagctccgcggcggggaggggcgccgcgtggagtccgcgtcgggggacactaacttccaggcgctcaagacatacggccgggacctcgtcgagcaggccgggaagcttgatcccgtcatcggccgcgacgaggagatccgccgcgtggtgcgcatcctctcgcgccgcactaagaacaaccccgtcctcatcggcgagcccggcgttggcaagacggccgtcgtggagggcctcgcgcagcgcatcgttcgcggcgacgtgcccagtaacctcctcgacgtccgcctcatcgcgctcgacatgggcgcgctcgtcgcgggcgccaagtaccgcggcgagttcgaggagcggctcaaggccgtgctcaaggaggtggaagaggccgaggggaaggtcattctcttcatcgacgagatacacctcgtcctgggcgcgggcaggacggagggttccatggacgcggccaacctgttcaagccaatgctggcgaggggacagctcaggtgcatcggcgccaccacgctggaggagtaccgcaagtacgtggagaaggacgcagcgttcgagcggcggttccagcaggtgttcgtcgcggagccgagcgtgcccgacaccgtcagcattctgaggggactcaaggagaagtacgaggggcaccatggcgtgaggatccaggaccgcgccctcgtggtcgcggcacagctatccgcgaggtacatcatgggtcggcacctgcctgacaaagccatagacctggtggacgaggcctgcgccaatgtgagggtgcagctcgacagccagccggaggagattgataacctggagaggaagagaatccagcttgaggttgagctccacgcgctcgagaaggagaaggacaaggccagcaaagcccggctgatcgaggtcaggaaggaattggacgatctgagggacaagctgcagcccctgaccatgaagtacaggaaggagaaggagagaatcgatgagatcaggaagctgaagcagcgccgcgaggagctccagttcaccctgcaggaggccgagcgccggatggacctggcccgtgtggccgacctcaagtacggcgccctccaggaaatcgacgccgcgatctccaagctggagagcgaaacaggggagaacctgatgctcaccgaaaccgtcggccctgaacaaattgcagaggtggtgagccgttggacgggtattccagtgacccggcttggccagaacgacaaggagaggctggtcggcctggctgacaggcttcaccagagggtggtcggccagacagaggctgtgagcgccgtcgcagaggcggtgctgaggtcgagggccggtcttggcaggccacaacagcccactggctcgttcctgttcctgggtccgactggcgtggggaaaactgagctagccaaggccctagccgaacagctgttcgacgacgagaaccttcttgtccgcatcgacatgtcggagtacatggagcagcactcggttgctcgcctcatcggagcaccgcctggctacgtcggccatgaagagggtgggcagctgactgaacaagtgaggaggaggccgtacagcgtgatcctgttcgacgaggtcgagaaggcccatgtcgccgtgttcaacaccctgctccaggtcctcgacgacggcaggttgacggatgggcaaggcaggacggtggacttcaggaacaccgtgatcatcatgacatcgaacctcggcgccgagcacctcctcgctgggatggtgggcaagaactccatgaaggtcgctcgcgatctggtcatgcaggaggtgaggaggcacttccgacccgagctgctgaaccgtctcgacgagatcgtgatcttcgatcctctgtcccacgagcagctgaggaaggtcgctcgccttcagatgaaggatgtggccgtccgtcttgccgaaaggggcatcgctctggctgtgaccgacgccgcattggacatcatcttgtctctctcttacgatccggtgtatggcgcgcggccaatcaggaggtggatcgagaagagggtggtgacgcagctgtcgaagatgctgatccaggaggagatcgacgagaactgcacggtctacatcgacgccgcgcccggcaaggacgagctggtctacagggtggaccggagcggcggtctggtgaacgctgagacggggatgaagtcggacatcctgatccaggtccccaacagctcccccaggagcgacgctgcgcaggccgtcaagaagatgaggatcatggaggaggacgaggacggcatggacgaggagtaa

SEQ ID NO: 7506 - protein, 912 aa, Zea mays
MNPDNFTHKTNEAIVGAHEIAVEAGHAQLTPLHLAAVLAADKGGILRQAITGASGGDGAAGDSFERVLNNSLKKLPSQSPPPDSVPASTALIKVIRRAQSAQKKRGDSHLAVDQLLLGLLEDSQISDCLKEAGVSAARVRAELEKLRGGEGRRVESASGDTNFQALKTYGRDLVEQAGKLDPVIGRDEEIRRVVRILSRRTKNNPVLIGEPGVGKTAVVEGLAQRIVRGDVPSNLLDVRLIALDMGALVAGAKYRGEFEERLKAVLKEVEEAEGKVILFIDEIHLVLGAGRTEGSMDAANLFKPMLARGQLRCIGATTLEEYRKYVEKDAAFERRFQQVFVAEPSVPDTVSILRGLKEKYEGHHGVRIQDRALVVAAQLSARYIMGRHLPDKAIDLVDEACANVRVQLDSQPEEIDNLERKRIQLEVELHALEKEKDKASKARLIEVRKELDDLRDKLQPLTMKYRKEKERIDEIRKLKQRREELQFTLQEAERRMDLARVADLKYGALQEIDAAISKLESETGENLMLTETVGPEQIAEVVSRWTGIPVTRLGQNDKERLVGLADRLHQRVVGQTEAVSAVAEAVLRSRAGLGRPQQPTGSFLFLGPTGVGKTELAKALAEQLFDDENLLVRIDMSEYMEQHSVARLIGAPPGYVGHEEGGQLTEQVRRRPYSVILFDEVEKAHVAVFNTLLQVLDDGRLTDGQGRTVDFRNTVIIMTSNLGAEHLLAGMVGKNSMKVARDLVMQEVRRHFRPELLNRLDEIVIFDPLSHEQLRKVARLQMKDVAVRLAERGIALAVTDAALDIILSLSYDPVYGARPIRRWIEKRVVTQLSKMLIQEEIDENCTVYIDAAPGKDELVYRVDRSGGLVNAETGMKSDILIQVPNSSPRSDAAQAVKKMRIMEEDEDGMDEE

SEQ ID NO: 7507 - DNA, 2793 bp, Triticum aestivum
  CDS (1)..(2793)
atgttcgtttgggacaacttacttttgaccatggcagggaccttagtcctgccggttgctcttgagacaacttttgcaggccgaacaggcggtcggcactgcaagtctcatggaaccaggaggactccctcaatgttggcaatgtcattgaaccgtcctgtaaggatggcagcatttgtcggtctgagatcggtacatagcttctcagccatgcgctcgtccaacttcaggtcaacagttgcatcttacagattctctagacagggaaggcgtgcttcttttgtaaccagagcaatgttcgagaggtttactgagaaagctataaaggtcataatgcttgcgcaagaggaagcgaggcgcctgggccacaactttgtcggaaccgagcaagttctattgggtctggttggagaaggcactggtattgcggcaaaggtgcttaagtccatgggtataaatctgaaggatgcccgtgtggaagtggagaagatcattgggaggggcaatggttttgttgctgtcgaaataccattcacaccacgtgcaaaacgtgttttagagctttcattggaggaagctcgccagctaggacacaactatattgggtccgagcacttgcttcttggattgcttcgtgagggggaaggggtggcagctcgcgtacttgagtctcttggtgctgaccccagcaatattcgtacccaggttgtccggatgattggtgagacaacagaagctgttggtgctggagttgggggagggagcagtggtaacaagatgccgacacttgaggagtatgggactaatttaacaaaattagccgaggagggaaagctagatcctgttgttgggagggaaccacagattgaacgtgtcgtacaaattttgggcagaagaaccaagaacaatccctgcttaattggagaacctggtgttgggaaaacagctattgcagaagggcttgctcaacgcatttctagtggcgatgtgcctgagacgatagaggggaagaaggtcattacccttgatatgggacttcttgttgctggtacgaaataccgtggagaatttgaagaacggttgaagaaactgatggaagaaatcaaacagagcgatgagataatactcttcatcgatgaagttcacaccctcataggagcaggagcagccgaaggtgctattgatgctgctaatattttaaagccagcattagcaagaggagaactacagtgtattggagccaccacacttgatgaatacaggaagcatgttgagaaagacccagcattagaaagacgtttccagccagtaaaggtaccggaaccatcagttgatgagaccatagaaattctcagagggctccgggagcgatatgagatccatcataaacttcgttacactgatgattctttgattgcagctgctaagctatcttatcaatatatcagtgatcgtttcctcccagataaagcaattgatttgattgatgaagcaggttcacgtgttaggcttcgacatgcccaggttcctgaggaagccagagagcttgacaaggagcttaagcaaataacgaaagataaaaatgaagctgtccgtggccaggattttgagaaggctggagagttgcgagatcgtgaaatggaattgaaggcccagataacagccctgattgacaagagcaaggagatgaacaaagcagagactgagtcgggagagacggggccgatggtgcatgaatcagatatccagcacattgtgtcatcatggactggtattccagtggagaaagtctcgactgacgaatctgataaacttcttaagatggaagagacattgcataagcgtgtcatcggccaagatgaggctgtgaaagcaataagccggtccgttcgccgtgctcgtgtgggcctcaagagccccaacagaccaattgcgagcttcatttttgcaggtcccactggtgttgggaaatcagagcttgcaaagactctggcatcatattacttcggctctgaagaagccatgatccggctggatatgagtgagttcatggagaggcacactgtgtccaagttgatcggttcaccaccaggctatgtgggatacactgaaggtgggcagctgacggaggcggttcgacggcggccatacagcgttgtgctttttgatgagattgagaaggcgcatccggatgtgttcaacatgatgctccagatcctggaagacggaaggttaaccgacagcaaggggagaacagtggacttcaagaacacgctcctgataatgacatcaaatgttgggagcagcgtgattgagaagggggggaggaagatcgggttcgacctcgactccgacgagaaggacagcagctatggcaggatcaagagcttggtgatcgaggagatgaagcagtacttccgaccggagtttctcaaccgtctggacgagatgatcgtcttcagacagctgaccaagctggaagtcaaagagatcgcggacataatgctgcaggaggttttcaccaggctcaagaccaaggacatcaacctgcaggtgacggagaagttcaaggagcgggtcgtggacgaagggtacaaccctagctacggagcgcggccgctgaggagggccatcatgaggctcctggaggacagcctcgcggagaagatgcgagctggggaggtcaaggagggcgactctgccatcgtcgatgtggattccgaggggaaggtgattgtactgaatggccaaagtgggttgcctgagctttcaactccggctgtcactgtgtag

SEQ ID NO: 7508 - protein, 930 aa, Triticum aestivum
MFVWDNLLLTMAGTLVLPVALETTFAGRTGGRHCKSHGTRRTPSMLAMSLNRPVRMAAFVGLRSVHSFSAMRSSNFRSTVASYRFSRQGRRASFVTRAMFERFTEKAIKVIMLAQEEARRLGHNFVGTEQVLLGLVGEGTGIAAKVLKSMGINLKDARVEVEKIIGRGNGFVAVEIPFTPRAKRVLELSLEEARQLGHNYIGSEHLLLGLLREGEGVAARVLESLGADPSNIRTQVVRMIGETTEAVGAGVGGGSSGNKMPTLEEYGTNLTKLAEEGKLDPVVGREPQIERVVQILGRRTKNNPCLIGEPGVGKTAIAEGLAQRISSGDVPETIEGKKVITLDMGLLVAGTKYRGEFEERLKKLMEEIKQSDEIILFIDEVHTLIGAGAAEGAIDAANILKPALARGELQCIGATTLDEYRKHVEKDPALERRFQPVKVPEPSVDETIEILRGLRERYEIHHKLRYTDDSLIAAAKLSYQYISDRFLPDKAIDLIDEAGSRVRLRHAQVPEEARELDKELKQITKDKNEAVRGQDFEKAGELRDREMELKAQITALIDKSKEMNKAETESGETGPMVHESDIQHIVSSWTGIPVEKVSTDESDKLLKMEETLHKRVIGQDEAVKAISRSVRRARVGLKSPNRPIASFIFAGPTGVGKSELAKTLASYYFGSEEAMIRLDMSEFMERHTVSKLIGSPPGYVGYTEGGQLTEAVRRRPYSVVLFDEIEKAHPDVFNMMLQILEDGRLTDSKGRTVDFKNTLLIMTSNVGSSVIEKGGRKIGFDLDSDEKDSSYGRIKSLVIEEMKQYFRPEFLNRLDEMIVFRQLTKLEVKEIADIMLQEVFTRLKTKDINLQVTEKFKERVVDEGYNPSYGARPLRRAIMRLLEDSLAEKMRAGEVKEGDSAIVDVDSEGKVIVLNGQSGLPELSTPAVTV

SEQ ID NO: 7509 - DNA, 2754 bp, Triticum aestivum
  CDS (1)..(2754)
atgaacccggacaacttcacgcacaagaccaacgaggcgctggtggcggcgcacgaggcggcgtcggaggccggccacgcgcagatcacgccgctgcacctggcggcggcgctggcggcggacaggtcgggcatcctgcggcaggcggtggcgggggcgtccggcgggaacgcgtccgcgggggactcgttcgagcgcgtgctctccgccgcgctcaagaagctgccgtcgcagtcgccgccgccggactccgtgccggcctccacggcgctcatcaaggccatccgccgcgcgcagtcggcgcagaagaagcgcggggactcgcacctcgccgtcgaccagctgctcatgggcctcctcgaggacgcgcagatcgccgactgcctcaaggaggccggcgtgtccgcctcgcggatgcgcgccgagctcgagaagctccgcggcggggacaacgcgcgcaaggtcgagtccgcctccggcgacaccaacttccaggccctcaagacgtacggccgcgacctcgtcgaggtggccggcaagctcgaccccgtcatcggccgcgacgaggagatccggcgcgtggtgcggatcctgtcgcggcgcaccaagaacaaccccgtcctcatcggcgagcccggcgtgggcaagaccgccgtcgtggaggggctcgcgcagcgcgtcgtgcgcggcgacgtccccagcaacctcctggacgtgcgcctggtcgcgctggacatgggcgcgctcgtggccggcgccaagtaccgcggcgagttcgaggagcggctcaaggccgtgctcaaggaggtggaggaggccgaggggaaggtgatactgttcatcgacgagatacacctggtgctcggcgccgggcggacggaggggtccatggacgccgccaacctgttcaagccgatgctggcgagggggcagctcaggtgcatcggcgccacgaccctcgaggagtacagcaagtacgtggagaaggacgcggcgttcgagaggcggttccagcaggtgttcgtggcagagcccagcgtcgccgacaccatcagcatcctgcgagggctcaaggagaagtacgaggggcaccacggcgtgcgcatccaggaccgcgccatcgtcgtcgcggcgcagctctcggcgaggtacatcatgggccgccacctgccggacaaggccatcgacctggtggacgaggcgtgcgccaacgtgagggtgcagctggacagccagccggaggagatcgacaatctggagcggaagcggattcagctggaggtggagctgcacgcgctggagaaggagaaggacaaggccagcaaggcccggctggtggaggtgaggaaggagctggacgacctgagggacaagctgcagccgctgaccatgaagtacaggaaggagaaggagcggatcgacgagatccggaagctgaagcagcggcgggaggagctgcagttcacgctgcaggaggccgagcggcgcatggacctggcacgcgtcgccgacctcaagtacggcgccctccaggagatcgacgccgccattgcgaagctggagggagagaccggcgagaacctgatgctcaccgagaccgtcggccccgagcagatcgcggaggtggtgagccggtggaccggcatcccggtgacccggctcgggcagaacgacaaggagcgcctggtcggcatggcggacaggctgcacacgagggtggtcgggcagacggaggccgtgaacgccgtcgccgaggcggtgctgaggtccagggcggggcttggacggccgcagcagcccaccgggtcgttcctcttcctgggcccgaccggcgtaggcaagaccgagctcgccaaggccctcgccgagcagctgttcgacgacgagaacctgctcgtccgcatcgacatgtccgagtacatggagcagcactccgtcgctcgcctcatcggagcgccacctggctatgtcgggcacgaggagggcgggcagctgacggagcaggtgaggaggcggccgtacagcgtgatcctgttcgacgaggtggagaaggcgcacgtggcggtgttcaacacgctcctccaggtgctggacgacggccggctgaccgacgggcaaggcaggacggtggacttccggaacaccgtgatcatcatgacctccaacctcggcgccgagcacctcctcgccgggatggtcggcaagaactccatgaaggtcgcgcgcgacctcgtcatgcaggaggtgaggaggcacttcaggccggagctgctgaaccggctggacgagatcgtcgtcttcgacccgctgtcccacgagcagctgaggaaggtcgctcgcctgcagatgaaggacgtggccgtccggctcgccgagcgcggcgtcgccctggccgtcaccgacgccgcgctggacgtcatcctgtcgctggcctacgatccagtgtatggcgctcggccgatcaggaggtggatcgagaagcgggtggtgacgcagctgtccaagatgctgatccaggaggagatcgacgagaactgcacggtgtacatcgacgccgccaacaaggacgagctggcctaccgggtggaccgcagcggcgggctggtgaacgccgagacggggcagaggtccgacatcctcatccaggtgcccaacggcgccctcggcggcggcggcggcgaggcggccaaggccgtgaagaagatgagggtgatggaggacggggacgaggacagcatggacgaggatgtttga

SEQ ID NO: 7510 - protein, 917 aa, Triticum aestivum
MNPDNFTHKTNEALVAAHEAASEAGHAQITPLHLAAALAADRSGILRQAVAGASGGNASAGDSFERVLSAALKKLPSQSPPPDSVPASTALIKAIRRAQSAQKKRGDSHLAVDQLLMGLLEDAQIADCLKEAGVSASRMRAELEKLRGGDNARKVESASGDTNFQALKTYGRDLVEVAGKLDPVIGRDEEIRRVVRILSRRTKNNPVLIGEPGVGKTAVVEGLAQRVVRGDVPSNLLDVRLVALDMGALVAGAKYRGEFEERLKAVLKEVEEAEGKVILFIDEIHLVLGAGRTEGSMDAANLFKPMLARGQLRCIGATTLEEYSKYVEKDAAFERRFQQVFVAEPSVADTISILRGLKEKYEGHHGVRIQDRAIVVAAQLSARYIMGRHLPDKAIDLVDEACANVRVQLDSQPEEIDNLERKRIQLEVELHALEKEKDKASKARLVEVRKELDDLRDKLQPLTMKYRKEKERIDEIRKLKQRREELQFTLQEAERRMDLARVADLKYGALQEIDAAIAKLEGETGENLMLTETVGPEQIAEVVSRWTGIPVTRLGQNDKERLVGMADRLHTRVVGQTEAVNAVAEAVLRSRAGLGRPQQPTGSFLFLGPTGVGKTELAKALAEQLFDDENLLVRIDMSEYMEQHSVARLIGAPPGYVGHEEGGQLTEQVRRRPYSVILFDEVEKAHVAVFNTLLQVLDDGRLTDGQGRTVDFRNTVIIMTSNLGAEHLLAGMVGKNSMKVARDLVMQEVRRHFRPELLNRLDEIVVFDPLSHEQLRKVARLQMKDVAVRLAERGVALAVTDAALDVILSLAYDPVYGARPIRRWIEKRVVTQLSKMLIQEEIDENCTVYIDAANKDELAYRVDRSGGLVNAETGQRSDILIQVPNGALGGGGGEAAKAVKKMRVMEDGDEDSMDEDV

SEQ ID NO: 7511 - DNA, 2925 bp, Zea mays
  CDS (1)..(2925)
atggccgccgcgccgccgctgtccgccgacgtactctccttcctaacctccgcccccgccgcgccgacgccggtcgtagccgcggcgtggggcgcggcgagggcgggtcctgtgaggggtaaggcggcactaaggacgacgagaggaggaaggggcggggtactggctccgctggtcgggaagaggccccgccggacgccgctctccgtgcgctgcaacgccaccagccgggacggcaggattacacaacaagagttcactgagatggcgtggcaagcaattgtctcatcccccgaggtggcaaaggagagcaaacaccagattgtggagactgaacatatgatgaaatccctgctggagcaacggaatggccttgcccgccgcatcttttctaaggcaggagttgacaatacaaggcttctcgatgccacggagaagttcatccagagacagcctaaggtattaggtgaagaacctggatctatgttggggcgtgacttagaagctctgatacaaagagcccgggacttcaagaaagagtacggcgattcatatgtctcagttgagcatctagtccttggctttgctgaagataagcggtttgggaaacagctgttcaaggattttcagattactgtgaagacgttgaaatcagccattgaatcgattagagggaagcaaaatgtaatcgatcaagatcctgagggaaagtacgaagccttggagaaatatggaaaggatctgacagctatggcacgtcaagggaagcttgatccagttattggaagagatgatgagattcgaagatgtatacagattttatcacgaagaacaaagaacaatccagttctgattggtgaacctggtgtagggaaaacagctatagctgaagggttagctcagaggatcgttcaaggagatgtcccacaagctctgacaaaccgtcgactaattgcacttgatatgggtgcattgattgctggtgcaaaatatcgtggagagttcgaggatagactcaaggctgttctcaaagaagttacagattctgatgggcagaccgttcttttcattgatgagattcacacagttgttggagcaggtgccacagatagctccacggatgctggtaatcttctcaaaccaatgcttgggagaggagatctacggtgcattggtgcaacaacccttgatgaataccgcaaatatattgagaaagatccagcactggagcggcgcttccaacaagtttttgttgatcagccttcagttgaagatacaatttcaatactccgagggctaagagagagatatgagttgcaccatggtgtacgaatatctgacagtgcccttgtagctgcagctgttctttcagaccgctatatcagtggacgattcttgcctgacaaagcaattgatctggttgatgaatcagctgccaagttaaaaatggagataacatcaaaacctactgctctggatgagattgatcgtgctgtcttgaagcttgagatggagcgtctctcacttacaaatgatacagacaaagcatcaagggacagactgtcccgccttgaagcagaactatcactcttgaaggataaacaacgtcaattgactgagcagtgggagcatgagaaagcagtaatgactaaaattcaatctatcaaagaagagattgacagggtaaatgtggagatacagcaggcagaacgtgagtacgaccttaatcgtgctgctgaactgaaatatggcagtctgaatgccttgcagcgccagcttcaagcgacagagaaggagcttgatgaatatcagagttctgggaaatccatgctaagggaagaggtgacccaagatgatattgcagaaatagtgagcaggtggacaggaattccagtttctaaactaaagcaatctgatagggagaaattgttgtatctggaggatgagctgcacaagcgagttgtcggtcaggatcctgctgtaaaagcagttgcagaggccattcagagatccagggctggattatccgacccaaaccgtcccattgctagtttcatgttcatgggacctacaggagttggcaaaacagagttagcgaaagcccttgcagcttttatgttcaacactgaggaagctgttgtcaggattgacatgagcgagtacatggagaagcattcagtctcaaggttgattggtgctccaccaggttatgttgggtatgaagagggtggtcaactaacagaagctgttcgtcgtaggccatattccgtcgtcttgtttgatgagatcgagaaagctcattcggatgtgttcaatgtcttccttcaaatactggacgacggtagggttaccgactctcaaggacggaaagtgagcttcaccaacaccataattatcatgacgtccaacgttgggtcgcagtatatactaaacatggacgaagaagttggatcatctgattcagcctatgagaacataaagaggagggtgatggatgctgcaagatctgtgttccgtccagagttcatgaatcgtgtagatgagtatattgtcttcaagcctctcgagagagaacagatcaacagcattgtcaaattacagctcgcaagagtacagaagaggatcgcagaccgcaaaatcaagctggaagtctcacccggtgctattgaattcttgggaagcctggggtatgacccgaactatggcgcgaggccggtgaagagagtgattcaacagcacgtggagaacgaactcgcgaagggcatcctcagaggtgatttcaaggacgaggacagcatctttgtggacacccaggtcacggtgccctctaacggccagcttccgcaacagaagctagttttccggaaagtgggtgagcaatcgaagcccgctgctgaaggcgagaagttcttgccggctgtctga

SEQ ID NO: 7512 - protein, 974 aa, Zea mays
MAAAPPLSADVLSFLTSAPAAPTPVVAAAWGAARAGPVRGKAALRTTRGGRGGVLAPLVGKRPRRTPLSVRCNATSRDGRITQQEFTEMAWQAIVSSPEVAKESKHQIVETEHMMKSLLEQRNGLARRIFSKAGVDNTRLLDATEKFIQRQPKVLGEEPGSMLGRDLEALIQRARDFKKEYGDSYVSVEHLVLGFAEDKRFGKQLFKDFQITVKTLKSAIESIRGKQNVIDQDPEGKYEALEKYGKDLTAMARQGKLDPVIGRDDEIRRCIQILSRRTKNNPVLIGEPGVGKTAIAEGLAQRIVQGDVPQALTNRRLIALDMGALIAGAKYRGEFEDRLKAVLKEVTDSDGQTVLFIDEIHTVVGAGATDSSTDAGNLLKPMLGRGDLRCIGATTLDEYRKYIEKDPALERRFQQVFVDQPSVEDTISILRGLRERYELHHGVRISDSALVAAAVLSDRYISGRFLPDKAIDLVDESAAKLKMEITSKPTALDEIDRAVLKLEMERLSLTNDTDKASRDRLSRLEAELSLLKDKQRQLTEQWEHEKAVMTKIQSIKEEIDRVNVEIQQAEREYDLNRAAELKYGSLNALQRQLQATEKELDEYQSSGKSMLREEVTQDDIAEIVSRWTGIPVSKLKQSDREKLLYLEDELHKRVVGQDPAVKAVAEAIQRSRAGLSDPNRPIASFMFMGPTGVGKTELAKALAAFMFNTEEAVVRIDMSEYMEKHSVSRLIGAPPGYVGYEEGGQLTEAVRRRPYSVVLFDEIEKAHSDVFNVFLQILDDGRVTDSQGRKVSFTNTIIIMTSNVGSQYILNMDEEVGSSDSAYENIKRRVMDAARSVFRPEFMNRVDEYIVFKPLEREQINSIVKLQLARVQKRIADRKIKLEVSPGAIEFLGSLGYDPNYGARPVKRVIQQHVENELAKGILRGDFKDEDSIFVDTQVTVPSNGQLPQQKLVFRKVGEQSKPAAEGEKFLPAV

SEQ ID NO: 7513 - DNA, 2841 bp, Zea mays
  CDS (1)..(2841)
atggaggtgtgctgctgctccacctcgtcgtccgtcctcaccgccgggggccgcggcgccgcggcgcggaggctggccgcgccggcggctcgctggggcgcggcggggtacgggagggcggtggcggcggtgctggcgcacccgctcccgcgcccggcacccaggccggccacgcggcgggcgcgcagggggggcgtcggcgtcgtcagggcggtgttcgagcggttcacggagcgggccgtcaaggcggtcgtgctgtcgcagcgggaggcccgggggctcggggagcccgccgtggcgccgagccacctcctcctcggcctggtcgccgaggaccgatcctcgggcggcttcctctcgtcggggatcaacatcgagcgcgcgcgcgaggagtgccgcggcatcgctgccagtgccagggacgcggactcggccaccgcgacgtctaggcccgggtcgtcggggctcgacacggacgtgcccttcgccgcgcccaccaagcaggtcttcgacgtggccgtcgtgctctccaagaacatgggctccagcttcgtctcgcccgagcacctcgccatcgcactcttctccctcgacgatccaaccaccaacaacctcctaaggagtttgggagcggatcccagtcatctagcatcggttgcagtcgaccgtctccaagcagagcttgcgaaagatggcagagatcctgctgaaccatcatctttcaaagttccaaagaaagcccctgctgcagccggaagatctgccttctcccagtccttgactaaaaagaaagataagggtgcgctggatcaattttgtttggatttgaccacacaagctagtggaggtttcattgatcctattattggccgtgaagaagagattgaaagagtagttcagatagtatgccggcggacgaagaacaaccctattcttttgggtgaggcaggtgttggcaaaactgcaattgccgagggtctggctcttcgaattgcaaatggagatgtccccatttaccttgtggcaaagcgcatattgtcgctagatgtcggtctacttattgctggtgcaaaggagaggggtgaactggagtctagggttactaatataatccgcgaggtccgggaagcaggcgatgttattctttttattgatgaggtccacaaccttattggatctggaactgttggaaagagtaagggttctggtcttgacattggcaacttgctgaagcccgcgcttgctagaggtgaattgcagtgcattgctgctacaactctagatgaacaccggatgcattttgagaaggataaggctttggcccgccgcttccagccagtactagtagatgagcctagtcaggaagatgctgtgaagatattactgggtcttcgtgaaaaatatgaagcttaccataaatgcaaattcacattggaagccatcaatgcagcagtttatttgtcagcaagatacattcctgacagacagcttcctgataaggctattgatctgattgatgaggctggaagtagagctcggatggaatcatttaataggaagaaggaagggcagtcttcgattctcttgaagtcaccagatgaatactggcaagagataagagctgctcaggcgatgcatgaagtggtgttatctaacaaggaaaaatattctccaaatgagaatgctgaagagagtggtagttctaacgttgaagcaccacgccgagacaatattgagtcaacatctacttcatcactctcagctgacgaaccagttgtagttgggacagaggaaattgcaagggttgcctcattatggtctgggataccagtacagcagttgactgctgacgataagaaacttctagtaggactggacgacgaactcagaaaacgtgtcattggccaagatgatgctgttgtggccatatctcgtgcagtgaagagatcacgtgttggccttaacgatcctgatagacctattgctacgctgcttttctgtggtccaacaggagttggtaaaacagagctcaccaaagctctagcagctagttattttggatcggaatctgctatgcttaggttagacatgagcgagtatatggagaggcacactgtgagcaagctcataggctctcctccagggtacattgggtatggtgaaactggtactttgacagaagcagtcaggagaaaaccatttactgtggtattgttggatgagatagagaaagctcaccctgatattttcaacatccttctccaaatatttgaggatggacatttgacagactcacagggtcgcagggtttccttcaaaaatacgttgattgtcatgacttcgaatgttggttcgacatcaatttcaaaaggaagacagagcataggtttcttgaaggaagataccgagtcaggctcatacttcgcaatgaaatccttagtgatggaagagctcaaggcatttttccgtccagagttgctcaatagaatcgacgagatggttgtgttccgtcctctggagaagactcagatgctggccattcttgatatcatcctaaaggaagtcaagggccgacttttggccctcgggataggtttggaggtgtctgatgcaatgaaggacctgatatgccaagagggctacgacaaaagctatggcgctcggcctctgaggagagctgtcacccacattatcgaggatgtcatcagcgaagcgattctttttggcgagttcaagcccggtgacacgatactgatggacatcgatgcagaggggaagccatgcatgggccatctggaccaacagatcgtccaggtctctgacccaacacgggcaatctga

SEQ ID NO: 7514 - protein, 946 aa, Zea mays
MEVCCCSTSSSVLTAGGRGAAARRLAAPAARWGAAGYGRAVAAVLAHPLPRPAPRPATRRARRGGVGVVRAVFERFTERAVKAVVLSQREARGLGEPAVAPSHLLLGLVAEDRSSGGFLSSGINIERAREECRGIAASARDADSATATSRPGSSGLDTDVPFAAPTKQVFDVAVVLSKNMGSSFVSPEHLAIALFSLDDPTTNNLLRSLGADPSHLASVAVDRLQAELAKDGRDPAEPSSFKVPKKAPAAAGRSAFSQSLTKKKDKGALDQFCLDLTTQASGGFIDPIIGREEEIERVVQIVCRRTKNNPILLGEAGVGKTAIAEGLALRIANGDVPIYLVAKRILSLDVGLLIAGAKERGELESRVTNIIREVREAGDVILFIDEVHNLIGSGTVGKSKGSGLDIGNLLKPALARGELQCIAATTLDEHRMHFEKDKALARRFQPVLVDEPSQEDAVKILLGLREKYEAYHKCKFTLEAINAAVYLSARYIPDRQLPDKAIDLIDEAGSRARMESFNRKKEGQSSILLKSPDEYWQEIRAAQAMHEVVLSNKEKYSPNENAEESGSSNVEAPRRDNIESTSTSSLSADEPVVVGTEEIARVASLWSGIPVQQLTADDKKLLVGLDDELRKRVIGQDDAVVAISRAVKRSRVGLNDPDRPIATLLFCGPTGVGKTELTKALAASYFGSESAMLRLDMSEYMERHTVSKLIGSPPGYIGYGETGTLTEAVRRKPFTVVLLDEIEKAHPDIFNILLQIFEDGHLTDSQGRRVSFKNTLIVMTSNVGSTSISKGRQSIGFLKEDTESGSYFAMKSLVMEELKAFFRPELLNRIDEMVVFRPLEKTQMLAILDIILKEVKGRLLALGIGLEVSDAMKDLICQEGYDKSYGARPLRRAVTHIIEDVISEAILFGEFKPGDTILMDIDAEGKPCMGHLDQQIVQVSDPTRAI

SEQ ID NO: 7515 - DNA, 2739 bp, Zea mays
  CDS (1)..(2739)
atgaatccggacaacttcacccacaagacgaacgaggcgatcgtgggggcgcacgagattgcggtggaggccggccacgcgcagctcacgccgctgcacctggccgcagtgctggctgcggacaagggcggcatcctgcggcaggccatcacgggggcgtcggggggcgacggagcggccggggactcgttcgagcgcgtgctgaacaactcgctcaagaagctgccgtcgcagtccccgccgccggactccgtcccggcgtccacggcactgatcaaggtcatccgccgggcgcagtccgcgcagaaaaaacgcggggactcgcacctcgccgtcgaccagctgctgctcggcctgctcgaggactcgcagatctccgactgcctcaaggaggccggcgtgtccgcggcgcgggtgcgcgccgagcttgagaagctccgcggcggggaggggcgccgcgtggagtccgcgtcgggggacaccaacttccaggcgctcaagacatacggccgggacctcgtcgagcaggccgggaagcttgaccccgtcatcggccgcgacgaggagatccgccgcgtggtgcgcatcctctcgcgccgcactaagaacaaccccgtcctcatcggcgagcccggcgttggcaagacggccgtcgtggagggcctcgcgcagcgcatcgttcgcggcgacgtgcccagtaacctcctcgacgtccgcctcatcgcgctcgacatgggcgcgctcgtcgcgggcgccaagtaccgcggcgagttcgaggagcggctcaaggccgtgctcaaggaggtggaagaggccgaggggaaggtcattctcttcatcgacgagatacacctcgtcctgggcgcgggcaggacggagggttccatggacgcggccaacctgttcaagccaatgctggcgaggggacagctcaggtgcatcggcgccaccacgctggaggagtaccgcaagtacgtggagaaggacgcagcgttcgagcggcggttccagcaggtgttcgtcgcggagccgagcgtgcccgataccgtcagcattctgaggggactcaaggagaagtacgaggggcaccatggcgtgaggatccaggaccgcgccctcgtggtcgcggcacagctctccgcgaggtacatcatgggtcggcacctgcctgacaaagccatagacctggtggacgaggcctgcgccaatgtgagggtgcagctcgacagccagccggaagagattgataacctggagaggaagagaatccagcttgaggttgagctccacgcgctcgagaaggagaaggacaaggccagcaaagcccggctgattgaggtcaggaaggaattggacgatctgagggacaagctgcagcccctgaccatgaagtacaggaaggagaaggagagaatcgatgagatcaggaagctgaagcagcgccgcgaggagctccagttcaccctgcaggaggccgagcgccggatggacctggcccgtgtggccgacctcaagtacggcgccctccaggaaatcgacgccgcgatctccaagctggagagcgaaacaggggagaacctgatgctcaccgaaaccgtcggccctgaacaaattgcagaggtggtgagccgttggacgggtattccagtgacccggcttggccagaacgacaaggagaggctggtcggcctggctgacaggcttcaccagagggtggtcggccagacagaggctgtgagcgccgtcgcagaggcggtgctgaggtcgagggccggtcttggcaggccacaacagcccactggctcgttcctcttcctgggtccgactggcgtggggaaaactgagctagccaaggccctagccgaacagctgttcgacgacgagaaccttcttgtccgcatcgacatgtcggagtacatggagcagcactcggttgcccgcctcatcggagcaccacctggctacgtcggccatgaagagggtgggcagctgactgaacaagtgaggaggaggccgtacagcgtgatcctgttcgacgaggtcgagaaggcccatgtcgccgtgttcaacaccctgctccaggtcctcgacgacggcaggctgacggatgggcaaggcaggacggtgaacttcaggaacaccgtgatcatcatgacatcgaaccccggcgccgagcacctcctcgctgggatggtgggcaagaactccatgaaggtcgctcgcgatctggtcatgcaggaggtgaggaggcacttccgccctgagctgctgaaccgtctcgacgagatcgtgatcttcgatcctctgtcccacgagcagctgaggaaggtcgctcgccttcagatgaaggatgtggccgtccgtcttgccgaaaggggcatcgctctggctgtgaccgacgccgcattggacatcatcttgtctctctcttacgatccggtgtacggcgcgcggccaatcaggaggtggatcgagaagagggtggtgacgcagctgtcgaagatgctgatccaggaggagatcgacgagaactgcacggtctacatcgacgccgcgcccggcaaggacgagctggtctacagggtggaccggagcggcggtctggtgaacgctgagacggggatgaagtcggacatcctgatccaggtccccaacagctccaccaggagcgacgctgcgcaggccgtcaagaagatgaggatcatggaggaggacgaggacggcatggacgaggagtaa

SEQ ID NO: 7516 - protein, 912 aa, Zea mays
MNPDNFTHKTNEAIVGAHEIAVEAGHAQLTPLHLAAVLAADKGGILRQAITGASGGDGAAGDSFERVLNNSLKKLPSQSPPPDSVPASTALIKVIRRAQSAQKKRGDSHLAVDQLLLGLLEDSQISDCLKEAGVSAARVRAELEKLRGGEGRRVESASGDTNFQALKTYGRDLVEQAGKLDPVIGRDEEIRRVVRILSRRTKNNPVLIGEPGVGKTAVVEGLAQRIVRGDVPSNLLDVRLIALDMGALVAGAKYRGEFEERLKAVLKEVEEAEGKVILFIDEIHLVLGAGRTEGSMDAANLFKPMLARGQLRCIGATTLEEYRKYVEKDAAFERRFQQVFVAEPSVPDTVSILRGLKEKYEGHHGVRIQDRALVVAAQLSARYIMGRHLPDKAIDLVDEACANVRVQLDSQPEEIDNLERKRIQLEVELHALEKEKDKASKARLIEVRKELDDLRDKLQPLTMKYRKEKERIDEIRKLKQRREELQFTLQEAERRMDLARVADLKYGALQEIDAAISKLESETGENLMLTETVGPEQIAEVVSRWTGIPVTRLGQNDKERLVGLADRLHQRVVGQTEAVSAVAEAVLRSRAGLGRPQQPTGSFLFLGPTGVGKTELAKALAEQLFDDENLLVRIDMSEYMEQHSVARLIGAPPGYVGHEEGGQLTEQVRRRPYSVILFDEVEKAHVAVFNTLLQVLDDGRLTDGQGRTVNFRNTVIIMTSNPGAEHLLAGMVGKNSMKVARDLVMQEVRRHFRPELLNRLDEIVIFDPLSHEQLRKVARLQMKDVAVRLAERGIALAVTDAALDIILSLSYDPVYGARPIRRWIEKRVVTQLSKMLIQEEIDENCTVYIDAAPGKDELVYRVDRSGGLVNAETGMKSDILIQVPNSSTRSDAAQAVKKMRIMEEDEDGMDEE

SEQ ID NO: 7517 - DNA, 2766 bp, Zea mays
  CDS (1)..(2766)
atggagggcgctcttgttcagtctgctattgttccagccgtttacagaagcagctcaggtcggttccgtgtgcgtgcaagggccagaacaaatgctacaatggtgcggaatacgccaacaaggactcttactcttggtggcttccaagggctgcgtcagacaaactttttggatacgaggtctgtaattaagcgtgactttggatcaatcgtggcaagccagattgcaaggccacgcgggtcagcctcaagaggggtggtccgtgccatgtttgagcgcttcactgagaaagcaatcaaggtgattatgcttgcacaggaagaggcaaggcgcctgggacacaacttcgttgggacagaacagattttgctggggcttattggtgagggcacaggaattgcagcgaaggttatgaagtctatgggaatcaatcttaaggatgcccgagtggaagtcgaaaagataattggacgtggcagtgggtttgtggctgttgaaatcccattcacacctcgagcaaaacgtgtattggaattgtcccttgaagaagctcgtcagcttgggcataattatataggatctgaacacttactccttgggctacttcgtgagggtgaaggtgttgctgctcgtgtgcttgaaagccttggtgctgatccaaacaacatccgtacccaggtcataagaatggttggggaaagcacagaagctgttggggctggagttggtggaggaagcagtggccagaagatgcccacacttgaagaatacggtactaatttgacgaaattagcggaagagggcaaattggacccagttgttggtagacaggatcagattgagcgcgttacccagattttaggcaggaggacaaagaacaacccctgcttaattggagagcctggtgttggaaagactgctattgctgaggggcttgctcaacgtatttccaatggtgatgttcccgaaacaattgaaggaaagaaggttattactcttgacatgggcctccttgttgctggaaccaaataccgtggagagtttgaagagagattaaagaaacttatggaggaaattaagcaaaatgaagatattattctctttattgatgaagtgcacacactgattggagcaggtgcagcagaaggtgcgattgatgctgctaatattttgaagccagctcttgcaagaggtgaactgcagtgcattggtgccacaacactggatgagtataggaagcatatagagaaagatcctgccttggaaagaaggtttcaaccagttaaggttcctgagcctactgttgatgaaacaatacagatcttaagagggctccgtgagagatatgaactccatcacaaactgcgatacacagatgatgctttaattgctgctgcacagctgtcttatcagtatatcagtgatcgtttcctgcctgacaaggccattgacttgattgatgaagctggatcccgtgttaggctgaggcatgcccagctccctgatgaagccaaagagctggacaaagagctgcgacagataaccaagcagaaaaacgaggctgtacgcggccaggattttgagaaggctggtgaattaagggaccgagaaatggaactgaaggctcaaattacggccattattgacaagagcaaggaaatgattaaagcagagactgaatctggtgatgtcggtcctcttgttactgaggcagatattcaacatattgtctcctcttggactggaattcctgtggagaaagtgtcgtctgatgagtctgaccgtctcctaaagatggaagagacactgcatacacgtatcattggccaggacgaggctgtcaaagctattagccgtgctatccgccgtgctcgtgttggcctgaagaatccaaataggccaattgccagcttcatattctctggaccaactggagttggcaaatcagagctagcaaaggctctggcagcctactactttggctcagaggaggctatgattaggcttgacatgagtgagttcatggagagacatactgtctccaagcttattggatcacctccaggttatgttgggtacactgagggaggccaactaactgaagcagtccgtcgccgcccatacacagttgttctctttgatgagattgagaaggcacatcctgatgttttcaacatgatgcttcagatattagaagatgggcgattaactgatagcaaggggcgcacagttgacttcaagaacacactattgatcatgacatctaatgtgggaagcagtgtcattgagaaaggaggccgcaagatcgggtttgaccttgactatgatgagaaagacaccagctataacaggatcaagagcctggtgaccgaggagttgaagcagtatttccggccagagttcttgaacagattggatgagatgattgtattccggcagctgactaaattggaggtgaaggagattgctgacattatgctgaaagaagtgtttgacaggctgaaggccaaggagattaatctccaggtcacggagaagttccgagatagagttgttgacgaaggttataacccgagctatggtgccagacctttgcggcgtgctatcatgaggcttctggaggatagtctggcagagaagatgctggctggtgaggtgaaagaaggtgactctgccatcgttgatgtggattcagatggcaaggtgatagtcctgaatggtggtagcggtgttgctgagccactggaacctgctctcagtacctaa

SEQ ID NO: 7518 - protein, 921 aa, Zea mays
MEGALVQSAIVPAVYRSSSGRFRVRARARTNATMVRNTPTRTLTLGGFQGLRQTNFLDTRSVIKRDFGSIVASQIARPRGSASRGVVRAMFERFTEKAIKVIMLAQEEARRLGHNFVGTEQILLGLIGEGTGIAAKVMKSMGINLKDARVEVEKIIGRGSGFVAVEIPFTPRAKRVLELSLEEARQLGHNYIGSEHLLLGLLREGEGVAARVLESLGADPNNIRTQVIRMVGESTEAVGAGVGGGSSGQKMPTLEEYGTNLTKLAEEGKLDPVVGRQDQIERVTQILGRRTKNNPCLIGEPGVGKTAIAEGLAQRISNGDVPETIEGKKVITLDMGLLVAGTKYRGEFEERLKKLMEEIKQNEDIILFIDEVHTLIGAGAAEGAIDAANILKPALARGELQCIGATTLDEYRKHIEKDPALERRFQPVKVPEPTVDETIQILRGLRERYELHHKLRYTDDALIAAAQLSYQYISDRFLPDKAIDLIDEAGSRVRLRHAQLPDEAKELDKELRQITKQKNEAVRGQDFEKAGELRDREMELKAQITAIIDKSKEMIKAETESGDVGPLVTEADIQHIVSSWTGIPVEKVSSDESDRLLKMEETLHTRIIGQDEAVKAISRAIRRARVGLKNPNRPIASFIFSGPTGVGKSELAKALAAYYFGSEEAMIRLDMSEFMERHTVSKLIGSPPGYVGYTEGGQLTEAVRRRPYTVVLFDEIEKAHPDVFNMMLQILEDGRLTDSKGRTVDFKNTLLIMTSNVGSSVIEKGGRKIGFDLDYDEKDTSYNRIKSLVTEELKQYFRPEFLNRLDEMIVFRQLTKLEVKEIADIMLKEVFDRLKAKEINLQVTEKFRDRVVDEGYNPSYGARPLRRAIMRLLEDSLAEKMLAGEVKEGDSAIVDVDSDGKVIVLNGGSGVAEPLEPALST

SEQ ID NO: 7519 - DNA, 24 bp, Artificial sequence
  primer
atgcgtctggatcgtcttactaat

SEQ ID NO: 7520 - DNA, 22 bp, Artificial sequence
  primer
ttactggacggcgacaatccgg

SEQ ID NO: 7521 - protein, 1095 aa, Artificial sequence
  consensus sequence
  Variant (2)..(13): Xaa in position 2 to 13 is any amino acid
  Variant (14)..(14): Xaa in position 14 is any or no amino acid
  Variant (16)..(23): Xaa in position 16 to 23 is any amino acid
  Variant (24)..(26): Xaa in position 24 to 26 is any or no amino acid
  Variant (28)..(30): Xaa in position 28 to 30 is any amino acid
  Variant (31)..(31): Xaa in position 31 is any or no amino acid
  Variant (33)..(48): Xaa in position 33 to 48 is any amino acid
  Variant (49)..(115): Xaa in position 49 to 115 is any or no amino acid
  Variant (117)..(117): Xaa in position 117 is any amino acid
  Variant (118)..(173): Xaa in position 118 to 173 is any or no amino acid
  Variant (175)..(175): Xaa in position 175 is any amino acid
  Variant (176)..(250): Xaa in position 176 to 250 is any or no amino acid
  Variant (252)..(253): Xaa in position 252 to 253 is any amino acid
  Variant (255)..(256): Xaa in position 255 to 256 is any amino acid
  Variant (260)..(261): Xaa in position 260 to 261 is any amino acid
  Variant (263)..(264): Xaa in position 263 to 264 is any amino acid
  Variant (275)..(275): Xaa in position 275 is any amino acid
  Variant (280)..(283): Xaa in position 280 to 283 is any amino acid
  Variant (285)..(285): Xaa in position 285 is any amino acid
  Variant (306)..(306): Xaa in position 306 is any amino acid
  Variant (311)..(311): Xaa in position 311 is any amino acid
  Variant (314)..(317): Xaa in position 314 to 317 is any amino acid
  Variant (320)..(320): Xaa in position 320 is any amino acid
  Variant (321)..(321): Xaa in position 321 is any or no amino acid
  Variant (323)..(328): Xaa in position 323 to 328 is any amino acid
  Variant (329)..(356): Xaa in position 329 to 356 is any or no amino acid
  Variant (359)..(359): Xaa in position 359 is any amino acid
  Variant (361)..(361): Xaa in position 361 is any amino acid
  Variant (363)..(363): Xaa in position 363 is any amino acid
  Variant (368)..(368): Xaa in position 368 is any amino acid
  Variant (378)..(378): Xaa in position 378 is any amino acid
  Variant (380)..(381): Xaa in position 380 to 381 is any amino acid
  Variant (383)..(389): Xaa in position 383 to 389 is any amino acid
  Variant (390)..(408): Xaa in position 390 to 408 is any or no amino acid
  Variant (415)..(415): Xaa in position 415 is any amino acid
  Variant (418)..(419): Xaa in position 418 to 419 is any amino acid
  Variant (423)..(425): Xaa in position 423 to 425 is any amino acid
  Variant (426)..(434): Xaa in position 426 to 434 is any or no amino acid
  Variant (437)..(437): Xaa in position 437 is any amino acid
  Variant (439)..(439): Xaa in position 439 is any amino acid
  Variant (443)..(443): Xaa in position 443 is any amino acid
  Variant (450)..(450): Xaa in position 450 is any amino acid
  Variant (451)..(451): Xaa in position 451 is any or no amino acid
  Variant (453)..(453): Xaa in position 453 is any amino acid
  Variant (459)..(459): Xaa in position 459 is any amino acid
  Variant (463)..(464): Xaa in position 463 to 464 is any amino acid
  Variant (465)..(465): Xaa in position 465 is any or no amino acid
  Variant (469)..(469): Xaa in position 469 is any amino acid
  Variant (477)..(477): Xaa in position 477 is any amino acid
  Variant (479)..(479): Xaa in position 479 is any amino acid
  Variant (481)..(481): Xaa in position 481 is any amino acid
  Variant (484)..(484): Xaa in position 484 is any amino acid
  Variant (486)..(487): Xaa in position 486 to 487 is any amino acid
  Variant (490)..(490): Xaa in position 490 is any amino acid
  Variant (496)..(496): Xaa in position 496 is any amino acid
  Variant (498)..(498): Xaa in position 498 is any amino acid
  Variant (501)..(501): Xaa in position 501 is any amino acid
  Variant (504)..(504): Xaa in position 504 is any amino acid
  Variant (505)..(505): Xaa in position 505 is any or no amino acid
  Variant (507)..(507): Xaa in position 507 is any amino acid
  Variant (509)..(509): Xaa in position 509 is any amino acid
  Variant (511)..(511): Xaa in position 511 is any amino acid
  Variant (513)..(515): Xaa in position 513 to 515 is any amino acid
  Variant (518)..(518): Xaa in position 518 is any amino acid
  Variant (521)..(521): Xaa in position 521 is any amino acid
  Variant (525)..(525): Xaa in position 525 is any amino acid
  Variant (526)..(526): Xaa in position 526 is any or no amino acid
  Variant (528)..(528): Xaa in position 528 is any amino acid
  Variant (537)..(537): Xaa in position 537 is any amino acid
  Variant (541)..(549): Xaa in position 541 to 549 is any amino acid
  Variant (551)..(551): Xaa in position 551 is any amino acid
  Variant (553)..(558): Xaa in position 553 to 558 is any amino acid
  Variant (559)..(584): Xaa in position 559 to 584 is any or no amino acid
  Variant (586)..(591): Xaa in position 586 to 591 is any amino acid
  Variant (592)..(592): Xaa in position 592 is any or no amino acid
  Variant (594)..(602): Xaa in position 594 to 602 is any amino acid
  Variant (603)..(645): Xaa in position 603 to 645 is any or no amino acid
  Variant (647)..(661): Xaa in position 647 to 661 is any amino acid
  Variant (662)..(733): Xaa in position 662 to 733 is any or no amino acid
  Variant (735)..(738): Xaa in position 735 to 738 is any amino acid
  Variant (741)..(746): Xaa in position 741 to 746 is any amino acid
  Variant (752)..(757): Xaa in position 752 to 757 is any amino acid
  Variant (759)..(761): Xaa in position 759 to 761 is any amino acid
  Variant (764)..(765): Xaa in position 764 to 765 is any amino acid
  Variant (767)..(768): Xaa in position 767 to 768 is any amino acid
  Variant (770)..(771): Xaa in position 770 to 771 is any amino acid
  Variant (774)..(774): Xaa in position 774 is any amino acid
  Variant (777)..(778): Xaa in position 777 to 778 is any amino acid
  Variant (780)..(782): Xaa in position 780 to 782 is any amino acid
  Variant (784)..(785): Xaa in position 784 to 785 is any amino acid
  Variant (787)..(788): Xaa in position 787 to 788 is any amino acid
  Variant (790)..(790): Xaa in position 790 is any amino acid
  Variant (792)..(792): Xaa in position 792 is any amino acid
  Variant (795)..(796): Xaa in position 795 to 796 is any amino acid
  Variant (798)..(798): Xaa in position 798 is any amino acid
  Variant (801)..(801): Xaa in position 801 is any amino acid
  Variant (802)..(802): Xaa in position 802 is any or no amino acid
  Variant (805)..(805): Xaa in position 805 is any amino acid
  Variant (807)..(807): Xaa in position 807 is any amino acid
  Variant (818)..(818): Xaa in position 818 is any amino acid
  Variant (820)..(820): Xaa in position 820 is any amino acid
  Variant (823)..(825): Xaa in position 823 to 825 is any amino acid
  Variant (827)..(832): Xaa in position 827 to 832 is any amino acid
  Variant (833)..(839): Xaa in position 833 to 839 is any or no amino acid
  Variant (841)..(841): Xaa in position 841 is any amino acid
  Variant (846)..(846): Xaa in position 846 is any amino acid
  Variant (849)..(849): Xaa in position 849 is any amino acid
  Variant (851)..(851): Xaa in position 851 is any amino acid
  Variant (853)..(853): Xaa in position 853 is any amino acid
  Variant (856)..(856): Xaa in position 856 is any amino acid
  Variant (866)..(866): Xaa in position 866 is any amino acid
  Variant (870)..(870): Xaa in position 870 is any amino acid
  Variant (878)..(878): Xaa in position 878 is any amino acid
  Variant (881)..(881): Xaa in position 881 is any amino acid
  Variant (883)..(883): Xaa in position 883 is any amino acid
  Variant (885)..(885): Xaa in position 885 is any amino acid
  Variant (888)..(888): Xaa in position 888 is any amino acid
  Variant (893)..(893): Xaa in position 893 is any amino acid
  Variant (898)..(899): Xaa in position 898 to 899 is any amino acid
  Variant (902)..(902): Xaa in position 902 is any amino acid
  Variant (908)..(908): Xaa in position 908 is any amino acid
  Variant (911)..(912): Xaa in position 911 to 912 is any amino acid
  Variant (915)..(915): Xaa in position 915 is any amino acid
  Variant (919)..(919): Xaa in position 919 is any amino acid
  Variant (922)..(924): Xaa in position 922 to 924 is any amino acid
  Variant (929)..(929): Xaa in position 929 is any amino acid
  Variant (931)..(937): Xaa in position 931 to 937 is any amino acid
  Variant (938)..(980): Xaa in position 938 to 980 is any or no amino acid
  Variant (982)..(988): Xaa in position 982 to 988 is any amino acid
  Variant (990)..(990): Xaa in position 990 is any amino acid
  Variant (994)..(994): Xaa in position 994 is any amino acid
  Variant (997)..(997): Xaa in position 997 is any amino acid
  Variant (999)..(1002): Xaa in position 999 to 1002 is any amino acid
  Variant (1004)..(1005): Xaa in position 1004 to 1005 is any amino acid
  Variant (1007)..(1012): Xaa in position 1007 to 1012 is any amino acid
  Variant (1013)..(1032): Xaa in position 1013 to 1032 is any or no amino acid
  Variant (1034)..(1043): Xaa in position 1034 to 1043 is any amino acid
  Variant (1046)..(1064): Xaa in position 1046 to 1064 is any amino acid
  Variant (1065)..(1067): Xaa in position 1065 to 1067 is any or no amino acid
  Variant (1069)..(1069): Xaa in position 1069 is any amino acid
  Variant (1072)..(1073): Xaa in position 1072 to 1073 is any amino acid
  Variant (1079)..(1079): Xaa in position 1079 is any amino acid
  Variant (1081)..(1094): Xaa in position 1081 to 1094 is any amino acid
TXXXXXXXXXXXXXAXXXXXXXXXXXHXXXXLXXXXXXXXXXXXXXXXXXXXXXXXXXXXXXXXXXXXXXXXXXXXXXXXXXXXXXXXXXXXXXXXXXXXXXXXXXXXXXXXXXXDXXXXXXXXXXXXXXXXXXXXXXXXXXXXXXXXXXXXXXXXXXXXXXXXXXXXXXXXXRXXXXXXXXXXXXXXXXXXXXXXXXXXXXXXXXXXXXXXXXXXXXXXXXXXXXXXXXXXXXXXXXXXXXXXXXXXXXLXXYXXDLTXXAXXGKLDPVIGRDXEIRRXXXXLXRRTKNNPVLIGEPGVGKTAIXEGLAXRIXXXXVPXXLXXXXXXXXXXXXXXXXXXXXXXXXXXXXXXXXXXLDXGXLXAGAKXRGEFEERLKXVXXEXXXXXXXXXXXXXXXXXXXXXXXXXXILFIDEXHTXXGAGXXXXXXXXXXXXDAXNXLKPXLARGELXXCXGATTLXEYRXXXEKDXALERRFQXVXVXEPXVXXTIXILRGLXEXYEXHHXXVXIXDXAXXXAAXLSXRYIXXRXLPDKAIDLXDEAXXXXXXXXXSXPXXXXXXXXXXXXXXXXXXXXXXXXXXXXXXXXRXXXXXXXEXXXXXXXXXXXXXXXXXXXXXXXXXXXXXXXXXXXXXXXXXXXXXXXXXXXXEXXXXXXXXXXXXXXXXXXXXXXXXXXXXXXXXXXXXXXXXXXXXXXXXXXXXXXXXXXXXXXXXXXXXXXXXXXXXXXXXXXXXXXXVXXXXIAXXXXXXTGIPVXXXXXXEXXXLLXXEXXLXXRVXGQXXAXXXVXXAXXRXRXGLXXPXRPXXSFXFXGPTGVGKTELXKXLAXXXFXXXXXXXXXXXXXRXDMSEXMEXHXVXRLXGAPPGYVGYXEGGXLTEAVRRXPYXVXLXDEXEKAHXDVFNXXLQXLDDGRXTDXXGRXVDFXNTXXXMTSNXGXXXXXXXXXXXXXXXXXXXXXXXXXXXXXXXXXXXXXXXXXXXXXXXXXXVXXXXXXXFXPEFXNRXDXXXXFXXLXXXXXXXXXXXXXXXXXXXXXXXXXXIXXXXXXXXXXRLXXXXXXXXXXXXXXXXXXXXXXGXDPXXGARPLXRXXXXXXXXXXXXXXL

SEQ ID NO: 7522 - protein, 30 aa, Artificial sequence
  protein pattern
  Variant (2)..(2): Xaa in position 2 is Phe, Ile, Leu, Met or Val
  Variant (5)..(5): Xaa in position 5 is Ser or Thr
  Variant (7)..(8): Xaa in position 7 to 8 is any amino acid
  Variant (10)..(10): Xaa in position 10 is any amino acid
  Variant (12)..(12): Xaa in position 12 is Ala, Asn, Ser or Thr
  Variant (14)..(14): Xaa in position 14 is Ala or Ser
  Variant (15)..(15): Xaa in position 15 is Lys or Arg
  Variant (17)..(17): Xaa in position 17 is Ile, Leu, Met or Val
  Variant (19)..(19): Xaa in position 19 is Ala, Pro or Ser
  Variant (24)..(24): Xaa in position 24 is Ile, Met or Val
  Variant (26)..(26): Xaa in position 26 is Phe, His or Tyr
  Variant (27)..(27): Xaa in position 27 is Ala, Asp, Glu, Gly, Asn, Ser or Thr
  Variant (28)..(28): Xaa in position 28 is Ala, Asp, Glu, Gln or Ser
RXDMXEXXEXHXVXXLXGXPPGYXGXXXGG

SEQ ID NO: 7523 - protein, 60 aa, Artificial sequence
  protein pattern
  Variant (4)..(4): Xaa in position 4 is any amino acid
  Variant (5)..(5): Xaa in position 5 is Ile or Val
  Variant (8)..(8): Xaa in position 8 is any amino acid
  Variant (11)..(12): Xaa in position 11 to 12 is any amino acid
  Variant (13)..(13): Xaa in position 13 is Ile, Leu or Val
  Variant (15)..(15): Xaa in position 15 is Phe, Leu or Met
  Variant (18)..(18): Xaa in position 18 is any amino acid
  Variant (23)..(23): Xaa in position 23 is any amino acid
  Variant (24)..(24): Xaa in position 24 is Ala, Asp, Glu, Gly or Ser
  Variant (25)..(28): Xaa in position 25 to 28 is any amino acid
  Variant (29)..(29): Xaa in position 29 is Phe, Leu or Met
  Variant (32)..(32): Xaa in position 32 is Ile, Leu, Met or Val
  Variant (34)..(35): Xaa in position 34 to 35 is Asp or Glu
  Variant (37)..(37): Xaa in position 37 is any amino acid
  Variant (38)..(38): Xaa in position 38 is Ile, Leu, Met or Val
  Variant (40)..(40): Xaa in position 40 is Asp, Glu or Asn
  Variant (41)..(41): Xaa in position 41 is Ala, Gly, Asn, Ser or Thr
  Variant (42)..(42): Xaa in position 42 is any amino acid
  Variant (44)..(46): Xaa in position 44 to 46 is any amino acid
  Variant (47)..(47): Xaa in position 47 is Asp, Asn or Ser
  Variant (49)..(50): Xaa in position 49 to 50 is any amino acid
  Variant (51)..(51): Xaa in position 51 is Ala, Cys, Ser, Thr or Val
  Variant (52)..(52): Xaa in position 52 is Ile, Leu, Met or Val
  Variant (53)..(53): Xaa in position 53 is Ala, Ile, Leu, Pro or Val
  Variant (54)..(54): Xaa in position 54 is Ile or Val
  Variant (55)..(55): Xaa in position 55 is Phe, Leu or Met
  Variant (59)..(59): Xaa in position 59 is any amino acid
  Variant (60)..(60): Xaa in position 60 is Ala, Cys or Gly
LTEXXRRXPYXXXLXDEXEKAHXXXXXXXLQXLXXGXXTXXXGXXXXFXXXXXXXTSNXX

SEQ ID NO: 7524 - protein, 53 aa, Artificial sequence
  protein pattern
  Variant (3)..(4): Xaa in position 3 to 4 is Ile or Val
  Variant (7)..(7): Xaa in position 7 is Asp, Glu, Asn, Gln or Ser
  Variant (8)..(8): Xaa in position 8 is any amino acid
  Variant (11)..(11): Xaa in position 11 is any or no amino acid
  Variant (13)..(16): Xaa in position 13 to 16 is any amino acid
  Variant (17)..(17): Xaa in position 17 is any or no amino acid
  Variant (19)..(19): Xaa in position 19 is any amino acid
  Variant (21)..(21): Xaa in position 21 is Lys or Arg
  Variant (22)..(22): Xaa in position 22 is any amino acid
  Variant (27)..(27): Xaa in position 27 is any amino acid
  Variant (28)..(28): Xaa in position 28 is Ile or Leu
  Variant (29)..(29): Xaa in position 29 is Ile, Leu or Val
  Variant (31)..(31): Xaa in position 31 is any amino acid
  Variant (32)..(32): Xaa in position 32 is Ala or Pro
  Variant (34)..(34): Xaa in position 34 is Thr or Val
  Variant (38)..(38): Xaa in position 38 is Ala, Ser or Thr
  Variant (39)..(39): Xaa in position 39 is Ile, Leu or Val
  Variant (40)..(40): Xaa in position 40 is any amino acid
  Variant (41)..(41): Xaa in position 41 is Asp or Glu
  Variant (42)..(42): Xaa in position 42 is Ala or Gly
  Variant (43)..(43): Xaa in position 43 is Leu, Met or Val
  Variant (45)..(46): Xaa in position 45 to 46 is any amino acid
  Variant (47)..(47): Xaa in position 47 is Ile, Met or Val
  Variant (48)..(51): Xaa in position 48 to 51 is any amino acid
  Variant (52)..(52): Xaa in position 52 is Ala, Ile or Val
  Variant (53)..(53): Xaa in position 53 is Pro or Ser
DPXXGRXXEIXRXXXXXLXRXXKNNPXXXGXXGXGKTXXXXXXAXXXXXXXXX

SEQ ID NO: 7525 - protein, 38 aa, Artificial sequence
  protein pattern
  Variant (4)..(4): Xaa in position 4 is any amino acid
  Variant (7)..(7): Xaa in position 7 is Ala, Glu, Gln, Ser or Thr
  Variant (12)..(12): Xaa in position 12 is any amino acid
  Variant (13)..(13): Xaa in position 13 is Ile, Leu or Val
  Variant (14)..(17): Xaa in position 14 to 17 is any amino acid
  Variant (19)..(19): Xaa in position 19 is Ala, Asp, Gly, Asn, Ser or Thr
  Variant (20)..(22): Xaa in position 20 to 22 is any amino acid
  Variant (23)..(23): Xaa in position 23 is Ala, Cys, Ser or Thr
  Variant (24)..(24): Xaa in position 24 is Ile, Leu or Val
  Variant (25)..(25): Xaa in position 25 is any amino acid
  Variant (28)..(28): Xaa in position 28 is any amino acid
  Variant (30)..(30): Xaa in position 30 is Ile, Leu or Val
  Variant (31)..(34): Xaa in position 31 to 34 is any amino acid
  Variant (36)..(36): Xaa in position 36 is any amino acid
  Variant (37)..(37): Xaa in position 37 is any or no amino acid
EKDXALXRRFQXXXXXXPXXXXXXXILXGXXXXXEXXH

SEQ ID NO: 7526 - protein, 14 aa, Artificial sequence
  protein pattern
  Variant (2)..(2): Xaa in position 2 is Phe, Ile, Leu or Met
  Variant (4)..(4): Xaa in position 4 is any amino acid
  Variant (12)..(12): Xaa in position 12 is Ser or Thr
FXFXGPTGVGKXEL

SEQ ID NO: 7527 - protein, 17 aa, Artificial sequence
  protein pattern
  Variant (2)..(2): Xaa in position 2 is Ala or Ser
  Variant (3)..(3): Xaa in position 3 is Ile, Leu, Met or Val
  Variant (6)..(6): Xaa in position 6 is Ala, Gly or Ser
  Variant (8)..(8): Xaa in position 8 is any or no amino acid
  Variant (10)..(10): Xaa in position 10 is any or no amino acid
  Variant (13)..(13): Xaa in position 13 is any amino acid
  Variant (15)..(15): Xaa in position 15 is Ala, Gly or Ser
GXXDAXNXLXKPXLXRG

SEQ ID NO: 7528 - protein, 21 aa, Artificial sequence
  protein pattern
  Variant (2)..(2): Xaa in position 2 is any amino acid
  Variant (3)..(3): Xaa in position 3 is Gln or Arg
  Variant (6)..(6): Xaa in position 6 is any amino acid
  Variant (7)..(7): Xaa in position 7 is Ala, Asp, Gly or Ser
  Variant (9)..(9): Xaa in position 9 is any amino acid
  Variant (18)..(18): Xaa in position 18 is Ile, Met or Val
  Variant (21)..(21): Xaa in position 21 is Ala, Cys or Ser
SXXYIXXRXLPDKAIDLXDEX

SEQ ID NO: 7529 - protein, 26 aa, Artificial sequence
  protein pattern
  Variant (2)..(2): Xaa in position 2 is Ile, Leu or Met
  Variant (3)..(3): Xaa in position 3 is Ala, Gly, Pro or Ser
  Variant (4)..(4): Xaa in position 4 is any amino acid
  Variant (5)..(5): Xaa in position 5 is Ile, Leu, Met or Val
  Variant (6)..(6): Xaa in position 6 is Ile, Leu or Val
  Variant (9)..(9): Xaa in position 9 is Ala, Ser or Thr
  Variant (11)..(11): Xaa in position 11 is any amino acid
  Variant (17)..(17): Xaa in position 17 is Ala, Asp, Glu or Gln
  Variant (20)..(21): Xaa in position 20 to 21 is any amino acid
  Variant (22)..(22): Xaa in position 22 is Phe, Ile, Leu, Met or Val
  Variant (23)..(23): Xaa in position 23 is Ile, Leu, Met or Val
  Variant (24)..(25): Xaa in position 24 to 25 is any amino acid
  Variant (26)..(26): Xaa in position 26 is Ala, Ile, Leu or Val
DXXXXXAGXKXRGEFEXRLXXXXXXX

SEQ ID NO: 7530 - protein, 26 aa, Artificial sequence
  protein pattern
  Variant (2)..(4): Xaa in position 2 to 4 is any amino acid
  Variant (5)..(8): Xaa in position 5 to 8 is any or no amino acid
  Variant (10)..(10): Xaa in position 10 is Lys or Arg
  Variant (13)..(13): Xaa in position 13 is Phe or Leu
  Variant (14)..(14): Xaa in position 14 is Ile, Leu, Met or Val
  Variant (17)..(17): Xaa in position 17 is Ile, Leu or Val
  Variant (19)..(19): Xaa in position 19 is Asp or Glu
  Variant (20)..(20): Xaa in position 20 is any amino acid
  Variant (21)..(21): Xaa in position 21 is Ile, Leu or Val
  Variant (22)..(22): Xaa in position 22 is Phe, Ile, Leu, Met or Val
  Variant (24)..(25): Xaa in position 24 to 25 is any amino acid
VXXXXXXXFXPEXXNRXDXXXXFXXL

SEQ ID NO: 7531 - protein, 26 aa, Artificial sequence
  protein pattern
  Variant (2)..(3): Xaa in position 2 to 3 is any amino acid
  Variant (4)..(4): Xaa in position 4 is Phe or Tyr
  Variant (9)..(9): Xaa in position 9 is any amino acid
  Variant (10)..(10): Xaa in position 10 is any or no amino acid
  Variant (12)..(16): Xaa in position 12 to 16 is any amino acid
  Variant (17)..(17): Xaa in position 17 is Ile, Leu or Val
  Variant (18)..(18): Xaa in position 18 is any amino acid
  Variant (19)..(19): Xaa in position 19 is Asp, Asn or Thr
  Variant (20)..(20): Xaa in position 20 is any amino acid
  Variant (21)..(21): Xaa in position 21 is Ile, Leu, Met or Val
  Variant (22)..(22): Xaa in position 22 is Ala, Gly, Ser or Thr
  Variant (23)..(25): Xaa in position 23 to 25 is any amino acid
  Variant (26)..(26): Xaa in position 26 is Ile, Leu or Val
DXXXGARPXXRXXXXXXXXXXXXXXX

SEQ ID NO: 7532 - protein, 20 aa, Artificial sequence
  protein pattern
  Variant (2)..(3): Xaa in position 2 to 3 is any amino acid
  Variant (4)..(4): Xaa in position 4 is Ile, Leu or Val
  Variant (5)..(5): Xaa in position 5 is any amino acid
  Variant (10)..(10): Xaa in position 10 is Ile, Leu, Met or Val
  Variant (12)..(12): Xaa in position 12 is any amino acid
  Variant (13)..(13): Xaa in position 13 is Ile, Leu, Met or Val
  Variant (14)..(14): Xaa in position 14 is Ile, Leu or Val
  Variant (16)..(16): Xaa in position 16 is any amino acid
  Variant (18)..(19): Xaa in position 18 to 19 is any amino acid
  Variant (20)..(20): Xaa in position 20 is Asp, Glu, Gly, Asn, Gln or Ser
GXXXXFIDEXHXXXGXGXXX

SEQ ID NO: 7533 - protein, 12 aa, Artificial sequence
  protein pattern
  Variant (2)..(3): Xaa in position 2 to 3 is any amino acid
  Variant (4)..(4): Xaa in position 4 is Ile or Val
  Variant (10)..(10): Xaa in position 10 is any amino acid
  Variant (12)..(12): Xaa in position 12 is His or Tyr
LXXXGATTLXEX

SEQ ID NO: 7534 - DNA, 216 bp, Escherichia coli
  CDS (1)..(216): transl_table=11
atgggtataacatcggcaggtatgcaaagcagagatgcagagtgcggggaacgaatcttcaccagaacggtgagacaggttaagcagcagacaacggttcattatttcgtatcacctccacggccgcctgttaagacgaacccacaagccaaaactctgatttcaacccggctggaagtggcaacacgaaagaaacgtcgtgtgctttttatttaa

SEQ ID NO: 7535 - protein, 71 aa, Escherichia coli
MGITSAGMQSRDAECGERIFTRTVRQVKQQTTVHYFVSPPRPPVKTNPQAKTLISTRLEVATRKKRRVLFI

SEQ ID NO: 7536 - DNA, 216 bp, Shigella flexneri 2a str. 2457T
  CDS (1)..(216): transl_table=11
atgggtataacatcggcaggtatgcaaagcagagatgcagagtgcggggaacgagtcttcaccagaacggtgagacaggttaagcagcagacaacggttcattatttcgtatcacctccacggccgcctgttaagacgaacccacaagccaaaactctgatttcaacccggctggaagtggcaacacgaaagaaacgtcgtgtgctttttatttaa

SEQ ID NO: 7537 - protein, 71 aa, Shigella flexneri 2a str. 2457T
MGITSAGMQSRDAECGERVFTRTVRQVKQQTTVHYFVSPPRPPVKTNPQAKTLISTRLEVATRKKRRVLFI

SEQ ID NO: 7538 - DNA, 24 bp, Artificial sequence
  primer
atgggtataacatcggcaggtatg

SEQ ID NO: 7539 - DNA, 26 bp, Artificial sequence
  primer
ttaaataaaaagcacacgacgtttct

SEQ ID NO: 7540 - DNA, 420 bp, Synechocystis sp.
  CDS (1)..(420): transl_table=11
atggatgtgattgacatggctccagtgagccccagggacgacggcgctcccccccaaattaacacggtgcccggcccccacctgcggcgacaggtatggctaaggaccaagtctggccaaagactggcctatgcggtttcctggtgggatgctagccatgtggacgagtatttgcaaaatcgtagtttacccatttgggacagcctttcccggttgcacaccgagctgtatcgggatatccaagccatatactgcggccataatcggaccctagctaaggcttttggccaagaagggcctttttggggccgtcattaccttttctggcatgaccgtaaacccctaaccctaatttacgaaattttttccccctacctatcccgctacctaggcgaattgcctaggccaaaatttgagtaa

SEQ ID NO: 7541 - protein, 139 aa, Synechocystis sp.
MDVIDMAPVSPRDDGAPPQINTVPGPHLRRQVWLRTKSGQRLAYAVSWWDASHVDEYLQNRSLPIWDSLSRLHTELYRDIQAIYCGHNRTLAKAFGQEGPFWGRHYLFWHDRKPLTLIYEIFSPYLSRYLGELPRPKFE

SEQ ID NO: 7542 - DNA, 414 bp, Nostoc sp. PCC 7120
  CDS (1)..(414): transl_table=11
atgtcattgattggtttggatttagatagtgcgccggatttaatccaatctgttccagcgccaagactgcggcgacaggtatggctacgtacagcctctggccaacgactcgcctatgcaacctcatggtgggaagccagccatgtagacgagtatttgcaaaaccgttcattaccaatttgggcaagtctagctcgtcttcgcacggagttgtatcgggatgtgcggggtatttattacggaaattcagaggccttgcaattaggttttggcgtggatgggcctttctggggtcgccattacctgttttggcatcacggtcaacctttaaccttgatttatgaagtcttttcgccatatttgacaaaatacttggggccgatgcagctaagttctagaaatggcaaaatataa

SEQ ID NO: 7543 - protein, 137 aa, Nostoc sp. PCC 7120
MSLIGLDLDSAPDLIQSVPAPRLRRQVWLRTASGQRLAYATSWWEASHVDEYLQNRSLPIWASLARLRTELYRDVRGIYYGNSEALQLGFGVDGPFWGRHYLFWHHGQPLTLIYEVFSPYLTKYLGPMQLSSRNGKI

SEQ ID NO: 7544 - DNA, 561 bp, Thermosynechococcus elongatus BP-1
  CDS (1)..(561): transl_table=11
gtggcgatcgcccaaggattgccccatgatcttttagcgccggcgtggcaaatcctgattcttggggatggctcccccactcgccacttgcaactgctgaccggcgaaaccacggaagtggatgtgattgatatgtcggccattggccatgccggcgatcgcgccccagcgcaactgcaactgattcccggcccacggctacggcgtcaagtgtggctacgaacagcctcgggtcaacgcttggcctatgccacctcctggtgggaagccgcccatgtggatgagtatttgcaaaaccgtgccatgcccatttggacaaacctcgcgcagcgcaagctggagctttatcgggacattcaggcggtgtatctagggcactctgaaaccttggcggcggcctttggcgaagccggaccgttttggggacgccactacctcttttggcacgatcgccgccccattaccctcatctatgaagttttttctccctacctctgccgttaccttggcccgatgggaagtacagcctattgggcaaattcagccctccccttcgcctaa

SEQ ID NO: 7545 - protein, 186 aa, Thermosynechococcus elongatus BP-1
MAIAQGLPHDLLAPAWQILILGDGSPTRHLQLLTGETTEVDVIDMSAIGHAGDRAPAQLQLIPGPRLRRQVWLRTASGQRLAYATSWWEAAHVDEYLQNRAMPIWTNLAQRKLELYRDIQAVYLGHSETLAAAFGEAGPFWGRHYLFWHDRRPITLIYEVFSPYLCRYLGPMGSTAYWANSALPFA

SEQ ID NO: 7546 - DNA, 507 bp, Prochlorococcus marinus subsp. marinus str. CCMP1375
  CDS (1)..(507): transl_table=11
ttgcctggggcatggcaattgatgcttttaggagatggaagccctacgcgacatctcagtctattaactggctatgaagtaaaaattgagcttattgcaatggagtcagatcttagtcccgttaaaaacgcacctaaagaagtcaacgaacttaaacatcccttattgagaaggcaagtttggctgcaatgtggttctcaaacacttgcatgggcagaaagctggtggaataagaatgaagcagaacatcacttaaaaaataaaaatcaaccaatttggcaaagcttgacacagggacgttctgaattatttcgtgaagtagatggactagctttagtcaaagctgaatggttagagaataaattcaaaatcaaaggacctttttggagcaggcattatcgattttttaggcatgaacgagaactaacagtcataagagaagtattcagcccagaattggaagaatggcttggaagctcaggtcgggaacaaatcgagtatctttga

SEQ ID NO: 7547 - protein, 168 aa, Prochlorococcus marinus subsp. marinus str. CCMP1375
MPGAWQLMLLGDGSPTRHLSLLTGYEVKIELIAMESDLSPVKNAPKEVNELKHPLLRRQVWLQCGSQTLAWAESWWNKNEAEHHLKNKNQPIWQSLTQGRSELFREVDGLALVKAEWLENKFKIKGPFWSRHYRFFRHERELTVIREVFSPELEEWLGSSGREQIEYL

SEQ ID NO: 7548 - DNA, 537 bp, Synechococcus sp. WH 8102
  CDS (1)..(537): transl_table=11
gtgctcagtggtgaagggccgcgccagctaccgggagcctggcggctgatgctgctgggggacggcagccccacccgccacctgcggctgcttaccggtgaaccggtggccgtggacctgatcgccatggaaccggaagccagtctgcccgcggaagcaccggcggaagtggccgaactgcaggcaccactactgcggcgtcaggtgtggctcacctgcggcggcctgcccctggcatgggccgagagctggtggaaccaggcggaggcagatctacatctgcaagatcgcaatctgccgatctggaaaagcctgacccagggccgctctgagctgttccgtgaagtcgatggtctggcgctggtgcaggcggattggctggagcacaccttcggccaccgcggtccgttctggagtcgtcactaccgctttttccgcggcggcaccgcactcactgtgatccgagaggtgttcagcccgcagctggaaacctggctgggacctaccttgcgccaggagcttcagcaaagttcatga

SEQ ID NO: 7549 - protein, 178 aa, Synechococcus sp. WH 8102
MLSGEGPRQLPGAWRLMLLGDGSPTRHLRLLTGEPVAVDLIAMEPEASLPAEAPAEVAELQAPLLRRQVWLTCGGLPLAWAESWWNQAEADLHLQDRNLPIWKSLTQGRSELFREVDGLALVQADWLEHTFGHRGPFWSRHYRFFRGGTALTVIREVFSPQLETWLGPTLRQELQQSS

SEQ ID NO: 7550 - DNA, 588 bp, Prochlorococcus marinus str. NATL1A
  CDS (1)..(588): transl_table=11
gtgaattcacgtcaatctccattaccttctcctgaagtgatttggaaagcatcgaaagaaaatgttctttcagggagagggaatcataagctgtctggagcttggcagttaatgctattgggggacggcagcccaacaagacatctcaagctattaactggacatgaagttgctattaaggttatttccatggcaacggaaaataataatgaaattggtgtaccagaagaagtcaatgagctagaaccacctttaatacgaagacaagtttggctgacatgcggagacttaaccttggcctgggctgaaagctggtggaattatcaagaagcagaaaaacatctgcgcaataaagatcaacctatctggaaaagcctcacccaaggacgctcagaactttttagagaggtagatggtttgggtttagtaaatgccaattggctgaaattagaattcgatgaagagggacctttttggagcaggcattaccgattttttcgtcaacaaaaagaattaactgtaatcagagaagtatttagcccaaagttagaaaaatggcttggaccagttccaaggaaggctttttga

SEQ ID NO: 7551 - protein, 195 aa, Prochlorococcus marinus str. NATL1A
MNSRQSPLPSPEVIWKASKENVLSGRGNHKLSGAWQLMLLGDGSPTRHLKLLTGHEVAIKVISMATENNNEIGVPEEVNELEPPLIRRQVWLTCGDLTLAWAESWWNYQEAEKHLRNKDQPIWKSLTQGRSELFREVDGLGLVNANWLKLEFDEEGPFWSRHYRFFRQQKELTVIREVFSPKLEKWLGPVPRKAF

SEQ ID NO: 7552 - DNA, 537 bp, Prochlorococcus marinus str. MIT 9303
  CDS (1)..(537): transl_table=11
gtgctctctggtgaaggcccctggcaactgcccggaccctggcgattgatgctgcttggggatggcagcccaacccgccacctaagactgctcacaggccatgaagtgcaagtcaacctcattgccatgcaaccggaacccaatcctgatgcaacagccccacaggaagttcgcgaactcaaaccacctttactaaggcgccaggtgtggttgatctgcgactcccataccctggcctgggcggaaagctggtggaatttcgatgaggccgaaaagcatctccacaatcgcaatcaacccatctgggacagtctcacaaaaggccgttccgaactgtttcgtgaagtcgacggacttggccttgtcgctgccgattggctcgaatccgcattcggccaaacagggccattttggagccggcattatcgcttctttcgccaagagcgtgaactaacagtgatccgagaagttttcagccctgagctcgagaaatggctcggacccactccacgacaagagcttcaactctgttcatga

SEQ ID NO: 7553 - protein, 178 aa, Prochlorococcus marinus str. MIT 9303
MLSGEGPWQLPGPWRLMLLGDGSPTRHLRLLTGHEVQVNLIAMQPEPNPDATAPQEVRELKPPLLRRQVWLICDSHTLAWAESWWNFDEAEKHLHNRNQPIWDSLTKGRSELFREVDGLGLVAADWLESAFGQTGPFWSRHYRFFRQERELTVIREVFSPELEKWLGPTPRQELQLCS

SEQ ID NO: 7554 - DNA, 543 bp, Prochlorococcus marinus str. MIT 9301
  CDS (1)..(543): transl_table=11
gtgaaaaattcactaccaaaaatatctggtccatggaaattaatgttgcttggggatggaagtccaactagacatttacaacttttaactaatcaagagacaaaaattaagttaatttcaatgcgagttgatcctcttttcattgaagaaggtcctaaagaattaaatcaattaaatggacctttaattagaagacaagtatggattaaaaacaataataaaaacctagcatgggctgaaagttggtggaatgcagaacaagttaatgaaaatttaaaagccaaagaagaaccaatctggaaaaatttaacacaagacagatcagaattgtttagagaagttgaccgaatttcacttgttaattcaaattggttagaagatcaattttgttgtaaaggcccattctggtcaagaaattatagatttttccgagacaaaaaacccttaacaattatcagagaagtcttcaatccacatttagaaactttattaggctattcaggaattaaagaatttacaaaactatactcttcttcttcttga

SEQ ID NO: 7555 - protein, 180 aa, Prochlorococcus marinus str. MIT 9301
MKNSLPKISGPWKLMLLGDGSPTRHLQLLTNQETKIKLISMRVDPLFIEEGPKELNQLNGPLIRRQVWIKNNNKNLAWAESWWNAEQVNENLKAKEEPIWKNLTQDRSELFREVDRISLVNSNWLEDQFCCKGPFWSRNYRFFRDKKPLTIIREVFNPHLETLLGYSGIKEFTKLYSSSS

SEQ ID NO: 7556 - DNA, 561 bp, Synechococcus sp. WH 7803
  CDS (1)..(561): transl_table=11
gtgctctgggaggctcccaccgccgccgttctggcaggcgaagaacccggctggctgcctggcccctggcgcttgatgctgcttggagatggcagccccacacggcacctgcgcttgctgacaagccatccggtcgccgttcgcgtcagtgccatggaagcggatacggcactgcacggcgcgccgcgggaagtgcgtgaactcagctatcccctgctgcgacgacaggtgtggctggagtgcggcgacatcactctggcctgggcggaaagctggtggaaccaaaccgaagcggagcaacacctccaagaccgcaacctgccgatctggatcagcctcacccagggacgctcagagctgttccgggaagtggatggtctggccctggtgactgccccctggctcgaacagggctttggtgagccgggacccttctggagccgccattaccgcttcttccgccaggggaaggaactcaccgtgatccgggaagtgttcagcccagctctggaacgctggcttggagaagctccacgccggccgcttcatgcagcgtcatga

SEQ ID NO: 7557 - protein, 186 aa, Synechococcus sp. WH 7803
MLWEAPTAAVLAGEEPGWLPGPWRLMLLGDGSPTRHLRLLTSHPVAVRVSAMEADTALHGAPREVRELSYPLLRRQVWLECGDITLAWAESWWNQTEAEQHLQDRNLPIWISLTQGRSELFREVDGLALVTAPWLEQGFGEPGPFWSRHYRFFRQGKELTVIREVFSPALERWLGEAPRRPLHAAS

SEQ ID NO: 7558 - DNA, 501 bp, Prochlorococcus marinus str. MIT 9215
  CDS (1)..(501): transl_table=11
atgctgcttggtgatggaagtccaactagacatctacagcttttaactaatcaagagacgaaaattaaattaatttcaatgcaagtagatcctttattcattaaagaaggtcctaaagaattaaatcagttaaatggccccttaattagaagacaagtatggattaaaaataataataaaaacctagcatgggctgaaagctggtggaatgcagatcaagtgaatgaaaatttaaaagccagagaagaaccaatttggaaaaatttgacacaagacagatcagaattgtttagagaagttgaccgaatttcacttgttaattcaaattggttagaagaccagttttgttttaaaggaccattctggtcaagaaattatagattttttcgagacaaaaagcccctaacaataattagagaagtctttaatccacatttggaaagtttattaggttattcaggaattaaagaatttaagaaactatgctcttcttcttcttga

SEQ ID NO: 7559 - protein, 166 aa, Prochlorococcus marinus str. MIT 9215
MLLGDGSPTRHLQLLTNQETKIKLISMQVDPLFIKEGPKELNQLNGPLIRRQVWIKNNNKNLAWAESWWNADQVNENLKAREEPIWKNLTQDRSELFREVDRISLVNSNWLEDQFCFKGPFWSRNYRFFRDKKPLTIIREVFNPHLESLLGYSGIKEFKKLCSSSS

SEQ ID NO: 7560 - DNA, 477 bp, Prochlorococcus marinus str. MIT 9211
  CDS (1)..(477): transl_table=11
atgctgttaggggatggcagtccaacacggcatctgaatctcctaactggacataaggtgaaagtaaatctaattgcaatgcaggcagaagaaacacaaaatgcagaagcacctatagaggtggaagagttaaaggctccgcttattagacgtcaagtatggttagaatgtggttcccagactcttgcatgggcagagagttggtggaatcaacaagaagctgaacatcatttacaaaataaggatcaaccaatttgggatagcctcacaaaaggtcgttcagaactctttcgtgaagtcgatggactcgcattagtcaccgccagctggctagagacaaaattcaaccaagaaggtcccttttggagtagacattatagatttttccgtaaggaaaaggagcttacagtgatacgagaagtatttaatcccgatttagaagcctggctaggacccacaccaaggcatgcactttaa

SEQ ID NO: 7561 - protein, 158 aa, Prochlorococcus marinus str. MIT 9211
MLLGDGSPTRHLNLLTGHKVKVNLIAMQAEETQNAEAPIEVEELKAPLIRRQVWLECGSQTLAWAESWWNQQEAEHHLQNKDQPIWDSLTKGRSELFREVDGLALVTASWLETKFNQEGPFWSRHYRFFRKEKELTVIREVFNPDLEAWLGPTPRHAL

SEQ ID NO: 7562 - DNA, 624 bp, Synechococcus sp. PCC 7002
  CDS (1)..(624): transl_table=11
ttgactctagcactcaattctccgtttttggcaacgtctaaagagcgtcagtggcactgtttagaacccatctggcaaggggggatggccgaagtacaaaagggactcccccacagccaactcgccccgccctggcaaattttgctcttgggggatggttcgccgacccgccatttgggtctactgacacgggaaaaaattgaggtcgatgtgatcgatatgtcccccattggtacggataatgatggggcaccgagtttgatttctgcgattccaacaccccatttacgccgtcaggtgtggttgcgaacggcggggggacaacgtttagcctatgcaacgtcctggtgggatgcgaaccatgtggatgattatttgcaaaatcgcagtttgcccatttgggagagtttgtcacggctccacacggaactgtaccgggatattcaaggaatttatctggggcgatcgccaatcctagaagccgcttttcaggaggaagggcctttctggggtcgccattatctgttttggcacgatggtaaacccttaaccttaatttatgaggtgttttcgccctatttgcgcaaatatttaggaaaaccgagccaggaatttccccaataa

SEQ ID NO: 7563 - protein, 207 aa, Synechococcus sp. PCC 7002
MTLALNSPFLATSKERQWHCLEPIWQGGMAEVQKGLPHSQLAPPWQILLLGDGSPTRHLGLLTREKIEVDVIDMSPIGTDNDGAPSLISAIPTPHLRRQVWLRTAGGQRLAYATSWWDANHVDDYLQNRSLPIWESLSRLHTELYRDIQGIYLGRSPILEAAFQEEGPFWGRHYLFWHDGKPLTLIYEVFSPYLRKYLGKPSQEFPQ

SEQ ID NO: 7564 - DNA, 606 bp, Cyanothece sp. ATCC 51142
  CDS (1)..(606): transl_table=11
ttgactgctaacttgaaaccttatcataaaaccactttagcccatcaatggcacgctttagatattgtttggcaaggagatgaagacgttgttaagcgtggacttccccatgatatgctatcccctgcgtggcaaatattattactcggtgatggttctcctacccgtcatttacaactgctaacgacggaaaaaacagaagttgatctcattgatatgtctcctattggtagcgaagacgatggggccccacctcagatagaaattgttccagaaccccgtttaagacgacaggtttggctaagaacagcatccggacaaagattagcttatgctacctcttggtgggatgcgaatcatgtggatgagtatctacaaaatcgttctttacctatttgggaaagtttatcacggttacatacagaattatatcgtgatattcaagggatttattatggtcattcccctgcattagaagaagcgtttaaagagaaaggacctttttggggaagacattatttattttggcatgatcgcaaaccattaaccttaatttatgaggtcttttccccttatttaagtaagtatttaggccccatgagttaa

SEQ ID NO: 7565 - protein, 201 aa, Cyanothece sp. ATCC 51142
MTANLKPYHKTTLAHQWHALDIVWQGDEDVVKRGLPHDMLSPAWQILLLGDGSPTRHLQLLTTEKTEVDLIDMSPIGSEDDGAPPQIEIVPEPRLRRQVWLRTASGQRLAYATSWWDANHVDEYLQNRSLPIWESLSRLHTELYRDIQGIYYGHSPALEEAFKEKGPFWGRHYLFWHDRKPLTLIYEVFSPYLSKYLGPMS

SEQ ID NO: 7566 - DNA, 624 bp, Nostoc punctiforme PCC 73102
  CDS (1)..(624): transl_table=11
ttgagtattacttttacgccgacaaacaacttaacacagccagcagcttggcatcgcctcactccgatttggcaaggaggggaggaagtaattcaaaaaagtttacctcacactcagctagcacctgcttggcagctcatgcttttgggtgacggctctccaacacgtcacctagaattgcttacaggcgagcctgtagaagtagatgtcattgatatgtcattgattggcatggatttggatgccgcacctgatttaatccaagctgttccagggccgcgactacggcgacaagtgtggctgcggactgcttctggtcaacgattagcttatgctacctcgtggtgggaagccagtcatgtagatgagtatttgcaaaatcgttcattaccaatttgggcaagtttagctcgtctccgcacagagttatatcgggatgttcgagggatttactatggtgactcatcggcgctagagtctggttttgacgtaactgggcctttttggggtcgccactacttgttttggcatcatggacagccactaaccttaatttatgaagttttttcgccttatttaactaaatatttgggagcgatgcaattgaattcccaaaatcggtaa

SEQ ID NO: 7567 - protein, 207 aa, Nostoc punctiforme PCC 73102
MSITFTPTNNLTQPAAWHRLTPIWQGGEEVIQKSLPHTQLAPAWQLMLLGDGSPTRHLELLTGEPVEVDVIDMSLIGMDLDAAPDLIQAVPGPRLRRQVWLRTASGQRLAYATSWWEASHVDEYLQNRSLPIWASLARLRTELYRDVRGIYYGDSSALESGFDVTGPFWGRHYLFWHHGQPLTLIYEVFSPYLTKYLGAMQLNSQNR

SEQ ID NO: 7568 - DNA, 612 bp, Synechococcus elongatus PCC 6301
  CDS (1)..(612): transl_table=11
atggcttccagcgatcgcggtacttccactttgcagggctggcatgccttacaaacgctctggcggggcgatcagcgatcggtcattcagggattgccccacagtcaactcgctcccgcttggcaattgctcctgctgggggatggctcgcccacacgccacctacagctcctgacaggggaaccgactgcggtggacgtcatcgaaatggccccgatcgccgatcaagatgacggcgcccctccaccaatccgtgcgatcgcggggccacggctacggcgacaggtctggttgcgcactgcttccggtcagcgtctcgcctacgccacctcttggtggacccagcagcgggttgatgcctacctacgcgatcgcgcccaaccgatttgggccaatcttgccgatttacggacagagctctatcgcgatatccaaggcgttgaatacggtgatagcgccgctctgagtgaggctttcggccagactgggccgttctggggacgctattacctgttctggcaccaaggacagccgctgacgctaatctatgaggtgttttcgccggcgatcgccacctatctcggaccaagtacacctcagcctgtggtttag

SEQ ID NO: 7569 - protein, 203 aa, Synechococcus elongatus PCC 6301
MASSDRGTSTLQGWHALQTLWRGDQRSVIQGLPHSQLAPAWQLLLLGDGSPTRHLQLLTGEPTAVDVIEMAPIADQDDGAPPPIRAIAGPRLRRQVWLRTASGQRLAYATSWWTQQRVDAYLRDRAQPIWANLADLRTELYRDIQGVEYGDSAALSEAFGQTGPFWGRYYLFWHQGQPLTLIYEVFSPAIATYLGPSTPQPVV

SEQ ID NO: 7570 - DNA, 588 bp, Prochlorococcus marinus str. NATL2A
  CDS (1)..(588): transl_table=11
gtgaattcacgtcaatctcaattaccttctcctgaagtgatttggaaagcatcgaaagaaaatgttctttcagggagaggtaatcataagctgtctggagcttggcagttaatgctattgggggacggcagcccaacaagacatctcaagctattaactggacatgaagttgccataaaagttatttccatggcaacggaaaataataatgaaattggcgtaccagaagaagtcaatgagctagaaccacctttaatacgaaggcaagtttggctgacatgtggagacttaaccttggcctgggctgaaagctggtggaattatcaagaagcagaaaaacatctgcgcaataaagatcaacctatctggaaaagcctcacccaaggacgctcagaactttttagagaggtagatggattgggtttagtaaatgccaattggctgaaattagaattcgatgaagagggacctttttggagcaggcattaccgattttttcgtgaacaaaaagaattaactgtaatcagagaagtatttagcccaaagttagaaaaatggcttggaccagttccaaggaaggctttttga

SEQ ID NO: 7571 - protein, 195 aa, Prochlorococcus marinus str. NATL2A
MNSRQSQLPSPEVIWKASKENVLSGRGNHKLSGAWQLMLLGDGSPTRHLKLLTGHEVAIKVISMATENNNEIGVPEEVNELEPPLIRRQVWLTCGDLTLAWAESWWNYQEAEKHLRNKDQPIWKSLTQGRSELFREVDGLGLVNANWLKLEFDEEGPFWSRHYRFFREQKELTVIREVFSPKLEKWLGPVPRKAF

SEQ ID NO: 7572 - DNA, 630 bp, Anabaena variabilis ATCC 29413
  CDS (1)..(630): transl_table=11
ttgactgctacttttactccaagcaacaactcaacattgccagccggatggcatcgcctcactccaatttggcaaggtggggaagaagtaattaaacatagtttgcctcacactcagctggctccagcgtggcaactactacttttaggtgatggctcacccacaaggcatttagaattactcactggtgagccaacagaagtcgatgtcattgatatgtcattgattggtctggatttagatagtgcgccggatttaatccaatcggttccagcgccaagactgaggcgacaggtatggctacgtacagcctctggccaacgactggcctatgcaacgtcatggtgggaagccagtcatgtagacgagtatttgcaaaaccgttcattacctatttgggcaagtctagctcgtcttcgcacggagttgtatcgagatgtgcggggaatttattacggaaattcacaggccctgcaatcaggttttggagtggatggccctttttggggtcgccattacctgttttggcatcacggtcaacctttaaccttaatttatgaagttttttctccgtatttaacaaaatacttggggccgatgcaactaagttctataaatgtcaaggtataa

SEQ ID NO: 7573 - protein, 209 aa, Anabaena variabilis ATCC 29413
MTATFTPSNNSTLPAGWHRLTPIWQGGEEVIKHSLPHTQLAPAWQLLLLGDGSPTRHLELLTGEPTEVDVIDMSLIGLDLDSAPDLIQSVPAPRLRRQVWLRTASGQRLAYATSWWEASHVDEYLQNRSLPIWASLARLRTELYRDVRGIYYGNSQALQSGFGVDGPFWGRHYLFWHHGQPLTLIYEVFSPYLTKYLGPMQLSSINVKV

SEQ ID NO: 7574 - DNA, 537 bp, Synechococcus sp. CC9605
  CDS (1)..(537): transl_table=11
gtgctctcggctgacggaccccggcaactgcccggtccctggcggttgatgctgctgggtgatggcagcccaacccgccacctgcgcctgctcaccggttcgcccgttgccgtggatctgatcgccatggaggccgaccagaccgaccatcccggggcaccggaggaggtgaaggaattgatggcaccactgctgcgccgccaggtgtggctcacctgcggcggcaccccgctggcctgggccgagagctggtggaaccaagctgaagcggattggcacctgcgggaccggaaccagccgatctggaaaagcctcaccgaagggcgttccgagctgttccgtgaggtggatggcttggcgctggtggaaggggactggctcgatcagacctttggccatcgcggcccctactggagccgccattaccgcttcttccgccaaggcaaggccctcactgtgattcgcgaagtgttcagcccgcaactcgaaacctggctcggccccacgctgcgccaggagtttcaacaaaattcatga

SEQ ID NO: 7575 - protein, 178 aa, Synechococcus sp. CC9605
MLSADGPRQLPGPWRLMLLGDGSPTRHLRLLTGSPVAVDLIAMEADQTDHPGAPEEVKELMAPLLRRQVWLTCGGTPLAWAESWWNQAEADWHLRDRNQPIWKSLTEGRSELFREVDGLALVEGDWLDQTFGHRGPYWSRHYRFFRQGKALTVIREVFSPQLETWLGPTLRQEFQQNS

SEQ ID NO: 7576 - DNA, 627 bp, Trichodesmium erythraeum IMS101
  CDS (1)..(627): transl_table=11
atgagtactatttcacctaagaaccagacaatacagccgagaggatggtattccttaactcccttatggcaaggaggagaagaagttgttcgccaaggtttacctcattcgctactttcacccccatggcaaatattacttctgggagatggctccccaactcgtcacttgcagctattaacaactgaaccaacagaagttgatgtaattgatatgtcctcaattgggatgaacctggataatgctcctgatttaattcatactgtacctggcccaagattacggcgacaagtatggctaagaacagcttctggacaaagattggcttatgcttcatcttggtgggaagcgagtcatgtagatgagtatttgcaaaatcggtctttaccaatttgggcaagtttagctcgtttgcgtacagaattgtatcgagatgtccagggaatttattatgggcattctagagaattagagtttgcttttggtgagtcagggcctttttggggacgacattatctattttggcatcatggccaaccactgacattaatttatgaggtgttttcgccttatctcaacaaatatttgggacaaacaagcattacggacagggattttccggagtaa

SEQ ID NO: 7577 - protein, 208 aa, Trichodesmium erythraeum IMS101
MSTISPKNQTIQPRGWYSLTPLWQGGEEVVRQGLPHSLLSPPWQILLLGDGSPTRHLQLLTTEPTEVDVIDMSSIGMNLDNAPDLIHTVPGPRLRRQVWLRTASGQRLAYASSWWEASHVDEYLQNRSLPIWASLARLRTELYRDVQGIYYGHSRELEFAFGESGPFWGRHYLFWHHGQPLTLIYEVFSPYLNKYLGQTSITDRDFPE

SEQ ID NO: 7578 - DNA, 606 bp, Crocosphaera watsonii WH 8501
  CDS (1)..(606): transl_table=11
ttgacagccaaattgaaaccttatcataaaagcactttagcccatcagtggcacgccttagacattgtttgggaaggagatcaagacgtagtgaagcgtggactcccccatgataccttatcccctgcgtggcagatgttgctgttgggagatggttcccctacccgtcatttacaactgttgaccacggaaaaaacggaagtggatctcattgatatgtctcccattggtagcgaagacgacggggccccaccccaagtcgaaattgtaccggaaccccgtttaagaagacaggtttggttacagacaggatcggggcaaagattagcttatgctacttcttggtgggatgccaaccatgtagatgagtatctacaaaatcgttctctgcccatttgggatagtttatcacggttacacacagaattatatcgtgacatccaaggtatatattatggtcattctccagtattagaacaagcatttcaagagaagggacctttttggggaagacattacctattctggcacgatcgcaaacctttaactttaatttatgaggtcttttctccctatttacgcaagtatttaggaccgatttgttaa

SEQ ID NO: 7579 - protein, 201 aa, Crocosphaera watsonii WH 8501
MTAKLKPYHKSTLAHQWHALDIVWEGDQDVVKRGLPHDTLSPAWQMLLLGDGSPTRHLQLLTTEKTEVDLIDMSPIGSEDDGAPPQVEIVPEPRLRRQVWLQTGSGQRLAYATSWWDANHVDEYLQNRSLPIWDSLSRLHTELYRDIQGIYYGHSPVLEQAFQEKGPFWGRHYLFWHDRKPLTLIYEVFSPYLRKYLGPIC

SEQ ID NO: 7580 - DNA, 561 bp, Synechococcus sp. WH 7805
  CDS (1)..(561): transl_table=11
gtgctctgggaagcacccacgtcggctgttttggcgggagaagaacccggctggcttcctggcccctggcgattgatgctgctcggtgatggcagtccaacgaggcacctgcgcttgctgacaaaccatccagtcgccgtgcgcgtcattgccatggaggctgatcaagcactgaacggcgcgccacaagaagtgcgtgaactcagccatcccctgctgcgacgccaggtttggctggagtgcgggggcaccacccttgcctgggcggaaagctggtggaaccagacggaagcggagcagcatcttcaggaccgcaacctgccgatctggctcagcctcacccagggacgctcggaactattccgagaagtggatggcctggctctagtgacagctccctggctggaacagggctttggtgaacaaggaccgttctggagccgccattaccgcttcttccgacaggggcgggaactgaccgtgatccgcgaagtgttcaacccagccctggaacgctggcttggggaagctccacgtcgaccgcttcaaacaacgtcatga

SEQ ID NO: 7581 - protein, 186 aa, Synechococcus sp. WH 7805
MLWEAPTSAVLAGEEPGWLPGPWRLMLLGDGSPTRHLRLLTNHPVAVRVIAMEADQALNGAPQEVRELSHPLLRRQVWLECGGTTLAWAESWWNQTEAEQHLQDRNLPIWLSLTQGRSELFREVDGLALVTAPWLEQGFGEQGPFWSRHYRFFRQGRELTVIREVFNPALERWLGEAPRRPLQTTS

SEQ ID NO: 7582 - DNA, 549 bp, Synechococcus sp. RS9916
  CDS (1)..(549): transl_table=11
gtgctgcggggtgaagggccgagcccactgcccgggccatggcgcctgatgctgctgggggacggaagtcccacccgccacctacgcctgcttaccggccatcccgttgcggtgcgtctggtggcgatggaagcagaacccgaaccgccaggccaaaccccctcccaactgccccgcgaagtgcgcgagctggaaccacccctgctgcggcgccaggtgtggctcgactgtggcggcgagaccctggcctgggcggaaagctggtggaaccaaaccgaagccgaacagcacctgcgcgatcgcaacctgcccatctggctcagcctcacccaaggacggtctgaactgttccgcgaggtggatggcctggccttggtgaacagcacctggttggaagagggatttgggacgcaggggccgttctggagtcgccactaccgctttttccgccagggacgggaactcacggtgatccgcgaagtgttcagcccaagcctggagcaatggctgggacccgcaccacgccagccgcttcactccccttcatga

SEQ ID NO: 7583 - protein, 182 aa, Synechococcus sp. RS9916
MLRGEGPSPLPGPWRLMLLGDGSPTRHLRLLTGHPVAVRLVAMEAEPEPPGQTPSQLPREVRELEPPLLRRQVWLDCGGETLAWAESWWNQTEAEQHLRDRNLPIWLSLTQGRSELFREVDGLALVNSTWLEEGFGTQGPFWSRHYRFFRQGRELTVIREVFSPSLEQWLGPAPRQPLHSPS

SEQ ID NO: 7584 - DNA, 606 bp, Cyanothece sp. PCC 7424
  CDS (1)..(606): transl_table=11
ttgacagctacttttaaacctgacagaaaccagagtcgatcgtcccaatggcattctcttgagattatttggcaaggaggagaagaaaccgttaaaggtggactccctcacagtcaactcgctcccacatggcaaatactcttattaggagatggttcaccaacgcgccatttacaactcctaacgggggaaaaaaccgaagtagatgtcattgatatgtctttggtcaatggttatgatgatggcgctcccagtcagattaaaaccgtacccgaacctcgactacgccggcaggtttggttaaggacagcatccggtcaaagactcgcttatgctgcctcttggtggaatgctaatcatgttgatgagtatttacaaaatcgctctttaccgatttgggaaagtctatctcgtttacatacggaattataccgagatatccaggggatttattacggccactctaaagctctagaatcagcttttggggaaaaagggccgttttggggtcgtcattatttattttggcatgacagaaaacccttaactttaatttatgaagtattttccccttacttaagtaaatatctcggctcgtttaattaa

SEQ ID NO: 7585 - protein, 201 aa, Cyanothece sp. PCC 7424
MTATFKPDRNQSRSSQWHSLEIIWQGGEETVKGGLPHSQLAPTWQILLLGDGSPTRHLQLLTGEKTEVDVIDMSLVNGYDDGAPSQIKTVPEPRLRRQVWLRTASGQRLAYAASWWNANHVDEYLQNRSLPIWESLSRLHTELYRDIQGIYYGHSKALESAFGEKGPFWGRHYLFWHDRKPLTLIYEVFSPYLSKYLGSFN

SEQ ID NO: 7586 - DNA, 621 bp, Microcystis aeruginosa PCC 7806
  CDS (1)..(621): transl_table=11
ttgactgctatcctccgcccccaagaaaaacccctgcttaatcgtccgtggtactccctgtcccctctctggcaaggagacgaaaccgatgttaaacaaggtttaccccatagtcaactcgcgcctccttggcagattttaattctcggcgatggttctcccacccgtcatttacaacttttaaccggtgaaaaaacagaagtggatgtgatcgatatgtcccccatcggcgacgatgaggatggcgcaccgatgaaaattagcctgattccaggaccgagattgcgtcgtcaagtctggttacgcacagctagtggtcaaaggttagcctatgccgcttcttggtggtccgccaatcaagtggacgaatatctagaaaatcgttccctaccgatttgggaaagtctctcgcggctgcacacggaattgtatcgcgatgtgcagggactttattacggtcattccccggaattagaaatagcttttggggaaaaaggagcattttggggtcgtcattacctattttggcacgctcgccaaccccttaccctgatttacgaggttttttctccctatctccgtaaatacctcggcgaaatgagaattgatcagttaggttaa

SEQ ID NO: 7587 - protein, 206 aa, Microcystis aeruginosa PCC 7806
MTAILRPQEKPLLNRPWYSLSPLWQGDETDVKQGLPHSQLAPPWQILILGDGSPTRHLQLLTGEKTEVDVIDMSPIGDDEDGAPMKISLIPGPRLRRQVWLRTASGQRLAYAASWWSANQVDEYLENRSLPIWESLSRLHTELYRDVQGLYYGHSPELEIAFGEKGAFWGRHYLFWHARQPLTLIYEVFSPYLRKYLGEMRIDQLG

SEQ ID NO: 7588 - DNA, 20 bp, Artificial sequence
  primer
atggatgtgattgacatggc

SEQ ID NO: 7589 - DNA, 27 bp, Artificial sequence
  primer
ttactcaaattttggcctaggcaattc

SEQ ID NO: 7590 - protein, 159 aa, Artificial sequence
  consensus sequence
  Variant (2)..(4): Xaa in position 2 to 4 is any amino acid
  Variant (16)..(16): Xaa in position 16 is any amino acid
  Variant (20)..(22): Xaa in position 20 to 22 is any amino acid
  Variant (23)..(27): Xaa in position 23 to 27 is any or no amino acid
  Variant (29)..(29): Xaa in position 29 is any amino acid
  Variant (31)..(39): Xaa in position 31 to 39 is any amino acid
  Variant (40)..(44): Xaa in position 40 to 44 is any or no amino acid
  Variant (46)..(53): Xaa in position 46 to 53 is any amino acid
  Variant (55)..(56): Xaa in position 55 to 56 is any amino acid
  Variant (63)..(68): Xaa in position 63 to 68 is any amino acid
  Variant (69)..(69): Xaa in position 69 is any or no amino acid
  Variant (72)..(72): Xaa in position 72 is any amino acid
  Variant (74)..(74): Xaa in position 74 is any amino acid
  Variant (78)..(85): Xaa in position 78 to 85 is any amino acid
  Variant (87)..(91): Xaa in position 87 to 91 is any amino acid
  Variant (95)..(95): Xaa in position 95 is any amino acid
  Variant (98)..(102): Xaa in position 98 to 102 is any amino acid
  Variant (105)..(105): Xaa in position 105 is any amino acid
  Variant (107)..(109): Xaa in position 107 to 109 is any amino acid
  Variant (111)..(118): Xaa in position 111 to 118 is any amino acid
  Variant (120)..(122): Xaa in position 120 to 122 is any amino acid
  Variant (124)..(126): Xaa in position 124 to 126 is any amino acid
  Variant (131)..(131): Xaa in position 131 is any amino acid
  Variant (135)..(135): Xaa in position 135 is any amino acid
  Variant (137)..(142): Xaa in position 137 to 142 is any amino acid
  Variant (145)..(145): Xaa in position 145 is any amino acid
  Variant (147)..(147): Xaa in position 147 is any amino acid
  Variant (153)..(153): Xaa in position 153 is any amino acid
  Variant (155)..(157): Xaa in position 155 to 157 is any amino acid
WXXXLLGDGSPTRHLXLLTXXXXXXXXIXMXXXXXXXXXXXXXXPXXXXXXXXPXXRRQVWLXXXXXXXLAXAXSWWXXXXXXXXLXXXXXPIWXSLXXXXXELXRXXXGXXXXXXXXLXXXFXXXGPFWXRHYXFXXXXXXLTXIXEVFSPXLXXXLG

SEQ ID NO: 7591 - protein, 15 aa, Artificial sequence
  protein pattern
  Variant (3)..(3): Xaa in position 3 is Asp, Glu or Asn
  Variant (4)..(4): Xaa in position 4 is any amino acid
  Variant (5)..(5): Xaa in position 5 is Ala, Asp, Asn, Gln, Ser or Thr
  Variant (6)..(6): Xaa in position 6 is Glu or His
  Variant (7)..(7): Xaa in position 7 is Ala or Val
  Variant (8)..(8): Xaa in position 8 is Asp or Glu
  Variant (9)..(9): Xaa in position 9 is any amino acid
  Variant (10)..(10): Xaa in position 10 is His or Tyr
  Variant (12)..(12): Xaa in position 12 is any amino acid
  Variant (13)..(14): Xaa in position 13 to 14 is any or no amino acid
WWXXXXXXXXLXXXN

SEQ ID NO: 7592 - DNA, 861 bp, Saccharomyces cerevisiae
  CDS (1)..(861)
atgacttacacattggcaattttaggctgcggtgttatgggccaagcacttctttccgccatttataatgctccaaaggcggctgatgaaactgctgctgcattttacccttccaaaattatcacatgtaaccatgatgaacctagtgcacaacaagttaccgatctagttgagacattcgacgaatctcctaacggtattaaagtcgaaagcacttacggtcacaacgtgagcgctgtcgaagaagcttctgtagttcttcttggtaccaagccatttttggccgaagaagtgttgaatggtgtgaagagcgtcattgggggaaagctacttatttccctggctgctggctggacaattgaccaattgagtcaatacactagcactgtttgccgtgttatgacgaacacacctgccaagtacggatatggttgtgcggtggtgtcctactcagctgatgtttccaaagagcaaaagccactggtcaacgaattgattagccaagttggtaaatacgttgagcttccagaaaagaacatggatgctgctacggctttagtcggttcaggccccgcttttgttctcttgatgttagaatccttgatggagagtgggttgaaattgggaatcccattacaagagagtaaggagtgtgccatgaaagttctagaaggaacagtgaagatggttgagaaaagcggtgctcatccatccgttttaaagcatcaagtttgcacaccaggtggtacaactattgccgggttgtgcgtaatggaagaaaagggcgtcaagagcggtattatcaatggtgttgaagaggcagcccgtgttgcgtcacaattaggccaaaagaagaaatag

SEQ ID NO: 7593 - protein, 286 aa, Saccharomyces cerevisiae
MTYTLAILGCGVMGQALLSAIYNAPKAADETAAAFYPSKIITCNHDEPSAQQVTDLVETFDESPNGIKVESTYGHNVSAVEEASVVLLGTKPFLAEEVLNGVKSVIGGKLLISLAAGWTIDQLSQYTSTVCRVMTNTPAKYGYGCAVVSYSADVSKEQKPLVNELISQVGKYVELPEKNMDAATALVGSGPAFVLLMLESLMESGLKLGIPLQESKECAMKVLEGTVKMVEKSGAHPSVLKHQVCTPGGTTIAGLCVMEEKGVKSGIINGVEEAARVASQLGQKKK

SEQ ID NO: 7594 - DNA, 996 bp, Candida albicans
  CDS (1)..(996): transl_table=12
ttgttgtcgctgatacctaactttaatggaaatcctgcacattttttttttttgttgttcgcctcgctttgttttgcctctgttagatctaatcagtataaattctccacgaaatttttcattctttttttgtcgaagttgtttttttcaaccagagataaatcattaatcatgaaagactacacgattacagtattaggatgcggtgttatgggcacagctgtaacatcagctattttgaaatccaagtttgacccatacccaaagaaaatcatagcatgtaccattccaagccaagaacaaagcttgaaagaaacctttgctgatcagccattagttcatgtttctgccggagttgaaaacaacaacaaggcagttactgaggcagatgttattattttaggatgtaagccatatatgtatgaaggcatttatgaagaagtcaaggaatcattaactggaaaacaattattaatttcattattggcaggaaccactataaaggaattgtctattttcactccatatgttgccaaagtcatgaccaacactccagctagatttggttgtggaactgcggcaattgcatttgctccagaagttagtgaagaaagccaagagttggtaatgaaattgattgatactgttggtatgactgtaaagattccagagaagaacatggacattgcaacttcattgattgggtccggaccagctttttgtttattgatgatggagtccatgatcgatggtgcagtaagaatgggtatgccatacgatgtagcatctgttgctgcagccaaggtgatggaaggtactgcccgtatggtcttggaaaccggcgaacatccagctgcgttaaagagcaaagtgtgtactcctggtggtactacaattggtggcttgttgaccatggaagatcgtggattaagaagtgctattgctagaggtgttgaagaggctgctaacatatctgcttcatttgccaaaaagtaa

SEQ ID NO: 7595 - protein, 331 aa, Candida albicans
LLSLIPNFNGNPAHFFFLLFASLCFASVRSNQYKFSTKFFILFLSKLFFSTRDKSLIMKDYTITVLGCGVMGTAVTSAILKSKFDPYPKKIIACTIPSQEQSLKETFADQPLVHVSAGVENNNKAVTEADVIILGCKPYMYEGIYEEVKESLTGKQLLISLLAGTTIKELSIFTPYVAKVMTNTPARFGCGTAAIAFAPEVSEESQELVMKLIDTVGMTVKIPEKNMDIATSLIGSGPAFCLLMMESMIDGAVRMGMPYDVASVAAAKVMEGTARMVLETGEHPAALKSKVCTPGGTTIGGLLTMEDRGLRSAIARGVEEAANISASFAKK

SEQ ID NO: 7596 - DNA, 1220 bp, Glycine max
  CDS (160)..(984)
atgcaagttaaacaaacaactgcaagggaaataggggcctaactttatatatctgcgtgagtgagtgcgtcatttctttctttctctgcttccctaaccaactgaaccagcagcaacatttgcgcaaatcgaaattgattctctgccacttaacctaaaatggaaatctttccgattcccgccgaatcctacactctcggcttcatcggcgccggaaaaatggccgagtccattgcccgaggcgccgtccgctccggcgtcctgccgccttctcgcattcggaccgccgtccacttcaacctcgcccgccgtggcgccttcgagtccttcggcgtcaccgttctcccttcaaacgacgacgtcgttcgcgaaagcgacgtcgtcgttttgtcggtcaaacctcaattagtgaaagacgtggtgtcgaaattgacgccgcttttgacgaagaacaagcttttggtttcggtcgctgctggtaccaaattgaaagatcttcaggaatgggctgggaacgacagatttataagagtgatgcctaataccccagcagctgttggccaggcagcatctgtaatgagcttggggggatctgcaacggaagaagatggaaatattatagcccaattatttgggtcaattggcaaaatatggaaagctgaggaaaagtattttgatgcaataactggcctgagtggcagtggtcctgcttatgtttatttagcaatagaggctttggctgatggaggagtagcagctggtttaccacgtgatctttcattaagtctagcttctcaaactgtattaggggcagcatcaatggtctcccagactgggaagcacccgggacagctcaaagatgacgttacttctccaggtgggacaacaattacgggcattcatgagttagaaaatggtgggttccgtggaacactgatgaatgctgttgttgctgctgctaagcgcagccgagagctttcctgaatcaagagattaggattctactttttttttagaccaaaatctgatttcggtcgaattttcagtcactattatgagaacttggggctcttctttgagaggagtaaacaagaatgtttggccataacagtcttttcgagctagcatcatgaatgcatccgagtctatatgagaacttgaagtttccttgcaaaagaagagtactagcagtaaaaataaaataaaaccacttggccact

SEQ ID NO: 7597 - protein, 274 aa, Glycine max
MEIFPIPAESYTLGFIGAGKMAESIARGAVRSGVLPPSRIRTAVHFNLARRGAFESFGVTVLPSNDDVVRESDVVVLSVKPQLVKDVVSKLTPLLTKNKLLVSVAAGTKLKDLQEWAGNDRFIRVMPNTPAAVGQAASVMSLGGSATEEDGNIIAQLFGSIGKIWKAEEKYFDAITGLSGSGPAYVYLAIEALADGGVAAGLPRDLSLSLASQTVLGAASMVSQTGKHPGQLKDDVTSPGGTTITGIHELENGGFRGTLMNAVVAAAKRSRELS

SEQ ID NO: 7598 - DNA, 837 bp, Cupriavidus taiwanensis
  CDS (1)..(837): transl_table=11
atgctcgacaccctcacctttggctttcttggcggcggcaatatggcttccgcactgatcggcggcctgatcgcccgcggcgtgcccgccggcgcgatccgcgtggtcgacccgtttccggaagcgcagcagcgcctggcgcgcgacctcggcgtgcatgcggccggggcgccggatgccgccttcggcgccagcgatgtgctggtgctggcggtcaagccgcagcagttccgcgacgccgcggcgcaattgctgccgcacctgccggccgatggcccgggcaacctggtgatcagcgtggccgccggcatccggctgcaggacatgcagcgctggctcggcgggcgcaaccgcgtggtgcgcgcgatgccgaatacgccggcgctgtcgggcatgggcatgaccgggctggccgcaccggccgggctgtcggtcgaagaccgggccattgccagcgccgtggcggaagccgtcggcaagtgcgtgtgggtggatggggatgaccagatcgacgccgtcaccgcgatttccggcagcggcccggcctatgtgttctatttcatcgaagccatgcagcgcgccgccaccgaactggggctgagcgcagaacagggacgcgaactcgccgtggagaccttccgcggcgcggctacattggcagggcaatcgcccgaaccggtggcgacgctgcgcgagcgcgtgacgtcgaagggcggcaccacctatgcggcgctgaccgcgatggaggcctccggcatcggcgatgccttcgtgcgcgcgatgcacgcggccgcggcacgcggcaaggagatgggggcggagttcgggaaggattga

SEQ ID NO: 7599 - protein, 278 aa, Cupriavidus taiwanensis
MLDTLTFGFLGGGNMASALIGGLIARGVPAGAIRVVDPFPEAQQRLARDLGVHAAGAPDAAFGASDVLVLAVKPQQFRDAAAQLLPHLPADGPGNLVISVAAGIRLQDMQRWLGGRNRVVRAMPNTPALSGMGMTGLAAPAGLSVEDRAIASAVAEAVGKCVWVDGDDQIDAVTAISGSGPAYVFYFIEAMQRAATELGLSAEQGRELAVETFRGAATLAGQSPEPVATLRERVTSKGGTTYAALTAMEASGIGDAFVRAMHAAAARGKEMGAEFGKD

SEQ ID NO: 7600 - DNA, 864 bp, Zea mays
  CDS (1)..(864)
atggcggcgccgcctgtccagcctgtgccaaccgcggcggcggcggcggcggctgtgaacggggacgcgttccgtctgggcttcgtcggcgcgggcaacctggccgagagcatcgcccgcggcgtggcggcgtcgggcgtcctcccggcctccgccatccgcaccgcgccccaccgccgccccgagcgcggcgaggccttcgcgtccttcggcgcgtgcttgctccaaaccaatgcccatgttgtggacgacagcgatgtgatcgtcatctccgtgaagcctcagatcgtgaagcaagttctacttcagctgaggccacggctgtcagaaaaaaagcttctcgtgtccattgctgccggcatcaagatgcaagatttgcaggattggtctggtcaacgacgtattattagagtaatgcccaacaccccttcagctgttggacaagctgcatcagtcatgtgtttgggagagatggctactcaggatgatgaaaaccgtgtaagaaaactgttcagtgccattggaaaagtctggacagctgaagagaaatattttgatgctgtaactggtctgagtggtagtggcccggcctatatcttcctagcaatagaggccatggctgatggtggagttgctgctgggcttcctcgggaccttgcccttggtcttgcatctcaaacagttcttggtgctgcaactatggtgagccagacaggcaaacatccagggcaactgaaagatcaggttacttctccagcaggtactaccattgccgggattcaggagctcgagaagggcgcattccgtggaacgctgattagtgctgttgttgctgccgcaaagcgctgccgcgaactgtcatag

SEQ ID NO: 7601 - protein, 287 aa, Zea mays
MAAPPVQPVPTAAAAAAAVNGDAFRLGFVGAGNLAESIARGVAASGVLPASAIRTAPHRRPERGEAFASFGACLLQTNAHVVDDSDVIVISVKPQIVKQVLLQLRPRLSEKKLLVSIAAGIKMQDLQDWSGQRRIIRVMPNTPSAVGQAASVMCLGEMATQDDENRVRKLFSAIGKVWTAEEKYFDAVTGLSGSGPAYIFLAIEAMADGGVAAGLPRDLALGLASQTVLGAATMVSQTGKHPGQLKDQVTSPAGTTIAGIQELEKGAFRGTLISAVVAAAKRCRELS

SEQ ID NO: 7602 - DNA, 816 bp, Mesorhizobium loti MAFF303099
  CDS (1)..(816): transl_table=11
atgacgaacaggcttgttctcgccggctgcggcaatatgggctacgccatgctttcgggctggctgaaatccggcaagctcgcgccctcggcggttttcgttatcgagcccaatgcggagctgcgccagcgcgctgcaacgcttggctgcgccacatcagcggacgccggtgagattccagccgatgcggtgcccgatctcgtcgtcatcgcggtaaaaccccaggtgatccgcgacgtcaccgccgcctacaagcgtttcggcgatggccgcaccaccttcgtcagcatcgccgccggcacgccggtcgccaccttcgaagacatcctcggcaaccgcgcgcctgttgtgcgctgcatgcccaacacgcccgcctccatcggcaaaggcatgatggtggtgttttccaacccgctggtctcggatgataccaagcgctttgtcgccgacctgctgtcggccagcggcgaagtggccaccattgacgacgaaggcctgatggatgcggtgaccgccgtgtcgggatccgggccggcctatatcttccacttcatcgaagcgctgaccgtggccgccgagaaggcggggctgcctagcgcaaccgccaggctgctcgcgatgcagaccgtctatggcgctgcctcgctcgctgccgaaagccaggaggaacccggcgtgctgcgccagcaggtgaccagccccaacggcacgacggctgcggcgcttgccgtgctgatgggcgaagaccggttgaccaatttgctgacgcaggcagtcgaggcggctcggctgcggtcgatcgagttgggaaagtaa

SEQ ID NO: 7603 - protein, 271 aa, Mesorhizobium loti MAFF303099
MTNRLVLAGCGNMGYAMLSGWLKSGKLAPSAVFVIEPNAELRQRAATLGCATSADAGEIPADAVPDLVVIAVKPQVIRDVTAAYKRFGDGRTTFVSIAAGTPVATFEDILGNRAPVVRCMPNTPASIGKGMMVVFSNPLVSDDTKRFVADLLSASGEVATIDDEGLMDAVTAVSGSGPAYIFHFIEALTVAAEKAGLPSATARLLAMQTVYGAASLAAESQEEPGVLRQQVTSPNGTTAAALAVLMGEDRLTNLLTQAVEAARLRSIELGK

SEQ ID NO: 7604 - DNA, 795 bp, Deinococcus radiodurans R1
  CDS (1)..(795): transl_table=11
atgcaacttgccatcgtcggtgtcggaaaactgggcctgtctctgctgaccggggtcatcgcccggggagtcatcgcgccgcaggacatcgggattatcgaggccaacgcggcgcgggcgcaggacatcgccgcgcagaccggcgtgcaggtcattacgccgccgcagctcgcgcaggtcgggcgcatcgtggtgagcgtgcagccgcgcgtctttcccgaggtcgcgccctggctggcgcaggaaaacgcgggctacatctccaccatggccggggtcagcgccggcaccatcgggcggcggctcggcacccggcgcgtggtacgggtgatgcccaacctcgccgccaccatcgggcgctcgcagaccgccatcaccgggccgcgtgaagcccacgaagcgggtgacatcgccttcgccgagcagctcttcggcgccgtcgggcaggtgtacgagttgcctgagcacctcttcaacgcctttaccggcatgagtgcgtcggggcctgcctacgtcgccgtcgtggccgaggcgctggcagacggcggcgtgcggatgggcttgccgcgtcccctcgccaatgaactcgccgcgcggctgctggcgtccactggcgagctgctgctggagcgggcgcatccggggctgctcaaagacgaggtggcgagtcccgggggcactacgattgccgggctagaggagttggaagcggcgggcgtgcgcggcggcgtgatgagggcggtggtggcggcgacgcggcgggggacggagctggggaaggaccaggaggattga

SEQ ID NO: 7605 - protein, 264 aa, Deinococcus radiodurans R1
MQLAIVGVGKLGLSLLTGVIARGVIAPQDIGIIEANAARAQDIAAQTGVQVITPPQLAQVGRIVVSVQPRVFPEVAPWLAQENAGYISTMAGVSAGTIGRRLGTRRVVRVMPNLAATIGRSQTAITGPREAHEAGDIAFAEQLFGAVGQVYELPEHLFNAFTGMSASGPAYVAVVAEALADGGVRMGLPRPLANELAARLLASTGELLLERAHPGLLKDEVASPGGTTIAGLEELEAAGVRGGVMRAVVAATRRGTELGKDQED

SEQ ID NO: 7606 - DNA, 834 bp, Sulfolobus solfataricus P2
  CDS (1)..(834): transl_table=11
ttgaaaattatggaagatttaactattggaatattaggagctggtaaaataggttctgcaatagtaagggcaataaggctaaagtatcctagcatccacgtaattgctactgcgagaaaagatgagactttaagaaatgtaaaagatctagaggtagagactactaaggataataattatgcagttaataaatcagatgtaattatcttaagcgttaagcctcagcattttcctactgttctaaggcaagttggcatagagtcatggagagataaggtagtaatttcaataatggcaggagttaagttatctacattatctaccctacttaataatgctgaggtttatagagccatgccaaacattaatgcaatagtatataagtctactactacaattgctgagaataacgggaaaagtagagaattagtggagaacatatttaagacactaggtaacgtatactggcttccagaagaatacttggatatttggactgcactagtaggcagtggtccagcttttatatctgaaattatagatgcgttaagtttaggtgcagttgcttgtggaatgcaaagagagatagcctacaatgcggttttggatatgataagtggaactataattatgcttaaggagggtaaaatagatcatcctatgctattacgtgatcaagtgactacgccagtcggtaccacaataaggggactcatggttatggaagctaagagcgttaagtcagcgttaattgagacaatagaggcatcatataagagggcagttgaaataggcaatgagattgacaagagtattaggaataatagcaaataa

SEQ ID NO: 7607 - protein, 277 aa, Sulfolobus solfataricus P2
MKIMEDLTIGILGAGKIGSAIVRAIRLKYPSIHVIATARKDETLRNVKDLEVETTKDNNYAVNKSDVIILSVKPQHFPTVLRQVGIESWRDKVVISIMAGVKLSTLSTLLNNAEVYRAMPNINAIVYKSTTTIAENNGKSRELVENIFKTLGNVYWLPEEYLDIWTALVGSGPAFISEIIDALSLGAVACGMQREIAYNAVLDMISGTIIMLKEGKIDHPMLLRDQVTTPVGTTIRGLMVMEAKSVKSALIETIEASYKRAVEIGNEIDKSIRNNSK

SEQ ID NO: 7608 - DNA, 813 bp, Clostridium acetobutylicum ATCC 824
  CDS (1)..(813): transl_table=11
atggatagcaaagttggatttattggctgcgggaatatggcacaggcaataataaagggaatggttaaggcaaaggtagtaccaaatgaaaatataattgtaagtaatccttctaatgaaaagctagagaagattagtaaagaatgcggagttttaactacaaatgacaacaagcaggttgcattaaaggcagatattattgtattatctgttaaacctaataaatacgaaaaggttataagtgaaatcaaggatttagtacaacaaagtgttataatagttgcaatagcagcgggggtttcaatagagaaaacaagaattatgtttaaaaatagcaatataagagtagtaagggctatgccaaatactccagcgcttgtaggagaggctatgacagctatatcaccatgtgaggaaatagacaaaggtgaactaaaaaatgtaacggagatatttgagtcatttggaaaatgtgaagttgtagatgaagctttaatgaatgcagtaacaggggtaagtggttcatcacctgcttatgtgtatatgtttgtagaagctatggcagatgctgctgttttgaacggaatgactagggaaaaagcatataagtttgcagctcaatcagtacttggagcagctaaaatgattcttgaaacaggagaacatcctggtaaacttaaggatgatgtatgttcaccttctggaactaccattgaagcagtatacgcacttgaaaaaagtggatttagagcttcggtaattgcagcagttgatgcatgcataaaaaaatcaaagctaatgtcatcaaaatag

SEQ ID NO: 7609 - protein, 270 aa, Clostridium acetobutylicum ATCC 824
MDSKVGFIGCGNMAQAIIKGMVKAKVVPNENIIVSNPSNEKLEKISKECGVLTTNDNKQVALKADIIVLSVKPNKYEKVISEIKDLVQQSVIIVAIAAGVSIEKTRIMFKNSNIRVVRAMPNTPALVGEAMTAISPCEEIDKGELKNVTEIFESFGKCEVVDEALMNAVTGVSGSSPAYVYMFVEAMADAAVLNGMTREKAYKFAAQSVLGAAKMILETGEHPGKLKDDVCSPSGTTIEAVYALEKSGFRASVIAAVDACIKKSKLMSSK

SEQ ID NO: 7610 - DNA, 819 bp, Agrobacterium tumefaciens str. C58
  CDS (1)..(819): transl_table=11
atggtgtacaaggcttccggtccgctcgtcctcgtgggggccggcaatatgggcggcgccatgctttcgggctggctgaaaaagggtgtgccgggatcgaaggtcatcgtcatcgaccctcgcccctccgacgccatgcgcacgacgatagcggaagccggcgcgacccacagcgaaagcgtgcctgagggcgtcaaggccggcattcttttcgtggcggtgaagccgcagatgatggatgccatattgccgtcgctgaagcccctgctgggtccggaaacggtcgttgtctccatcgcggccggtaccaccatcgccactttcgtttcgcatttcggtgcggtcgctgccgtgcgcgccatgcccaatacgcctgccatggtcggccgtggcgtcaccggcgcttatgccaacgatcttgtcacagccgagctgaaaaccgttgtggacgggttgctgaaggtcagcggtccggtcgaatgggttgaggccgaaagcgacatcgacgcggtgaccgcggtttcgggaagcggcccggcctatgtcttctatctggtggaatgcatggcggaagctggccgcaaggccggtctgccggccgacgtggccatgcgtctggcgcgcgaaaccgtggccggtgccggtgaactcctgcatcagtcccccgaggaggccgcgcggctgcgccagaacgtgacctcgccgggtggcaccacggccgcggcgctgtccgtgctgatggccgaagacggcatgcagcccctgttcgacagggccgtcgccgccgcgaaaacgcgcgccgaagaactggcgggctga

SEQ ID NO: 7611 - protein, 272 aa, Agrobacterium tumefaciens str. C58
MVYKASGPLVLVGAGNMGGAMLSGWLKKGVPGSKVIVIDPRPSDAMRTTIAEAGATHSESVPEGVKAGILFVAVKPQMMDAILPSLKPLLGPETVVVSIAAGTTIATFVSHFGAVAAVRAMPNTPAMVGRGVTGAYANDLVTAELKTVVDGLLKVSGPVEWVEAESDIDAVTAVSGSGPAYVFYLVECMAEAGRKAGLPADVAMRLARETVAGAGELLHQSPEEAARLRQNVTSPGGTTAAALSVLMAEDGMQPLFDRAVAAAKTRAEELAG

SEQ ID NO: 7612 - DNA, 810 bp, Salmonella typhimurium LT2
  CDS (1)..(810): transl_table=11
atggagaagaaaatcggttttattggctgcggtaatatgggcaaggctattcttggcggactgattgccagcggtcaggtacttcccggccagatctgggtctataccccctcccccgataaagtcgccgccctgcatgatcagtacggcattaatgcggcgcaaagcgcgcaggaggtcgctcaggtcgcggatatcgttttcggcgcggtaaaaccgggcattatggtgaaagtgctcagtgaaatctcctccagcctgaacaaagactcgctggtggtctctatcgccgcaggcgtaacgcttgatcagcttgcgcgcgcgctgggacacgaccgtaaaatcattcgcgctatgccgaatacgccgtcgctggtcaacgcaggaatgacctccgtcacgcccaacgcgctggtcacaccggaagatacggctgatgtgctgaatattttccgctgctttggcggggcggaagtgattgctgagccgatgatccatccggtggttggcgtgagcggatcttcgccggcctatgtctttatgtttatcgaggcgatggcggacgctgccgttctgggcggtatgcctcgcgctcaggcttataaattcgccgcgcaggccgtcatggggtcggcgaaaatggtactcgaaaccggaaagcatcccggcgaactgaaagatatggtgtgctcgcctggcggaacgacgattgaagccgtacgcgttctggaagaacgtggcttccgcgctgcggtaatagaagcgatgacgaagtgtatggaaaaatcagaggcgctcagtaaatcctga

SEQ ID NO: 7613 - protein, 269 aa, Salmonella typhimurium LT2
MEKKIGFIGCGNMGKAILGGLIASGQVLPGQIWVYTPSPDKVAALHDQYGINAAQSAQEVAQVADIVFGAVKPGIMVKVLSEISSSLNKDSLVVSIAAGVTLDQLARALGHDRKIIRAMPNTPSLVNAGMTSVTPNALVTPEDTADVLNIFRCFGGAEVIAEPMIHPVVGVSGSSPAYVFMFIEAMADAAVLGGMPRAQAYKFAAQAVMGSAKMVLETGKHPGELKDMVCSPGGTTIEAVRVLEERGFRAAVIEAMTKCMEKSEALSKS

SEQ ID NO: 7614 - DNA, 801 bp, Listeria innocua Clip11262
  CDS (1)..(801): transl_table=11
atgaaaaaaatcggttttataggcgcgggaaatatgggtgcagcaatgattcgtggtttagcaaaagctaacttggggaaagaagaagacattcttgtgtgtggtagagatatggaaaaattaaaaccacttaaaacggaatttaacggaattcaattaacaacggatatcgctcaacttgcagaacaagcagatattatcattttatccgttaagccttatactattcctgagattttaacagcagtaaaagataagataacacctgaaaaaatcgttatttctgtagcagcaggggtcacaattaaagacttagaagaattaacgtcaacagagactaaaattgttcgcgttatgccaaataccccggcgcttgtcggcgaagcaatgtcatccatttcgcctaatagcaatgtaactgcggaagaaacagcgcatatttctactattttttctagttttggaaaagccgaagttgttgctgagaacttgatggatgccgtagtgggcgtcagtggttcgtccccagcatatgtgtatatgtttatcgaggcgcttgctgatggagctgttttgaagggtatgccgcgagataaagcttataaattcgcagctcaagccgttcttggtgccgcaaaaatggtattagaaactggcgaacatcctggaaaactaaaagacatggtcacctctcctggtggaacaacaatcgaagcagtcaagtcactggaagatacaggtttccgttcctctgtcattagtgccgttcaagccgctgctaacaaaaacagttccatgtag

SEQ ID NO: 7615 - protein, 266 aa, Listeria innocua Clip11262
MKKIGFIGAGNMGAAMIRGLAKANLGKEEDILVCGRDMEKLKPLKTEFNGIQLTTDIAQLAEQADIIILSVKPYTIPEILTAVKDKITPEKIVISVAAGVTIKDLEELTSTETKIVRVMPNTPALVGEAMSSISPNSNVTAEETAHISTIFSSFGKAEVVAENLMDAVVGVSGSSPAYVYMFIEALADGAVLKGMPRDKAYKFAAQAVLGAAKMVLETGEHPGKLKDMVTSPGGTTIEAVKSLEDTGFRSSVISAVQAAANKNSSM

SEQ ID NO: 7616 - DNA, 813 bp, Nostoc sp. PCC 7120
  CDS (1)..(813): transl_table=11
atgactataaaatttggtttaattggtggcggggtaatgggagaagcgctcttatcccgccttattgcgcggggaatttatcaaccatcagaagtcatagtcagcgaaccgcaaacagcgcgacaagcttttttacaacaaaaatatcatgtgggtgtgaccacagataacagtttggtattcacacaagctcaagacgttgtattcttggcggtgaaaccacaagtgtttagtgcgatcgctcaagaattagcagatacagtattcacagaccattccccccttgtcgtctccattcttgcaggggtgtctctaagccagctagaagcggcgtttccccaatcaccagtcattagagccatgcccaataccccagccactgtaggctcagggatgaccgctatctgctctggtgcctacacttatgcccaacaccaaaaattggcgcaacaaattttttccgcagtaggggaagtagtcgaagtttccgaaagtttgatggatgcagtcaccgggctttctggcagtggcccggcttacgtagctttattggtagaagccctcgctgatgggggagtggcatcgggtttacccagaggaatagccaatcaactagcattacaaactgtgctaggaacagcccaactattacacgaaagtaaactccacccagccgaactcaaagaccgagttactagccctggcggtactaccatcgcggggattgcccaactagaaaaagcgggattccgttcagccttaatcgaagccgtcaaagcagctacatggcgatcgcaagaactaggaaaatag

SEQ ID NO: 7617 - protein, 270 aa, Nostoc sp. PCC 7120
MTIKFGLIGGGVMGEALLSRLIARGIYQPSEVIVSEPQTARQAFLQQKYHVGVTTDNSLVFTQAQDVVFLAVKPQVFSAIAQELADTVFTDHSPLVVSILAGVSLSQLEAAFPQSPVIRAMPNTPATVGSGMTAICSGAYTYAQHQKLAQQIFSAVGEVVEVSESLMDAVTGLSGSGPAYVALLVEALADGGVASGLPRGIANQLALQTVLGTAQLLHESKLHPAELKDRVTSPGGTTIAGIAQLEKAGFRSALIEAVKAATWRSQELGK

SEQ ID NO: 7618 - DNA, 843 bp, Drosophila melanogaster
  CDS (1)..(843)
atggccaagttggacgaaaagatcggcttcatcgggggcggaaacatggcctacgccataggatccggactggtgcgctgtgggatcgtgaaggctagccaggtgcaggtctccggtccccacattgagaacctgcaacggtggcgggatctgggagctgtgacctgcgacgacaactgcatggtcctggagcactcggacatagttttcatctgcgtaaagccacacatgctaacgccgtgtgccgcccagcttaaatacaagcacgtgccgtcggccaaggatgccagcaagctggtggtgtcggttctggcgggtaccagtctcgaaacgctggaggaggccttcagcttcatgggcagttcggagctgaaggtgatacgcaccatgcccaatacatccatgcaggtgggcgagggctgcactgtttacactggcaacgcacgcgtttcgcatcacgacttggaaaagattcacctaatgctcaacgccctgggactggcgcaacaggtgcccgagtccatgatcgacgccgttaccggggtagctggatgcggtccggcatttgtttacaccatcatagaggcactggccgatggcggcgtcaaacagggcgttccgcgtcagatggctcttcagtttgcggctcagacgcttctgggagcggccaaaacggtgctgctcactggaaaacatccggcggtgctgcgggatgaagtctgttctcccggtggcgccaccatagtaggcgttcatgaactggaaaaggggaacctcaggtctactttaataaacgccgtggaaaagtcgtcacagcgctctgctgaactgggaaagaagtga

SEQ ID NO: 7619 - protein, 280 aa, Drosophila melanogaster
MAKLDEKIGFIGGGNMAYAIGSGLVRCGIVKASQVQVSGPHIENLQRWRDLGAVTCDDNCMVLEHSDIVFICVKPHMLTPCAAQLKYKHVPSAKDASKLVVSVLAGTSLETLEEAFSFMGSSELKVIRTMPNTSMQVGEGCTVYTGNARVSHHDLEKIHLMLNALGLAQQVPESMIDAVTGVAGCGPAFVYTIIEALADGGVKQGVPRQMALQFAAQTLLGAAKTVLLTGKHPAVLRDEVCSPGGATIVGVHELEKGNLRSTLINAVEKSSQRSAELGKK

SEQ ID NO: 7620 - DNA, 801 bp, Clostridium perfringens str. 13
  CDS (1)..(801): transl_table=11
atgaataaaaaaattggattcataggctgtggtaacatgggaagtgctatggttttaggaatattaaagtcaggtattgtatgcaaagaaaatattattgcatcatgttcaagagaatcaagtgcagaaagaataaaaaatgaattaggaataaacacaactcttgataacaaagaagtttgtaataacagtgacataatatttcttgcggtaaagccatatatgtatgaaaaagttataaaagaaataagagattgtgtagacttaaataagactattgttactatagcagcaggaattaatttaagtgatgttgaaaaatggtttaagaaagaaacaaaaatagttaagactatgccaaatactccagctttaataggagaagcaatgagcgctatttgtcctaatgaattagtaaatgaagaagaattaaaagaagttatggatatatttaatgcttttggaaaatcagaagtgttaagtgagaaagatttccatggatttatagcactttgtgggtcatcaccagcttatgtttatatgtttatagaagctatggcagatgctgctgttagagagggaataagtagagataaggcttataaattagctgctcaatcagtattaggatcagctaagatggttttagaaactggagagcatccagctaagttaaaagacaatgtttgctcaccgggaggaacaactattgaagctgttttagagttagaagagactggatttagaagctctgtaatgagtgccatgaaaaaatgttcaaaaaaatctaaaaaaatgtaa

SEQ ID NO: 7621 - protein, 266 aa, Clostridium perfringens str. 13
MNKKIGFIGCGNMGSAMVLGILKSGIVCKENIIASCSRESSAERIKNELGINTTLDNKEVCNNSDIIFLAVKPYMYEKVIKEIRDCVDLNKTIVTIAAGINLSDVEKWFKKETKIVKTMPNTPALIGEAMSAICPNELVNEEELKEVMDIFNAFGKSEVLSEKDFHGFIALCGSSPAYVYMFIEAMADAAVREGISRDKAYKLAAQSVLGSAKMVLETGEHPAKLKDNVCSPGGTTIEAVLELEETGFRSSVMSAMKKCSKKSKKM

SEQ ID NO: 7622 - DNA, 786 bp, Pyrococcus furiosus DSM 3638
  CDS (1)..(786): transl_table=11
atgaaggttgctgtaattggagcgggaacaattgggagtgctgttgcaaaggccttggctgaaagtaattacgaagtcattgctacaaggagaagcattgaaaaggttaaatggttggagaaatatggggtaaaacttgaaaaagacaacaaaaaagccagtagggaagcggatatcgtgattatcgcagtaaagccaaataaagtaggaaaggttcttgaagaaataaaggaagaagttgaaagtaaaattgtgatatctttagcggcgggaattccaataaagcttcttaagaggtttgcaaatgcaaaatttgtgagggctatgccaaatatagctgttctcgtaaaagagtcctttacagcctatgcaacggaagatttaagcgaagaggaaattagaactgttgaaaaaatctttgagtcctttgggaagtatataagaatcgacgaagaatatatggatgccataactggattaagtggctctggaccagcttatgtctctgtgtttttagaagccatgatatatggcggtttacgggttggactcccaagagatattgcaaaacttgcggccgctcaaaccctcttaggcactgcgaagctcttactaaattttgagggacaccctgctgaaattagagatatggtaattacccccggaggaacaacgatagatgggatatttgagttggaggaaggaaaaattagaacaacaataatgaaagccattgatgcagcaactaaaaaatcaaagatcttatccacaaggttatctccttaa

SEQ ID NO: 7623 - protein, 261 aa, Pyrococcus furiosus DSM 3638
MKVAVIGAGTIGSAVAKALAESNYEVIATRRSIEKVKWLEKYGVKLEKDNKKASREADIVIIAVKPNKVGKVLEEIKEEVESKIVISLAAGIPIKLLKRFANAKFVRAMPNIAVLVKESFTAYATEDLSEEEIRTVEKIFESFGKYIRIDEEYMDAITGLSGSGPAYVSVFLEAMIYGGLRVGLPRDIAKLAAAQTLLGTAKLLLNFEGHPAEIRDMVITPGGTTIDGIFELEEGKIRTTIMKAIDAATKKSKILSTRLSP

SEQ ID NO: 7624 - DNA, 795 bp, Thermoanaerobacter tengcongensis MB4
  CDS (1)..(795): transl_table=11
atgaaaattggctttataggtgccgggaacatgggcatggcccttataaagggtattttgaagtcagactttgtggaagcagaagacttgatactttatgaccctgtaagagaaaaagtagaaggattggaaagagagtttgggacagttactgctaaagacaatctagaattaactgaaaaatcggatgtagtaatagtagcggtaaagccaaatgtttacgatgaagtgctcaaggaaattagagaaaaagtgacagaggaaaaaataataatcacgatagctccagggattactatagaccatgtaaaaaagcttttgggcagggggaaaatagttaggacaatccctaatactcctgcgttaataggagaaggcataacggccgttacatattccgaagaagtaaaagaagaagacaaagaacttgtgcgaaagatttttagcacttgtggagaaatagtggagatagaagaaaagttaatagatgtggcaatggccgtgtcaagttgcagcccagccttcgtatacatgtttatagaagccttagcagacggaggagtcctgctgggattgccaagagatgtagcttataaactggcttctaaagcggtatctggagcgggaagcatggtatttaagacaggctttcatccaggacagttaaaagacatggtcacttctccggggggaactactatagaaggcataagagttttggaaaaaagcggtatgagaagtgcggtgattgaagctgtgattgcagcttatcagaaggcaaaagggctgaaataa

SEQ ID NO: 7625 - protein, 264 aa, Thermoanaerobacter tengcongensis MB4
MKIGFIGAGNMGMALIKGILKSDFVEAEDLILYDPVREKVEGLEREFGTVTAKDNLELTEKSDVVIVAVKPNVYDEVLKEIREKVTEEKIIITIAPGITIDHVKKLLGRGKIVRTIPNTPALIGEGITAVTYSEEVKEEDKELVRKIFSTCGEIVEIEEKLIDVAMAVSSCSPAFVYMFIEALADGGVLLGLPRDVAYKLASKAVSGAGSMVFKTGFHPGQLKDMVTSPGGTTIEGIRVLEKSGMRSAVIEAVIAAYQKAKGLK

SEQ ID NO: 7626 - DNA, 855 bp, Streptomyces coelicolor A3(2)
  CDS (1)..(855): transl_table=11
atgaccccggaccacgcgcacaccccggagggcaccgaacccatgacccagaaagtcgcagtcctcggcaccggcaagatcggcgaagccctgctcagcggcatgatcggagccggctgggcccccgccgacctcctggtcaccgcccgccgccgggaacgggccgacgaactccgcgcccgccacggagtcacccccgtcaccaacgccgaggccgccaaggccgccgacaccctgatcctcacggtcaagccccaggacatgggcaccctcctcgacgaactcgccccgcacgtcccggccgaccgcctggtcatcagcggcgcggcgggcgtgcccacctccttcttcgaggagcgcctcgcgcccggcaccccggtcgtccgcgtcatgacgaacaccccggctctcgtcgacgaggccatgtccgtcatctcggccggcacccacgcgaccgcggcccacctgacccacaccgaggagatcttcggcgccgtcggcaagaccctccgcgtccccgagtcccagcaggacgcctgcaccgccctctccgggtcgggaccggcgtacttcttctacctggtcgaggccatgaccgacgccggcatcctcctcggtctgccccgcgacaaggcccacgacctgatcgtgcagtcggcgatcggcgcggcgaagatgctccgcgacagcggcgaacacccggtcaagctgcgcgagaacgtcacgtcccccgccggcaccaccatcaacgccatccgcgaactggagaaccacggcgtccgcgccgccctcatcgccgccctggaagccgcccgcgaccgcagccgcgaactggccaccggcaccaaggactga

SEQ ID NO: 7627 - protein, 284 aa, Streptomyces coelicolor A3(2)
MTPDHAHTPEGTEPMTQKVAVLGTGKIGEALLSGMIGAGWAPADLLVTARRRERADELRARHGVTPVTNAEAAKAADTLILTVKPQDMGTLLDELAPHVPADRLVISGAAGVPTSFFEERLAPGTPVVRVMTNTPALVDEAMSVISAGTHATAAHLTHTEEIFGAVGKTLRVPESQQDACTALSGSGPAYFFYLVEAMTDAGILLGLPRDKAHDLIVQSAIGAAKMLRDSGEHPVKLRENVTSPAGTTINAIRELENHGVRAALIAALEAARDRSRELATGTKD

SEQ ID NO: 7628 - DNA, 813 bp, Methanosarcina mazei Go1
  CDS (1)..(813): transl_table=11
atgataaatcgaaaaataggattcattggggcagggaaaatgggttctgctctcatgcagggcataattaaagccggaatcgtgcagcctgaaaatatcggtgcaagcgatgtatacgagccttttttaaaagagcttcagacaaagctggggatcagggtatcaaccgataataccgttattgtccgggagtcggatatcctcattcttgcagtaaagccccagacgcttggttctgtacttgaaaacctgaaaaatgaaattacttccgaaaaactcgtaatatcaattgctgcaggagtgcctctttcaacttacgagggcgctcttcttgaaggcaccagggttgtccgtgtcatgcccaatatagcagcaacagtttcggaggctgcttcgggaatttcccccgggaagaacgcgacccctgaggatatgaaagatgctcttactatcttttctgcggttggtactgcagttcaggttcctgaatccctgatggacgcagttacaggtctttccggcagtgggcctgctttcattttccctgtcatagaggctatggctgacggggctgtactggaaggcatggacaggaaaagcgctcttaccctcgcagcccagaccgtgctcggagccgcaaaaatggcacttgaaacaggcatgcaccccggagaactcaaagatatggttacatctcctgccggtaccactattcagggagttcatgctctcgaggaagcaggaatcagggcagcttttatgaatgcagttataagagcaagcgaacgctcaagagaactcgggaagaagtaa

SEQ ID NO: 7629 - protein, 270 aa, Methanosarcina mazei Go1
MINRKIGFIGAGKMGSALMQGIIKAGIVQPENIGASDVYEPFLKELQTKLGIRVSTDNTVIVRESDILILAVKPQTLGSVLENLKNEITSEKLVISIAAGVPLSTYEGALLEGTRVVRVMPNIAATVSEAASGISPGKNATPEDMKDALTIFSAVGTAVQVPESLMDAVTGLSGSGPAFIFPVIEAMADGAVLEGMDRKSALTLAAQTVLGAAKMALETGMHPGELKDMVTSPAGTTIQGVHALEEAGIRAAFMNAVIRASERSRELGKK

SEQ ID NO: 7630 - DNA, 855 bp, Xanthomonas axonopodis pv. citri str. 306
  CDS (1)..(855): transl_table=11
atgaacacaccggcttcgtcctcgccctcgtcttccgctacgacgtccatcgccttcgtcggcggcggcaacatggcgcgtagcttgatcgccgggctgatccggcagggtacgccggctgccagcatccgcgtagccgagccggtggccgatctgcgcgcagccttggcgcgcgacttcggcgtgcaggtggtcgaggatgcgcgcgccgctgtcgacgcgacgacgacctgggtcttggcggtcaagcctcaggtcctgccaatggtgtgcgcgcaactggccgatctcgcgcaggcccaacaaccgctactggtttccatcgctgccggcatcaccgccacgcagctgcagcgctggtctggcggagatatcgccgtggttcgtgccatgcccaacacacccgccctgctcggcgccggtgtcaccgggctgtacgccaacgcgcgcgtgtccgcagcgcaacgccaacaggcgacccagctactggacagcgccggcgtcaccgtctggatcgacgacgaagcgcagatggatgcggtgaccgccgtctccggcagcggaccggcctatgtctttctcttggccgaagcgatggaagctgccgcgcaagcgcagggcctgcccgccgcagccgcgcgtacgttggtgctgcaaacgctgctcggcgccgcacgcatgctcaccgaatcgggcgaagcaccggaggtcctgcgtcgccgcgtgacctcgcccaacggcacgacccatgccgccatcgagacgttccaggccggcggctttgaggccctcaccgcccaggccattgccgcagcgaccgaacgcggccgcagtttatcggccgccaacgactga

SEQ ID NO: 7631 - protein, 284 aa, Xanthomonas axonopodis pv. citri str. 306
MNTPASSSPSSSATTSIAFVGGGNMARSLIAGLIRQGTPAASIRVAEPVADLRAALARDFGVQVVEDARAAVDATTTWVLAVKPQVLPMVCAQLADLAQAQQPLLVSIAAGITATQLQRWSGGDIAVVRAMPNTPALLGAGVTGLYANARVSAAQRQQATQLLDSAGVTVWIDDEAQMDAVTAVSGSGPAYVFLLAEAMEAAAQAQGLPAAAARTLVLQTLLGAARMLTESGEAPEVLRRRVTSPNGTTHAAIETFQAGGFEALTAQAIAAATERGRSLSAAND

SEQ ID NO: 7632 - DNA, 822 bp, Drosophila melanogaster
  CDS (1)..(822)
atgtcggcaatcggaaagatcggattcctgggaggcgggaatatggccaaggctttggctaagggtttcctagcggccggcctggccaaacccaataccctgatagccagcgtccatccggcagataagctctccctgcagtcctttcaatccctgggagtggaaacagtgatcaagaatgcacccgttgtgcagcaatcggatgtggtcttcgtgtccgtgaaaccccaagtggttccctcggttttgtcggagattcagccattgagctcgggcaaactattcctttccgtggccatgggcatcactttgtccaccatcgagtccagtttatctccacaagctcgcgtcatccgtgtgatgcccaatctgccggctgtcgtgtgttccggttgttcggttttcgttcgcggatccaaggccacagatgcagatgcggatattacccagaagctgctgcagtccgtgggcacttgtgagccggtggatgagtcccagttggatgtggttactgctctgagcggaagtggaccggcctatgtattcgtgatgattgaggccttggcggatggagccgttcacatgggcatgcccagggatctggcctatcgtttggcatcgcaaacagtcctgggcgcaggtcacatggtgcgggacagtggtatgcatcccggacaactcaaggatggggtcacaagtccggcgggatcgacagcagcggcactcagacaactcgagctgtcaggttttcgggctgcggtgtctggagcggtggaacaggcgactctgcgatgccggcaaatctcgggaaagacgaagtag

SEQ ID NO: 7633 - protein, 273 aa, Drosophila melanogaster
MSAIGKIGFLGGGNMAKALAKGFLAAGLAKPNTLIASVHPADKLSLQSFQSLGVETVIKNAPVVQQSDVVFVSVKPQVVPSVLSEIQPLSSGKLFLSVAMGITLSTIESSLSPQARVIRVMPNLPAVVCSGCSVFVRGSKATDADADITQKLLQSVGTCEPVDESQLDVVTALSGSGPAYVFVMIEALADGAVHMGMPRDLAYRLASQTVLGAGHMVRDSGMHPGQLKDGVTSPAGSTAAALRQLELSGFRAAVSGAVEQATLRCRQISGKTK

SEQ ID NO: 7634 - DNA, 801 bp, Chlorobium tepidum TLS
  CDS (1)..(801): transl_table=11
atggcacgactttccatagggtttatcggcaccggacgcattgcccaggcgcttatttccggactttcacacgacccgaacatcgtcatctgcggctacgacaagatgcctgatgcactgcactcggtatccctgcaatacggcgtcaataccgaggagtcaatcgaaagcctcgcgcgcgacgcggagatcatcgtcattgccgtcaagccgtaccagatggccgaagtgctcgcagagctgaaacccgcactccacgggcagcatctcattgtcagcgtggcggcaggaatctcgacaggcttcattgaatcgaactgccctgagggcacgagggtggtgcgagtgatgccgaataccccggcgtttgtgggtgaggggatgaccgccttgtgcaaagggatgcacgccacagcggacgaccttctggttgccgaacggattttcaacgcgattggcaagacggccatcatcgaggagagcggcatggatgccgcgacggcagtgtcgggcagcggaccggcctacatgttcaggatcatcgactcccttgccgaaggtggagaggcgtgcggcctcgaccgcgaaaccgcgcaactgctcgctgcccagacgatgctcggcgcggcgaaaatggtgctctcgggccacaaaagccccgaagagctggtgcgcgaagtgacgactcccggaggtaccaccgaagccgggctgaaagcgatggacgagcgcgacctgcgtggagcgctcatcgacacggtcagggccgccgccgcccgttcgaaagagctgatgaagtag

SEQ ID NO: 7635 - protein, 266 aa, Chlorobium tepidum TLS
MARLSIGFIGTGRIAQALISGLSHDPNIVICGYDKMPDALHSVSLQYGVNTEESIESLARDAEIIVIAVKPYQMAEVLAELKPALHGQHLIVSVAAGISTGFIESNCPEGTRVVRVMPNTPAFVGEGMTALCKGMHATADDLLVAERIFNAIGKTAIIEESGMDAATAVSGSGPAYMFRIIDSLAEGGEACGLDRETAQLLAAQTMLGAAKMVLSGHKSPEELVREVTTPGGTTEAGLKAMDERDLRGALIDTVRAAAARSKELMK

SEQ ID NO: 7636 - DNA, 822 bp, Thermosynechococcus elongatus BP-1
  CDS (1)..(822): transl_table=11
atgcccaacaacaccatagtgcctagggtgcctgctcttgggatcattggctgtggccgcatggcggaggcaatgcttgcgcggctgcttgcaaagggtctattgccagaccatgtgtgggtatcggcgcgatcgccccagcggcaacagtacttagcccacacctacggggttagagtcacaactaaccttgaagtagccaccgccgaaacgctcctactggcggtcaagccccaggtcttggccgatattgagtcggaactcgcggatacgccggtagctcaggagatgggggttgtcctttctatcatggccgggatccacagtgggcggctgcggcggctttttccccagcggttgatctttcgggcgatgccgaatacaccagcacaggtgggtgctggcgtcattgcccttgccagtgacagtgcagccagtgaactggagattcaaaagattaagaatttgttgggggtgctggggcaggtggtggctgtcagtgaagggcaaatggatgcggtcacggcgctgtctggctctggccctgcctttgttgctctcattgtcgaggctctctgtgatgcgggggtggcagtgggcctatcgcgatcgctgacacaggaactcgtttatggcacaatagcaggcacagtacaattactgaaggagcgtgggctgcatccggcgcaactcaaggatgcggttgccagtcctgcagggacaaccattgcgggtctcgaagtcctggaagctgccggtatgcgtggaaccctcatgcaaacagtaaaagcggcctacgagcgttcccaagccctcaactaa

SEQ ID NO: 7637 - protein, 273 aa, Thermosynechococcus elongatus BP-1
MPNNTIVPRVPALGIIGCGRMAEAMLARLLAKGLLPDHVWVSARSPQRQQYLAHTYGVRVTTNLEVATAETLLLAVKPQVLADIESELADTPVAQEMGVVLSIMAGIHSGRLRRLFPQRLIFRAMPNTPAQVGAGVIALASDSAASELEIQKIKNLLGVLGQVVAVSEGQMDAVTALSGSGPAFVALIVEALCDAGVAVGLSRSLTQELVYGTIAGTVQLLKERGLHPAQLKDAVASPAGTTIAGLEVLEAAGMRGTLMQTVKAAYERSQALN

SEQ ID NO: 7638 - DNA, 813 bp, Oceanobacillus iheyensis HTE831
  CDS (1)..(813): transl_table=11
atgaatcaaacgattgcatttatgggagcaggttcgcttgcagaagcgattatttctggaattacgaaagctcaaattgtcccaaatgaaaatatactcgtaaccaataaaagtgatataaaccgattaaaacgaatagaagaaggctatgacattcaaggaaatacgaataaacaagaagtcattaaacaagcagatattatcattttggcgatgaaaccaaaagacgctgcaacctcattatcttttatgaaagaatacattcgtcctgatcaaatggtgatttctgtaattgcaggacttacaacggaaagaatggaagcgattttagaaaaagagataccagtgattcgaaccatgcccaatacctctgcgttaattggatattcagctaccgccattgcaaaaggatcctatgttactgatgagcaattagcagttgcagaacaattatttcaaactgttggtatgactacaattattaaagaaaaagatatgcatacggttacggctatcgctggcagtgggccggcattcttttactatatggtcgaagcgatggaacaagcagctgtagaagcaggtttggatgcagaaatggcatctcaattaatagctcaaaccgttatcggtgcaggaaaaatgttagaattatctggagacccaataacacttcgaaaaaatattacaagtcctggtggaacaaccgaagccggtgtccagcaattaatgagtgaagattttgcatcaattgtccagtcttgtgttcagagggcacgagaacgttccatggaacttgctgccaagtcatga

SEQ ID NO: 7639 - protein, 270 aa, Oceanobacillus iheyensis HTE831
MNQTIAFMGAGSLAEAIISGITKAQIVPNENILVTNKSDINRLKRIEEGYDIQGNTNKQEVIKQADIIILAMKPKDAATSLSFMKEYIRPDQMVISVIAGLTTERMEAILEKEIPVIRTMPNTSALIGYSATAIAKGSYVTDEQLAVAEQLFQTVGMTTIIKEKDMHTVTAIAGSGPAFFYYMVEAMEQAAVEAGLDAEMASQLIAQTVIGAGKMLELSGDPITLRKNITSPGGTTEAGVQQLMSEDFASIVQSCVQRARERSMELAAKS

SEQ ID NO: 7640 - DNA, 822 bp, Leptospira interrogans serovar Lai str. 56601
  CDS (1)..(822): transl_table=11
gtgattttgttaggattggaagtgcgatttttggagaaagaaattgatatgaaatatacgataggaattgcgggttgtggaaatatgggaggagcaatttatttctctcttaaagaacgttatccgacacaagtattgggatatgatccttatataatttccaatcaaaagatagaacttatatcttcctgggatgaatttgtttctaagtccgatttaatactcgtttgtgtaaaacctggaaaggtgattgaacttttaagacaaatcaaagttcctaaaaaaattatatccgttgccgctggaattcatatcgatacaattctaaaaaatcttccgacgggatccaatgtagtgagggtaatgcctaatttacctttactagtttcagaaggggcgatcggatttttcggagacgaagagttatacgaaaccgtttccgagatctttcagcctttaggacattctgtaaaactcggtagtgagactctcatggacgcggttactggactttccggatcgggcccggcctatgtttttaaatttatacaagctttagcagaaggtggcgttctttccggcttggggtatcaagaagcgttggatctcagcatacaaacagtgatcggttctgcacagcttcttagaaaagaaagagagaaagatccgacaactcatccagaagtgtggaaaaataaagtaacttctccaggaggaactacgatagctgggcttgtggaattggaaaaaaatggatttagcaatgcggttttagaggcggtaaaagctgcagcaaatcgttctaaagagttgggagtttaa

SEQ ID NO: 7641 - protein, 273 aa, Leptospira interrogans serovar Lai str. 56601
MILLGLEVRFLEKEIDMKYTIGIAGCGNMGGAIYFSLKERYPTQVLGYDPYIISNQKIELISSWDEFVSKSDLILVCVKPGKVIELLRQIKVPKKIISVAAGIHIDTILKNLPTGSNVVRVMPNLPLLVSEGAIGFFGDEELYETVSEIFQPLGHSVKLGSETLMDAVTGLSGSGPAYVFKFIQALAEGGVLSGLGYQEALDLSIQTVIGSAQLLRKEREKDPTTHPEVWKNKVTSPGGTTIAGLVELEKNGFSNAVLEAVKAAANRSKELGV

SEQ ID NO: 7642 - DNA, 819 bp, Shewanella oneidensis MR-1
  CDS (1)..(819): transl_table=11
atgagtcaacaaaaaatctgctttatcggtgcgggcaatatgacccgcagcatcattagcggcttaattcgtagcggttatcctgcatcacaggttcaggcgaccaacccaagccaaggtaaactcgatgccctcgccaccgattttggtgtacgtgtttcccaagacaatgtaagcgccgcacaggatgctgatgtgatcatattgtctgttaaacctcagttgatggagcaagtgtgtcaagcgctgcaaggcattgatatgtcaaataagcttctgataaccattgcagcgggcatcaaagcaagccgctacagcgagtatctggctcaacccattacacttatccgcactatgccaaacaccccaatgcaaatcggtgtaggtatgacgggactctatgcaccgcaatccctatctgatgcacaaaaagccattgccgaacgcttaatgtccagcggcggagaaatagtgtgggtaaatgaagaatctgacattaatcaagtgattgcccttgctggtagttcgcctgcttattttttcctactgatggaatcgatgattgatgcgggcaaacaaatgggcatggatgaagccaaagccagaagcttagtgcagcaagccgcccttggtgctgctatgatggctaaacaaaatcctgagctcacgctgggtaacttacgggaaaatgtcacctctaagggcggcacaacggcgcaagctatcgccacgttcgaagcggcagatctccgtggcgtcgtaaaaaaagccatggaaaactgcattaaccgtgcagaagaaatggcaaaaacgttttaa

SEQ ID NO: 7643 - protein, 272 aa, Shewanella oneidensis MR-1
MSQQKICFIGAGNMTRSIISGLIRSGYPASQVQATNPSQGKLDALATDFGVRVSQDNVSAAQDADVIILSVKPQLMEQVCQALQGIDMSNKLLITIAAGIKASRYSEYLAQPITLIRTMPNTPMQIGVGMTGLYAPQSLSDAQKAIAERLMSSGGEIVWVNEESDINQVIALAGSSPAYFFLLMESMIDAGKQMGMDEAKARSLVQQAALGAAMMAKQNPELTLGNLRENVTSKGGTTAQAIATFEAADLRGVVKKAMENCINRAEEMAKTF

SEQ ID NO: 7644 - DNA, 822 bp, Corynebacterium efficiens YS-314
  CDS (1)..(822): transl_table=11
gtggagggcatgacaattattgctgtgatcggtggcggtcagatcggtgaggcgctcgtctcgggtctggttgcagccgatgtgaacccccagaacatccgtgtgaccaaccgtcgtgaggaacgcggggcggaactcgaggaacgctacggcgtggtcaccatgaccgacaacgcccaggccgtggacggcgccgacgtggtcttcctgtgcgtgaagccgaagatgatccttgatgtgctcgccgagatcgccaccaccgtggacaacaattcggtgtccaccgtcgtggtgagcatggccgccggcatcaacctcgcctcgatggaggagaaggtctccgcgggcatgccgatcgtgcgtgtcatgccgaacaccccgatgctggtgcgcaagggcatgtgcaccgtcaccggtggccggttcgtcgacgcggagcagctcgagctggtccaggagctgctcacctccgtcggcgatgtcatggtggtcgaggaatccgacctcgacgccgtcaccgccctgtccggttcctcacccgcctacctcttcctggtcaccgaggcgcttatcgacgccggtgtcagcctcggcctgacccgcgcggccgccaaacagctggccgtgtccgcatttgacggtgccggcaccatgctgaaggagaccggccgtgagccctccgatctgcgtgcgggcgtgtcctcaccggccggcaccacggtggcggccctgcgcgaactggaggagagtggcatccgtggcgccttcttccgggcagcccaggcctgcgccgaccgctcagccgagatgggacgcaactag

SEQ ID NO: 7645 - protein, 273 aa, Corynebacterium efficiens YS-314
MEGMTIIAVIGGGQIGEALVSGLVAADVNPQNIRVTNRREERGAELEERYGVVTMTDNAQAVDGADVVFLCVKPKMILDVLAEIATTVDNNSVSTVVVSMAAGINLASMEEKVSAGMPIVRVMPNTPMLVRKGMCTVTGGRFVDAEQLELVQELLTSVGDVMVVEESDLDAVTALSGSSPAYLFLVTEALIDAGVSLGLTRAAAKQLAVSAFDGAGTMLKETGREPSDLRAGVSSPAGTTVAALRELEESGIRGAFFRAAQACADRSAEMGRN

SEQ ID NO: 7646 - DNA, 819 bp, Pseudomonas putida KT2440
  CDS (1)..(819): transl_table=11
atgagcaagacacgtattgcctttatcggcgccggcaacatggccgccagcctgatcggtggtctgcgtgcccagggcctggacgcctcgcagatccgcgccagcgacccgggcgccgagacccgcagtcgcatccaggccgagcacggcattgaagccttcgaggacaacgcccaggccatcgatggcgctgacgtcatcgtgctggcggtcaagccacaagtcatgaaaaccgtatgtcaggcactgcaacccaacctgcaggatggccagctgatcgtttccatcgccgccggcatcacatgcgccagcctgcagagctgggtgggcgctcgcccggtggtgcgctgcatgcccaacaccccggcattgctgcgccaaggcgtgagcggcctgtacgccaccgctgaagtgtccggcgaacagcgtctgcaggccgaacaactgctgtcggctgtaggcaccgccctgtggctggagcaggaacagcaactggacgccgtgacagctgtgtccggcagtggcccggcgtacttcttcctgctgatcgaggccatgaccgcggcaggcgaaaaactcggcctgccacgcgaaacggcctcccaactgaccttgcagacagccctgggcgccgcgcgcatggcagttgcaagcgatgtcgatgccgctgaactgcgccgccgcgtcacttcgcccgccggcaccacggaagcggcgatcaagtcgttccaggccagcggcttcgaagccatcgtcgagcaggcgctgcaggctgcagccacgcgctctgccgagctggccgaacaactgggcaaataa

SEQ ID NO: 7647 - protein, 272 aa, Pseudomonas putida KT2440
MSKTRIAFIGAGNMAASLIGGLRAQGLDASQIRASDPGAETRSRIQAEHGIEAFEDNAQAIDGADVIVLAVKPQVMKTVCQALQPNLQDGQLIVSIAAGITCASLQSWVGARPVVRCMPNTPALLRQGVSGLYATAEVSGEQRLQAEQLLSAVGTALWLEQEQQLDAVTAVSGSGPAYFFLLIEAMTAAGEKLGLPRETASQLTLQTALGAARMAVASDVDAAELRRRVTSPAGTTEAAIKSFQASGFEAIVEQALQAAATRSAELAEQLGK

SEQ ID NO: 7648 - DNA, 879 bp, Bradyrhizobium japonicum USDA 110
  CDS (1)..(879): transl_table=11
gtggttatgggtcccggccttcgccgggacgacaccgaatttgtggtgaccacagtggcgaacagcactcttcaaaacatcaccggcaccatccttctcgccggcgccggcaagatgggcggcgcgatgctgaccggatggctggcgggcggactcgatccgcgccgtgtcgcggtggtcgacccgcacatcgcgcctgagatcagcgcgcttgccgccaagggcgtggcgctcaatcccgatgcgaaggcggcaggtcaggtcgagacgatggtcgtcgcggtgaagccgcagatgttccgcgaggccggcgcgaagctgaagcccttcgtctcggagaagacctccgtggtctcgatcatggcgggaaccacgatcgcctcgcttcaggaggtctgcggcggcgctgtcgtgcgcgcgatgccgaacacgccggccgcgatcggccgcggcatcacggtggcggttgcggcgaagaacgtcagcaccgcgcaacgcgcggtggccgacgcgctgctgcgcgccaccggctcggtcgaatgggtcgaggatgagagcctgatggatgcggtgaccgcggtgtccggctcgggaccggcctatgtgttcctgctcgccgaggaacttgcgcgcgccggtgtcgaagcgggattgcccgaggcgctggcgacgaagctcgcgcgcgaaacggtggcaggctcgggcgagctgctgcatcaatccgagctgccctccggcacgctgcgccagaacgtcacctcgcccggcggcaccacggccgcagcgctcggcgtgctgatgggcgagcccggcctgcgcgacctgatgatccgtgcaatcgcagcggcgacgcagcggtcgaaggaattggcgaagtag

SEQ ID NO: 7649 - protein, 292 aa, Bradyrhizobium japonicum USDA 110
MVMGPGLRRDDTEFVVTTVANSTLQNITGTILLAGAGKMGGAMLTGWLAGGLDPRRVAVVDPHIAPEISALAAKGVALNPDAKAAGQVETMVVAVKPQMFREAGAKLKPFVSEKTSVVSIMAGTTIASLQEVCGGAVVRAMPNTPAAIGRGITVAVAAKNVSTAQRAVADALLRATGSVEWVEDESLMDAVTAVSGSGPAYVFLLAEELARAGVEAGLPEALATKLARETVAGSGELLHQSELPSGTLRQNVTSPGGTTAAALGVLMGEPGLRDLMIRAIAAATQRSKELAK

SEQ ID NO: 7650 - DNA, 819 bp, Vibrio parahaemolyticus RIMD 2210633
  CDS (1)..(819): transl_table=11
atggaacataaaaagatcgcctttatcggtgcgggaaacatggtcagagccattgtttctggcctcgtggctaacggctaccctgcacaaaacattgttgcaaccgccccatcagaggcgcgtcgtctgccgcttgagcaagattttggtatccgtactaccagcgacaacatgctggcagcgtccgaggccgatgtggtggttctgtctgtgaaaccacaaatgatggcggatgtttgtaaacctctgcaatctatcgactttagcaacaagctcgtgatttctattgcggcaggcatcaattgttcacgtttggatgagatgctagcgacaaaattgaatttggttcgcgtaatgccaaacactccatctcagttgggtttgggcatgagtggcttattcgctccagaacatgtcaaagaacaagacagagcctttgccgcagaactgatgcaagcggttggtaaagtttgctgggtggaacaagaatcaggcatcaacaatgtgattgcagcagcaggcagcgctccggcatacttcttcctgtttatggaagcgatgcaagctgaagcgatagctcaaggttttgataaagaaacggctcgtttgttggttcaacaagcagcgctgggtgcggcaagtatggtggtgagcaatccagacaccgaactttcgacactgcgtgaaaacgtgacttcgaaaggcggcacaaccgccgaagcacttcgtacattcaacgagcatcagttaacagacatcgttgcaaaagccatgcaagctgcggttgctcgcgcagaagaaatggaaaaactgttttaa

SEQ ID NO: 7651 - protein, 272 aa, Vibrio parahaemolyticus RIMD 2210633
MEHKKIAFIGAGNMVRAIVSGLVANGYPAQNIVATAPSEARRLPLEQDFGIRTTSDNMLAASEADVVVLSVKPQMMADVCKPLQSIDFSNKLVISIAAGINCSRLDEMLATKLNLVRVMPNTPSQLGLGMSGLFAPEHVKEQDRAFAAELMQAVGKVCWVEQESGINNVIAAAGSAPAYFFLFMEAMQAEAIAQGFDKETARLLVQQAALGAASMVVSNPDTELSTLRENVTSKGGTTAEALRTFNEHQLTDIVAKAMQAAVARAEEMEKLF

SEQ ID NO: 7652 - DNA, 774 bp, Bacteroides thetaiotaomicron VPI-5482
  CDS (1)..(774): transl_table=11
atgaaaatagctattatcggtgcaggaaacatgggtggttctatagcccgcggcctggcaaaaggaagtctgatagcagactcagatatcattgtatccaaccccagcgcaggcaaactggagaaactgaaagaagaatttccgggcatttccaccactctgagcaatacggaagcggcaacgggagcagatgttgtcattctcgccgtgaagccttggtttgtggagtccgtcatgcgcgagttgaagctgaagagcaaacagacgctcgtatccgtagcggcaggtatcagttttgaagaactcgcacactttgtgatagcaccggagatgccgatgttccgcctgattccgaacactgccatcagcgaactggaaagtatgacgcttatcgcggcacgcaacacgaacgatgaacagaacctgtttatgctccgcctgttcaacgaaatgggaatggccatgctcatccccgaagataagatagccgccaccacggcactgacttcctgcggcatcgcttacgtattgaaatacatccaggcagccatgcaggccggcatcgaaatgggcatccgtcccaaagatgcgatggaaatggtagcccagtccgtcaagggagccgccgcattaattctgaacaatgacacccaccccagcgtggaaatcgacaaagtgactactccgggcggaattacgatcaagggaatcaacgaactggaacacaacggatttacctccgccgtcatcaaagcgatgaaagcatccaaataa

SEQ ID NO: 7653 - protein, 257 aa, Bacteroides thetaiotaomicron VPI-5482
MKIAIIGAGNMGGSIARGLAKGSLIADSDIIVSNPSAGKLEKLKEEFPGISTTLSNTEAATGADVVILAVKPWFVESVMRELKLKSKQTLVSVAAGISFEELAHFVIAPEMPMFRLIPNTAISELESMTLIAARNTNDEQNLFMLRLFNEMGMAMLIPEDKIAATTALTSCGIAYVLKYIQAAMQAGIEMGIRPKDAMEMVAQSVKGAAALILNNDTHPSVEIDKVTTPGGITIKGINELEHNGFTSAVIKAMKASK

SEQ ID NO: 7654 - DNA, 810 bp, Streptomyces avermitilis MA-4680
  CDS (1)..(810): transl_table=11
atgacccagaaagtcgcagtcctcggcaccggcaagatcggcgaagccctgctcagcggaatgatccgagcgggctgggcccccaccgacctcctggtcaccgcccgccgccccgagcgcgccgaagagctccgcgcgcgccacggcgtcaccccggtcaccaacgcggaggccgccaagaccgccgacaccctgatcctgacggtcaagccgcaggacatgggcaccctcctcaccgagctcgcgccgcacgtccccaccgaccgcctggtcatcagcggcgcggcaggcatccccacctccttcctggaggagcgcctcgctcagggcacccccgtcgtccgggtcatgacgaacacccccgcgctcgtcgacgaggccatgtccgtcatctccgccggcagccacgccaccgccgggcacctcgcgcacgccgaggagatcttcggcgcggtcggcaagaccctgcgcgtcccggaatcccagcaggacgcctgcaccgcactctccggatcgggcccggcgtacttcttctatctggtcgaggccatgacggacgcgggcatcctgctgggactgccccgcgacaaggcgcacgatctgatcgtccagtccgcgatcggcgccgcgatcatgctccgcgacagcggcgagcaccccgtcaagctccgcgagaacgtgacgtcaccggccggcacgacgatcaacgcgatccgcgaactggagaaccacggggtacgcgccgcactgatcgccgccctggaggcagcccgcgaccgcagccgcgaactggcctccggcagcagctga

SEQ ID NO: 7655 - protein, 269 aa, Streptomyces avermitilis MA-4680
MTQKVAVLGTGKIGEALLSGMIRAGWAPTDLLVTARRPERAEELRARHGVTPVTNAEAAKTADTLILTVKPQDMGTLLTELAPHVPTDRLVISGAAGIPTSFLEERLAQGTPVVRVMTNTPALVDEAMSVISAGSHATAGHLAHAEEIFGAVGKTLRVPESQQDACTALSGSGPAYFFYLVEAMTDAGILLGLPRDKAHDLIVQSAIGAAIMLRDSGEHPVKLRENVTSPAGTTINAIRELENHGVRAALIAALEAARDRSRELASGSS

SEQ ID NO: 7656 - DNA, 819 bp, Bacillus cereus ATCC 14579
  CDS (1)..(819): transl_table=11
atggataaacaaattggattcatcggttgcggaaatatgggaatggctatgattggcggaatgataaacaaaaatatagtgtcttcaaatcaaattatttgttcagatttaaacactgctaatttaaaaaatgctagtgaaaaatatgggctaactacaactaccgacaacaatgaagtagctaaaaatgctgatattttaattttatcaatcaaaccagacctatacgcgtcaataattaatgaaataaaagaaataatcaaaaacgatgctatcatcgttacgatcgctgctgggaaaagtattgaaagtactgaaaatgcctttaataaaaaagtaaaggttgtaagggtaatgcctaatactcctgctcttgttggagaaggaatgtctgcattatgcccgaatgaaatggtgacagaaaaagatttagaagatgtactaaacattttcaatagttttggtcaaacagagatcgtaagtgaaaaattaatggatgttgtaacatctgtaagtggttcttcaccagcttatgtatatatgattatagaagcgatggcagatgctgctgtactagatggtatgccaagaaatcaagcatataaattcgctgctcaagctgtgttaggctctgcaaaaatggtactagaaacaggaatacatccaggtgaattgaaagatatggtttgttctcctggcggaacgacaatagaagctgtagcaacattggaggaaaaaggactgagaacagcgattatttcagctatgcagcgttgtacgcaaaagtctgttgaactatctggtcaaactaaaaagtaa

SEQ ID NO: 7657 - protein, 272 aa, Bacillus cereus ATCC 14579
MDKQIGFIGCGNMGMAMIGGMINKNIVSSNQIICSDLNTANLKNASEKYGLTTTTDNNEVAKNADILILSIKPDLYASIINEIKEIIKNDAIIVTIAAGKSIESTENAFNKKVKVVRVMPNTPALVGEGMSALCPNEMVTEKDLEDVLNIFNSFGQTEIVSEKLMDVVTSVSGSSPAYVYMIIEAMADAAVLDGMPRNQAYKFAAQAVLGSAKMVLETGIHPGELKDMVCSPGGTTIEAVATLEEKGLRTAIISAMQRCTQKSVELSGQTKK

SEQ ID NO: 7658 - DNA, 813 bp, Nitrosomonas europaea ATCC 19718
  CDS (1)..(813): transl_table=11
atgaaaattacttttattggtggcggaaacatggctggagccatgatcggcggcctgatacatcatggaagcacaccttcacacatctgtgccgtggaaaccgatgcgatgcgacgacagcaacttgccgaggcatgcggtgtcacggttacggcatcgatacctgatggaattcatggcagtgagattgttattcttgccgtaaagccgcagcagttacgtgctgtggccaatcaagctgcacaatttctgcagaataaacttgtaatttcgattgcagcgggagttcgtgcaagtgatctgagccagtggctgaaccggcatgaatttgtcattcgtgccatgcccaatacacccgctttgatcggagaaggtatcaccggcttatatgcgttacctttggtcgatagccggcagaaggaacaggccactacgattctggaggcaatcggtacagtaatctgggtgaatgaagaagcgcagctggatgcggtgacagctttatctggcagtggcccggcgtatgttttctattttctggaggccatgcaggaggccggaacacagttgggactgacagcagatacggcgaaacagcttgcaatgcagacatttctgggcgcaacacatcttgccgcacaaagtaatgacacgcttgcaacgctgaggatgaaagtgacttcgcaaggtggaacgactgaacaagctttactcagtatggaacaagccgatatcagaggggcgtttattcgtgccatgcatgctgcctgtgatcgttcccggcaaatgggtgaaatattcggacgtacataa

SEQ ID NO: 7659 - protein, 270 aa, Nitrosomonas europaea ATCC 19718
MKITFIGGGNMAGAMIGGLIHHGSTPSHICAVETDAMRRQQLAEACGVTVTASIPDGIHGSEIVILAVKPQQLRAVANQAAQFLQNKLVISIAAGVRASDLSQWLNRHEFVIRAMPNTPALIGEGITGLYALPLVDSRQKEQATTILEAIGTVIWVNEEAQLDAVTALSGSGPAYVFYFLEAMQEAGTQLGLTADTAKQLAMQTFLGATHLAAQSNDTLATLRMKVTSQGGTTEQALLSMEQADIRGAFIRAMHAACDRSRQMGEIFGRT

SEQ ID NO: 7660 - DNA, 828 bp, Prochlorococcus marinus subsp. marinus str. CCMP1375
  CDS (1)..(828): transl_table=11
gtggcttgttctcttggtgttattggtttaggaagaatggcacaagtcattcttcaaagtttatttgaagcaggccaatttaatccggaagaggttttcggtgttgtagggaaaaaaaatagtgtggagagagtactccatcaatttaagagtccctttactgtcgttgatgtaaatgataaaaatgctattgatgtttggaacacacctgtaaagatattggcagtaaaaccacaacagttgaatcaagttcaggagaaatgttctaaagaattccttgcaaaattacctgctaagccgttgttaatttccatattggctggagtgaaattaaaaagattgcaatcgttgttccctgatcatgtatgtgtgcgtgctgtgcctaatactcctgcacttgtaagtgctggtttaacaggcctttcatggggggaagaagtgacagaagatcagaagtctttagtggaatctatttttaagcccattagccaggtatttgaattgcctgaagaccaattagatgctttcttagctcttacatcttcaggtcctgcatatttagctctgatttcagaggcactagctgatggcgcggtagcagcaggactgcctagagctttggcacagtctttgacaaatttcactcttgaaggcacagcaatattgcttaagaaaaaggagttacatccagggcaactaaaagatatggttgcttctcccgcaggtacaactatttcggctttgcgccatcttgaaaaagaaggagttcgctctgcgttgattgaggctgttatccttgcggcaaagaaaagtcgtgagatggcttga

SEQ ID NO: 7661 - protein, 275 aa, Prochlorococcus marinus subsp. marinus str. CCMP1375
MACSLGVIGLGRMAQVILQSLFEAGQFNPEEVFGVVGKKNSVERVLHQFKSPFTVVDVNDKNAIDVWNTPVKILAVKPQQLNQVQEKCSKEFLAKLPAKPLLISILAGVKLKRLQSLFPDHVCVRAVPNTPALVSAGLTGLSWGEEVTEDQKSLVESIFKPISQVFELPEDQLDAFLALTSSGPAYLALISEALADGAVAAGLPRALAQSLTNFTLEGTAILLKKKELHPGQLKDMVASPAGTTISALRHLEKEGVRSALIEAVILAAKKSREMA

SEQ ID NO: 7662 - DNA, 807 bp, Prochlorococcus marinus subsp. pastoris str. CCMP1986
  CDS (1)..(807): transl_table=11
gtgacaagtaaaattgcagtaattgggtttggaaatattgcaaaagctattataactccgctatttgataaaaaattactaaaaccaaaggatgtttattgtttagtaaatacaaaaaaaagtttagaaaatattagaaaaaactataaatatgatattaatatttttcaggcaaactccaaaggttcggaaattatatgggattgcgaagttaaatttctctctgtaaagcctcagcaacttaaaaatataattgaattagaaaaaaataaaaattatttattggtttctattttagctggtgtatctttagaaaaacttataaaaaaatttccaaatcataaatgtgttagggtagtgactaatattccaataacaattggtaaaggtttaactggaatttcatggggagatgaaataaaggaagctcagaagcaattcataaaaagattatttgaaaattctagtaaaatttatgaatttcctgaagatttactcgatatttttttatcattaacttcttccgggccagctatagttgccctgattattgaagctttaagtgacggaggtttaagcggcggattgcaaaaaagactttctgaagaacttgttgtagagatgattttaggcactgttagtttaataaaagaaactaatttaacaactgctgagcttaagaatatggtaacttctcctgggggcaccaccatatcagcactaagggttttagaaaataggagtttaaggtctgctcttatagaagcagtagtttcggccagtaatcgtagtaaagaatttcgttaa

SEQ ID NO: 7663 - protein, 268 aa, Prochlorococcus marinus subsp. pastoris str. CCMP1986
MTSKIAVIGFGNIAKAIITPLFDKKLLKPKDVYCLVNTKKSLENIRKNYKYDINIFQANSKGSEIIWDCEVKFLSVKPQQLKNIIELEKNKNYLLVSILAGVSLEKLIKKFPNHKCVRVVTNIPITIGKGLTGISWGDEIKEAQKQFIKRLFENSSKIYEFPEDLLDIFLSLTSSGPAIVALIIEALSDGGLSGGLQKRLSEELVVEMILGTVSLIKETNLTTAELKNMVTSPGGTTISALRVLENRSLRSALIEAVVSASNRSKEFR

SEQ ID NO: 7664 - DNA, 843 bp, Prochlorococcus marinus str. MIT 9313
  CDS (1)..(843): transl_table=11
gtggcctctaatcactccatgccctgctctttgggggtaatcggcctgggtcgaatggcccaggctcttgttttgccgttgttgaagcagggagagcttgctccgcagcagcttgttgcggttgtgggctgtggcgcaagtgttgaacgtctcgcagatcagttgccaatcggtctgcgtttgaaagctgcagatgatcccactgcggcagaggcatggatggcgcccattcaattgctagcggtgaaaccgcagcagcttgaccagatagcggcttcagcagctcgtcttaagaaaactgcagatgggccgcacctgttgatttctgtgcttgctggcgtgagcttggcgcgtttgcagcaggctttccccgctcatgcctgtgtgcgtgccgttccaaatacccctgccttggttggcgctgggcttactggattgtcttggggagagggcgtcacgccagagcaacgcctagcggttgagcgattgtttttgccggtgagcgaggtgctggaattgccggagtcgcagctggatgcttttttggcgttgacgtcatccggccctgcctatgtggcactggtggctgaggcgatggctgatggtgcagtagcggcaggcctgccgagatccttggcccatcatcttgcccatcgcacccttgctggcacagccgccttgcttaagcagcagaaactgcatcctgcggagcttaaagacatggtgacctctccgggtggcaccacgattgccgcactgcgcaagcttgagcgggcaggggttcgttctgctttgattgaggcggttgttgcagctgctcaacgtagccgtgaactggcttga

SEQ ID NO: 7665 - protein, 280 aa, Prochlorococcus marinus str. MIT 9313
MASNHSMPCSLGVIGLGRMAQALVLPLLKQGELAPQQLVAVVGCGASVERLADQLPIGLRLKAADDPTAAEAWMAPIQLLAVKPQQLDQIAASAARLKKTADGPHLLISVLAGVSLARLQQAFPAHACVRAVPNTPALVGAGLTGLSWGEGVTPEQRLAVERLFLPVSEVLELPESQLDAFLALTSSGPAYVALVAEAMADGAVAAGLPRSLAHHLAHRTLAGTAALLKQQKLHPAELKDMVTSPGGTTIAALRKLERAGVRSALIEAVVAAAQRSRELA

SEQ ID NO: 7666 - DNA, 762 bp, Wolinella succinogenes DSM 1740
  CDS (1)..(762): transl_table=11
atgccccccaccttgaccctttatggctatggcaaaatggccttggccatcgctaaaggtctaagcggccgcttccccctagagatcacggggcgcaacccccaaaaaatcgaggaattgattgccctgcatggccttaacgcctcccctctctttccccacgattcacccctagatatcaccgatagacacttgctattatgcgtcaaaccctacgccctaagcgagctctcttttagcggagaagccaagggcgtctactccattttggcaggagtctccatagagcgcctgcgcgagaagatacccgcccaaagctacattcgcgcaatgcccaatatggccgcctctttgggaagttcctgcaccgctctttgtggcgatgagagcctcaaagccttggcgagtgagatttttgcgcctcttggcacctctttgtggctagacaaagaatctaaaattgacgccgcgactgctttagcgggaagcggtcctgcctatttggccttgatggcggaggctttgatggatgcaggggtgcgagagggactctccagagaagaatccaaagcgctcacccaagggcttttttcaggctttgccgaccttttggaagatcgccatcctgccctcattaaggaggaggtcacctctccaggaggcacgaccgccgaggcgctcgcgctcttagaatctaaagggcttcgaggtatcctcattgaggcggttcgcgccgccctgctcaaagccaaaaaactctaa

SEQ ID NO: 7667 - protein, 253 aa, Wolinella succinogenes DSM 1740
MPPTLTLYGYGKMALAIAKGLSGRFPLEITGRNPQKIEELIALHGLNASPLFPHDSPLDITDRHLLLCVKPYALSELSFSGEAKGVYSILAGVSIERLREKIPAQSYIRAMPNMAASLGSSCTALCGDESLKALASEIFAPLGTSLWLDKESKIDAATALAGSGPAYLALMAEALMDAGVREGLSREESKALTQGLFSGFADLLEDRHPALIKEEVTSPGGTTAEALALLESKGLRGILIEAVRAALLKAKKL

SEQ ID NO: 7668 - DNA, 792 bp, Gloeobacter violaceus PCC 7421
  CDS (1)..(792): transl_table=11
atgaacttaggcattgtcggcggcggtgcgatggccgaggctttgatcgccggcctgatcgccggcgcggtttatgcaccttcggaaattgccgtgagcgacccggtggccgagcgcggcgagtggctccatcgccgctacggcgtggtggccgtcaccgacaatctggttcccgccgctgccccgacgctgcttttggctgtcaagccccaggcttttgccgtggtgagcaaccaggttgccgcccatgtgcgctccgaactggtggtgtcgatcctggcgggcgttccgctggcccgcctgcaggcggcctttaccgggcgggctgtcgtgcgggcgatgcccaacaccccggcgctggtgcgctccggaatcactgccctcagccgctcggagcgcgtcaccccggagcagtttgccgtcgcgcgcacgctcttcgcctgcgtgggtgaagtggtcgaggtgcccgaatccgccatggacgcggtgacgggcttgtcgggctccggtcccggttatctggcgctcgtggtcgaggcgctcatcgacggcggcgtggccgccggtctgccgcgggccaccgccagccagctggtgcttgccaccttgcgcggcagcgcggagttgttgatccaggagaagctgcacccggcggtgctcaaagaccgcgtcaccagccccggcggcaccaccatcgccggcatcgagcaactggagggacgctcggtgcgcggggcgtttatcgaggcggtccaggccgccacccgccgcgcccgggaactgtccgggtag

SEQ ID NO: 7669 - protein, 263 aa, Gloeobacter violaceus PCC 7421
MNLGIVGGGAMAEALIAGLIAGAVYAPSEIAVSDPVAERGEWLHRRYGVVAVTDNLVPAAAPTLLLAVKPQAFAVVSNQVAAHVRSELVVSILAGVPLARLQAAFTGRAVVRAMPNTPALVRSGITALSRSERVTPEQFAVARTLFACVGEVVEVPESAMDAVTGLSGSGPGYLALVVEALIDGGVAAGLPRATASQLVLATLRGSAELLIQEKLHPAVLKDRVTSPGGTTIAGIEQLEGRSVRGAFIEAVQAATRRARELSG

SEQ ID NO: 7670 - DNA, 822 bp, Photorhabdus luminescens subsp. laumondii TTO1
  CDS (1)..(822): transl_table=11
atggagagacgtaaaattaccttgattggtgcaggtaatatggctcacgccatcatagctggattagtaaaaggagggtaccctgctgagctgattaatgtctgcgcaccaagtcatactcgccgtgatgcactcgcaacagagtatggcgttaacagcggtagtgacaatattcgctacgcacaggaagcggacgttgttgttctggcggtaaaaccgcaagtgatggtagatgtctgccagcctctgaaagaaaatgtagatttcagtaacaagctggttctgtctattgcctcaggtatttccgttgcacgttttgatgctttattacaagacaaactcaatattgttcgtatcatgccaaacacgccggcattaattggtcaaggggtgagtggattattcgcatctgagcaagtcagtcagtctgaccgtgatttcactcaagcattaatgaacagtgttggtaaaacttactgggtaaaagatgaaaacggcatcaatgacgttatcgccgcagcaggcagtgcgcccgcttatttcttcctatttatggaatcaatgcaacaggaagcagaacgtttaggttttgataaccaaacagcccgtgaaattattttgcaaacggcaataggttctgcggcactggccgcatcaaatgtagatctcccttttgcaaccctgcgtgaacaggtaacatctaaaggcggtactactgcggaagcattacgtattttttatgaaggcaaattaccggaaaccatatccaacgcgatgcaggcggctattcgccgggcacaggaaatggaaaaacaattttaa

SEQ ID NO: 7671 - protein, 273 aa, Photorhabdus luminescens subsp. laumondii TTO1
MERRKITLIGAGNMAHAIIAGLVKGGYPAELINVCAPSHTRRDALATEYGVNSGSDNIRYAQEADVVVLAVKPQVMVDVCQPLKENVDFSNKLVLSIASGISVARFDALLQDKLNIVRIMPNTPALIGQGVSGLFASEQVSQSDRDFTQALMNSVGKTYWVKDENGINDVIAAAGSAPAYFFLFMESMQQEAERLGFDNQTAREIILQTAIGSAALAASNVDLPFATLREQVTSKGGTTAEALRIFYEGKLPETISNAMQAAIRRAQEMEKQF

SEQ ID NO: 7672 - DNA, 813 bp, Corynebacterium diphtheriae NCTC 13129
  CDS (1)..(813): transl_table=11
gtgttcgccatgacttcaatcgcagtaattggtggcggcaagattggcgaggcattgatttcgggcctcgtagcaagtggcatgagtccaaaagatattcatgtgactaatcgcaacgctgagcgtgcccaggaactcaaggaacgctatggcgtattgaccttcctagagaacattgccgctgttgacgacgtagacatggtgtttttgtgcgtgaagccgcagcaggtcattcccgttgtggaagaaatcgcagacgttgtagataacaacaccagcaccactatcgtgtcgatggccgctggcgtgactaacgccatgatcgaggagagccttgccgcaggttcccctgttatccgtgtgatgcctaatactcctatgttggtgggtaagggcatgtccgtggtggctcctggtcgctatgccgatgaggacacggtggcgtcgttaacgcagctgttggaggctgtgggcagcgtggaggtcatcgaggagtcgagcatggacgcggtggtggcgttgtcgggttcttctcctgcgtatctctttttgatggttgaggctcttatcgacgccggcgtgttccttggcctaccacgtgataaggcgaaaaacttggctgtttcttcctttgctggcgctgccacgatgttggagcaaacgggtgaggagccagcagtattgcgtgcaaatgtgagctcgcctggcggtactacgattgctgctattcgggagtttgaggaaagcggtttgcgtgctgcggtctatcgtgcggcgactgctgcggcgacacgcaacagttctttgggctag

SEQ ID NO: 7673 - protein, 270 aa, Corynebacterium diphtheriae NCTC 13129
MFAMTSIAVIGGGKIGEALISGLVASGMSPKDIHVTNRNAERAQELKERYGVLTFLENIAAVDDVDMVFLCVKPQQVIPVVEEIADVVDNNTSTTIVSMAAGVTNAMIEESLAAGSPVIRVMPNTPMLVGKGMSVVAPGRYADEDTVASLTQLLEAVGSVEVIEESSMDAVVALSGSSPAYLFLMVEALIDAGVFLGLPRDKAKNLAVSSFAGAATMLEQTGEEPAVLRANVSSPGGTTIAAIREFEESGLRAAVYRAATAAATRNSSLG

SEQ ID NO: 7674 - DNA, 843 bp, Rhodopseudomonas palustris CGA009
  CDS (1)..(843): transl_table=11
atgttcgcgatgaccagctctgctcaatctcccctgcaacagctcggcggcacggtggttcttgccggcgccggcaagatgggcggtgcgctgctcaccggctggctggcgcaagggctggacggcggcgacgtcgtggtgatcgagccgcatccgaccgaggagatcgcggcgctgagcgcacgcggcgtccgcctcaacgcctccgccggcgatgtcggcgcggtgtcgacgctggtggtcgcggtcaagccgcagatgttcgccgaagccgccgccgcgctgcgcggctatgtcggcccctcgaccctggtggtgtcgatcatggccggcaagccgatcgcagcgctgtccgagcagctcggcggccacgtcgtccgggcgatgccgaacaccccggccgcgatcggccgcggtatcaccgtcgcggtcgcggccggtaacgtgacagccgcgcagcgcggcattgccgatgcgctgctgcgagccaccggcggcgtcgaatgggtcgacgacgaggcgctgatcgatgccgtcacggcggtgtccggctcgggcccggcctacgtgttcctgctcgccgaagaactcgcccgcgccggcgtcgaagccggtctgccggaaggcctcgccatgacgctcgcccgtgccaccgtcgccggttcgggcgaactgctgcaccgctccgacctcgatgccgccacgctgcgcaagaacgtcacctcccccggcggcaccaccgccgcggcgctcgaggtgctgatggcgaacgacggcttccgcccgctgctgacccgcgcggtcgccgcagcaacgaagcggtcgaaggaactggcgaagtag

SEQ ID NO: 7675 - protein, 280 aa, Rhodopseudomonas palustris CGA009
MFAMTSSAQSPLQQLGGTVVLAGAGKMGGALLTGWLAQGLDGGDVVVIEPHPTEEIAALSARGVRLNASAGDVGAVSTLVVAVKPQMFAEAAAALRGYVGPSTLVVSIMAGKPIAALSEQLGGHVVRAMPNTPAAIGRGITVAVAAGNVTAAQRGIADALLRATGGVEWVDDEALIDAVTAVSGSGPAYVFLLAEELARAGVEAGLPEGLAMTLARATVAGSGELLHRSDLDAATLRKNVTSPGGTTAAALEVLMANDGFRPLLTRAVAAATKRSKELAK

SEQ ID NO: 7676 - DNA, 813 bp, Geobacter sulfurreducens PCA
  CDS (1)..(813): transl_table=11
atgctgaagggaagcactctcggcttcatcggcggcgggaacatggctgaggcgatcatcaaagggctgctggccggcggggtcgcggcggcggacgtgatggtggctgaaccggtggcagcgcggcgggaatacctgcacggcacctacggcatcgacgtctgcgccgacaacggccgggtggccgccgctgccgacgccctggtcatggccgtaaagccccaggtgttccgtggcatggttgcggccctggggccggcagggctcgacggcaagctgctcatctccatcatggcggggattaccaccgcggacatggaggaggtctgcggcagcgcggcccgggtgatccgggtgatgccgaacaccccggccctggtgctggaaggggcgtccaccctctgtcgcggcaggaacgccaccgatgacgatctgttctttgccacgggaatcttcgacctggtggggaccacctgcgtggtggaggaaaagctcatggacgccgtcaccggcgtctccggctgcggcccggcctacgtcttcctcttcatggaggccctttccgacgccggcgtgaaaaacggcctcccccgggacgtggccacgagactggcggcccagacggtactgggagctgcgagactgctcctggagaccggcgaccacccaggcgtcctcaaggagaaggtcacctcccccggcggcagcaccatcgccggcatcgcctccctggagcgggatgccttccgcggagcggtcatggccgccgtggacgccgctactgcccgctcggcggagctgggcaaaaaataa

SEQ ID NO: 7677 - protein, 270 aa, Geobacter sulfurreducens PCA
MLKGSTLGFIGGGNMAEAIIKGLLAGGVAAADVMVAEPVAARREYLHGTYGIDVCADNGRVAAAADALVMAVKPQVFRGMVAALGPAGLDGKLLISIMAGITTADMEEVCGSAARVIRVMPNTPALVLEGASTLCRGRNATDDDLFFATGIFDLVGTTCVVEEKLMDAVTGVSGCGPAYVFLFMEALSDAGVKNGLPRDVATRLAAQTVLGAARLLLETGDHPGVLKEKVTSPGGSTIAGIASLERDAFRGAVMAAVDAATARSAELGKK

SEQ ID NO: 7678 - DNA, 897 bp, Mycobacterium avium subsp. paratuberculosis K-10
  CDS (1)..(897): transl_table=11
atgtctgcgatgctgtccggcatggcaagaatcgcaatcatcggtggcggcagcatcggggaggccctgctgtcgggtctgctgcgggcgggccggcaggtcaaggacctggtggtggtcgagcgggttcccgagcgcgccaaatatctggccgacacctactcggtgctgatcacctcggtggccgacgcggtggaaaacgcgtcgttcgtcgtggtcgcggtgaaaccggccgacgtcgagtcggtgatgtccgagatcgcccgcgccgccggccaggccgagagcgacaccgccgagcaggtgttcgtcacggtcgccgccggggtcaccatcggctacttcgaatcccggctgccggccgggacaccggtggtgcgggccatgccgaacgcggccgtgctggtcggcgccggggtcaccgccctggccaagggccgcttcgtcaccgccccgcagctcgagggcgtctcggcgctgttcgactcggtcgggggcgtgctgagcgtgccggagagccagatggacgccgtcaccgccctctccggctccgggccggcgtatttcttcctgctggtggaggccctggtggacgccggggtggccgcgggcctgagccgcgaggtggccgccgacctgaccgcccagaccatggccggctcggcggcgatgctgctggagcggatggacgccgatcggcgactgggcgaggcggagacgcccgggctgcgggtggacgccaccgccacccagctgcgggccacggtgacctccccgggcggcaccaccgcggccggcctgcgcgagctggagcgggggggcctgcgggccgccgtcgacgccgccgtccaggccgccaaaatgcgctctgagcagctaagaattacatcggagtaa

SEQ ID NO: 7679 - protein, 298 aa, Mycobacterium avium subsp. paratuberculosis K-10
MSAMLSGMARIAIIGGGSIGEALLSGLLRAGRQVKDLVVVERVPERAKYLADTYSVLITSVADAVENASFVVVAVKPADVESVMSEIARAAGQAESDTAEQVFVTVAAGVTIGYFESRLPAGTPVVRAMPNAAVLVGAGVTALAKGRFVTAPQLEGVSALFDSVGGVLSVPESQMDAVTALSGSGPAYFFLLVEALVDAGVAAGLSREVAADLTAQTMAGSAAMLLERMDADRRLGEAETPGLRVDATATQLRATVTSPGGTTAAGLRELERGGLRAAVDAAVQAAKMRSEQLRITSE

SEQ ID NO: 7680 - DNA, 819 bp, Bacillus cereus ATCC 10987
  CDS (1)..(819): transl_table=11
atggataaacaaattggattcatcggatgcggaaatatggggatggctataattggcgggatgctaaacaaaaagatagtgtcttcaaataaaatcatgtgttcagatttaaacacgacgaatttagaaaatgctagtgaaaagtacggaataactataactaccgacaacaatgaagtcgctaaaaatgctgatattttaattttatcaattaaaccagacttatacccattagtaattaacgaaattaaagaagtaataaaaaacgatgctatcatcgttacgatcgctgctggtaaaagtattgaaagtactgaaaatgcctttaataaaaaattaaaagttgtacgagtaatgcctaatactcctgctcttgttggagaaggaatgtctgcattatgcccaaatgaaatggtgacagaaaaggatttagaagatgtgctaaacattttcaatagttttggtcaatcagagatcgtaagtgaaaagttaatggatgttgtaacatctgtaagtggctcttcaccagcatacgtatatatgattatagaagcgatggcagatgctgctgtactagatggcatgccaagaaatcaagcatataaattcgctgctcaagcagtattaggctctgcaaaaatggtactagaaacaggaatacatccaggtgaattgaaagatatggtttgttctcctggcggaacaacgatagaagctgtagcaactttagaggaaaaaggcttacgaacagccatcatttcagctatgcaacgttgtacacaaaagtctgttgaactatctggtcaaacgaaaaagtaa

SEQ ID NO: 7681 - protein, 272 aa, Bacillus cereus ATCC 10987
MDKQIGFIGCGNMGMAIIGGMLNKKIVSSNKIMCSDLNTTNLENASEKYGITITTDNNEVAKNADILILSIKPDLYPLVINEIKEVIKNDAIIVTIAAGKSIESTENAFNKKLKVVRVMPNTPALVGEGMSALCPNEMVTEKDLEDVLNIFNSFGQSEIVSEKLMDVVTSVSGSSPAYVYMIIEAMADAAVLDGMPRNQAYKFAAQAVLGSAKMVLETGIHPGELKDMVCSPGGTTIEAVATLEEKGLRTAIISAMQRCTQKSVELSGQTKK

SEQ ID NO: 7682 - DNA, 831 bp, Strongylocentrotus purpuratus
  CDS (1)..(831)
atgtcaatcggaacaataggcttcgtaggagctggaaatgtagcattaacgctaataaaaggcctcctttccgcaagtgctgtaggagcagagaggataatggccagtgcaccatcaaacaggaatctacaagttataggggatcttggagccaagacaaccagtagcaacagagagatcttggagacggctgacacaattttcttggccatcaaaccaaacctagctggcgccgtcatcaaagaaatagctccattcgtcaaaagagaccaactcttcatatcacttgctgcaggaatctcattagattttattgaaaataacctaccagaaagatcaagggttgtccgggccatgcccaacacacccaccatcatccgggagggggctaccgtgtttgcgtgtggttcgcacatcaaagagggcgacaatcgcttgatccaatcgctcttctccaagctaggtatctgcatcgagggagacgagagtatcattgacgcagcgatggctgtcagtggttgtgggccggcctatgcctatgtagctattgacgcacttgcagacggtggagttaagatggggcttccaagggacatcgctatcaagctagcagctcaaacactattaggttcagccaagatggtgctgagaggcggcaagcacccatcgcagctcaaggacgatgtgtgttctccaggaggtacaacgatcgatgccatccatgaacttgagagaggtggattcaggaaatgtcttatagaagcagtggaagcagcgtgcaataaggctaggaggctcaacgatgctatgctgtattcaaacaagaaatga

SEQ ID NO: 7683 - protein, 276 aa, Strongylocentrotus purpuratus
MSIGTIGFVGAGNVALTLIKGLLSASAVGAERIMASAPSNRNLQVIGDLGAKTTSSNREILETADTIFLAIKPNLAGAVIKEIAPFVKRDQLFISLAAGISLDFIENNLPERSRVVRAMPNTPTIIREGATVFACGSHIKEGDNRLIQSLFSKLGICIEGDESIIDAAMAVSGCGPAYAYVAIDALADGGVKMGLPRDIAIKLAAQTLLGSAKMVLRGGKHPSQLKDDVCSPGGTTIDAIHELERGGFRKCLIEAVEAACNKARRLNDAMLYSNKK

SEQ ID NO: 7684 - DNA, 1107 bp, Aedes aegypti
  CDS (126)..(944)
agtcgaagtcgaacgaaagtacacaacgcacgttattttattctgaagaaacaacagcttttttgtgcagttataagaacaagttattatcaggataaactatacagattaaatacgaattaagcatgagtaacatgctcaaaatcggttttctcggcggtggaaaaatggcacaagcgatggccaaaggattcatttcggcgggtttaacaaaatgtgaaaatatgaccgcaagtttccatccatccgatttgccaaacattgaggctttcaaatcgtttggggctcagacttttacagaaaacgttcctgttgtgaagcgctcagacgtgatatttgtatcggtgaaaccaacagtagttccaactgtattggaaaatgtgcgatctgaaagtgatggaaaactcttcatttctatcgctatgggagtaacattggcagatttggagcagtcgctttcgtcaaatgctcgtgtaattagagtgatgcccaatacccctgcactggttcgcagtggagcttccgtatatgttcgaggtaagacagctacgccagatgattgttctgtaacgcaaaagcttttcgaggctatcggtacttgtgaagaagttgcggaaagtatgatggatcctgtgacagcactttccggtagcggaccggcatacatttttgtgctgatagaatcattagccgatggaggcgtaagaatgggtctaccaagggatttggcttatcgcttagcagcgcagactgttcttggcgctggtcaactggttcgtgatactggtcgtcatcctggacaattgaaagatgatgtaacgagcccagccggatcaactgctgcaggattggcgtttctggagcaaaatgcattccgacatgccgttgctggagcagtagaagcagcgacacttcgatgtcgcgaggtttcgggcaataaataaaatctatagcattctttcccttcgtcaatgtcaactcattctcaaaagcatgcgatgtttgggaatcttttgtagatagttatagacttataaataatattgaacattactataaacaataaaaatgccacaattgactgtgagaatcactacagaagaaaaa

SEQ ID NO: 7685 - protein, 272 aa, Aedes aegypti
MSNMLKIGFLGGGKMAQAMAKGFISAGLTKCENMTASFHPSDLPNIEAFKSFGAQTFTENVPVVKRSDVIFVSVKPTVVPTVLENVRSESDGKLFISIAMGVTLADLEQSLSSNARVIRVMPNTPALVRSGASVYVRGKTATPDDCSVTQKLFEAIGTCEEVAESMMDPVTALSGSGPAYIFVLIESLADGGVRMGLPRDLAYRLAAQTVLGAGQLVRDTGRHPGQLKDDVTSPAGSTAAGLAFLEQNAFRHAVAGAVEAATLRCREVSGNK

SEQ ID NO: 7686 - DNA, 1044 bp, Chlamydomonas reinhardtii
  CDS (1)..(1044)
atgctgcagatctttcgtggcgtgtttgctcggagtgtaggcccagcgcgtcagaacctagcgttgccggcggccaataaggctttctctgcagcgtccgcagctatctgctggccccctgtgcccgctgtgaagcttactgagcagcaggcaaaaagccgtgctcatttccccaatctgatcgtcgtcgagagcgcagccaaccccgacaccatggccaccgcgaccgcccccgcgctgaacaagcgcatcggcttcctgggcagtggtcagatggccgaggcgctcgcgcgcggccttatgaagcgcggcctggtcagcggtgagcacatcgcctgcaacgaccccaaccccgcccgcaccaacctcttcaagagctttggcgcgaccccctacgagtccaacgccgacgtggcccgcaacgccgacgtgatctttgtggccgtcaagccgcagcacgtggcgcaggtgctgagcgaggtgcggccggtgctgacggagggacacaccgtggtgtccatcgcggccggcatcaccattgacaagctggtggaggctgccggcccggacgcgcacgtggtgcgtgtgatgcccaacacgccctgcctggtgggcgagacggcggcggccatgtgcctgggcggcaaggccaacgccgacgacgagacgctggtccgcaccatcttcgaggcggtgggcaagatctacacggtggacgagaagctgctggcggcggtgacggggctgtcgggcagcgggcccgcctacgtgttcctcatgatcgaggcgctggcggacggaggcgtgcgcgcaggcctgccccgcgacatcgcgcaggcgctggcggcccagacggtgctgggcagcgccaagatggtgatggagaccggcacgcacccgggcgccctcaaggacatggtcacctcgcccgccggcaccaccattgccggtgtgcacgagctggagcgcgccggcatccgcgccgccttcatgaacgccgtggtggccgccactgaccgcgccaaccagctgtccaagatgtag

SEQ ID NO: 7687 - protein, 347 aa, Chlamydomonas reinhardtii
MLQIFRGVFARSVGPARQNLALPAANKAFSAASAAICWPPVPAVKLTEQQAKSRAHFPNLIVVESAANPDTMATATAPALNKRIGFLGSGQMAEALARGLMKRGLVSGEHIACNDPNPARTNLFKSFGATPYESNADVARNADVIFVAVKPQHVAQVLSEVRPVLTEGHTVVSIAAGITIDKLVEAAGPDAHVVRVMPNTPCLVGETAAAMCLGGKANADDETLVRTIFEAVGKIYTVDEKLLAAVTGLSGSGPAYVFLMIEALADGGVRAGLPRDIAQALAAQTVLGSAKMVMETGTHPGALKDMVTSPAGTTIAGVHELERAGIRAAFMNAVVAATDRANQLSKM

SEQ ID NO: 7688 - DNA, 831 bp, Chlamydomonas reinhardtii
  CDS (1)..(831)
atggccaccgcgaccgcccccgcgctgaacaagcgcatcggcttcctgggcagtggtcagatggccgaggcgctcgcgcgcggccttatgaagcgcggcctggtcagcggtgagcacatcgcctgcaacgaccccaaccccgcccgcaccaacctcttcaagagctttggcgcgaccccctacgagtccaacgccgacgtggcccgcaacgccgacgtgatctttgtggccgtcaagccgcagcacgtggcgcaggtgctgagcgaggtgcggccggtgctgacggagggacacaccgtggtgtccatcgcggccggcatcaccattgacaagctggtggaggctgccggcccggacgcgcacgtggtgcgtgtgatgcccaacacgccctgcctggtgggcgagacggcggcggccatgtgcctgggcggcaaggccaacgccgacgacgagacgctggtccgcaccatcttcgaggcggtgggcaagatctacacggtggacgagaagctgctggcggcggtgacggggctgtcgggcagcgggcccgcctacgtgttcctcatgatcgaggcgctggcggacggaggcgtgcgcgcaggcctgccccgcgacatcgcgcaggcgctggcggcccagacggtgctgggcagcgccaagatggtgatggagaccggcacgcacccgggcgccctcaaggacatggtcacctcgcccgccggcaccaccattgccggtgtgcacgagctggagcgcgccggcatccgcgccgccttcatgaacgccgtggtggccgccactgaccgcgccaaccagctgtccaagatgtag

SEQ ID NO: 7689 - protein, 276 aa, Chlamydomonas reinhardtii
MATATAPALNKRIGFLGSGQMAEALARGLMKRGLVSGEHIACNDPNPARTNLFKSFGATPYESNADVARNADVIFVAVKPQHVAQVLSEVRPVLTEGHTVVSIAAGITIDKLVEAAGPDAHVVRVMPNTPCLVGETAAAMCLGGKANADDETLVRTIFEAVGKIYTVDEKLLAAVTGLSGSGPAYVFLMIEALADGGVRAGLPRDIAQALAAQTVLGSAKMVMETGTHPGALKDMVTSPAGTTIAGVHELERAGIRAAFMNAVVAATDRANQLSKM

SEQ ID NO: 7690 - DNA, 822 bp, Culex quinquefasciatus
  CDS (1)..(822)
atgcagctgaaaagtgcctgcggagcgttgctgaagatgggcttcctgggcggtggcaaaaccgcccaagccatggcccagggtctggttgacgggaagaatctccgcgcgagcttcagcccgcaagacgaggccaacatggtggcgttccgcggacttggcgcgcagacgtttacggagaacctcccggtggtgcaggactcgcaggtggtgttcattacggtgaagccgtggattgttcccttggtgttggacagcgtcaagtcgattagcggaggcaagctgttcatttcggttgcgatgggactgaaattggcggatttggagcagtcactcgttccggaagctcgcgtgattcgagttatgccaaacattccgacgttggtccgcgctggggctgcggtgtttgttcggggcaagaaagctaccgagcaggactgtgcgttgacacagacgctgttcgaatcggttggaacctgtgacgaagttacggaagcgttgattgatcccattacggcactgtcgggaagcggtcccgggtacgtgtttgccatgattgaggcgatggccgacggagcggtcaagatgggactgtcacgtgacttggcgtacaagctggccgcccaaacggtgatgggagccggcaagatggtccgagaaactggaatgcatcccggacagctgaaggatgacgtggcgagtcccggtgggtcgaccatccacggattgtcctttctggagaagaatgcgttccgctacatcgtggccggtgccatcgaggcggccaccaacaggtgtcgggagttttccaaggagaaatga

SEQ ID NO: 7691 - protein, 273 aa, Culex quinquefasciatus
MQLKSACGALLKMGFLGGGKTAQAMAQGLVDGKNLRASFSPQDEANMVAFRGLGAQTFTENLPVVQDSQVVFITVKPWIVPLVLDSVKSISGGKLFISVAMGLKLADLEQSLVPEARVIRVMPNIPTLVRAGAAVFVRGKKATEQDCALTQTLFESVGTCDEVTEALIDPITALSGSGPGYVFAMIEAMADGAVKMGLSRDLAYKLAAQTVMGAGKMVRETGMHPGQLKDDVASPGGSTIHGLSFLEKNAFRYIVAGAIEAATNRCREFSKEK

SEQ ID NO: 7692 - DNA, 816 bp, Acyrthosiphon pisum
  CDS (1)..(816)
atgttgaaaatcggatttttcggtgcgggcaaaatggctcaggcgttggccaaaggtttcttggcggccggtctcgtcaaaggagaaaacattacagccagctgtgccccacaagacacgcagtgcgtcgaagctttcgagggatttggatctaaagtgactttcgacaaccagtcggtggccgacaacgctgacgtcctactgctggccgttaaaccatccgtggtcaagacggtattggaccagatccgtccgaatttcacgtctagcagacacctgttgctgtccgtcgccatgggtgtcaccgtaaatcagttggaaaacctcttaccggacggatcgagggtaatgcgagtaatgcccaacactcctgcgttggttcagtgcggtgcttccgtgtacgtgccgggcaatcgggcgacggtcgaagacgagaagctgacggcaaaacttttgtcgtccgtgggcacggcggagcgcgtacaagagtacttgatggatccgatcactgcgctcagtggttccggtccggcatacgtgtacgtgattattgaagcgctggccgacggtgccgttcgcatgggcatgcctagagacatggcttaccgattggcgtcgcagactgtcctgggcgcagggaccatggttcgagagacgaaagaacatccgggaaaactcaaggatgacgttacctcaccagcgggttctacggcggctggtctctgtgctctggaacatggtggcctaagatttacaatcattgacgctttggaaaaagctacggaaaaatgtaaggaaacttcaaaggcgctttaa

SEQ ID NO: 7693 - protein, 271 aa, Acyrthosiphon pisum
MLKIGFFGAGKMAQALAKGFLAAGLVKGENITASCAPQDTQCVEAFEGFGSKVTFDNQSVADNADVLLLAVKPSVVKTVLDQIRPNFTSSRHLLLSVAMGVTVNQLENLLPDGSRVMRVMPNTPALVQCGASVYVPGNRATVEDEKLTAKLLSSVGTAERVQEYLMDPITALSGSGPAYVYVIIEALADGAVRMGMPRDMAYRLASQTVLGAGTMVRETKEHPGKLKDDVTSPAGSTAAGLCALEHGGLRFTIIDALEKATEKCKETSKAL

SEQ ID NO: 7694 - DNA, 816 bp, Anopheles gambiae str. PEST
  CDS (1)..(816)
atgagtaaattattaaaattagggtttcttggtggaggaaagatggctcaagctatggctaatggttttatttctgctggattgacacgaggcgaaagcatgacggctagtttccatccctctgaccacgccaacatagaggcgttcaaagcatttggagccaagacatacgtcgagaacctgccggtggtgagcggttccgagatcatcttcatctccgtcaaacccacagtcgtctcgagcgtgctggaagccgtccgtcccgctagcgctggtaaactattcatatcgatcgcgatgggcgttactttgcgggagctagaaaattcgctggagtctaaggcgcgcgtgatccgcgtgatgccaaacacgcctgctctggtacgagccggtgcttccgtgtacgttcgcggatcggccgccacagatgacgattgcaaggtaacgcaggcccttttccaggccgtgggaacctgcgaggaggtgtcggaagctatgatggatcccatcacggcactatcgggaagcggaccagcgtacgtgtttgtaatgattgaggcattagctgacggtgcggtacgcatgggattgccgagagatttggcctaccggttggcatcacagacggtgctcggatctggcaagctggtgcgcgagactggacgccacccgggacagctgaaggacgacgtaacgagtccggccggctcgacggctgccggtctatcccatctggagcagaacgccttccgacacgctgtcagcggagccgtagaatcggccacagttcgatgccgtcaaatttctagcaagtga

SEQ ID NO: 7695 - protein, 271 aa, Anopheles gambiae str. PEST
MSKLLKLGFLGGGKMAQAMANGFISAGLTRGESMTASFHPSDHANIEAFKAFGAKTYVENLPVVSGSEIIFISVKPTVVSSVLEAVRPASAGKLFISIAMGVTLRELENSLESKARVIRVMPNTPALVRAGASVYVRGSAATDDDCKVTQALFQAVGTCEEVSEAMMDPITALSGSGPAYVFVMIEALADGAVRMGLPRDLAYRLASQTVLGSGKLVRETGRHPGQLKDDVTSPAGSTAAGLSHLEQNAFRHAVSGAVESATVRCRQISSK

SEQ ID NO: 7696 - DNA, 990 bp, Magnaporthe grisea 70-15
  CDS (1)..(990)
atgctgaacaccccgtcagatggcgagctgactctggcggtcttgggctgcggcaccatggggatcgccatcctgtccggcatcctcacctccctccaggacatggcggcaagtggagtgttgtctgcatccgcgtccgggacgtcgactccggtccaccccgaggtccccgaccgccttcccagccggttcatcgcctgcgtgcggcgtcccgagagcgccaagaaggtcaaggtggcgctagcggagcacttgtccgtcgtaaaggtcgtgcagaatgacaacctcgcctcggcccggcaggccggcgtcgtgatcctggcctgcaagccccagatgatcggcgacctgttgagcaagcccggcatcgccgaggccctgcgcggcaagctcctcatcagcatctgcgccggcgtcaccgtgccccagatcgagggtcacctggagcaggccctggggtccaaggacgtcgagaacccctgccgcgtcgtgcgcgccatgcccaacacggcatccatgatccgcgagagtatgaccgtcgtggccacgacagagccgccactgccgcctcaggtttccagcctggtgacgtggatcttcaagcgcatcggagatgtcgtctacctcccggcgagcactatggatgcgtcaaccgcgctttgcggttccggtccagccttctttgccctgatgttggaggcggctgtcgatggcgccgtggccatgggcttgcctcgagctgaggctttgaggatggccgcccagaccatgaagggaaccgccgctttggtacagcatggagaccaccctgccctgctcagggacaaagtcagcacaccgggaggttgcaccattggtggactgctcgtactcgaggaaggtatcgtcaggggtacggttgcgagggcggttagggaggctacagttgtagccagtcagctcggccaaggtgtgcaaggagtgaacgggacgcgacctatgcgacactga

SEQ ID NO: 7697 - protein, 329 aa, Magnaporthe grisea 70-15
MLNTPSDGELTLAVLGCGTMGIAILSGILTSLQDMAASGVLSASASGTSTPVHPEVPDRLPSRFIACVRRPESAKKVKVALAEHLSVVKVVQNDNLASARQAGVVILACKPQMIGDLLSKPGIAEALRGKLLISICAGVTVPQIEGHLEQALGSKDVENPCRVVRAMPNTASMIRESMTVVATTEPPLPPQVSSLVTWIFKRIGDVVYLPASTMDASTALCGSGPAFFALMLEAAVDGAVAMGLPRAEALRMAAQTMKGTAALVQHGDHPALLRDKVSTPGGCTIGGLLVLEEGIVRGTVARAVREATVVASQLGQGVQGVNGTRPMRH

SEQ ID NO: 7698 - DNA, 1008 bp, Gibberella zeae PH-1
  CDS (1)..(1008)
atgcccaactcaatggctctcacgccttacggctcaaatggaagtacagacctcaccatggctgtccttggctgtggtactatgggtgttgccattctcagtggtattttgaactctctcgcagagatgcaagggcccaagcccctccaaactttgacttcatcgcccggcgacgaggtgcctgatcgacttccctcacgtttcgtcgccagcgtagccactcctgctggtgctaagcgcgtcaaaggtgccctttgggagcactcttctattctcaaggttgtccacaacgacaacattggtgctgttcagcagtccgaggtcgtcatcctcgcatgcaagccgtggatggtcaaggagattctcaccgagcctggtatttcaaaggctctgcacggcaagctccttatcagtgtctgtgctggtatcactgttgaggatatcgagatcgctctccacggcgctgtgccctgcaaggatcccgaggaggatggccgatgccgcattgtccgtgccatgtgcaacaccgctgccgttatccgcgaatccatgaccgtcattgcatcccccaactcccctctcgaccacgccactgagagccttgtcacctggattttcaagcgcatcggcgacgtcgtctacctgccaacccgacacatggacgcatcaacagctctgtgcgcgtcaggtcctgccttcttcgccctcgtcctagaggctgccattgacggtgcggttgccatgggtattccccgcccagatgctcagcgcatggccacgcagtctatgagaggtactgctggccttgtccagaacggtgagcaccctgctcttctccgcgagaaggtctgcacatccggaggttgcactattggcggcgtcttggttcttgaggaaggcaaagtccgtggcaccgtctcaagagctgtacgtgaagctgctgttgttgctggacagatcggcaagggagccgacggtgtgaatggaacaaggttccactacgagtaa

SEQ ID NO: 7699 - protein, 335 aa, Gibberella zeae PH-1
MPNSMALTPYGSNGSTDLTMAVLGCGTMGVAILSGILNSLAEMQGPKPLQTLTSSPGDEVPDRLPSRFVASVATPAGAKRVKGALWEHSSILKVVHNDNIGAVQQSEVVILACKPWMVKEILTEPGISKALHGKLLISVCAGITVEDIEIALHGAVPCKDPEEDGRCRIVRAMCNTAAVIRESMTVIASPNSPLDHATESLVTWIFKRIGDVVYLPTRHMDASTALCASGPAFFALVLEAAIDGAVAMGIPRPDAQRMATQSMRGTAGLVQNGEHPALLREKVCTSGGCTIGGVLVLEEGKVRGTVSRAVREAAVVAGQIGKGADGVNGTRFHYE

SEQ ID NO: 7700 - DNA, 1419 bp, Apis mellifera
  CDS (280)..(1125)
agtcacatacttaaaaatgtctcaaaaaaattttttaacgtatattttttaattttgaaatatttaaataaataattaatattgaatatcaagaaaatatttaataataataaataattaaataaacaatttactttattaatattttatattatgttattaaaattattaaatgtcagtttaattagaatttttaagaatactttgaacaaaagataaatatattgtatcatatttgattttgtaaacaatatatatatttaatattttttaataaatatggataaaggttatttattgtcaaataaagttggttttattggtggtggaaatatggcaagtgctattggtgctggcttaattcgtaaaggtattttaaatccagataatgtttgggtttctgctcgtacaaataaaactttaggcttttggaatgatcttggtgctcatgctacattaaaaaatggagaagtagtagataattgtgatatcatattcttagcaatgaaacctcatatgtttgatgatgcacttaagggtattagagaaacgatgacaagcaaagcttcacatatactttttgtttcagttcttgtaggagttacattagattgtttagctaataaacttaaatctattgttacatatcccagaataattagatgcatgcctaatactccaatgatggttggagaaggaataacagtatattgttctatgaatacaacaaatcaagatgaaactataatagaaaaattattttcatatattggtgtaattgaaaatgttcctgaatctcttatgaatgctataggtggtctttcaggatctggtcctgcttatgcatatcttgttatagaagcattagcagatggtgctgtgaagatgggtgttccaagaccaatggcaacaaaatttgcagctcaagtattagttggagctggtaaaatggtattagaaacaggtagacatcctggtcaattaaaagatgaagtatgttctccaggaggtacaactattacaggagtacatgctatggaatgtggacaagttagagcttctatgatgaatgcagttgaagctgcagtaagaaaatcaaacgaattaacgtctaatataaaataaaaaaattgtaaaatataaatataataataatatataatatgaaaatatgtaatataatttgcatttttataaatttctttatttttaagaaattatttttgtttttaagaattataagtatttctttaattttaagatgtttattattattaagataatttattattttatttattatttaaaaatataaatagtacaaataagttctaatttagtatgaaaataagtattcaaattgtagtattcaaacaaattgatttgctattttaaataaatataatttgtattcctttt

SEQ ID NO: 7701 - protein, 281 aa, Apis mellifera
MDKGYLLSNKVGFIGGGNMASAIGAGLIRKGILNPDNVWVSARTNKTLGFWNDLGAHATLKNGEVVDNCDIIFLAMKPHMFDDALKGIRETMTSKASHILFVSVLVGVTLDCLANKLKSIVTYPRIIRCMPNTPMMVGEGITVYCSMNTTNQDETIIEKLFSYIGVIENVPESLMNAIGGLSGSGPAYAYLVIEALADGAVKMGVPRPMATKFAAQVLVGAGKMVLETGRHPGQLKDEVCSPGGTTITGVHAMECGQVRASMMNAVEAAVRKSNELTSNIK

SEQ ID NO: 7702 - DNA, 852 bp, Candida glabrata CBS 138
  CDS (1)..(852)
atgacatacactttaaccattctaggatgcggtgtgatgggccaagccgttctttctgccatttacaaggcaccaaaggcaacctctgtcatcaaggctttatatccatctaagattattacctgtaaccatgatgaaccaagtgctcaacaagttaccgaccttatctcaacttttgagacttcccctaatggaatcgaagtcgtctctacctatggcaagaatgtcgaagcagtgaagcaatctgatgttatcattttgggtaccaagccatttctggcagagcaagtattgaacggtgttaaagacgttactagtggcaagttgatcatctcattggctgctggctggacaattggtcaattacaggcgtacacaccatctgtctccagagtcatgactaatacaccagctaagtacggttatggttgtgctgtagtttctcattctcctcaggttacagaagaccagaagtcattggtcagcgaactaattagccatgttgggaagtacgttgaactaccagagaagaatatggatgctgccacagcacttgtaggctcaggtccagcgtttgtcctattggtgttggagtctctaatggagagtggtattaagatgggtatcccattgaaggagagcaccgagtgtgcgttgaaagtgctagaaggtactgcaaagatggttgaagaatctggtgttcacccaagtgttctaaagcaccaagtctgcacacctggaggcaccacaattgcaggattgtgtgtcatggaagacaaaggtgtcaagagtggtatcatcagaggtgtcgaagaagctgcgagagttgctgccgaactgggtaagaaatga

SEQ ID NO: 7703 - protein, 283 aa, Candida glabrata CBS 138
MTYTLTILGCGVMGQAVLSAIYKAPKATSVIKALYPSKIITCNHDEPSAQQVTDLISTFETSPNGIEVVSTYGKNVEAVKQSDVIILGTKPFLAEQVLNGVKDVTSGKLIISLAAGWTIGQLQAYTPSVSRVMTNTPAKYGYGCAVVSHSPQVTEDQKSLVSELISHVGKYVELPEKNMDAATALVGSGPAFVLLVLESLMESGIKMGIPLKESTECALKVLEGTAKMVEESGVHPSVLKHQVCTPGGTTIAGLCVMEDKGVKSGIIRGVEEAARVAAELGKK

SEQ ID NO: 7704 - DNA, 858 bp, Kluyveromyces lactis NRRL Y-1140
  CDS (1)..(858)
atgagtcgttacactttagctattgtgggatgtggtgttatgggccaagcattgttgagtgctatttacaatgcaccaaaagccagcgatgaagctcttcaatactatccaagcaagatcatcgcttgcaatgacgttccagccagcgcagagcttgtggagaaattggttagcgggtttgaaacttcgccaaacggaattgaggtcgaaattgctaccaatgataatgaaagagctgttgccgaagcgaaagtaatcattcttggattgaaacctcatatcgtggaaccagtcttgcagcaaatccctaacgaggacgggtccaagcttttgatctctttggctgccggtgttacattgaaccaattgtctcaatactacaaaaaggtttctcgtgttatgaccaacactccagctaaatacggttatggtactgcaattgtgtcacattctactagcgtcgagcctcaggataaagccattgtatcggaattggttagccaagtcggtaaatgtttggaactaccagaaaaaaatatggacgcagctactgcgctagtcggctcgggtccagcttttgtactactaatgctagaatcaatgatggaagccggactaaagatgggcatcccattgaaggagtcccgcgagtgtgctatgaaagtgttggaaggtactgccaagatggtcgagatttcaggacaaagtcctggtgtgttgaagcaccaagtgtgtactccaggaggtactacgatcgctggtctatgtgtcatggaagacaagggcgtcaagtccggcattatccgtggtatcgaagaagcagcaagagtttccaaggaattgggccaaaagaagtga

SEQ ID NO: 7705 - protein, 285 aa, Kluyveromyces lactis NRRL Y-1140
MSRYTLAIVGCGVMGQALLSAIYNAPKASDEALQYYPSKIIACNDVPASAELVEKLVSGFETSPNGIEVEIATNDNERAVAEAKVIILGLKPHIVEPVLQQIPNEDGSKLLISLAAGVTLNQLSQYYKKVSRVMTNTPAKYGYGTAIVSHSTSVEPQDKAIVSELVSQVGKCLELPEKNMDAATALVGSGPAFVLLMLESMMEAGLKMGIPLKESRECAMKVLEGTAKMVEISGQSPGVLKHQVCTPGGTTIAGLCVMEDKGVKSGIIRGIEEAARVSKELGQKK

SEQ ID NO: 7706 - DNA, 828 bp, Debaryomyces hansenii CBS767
  CDS (1)..(828): transl_table=12
atggaagattatactattgctgtgttaggatgtggtgttatgggtactgctgttacttcagctattctcaaagccaagtttgagccatacccatcaaagattatatgctgtaccaattcagaaaaactgtcgaccgaattaaaatcaaaattagatagcgacgtaatagaaacctcatatgggtcagagtcgaacaataaggctgtttcaaaagcagatattgtgattttgggatgtaaaccatttatgttcaaggatgtttacgaacaggtcaaaggctcgttaagtggtgatcaattgattatttcgttattagctggtaccacaattgaagaattgagcattatgtcaccttatgttgccaaggttatgaccaatactccagctcagtttggttgtggtatggctgttgtttcattctcggacgaagctgagtctaagtactctgatttggtcatgaagttgattgatccagttggaaaggccatgaaattgccagaaaagaacatggatgcggccactgcattagtcggttctggacctgctttctgcttgttgattatggaagcattggttgatggtggtgttagaatggggcttccatatgctgttgcgaaggaatccgccgctaaagttatggaaggtactgcaaagatggtcttagaaactggtgaacatcctgctgctttaagaagtaaaatctgtactcctggtggaactacaattggtggcttactaaaaatggaagatgctggtgttagaggaggtattgcaagagccgttgaagaagctgccaacatttccgcctcctttgctaaaaagaaataa

SEQ ID NO: 7707 - protein, 275 aa, Debaryomyces hansenii CBS767
MEDYTIAVLGCGVMGTAVTSAILKAKFEPYPSKIICCTNSEKLSTELKSKLDSDVIETSYGSESNNKAVSKADIVILGCKPFMFKDVYEQVKGSLSGDQLIISLLAGTTIEELSIMSPYVAKVMTNTPAQFGCGMAVVSFSDEAESKYSDLVMKLIDPVGKAMKLPEKNMDAATALVGSGPAFCLLIMEALVDGGVRMGLPYAVAKESAAKVMEGTAKMVLETGEHPAALRSKICTPGGTTIGGLLKMEDAGVRGGIARAVEEAANISASFAKKK

SEQ ID NO: 7708 - DNA, 900 bp, Yarrowia lipolytica CLIB122
  CDS (1)..(900)
atgggtgtggatattcaacttaaggacggctacacaatctgtttcctcggctgcggtaccatgggtactgccgtgctaggagctgtgctcgattctctaagcaagggtaacaaggagggtgacgccccgaagcccggcaagttcatggcctgtgtgacccgacaggagtccgctgaccgattgcacaaggatctgacctcctctgcccctgacattcccgtcgagattcttatcaatgacaacggatctgcctacaaggctgatgtgtttgttctcggatccaagccctacatggccgagaagatcctgactcctctgcagcaaatgctggagggcaaggttctggtttcgctgcttgccggaaagaccattgccgacattgagagctactctggccgatgccccaagcctttggttgttcgagccatgaccaacactccttctcgaatcggagccggtatgaccgttctgtcgttccccgataacgctaccgttgacgagagcgttgtcaacgctgtgtcctggatctttgagcagaccggaaagtgcatcaccctcgaggagaagcaaatggacgtctccactgctttgtgtggatcttcccctgctttctgcttcctcattatcgaggctctggccgatggtgctgttcgaatgggcatgccctacaacactgccttccagtgtgcagctcagtccatgctgggagctgccaagatggttgttgagtctggccagcaccctgccgtcctcaagagcgctgtgtgcactcctggcggaaccactattggaggactgcttgctctggaggacaagggcgttcgatcttccgttgctcgagccgtggaggagtccactaacatcgctaagtctcttggtggcggtgctgctaagaaataa

SEQ ID NO: 7709 - protein, 299 aa, Yarrowia lipolytica CLIB122
MGVDIQLKDGYTICFLGCGTMGTAVLGAVLDSLSKGNKEGDAPKPGKFMACVTRQESADRLHKDLTSSAPDIPVEILINDNGSAYKADVFVLGSKPYMAEKILTPLQQMLEGKVLVSLLAGKTIADIESYSGRCPKPLVVRAMTNTPSRIGAGMTVLSFPDNATVDESVVNAVSWIFEQTGKCITLEEKQMDVSTALCGSSPAFCFLIIEALADGAVRMGMPYNTAFQCAAQSMLGAAKMVVESGQHPAVLKSAVCTPGGTTIGGLLALEDKGVRSSVARAVEESTNIAKSLGGGAAKK

SEQ ID NO: 7710 - DNA, 825 bp, Candida albicans SC5314
  CDS (1)..(825): transl_table=12
atgaaagactacacgattacagtattaggatgcggtgttatgggcacagctgtaacatcagctattttgaaatccaagtttgacccatacccaaagaaaatcatagcatgtaccattccaagccaagaacaaagcttgaaagaaacctttgctgatcagccattagttcatgtttctgccggagttgaaaacaacaacaaggcagttactgaggcagatgttattattttaggatgtaagccatatatgtatgaaggcatttatgaagaagtcaaggaatcattaactggaaaacaattattaatttcattattggcaggaaccactataaaggaattgtctattttcactccatatgttgccaaagtcatgaccaacactccagctagatttggttgtggaactgcggcaattgcatttgctccagaagttggtgaagaaagccaagagttggtaatgaaattgattgatactgttggtatgactgtaaagattccagagaagaacatggacattgcaacttcattgattgggtccggaccagctttttgtttattgatgatggagtccatgatcgatggtgcagtaagaatgggtatgccatacgatgtagcatctgttgctgccgccaaggtaatggaaggaactgcccgtatggtcttggaaaccggcgaacatccagctgcgttaaagagcaaagtgtgtactcctggtggtactacaattggtggcttgttgaccatggaagatcgtggattaagaagtgctattgctagaggtgttgaagaggctgctaacatatctgcttcatttgccaaaaagtaa

SEQ ID NO: 7711 - protein, 274 aa, Candida albicans SC5314
MKDYTITVLGCGVMGTAVTSAILKSKFDPYPKKIIACTIPSQEQSLKETFADQPLVHVSAGVENNNKAVTEADVIILGCKPYMYEGIYEEVKESLTGKQLLISLLAGTTIKELSIFTPYVAKVMTNTPARFGCGTAAIAFAPEVGEESQELVMKLIDTVGMTVKIPEKNMDIATSLIGSGPAFCLLMMESMIDGAVRMGMPYDVASVAAAKVMEGTARMVLETGEHPAALKSKVCTPGGTTIGGLLTMEDRGLRSAIARGVEEAANISASFAKK

SEQ ID NO: 7712 - DNA, 825 bp, Candida albicans SC5314
  CDS (1)..(825): transl_table=12
atgaaagactacacgattacagtattaggatgcggtgttatgggcacagctgtaacatcagctattttgaaatccaagtttgacccatacccaaagaaaatcatagcatgtaccattccaagccaagaacaaagcttgaaagaaacctttgctgatcagccattagttcatgtttctgccggagttgaaaacaacaacaaggcagttactgaggcagatgttattattttaggatgtaagccttatatgtatgaaggcatttatgaagaagtcaaggaatcattaactggaaaacaattattaatttcattattggcaggaaccactataaaggaattgtctattttcactccatatgttgccaaagtcatgaccaacactccagccagatttggttgtggaactgcggcaattgcatttgctccagaagttagtgaagaaagccaagagttggtaatgaaattgatcgatactgttggtatgactgtaaagattccagagaagaacatggacattgcaacttcattgattgggtccggaccagctttttgtttattgatgatggagtccatgatcgatggtgcagtaagaatgggtatgccatacgatgtagcatctgttgctgccgccaaggtaatggaaggaactgcccgtatggtcttggaaaccggcgaacatccagctgcgttaaagagcaaagtgtgtactcctggtggtactacaattggtggcttgttgaccatggaagatcgtggattaagaagtgctattgctagaggtgttgaagaggctgctaacatatctgcttcatttgccaaatcgtga

SEQ ID NO: 7713 - protein, 274 aa, Candida albicans SC5314
MKDYTITVLGCGVMGTAVTSAILKSKFDPYPKKIIACTIPSQEQSLKETFADQPLVHVSAGVENNNKAVTEADVIILGCKPYMYEGIYEEVKESLTGKQLLISLLAGTTIKELSIFTPYVAKVMTNTPARFGCGTAAIAFAPEVSEESQELVMKLIDTVGMTVKIPEKNMDIATSLIGSGPAFCLLMMESMIDGAVRMGMPYDVASVAAAKVMEGTARMVLETGEHPAALKSKVCTPGGTTIGGLLTMEDRGLRSAIARGVEEAANISASFAKS

SEQ ID NO: 7714 - DNA, 924 bp, Ustilago maydis 521
  CDS (1)..(924)
atggcgggatatacactagctataattgggtgtggtacgatgggcgtggcgattctgtcgggcgtactcgactctcagcggtctcaacaggcgattgcatcatctatggcgtcgtccgtgtcgtcgctgcacgactcaacgacgtgcgatgaccttagcgagctgccgacacgatacattgctactgtgaaccgactggaatctgtgcgtcggctgaagaagacgttttcgcagtatccggatatacagatccatgcggggcagaatgtggccgcggcgcgtgaggccgacgtcatattgctcggttgcaaaccacagatggtacaagacatcatcgccgagtgcggaatgaaagaggctttggacggtaaactggtcatctcgatctgcgctggtcttcgcatctctcaaattgtcgaatgggtcactcctgccaccaaggtcgtcagagcgatgcccaacactccgtgcaagatccgcgaaggaatgaccatcctcaccccgctaccttcaacactcccgaatgcagagctcgaccgcaacatcttgctgagcatcttctcggccgtcggcagatgcaggttcttggacgaaaaacactttgatgcatgcaccgcactcgccggctcaggccccgctttcgcctgcgtcttcttggaagccatggccgacggcggcgtaatgatgggattgcccagacaggaagccctcgaattggctgcacagaccatgcagggagctgcaagaatggtcatgcagtcaggtatgcatcctgccgccatcaaggattcagtcaccacccccggtggttgcaccatcgccggcttgttgaatctggaagatggaaaggtaagaagtaccgttgccagaaccattcaggctgctgctgaacacgcgagcggtctaggtcagaacaggaagtaa

SEQ ID NO: 7715 - protein, 307 aa, Ustilago maydis 521
MAGYTLAIIGCGTMGVAILSGVLDSQRSQQAIASSMASSVSSLHDSTTCDDLSELPTRYIATVNRLESVRRLKKTFSQYPDIQIHAGQNVAAAREADVILLGCKPQMVQDIIAECGMKEALDGKLVISICAGLRISQIVEWVTPATKVVRAMPNTPCKIREGMTILTPLPSTLPNAELDRNILLSIFSAVGRCRFLDEKHFDACTALAGSGPAFACVFLEAMADGGVMMGLPRQEALELAAQTMQGAARMVMQSGMHPAAIKDSVTTPGGCTIAGLLNLEDGKVRSTVARTIQAAAEHASGLGQNRK

SEQ ID NO: 7716 - DNA, 942 bp, Cryptococcus neoformans var. neoformans B-3501A
  CDS (1)..(942)
atgggctacactctcgctgttctcggatgcggtaccatgggcatcgccatcctctctggtgtcatctcttccctcgaaacccgcgcttctcttcctcgcaaccctaacgcctcttccgaacctccttccggtatctccacccctaccgcctcccaatttcttgatgccccagaagcttcccttcctagcactttcatcgctaccgtcggacgcgaggagaccggccgcaagctcagacgcactttggccgacatgggctctatcgggaaacaagtccaggtccgcgctggtcaagggaacgtcaagaccgtggacgaggccgatgtcatcttggtgtgttccaagcctcagattgcgaggtcgatcttggaggaggaaggtatgagcaaggcattggagggaaagctactcatttccatctgtgcgggtgtgaccatctcccaactgaagagctgggtgcccgagagcacccgggtggtgcgagctatgccaaacactccttgtaagatcggagaaggcatgactatcgtgacccccctgtctgacgctctttctcgaacacttatcctcaacatctttacttcttgtggcagatgtcgattcctcgacgagaagcactttgacgcttgtaccgcccttgcgggctctggtcctgcgtttgtggctttggtgttggaggctatggccgatggtggtgtgatgatgggtttgcccaggtctgaagctttggaactagctgctcagaccatgcaaggaaccggaagaatggctcttcaaacaggtttgcaccctgcccaattgaaggacagtgtcactactcccggtggatgcaccattgccggtttgttgacacttgaagacggccgggtgcgatcaacgatggccagagctatccaagtcgccactaaccatgcttccggcctcggacaagacaagaagtaa

SEQ ID NO: 7717 - protein, 313 aa, Cryptococcus neoformans var. neoformans B-3501A
MGYTLAVLGCGTMGIAILSGVISSLETRASLPRNPNASSEPPSGISTPTASQFLDAPEASLPSTFIATVGREETGRKLRRTLADMGSIGKQVQVRAGQGNVKTVDEADVILVCSKPQIARSILEEEGMSKALEGKLLISICAGVTISQLKSWVPESTRVVRAMPNTPCKIGEGMTIVTPLSDALSRTLILNIFTSCGRCRFLDEKHFDACTALAGSGPAFVALVLEAMADGGVMMGLPRSEALELAAQTMQGTGRMALQTGLHPAQLKDSVTTPGGCTIAGLLTLEDGRVRSTMARAIQVATNHASGLGQDKK

SEQ ID NO: 7718 - DNA, 840 bp, Tribolium castaneum
  CDS (1)..(840)
atgacgagcaatttattaaaaattgggtttatcggaggcggaaaaatggcccaggccatggctaagggattcatctcggcaggtctggccaagggtgagaccatgatttccagctgccatccgtcggacttggcgtcggcgaaggctttcaaggaattaggagccgaatctctgttcgaaaacgtccccgtggtgaaaaaatcggacgttatcatcgtctccgtgaaaccctcagtggtgccgatcgccctcggcgacataaaaaaggccgcagatgtgaaagccgacaaattatttctatcaatcgcgatgggagtgacaataaagcagctggaacagttcttgccttcggagtctcgagtggttcgagtgatgccgaacacgcccgccctcgtccgcagcggcacttccgtcttcgtcaccggcagcagggccaccgagaaggacgccgaaaccaccaagaagctgctccaggccgtggggacgtgcgagcaggtccccgagggcctgctggacgccataacggccctcagcggctcggggccggcatatatttatgtcctcatagaggcgctcgccgacggcggcgtcaagatgggccttccgcgggatttagcatatagattggcctcgcagacggtgctaggggccgcgcaaatggtgagggacacgaatacgcaccccggggtgctcaaggacgacgtcacctccccggcgggctcgacggcggccggattgcattttctcgaacagaaaggtttcagagcagctgtgatcggagcaattgaagccgcgacccagagatgtcgcgaggttgctcaaagcgacccaacaaaataa

SEQ ID NO: 7719 - protein, 279 aa, Tribolium castaneum
MTSNLLKIGFIGGGKMAQAMAKGFISAGLAKGETMISSCHPSDLASAKAFKELGAESLFENVPVVKKSDVIIVSVKPSVVPIALGDIKKAADVKADKLFLSIAMGVTIKQLEQFLPSESRVVRVMPNTPALVRSGTSVFVTGSRATEKDAETTKKLLQAVGTCEQVPEGLLDAITALSGSGPAYIYVLIEALADGGVKMGLPRDLAYRLASQTVLGAAQMVRDTNTHPGVLKDDVTSPAGSTAAGLHFLEQKGFRAAVIGAIEAATQRCREVAQSDPTK

SEQ ID NO: 7720 - DNA, 843 bp, Prochlorococcus marinus str. NATL1A
  CDS (1)..(843): transl_table=11
ttggaaatttctcttgggataattggccttggcagtatggctaaggctattgttttacctcttttggagagaggtgaatacaatcctcaacaagttttaggaattgttggtaggagctcaagtattgcatctgcattgaatgatcttccacaggaagtaaaagttgtaactagcaaagatcctttgtctaaagaagtgtggaaggcccctataaaaatattggctgtaaaacctcaacaattaagcaaaatcaaagaatctgtttcgtcatttcaatcgaatgatcagttccctaaaccgttattaatttcagttttagctggaataacattgaaaagtcttaagaaagcttttcctagacacacatgtgtaagagcagtgcctaataccccttctcttgtcggccaagggcttactggtttggcgtggccagatgatatgacttcggatcaaaagaaagttgttagaaagatttttgaacctatcagtgaaatttacgagttggaggagccaaagcttgattcctttttggctttaacttcttcaggacctgcatatatagctttagttgttgaagcaatggctgatggagctgttgccgcaggattaccacgacaattatccaatcaattagctcatagaactctttcaggtactgcatctctactaagagaaaagaatttacaccctgctgaactaaaagatatggttgcctctcctgcaggtactacgattagtgctcttcgacaccttgaactttctggcttgagatccgccttaattgaagcagttgttttggcagcgcagaagagtcgtcaattggctgaggaagtttcgacctag

SEQ ID NO: 7721 - protein, 280 aa, Prochlorococcus marinus str. NATL1A
MEISLGIIGLGSMAKAIVLPLLERGEYNPQQVLGIVGRSSSIASALNDLPQEVKVVTSKDPLSKEVWKAPIKILAVKPQQLSKIKESVSSFQSNDQFPKPLLISVLAGITLKSLKKAFPRHTCVRAVPNTPSLVGQGLTGLAWPDDMTSDQKKVVRKIFEPISEIYELEEPKLDSFLALTSSGPAYIALVVEAMADGAVAAGLPRQLSNQLAHRTLSGTASLLREKNLHPAELKDMVASPAGTTISALRHLELSGLRSALIEAVVLAAQKSRQLAEEVST

SEQ ID NO: 7722 - DNA, 843 bp, Prochlorococcus marinus str. MIT 9303
  CDS (1)..(843): transl_table=11
atggcctctaatcactccatgccctgctctttgggggtaatcggcctgggccgaatggctcaggctcttgttttgccgctgttgaagcagggagagcttgctccgcagcaggttgttgcgctagtgggccgtggcgcaagtgtcgaacgtctcgcagaccaactgccaataggtctgcgtttgaaagctgcagatgatcccactgcggcagaggcatggatggcgcccattcaattgctagcggtgaaaccgcagcagcttgatcagatagcagcttcagcagctcgtcttaagcaaactgcagctgggccgcagctgttgatttctgtgcttgctggcgtgagcttggctcgtttgcagcaggcttttcccgctcatgcctgtgtgcgtgccgttccaaatacccctgccttggtaggcgctgggctcactggattgtcttggggagagggagtcacggcagagcaacgcctagcggttgagcgattgtttttgccggtgagcgaggtgctggaattgccggagtcgcagctggatgcttttttggcgttgacgtcatccggccctgcctatgtggcactggtggctgaggcgatggctgatggtgcggtagcggcaggcctgccgagatccttggcccatcatcttgcccatcgcacccttgctggcacagcagccttgcttaaggagcagaaactgcatcctgcggaacttaaggacatggtgacctctcctggtggcaccacgattgccgcactgcgcaagcttgagcaggctggggttcgttctgctttgattgaggcggttgttgcagctgctcaacgtagccgtgaactggcttga

SEQ ID NO: 7723 - protein, 280 aa, Prochlorococcus marinus str. MIT 9303
MASNHSMPCSLGVIGLGRMAQALVLPLLKQGELAPQQVVALVGRGASVERLADQLPIGLRLKAADDPTAAEAWMAPIQLLAVKPQQLDQIAASAARLKQTAAGPQLLISVLAGVSLARLQQAFPAHACVRAVPNTPALVGAGLTGLSWGEGVTAEQRLAVERLFLPVSEVLELPESQLDAFLALTSSGPAYVALVAEAMADGAVAAGLPRSLAHHLAHRTLAGTAALLKEQKLHPAELKDMVTSPGGTTIAALRKLEQAGVRSALIEAVVAAAQRSRELA

SEQ ID NO: 7724 - DNA, 804 bp, Clostridium difficile 630
  CDS (1)..(804): transl_table=11
atgaaaactttaggatttattggttcagggaatatgggaagtgcaatgataggtggcatagtacagtcaggattagtaaaggcagaagatataactgtatcagatttaagccaagttgccttagataaagtaaaagaagaatttggagtaaatactacaactgattcaaaggtagctgttacaaattctgatgtggtaatagtagcacttaaacctaatatatgcgaaaaggctttaactccacttaaagaattaatagatgcaaataaaataatagtatctatagcagcaggtaaaactatagaaagtctggaaagttttataggttcagataaaaaaatagtaagagtaatgcctaatactccagcccttgttggcgaaggaatgtcagctctttgtaaaaatagtaatgtaacagatgaagagttaaatatgattaaggctctgtttgaatcttttggtgaggcagaaatagtatcagaatatttaatggatacagttacaggtattagtggttcttctcctgcatatgtatttatgtttatagaagctatggcagatgcagcagtattagctggaatgccaagacaacaagcttacaaatttgcatctcaagcagtaatggggtcagctaagatggttcttgaaactggaaaacatccaggtgaattaaaagatatggtttgttctccagcaggaactactatagaagctgttaaggtattagaagaagaaggctttagagcagcagttataaaatctattgttgcttgtatagataagtctaaagacatgagtaaataa

SEQ ID NO: 7725 - protein, 267 aa, Clostridium difficile 630
MKTLGFIGSGNMGSAMIGGIVQSGLVKAEDITVSDLSQVALDKVKEEFGVNTTTDSKVAVTNSDVVIVALKPNICEKALTPLKELIDANKIIVSIAAGKTIESLESFIGSDKKIVRVMPNTPALVGEGMSALCKNSNVTDEELNMIKALFESFGEAEIVSEYLMDTVTGISGSSPAYVFMFIEAMADAAVLAGMPRQQAYKFASQAVMGSAKMVLETGKHPGELKDMVCSPAGTTIEAVKVLEEEGFRAAVIKSIVACIDKSKDMSK

SEQ ID NO: 7726 - DNA, 813 bp, Burkholderia vietnamiensis G4
  CDS (1)..(813): transl_table=11
atgaaaatcgcattcatcggcggcggcaacatggccgcggccctgatcggcgggctcgtcaagcgcggcgtcgccgccgacggcctgtacgccatcgacgtcaacgaggacgtgcgcgcgcgtgccgcgcagcagttcgggatccgcaccggcgcggccgtcgacgcgacgctcgccgattacgacgcgatcgtgctcgcggtgaagccgcaggtgctgaaggaggtcgcgcaggcgctcgcgccgcacctgaagtcgcagctggtgatcagcatcgcggccggcatccgcggcgccgacctcgcgcgctggctcggcggctacacgcgtgtcgtgcgcacgatgccgaacacaccggcgctggtcggcatgggcgtgacgggcctcgcggcgctgccgggcgtcgacgcgaccggtcgcgaactggcgtcgagcgtgctcggcgcggtcggcgagatcgtctggttcgccgacgaagtgcagctcgacgcggtcaccgcgatctcgggcagcgggccggcctacgtgttctatttcatcgaagcgctgcaggaggccgcccgccgcctcggcctgaacgacgaacagggccgcgcgctcgcggtcgcgacgttcgccggcgccgcgcagctggccgcgcagtcgggcgagccggcgagcgtgctgcgcgagcgcgtgacgtcgaaaggcggcacgacggccgccgcgctcgcgtcgttcgacgcgcagcaggtgaaggaagcgatcgtgcgcggcgcgctcgctgcgcacgcgcgcgcgcaggaaatgggcgacgagctcggccgcgcgtaa

SEQ ID NO: 7727 - protein, 270 aa, Burkholderia vietnamiensis G4
MKIAFIGGGNMAAALIGGLVKRGVAADGLYAIDVNEDVRARAAQQFGIRTGAAVDATLADYDAIVLAVKPQVLKEVAQALAPHLKSQLVISIAAGIRGADLARWLGGYTRVVRTMPNTPALVGMGVTGLAALPGVDATGRELASSVLGAVGEIVWFADEVQLDAVTAISGSGPAYVFYFIEALQEAARRLGLNDEQGRALAVATFAGAAQLAAQSGEPASVLRERVTSKGGTTAAALASFDAQQVKEAIVRGALAAHARAQEMGDELGRA

SEQ ID NO: 7728 - DNA, 828 bp, Bradyrhizobium sp. ORS278
  CDS (1)..(828): transl_table=11
atgacttccgtgggcaacaacgaactccaacacaccaccggcaccatcgtgctggccggtgccggcaagatgggcggcgcgatgctgagcggctggctggccggcgggctcgatccggcgcgggtggtggtgatcgagccgatgccgtcggccgagatcacggcgctggtggccaagggtgtgcggctcaatccggccgatgccgcaccggccgaggtcgtcatcctcgccgtcaagccgcagatgttccgcgaagccggaccggcgctgaagcggtgggtgggcggcgccacgctggtgctgtcgatcatggccggcaccacgatcgccagcctgcaggatgtggtgggcggcgccgtggtgcgcgcgatgcccaacacgccggccgcgatcggccgcggcatcacggtcgccgtacccgccgccaatgtcagcgccagccagcgcgcgctgaccgatgcgctgctgcgcgcgaccggggcggtcgaatgggtggatgacgagatgctgatggacgcggtcaccgcggtctccggctccggccccgcttatgtcttcctgctcgcggaggagctcgcgcgcgccggcgtcgccgctggcctgcccgaggcgctggcgacgaagctggcacgcgacacggtgtccggcgcgggcgagctgctgcatcgctcggatctctcatctgcgacattgcggcggaacgtcacctcgcccgggggcacgaccgcggccgcactctcggtgctgatggccgcggacggcttccagccgctgctggagcgcgcggtggccgcggcgacggcaaggtcgaaggaattggccaaatag

SEQ ID NO: 7729 - protein, 275 aa, Bradyrhizobium sp. ORS278
MTSVGNNELQHTTGTIVLAGAGKMGGAMLSGWLAGGLDPARVVVIEPMPSAEITALVAKGVRLNPADAAPAEVVILAVKPQMFREAGPALKRWVGGATLVLSIMAGTTIASLQDVVGGAVVRAMPNTPAAIGRGITVAVPAANVSASQRALTDALLRATGAVEWVDDEMLMDAVTAVSGSGPAYVFLLAEELARAGVAAGLPEALATKLARDTVSGAGELLHRSDLSSATLRRNVTSPGGTTAAALSVLMAADGFQPLLERAVAAATARSKELAK

SEQ ID NO: 7730 - DNA, 804 bp, Dehalococcoides sp. BAV1
  CDS (1)..(804): transl_table=11
atgaacatagcatttatcggcgggggaaatatgggtgaggccatcttgggcgctcttatccaaaaaaacatctgcccgccccaaaatatcactgtaagtgagattaaagctgaacgccgtacctaccttgaaaccagctatggcataaaaaccaccgcttcaaacccggatgcgataaagagtgcagaggtagttctgctggctatcaaaccccagaatctgcccgaactgagtgccgaactgaagggcaaactggcggacaaacagctggttatatccattattgccggggcaaccttaagcaaactcagcggcgggcttgcccataaagcggtggtgcgggttatgcccaacacccccgccatgataggcatgggcatgagcgtctggactgccctgccgtctgtcagccccgcccagaaagaccaagctaaagccatactttcagccatgggcaaagaaatatataccggcaaagaaaccatgctggatgcagctaccgctatctcaggttcaggcccggcctatttctttctgttcatggaagggctggaaaaagcggcactggaaatgggctttacacctgaagaagcatctatactggtatcccagacagctgccggttcggctatttatgccggaaaatccggctttgcgctcacccagcttcgcaaaaacgtaacctcgcccggcggtactaccgccgaagctataaaggcatttgaagaagccggtctggaggcaactataatcaaggctgccaaggccgcctttaaccgctctgtagaactgggcaagggttaa

SEQ ID NO: 7731 - protein, 267 aa, Dehalococcoides sp. BAV1
MNIAFIGGGNMGEAILGALIQKNICPPQNITVSEIKAERRTYLETSYGIKTTASNPDAIKSAEVVLLAIKPQNLPELSAELKGKLADKQLVISIIAGATLSKLSGGLAHKAVVRVMPNTPAMIGMGMSVWTALPSVSPAQKDQAKAILSAMGKEIYTGKETMLDAATAISGSGPAYFFLFMEGLEKAALEMGFTPEEASILVSQTAAGSAIYAGKSGFALTQLRKNVTSPGGTTAEAIKAFEEAGLEATIIKAAKAAFNRSVELGKG

SEQ ID NO: 7732 - DNA, 819 bp, Synechococcus sp. WH 7803
  CDS (1)..(819): transl_table=11
gtgagcttcgccgttggtgtgatcggcatggggcgcatggctcaggccttggtgcgtcccctggttgaaggtggatctcttcgcggatctgatctgattgcagtcgttggtcgcgagccctccgtggcccatctccaatcccaactgcaatctgaaatcactgtgatttccagttccgatcctcggatgcacgaggcatgggaggccccggttcagcttctggctgtcaagcctcagcagctcgatcaggtcgcggcatccgtcccgaccccccctgcaggtgcggccccgctgctgatctctgtgttggctggagtcaccttggagcgactgcagagcacatttcccggcagggtttgtgtgcgcgccgtacccaatacgccttgtttggtggctgaagggctgtgcggccttgcctgggggtgtgatgtcacgtccgagcagcaggcatgggtgcgtcgcatgttcgagcctgtcagtgaagtgctcgagttgccggaatcgcaactcgacgctttcctcgcgctcacgtcctccggaccggcttatgtggcgttgatggccgaagcgatggctgatggtgccgttgctgcaggcctgccgagggatcaggctctaaggctggcgcagcgcaccttggccgggaccgccgcgcttctggaccagcagcaactgcatccagcgcaactcaaagacatggtggcctctccgggaggcaccaccatcgctgcgctccgtgttttggaaaaggctggattgcgttcagcattgatcgaggccgtggtggcggccacggagcgggggcgagcactgcgttaa

SEQ ID NO: 7733 - protein, 272 aa, Synechococcus sp. WH 7803
MSFAVGVIGMGRMAQALVRPLVEGGSLRGSDLIAVVGREPSVAHLQSQLQSEITVISSSDPRMHEAWEAPVQLLAVKPQQLDQVAASVPTPPAGAAPLLISVLAGVTLERLQSTFPGRVCVRAVPNTPCLVAEGLCGLAWGCDVTSEQQAWVRRMFEPVSEVLELPESQLDAFLALTSSGPAYVALMAEAMADGAVAAGLPRDQALRLAQRTLAGTAALLDQQQLHPAQLKDMVASPGGTTIAALRVLEKAGLRSALIEAVVAATERGRALR

SEQ ID NO: 7734 - DNA, 816 bp, Klebsiella pneumoniae subsp. pneumoniae MGH 78578
  CDS (1)..(816): transl_table=11
atggtgatggataagaaaattggctttatcggctgcggcaatatgggtaaggccattctgggcgggctgatcgccagcggtcaggtacagccgggacaaatctgggtctacaccccgtcgccggacaaggttgcagctctgcgcgaccagtatggcatcaacgccgccagcagcgcccaggaagtggcgcagattgccgatatcgtcttcggcgcggttaaaccggggatcatgaccaaagtgctgggcgatatcgcctccagcctgaataaagagtcgctggtggtctctatcgccgccggcgttacgcttgagcagctggcgcgcgcccttggccacgatcgcaaaatcattcgcgcgatgccgaatacgccgtcgctggttaacgccggtatgacctccgtcacgcctaacgccctggtgagcagcgaagatgttgccgaagtgctgactattttccgttgctttggccaggcggagcaaattgccgagccgatgatccatccggtggtgggggtaagcggttcggcgccggcctatgtctttatgtttatcgaagcgatggccgatgccgccgtcctcggcggaatgccgcgcgctcaggcctataaattcgccgcccaggcggtgatgggctccgccaaaatggtgctggagagcggagaacacccaggggcgctgaaagatatggtctgttcccctggcgggaccaccatcgaagccgtgcgcgtgctggaagagaaagggttccgctcggcggtaatcgaagccatcacccagtgtatggaaaaatcagagaaactgagccgctcctga

SEQ ID NO: 7735 - protein, 271 aa, Klebsiella pneumoniae subsp. pneumoniae MGH 78578
MVMDKKIGFIGCGNMGKAILGGLIASGQVQPGQIWVYTPSPDKVAALRDQYGINAASSAQEVAQIADIVFGAVKPGIMTKVLGDIASSLNKESLVVSIAAGVTLEQLARALGHDRKIIRAMPNTPSLVNAGMTSVTPNALVSSEDVAEVLTIFRCFGQAEQIAEPMIHPVVGVSGSAPAYVFMFIEAMADAAVLGGMPRAQAYKFAAQAVMGSAKMVLESGEHPGALKDMVCSPGGTTIEAVRVLEEKGFRSAVIEAITQCMEKSEKLSRS

SEQ ID NO: 7736 - DNA, 804 bp, Kineococcus radiotolerans SRS30216
  CDS (1)..(804): transl_table=11
atgagcgggaccctggccctggtgggggcgggggtgatggggcagacgctgctgggcggtctgctgcgcgccggccgcgaacccggcggcgtcctggtggtggaccgccgccccgggcgggcgcgggagctgcacgagcggttcggggtccgcgtcgtggacgacgtgggcgcggtggcgggggcctcgacggtcctgctcgcggtcaagccgcaggaccttctcgcgctgctggactccctcgcggggcacctggccccggacgcgctggtggtctcgctcgcggcgggggtcacgaccgcggcgatcgaggcgcggctgcccgcgggcacggccgtggtgcgggtcatgcccaacaccccctccctcgtcgacgaggggatggcgggcctctcgggcggctcggcctgcggcgacgagcagctggccgaggccgaggacctgctgcgctcgtgcgggcgcacggtcgtgctggccgagaagcacctggacgcggtgacggcgctgagcggttccgggcccgcgtacgtgttctacgtggtggaggccatggtcgaggccggggtgctgctggggctgccgcgcgcgacggcgaccgagctggtcgtgcagaccgtcgtgggcgccggcgcgatgctgcgcgagacggggcagcaccccacggtcctgcgcgagcaggtcacctccccggcggggacgacggcggccgcgctgcggcagctggacgactcgggggtgcgggccgcgctggtcgcggccgtcgaggcggccgcggcccgctcccggcagctctcggggagctga

SEQ ID NO: 7737 - protein, 267 aa, Kineococcus radiotolerans SRS30216
MSGTLALVGAGVMGQTLLGGLLRAGREPGGVLVVDRRPGRARELHERFGVRVVDDVGAVAGASTVLLAVKPQDLLALLDSLAGHLAPDALVVSLAAGVTTAAIEARLPAGTAVVRVMPNTPSLVDEGMAGLSGGSACGDEQLAEAEDLLRSCGRTVVLAEKHLDAVTALSGSGPAYVFYVVEAMVEAGVLLGLPRATATELVVQTVVGAGAMLRETGQHPTVLREQVTSPAGTTAAALRQLDDSGVRAALVAAVEAAAARSRQLSGS

SEQ ID NO: 7738 - DNA, 831 bp, Prochlorococcus marinus str. MIT 9211
  CDS (1)..(831): transl_table=11
gtgcctttctctatagggataattggtctagggcgaatggctcaggctattttgacccctttactggaaagaggtgattttaaacctgatgaagttttgggtgttgttggtcagagaagtagtgttaaaaaagtcttaggagagttttctcaagatctatctattgtttcctcagacaatccagtttctcttgaggtatggaattctccaatacaacttttagcagtaaaaccacaacagttaaatgatattaaagagcaggtttctcaactggagattgtcccagatagacccaagccagttctcatttctattttagctggtgttaatttaaaaaggttgcaatcaatcttccctgctcataattgtgtgcgagcagttcccaatattcctgtaattgtcaggtcaggactgacgggcctatcatggggtgcaggagttacaaccgatcagcgcctatctgtagaagccatttttaaacctattagtgaagtacttgaattgcctgagaagcagcttgatgcatttcttgctttaacttcttcaggacctgcttatgtggccgtgattgcagaagctttggctgatggagcggttgcggctggtttgcctcgctcattagcaaatgatttgtcgaatatgactcttgctggatctgcaaaattattgaaggaaagcaatttgcatcctggagagcttaaagatatggttgcttctcctgccggcacaactattactgctctgcgccatctagagatggcaggtattcgctcagctttgatcgaggctgttgttttggccgcggaaagaagtcgggagcttggttgctag

SEQ ID NO: 7739 - protein, 276 aa, Prochlorococcus marinus str. MIT 9211
MPFSIGIIGLGRMAQAILTPLLERGDFKPDEVLGVVGQRSSVKKVLGEFSQDLSIVSSDNPVSLEVWNSPIQLLAVKPQQLNDIKEQVSQLEIVPDRPKPVLISILAGVNLKRLQSIFPAHNCVRAVPNIPVIVRSGLTGLSWGAGVTTDQRLSVEAIFKPISEVLELPEKQLDAFLALTSSGPAYVAVIAEALADGAVAAGLPRSLANDLSNMTLAGSAKLLKESNLHPGELKDMVASPAGTTITALRHLEMAGIRSALIEAVVLAAERSRELGC

SEQ ID NO: 7740 - DNA, 810 bp, Synechococcus sp. PCC 7002
  CDS (1)..(810): transl_table=11
atggcggcaaaattcggcatgattggcggcggtgtcatgggagaggccctcctcgcacggctcctcaaggaacaaatttacttgccagcagatgtgattgtgagtgaacctgtggcggaacggcgggcttatttacaacaggaatatcaagtgggtgtcacggccagtaaccaggaagcggcgatcgcctctgaagttttaatgttggcaatcaagccacaaatttttaatcaagtcagcaccgaactccaaggtcaacagctagaaacgcctcccctggtgttgtcaatcctcgctggggttaccctggctcagttacaaggcggttttagggactatccagtggtgcgggcaatgccaaatacaccggcgattattggccaagggatgacggcgatcacccctggggatcgcgtttcagaagcccaggtcgccctcgcaaaacgaatttttggggctgtgggtgaagtggtggcagtaccagagtctctgatggatgcggtgactggactttctggctctggcccggcttttgtggccttgatggtagaagccctggccgatggcggcgttgcggcaggtttgccccgggccacggcccaacaactcgccctccaaacggtcaagggaacggcggaattactccaaacctccggcttacatcccgctcaactcaaagaccgggtgaccagtccagggggcactaccattgctggtgttgcggcccttgaagcccatgggtttcgctcaggggtcattgctgctgttaccgcggcgaaggcccgttctgtcgagttgggccaaggatga

SEQ ID NO: 7741 - protein, 269 aa, Synechococcus sp. PCC 7002
MAAKFGMIGGGVMGEALLARLLKEQIYLPADVIVSEPVAERRAYLQQEYQVGVTASNQEAAIASEVLMLAIKPQIFNQVSTELQGQQLETPPLVLSILAGVTLAQLQGGFRDYPVVRAMPNTPAIIGQGMTAITPGDRVSEAQVALAKRIFGAVGEVVAVPESLMDAVTGLSGSGPAFVALMVEALADGGVAAGLPRATAQQLALQTVKGTAELLQTSGLHPAQLKDRVTSPGGTTIAGVAALEAHGFRSGVIAAVTAAKARSVELGQG

SEQ ID NO: 7742 - DNA, 807 bp, Cyanothece sp. ATCC 51142
  CDS (1)..(807): transl_table=11
gtgtctattagactaggtatcattggaggcggagtgatggcagaagcaatactcacccgtcttttagcatcgcaactttatccggctaatagcctattagtgagtgaaccccaaagctcaagaagggactttttggctgaaacctatgggattaatgtaacagacaacaatcaaaccaccttacaagctaccgaagccctcttattagccgtcaagcctcaaattttggataaggtgacctctcagttaaccttagatgcagtgggcaattatcctttaattctgtccattttggctggaactcctttaaaccgattggaaacagcatttcccaattttcctgttattcgggtgatgcccaatacccctgctacggtaggggaaggcatgacagcgatcgcaccagggactcaggttaaaccatctcatttagccctagccacctcgatttttgaggcggtgggggaagtggtagaagtcactgaatcgttgatggatggagtaaccggtttatcgggatcggggccagcgtttgtggccttgatgattgaggcgttatccgatgggggggtagcttcggggttgccaagagcgatcgctactaaactcgccatacagaccgttctaggcacggctacgttaatgaaagaaacagggttacaccccggtcagttaaaagataatgtcaccagtcccggaggaaccaccattgcaggggtagccaagttagaagaaaaaggctttcgttctgcagtgatcgaagccgttaaaactgcttatcggcgatcgcaagacttaggaaaatag

SEQ ID NO: 7743 - protein, 268 aa, Cyanothece sp. ATCC 51142
MSIRLGIIGGGVMAEAILTRLLASQLYPANSLLVSEPQSSRRDFLAETYGINVTDNNQTTLQATEALLLAVKPQILDKVTSQLTLDAVGNYPLILSILAGTPLNRLETAFPNFPVIRVMPNTPATVGEGMTAIAPGTQVKPSHLALATSIFEAVGEVVEVTESLMDGVTGLSGSGPAFVALMIEALSDGGVASGLPRAIATKLAIQTVLGTATLMKETGLHPGQLKDNVTSPGGTTIAGVAKLEEKGFRSAVIEAVKTAYRRSQDLGK

SEQ ID NO: 7744 - DNA, 885 bp, Mycobacterium marinum M
  CDS (1)..(885): transl_table=11
atgctgtcgggcatgccaagaatcgcgatcatcggcggcggcagcatcggtgaagcattgttgtccggactgttgcgggccgggcggcaagtcaaagatctggtggtggctgagcgggtaccggagcgcgccaaatacctggccagtacctattcggtgttggtgacctcggccaaggatgcggcggagagcgcctcgctggttgtcgtcgcggtcaagcccggcgacgtcgactcggtgatgggcgacctgagcgcggtggttgccgcggccgaaagctacagcggcgagcaggtgttcgtcaccgtcgcggcaggggtcaccacctcatatttcgaatccaagttgcccgcgggcaccccggtggttcgagcgatgcccaacgcggccgcactggtgagtgcgggggttaccgcgctggccaagggccgcttcgtcacgcccgaacagctcgaggaagtctcagccctgttcgattcggtcggcgtcgtgctcaccgttcccgagcagcaactcgacgctgtgaccgcgttgtcggggtccgggccggcgtatttcctgctgatggtcgaggcattggtggacgcgggtgtggcggcgggcttgagtcgtcaggtggcaaccgacctgacggcccagacgatggccggttcggcggcgatgctgctggagcggatggatcaagaccgacgcggcgctgccgagccgttgggtttgcgggtggacacctcgccggcgcagctgcgggcgtcggtaacctcacccggcgggaccaccgccgctgcgctgcgcgaactcgagcgcgaagggttccggggggccgtcgatgccgccgtgcaggccgccaaaagccgctctgagcagctaagaattacatcggaataa

SEQ ID NO: 7745 - protein, 294 aa, Mycobacterium marinum M
MLSGMPRIAIIGGGSIGEALLSGLLRAGRQVKDLVVAERVPERAKYLASTYSVLVTSAKDAAESASLVVVAVKPGDVDSVMGDLSAVVAAAESYSGEQVFVTVAAGVTTSYFESKLPAGTPVVRAMPNAAALVSAGVTALAKGRFVTPEQLEEVSALFDSVGVVLTVPEQQLDAVTALSGSGPAYFLLMVEALVDAGVAAGLSRQVATDLTAQTMAGSAAMLLERMDQDRRGAAEPLGLRVDTSPAQLRASVTSPGGTTAAALRELEREGFRGAVDAAVQAAKSRSEQLRITSE

SEQ ID NO: 7746 - DNA, 819 bp, Nostoc punctiforme PCC 73102
  CDS (1)..(819): transl_table=11
atgactataaaatttggtttaattggtggtggggtaatgggagaagcgctcttatcccgccttatcgcgcgtggaatttatcaatcatcagaagtcatagttagcgaaccgctaccttcacgtctagattttttgcaacagcaatacggtgtttctgtgacgacagataatagtgaggttttcacccaagccaaagaagttgtctttttggcagtgaaaccgcaggtgttcagcgcgatcgcacaagaattagcagatattgatattattaatagagaacaatcacccttgataatttccatattggcgggtgtgcccttaaatcagctagaagctgcatttgtgcaattgccagttatcagagcaatgcccaacactccagccactgtgggagcaggaattaccgccatttgtttaggtgcatatactaataccaagcatcaccaaatagcacaacaagttttttctgctgtgggcgaagttgtggaagtctcagaagggttgatggatgcagtcacagggctatctggtagcggccccgcttacgtggcgctgctagtagaatcacttgctgatggcggagtatccgcaggtttacctagagcaattgccaatcaattagcattgcaaaccgtactgggaacagcgaaactgttgtatgaaaccaaaatgcacccagcagaacttaaagatcgcgttaccagtcccggtggtacaactattgccggaattgccaaactagaacaggcaggatttcgttcagctttaattgaagcagtgaaagctgccacagagcgatcgcaagaactgggaaaataa

SEQ ID NO: 7747 - protein, 272 aa, Nostoc punctiforme PCC 73102
MTIKFGLIGGGVMGEALLSRLIARGIYQSSEVIVSEPLPSRLDFLQQQYGVSVTTDNSEVFTQAKEVVFLAVKPQVFSAIAQELADIDIINREQSPLIISILAGVPLNQLEAAFVQLPVIRAMPNTPATVGAGITAICLGAYTNTKHHQIAQQVFSAVGEVVEVSEGLMDAVTGLSGSGPAYVALLVESLADGGVSAGLPRAIANQLALQTVLGTAKLLYETKMHPAELKDRVTSPGGTTIAGIAKLEQAGFRSALIEAVKAATERSQELGK

SEQ ID NO: 7748 - DNA, 822 bp, Nostoc punctiforme PCC 73102
  CDS (1)..(822): transl_table=11
atgctcgaagatttacaaattgcctttatcggcggtggcacgatgggcgaaatgataattagtagattgttattaacgaaaattgttccaaaagccgatctaattatagtcagcgatccagtttctgcgcgatgccttcatttagaaagggaatatggagtacgtactacaacctccaatatagaagcggttcttggcgcatctattgtgatattagcggtgaagccgcaggttttagcagaggttctaggtatgcttaaggataaaattccacctaatgctttagtaattagtattgtgagtggagcgaatatttcatctctgtgccaagggttgaatcatcctgctgttgtccgtacaatgcccaatattgcagtacaagttggtcatgggactacagtgtggagtgcatcatcaagtgtgacagagatacagcgatcgcatacccaagtcattttacaagcattaggtaaggaatttactacccaaaatgaacattaccttgatatggcaacggcgttgagtagcgcggggactggatttgtgtttctctacatcgaagcgatgattgatgctggcgttcagatgggtttaactcggacacaagcccaagaactaacattgcatacgattgctggtagtgtagaactgatgtttcagactcatgaacatccagcagttttacgaaacaaggtaacaagcccagggggagtcactgctgctggtctttacgagttagaaaaaggtggtatgagaactgttatttctaatgcagtacttgccgctttgagccgcaatcaacaattaggtaatatcagttaa

SEQ ID NO: 7749 - protein, 273 aa, Nostoc punctiforme PCC 73102
MLEDLQIAFIGGGTMGEMIISRLLLTKIVPKADLIIVSDPVSARCLHLEREYGVRTTTSNIEAVLGASIVILAVKPQVLAEVLGMLKDKIPPNALVISIVSGANISSLCQGLNHPAVVRTMPNIAVQVGHGTTVWSASSSVTEIQRSHTQVILQALGKEFTTQNEHYLDMATALSSAGTGFVFLYIEAMIDAGVQMGLTRTQAQELTLHTIAGSVELMFQTHEHPAVLRNKVTSPGGVTAAGLYELEKGGMRTVISNAVLAALSRNQQLGNIS

SEQ ID NO: 7750 - DNA, 801 bp, Bifidobacterium longum DJO10A
  CDS (1)..(801): transl_table=11
atgtccaatccaaccatcggattcatcggatacggcaatatggcgcaggccatcgccgaaggactcgtcgcagccggcgccgtcgacggtgccgacatcgtggcttgcgccgcgcattacgacaagctggaaaagaccacgatgaaagtgggtgcaaagccattgcacaacgcggccgaagtcgtcgcagcgtccgacatggtcgtcatcgccatcaaaccgtaccaaatcgaaagtgtcatcaagccagtcatcggcgcgattgccgacgaagacaaattcgtcgtatccatcgcggcgggctgggatcttgacaaataccgagacttgttcggcgccgatttcaacgcggcgcatatccaatgcaccattccgaacacgccgatggccgtcggcaagggggtactcgtcaccgaagccgacaacacgctgaccgacacgcaagccgaagtgttcgagcggctgttctcatcgatcagcctcatcgaacgcgttgattccgcgcatatgggcattggcatgtgcatcgcaggctgcgcaccggcattcaccgacatgtatatcgaggcgctcggcgacgcgggcgtgaaatacggcctgcaacgtgccaccgcctaccgtctagccgcgaagatggtggaaggcgtcggtgcgctatacctcaaaaacgaaacccatccgggcgtcatgaaggacgccgtctgctcgccgggcggcaccacaatcaagggtgtgacctcgctggaggaaagcgcgttccgcggtgcggtcatcaaggccgtcgacgccatcgaagcctaa

SEQ ID NO: 7751 - protein, 266 aa, Bifidobacterium longum DJO10A
MSNPTIGFIGYGNMAQAIAEGLVAAGAVDGADIVACAAHYDKLEKTTMKVGAKPLHNAAEVVAASDMVVIAIKPYQIESVIKPVIGAIADEDKFVVSIAAGWDLDKYRDLFGADFNAAHIQCTIPNTPMAVGKGVLVTEADNTLTDTQAEVFERLFSSISLIERVDSAHMGIGMCIAGCAPAFTDMYIEALGDAGVKYGLQRATAYRLAAKMVEGVGALYLKNETHPGVMKDAVCSPGGTTIKGVTSLEESAFRGAVIKAVDAIEA

SEQ ID NO: 7752 - DNA, 774 bp, Leptospira interrogans serovar Copenhageni str. Fiocruz L1-130
  CDS (1)..(774): transl_table=11
atgaaatatacgataggaattgcgggttgtggaaatatgggaggagcaatttatttctctcttaaagaacgttatccgacacaagtattgggatatgatccttatataatttccaatcaaaagatagaacttatatcttcctgggatgaatttgtttctaagtccgatttaatactcgtttgtgtaaaacctggaaaggtgattgaacttttaagacaaatcaaagttcctaaaaaaattatatccgttgccgctggaattcatatcgatacaattctaaaaaatcttccgacgggatccaatgtagtgagggtaatgcctaatttacctttactagtttcagaaggggcgatcggatttttcggagacgaagagttatacgaaaccgtttccgagatctttcagcctttaggacattctgtaaaactcggtagtgagactctcatggacgcggttactggactttccggatcgggcccggcctatgtttttaaatttatacaagctttagcagaaggtggcgttctttccggcttggggtatcaagaagcgttggatctcagcatacaaacagtgatcggttctgcacagcttcttagaaaagaaagagagaaagatccgacaactcatccagaagtgtggaaaaataaagtaacttctccaggaggaactacgatagctgggcttgtggaattggaaaaaaatggatttagcaatgcggttttagaggcggtaaaagctgcagcaaatcgttctaaagagttgggagtttaa

SEQ ID NO: 7753 - protein, 257 aa, Leptospira interrogans serovar Copenhageni str. Fiocruz L1-130
MKYTIGIAGCGNMGGAIYFSLKERYPTQVLGYDPYIISNQKIELISSWDEFVSKSDLILVCVKPGKVIELLRQIKVPKKIISVAAGIHIDTILKNLPTGSNVVRVMPNLPLLVSEGAIGFFGDEELYETVSEIFQPLGHSVKLGSETLMDAVTGLSGSGPAYVFKFIQALAEGGVLSGLGYQEALDLSIQTVIGSAQLLRKEREKDPTTHPEVWKNKVTSPGGTTIAGLVELEKNGFSNAVLEAVKAAANRSKELGV

SEQ ID NO: 7754 - DNA, 798 bp, Desulfovibrio vulgaris subsp. vulgaris str. Hildenborough
  CDS (1)..(798): transl_table=11
atgcaaacaacactcggctgcataggttgcggcaacatgggctccgccattctgcgcgggctttccggacgtgaaggactgcgtcttgtcggctgcgaccccacgggcgccaagctggctgcgcttgccgacgcgggcgtcgaaggggtggctgacatcgccgccgccgtgcgcgcttcggacattgttctcgtggccgtgaagccgggtcaggtcggcgcggtgcttggtgcggccatgccggaactcgattccggcaaggtcgtggtctccatcgcctcgggcgtgtccgtcggctcactgcgtgagatgagcggcgggcgttgtcctgtggtgcgcgtcatgcccaacacccccgccatggtgggggcgggcgtcttcgccctgtgcttcgaggacgcgaccctcgatgaggtacgccgcactctcgtgaaggagcttttcgaggcgcttggccgtgtgctggtgctgcctgaagagaagttcaacgccttcacggcggtcgtgggctgtggcccggcctatgtcttccatttcatggaagccgtggtcgaggctgcggtgacgctgggctttccgcgtcatgaggcgacggacatggtggtcgacctcttcgccggttcggtgaagctggctgccacatcaggtacgcatctctctctgcttcgcgaggccgtgtgttcgccagcgggcaacaccatcgccgccatgaaccagttcgacagggatgccgtgcgcggacgcatcatcgacgccatcctcgccgcctacaggcgtgggcaggagatggaacgctag

SEQ ID NO: 7755 - protein, 265 aa, Desulfovibrio vulgaris subsp. vulgaris str. Hildenborough
MQTTLGCIGCGNMGSAILRGLSGREGLRLVGCDPTGAKLAALADAGVEGVADIAAAVRASDIVLVAVKPGQVGAVLGAAMPELDSGKVVVSIASGVSVGSLREMSGGRCPVVRVMPNTPAMVGAGVFALCFEDATLDEVRRTLVKELFEALGRVLVLPEEKFNAFTAVVGCGPAYVFHFMEAVVEAAVTLGFPRHEATDMVVDLFAGSVKLAATSGTHLSLLREAVCSPAGNTIAAMNQFDRDAVRGRIIDAILAAYRRGQEMER

SEQ ID NO: 7756 - DNA, 819 bp, Bacillus thuringiensis serovar konkukian str. 97-27
  CDS (1)..(819): transl_table=11
atggataaacaaattggattcatcggatgcggaaatatggggatggctataattggcgggatgctaaataaaaagatagtgtcttcaaataaaatcatgtgttcagatttaaacacgacgaatttagaaaatgctagtgaaaagtacggaatatctataactactgacaacaagaaagtcgctaaaaatgctgatattttaattttatcaattaaaccagacttatacgcatcagtaattaacgaaattaaagaagagatcaaaagcgatgttattgtcgtaacgatcgctgctggaaaaagtatcaaaagtacagaggattcttttgatacaaaattaaaagttgtacgagtaatgcctaatacccctgctcttgttggtgaaggcatgtctgcattatgcccgaatgaaatggtgacagaaaaagatttagaagatgtgctaaacattttcaatagctttggtcaatcagagatcgtaagtgaaaaattaatggacgttgtaacatctgtaagtggttcttcaccagcatacgtatatatgattatagaagcgatggcagatgctgctgtactagatggtatgccaagaaatcaagcatataaattcgcagctcaagctgtgttaggctctgcaaaaatggtactagaaacaggaatacatcctggtgaattaaaagatatggtttgttctcctggcggaacaacgatagaagctgtagctacattagaggaaaaaggcttacgaacagccatcatttcagctatgcaacgttgtacacaaaagtctgtcgaactatctggtcaaacgaaaaagtaa

SEQ ID NO: 7757 - protein, 272 aa, Bacillus thuringiensis serovar konkukian str. 97-27
MDKQIGFIGCGNMGMAIIGGMLNKKIVSSNKIMCSDLNTTNLENASEKYGISITTDNKKVAKNADILILSIKPDLYASVINEIKEEIKSDVIVVTIAAGKSIKSTEDSFDTKLKVVRVMPNTPALVGEGMSALCPNEMVTEKDLEDVLNIFNSFGQSEIVSEKLMDVVTSVSGSSPAYVYMIIEAMADAAVLDGMPRNQAYKFAAQAVLGSAKMVLETGIHPGELKDMVCSPGGTTIEAVATLEEKGLRTAIISAMQRCTQKSVELSGQTKK

SEQ ID NO: 7758 - DNA, 819 bp, Bacillus thuringiensis serovar konkukian str. 97-27
  CDS (1)..(819): transl_table=11
atgaataaacaaataggatttatcggatgtggcaacatgggtattgctatgataggtgggatgattaataaaaatatagtgtctccaaatcaaataatttgttcagatttaaacgtcagtaatttaaaaaatgctagtgataaatatggcataactataactactaacaacaatgaagtcgctaacagtgctgacattttaattttatcaattaaaccagacctatacacatcggtaattaaccaaataaaagaccaaataaaaaatgatgtcattgttgtaactattgctgcaggaaaaagtattaagagcactgagaatgaatttgatagaaagttaaaggttattaggataatgcctaatacaccggtacttgttggagaaggaatgtctgcattatcttttaatgaaatggttacagaaaaagatataaaagaggtactaactatatttaatattttcggccagacggaggtcgtaaatgaaaaactaatggatgttgttacatctattagtggttcttctccagcatatgtgtatatgtttatagaagccatggcagatgctgctgtacttgacggtatgccaagaaaacaagcttataaatttgcggctcaggctgtattaggttctgcaaaaatggtattggaaacgggaatacatccaggtgaattgaaggatatggtttgttctccaggtggaacgacgatagaagctgtagcaacattagaagaaaaaggtttaagaacagctatcatttcagctatgaaacgttgtacgaaaaaatctatggaaatgtctagtttaactagtaagtga

SEQ ID NO: 7759 - protein, 272 aa, Bacillus thuringiensis serovar konkukian str. 97-27
MNKQIGFIGCGNMGIAMIGGMINKNIVSPNQIICSDLNVSNLKNASDKYGITITTNNNEVANSADILILSIKPDLYTSVINQIKDQIKNDVIVVTIAAGKSIKSTENEFDRKLKVIRIMPNTPVLVGEGMSALSFNEMVTEKDIKEVLTIFNIFGQTEVVNEKLMDVVTSISGSSPAYVYMFIEAMADAAVLDGMPRKQAYKFAAQAVLGSAKMVLETGIHPGELKDMVCSPGGTTIEAVATLEEKGLRTAIISAMKRCTKKSMEMSSLTSK

SEQ ID NO: 7760 - DNA, 822 bp, Pectobacterium atrosepticum SCRI1043
  CDS (1)..(822): transl_table=11
atgcagcaacgtaaaatagcgtttattggtgccggaaatatggcgcaggccattatcgccgggttggtcaacggcggttatcccgctcaacacatcagcgtctgcgcgccttcgggtaaaaaccgcgatgtgctggctgcacaatatggcgtcatcagcagcgcggataatgtacgctgcgctcaggaagcggacgtcattgttctggccgtcaaaccgcaaatgatggcgacggtttgcgaaccgttacatgaacaggtcaatgtcgcgggcaagctggtgctctcgattgccgcgggaatcaacatcgcccgttttcaggcgctgctgggtgagccgctgaatatcgtgcgcattatgcccaacacgccgtctctggtcggaaaagggatgagcggaatgtacgcccccgcatccgtcagtcaggctgataaagacttcaccgcacagctgatgcagagcgtcggtaaaatttgctgggtggatagtgagcaaggcattaacagcgtgatcgccgcagcgggaagcgcaccggcctatttcttcctgtttatggaagcgatgcagcaggaagccattcgccaagggttcgatcaggaaaccgctcgcctgctggtgcaacaggccgcctcaggcgctgctgcgctggttgaggccaatcccgatacgccgctgtcgaccttgcgggaaaatgtcacctccaaaggtggcaccacggcagaagcactacgggtgtttaacgaacagcagttgacgcaaaccgtggccgaggccatgcaggcggcaattgctcgcgcacaggaaatggaaacgcttttttaa

SEQ ID NO: 7761 - protein, 273 aa, Pectobacterium atrosepticum SCRI1043
MQQRKIAFIGAGNMAQAIIAGLVNGGYPAQHISVCAPSGKNRDVLAAQYGVISSADNVRCAQEADVIVLAVKPQMMATVCEPLHEQVNVAGKLVLSIAAGINIARFQALLGEPLNIVRIMPNTPSLVGKGMSGMYAPASVSQADKDFTAQLMQSVGKICWVDSEQGINSVIAAAGSAPAYFFLFMEAMQQEAIRQGFDQETARLLVQQAASGAAALVEANPDTPLSTLRENVTSKGGTTAEALRVFNEQQLTQTVAEAMQAAIARAQEMETLF

SEQ ID NO: 7762 - DNA, 792 bp, Propionibacterium acnes KPA171202
  CDS (1)..(792): transl_table=11
atgagcgggaagattgccgtcctgggctgtggaacgatggctggggcgcttgttggtggactcattgacgctggacaaatgaaggccgaggacgtcgtggcaaccgcgcgatcggcgtcccatcgcgacgaaatcgccaacactttgggtgtaactacgagcggtgacaacaccacagctgtgcgggacgccgacctcgtcatcctcggcgtcaagccttacgcggccgttgacgtgctggaagaagtctcgggtgctctgaaagctgatgcggtggttgtctccattgctgccggtgtcactactgagaagttgctcatggcatggcagggaaagatcgtccgtgtaatgccaaacaccccagttcgggtgggcaaaggggcgttcattgtgagttccgctcccggctccgaggatgcggctaagaaggtgggtgacctactcgaatcggtgggagtcgtcgtcactgtgcctgaggagctgcataatgctgccacagccgtgtcgggatcgggtccggcgtacgttttcttggtagcagaggccatgatcgatgctgccgtcgcgctgggtgtgccgcgcgaccaggctagccaacttactgtagcgacgttagccggttcggctgagttgttggcaggaggcgagcaccctgcggtcctgcgatccaaggtgacgagcccgggtggtaccactgcggctgccgtagccgcattggaggccggaggtgtgcgctccgttttcgccgatgcgatgacggcatgtcgggaccgcgccgctggcctgtcctga

SEQ ID NO: 7763 - protein, 263 aa, Propionibacterium acnes KPA171202
MSGKIAVLGCGTMAGALVGGLIDAGQMKAEDVVATARSASHRDEIANTLGVTTSGDNTTAVRDADLVILGVKPYAAVDVLEEVSGALKADAVVVSIAAGVTTEKLLMAWQGKIVRVMPNTPVRVGKGAFIVSSAPGSEDAAKKVGDLLESVGVVVTVPEELHNAATAVSGSGPAYVFLVAEAMIDAAVALGVPRDQASQLTVATLAGSAELLAGGEHPAVLRSKVTSPGGTTAAAVAALEAGGVRSVFADAMTACRDRAAGLS

SEQ ID NO: 7764 - DNA, 819 bp, Desulfotalea psychrophila LSv54
  CDS (1)..(819): transl_table=11
atgacaacagaaaatataggttttatcggtggcgggcaaatggccgaagcacttatcaaaggccttacccaatcgggctcctatcctgcagaaaacatctatgtacttgatccctctccagaaagaaaagatttcttaacagccacctataatatcaacaccattgaggactgtggggctgcctttgccacctgtcaaaagatctttctcgccgttaaacctcaggtaatgtccctcgtattacaaaattgccaaggaattatcaacgaagatcatctgcttattaccatcgccgccggcctccccatctcgtcctatgtaaagacattggccctgcccagacttaaaattatccgggtaatgcccaatacccccgccttggttggacagagtgcctccgcccttacggcaagcccctatgtaagccaggaagaactcgataaagtacaaaatatttttaatcaaattggcacaacaacggtgctcgaagagtgtcatcttgatgcagtcaccggcctcagtggctcggggcctgcctatgttttttcctttatagaggcccttattgatgccggtgttgccgagggactcaatcgacaggtttcgaccaatcttgccctgcaaaccgttgcgggttccgttgagcttctccgccaaaatggagaacatccagcggtggaacgcgcccgcgtctcctctcctggtgggacaacaatagcagcatccaaaatattagagagatcaggttttcaggcaattatcatggatgccgtcgctgctgcaactgaaaaatcaaaagagcttggcaaggggaagtga

SEQ ID NO: 7765 - protein, 272 aa, Desulfotalea psychrophila LSv54
MTTENIGFIGGGQMAEALIKGLTQSGSYPAENIYVLDPSPERKDFLTATYNINTIEDCGAAFATCQKIFLAVKPQVMSLVLQNCQGIINEDHLLITIAAGLPISSYVKTLALPRLKIIRVMPNTPALVGQSASALTASPYVSQEELDKVQNIFNQIGTTTVLEECHLDAVTGLSGSGPAYVFSFIEALIDAGVAEGLNRQVSTNLALQTVAGSVELLRQNGEHPAVERARVSSPGGTTIAASKILERSGFQAIIMDAVAAATEKSKELGKGK

SEQ ID NO: 7766 - DNA, 855 bp, Symbiobacterium thermophilum IAM 14863
  CDS (1)..(855): transl_table=11
gtggagcggatgcttacgggcaatgtgggatttctgggtgcgggcgcgatcgccgaggccctgatccgcggcatgctgaatgccggggtcgtacagcctgaacaggttctggtgagcaaccgctccgatcgggagcgcctggccgacctgaaccggcgctacggcgtgcgcacggcggggagcaaggggtacgtggtggacgtctgccaggtggtggtgctggcctgcaagcccaaggacgtggccggtctgctggccgaggtgggtggccggttccgcccggggcagatcgtgctctccctggctgcggggatcgcgacgtcgttcatcgaggagcgggtggccgacggggtgatggtcgtacgggcgatgcccaacacctcctgccaggtgggcgagtcggccacggcggtctgcctcggccgcgcggctacgcccgaggcgatgcggctcgtcaccgagatgctggccagcgtcgggcaggtgtataccgtgcccgaggaacagatggacgccgtgaccggcctttccggcagcgggcccgcgtacgtgtactacatcgtcgaggcaatgatcgaggccggcgaggcggtgggcctcgcccccgaggtggcccgggcgctgaccctgcagacgctgaagggcgcggcgctgacgctggccaccaccggggccgaccccgccgtgctgcgagagcaggtgacctcgcccgggggcaccaccgcggcgggcctgcaggtgctgcgggaggccggcttcgcccaggcgctcatcagcgcgatcgtccgggccaccgagaggtcccgggagctgggccggatgccggcgcaggccgccacggaggtcggcgattga

SEQ ID NO: 7767 - protein, 284 aa, Symbiobacterium thermophilum IAM 14863
MERMLTGNVGFLGAGAIAEALIRGMLNAGVVQPEQVLVSNRSDRERLADLNRRYGVRTAGSKGYVVDVCQVVVLACKPKDVAGLLAEVGGRFRPGQIVLSLAAGIATSFIEERVADGVMVVRAMPNTSCQVGESATAVCLGRAATPEAMRLVTEMLASVGQVYTVPEEQMDAVTGLSGSGPAYVYYIVEAMIEAGEAVGLAPEVARALTLQTLKGAALTLATTGADPAVLREQVTSPGGTTAAGLQVLREAGFAQALISAIVRATERSRELGRMPAQAATEVGD

SEQ ID NO: 7768 - DNA, 822 bp, Bacillus licheniformis ATCC 14580
  CDS (1)..(822): transl_table=11
atgaaacgaataggatttatcggagccggttcgatggctgaagcgatgattaaggggcttgtcaaaagcggtgcaatggaacctgaggcgatattcgttacgaatcagtcgaatacggccaggcttcgtgaattaagcgagacttacggggtatgcggagaagcagatacggcaaaagtcgccgcccggtcggatacactcgttttggcgatgaagccgaaagacgcggcaggaggaatagccgcactccgcccctatttgcgaaaagaacagctgctgatctctgttcttgcaggcattccgattcatacgatccagcactatgccgggcttgagctgcctgttgtgagagccatgccgaatacatcggccgccattcaaaaatcagccacagcctttgcggcaagcccgcttgtcacgaaagagcagatgcaggaagcggctgacctctttgcgacggtcggcagcgttacaatcgttgaggaatctgcccttgatgctgtgacagccgtagccggaagcgggcccgcttttgtttatcggtttgtcgaagccctgcaggcgtcggctgccgagctggggcttcctgaaaaaacggcgaaacagctgattatcgatatgatggcaggagcggctcaaatgcttgaaaccggcagagatccttctgtcatgaggaaagagatcacaagcgccggagggacaacggaagcaggccttaggatgcttgacgaccatcaatttgaacagaccgtcatatcctgcgtcaaagaagcggcgaatcgttctgcggaactcagggatatgtttgccgccaaaatttaa

SEQ ID NO: 7769 - protein, 273 aa, Bacillus licheniformis ATCC 14580
MKRIGFIGAGSMAEAMIKGLVKSGAMEPEAIFVTNQSNTARLRELSETYGVCGEADTAKVAARSDTLVLAMKPKDAAGGIAALRPYLRKEQLLISVLAGIPIHTIQHYAGLELPVVRAMPNTSAAIQKSATAFAASPLVTKEQMQEAADLFATVGSVTIVEESALDAVTAVAGSGPAFVYRFVEALQASAAELGLPEKTAKQLIIDMMAGAAQMLETGRDPSVMRKEITSAGGTTEAGLRMLDDHQFEQTVISCVKEAANRSAELRDMFAAKI

SEQ ID NO: 7770 - DNA, 819 bp, Bacillus cereus E33L
  CDS (1)..(819): transl_table=11
atggataaacaaattggattcattggatgcggaaatatggggatggctatagttggtgggatgctaaataaaaagatagtgtcttcaaataaaatcatgtgttcagatttaaacacgacgaatttagaaaatgctagtgaaaagtacggaatatctataactactgacaacaagaaagtcgctaaaaatgctgatattttaattttatcaattaagccagacttatacaccgcagtaattaacgaaattaaagaagtgataaaaaacgatgctatcatcgttacgatcgctgctggtaaaagtattgaaagtactgaaaatgcctttaatcaaaaattaaaagttgtaagagtaatgcctaatactcctgctcttgttggagaaggaatgtctgcattatgcccgaatgaaatggtgacagaaaaagatttagaagaagtgctaaacattttcaatagttttggtcaatcagagattgtaagtgaaaagttaatggatgttgtaacatctgtaagtggttcttcaccagcatacgtatatatgattatagaagcgatggcagatgctgctgtactagatggtatgccaagaaatcaagcatataaattcgctgctcaagcagtattaggctctgcaaaaatggtactagaaacaggaatacatccaggtgaattgaaagatatggtttgttctcctggcggaacaacgatagaagctgtagcaactttagaggaaaaaggcttacgaacagccatcatttcagctatgcaacgttgtacacaaaagtctgtcgaactatctggtcaaacgaaaaagtaa

SEQ ID NO: 7771 - protein, 272 aa, Bacillus cereus E33L
MDKQIGFIGCGNMGMAIVGGMLNKKIVSSNKIMCSDLNTTNLENASEKYGISITTDNKKVAKNADILILSIKPDLYTAVINEIKEVIKNDAIIVTIAAGKSIESTENAFNQKLKVVRVMPNTPALVGEGMSALCPNEMVTEKDLEEVLNIFNSFGQSEIVSEKLMDVVTSVSGSSPAYVYMIIEAMADAAVLDGMPRNQAYKFAAQAVLGSAKMVLETGIHPGELKDMVCSPGGTTIEAVATLEEKGLRTAIISAMQRCTQKSVELSGQTKK

SEQ ID NO: 7772 - DNA, 816 bp, Mannheimia succiniciproducens MBEL55E
  CDS (1)..(816): transl_table=11
atgaaaaataaattgctcacctttatcggcggcggaaatatggcgcaggcgatagtgttcggattgttgaataaaggatattcggcggcaaaattaattgtttgcgatcgtaatgaggctaaacgcaacttatttgcccaaaaaggcgttgaggtcaatttaacgaatgtagaggcggcggaaaaagcggaagtggtggtgcttgcggtaaaacctcaggcgatggcggaaacctgcggcccattaagtgcggtggattttagcggaaaattggtcatttccattgctgccgcagtttccgtaagccgtttatcggcgctgcttccgacggcgaaaaatattgtgcgggtaatgccgaacacgccggcgctggtgtcggaaggcatggcgggtttatttgcatcggcagggcttaacggggaatatcaggatttcgctgaagatttgctgaatgcggtagggaaaacctgctggctacaaaaagaagaggatatgcacgccgttaccgcaggatccggctcaagccccgcttatttctttctatttatggaagctatggaaaaaacattatcaagcatgggaatttcaccggaaaatgcccgcactttggtgcagcagtccgctttaggtgcggcaaaaatggtggaaaacaatccgcagctgcccctttcgacattacgcgaaaatgtcacttcaaaaggaggaaccactgcggcggcgttggcggtgtttaatcaatatcaattagataaaatcgtgcaacaggcgatggaagcctgcgttgcccgttctcaggaaatggaaaaattattttaa

SEQ ID NO: 7773 - protein, 271 aa, Mannheimia succiniciproducens MBEL55E
MKNKLLTFIGGGNMAQAIVFGLLNKGYSAAKLIVCDRNEAKRNLFAQKGVEVNLTNVEAAEKAEVVVLAVKPQAMAETCGPLSAVDFSGKLVISIAAAVSVSRLSALLPTAKNIVRVMPNTPALVSEGMAGLFASAGLNGEYQDFAEDLLNAVGKTCWLQKEEDMHAVTAGSGSSPAYFFLFMEAMEKTLSSMGISPENARTLVQQSALGAAKMVENNPQLPLSTLRENVTSKGGTTAAALAVFNQYQLDKIVQQAMEACVARSQEMEKLF

SEQ ID NO: 7774 - DNA, 825 bp, Methylococcus capsulatus str. Bath
  CDS (1)..(825): transl_table=11
atgaagcataagaccttggggttcatcggggcaggcaacatggcctcgagcctggtgggagggctggtggccgacggttatccggcccggaccatttgggtgtcggacgtggatgaggcgaagctggacgcgctttctctgaagttcggagtcaacgtgagcggggacaaccggcaggtggcgagactggcggaaatcctgatcctggccgtgaagccgcagattctgcgggaagtggcggaggggctggccgacatcgttgcggaaacccggccgctggtcctgtcggtcgcggccggtgtcgcagagtcctccctcgaccgctggctcggcggcgaccaggccctcgtccgctgcatgccgaacaccccggctctggtcaagagttccgccaccgcgctgcatgcgaacggcaagacgacctcagcccaacgtagcgaggccgaaagcatcctgcgcgccgtcggtgtgaccgtctgggtcgagcgggaggaagcgctggacgccgtcacggcgatttccggcagcggaccggcctactttttcctgctgatggaagcgatggaaaacgccgccgccagcctggggctcgatcccgagaccgcacgcctcttggtgcagcagacagcgctcggagccgcccgcatcgccatcgagtccgaagaaggtccggcccagctgcggcagagggtgacctctcccaagggaacgaccgagcgggcgatcggcgtgttcgaggagcgggggctgcatgagatcgtgagagatgccgtggcggcggctcatgccagagcggtcgaattggcgcgggaactgggggcttga

SEQ ID NO: 7775 - protein, 274 aa, Methylococcus capsulatus str. Bath
MKHKTLGFIGAGNMASSLVGGLVADGYPARTIWVSDVDEAKLDALSLKFGVNVSGDNRQVARLAEILILAVKPQILREVAEGLADIVAETRPLVLSVAAGVAESSLDRWLGGDQALVRCMPNTPALVKSSATALHANGKTTSAQRSEAESILRAVGVTVWVEREEALDAVTAISGSGPAYFFLLMEAMENAAASLGLDPETARLLVQQTALGAARIAIESEEGPAQLRQRVTSPKGTTERAIGVFEERGLHEIVRDAVAAAHARAVELARELGA

SEQ ID NO: 7776 - DNA, 825 bp, Azoarcus sp. EbN1
  CDS (1)..(825): transl_table=11
atgacggaacgcatgaagatcagtttcctcggcggcggcaacatggcgaccgccctgatcggcggcctcgccgagcgcggctttgcgagcgcggacatccaggcggtcgacctgcaggccgacagccgcgcgcggctcgcggagcgcttcggcatccgcacggccccggccgtcgatgacgaggtgctcgcatgcgacgtcgtcgtgctggcggtcaagccgcaacagatgaaggccgccgtcgcgccgctgaccgggcgcctggcgcgccaggtggtcgtcagcatcgccgccggcctgcggctcgccgacgtcggccgctggctcggcggctaccatcggctggtgcgcgcgatgccgaacacgcctgcgttgatcggcgcaggcatcaccggcctgtatgccgatccgtcggtcgatgccgccgggcgcgagtcggccgagcgcattctcggtgccgtcggcagcacggtgtggatcgcggacgaggcgcagatggacgcggtgacggccgtctccggcagcggcccggcttacgttttccatttcatcgaggcgctcgaagcggcggccgtctcgctcggcttcgatgcggcaaccgcgcggcagctggcgctcgataccgtgctcggcgcggcgaagctcgccgccggcgccgacgaggcccccgcagtgttgcgcgagcgcgtgacgtcgaaaggcggcacgaccgaggccgcgctcgcgagcatggcgtcgtcgggcgtgttcgacgcgatcgtgcgcgcagtgcacgccgcgaacgtgcgcggccgcgagctcggcgaacagctcggaaaggattga

SEQ ID NO: 7777 - protein, 274 aa, Azoarcus sp. EbN1
MTERMKISFLGGGNMATALIGGLAERGFASADIQAVDLQADSRARLAERFGIRTAPAVDDEVLACDVVVLAVKPQQMKAAVAPLTGRLARQVVVSIAAGLRLADVGRWLGGYHRLVRAMPNTPALIGAGITGLYADPSVDAAGRESAERILGAVGSTVWIADEAQMDAVTAVSGSGPAYVFHFIEALEAAAVSLGFDAATARQLALDTVLGAAKLAAGADEAPAVLRERVTSKGGTTEAALASMASSGVFDAIVRAVHAANVRGRELGEQLGKD

SEQ ID NO: 7778 - DNA, 837 bp, Silicibacter pomeroyi DSS-3
  CDS (1)..(837): transl_table=11
atgacaggagaggggcatatcgtggacatgtctgatatcgcgcgccgcgggctggtcctgctgggctgtggcaagatgggatcggcgatgctcgccggctggctcgacggcgggctgcccgcaggctcggtctgggtgatcgatccctatccgtcggactgggtcaaggcacagggcgtgcatgtgaacgccgagctgcccggtgatccggccatcgcgctgatcgcggtcaagccgcagatgatgggcgatgcgctgccgcagatgcaggcgctgggcaatggcacgacgctctttgtctcggtcgccgccggaacctcgatcgccacctatgaacagatccttggcgccgataccccgatcgtgcgcgccatgcccaacacgcccgccgccatcgggcgcggcatcaccgcgctgatcggcaacgcccgcgcctctgccgccgatctcgacctggccgaggcgctgctcaaggcggtgggccagaccgtgcggctggagcgcgaggaacagatggatgcggtcaccggcgtcagcggctcgggtcccgcctatgtgttccacctgatcgaaacgctggccgccgccggcaccgcccagggcctgcccgccgatctggcgatgcagctggccaaggccaccgtcgcaggcgcaggcgccctggccgaggcggccgaggaagaccccgcgcaactgcgcgtcaacgtgacctcgcccaatggcaccacccaggccgcgctggaggtgctgatggagcccgagaccggttttcccggcctgctcaaccgggccgtcgccgccgccaccaaccgatccagggagctgtcccgtggctga

SEQ ID NO: 7779 - protein, 278 aa, Silicibacter pomeroyi DSS-3
MTGEGHIVDMSDIARRGLVLLGCGKMGSAMLAGWLDGGLPAGSVWVIDPYPSDWVKAQGVHVNAELPGDPAIALIAVKPQMMGDALPQMQALGNGTTLFVSVAAGTSIATYEQILGADTPIVRAMPNTPAAIGRGITALIGNARASAADLDLAEALLKAVGQTVRLEREEQMDAVTGVSGSGPAYVFHLIETLAAAGTAQGLPADLAMQLAKATVAGAGALAEAAEEDPAQLRVNVTSPNGTTQAALEVLMEPETGFPGLLNRAVAAATNRSRELSRG

SEQ ID NO: 7780 - DNA, 795 bp, Synechococcus elongatus PCC 6301
  CDS (1)..(795): transl_table=11
atgatcagcagcttgggcatcattggcggtggcgtgatgggagaagccttgctcgcccgactgttggcccaaggacaggtggccgcgacggccgttactgtcagtgaaccctttgctgctcggtgtgagttcctgaacgatcgctacggcgttcgttgcgttgatgacaatgctgaagctgctcaggctgattgggttttgctggcgatcaaacctcaggtctttgatccggcagtggcaggcctagcaaatttgcgcagcgatcgtttgatcctgtcgatcttggcaggagtacctttggccaagctggaggctgcttttccgcatgaagcggtgattcgggccatgccgaacacgccggcgacggtgggtgctggggtaacggcgatcgcagctggacagcaggtaacggcggatcagctcagccaagcacaggaattttttgcggcagtcggtcgcgttgtcaccgtaccggaatcgcaattggatgccgtgacaggactgtctggttccggccccggctatgtcgctctgattgttgaagccctcagtgatggcggtgtcgctgctggtctgccccgcgcgatcgcgactgaactggcgattcaaacggtgcggggaacggcggaattgctccaagaaaccggctggcatccgggcgaactcaaagatcgcgtctgtagccccggcggtaccacaattgcgggggtagcgacccttgaacaaaatggactgcgatctgccctgatcgaagcggtcaaagcagcagcgctgcgatcgcaacaattgggctag

SEQ ID NO: 7781 - protein, 264 aa, Synechococcus elongatus PCC 6301
MISSLGIIGGGVMGEALLARLLAQGQVAATAVTVSEPFAARCEFLNDRYGVRCVDDNAEAAQADWVLLAIKPQVFDPAVAGLANLRSDRLILSILAGVPLAKLEAAFPHEAVIRAMPNTPATVGAGVTAIAAGQQVTADQLSQAQEFFAAVGRVVTVPESQLDAVTGLSGSGPGYVALIVEALSDGGVAAGLPRAIATELAIQTVRGTAELLQETGWHPGELKDRVCSPGGTTIAGVATLEQNGLRSALIEAVKAAALRSQQLG

SEQ ID NO: 7782 - DNA, 804 bp, Dehalococcoides ethenogenes 195
  CDS (1)..(804): transl_table=11
atgaaaatagcatttatcggcgggggaaatatgggcgaggccattttgggcgcccttatccaaaagaatatctgcccgcctaaggatattaccgtaagtgagattaaagccgaacgccgcactttccttgaaaatacctatggcataaagaccaccccttcaaacccggaggccataaaaaacgccgaagtagtcctgctggctataaaaccccagaacctggctgaactgagcgccggacttaagggcaaactggcagagacacagctggtcatatccattattgccggggcaactctaagtaaactgtccggcgggcttgaacacaaagccgtagtaagggttatgcccaacaccccggctatgataggcatgggcatgagcgtctggactgccctgccggcggtaagccccgcccagaaagaacaagctaaaagcatactttccgccatgggcaaagaaatatataccggcaaagaaaccatgctggatgcggctaccgccatctcaggttcaggcccggcttatttcttcctgtttatggaaagtctggaaaaagcggctcaggaaatgggctttacccctgaggaagcaacggtactggtatcccagacagccgccggttcggctgtttatgcggaaaaatccggcctgccgcttgcccagctccgcaaaaatgtaacctctcccggcggcactaccgccgaagctataaaggtatttgagcaagccggactggaaacaaccgtgattaaggctgccaaagcggcttttgaccgttcggtagagctgggaaagggctaa

SEQ ID NO: 7783 - protein, 267 aa, Dehalococcoides ethenogenes 195
MKIAFIGGGNMGEAILGALIQKNICPPKDITVSEIKAERRTFLENTYGIKTTPSNPEAIKNAEVVLLAIKPQNLAELSAGLKGKLAETQLVISIIAGATLSKLSGGLEHKAVVRVMPNTPAMIGMGMSVWTALPAVSPAQKEQAKSILSAMGKEIYTGKETMLDAATAISGSGPAYFFLFMESLEKAAQEMGFTPEEATVLVSQTAAGSAVYAEKSGLPLAQLRKNVTSPGGTTAEAIKVFEQAGLETTVIKAAKAAFDRSVELGKG

SEQ ID NO: 7784 - DNA, 819 bp, Pseudomonas fluorescens Pf-5
  CDS (1)..(819): transl_table=11
atgaacacgactcgtatcgcttttatcggtgccggcaacatggcggccagtctcatcggcggcctgcgggccaaaggcctggaggcctcgcagatccgcgccagcgacccgggcgagcagacccgagcgaaagtagcggccgaacatggcatccaggtgtttgccgataacgccgaggccatcgaaggcgtcgacgtgatcgtcctggcggtcaagccccaggccatgaaagccgtgtgccaagccctgcgcccgagcctgaagccgcaacagctggtggtgtccatcgccgccggcatcacctgttcgagcatgaacagctggctcggcgcccagcccatcgtgcgctgcatgcccaacaccccggcactgctgcgccagggtgtcagcggcctgtacgccaccgccgaagtcagcgcccagcaacgccagcaggccgaggaactgctgtccgccgtgggtatcgccctgtggctggaccaggagcagcaactggacgcagtgactgccgtctccggcagtggcccggcgtatttcttcctgctgatcgaagccatgaccgccgccggcgagaagctcggcctgccccgggaaaccgccgcccagctgactctgcagaccgccctgggcgccgcccacatggcggtctccagtgacgttgacgccgccgagctgcgccgccgcgtgacttcaccggcaggcaccacggaagcggccatcaagtcattccaggccggtggctttgaagccctggtggaaaaagcattgggtgccgctgcgcaccgctcggccgaaatggccgaacaactgggccaataa

SEQ ID NO: 7785 - protein, 272 aa, Pseudomonas fluorescens Pf-5
MNTTRIAFIGAGNMAASLIGGLRAKGLEASQIRASDPGEQTRAKVAAEHGIQVFADNAEAIEGVDVIVLAVKPQAMKAVCQALRPSLKPQQLVVSIAAGITCSSMNSWLGAQPIVRCMPNTPALLRQGVSGLYATAEVSAQQRQQAEELLSAVGIALWLDQEQQLDAVTAVSGSGPAYFFLLIEAMTAAGEKLGLPRETAAQLTLQTALGAAHMAVSSDVDAAELRRRVTSPAGTTEAAIKSFQAGGFEALVEKALGAAAHRSAEMAEQLGQ

SEQ ID NO: 7786 - DNA, 834 bp, Psychrobacter arcticus 273-4
  CDS (1)..(834): transl_table=11
atgtcagtattggataataagaaaatcagctttatcggtggcggaaatatggcgcaggctttaattagcggcatggtgagctgtggtatcaagcccaatctcattactgtctctgatccaagtagcgaggcacgtgagcaattagctgctaaaggattgaatactgttgacccaatgacggatgccaaagcagcggttattgatgctgatattgtggtgctggcagtcaagccgcaagtgatgaaagcggtggtcagtgccttcgctgatgtcttggataagcagttggtgatttcggtagctgcaggcttatcgaccgatgttttatctagcatgcttggcggctatcgtaatattgtgcgtgcgatgccaaatacgcctgcgatgattcagatgggtgccactggtctttatggtactgatgacatctctgctgagcaaaaacaattggcaactgcggttatggaagcatcagggcttgtgatgtgggtcgaggacgaagcgcacatgcatgcagttaccgcagtatcaggttcagcgcccgcttatatgttttacattattgaagctatggttgatggggcagtagctctaggattggataaagagcaagcgtcagcactggcaatgcaaaccatgctaggtgcggcaaaaatggcaatgggcagcgaagatgcgcccgctgagctacgtcgtaaagtgacttcaccaaatggtactacccaagccgcgattgaatcaatgcaagccaatgatattggtcgtcaaattagtgaagccatgcaagcatgctatgaccgcagccaagccctaagcgaagagatgagtaaatag

SEQ ID NO: 7787 - protein, 277 aa, Psychrobacter arcticus 273-4
MSVLDNKKISFIGGGNMAQALISGMVSCGIKPNLITVSDPSSEAREQLAAKGLNTVDPMTDAKAAVIDADIVVLAVKPQVMKAVVSAFADVLDKQLVISVAAGLSTDVLSSMLGGYRNIVRAMPNTPAMIQMGATGLYGTDDISAEQKQLATAVMEASGLVMWVEDEAHMHAVTAVSGSAPAYMFYIIEAMVDGAVALGLDKEQASALAMQTMLGAAKMAMGSEDAPAELRRKVTSPNGTTQAAIESMQANDIGRQISEAMQACYDRSQALSEEMSK

SEQ ID NO: 7788 - DNA, 822 bp, Colwellia psychrerythraea 34H
  CDS (1)..(822): transl_table=11
atgaataaaatagcctttataggtgccggcaatatggcacgtgccataattattggtttagttaattctggtatcactccccaagacattatagtagccaacccttctgaaactaagagactcaatttagcgacagagtttggagtgttacaaacaaacgataatatcaaagccagtgagttcgccgatgttattgtgctttgtgttaaaccacactttatcactgatgtttgttttcaaataagccaagcaatcgatatagcaggaaaactattcatttctgttgccgcaggtactaccgttgcacaaattcaatcagcgttatcaaaagacgacactttaaaccttgctcctgtagtccgtgtcatgccaaataccccttctcaacttggtttaggcatgagtggtctatttgcttcaaaagaagtggcggtagagcaaaaggctaatgcagaaaaaattactaacgcggttggcaaaagtatttggctcgacacagaagataagattaataatattatcgctgttgctggttctgctccagcctactatttcttatttatggaagcgatggaacagcaagcaaagcagtatggtttttctgcagaagaaagccgtatgctagtgcaacagaccgcgcttggtgctgcccaaatggtcgctcacaacagcgcccctatcagtgagttgcgcgctaatgtcacctcaaaaggcggtacaacacatgccgcaatagaacgttttaaggctgatggtatagaagaaatagttaaaaatgccatgaatgctgcaattgctcgtgctgtagaaatggctaaataa

SEQ ID NO: 7789 - protein, 273 aa, Colwellia psychrerythraea 34H
MNKIAFIGAGNMARAIIIGLVNSGITPQDIIVANPSETKRLNLATEFGVLQTNDNIKASEFADVIVLCVKPHFITDVCFQISQAIDIAGKLFISVAAGTTVAQIQSALSKDDTLNLAPVVRVMPNTPSQLGLGMSGLFASKEVAVEQKANAEKITNAVGKSIWLDTEDKINNIIAVAGSAPAYYFLFMEAMEQQAKQYGFSAEESRMLVQQTALGAAQMVAHNSAPISELRANVTSKGGTTHAAIERFKADGIEEIVKNAMNAAIARAVEMAK

SEQ ID NO: 7790 - DNA, 795 bp, Thermobifida fusca YX
  CDS (1)..(795): transl_table=11
atgatcgcgatcattggggcagggcggatgggtgaagccctgctcgccggaatcctccacaccgggcgggacgccgcggaggtgctcatcagcgaagcgcgcgaagaccgcgccgcagaactctgccagcgctacggggtcgccgccgcctccccggccgaagccgccgcccgcgcagacacgctgctgctcgcagtcaaaccgcaggacatggtcgcggcgttgaacgagattgccccggcactgccccccgggcgcctggtgatctccgtagccgccggaatcaccacagccgtgctggaaaagcaccttcccgcggagaccgccgtggtccgagccatgcccaacacccctgccctggtcggccaggggatgaccgccatcgcagccggaacccacacccttgaggagcacctcgaccgcgcggagaccctgctccgatcggtgggcgaggtcgtgcgcgtaccggagaagcacctggacgcggtcaccgccctctccggaagcggccctgcctacttctacctcgtcgcggaagcgatgatcgaagccggagtgctcctggggctgccgcggccgaccgccgagcggctcgtcacccagaccgcggtgggctccgcggcaatgctgcgcgactccggggaccatccgaccctgttgcgggaagcagtgacctcgcccgggggaacgaccgccgctgccctgcgggaactcgaacgccacggcctgcgcagcgcgttcgctgacgcggtggaagccgcgtgccggcggagcgcggaactcgctgaaggctga

SEQ ID NO: 7791 - protein, 264 aa, Thermobifida fusca YX
MIAIIGAGRMGEALLAGILHTGRDAAEVLISEAREDRAAELCQRYGVAAASPAEAAARADTLLLAVKPQDMVAALNEIAPALPPGRLVISVAAGITTAVLEKHLPAETAVVRAMPNTPALVGQGMTAIAAGTHTLEEHLDRAETLLRSVGEVVRVPEKHLDAVTALSGSGPAYFYLVAEAMIEAGVLLGLPRPTAERLVTQTAVGSAAMLRDSGDHPTLLREAVTSPGGTTAAALRELERHGLRSAFADAVEAACRRSAELAEG

SEQ ID NO: 7792 - DNA, 837 bp, Ralstonia eutropha JMP134
  CDS (1)..(837): transl_table=11
atgctcgacaccctgaccttcggcttccttggcggcggcaatatggccaccgcgctgatcagcggcctgatcgcccgcggcgtgcccgccggttcgatccgcgtggtcgatccgttccccgatgcgcagcagcgcctggtgcgcgacctgcgcgtgcatgtcgccggcgcacccgacgcggcgttcggtgggtccgacgtcctggtgctggccgtcaagccacagcagttccgtgaagccgccgccagcttgctgccgcacctgcctgcgactggcgccggcaacctgatcatcagcgtcgccgccgggattcgcctgcaggacatggagcgctggctgggcggccgcacgcgtctggtgcgcgccatgccgaatacgcccgcactgtcgggcatgggtatgacgggcttggccgcgcccgccggactatcgcaacacgatcgcgcgattgcctccgccgtggcggaagccgtgggcaagagcgcatgggtcgatggcgatgagcagatcgacgcggttacggccatttcgggcagcggtccggcttatgtgttctatttcatcgaagcgatggaacgtgcggcgacggaactcggcctgaccacgcagcagggtcgcgagcttgcggtgcagactttcctcggggcagccacgctggccgggcaatcgacggaaccggtcgctacgttgcgcgagcgggtgacatccaagggtggcacgacgtatgcggcgctcactgccatggaaagcgctggaatcggcgatgctttcgtgcgcgccatgcaggctgcagcggcgcgtgggaaggagatgggggaagagttcgggaaggattga

SEQ ID NO: 7793 - protein, 278 aa, Ralstonia eutropha JMP134
MLDTLTFGFLGGGNMATALISGLIARGVPAGSIRVVDPFPDAQQRLVRDLRVHVAGAPDAAFGGSDVLVLAVKPQQFREAAASLLPHLPATGAGNLIISVAAGIRLQDMERWLGGRTRLVRAMPNTPALSGMGMTGLAAPAGLSQHDRAIASAVAEAVGKSAWVDGDEQIDAVTAISGSGPAYVFYFIEAMERAATELGLTTQQGRELAVQTFLGAATLAGQSTEPVATLRERVTSKGGTTYAALTAMESAGIGDAFVRAMQAAAARGKEMGEEFGKD

SEQ ID NO: 7794 - DNA, 819 bp, Methanosarcina barkeri str. Fusaro
  CDS (1)..(819): transl_table=11
atggtagatcaaaaccaaaagataggatttatcggagcaggaaaaatgggctctgcacttatgcagggaattataaaggccggaattgtaaagcctgaaaaccttggcgcagccgacgtgtacgagcctttcttgaacgatctaaaggcaaagcttggcattaatatatctactgacaattccgttatcgccagggcatccgatattcttctcctagcagtaaagccccagactctgggttctgtactcgaaaatcttaaagctgacataacttctgataaacttataatctcaattgcagctggtgtgcctcttgccacttacgaaaatgcgctccccgctggcacaagagtcatacgtgtgatgccaaatattgcggccacagtttccgaagctgcttcaggtattgctccaggtaaaaatgccactcccgaagacgtgaaaactgcccttgagatcttttctgcagtcggcactgcagtccaggtgtctgagtccataatggacgcagttacaggtctttcaggcagcgggcctgcatttatctttcctgtgattgaggcaatggccgatggggctgttcttgaaggaatggacaggaaaagtgccctcactctctcagcccagactgtacttggggctgcaaaaatgatgcttgaaacaggcctgcaccctggagaactcaaggatatggttacttctcctgccgggactaccatccaaggtgtccatgctcttgaagaggctggagtcagggctgcatttatgaatgcagttataagggcaaccgaacgctcaaaagaacttggaaagaagtaa

SEQ ID NO: 7795 - protein, 272 aa, Methanosarcina barkeri str. Fusaro
MVDQNQKIGFIGAGKMGSALMQGIIKAGIVKPENLGAADVYEPFLNDLKAKLGINISTDNSVIARASDILLLAVKPQTLGSVLENLKADITSDKLIISIAAGVPLATYENALPAGTRVIRVMPNIAATVSEAASGIAPGKNATPEDVKTALEIFSAVGTAVQVSESIMDAVTGLSGSGPAFIFPVIEAMADGAVLEGMDRKSALTLSAQTVLGAAKMMLETGLHPGELKDMVTSPAGTTIQGVHALEEAGVRAAFMNAVIRATERSKELGKK

SEQ ID NO: 7796 - DNA, 804 bp, Dehalococcoides sp. CBDB1
  CDS (1)..(804): transl_table=11
atgaacatagcatttatcggcgggggaaatatgggtgaggccatcttgggcgctcttatccaaaaaaacatctgtccgccccaaaatatcactgtaagtgagattaaagctgaacgccgtacctaccttgaaaccagctatggcataaaaaccaccgcttcaaacccggatgcgataaagagtgcagaggtagttctgctggctatcaaaccccagaatctgcccgaactgagtgccgaactgaagggcaaactggcggacaaacagctggttatatccattattgccggggcaaccttaagcaaactcagcggcgggcttgcccataaagcggtggtgcgggttatgcccaacacccccgccatgataggcatgggcatgagcgtctggactgccctgccgtctgtcagccccgcccagaaagaccaagctaaagccatactttcagccatgggcaaagaaatatataccggcaaagaaaccatgctggatgcagctaccgctatctcaggttcaggcccggcctatttctttctgttcatggaagggctggaaaaagcggcactggaaatgggatttacccctgaagaagcatctatactggtatcccagacagctgccggttcggctatttatgccggaaaatccggcttggcgctcacccagcttcgcaaaaacgtaacctcgcccggcggtactaccgccgaagctataaaggcatttgaagaagccggtctggaggcaactataatcaaggctgccaaggccgcctttaaccgctctgtagaactgggcaagggttaa

SEQ ID NO: 7797 - protein, 267 aa, Dehalococcoides sp. CBDB1
MNIAFIGGGNMGEAILGALIQKNICPPQNITVSEIKAERRTYLETSYGIKTTASNPDAIKSAEVVLLAIKPQNLPELSAELKGKLADKQLVISIIAGATLSKLSGGLAHKAVVRVMPNTPAMIGMGMSVWTALPSVSPAQKDQAKAILSAMGKEIYTGKETMLDAATAISGSGPAYFFLFMEGLEKAALEMGFTPEEASILVSQTAAGSAIYAGKSGLALTQLRKNVTSPGGTTAEAIKAFEEAGLEATIIKAAKAAFNRSVELGKG

SEQ ID NO: 7798 - DNA, 945 bp, Anabaena variabilis ATCC 29413
  CDS (1)..(945): transl_table=11
atggcttcgccaacgctaagagcgaacagaacttttcaagagagaggggtttggggagaggtcatcgaattcacgttaatttatcttaaaaaaatcaggggtgcagctatgttgggagacttaaaaattgcctttatcggcggtggtacgatgggggaaatgataattagtagattgttatcaacaaaaactgttgaaaaatccgagctaattattgttagtgagccatattctacacgatgcctttatttagaaaaagaatatggagtacataccaccaactgcaatatagaagctgtgcaaggtgcatcaattgtgattttggcagtgaaaccccaggttttgccagaggtgatggctgtactaaaagatcaaattccccctgatgctttagtaattagtattgtgggtggggcgagtgtttcatctctttgccaaggcttaaatcatggtgctgttgttcggacaatgcccaatattgcagtacaagttggtcatggaactacagtctggagcgcatcatcaaatgtgacagaaatacagcgatcgcacacccaaattattttacaagcattaggtaaggaatttgttacccaaaatgaacattacctagatatggcaacggctttgagtagtgctgggacaggatttgtattcctgtacattgaagcgatgattgatgctggcgttcagatgggcttaactcgcatacaagcccaagaactaacactacataccattgccggcagtgtagaactgatgttgcaaactaacgaacatccagcagttttacgcaacaaagtaactagtcctgggggagtgactgcggctggtatttacgagttagaaaaaggtgggatgcgaactagcatttctaatgccttttcgactgctttaagccgcactcaacaattaggtaatatcagttgcagcattagtggctag

SEQ ID NO: 7799 - protein, 314 aa, Anabaena variabilis ATCC 29413
MASPTLRANRTFQERGVWGEVIEFTLIYLKKIRGAAMLGDLKIAFIGGGTMGEMIISRLLSTKTVEKSELIIVSEPYSTRCLYLEKEYGVHTTNCNIEAVQGASIVILAVKPQVLPEVMAVLKDQIPPDALVISIVGGASVSSLCQGLNHGAVVRTMPNIAVQVGHGTTVWSASSNVTEIQRSHTQIILQALGKEFVTQNEHYLDMATALSSAGTGFVFLYIEAMIDAGVQMGLTRIQAQELTLHTIAGSVELMLQTNEHPAVLRNKVTSPGGVTAAGIYELEKGGMRTSISNAFSTALSRTQQLGNISCSISG

SEQ ID NO: 7800 - DNA, 813 bp, Anabaena variabilis ATCC 29413
  CDS (1)..(813): transl_table=11
atgactataaaatttggtttaattggtggcggggtaatgggagaagcgctcttatcccgccttattgcgcggggaatttatcaaccatcagaagtcatagtcagcgaaccgcaaacagcgcgacaagcttttttacagcaaaaatatcatgtgggtgtgactacagataacagtttggtattcacacaagctcaagacgttgtattcttggcggtgaaaccacaagtgtttagtgcgatcgctcaagaattagcagatacagtattcacagaccattccccccttgtcgtctctattctcgcaggggtgtctttaagccagctagaagcggcatttccccaatcaccagtcattagagctatgcccaataccccagccactgtaggcgcagggatgaccgctatctgctctggtgcatacacttacgcccaacaccagaaattggcgcaacaaattttttcggcagtgggggaagtagtcgaagtttccgaaagtttgatggatgcagtcactgggctttctggtagcggcccggcttatgtcgctttattagtagaagccctcgctgatgggggagtggcatccgggttacctagaggaattgccaatcaactggcgttacaaactgtgctaggaacagcccaattattacacgaaagtaaactccacccagccgaactcaaagaccgagttaccagccccggtggtactaccatcgcggggattgcccaactagaaaaagcgggatttcgttcagccttaattgaagccgtcaaagcagctacctggcgatcgcaagaattgggcaaatag

SEQ ID NO: 7801 - protein, 270 aa, Anabaena variabilis ATCC 29413
MTIKFGLIGGGVMGEALLSRLIARGIYQPSEVIVSEPQTARQAFLQQKYHVGVTTDNSLVFTQAQDVVFLAVKPQVFSAIAQELADTVFTDHSPLVVSILAGVSLSQLEAAFPQSPVIRAMPNTPATVGAGMTAICSGAYTYAQHQKLAQQIFSAVGEVVEVSESLMDAVTGLSGSGPAYVALLVEALADGGVASGLPRGIANQLALQTVLGTAQLLHESKLHPAELKDRVTSPGGTTIAGIAQLEKAGFRSALIEAVKAATWRSQELGK

SEQ ID NO: 7802 - DNA, 813 bp, Burkholderia sp. 383
  CDS (1)..(813): transl_table=11
atgaaaatcgcattcatcggcggcggcaacatggccgcggccctgatcggcggcctgatcaagcgcggcgttgccgctgacggcctgtatgccatcgacgtcaacgaagaggtgcgcgcgcgcgccgcccagcagttcggcgtgcacaccggcgcggccatcgacgcgacgctcgccgactacgacgcggtcgtgctcgcggtgaagccgcaggtgctgaaggacgtcgcgcaggcgctcgcgccgcacctgaagtcgcagctcgtgatcagcatcgcggccggcattcgcggcacggacctcgcgcgctggctcggcggctacgaccgcatcgtgcgcacgatgccgaacacgcccgcgctcgtcggcatgggcgtgacgggcctcaccgcgctgccgggcgtcgacgcggcgggccgcgaactcgcatcgaacgtgctcggcgcggtcggcgagatcgtgtggttcgacgacgagtcgaagctcgacgccgtcaccgcgatctcgggcagcggccccgcgtacgtgttctatttcatcgaagcgctgcaggaagccgcgcgccagctcggcatgaacgacgaacaggggcgcgcactcgcggtcgcgacgttcacgggcgccgcacaactcgccgcgcaatcgggcgagcccgcgagcgtgctgcgcgaacgcgtgacgtcgaagggcggcacgacggccgccgcgctcgcgtcgttcgacgcgcaaggcgtgaaggatgcgatcgtgcgcggcgcgcttgcagccgaggcacgcgcgaaggaaatgggcgacgagctcggccgcgcgtaa

SEQ ID NO: 7803 - protein, 270 aa, Burkholderia sp. 383
MKIAFIGGGNMAAALIGGLIKRGVAADGLYAIDVNEEVRARAAQQFGVHTGAAIDATLADYDAVVLAVKPQVLKDVAQALAPHLKSQLVISIAAGIRGTDLARWLGGYDRIVRTMPNTPALVGMGVTGLTALPGVDAAGRELASNVLGAVGEIVWFDDESKLDAVTAISGSGPAYVFYFIEALQEAARQLGMNDEQGRALAVATFTGAAQLAAQSGEPASVLRERVTSKGGTTAAALASFDAQGVKDAIVRGALAAEARAKEMGDELGRA

SEQ ID NO: 7804 - DNA, 813 bp, Geobacter metallireducens GS-15
  CDS (1)..(813): transl_table=11
atgctgaagggatgcagagtggggttcatcggcggcggcaacatggcggaggcgatcatcaggggacttctggccggcggggtaacggcggcggaactggtggtggcggagcccatggccgagcggcgggaatttctgcgggagacctacggtattgatgcccgtgccgacaacggcgaggtggccacgatgaccgacgccctgatcgttgccgtgaagccccaggtatttcggggcatggctgcggccctcggggcagcaggctttgccgggaagctcgtcatctccatcatggcggggatatccatcaacggcatcgaggaggtctgcggcgactcttcccgggtgatccgggtcatgccgaacacgccggccctggtgctggagggggcctcggccctctcccgagggaagaacgccaccgacgacgatttgttcttcgcccagggaatcttcgagctggtgggaaccacctgcgtcgtggacgagaaactcatggatgccgtcaccggcctctcggggagcgggcctgcctacgtgttcatgttcatcgaggccctctccgatgccggcgtgaagaacggcctcccccgcgacgtagcaacccgccttgcggcccagacggtcctgggctccgcgagactccttctggagaccggcgaccaccccggagtcctcaaggaaaaggtcacctcccccggcggcaccaccatcgccggcgtagccgccttggaacggggctccttccgggggacggtcatggcggccgtggacgcggccaccgcccgctctgccgagttggggaaaaaataa

SEQ ID NO: 7805 - protein, 270 aa, Geobacter metallireducens GS-15
MLKGCRVGFIGGGNMAEAIIRGLLAGGVTAAELVVAEPMAERREFLRETYGIDARADNGEVATMTDALIVAVKPQVFRGMAAALGAAGFAGKLVISIMAGISINGIEEVCGDSSRVIRVMPNTPALVLEGASALSRGKNATDDDLFFAQGIFELVGTTCVVDEKLMDAVTGLSGSGPAYVFMFIEALSDAGVKNGLPRDVATRLAAQTVLGSARLLLETGDHPGVLKEKVTSPGGTTIAGVAALERGSFRGTVMAAVDAATARSAELGKK

SEQ ID NO: 7806 - DNA, 804 bp, Desulfovibrio desulfuricans subsp. desulfuricans str. G20
  CDS (1)..(804): transl_table=11
atgaaaaatacggttctggggtgtatcggttgcggcaacatgggcggcgccatcatgcgcggtcttgccggggtggaaggattgcagctggccggctttaaccgcagtgccccgaaagtggaagccctgcgggatgaaataggccttgagcctgctcctgatgccgtggcgctggcgcggcgtgccgacattattctgctgggcgtcaagcctgatcagatttgcgatgttatagggcaggtgcgtcctgttctggatgccggcaaggtgctggtttccattgccgccggtgtttcgctggaagccatgcgcagcgctgctcagggggcggccccggtggtgcgggtgatgcccaatacgccggccatggtcggcaggggcatttacggcatgtgtctggacgatcccgccctgtctgcagaagccgcaaccgctgtccggaacctgtttgcagccatcggcaaggtgattgtactgcccgaacagaagttcgaggcatttaccgctgtggccggatgcggtcccgcctatgtctttcatatgatggaagctgtcatcgaagccgcggtaaccgtagggtttacgcggcagcaggccacagaaatggtgacggagctgttttccggctcgtgcgctctggccgaacagacgggaatacatccttcgctgctgcgcgagatggtcacttctccggccggaacaaccatagccggaaccaaccaccttgaccgcaccgctgtgcggggacacatcattgatgccgtgctggcagcctatgaaaaaggtctggccatgcgcagatag

SEQ ID NO: 7807 - protein, 267 aa, Desulfovibrio desulfuricans subsp. desulfuricans str. G20
MKNTVLGCIGCGNMGGAIMRGLAGVEGLQLAGFNRSAPKVEALRDEIGLEPAPDAVALARRADIILLGVKPDQICDVIGQVRPVLDAGKVLVSIAAGVSLEAMRSAAQGAAPVVRVMPNTPAMVGRGIYGMCLDDPALSAEAATAVRNLFAAIGKVIVLPEQKFEAFTAVAGCGPAYVFHMMEAVIEAAVTVGFTRQQATEMVTELFSGSCALAEQTGIHPSLLREMVTSPAGTTIAGTNHLDRTAVRGHIIDAVLAAYEKGLAMRR

SEQ ID NO: 7808 - DNA, 813 bp, Prochlorococcus marinus str. MIT 9312
  CDS (1)..(813): transl_table=11
gtgactgataaaattgcgattattgggtttggcaatattgcaaatgctattattactcctttattcgataagaatttaatacagccagagagagtttattgtgttgtaaattcagaaaagagtttagaaaatataaaaaaaaattataaatacaatataaatgtttataaatcaggttctaaagagtcagaaataatttgggattgtcaatttaaacttctttcaataaaaccccaacatcttaaagatataactgagggagatattataaaaaacaagaacaatttattagtatcaattcttgcaggagtttcaataaataaacttcatcaaaaatttcctaaccataaatgcgtaagggttgttacaaatatcccaataactgttggaaagggtttaacaggcattgcttggggtgaaaatcttacagaagatcagaaagaatttacaaaaaaattgtttgaaaatactagtaagatttatgaatttactgaagaatatcttgatatttttttagctttaacctcatcagggcctgcaattattgctttaattatagaatcattaagtgatggagggttgagtggtggattaccaaaaatactttcagaagaacttgtaatggaaatgataatagggactataagtttaattaaagaaaaaaaacttactacttcagagcttaaaaatttagtaacctctcccggtggaacaactatttctgctttacgggttctagaaaaaaaaggagtaaggtcagcattaattgaatcgattgtttcagctagtaatcgaagtaaagagtttagttag

SEQ ID NO: 7809 - protein, 270 aa, Prochlorococcus marinus str. MIT 9312
MTDKIAIIGFGNIANAIITPLFDKNLIQPERVYCVVNSEKSLENIKKNYKYNINVYKSGSKESEIIWDCQFKLLSIKPQHLKDITEGDIIKNKNNLLVSILAGVSINKLHQKFPNHKCVRVVTNIPITVGKGLTGIAWGENLTEDQKEFTKKLFENTSKIYEFTEEYLDIFLALTSSGPAIIALIIESLSDGGLSGGLPKILSEELVMEMIIGTISLIKEKKLTTSELKNLVTSPGGTTISALRVLEKKGVRSALIESIVSASNRSKEFS

SEQ ID NO: 7810 - DNA, 825 bp, Rhodospirillum rubrum ATCC 11170
  CDS (1)..(825): transl_table=11
atgggttgcctgaccaccgataccccgcttgcgggggtttcgttgttgctgctgggctgcgggaagatgggcggcgccctgctgaacggctggctgggccgtggccttgagccgagcgcggtccatgtcgtcgatcccctggccgatctgcccgccggcgtcacccggctgaccgccgagcaggccgtggccctgccgccgcccgacgtctgtctggtggcgatcaagccccaggtcgtccccgaggttctgccggcctatgccccgctggcccaggccggaacggtgttcttgtcggtggcggcgggcaagacgatcgatggcctgtcgggcctgctgggcggcgatgccgccgtggtccgagcgatgcccaacaccccggccgccgtcggccggggcgccagcgtgctctgcgccaacgcccgggtgccggcgccgacgcgcgccctgtgcgaaaccctgatggccgccgtcggcaccgtcgaatgggtcgatgacgaatcgctgatcgacgcggtgacggccctgtcgggcggcggcccggcctatgtgttcttgctggtcgaatgcctggccgaagccgggcgggccaacggcctgccggccgatctggcgatgcggctggcgcgcagcacggtcgccggctcgggcgccctgcttgacggcagcgccgaagacgccgccaccttgcgcaagaacgtcaccagccacaagggcacgaccgccgccgccctggcggtgctgatggccgaagacgcccttcagcccatggtcacccgcgccatcgccgccgccgccgaacgctcgcgcgaactggcttcctaa

SEQ ID NO: 7811 - protein, 274 aa, Rhodospirillum rubrum ATCC 11170
MGCLTTDTPLAGVSLLLLGCGKMGGALLNGWLGRGLEPSAVHVVDPLADLPAGVTRLTAEQAVALPPPDVCLVAIKPQVVPEVLPAYAPLAQAGTVFLSVAAGKTIDGLSGLLGGDAAVVRAMPNTPAAVGRGASVLCANARVPAPTRALCETLMAAVGTVEWVDDESLIDAVTALSGGGPAYVFLLVECLAEAGRANGLPADLAMRLARSTVAGSGALLDGSAEDAATLRKNVTSHKGTTAAALAVLMAEDALQPMVTRAIAAAAERSRELAS

SEQ ID NO: 7812 - DNA, 795 bp, Moorella thermoacetica ATCC 39073
  CDS (1)..(795): transl_table=11
gtggacgtaaaaatcggttttcttggtgccggggctatggccgaggcccttattcgcggtatcatccaggccaggctggtgcagccggagcggttatgggcctatgacatccgggctgcaaggttgaaggaactggagcaacgattcggattggtggcggcagctagcagggaagaactggcggccgctgcggacatcataattctggccgtaaaaccccagaatgtggaagcggctctgactggattgcaggtcaagggggataagctggtgatctccattattgccggcgtaaccctttcccgcctggcgggatacctgggtgacgtgcctttagtcagggtagtgcccaataccccggccctggttggtgctggggtttccgccctggccgcgggcgcccgggtgggacaggaagacctggagaaagccttggccattttccgctctgtaggcgaggccatggtgttaccggaagaacagctaaacgccgtgaccggcctgagtgggagcgggccggcttacgtttatatgatcattgaagccctggccgacggcggcgtgcgccagggactggccaggccggtagccctggaactggcggccaggaccctcttaggaggagcacagatggtcctggccaccggtgagcacccgggggtcctgaaggatagggtaacctccccggcggggacaactatagccggcctcgccgtactggaagaccggggcgtgcggggagccctcatccgggctgtcgaggctgctaccctgcgggccggcgaacttgaataa

SEQ ID NO: 7813 - protein, 264 aa, Moorella thermoacetica ATCC 39073
MDVKIGFLGAGAMAEALIRGIIQARLVQPERLWAYDIRAARLKELEQRFGLVAAASREELAAAADIIILAVKPQNVEAALTGLQVKGDKLVISIIAGVTLSRLAGYLGDVPLVRVVPNTPALVGAGVSALAAGARVGQEDLEKALAIFRSVGEAMVLPEEQLNAVTGLSGSGPAYVYMIIEALADGGVRQGLARPVALELAARTLLGGAQMVLATGEHPGVLKDRVTSPAGTTIAGLAVLEDRGVRGALIRAVEAATLRAGELE

SEQ ID NO: 7814 - DNA, 813 bp, Burkholderia thailandensis E264
  CDS (1)..(813): transl_table=11
atgaaaatcgcattcatcggcggcggcaacatggcggccgcgttgatcggcggactcgtcaggcgcggcgtcgcggcgagcgagctgctcgccgtcgacatcaacgaagatgcgcgtcagcgcgcgcaagcgcaattcggcgtgcgcacggcggccgccatcgacgccacgctcgccggctacgacgcgatcgtgctcgccgtgaagccgcaggtgctcaaggagatcgcgaccgcgctcgcgccgcatctgtcgacacagctcgtcgtcagcatcgcggccggcattcgcggcgcggacctgtcgcgctggctcggcgattacgcgcgcgtcgtgcgcacgatgccgaacacgccggcgctcgtcggcctcggcgtgaccggcctgtccgcactgccgggcgtcgacgcggcgggccgcgatctcgcatcgaaggtgctcggcgcggtcggcgagacggtctggttcgacgacgaatcgcagctcgacgccgtcaccgcgatctcgggcagcggccccgcgtacgtgttctatttcatcgaggcgctgcaggaagcggcgcgccagctcggcatgaacgacgagcagggccgcgcgctcgcggtcgcgacgttcgcgggcgccgcgcagctcgcggtgcagtcgggcgagcccgcgagcgtgctgcgcgagcgcgtgacgtcgaagggcggcacgacggcggccgcgctggcgtcgttcgacgcgcaacacgtgaaggactcgatcgtgcgcggcgtgctcgccgcacaggcgcgcgcgaaggaaatgggcgacgagctgggcgctgcgtaa

SEQ ID NO: 7815 - protein, 270 aa, Burkholderia thailandensis E264
MKIAFIGGGNMAAALIGGLVRRGVAASELLAVDINEDARQRAQAQFGVRTAAAIDATLAGYDAIVLAVKPQVLKEIATALAPHLSTQLVVSIAAGIRGADLSRWLGDYARVVRTMPNTPALVGLGVTGLSALPGVDAAGRDLASKVLGAVGETVWFDDESQLDAVTAISGSGPAYVFYFIEALQEAARQLGMNDEQGRALAVATFAGAAQLAVQSGEPASVLRERVTSKGGTTAAALASFDAQHVKDSIVRGVLAAQARAKEMGDELGAA

SEQ ID NO: 7816 - DNA, 819 bp, Syntrophus aciditrophicus SB
  CDS (1)..(819): transl_table=11
atgtttgaaaatcagaagatcgggcttgttggttgcggcaagatgggaacgattctgctgtccgggatgctccgtaatcgtctggttgctgaaagtcagataagggttgctgatgtggtaaaagaacgccttgaggaaatccatgaggcttatcccgacattgttcaggaaagcaatcaaccacttgctcgttcggtcgacatccttattcttgcggtaaagcctcagaatctgccggaacttcttaatgagcttacagaagatatccattccgggcaattgatcgtttcggttgcagccggcatttccacccgattgatcgaaaagcacctttccggaccggtacgtgtcgtgcgggccatgccgaataccccggctctcgtcggtgagggtgtgaccgctcttgccgcgggtgcttatgcaacacaaaaagatgttgagactgtcgccaggctgttcgaagccgtgggcttgacagttaaaatcaatgaaaatctcatggatgctgtaaccggcctcagtggcagcggacccggttatgtgtttgttatcctggaagcactcgccgatgctggggtgtttctcggtctgccgcgggaaacagccttgaagctggccgcacagactttgcttggctctgcaaaactctatctccggaccgggaagcatcccggagaactcaaggatatggtgacgtctccgggagggacaaccattgcaggtttgaaagccttagaagagggccggttgagagcgactctgatgacggcggttgaggccgccacccggcgttccaaggtcctggccggggatgaataa

SEQ ID NO: 7817 - protein, 272 aa, Syntrophus aciditrophicus SB
MFENQKIGLVGCGKMGTILLSGMLRNRLVAESQIRVADVVKERLEEIHEAYPDIVQESNQPLARSVDILILAVKPQNLPELLNELTEDIHSGQLIVSVAAGISTRLIEKHLSGPVRVVRAMPNTPALVGEGVTALAAGAYATQKDVETVARLFEAVGLTVKINENLMDAVTGLSGSGPGYVFVILEALADAGVFLGLPRETALKLAAQTLLGSAKLYLRTGKHPGELKDMVTSPGGTTIAGLKALEEGRLRATLMTAVEAATRRSKVLAGDE

SEQ ID NO: 7818 - DNA, 804 bp, Frankia sp. CcI3
  CDS (1)..(804): transl_table=11
atggtcatgatcgttgcggtcatgggggcgggacggctcggcggggcgatgctgtcggggctgctgcggtccgggcatgccgctcaggacatcgtcgtggccgaacgtgatgccgaccgggctggtgagatcgtggcgcgtcacggcgtcgaggtgcaggcgccgacggtggccgcagccaaggcggatgttctgatcatcggggtgaagccccaggacgtcgggaccctgctggccgagatcgggtcggtggtcgcgaacgggacgctcgtggtgtcgttggcggcgggcatcaccactgatcttctcgaggagcggctaccttcgcttcccccggtggtccgggtgatgacgaacaccccgctgctcgtcggggaggcgatgtcggcgatctgcgggggccgctacgccgaggagaagcacctcgccacggcagaagccctgctgacgccggtcggccgggtgacgcgggtggcagagtcccagctcgacgcggtgacggccctgtccggcagcggaccggcgtacttcttctatcttgtcgatgcgatgatcgaggcgggtgtgctccttgggctgccccgcaccctggccgcggaactcatgacccagaccgccctgggctcggcgcggatgctgcgcgagagcggtgagcatccggcgctgttgcgggaggccgtcacctctccggccgggaccacgatcgcggcactgcgggagctggaccgtcgcggtgtgcgcgcggcgctcatggacgccctggaggcggcgagcagtcggtcgcgggaactcggccgtagttga

SEQ ID NO: 7819 - protein, 267 aa, Frankia sp. CcI3
MVMIVAVMGAGRLGGAMLSGLLRSGHAAQDIVVAERDADRAGEIVARHGVEVQAPTVAAAKADVLIIGVKPQDVGTLLAEIGSVVANGTLVVSLAAGITTDLLEERLPSLPPVVRVMTNTPLLVGEAMSAICGGRYAEEKHLATAEALLTPVGRVTRVAESQLDAVTALSGSGPAYFFYLVDAMIEAGVLLGLPRTLAAELMTQTALGSARMLRESGEHPALLREAVTSPAGTTIAALRELDRRGVRAALMDALEAASSRSRELGRS

SEQ ID NO: 7820 - DNA, 810 bp, Novosphingobium aromaticivorans DSM 12444
  CDS (1)..(810): transl_table=11
atgaccaagacctttctccagttcggctgcggcaacatgggcggagccatgctcaagggctggcttgccggcggtctggcgccggaaaccttcaccgtggtcgatccctatctcgaagcggcgccgcacggcgttcgcctgctcgaagctgcgcccgccggcgaggatgcgttcgacatcgtcctgctcggcttcaagccgcagcagttgcccgacgcggcgcaggccgtgcgccccttcgtcgggccgcgcaccctgttgctgtcgatacttgcgggcgtcgacctcgccaccttgcgccgtactttccccgaagcgcgtgcaatcgtccgcgtcatgcccaacctggccgccgcgctaggcaagtccccgatcgcgctgttcggcgatgcggacgaggccgcccgtgccgagactgacgcgctgatggcaccgttggggcaggcggaatggctctcgggcgaggatcagatggaccttgtcaccgcgctcgctggttcgggtcctgccttcgtgtaccgcttcatcgatgccctggccgaaggcgctgccgctctcggcctgccgcgcgaccaggctgaccgcctggcgctgtcgatggtggagggttcggccatgctcgccgccgcctccgaacactcgccgggtgaactcgcgcgccgggtcgccagccccggcggggtcacgcaggttggcatcgacatcctcgacgccgagcgccgtcttgcgcgcctcgtggaggacaccttgcgcggtgcgcgcgaccgcagcgccgagatgacggagcaggcgcgggcgcgtcagcaataa

SEQ ID NO: 7821 - protein, 269 aa, Novosphingobium aromaticivorans DSM 12444
MTKTFLQFGCGNMGGAMLKGWLAGGLAPETFTVVDPYLEAAPHGVRLLEAAPAGEDAFDIVLLGFKPQQLPDAAQAVRPFVGPRTLLLSILAGVDLATLRRTFPEARAIVRVMPNLAAALGKSPIALFGDADEAARAETDALMAPLGQAEWLSGEDQMDLVTALAGSGPAFVYRFIDALAEGAAALGLPRDQADRLALSMVEGSAMLAAASEHSPGELARRVASPGGVTQVGIDILDAERRLARLVEDTLRGARDRSAEMTEQARARQQ

SEQ ID NO: 7822 - DNA, 810 bp, Methanococcoides burtonii DSM 6242
  CDS (1)..(810): transl_table=11
atgcatctcacagagaaaaggatcggattcataggcacaggcaaaatgggagaatcacttataagagggatccttgcagcacatagcgaaataactctgaatgcaagtgatgtttacaagcctgctcttgaaagactcaacaatgaattaggtattaacgtctcaactgataacactgagaccataggagactccgatgttgtcgtacttgcagtcaaaccgcagatactaaaggacgtgctggtagccatcaaggacagcatcactgctgacaaactagtgatctctattgcagcaggagtttcggtaacagcaattgaagatgaacttaatgaaggaacaagggtcgtacgagtaatgccaaacattgcagcaaccgttgcagaagctgcatctgccgtttgtgcaggcaaaaatgctactgaggatgatatggaggtcgcacttgagatgttccagtctattggaagtgcaataacgatcccagagaagctcatggatgcggtcacaggcctatccggaagcggacctgcatacatattcccagttatagaagcattggctgatggtgcagtacatgaagggctggaccgtgcaaatgcgatcacattggcagcccagacagttcttggtgctgcaaaaatggtgctggagacaggaatgcaccctggagaacttaaggacatggtcacatcccctgcaggaacaaccatccgaggaatacatacgcttgaagaaagcggcatacgagctgcttttatgaatgcggtcatcgaatcttcaaaacgatcaaaggaactggggaagtaa

SEQ ID NO: 7823 - protein, 269 aa, Methanococcoides burtonii DSM 6242
MHLTEKRIGFIGTGKMGESLIRGILAAHSEITLNASDVYKPALERLNNELGINVSTDNTETIGDSDVVVLAVKPQILKDVLVAIKDSITADKLVISIAAGVSVTAIEDELNEGTRVVRVMPNIAATVAEAASAVCAGKNATEDDMEVALEMFQSIGSAITIPEKLMDAVTGLSGSGPAYIFPVIEALADGAVHEGLDRANAITLAAQTVLGAAKMVLETGMHPGELKDMVTSPAGTTIRGIHTLEESGIRAAFMNAVIESSKRSKELGK

SEQ ID NO: 7824 - DNA, 843 bp, Acidobacteria bacterium Ellin345
  CDS (1)..(843): transl_table=11
atgaccagcaaagcgaaatcgacctcgaagctctcccaacagaccgtcgcgatcctcggactcggcaagatcggcagcatcctgctgcaagccatgttgcgcgaaggactgctctcgccgaagcgcgtgcgcgcgacggtgaaccatgcagataagaccgccaagctcacgcaggagttcggcattcaggttggcaccgataacgccgcggcaatcaaaggcgcggacatcatcctcgtcgcactaaagccgcagcagattggtactgttctcaccagtttgcgtgacgagatcaagccgaaccagctgctgatctcggtagcggcatcggttccgacggcctacatggaagagcggctcgcggcgaaggtgccgatcattcgcgccatgccgaatacaccctcaatgctgggtgcgggcatgacgggcatctgcaaaggtgcgcacgctactgcggctcaactcgatctggcgcaggcgatgttcaatacggtgggccgcacggctatcgtggaagaaaaacatatggatgccgtgaccgggctgtcggcgagcgggccagcgtttatctacatcatcatcgagtccctggcggaagcaggcgtgaaggtcggcttaccgcgcgatctggcgacgcttttggcagcacagacaacgatgggcgcggcgcaagttgtgctggaaaccgggcaacatccggcgcaattgaaggacgccgtaacgacgccggcaggctgcacaattgatggcatcctcgaactggaagagggcaagttgcgggtgacgctgattaaagcggtggtgaaggctgcgcagcgcgcgaaggagttggtgttcagttaa

SEQ ID NO: 7825 - protein, 280 aa, Acidobacteria bacterium Ellin345
MTSKAKSTSKLSQQTVAILGLGKIGSILLQAMLREGLLSPKRVRATVNHADKTAKLTQEFGIQVGTDNAAAIKGADIILVALKPQQIGTVLTSLRDEIKPNQLLISVAASVPTAYMEERLAAKVPIIRAMPNTPSMLGAGMTGICKGAHATAAQLDLAQAMFNTVGRTAIVEEKHMDAVTGLSASGPAFIYIIIESLAEAGVKVGLPRDLATLLAAQTTMGAAQVVLETGQHPAQLKDAVTTPAGCTIDGILELEEGKLRVTLIKAVVKAAQRAKELVFS

SEQ ID NO: 7826 - DNA, 816 bp, Silicibacter sp. TM1040
  CDS (1)..(816): transl_table=11
atggatatgaatgagatcgcagcgcgagggttggtgcttttgggctgcggcaaaatgggatccgcgatgctcaagggctggctcgaaggggggctgccgcgtgaagctgtctatgtaatggaccccaacccctccgactggctcaagggaaccggcgtgcatatcaacgccacggtgcctgagcagcccgcaatcgttctggttgcggtcaagccgcaggtgatgggcgcggcgcttccttctgccaaatcctatgggggcggtgggaccctgtttatctccgttgcggcaggcacaccgatttcgacgtttgagacgatgctcggtgagagcaccccgattgtacgcgccatgcccaacacacccgcagccgtggggcggggcattacggccctcatcgggaacgcccatgtggatgaggccaagatggcgcaggccgacgccctgttgcaggctgtgggccagacggtgcggctggacgacgaaggtcagatggatgcagtcaccggggtgagcggatccggccctgcctatgtcttccacctcattgagacgctggccgctgcgggtgtggcgcagggtctgcccgagccgctggcgatgcaactggccaaggccacggttgccggagccggggctctggctgaggcggcagaagaggatcccagcgcgcttcgggtcaatgtgaccagcccgaatgggacaacgcaggccgcgcttgaggtcctgatggatgaggagacaggcttcccgccgctcctgcagcgcgcggttgcggcagcggccaagcgttcggaggaactgtcccgtggctga

SEQ ID NO: 7827 - protein, 271 aa, Silicibacter sp. TM1040
MDMNEIAARGLVLLGCGKMGSAMLKGWLEGGLPREAVYVMDPNPSDWLKGTGVHINATVPEQPAIVLVAVKPQVMGAALPSAKSYGGGGTLFISVAAGTPISTFETMLGESTPIVRAMPNTPAAVGRGITALIGNAHVDEAKMAQADALLQAVGQTVRLDDEGQMDAVTGVSGSGPAYVFHLIETLAAAGVAQGLPEPLAMQLAKATVAGAGALAEAAEEDPSALRVNVTSPNGTTQAALEVLMDEETGFPPLLQRAVAAAAKRSEELSRG

SEQ ID NO: 7828 - DNA, 810 bp, Mesorhizobium sp. BNC1
  CDS (1)..(810): transl_table=11
atgggcaagcgagtcgttctcgtcggttgcggcaatatgggttatgccatgatgaagggctggctcgcggcgggaaagctttccgcggccgatatcagcgtcgttgaaccaaacgacgagctgcgtgcccgtgccgccgattgtggggtgagcgtcgcagctcaaccagatgcgttgccctggagggaggcggatctcgtcatctttgccgtgaagccgcagatggttcatcaggtggtgcccgattatcgcttcttcgcgccaggcgccacctttctgagcgtcgccgcaggcgcggggatttccctcttcgaagagctgttgggacataacgcagccgttgtccgctgcatgccgaatacgcccgctgcaatcgggaagggcatgctggtgattgtctcgaatgggaatgtccgcccgcagacaaaggaattcgtcaacgaactcctggccaccaacggagcggtcgccacaatcgaggatgagagcctcatggacaccgtaacagctgtttcgggctcaggtcccgcctatgtcttccacttcatcgaatgcctcacggcggcgggcgagcaagccggcctgccctctcaaacggcaaagcagctggccatgcagacggtctatggcgcggcagttcttgccaaggaaagcggcgaggagccagggatgcttagagagcaggtcacaagccccaacggaacgaccgcggccgcactgaaggttctgatgggcgaagagcggctgcaaagactcctgggcgaggccgtggaagcggcccggcagcgttccatagagcttggaaagtaa

SEQ ID NO: 7829 - protein, 269 aa, Mesorhizobium sp. BNC1
MGKRVVLVGCGNMGYAMMKGWLAAGKLSAADISVVEPNDELRARAADCGVSVAAQPDALPWREADLVIFAVKPQMVHQVVPDYRFFAPGATFLSVAAGAGISLFEELLGHNAAVVRCMPNTPAAIGKGMLVIVSNGNVRPQTKEFVNELLATNGAVATIEDESLMDTVTAVSGSGPAYVFHFIECLTAAGEQAGLPSQTAKQLAMQTVYGAAVLAKESGEEPGMLREQVTSPNGTTAAALKVLMGEERLQRLLGEAVEAARQRSIELGK

SEQ ID NO: 7830 - DNA, 807 bp, Cytophaga hutchinsonii ATCC 33406
  CDS (1)..(807): transl_table=11
atgaaaatagcaattttaggtggaggcaatatgggtatgacttatgcaaaagcatttgtcagcagaaaaattgtttcgaaagatgaattattgattattgaaaaacatgatgaaaaaagagaacaattaaaacaggaaggagtagcttctttgtctgctgatatcgatgattcgattaagaattacgatattttaattgttgcagtaaaaccacaggattttagagttttatctgaaacgctgaaaaaatatctgacagaaaatcaaatgatactttccattatggcgggtattcagattgctcagattcaaaccttacttgaacataaaaacgtagtacgtgccatgccgaatacacctgcgcagttgggctttggtattacagcatttacagttgctaaagatgcttcgtttgaaaatataagtgttgtagatatgcttttggaaactaccgggaaagcaatttttatgaaagacgaaaccatgctggatgcagtaacagcattaagcggaagcggccctgcgtatttttattatatcgttcagaacatgatcgaagccggtaaacaaatgggcgtggacgaaaatgtggctggcatgctcgtgaaagaaaccatgatgggcgcttttcagattttgaaccattcaaaatcatccattgatgaattgattgccatggttgcttcaaaaggtggtacgacagaggctgctttaaatacgttaaaacagagagaagttggtgcgcatatcatcgaagcactgaaaaatgccgaaaaaagggcaaaagaactctccgggaacgcctaa

SEQ ID NO: 7831 - protein, 268 aa, Cytophaga hutchinsonii ATCC 33406
MKIAILGGGNMGMTYAKAFVSRKIVSKDELLIIEKHDEKREQLKQEGVASLSADIDDSIKNYDILIVAVKPQDFRVLSETLKKYLTENQMILSIMAGIQIAQIQTLLEHKNVVRAMPNTPAQLGFGITAFTVAKDASFENISVVDMLLETTGKAIFMKDETMLDAVTALSGSGPAYFYYIVQNMIEAGKQMGVDENVAGMLVKETMMGAFQILNHSKSSIDELIAMVASKGGTTEAALNTLKQREVGAHIIEALKNAEKRAKELSGNA

SEQ ID NO: 7832 - DNA, 816 bp, Rhodococcus sp. RHA1
  CDS (1)..(816): transl_table=11
atgacgagaattgcggtaatcggaggcggcaagatcggcgaggccctcatctcggggcttctgcaggcaggtcacgccgtcaaggatctggtggtggccgagcagcatccggcgcgcgccgacgagctggccgcggcgtacgcggtgcgggtcaccaccccctccgacgccgcggaaggcgccgacgtcatcgtgatcgccgtcaagccgggcgacgtcgaggccgcgctcaccgaggtgtccaaggtggaactcgacggcgagcgcgagcagctgctcgtgtcgctcgctgccggtatccccactgccttctacgagacgagactgcccgccgggttcccggtggtccgggtcatgcccaacacgcccatgctggtcggtgagggcgtcagtgtgctcgcccccggcaggcatgtgaagaaggagcacctcgaactggtgcgcggcgtcctgtcgtcggtcggcaaggtcgtcgtcgtccccgaatcgcagatcgacgccgtcaccgccgtctccggctccggtcctgcctatttcttcctggtcgccgaggccatgatcgacgcgggcgtcgggctgggactgacccgggcgaccgcttccgaactggtcgtgcagaccatggtcggctccgcggcgatgctcgacaggtcgggggagagtgcgaccgaactccgtgccgccgtgacctcgcccggcggaaccaccgcggccgcgatccgccggctggagggaaacgggctccgaacagcctttttcgacgctctcgaagccgcgaagattcgttccgccgaactcggtacgtcgaccgaatga

SEQ ID NO: 7833 - protein, 271 aa, Rhodococcus sp. RHA1
MTRIAVIGGGKIGEALISGLLQAGHAVKDLVVAEQHPARADELAAAYAVRVTTPSDAAEGADVIVIAVKPGDVEAALTEVSKVELDGEREQLLVSLAAGIPTAFYETRLPAGFPVVRVMPNTPMLVGEGVSVLAPGRHVKKEHLELVRGVLSSVGKVVVVPESQIDAVTAVSGSGPAYFFLVAEAMIDAGVGLGLTRATASELVVQTMVGSAAMLDRSGESATELRAAVTSPGGTTAAAIRRLEGNGLRTAFFDALEAAKIRSAELGTSTE

SEQ ID NO: 7834 - DNA, 828 bp, Trichodesmium erythraeum IMS101
  CDS (1)..(828): transl_table=11
atggcaattactaagttgggtttaataggtggtggggtaatgggagaggctttgctatcccgcctaattaaacaaaatgtttatctaccctcggaaattttagttagtgacccccagcaacaaaggcggaatttgttgacacaagagtatggtgtacaagtgactacagataatagtttggtagtgacaagtacaacggaggttttattgctggcagttaagcctcaaatatttgatagtgtagtgtcacagttgggagactggcaagttgctggtaagacaacaactttacctttgctaatttctattatggctggtgtgcctttgcaaaagctggaagcatttttctgtgggcaacctgtggttagagttatgccgaatactccagcaacagtgggtgtaggtatgagcgctatcgctctggggaaaaatgttcaaccatcacatcgggagttagctacttgtattttagcatctataggtcaggtagttgaagtgtcagaaagtttaatggatgcagttacggcagtgtctggttcgggacctggttatgtaacaatttttatagaatctttgacagatgggggtgttcgtgctggtttacctagggcgatcgcttatcaattggcattgcaaactgttctgggaacagcggttttattgcaggagtcaggaatgcacccggcacagttgaaagatcgggtgacaagtccagggggcacaactattgctggaattgctgagttagaaagtgcgggttttcgttctgctattattgaggctgtcctggcagcaaaggagaaagcggaagagttaggaaatagttga

SEQ ID NO: 7835 - protein, 275 aa, Trichodesmium erythraeum IMS101
MAITKLGLIGGGVMGEALLSRLIKQNVYLPSEILVSDPQQQRRNLLTQEYGVQVTTDNSLVVTSTTEVLLLAVKPQIFDSVVSQLGDWQVAGKTTTLPLLISIMAGVPLQKLEAFFCGQPVVRVMPNTPATVGVGMSAIALGKNVQPSHRELATCILASIGQVVEVSESLMDAVTAVSGSGPGYVTIFIESLTDGGVRAGLPRAIAYQLALQTVLGTAVLLQESGMHPAQLKDRVTSPGGTTIAGIAELESAGFRSAIIEAVLAAKEKAEELGNS

SEQ ID NO: 7836 - DNA, 885 bp, Synechococcus sp. CC9311
  CDS (1)..(885): transl_table=11
ttgctccaactcccgcctggagtgcaacaagcgccaccgcgctttgatccatcagtgccgattgcattaggtgtgattggtctgggccggatggctcaggccctggtgattcccttgattgagcaggaattgatttctgctgatgaggtgatcgcggttgtgggccgagagcactctgttgcaacggtgtctgcgcgagtgccttctggagtgaaagttatagctgccagtgattccgcggcagaacacgcttgggctgcgtcggttcaactcttggccgtcaagcctcagatgcttgatggggtcgctgcctcggctccacccccaatcgaaacgcctgcgtcgggttcaagtcttttgctttccgtgctggctggggttcccctggcgcggctccaagctctatttccaggccgtatttgtgtgcgcgctgttcctaatactccctgcctggtaggtcagggactcaccggtctggcttggggggatggcatctctgatccacagaagcagcaagtgcgctccttctttgaaccggtgagtgaggttctcgaacttcccgaggaacggctcgatgcttttcttgcactcacttcgtccggtcctgcctatgtggccttaatcgcggaagcgatggccgatggtgctgttgctatgggaatgcctcggtcgcaggcccatcatttggcgcatcgaactctcgctgggaccgccgccttattgcaggagcaggagctgcatcctggcgaacttaaagatatggtggcgtctccaggtggaaccaccatggcggcgttgcgtcatctcgagaaatcgggcttgcgttcggcgttgattgaagccatcgttgccgccacgcaacatggacggggcatggcgaattaa

SEQ ID NO: 7837 - protein, 294 aa, Synechococcus sp. CC9311
MLQLPPGVQQAPPRFDPSVPIALGVIGLGRMAQALVIPLIEQELISADEVIAVVGREHSVATVSARVPSGVKVIAASDSAAEHAWAASVQLLAVKPQMLDGVAASAPPPIETPASGSSLLLSVLAGVPLARLQALFPGRICVRAVPNTPCLVGQGLTGLAWGDGISDPQKQQVRSFFEPVSEVLELPEERLDAFLALTSSGPAYVALIAEAMADGAVAMGMPRSQAHHLAHRTLAGTAALLQEQELHPGELKDMVASPGGTTMAALRHLEKSGLRSALIEAIVAATQHGRGMAN

SEQ ID NO: 7838 - DNA, 828 bp, Alkalilimnicola ehrlichei MLHE-1
  CDS (1)..(828): transl_table=11
atgagcaacaacaccctgtgctttatcggcggcggcaacatggcccgctcgctgatcggcggcctgctggccgacggtttcgacccgcaggcggtacgggtggccgacccggacgccggcaagcgcgatgacctggccaaccgtttcggcgttcgggtctacgccgacaacctggaggcggccgccgacgccgacaccgtgatcctggcggtcaagccccaggtggtgcgtaccgcctgcgagcagttggtggccggcagcggcgacgccgggcggctgtttatctccatcgcggcgggcgtgcgcgagccggacctgacccgctggctcgggggccaggccgcagtggtgcggaccatgcccaacaccccctcgctggtgggcaccggcgccacggcgctgtacgccaacgaccgggtcaaggagcggcagcgggagctggcggaatcattgatgcgcgccgtggggctggtggtctggctcgacgacgaggcccagatggataccgtgaccgcggtttccggcagcggcccggcctacttcttcctgctcatggaggccatcgaggacgccgcgcgggacctgggtctgcccggtgagaccgcccgcctgctgaccatcgagacggcgctgggcgcggccaagatggccttggagagcgatgagtccccggcccaattgcgccagcgggtgacctcccccgggggcaccaccgagcatgcgctgcatgtgttggaggatggcgagtaccgcgccctgatgacccgtgcggtgcaggccgccgccaaacgcgcccaggagctgggccagatgctgggggagcagtga

SEQ ID NO: 7839 - protein, 275 aa, Alkalilimnicola ehrlichei MLHE-1
MSNNTLCFIGGGNMARSLIGGLLADGFDPQAVRVADPDAGKRDDLANRFGVRVYADNLEAAADADTVILAVKPQVVRTACEQLVAGSGDAGRLFISIAAGVREPDLTRWLGGQAAVVRTMPNTPSLVGTGATALYANDRVKERQRELAESLMRAVGLVVWLDDEAQMDTVTAVSGSGPAYFFLLMEAIEDAARDLGLPGETARLLTIETALGAAKMALESDESPAQLRQRVTSPGGTTEHALHVLEDGEYRALMTRAVQAAAKRAQELGQMLGEQ

SEQ ID NO: 7840 - DNA, 828 bp, Rhizobium leguminosarum bv. viciae 3841
  CDS (1)..(828): transl_table=11
atgccgacgaaggctttctcctcgacacatcccgtcgttctgatcggtgccggaaacatgggcggggcgatgctctccggctggctgaaaagcggcgttccgggctcggccgtcatcgttgtcgatccaggcccgtcgccggcgatgctttcgacgatcaacgaggccggcgccacccatctgaccgcgcttcctaaggatttgaaggcaagcgtgctgttcctggcggtcaagccgcaggtgatggaaacggtgctgccggcggtgaagagcgccgtcgggccggacacggtcgtcgtctcggtcgcggccggaaagacgctcggtttcctcgagaaacatctcggcaaggccgccatggtgcgggccatgccgaacacgccagccatggtcgggcgcggtgtcaccggcgcttttgcgaattcaggggtcagcgatccgcagcgcgaacgcgtccattcccttctgcgcgtctcggggccggtcgaatgggtgccggcggaagccgatatcgatgccgtgacggcgctttcgggcagcggtccggcctatgtattctatctcgtcgaatgtatggcggaggcaggccgtaaactcggcctgcaggcggacctcgccatgcgtcttgcgcgggaaacagtcgcgggggctggtgaactcatgcaccagtcccccgacgacgcttcgcggctgcgggagaatgtgacctctcccggcggcaccacggcggcggcgctcgccgtgctgatggccgaagacggcatgcagcccttgttcgacgcagcccttgctgcggcgcgcaagcgggccgaggaactggctggctga

SEQ ID NO: 7841 - protein, 275 aa, Rhizobium leguminosarum bv. viciae 3841
MPTKAFSSTHPVVLIGAGNMGGAMLSGWLKSGVPGSAVIVVDPGPSPAMLSTINEAGATHLTALPKDLKASVLFLAVKPQVMETVLPAVKSAVGPDTVVVSVAAGKTLGFLEKHLGKAAMVRAMPNTPAMVGRGVTGAFANSGVSDPQRERVHSLLRVSGPVEWVPAEADIDAVTALSGSGPAYVFYLVECMAEAGRKLGLQADLAMRLARETVAGAGELMHQSPDDASRLRENVTSPGGTTAAALAVLMAEDGMQPLFDAALAAARKRAEELAG

SEQ ID NO: 7842 - DNA, 822 bp, Pseudomonas aeruginosa UCBPP-PA14
  CDS (1)..(822): transl_table=11
atgagcacaccccgcatagcgttcatcggcgccggcaacatggccgccagcctgatcggcggcctgcgcgcccaaggcgtgccggcggcgcagatccgcgccagcgacccgggcgccgagcaacgcgcgaagatcgccggcgagttcgccatcgacgtggtcgagtccaacgccgaggccgtggccgacgccgacgtcgtggtcctgtcggtcaagccgcaggccatgaaagccgtgtgccaggccttggcgccggcgctgaagccggagcaactgatcgtctccatcgccgccggcatcccctgcgccagcctcgaagcctggctcggccagccgcgcccggtggtccgctgcatgcccaacaccccggcgctgctgcgccagggcgccagcgggctgtacgccaacgcgcaggtcagcgccgcgcaacgcgagcaggccgggcagctgctgtctgcggtaggcatcgccctgtggctggacgacgaagcgcagatcgacgcggtgaccgcggtgtcgggcagcggcccggcgtatttcttcctgctgatgcaggccatgaccgacgccggcgagaagctcggcctgtcccgcgagacagcctcgcgcctgaccctgcagaccgccctcggcgcggcgcagatggcgctgtccagcgaggtcgagccggccgaactgcggcgccgggtgacttcgcccaacggcaccaccgaggcggcgatcaaatccttccaggccaacggcttcgaagcactagtggagcaggccctgaacgccgccagccagcgctccgccgagctggccgaacagcttggccaataa

SEQ ID NO: 7843 - protein, 273 aa, Pseudomonas aeruginosa UCBPP-PA14
MSTPRIAFIGAGNMAASLIGGLRAQGVPAAQIRASDPGAEQRAKIAGEFAIDVVESNAEAVADADVVVLSVKPQAMKAVCQALAPALKPEQLIVSIAAGIPCASLEAWLGQPRPVVRCMPNTPALLRQGASGLYANAQVSAAQREQAGQLLSAVGIALWLDDEAQIDAVTAVSGSGPAYFFLLMQAMTDAGEKLGLSRETASRLTLQTALGAAQMALSSEVEPAELRRRVTSPNGTTEAAIKSFQANGFEALVEQALNAASQRSAELAEQLGQ

SEQ ID NO: 7844 - DNA, 813 bp, Magnetococcus sp. MC-1
  CDS (1)..(813): transl_table=11
atgtccagtcagcccccaatcgcctttctcggtggtggtaatatggccagtgccatcatcgctggtctgcacaaggtcggctatcccgccgcaaagctgcgtgtaggagagcccaacgccacccagcgagaggccttaatccgccaatttgccatccagggccatgcccataatccggatgccgtggcagaggcggcttttgtggtggtggcggtaaaacccaatctggtcgctcaagtgttgcgtgatgtggccccgcagctggcccccactgcggtggtgctctctatcgcggcgggggtggatctaaccaccatggcggcggccttgccagcgggtcaacccatcattcgggccatgcccaataccccggcgctggtgggccaaggcatgaccgtactatgccccaatggacatgttgatgcagagcaactcgcccaggcacaacgcttgctggaaagtgtgggccaggtcgcggtggtcaaacaagagagtctcatggatggggtaaccgccctctctggctcagggccagcctatctgtttttaatcgccgaggcgctctcggatgggggggtggcctgtggtctacccagagctctggccgatcaactggcggtgcagacactgttgggctccgccaccctgctacgggagagtggtgagcaccccggtgtgttaaaaaatcgagtgacttctcccggcggtaccaccattgcgggtctgggcgtgctggagcggcaaggagtgcgaggtgccctaatggctgcggtagaggccgcttggaaccgatccaaggcattgggtcaataa

SEQ ID NO: 7845 - protein, 270 aa, Magnetococcus sp. MC-1
MSSQPPIAFLGGGNMASAIIAGLHKVGYPAAKLRVGEPNATQREALIRQFAIQGHAHNPDAVAEAAFVVVAVKPNLVAQVLRDVAPQLAPTAVVLSIAAGVDLTTMAAALPAGQPIIRAMPNTPALVGQGMTVLCPNGHVDAEQLAQAQRLLESVGQVAVVKQESLMDGVTALSGSGPAYLFLIAEALSDGGVACGLPRALADQLAVQTLLGSATLLRESGEHPGVLKNRVTSPGGTTIAGLGVLERQGVRGALMAAVEAAWNRSKALGQ

SEQ ID NO: 7846 - DNA, 888 bp, Mycobacterium avium 104
  CDS (1)..(888): transl_table=11
atgctgtccggcatggcaagaatcgcgatcatcggtggcggcagcatcggggaggccctgctgtcgggtctgctgcgggcgggccggcaggtcaaggacctggtggtggtcgagcgggttcccgagcgcgccaaatatctggccgacacctactcggtgctgatgacctcggtggccgatgcggtggaaaacgcgtcgttcgtcgtggtcgcggtgaaaccggccgacgtcgagtcggtgatgtccgagatcgcccgcgccgccggccaggccgagagcgacaccgccgagcaggtgttcgtcacggtcgccgccggggtcaccatcggctacttcgaatcccggctgccggccgggacaccggtggtgcgggccatgccgaacgcggccgcgctggtcggcgccggggtcaccgcactggccaagggccgcttcgtcaccgccccgcagctcgagggcgtctcggcgctgttcgactcggtcgggggcgtgctgagcgtgccggagagccagatggacgccgtcaccgccctgtccggctccgggccggcgtatttcttcctgctggtggaggccctggtggacgccggggtggccgcgggcctgagccgcgaggtggcggccgacctgaccgcccagaccatggccggctcggcggcgatgctgctggagcggatggacgccgatcggcgactgggcgaggcggagacgcccgggatgcgggtggacgccaccgccacccagctgcgggccacggtgacctccccgggcggcaccaccgcggccggcctgcgcgagctggagcgggggggcctgcgggcggccgtcgacgccgccgtccaggccgccaaaatacgctctgagcagctaagaattacatcggagtaa

SEQ ID NO: 7847 - protein, 295 aa, Mycobacterium avium 104
MLSGMARIAIIGGGSIGEALLSGLLRAGRQVKDLVVVERVPERAKYLADTYSVLMTSVADAVENASFVVVAVKPADVESVMSEIARAAGQAESDTAEQVFVTVAAGVTIGYFESRLPAGTPVVRAMPNAAALVGAGVTALAKGRFVTAPQLEGVSALFDSVGGVLSVPESQMDAVTALSGSGPAYFFLLVEALVDAGVAAGLSREVAADLTAQTMAGSAAMLLERMDADRRLGEAETPGMRVDATATQLRATVTSPGGTTAAGLRELERGGLRAAVDAAVQAAKIRSEQLRITSE

SEQ ID NO: 7848 - DNA, 861 bp, Mycobacterium smegmatis str. MC2 155
  CDS (1)..(861): transl_table=11
atgtcgagaatcgcgatcatcggcggcggaagcatgggtgaggcactgttgtccggcctgctccgggccggcaggcaggtcaaggacatggtcgttgcggagaagttccccgagcgtgccaagtacctggcggacaagtactccgtgcgcgtcacgtcggttgccgacgccgccgagaatgcccactacgtcgtcgtcgccgtcaagcccgccgacgtcgagaaggtgatcggcgagatcgccgaggccgctgccaacgccgagaccgatacggccgagcaggttttcgtcaccatcgcggccggcgtcggcaccgcgtactacgaggccaagctgcccgcgggctcgccggtgatccgggtgatgcccaatgcgccggtgatcgtcggcggcggcgtcagcgcgctggcacccggtcgcttcgcgacgcccgagcagctcaaggaggtctcgacgctgttcgacgcggtcggtggcgtcatcacggtctccgagtcccaactggacgccgtcacggccctgtccggttcgggcccggcgtacttcttcctgatggccgaggcgatggtcgacgccggggtggctgtcgggctgtcgcgtgccgtggcgaccgatctggttgcccagacgatggccggttcggccgcgatgctgctggaccgcctggatcaggtgaacgccgcgggaggcgcggcgctggacaccacaccggcccagttgcgggccaccgtcacctcgccggccggcacaaccgccgctggtctgcgcgaactcgagcggggcgggctgcgcgccgcggtggcaaatgccgtggaagccgcgaaaacgcgctctgagcagctaggaattacatcggagtaa

SEQ ID NO: 7849 - protein, 286 aa, Mycobacterium smegmatis str. MC2 155
MSRIAIIGGGSMGEALLSGLLRAGRQVKDMVVAEKFPERAKYLADKYSVRVTSVADAAENAHYVVVAVKPADVEKVIGEIAEAAANAETDTAEQVFVTIAAGVGTAYYEAKLPAGSPVIRVMPNAPVIVGGGVSALAPGRFATPEQLKEVSTLFDAVGGVITVSESQLDAVTALSGSGPAYFFLMAEAMVDAGVAVGLSRAVATDLVAQTMAGSAAMLLDRLDQVNAAGGAALDTTPAQLRATVTSPAGTTAAGLRELERGGLRAAVANAVEAAKTRSEQLGITSE

SEQ ID NO: 7850 - DNA, 804 bp, Nocardioides sp. JS614
  CDS (1)..(804): transl_table=11
atgtcccagaccgccatcctcggcgccggcgtgatgggcgagaccctgctctccggcctggtgcgcgccggccgccgcgtcgaccacctgctggtcggcgagaagcgccccgagcgcgcccaggagctcgaggagcggtacggcgtcgccgtggtcggcaacgccgaggcggcccgcaaggccgacacgctcgccctggtcgtcaagccccaggacatgggcgacctgctcgaggagatcgccggcgagctgcgcccgggccagctggtcgtctcccttgcggccggcatcaccaccgccttcatcgaggcccgggtccccgagggcgtcgccgtggtccgggtgatgccgaacacgcccgcgctggtcgacgaggggatggctgcggtctctcccgggtcgcactgcagcgaggagcacctcgccgaggccgagtcgctgatggcgtcggtcggccgggtgctccggatcccggagcgccagcaggacgccgtcaccgcgatctccgggtccggcccggcctacatcttcttcgtcgtggagtcgatgatcgaggccggcgtccacctgggcctgccgcgtgcgaccgccaccgacctggtcgtccagaccgtcgtgggctcggccaagatgctgcgcgagaccggcacccacccggccgtgctgcgcgagcaggtcacctccccggccggcaccaccgcggcggccctgcgcgagctggagatccacaaggtgcgcgccgcgttcctcgccgccatggaggccgcgcgcgaccggtcgcgtgcgctcgccgagggcagctga

SEQ ID NO: 7851 - protein, 267 aa, Nocardioides sp. JS614
MSQTAILGAGVMGETLLSGLVRAGRRVDHLLVGEKRPERAQELEERYGVAVVGNAEAARKADTLALVVKPQDMGDLLEEIAGELRPGQLVVSLAAGITTAFIEARVPEGVAVVRVMPNTPALVDEGMAAVSPGSHCSEEHLAEAESLMASVGRVLRIPERQQDAVTAISGSGPAYIFFVVESMIEAGVHLGLPRATATDLVVQTVVGSAKMLRETGTHPAVLREQVTSPAGTTAAALRELEIHKVRAAFLAAMEAARDRSRALAEGS

SEQ ID NO: 7852 - DNA, 792 bp, Magnetospirillum magnetotacticum MS-1
  CDS (1)..(792): transl_table=11
atgaccaagattctgctggtcggttgcggcaagatgggttcggccatgctggcgggctggctcgagcgcggcacgtcgcccggtgacgtggtggtggtcgagccgtcttgccccgatctggggtcggtgcgggtggttgcctcccatgcggcgatcccagagggtttcgtcccccatgtggtgatcttcgccgtgaagccgcaggtgatggccgatgtggtgccgccctatgcccgcttcggaacctccctgttcctgtccatcgccgcgggcaagaccatcgccttcttccgttcgctcctggggcccgacgccgtcatcgtgcgggccatgcccaatacccccgcggcagtgcggcgcggcatcaccgtgtgctgcgccgaagcctcggtaccggcgcaggcccgcgacctgtgcgggtcgctgctggaggcggtgggagaggtcggctgggtcgatgacgaggcgctgatggatgtggtgaccgccgtctcgggctcgggccccgcttatattttcctgctggccgaagccatggaggcggccggtttggcccagggcctgccgcccgccctggccgaacgcctggcgcgggcgaccgtggcgggggcgggggaattgctgcggctatcttcggaaaccacgcaacaactgcgccagaacgtgacgtcgccgggggggacaacggcggcggcacttgcggtgctgatggctgaaaagaacggtattcccgggctgatgagcgaggcggtggcggccgcaactcgccgtgggcgagaacttgccggttag

SEQ ID NO: 7853 - protein, 263 aa, Magnetospirillum magnetotacticum MS-1
MTKILLVGCGKMGSAMLAGWLERGTSPGDVVVVEPSCPDLGSVRVVASHAAIPEGFVPHVVIFAVKPQVMADVVPPYARFGTSLFLSIAAGKTIAFFRSLLGPDAVIVRAMPNTPAAVRRGITVCCAEASVPAQARDLCGSLLEAVGEVGWVDDEALMDVVTAVSGSGPAYIFLLAEAMEAAGLAQGLPPALAERLARATVAGAGELLRLSSETTQQLRQNVTSPGGTTAAALAVLMAEKNGIPGLMSEAVAAATRRGRELAG

SEQ ID NO: 7854 - DNA, 819 bp, Actinobacillus pleuropneumoniae serovar 1 str. 4074
  CDS (1)..(819): transl_table=11
atgaatcatcaaaaacttgcctttatcggcaccggcaatatggcatacgctatcattcaaggcttactcaaaagccattatcccgcctcgcaaatcatcgcttgcaacaaaagcaatttagttcgccgagcagaattacaagcggtcggaattgcgacaaattttaccaatcgtgcagcagttgaacaggcggaagtcgttgtgttagcggtcaaaccgcaaatgatggcggaggtttgtagtgaattttcagcggtggatttttcgaataaaacagtgatctctgtcgcagcagggatttcagttgctcgtttagaacagcttttaccgacagcaaaaaatattatccgcaccatgccgaataccccttcgctaatcggtgagggaatgaccgggttatttgcaaaaaaatcagtaaattcgaccgcttgccaatttgccgagagtttaatgtcggcggtcggaaaatgctattgggtcgaacaagaacagcaaatcaatcacattattgcagtgaccggttccagccctgcctatttcttccgttttatggaagcgatgcaacaaagtgcaatgcaaatgggatttagcgaagctgatgcacgtttactggtgcaacaagctgcattaggcgcagccaaattagtcgaagcaaatccgaatacacctctttcaaccttgcgagaaaacgttacttcaaaaggcggaacaacggctaaagcattggaagtttttgaacaacacgcattagcggaaacagtcgatcaagcaatgtgggcagccattcaccgtgcagaagaaatggagcagcagctatga

SEQ ID NO: 7855 - protein, 272 aa, Actinobacillus pleuropneumoniae serovar 1 str. 4074
MNHQKLAFIGTGNMAYAIIQGLLKSHYPASQIIACNKSNLVRRAELQAVGIATNFTNRAAVEQAEVVVLAVKPQMMAEVCSEFSAVDFSNKTVISVAAGISVARLEQLLPTAKNIIRTMPNTPSLIGEGMTGLFAKKSVNSTACQFAESLMSAVGKCYWVEQEQQINHIIAVTGSSPAYFFRFMEAMQQSAMQMGFSEADARLLVQQAALGAAKLVEANPNTPLSTLRENVTSKGGTTAKALEVFEQHALAETVDQAMWAAIHRAEEMEQQL

SEQ ID NO: 7856 - DNA, 819 bp, Bacillus cereus G9241
  CDS (1)..(819): transl_table=11
atgaataaacaaataggattcatcggatgtggaaacatgggtattgctatgataggtgggatgattaaaaaaaatatagtttctccagatcaaataatttgttcagatttaaacgtcattaatttaaaaaatgctagtaatgaatatggcataactataactactaacaacaatgaagtcgctaacagtgctgacattttaattttatcaatcaaaccagatttatactcatcggtaattaaccaaataaaagatcaaataaaaaatgatgtaatcgttgtaactattgctgcaggaaaaagtattaagagcactgagaatgaatttggtagaaagttaaaagttgttagagtaatgcctaatacaccggcacttgttggagaaggaatgtctgcgttatgttttaatgaaatggttacagaaaaagatataaaagaggtactgaacatgtttaatattttcggccagacggaggtcgtaaatgaaaaactaatggatgttgttacatctattagtggttcttctccagcatatgtgtatatgtttatagaagccatggcagatgctgctgtacttggcggtatgccgagaaaacaagcttataaatttgcggctcaggctgtattaggttctgcaaaaatggtattggaaacaggaatacatccaggtgaattaaaggatatggtttgttctccaggtggaacgacgatagaagctgtagtaacgctagaagaaaaaggtttaagaacagctatcatttcagctatgaaacgttgtatgcaaaaatctatggaaatgtctagtttaactagtaagtga

SEQ ID NO: 7857 - protein, 272 aa, Bacillus cereus G9241
MNKQIGFIGCGNMGIAMIGGMIKKNIVSPDQIICSDLNVINLKNASNEYGITITTNNNEVANSADILILSIKPDLYSSVINQIKDQIKNDVIVVTIAAGKSIKSTENEFGRKLKVVRVMPNTPALVGEGMSALCFNEMVTEKDIKEVLNMFNIFGQTEVVNEKLMDVVTSISGSSPAYVYMFIEAMADAAVLGGMPRKQAYKFAAQAVLGSAKMVLETGIHPGELKDMVCSPGGTTIEAVVTLEEKGLRTAIISAMKRCMQKSMEMSSLTSK

SEQ ID NO: 7858 - DNA, 801 bp, Prosthecochloris aestuarii DSM 271
  CDS (1)..(801): transl_table=11
atgcagcagctatctatcggctttgtgggcacaggacgtatagcccgtgcattaatttccggcctcgtcaatgacccggcaaaccgtatctgcggatacgataaggatcccgacgccattgctgccgtcgtgaagcagttcggcatcgaaggaacatcctctgccgcagaggtcgcgcgcgatgccaggattatcattcttgccgtcaagccctaccagatcggcgaggttgtcgaagaactcaggccacacctgacaaccgggcatctgctcatcagcgtcgctgcaggcatcacgtcagagtttatccggcagcactccattgatgctatgagggttatccgcgtcatgcccaatacgcctgcgtttaccggccagggaatgactgccctcagtaaaggcatcatggccacacaagaggacatcgctcttgcgacaacgatgttcagcgcaatcggcagggtcgccgtgctcgatgaacgcctgatggatgccgcgacagccgtttccggcagcggtcccgcctatatgttttctctcatcgcatcgatagccgagggcggacgccaatgcggactatcgatgcaagacgccatcctgctcagcgcccagaccatgctgggagcggcaaccatggtccttaacggcgaaaaaactccggaagagcttatcagggaggtcaccactccgggaggcacaacggaagcagggctcaaacagatggacgcacaccatgtccggcaggcgatgatcgaaacagttaaagctgccgccgcgcgatcaaacgaactgaagcagtaa

SEQ ID NO: 7859 - protein, 266 aa, Prosthecochloris aestuarii DSM 271
MQQLSIGFVGTGRIARALISGLVNDPANRICGYDKDPDAIAAVVKQFGIEGTSSAAEVARDARIIILAVKPYQIGEVVEELRPHLTTGHLLISVAAGITSEFIRQHSIDAMRVIRVMPNTPAFTGQGMTALSKGIMATQEDIALATTMFSAIGRVAVLDERLMDAATAVSGSGPAYMFSLIASIAEGGRQCGLSMQDAILLSAQTMLGAATMVLNGEKTPEELIREVTTPGGTTEAGLKQMDAHHVRQAMIETVKAAAARSNELKQ

SEQ ID NO: 7860 - DNA, 786 bp, Streptococcus suis 89/1591
  CDS (1)..(786): transl_table=11
atgaagattggatttatcggactgggcaacatgggagcggccttggctcatgcagtcagccagcagccagatacccagctcctcctcagcaaccacaacccagcaaaagcccaagttcttcaagagaaggtaggcggtcagcttttttctaatggggaaatagcagagcaggccaaggtcattttccttggggtcaagcctcacctgattcagacagtcttgtcaggcttacaggaccagattagccagaatccgtcggccatttggatttccatggcagcaggagtgcctcttgacagcctggcagcatttgtgtcggcagataagctcatccgcatcatgcccaacacacctgtcgctatcggccaaggtatgacgacctatagcttggtcaatcaagagcttgctccgctattggaacaaatcctagaaaaatcaggcaaggtccaacaggtgccagagagcctgatcgacgcagcaacggctatcgcaggctgcggaccagcctttgtctatcagatgattgaggctttgaccgatgccggtgtgcaaaacgggctcacagctcaagatgccaaggttttggcggctcaaaccctagctggaactgctcagatggtcttaaccagcgataaacacccagcccagctgagacaggaagtgacctcgccaggcggctcgactatcgcaggcgtggtagctcttgaaaaagaaggcttccgttacgccattattagggcagtcgccgccgccctcaaaaagactagaaaattaggcaaaaaatag

SEQ ID NO: 7861 - protein, 261 aa, Streptococcus suis 89/1591
MKIGFIGLGNMGAALAHAVSQQPDTQLLLSNHNPAKAQVLQEKVGGQLFSNGEIAEQAKVIFLGVKPHLIQTVLSGLQDQISQNPSAIWISMAAGVPLDSLAAFVSADKLIRIMPNTPVAIGQGMTTYSLVNQELAPLLEQILEKSGKVQQVPESLIDAATAIAGCGPAFVYQMIEALTDAGVQNGLTAQDAKVLAAQTLAGTAQMVLTSDKHPAQLRQEVTSPGGSTIAGVVALEKEGFRYAIIRAVAAALKKTRKLGKK

SEQ ID NO: 7862 - DNA, 816 bp, Sulfitobacter sp. EE-36
  CDS (1)..(816): transl_table=11
atgaaagatacgcgcatcgccaaagacggtttggttctactgggctgtggcaagatgggatccgcgatgctggcgggctggctggcacgcgggcttccgacatcttcggtatatgtcatcgatccgaaaccctctgattggttgaaagagcagggcgtgcagttgaacgtcgatctgcccaaagagcccgctgtggttcttgtagcggtgaagccgcagatgatgggtgacgcgctgcccacgttgcaggccatgggcaacggcaagacggtttttgtcagcgtcgccgccggcactaccatcgcgacgtttgagaaaacgctgggggaacagacgccaatcgtgcgcgccatgcccaacacacccgccgccatcagccaaggcatcaccgccatcgtcggcaacaaccacgtcgacgccaaaggcatggatgaagccgaagagctgctgtcggccgtgggcgacgttgtccggctggaggaggaatcccagatcgacgcggtcacaggggtcagcggctcgggtccggcctatgttttccacatgatcgaaaccatggccgcgggcgggatcgcgcaggggctcagccccgagctcgcgctaaagctcgccacggcgacggtcgcaggggcaggggccctggccaaatccgccgacgaaggcccggaccagttgcgcgtcaacgtgaccagccccaacggcaccacacaggccgcgctggatgtgctgatgaacgagcaagacggctttccggtcctgctcaaacgcgctgtggcggcagccgccgatcgttcgcgcgagctttcgaatggctga

SEQ ID NO: 7863 - protein, 271 aa, Sulfitobacter sp. EE-36
MKDTRIAKDGLVLLGCGKMGSAMLAGWLARGLPTSSVYVIDPKPSDWLKEQGVQLNVDLPKEPAVVLVAVKPQMMGDALPTLQAMGNGKTVFVSVAAGTTIATFEKTLGEQTPIVRAMPNTPAAISQGITAIVGNNHVDAKGMDEAEELLSAVGDVVRLEEESQIDAVTGVSGSGPAYVFHMIETMAAGGIAQGLSPELALKLATATVAGAGALAKSADEGPDQLRVNVTSPNGTTQAALDVLMNEQDGFPVLLKRAVAAAADRSRELSNG

SEQ ID NO: 7864 - DNA, 831 bp, Roseovarius nubinhibens ISM
  CDS (1)..(831): transl_table=11
atgcgggagggttttatggtgatgcaatcggtggccgagggcggtctggtcctattgggctgtggcaagatgggatctgcgatgctggagggctggttggccaatggtctgccgcccacgagtgtctgggtgattgatccgcgcccgtcggattggctcaaatccaccggtgtcaccatcaacggcgcgttgcccaaggccccggcgatcgttctcatcgcggtcaagccgcagatgatgggcgatgcgctgcccgagatcgcggcgatgggcaatggcgagacgctgtttgtctcggtcgcggcgggcacgtcgattgcggcctttgaggccgccatgggggcgcagagcccgatcatccgggcgatgcccaacacccccgccgcggtgggccggggcatcaccgccatcatcggcaacagccacgccagcgccgcgcatctcgacatggccgaagagctgctgcgtgcggtggggcaggtcgtccggctcgagagcgaaagccagatggatgcggtcaccggggtcagcggctctggcccggcctatgtgttccatatgatcgaatgtctggcgcaggcgggcgaggcgcaggggcttgcccccgagcttgccatgcagcttgccaaggcgacggtggccggggccggggcgctggccgaggcggcggaggagaccccggcgcagctccgcgtcaatgtcaccagccccaatggcacgacgcaggccgggcttgagcagctgatggatgagacaaccggcctgccgcccctgatggcgcggaccgtggccgccgcgacagaccggtcaaaggagttggcgcgtggctga

SEQ ID NO: 7865 - protein, 276 aa, Roseovarius nubinhibens ISM
MREGFMVMQSVAEGGLVLLGCGKMGSAMLEGWLANGLPPTSVWVIDPRPSDWLKSTGVTINGALPKAPAIVLIAVKPQMMGDALPEIAAMGNGETLFVSVAAGTSIAAFEAAMGAQSPIIRAMPNTPAAVGRGITAIIGNSHASAAHLDMAEELLRAVGQVVRLESESQMDAVTGVSGSGPAYVFHMIECLAQAGEAQGLAPELAMQLAKATVAGAGALAEAAEETPAQLRVNVTSPNGTTQAGLEQLMDETTGLPPLMARTVAAATDRSKELARG

SEQ ID NO: 7866 - DNA, 810 bp, Erythrobacter sp. NAP1
  CDS (1)..(810): transl_table=11
gtgtcagaaatcaaccaactactcatcatcggctgcggcaatatgggcggagcaatgctcgccggttggcttgctgccggtgtcgatccctcgcgctttgcgatcctcgatccgggaatggaagccgcgcctgaaggcgtgacgctttaccgagatcccgccgaggccgaggcggcgggcgcgcatgacgcggtgatgctgggcttcaagccacagcaactcggcaatcttgcaccagggctgcaaaagctgaccggcgaaggagtgacgatctattcgctgctcgccggactgacgctggcccagctgaagaaggcgtttccgggtgctgcggcccatgtgcgcgtcatgccaaacctcgcctcgcgcataaacaagtcgccgatcattctgctcgaagatggtcttgatggaagcgagcgcgacgctgcgtttgcgctgttcgatctgctcgggactgcagtgtggctcgaggaagaaggcaagttcgacctcgttaccgcgcttgcaggctcagggccgggctttgtctaccggttcatcgacgcgcttgcagaagcggcgcgcaatctcggactggaggacgagcaggccaccagtctcgcgctcgcaatggtggatggggcttcctcgcttgcggcgggctcggacatttcgcccggtgagctggccgaccgcgtcgccagtcccggcggaatgacccgcgaaggcatgaacgtgctcgatgcagacaaagcgttggtcaagctgcttactgacaccctgatcgcaacgcgagaccgtggcgcggagctttcggcaggcggatag

SEQ ID NO: 7867 - protein, 269 aa, Erythrobacter sp. NAP1
MSEINQLLIIGCGNMGGAMLAGWLAAGVDPSRFAILDPGMEAAPEGVTLYRDPAEAEAAGAHDAVMLGFKPQQLGNLAPGLQKLTGEGVTIYSLLAGLTLAQLKKAFPGAAAHVRVMPNLASRINKSPIILLEDGLDGSERDAAFALFDLLGTAVWLEEEGKFDLVTALAGSGPGFVYRFIDALAEAARNLGLEDEQATSLALAMVDGASSLAAGSDISPGELADRVASPGGMTREGMNVLDADKALVKLLTDTLIATRDRGAELSAGG

SEQ ID NO: 7868 - DNA, 819 bp, Photobacterium sp. SKA34
  CDS (1)..(819): transl_table=11
atggaacaacgctcaattgcctttattggggcaggtaatatggctcgctcaattatcgcaggtttagttgctagcggttacgatgcaaaaaagctcacggccaccgctcctagcgatgctcgacgtgaacctttagcacgtgactttggtatccataccactagcgataacttaaatgctgctcaaaatgctgatgttgttgttcttgcggttaaaccacaacttatggaagaagtgtgtaaaccactgcaagacattaactttgccggaaaattagtgatttctattgctgctggcattaattgcgatcgtttgtgtgaaatgttaggtcagcaagttgaattagttcgtgtaatgccaaatactccctctttaattggtaaggggatgagcggcttatatgcgaaaccacaactcacagaaaccgaccgactatttgccactcaactattacaagccgtaggcgaaatttgttgggtccaagaagagtcaggtatcaatggtattattgccgcagcaggcagtgctcccgcctacttctttttgtttatggaagcaatgcagcaagaagcaatgaaccaagggtttgatgccgatactgcgcgcttactggttcaacaagcagctttaggtgcagctgaattagtaaaagcgaatccagatacttcattgtcgacactacgtgatcaagtcacttcaaaaggtggcacgacagctgaagctattaatacatttaatcaacatcaattctcagatattgttgctaaagcgatgcaagcagccgtatctcgagctaaagaaatggaacaattgttttaa

SEQ ID NO: 7869 - protein, 272 aa, Photobacterium sp. SKA34
MEQRSIAFIGAGNMARSIIAGLVASGYDAKKLTATAPSDARREPLARDFGIHTTSDNLNAAQNADVVVLAVKPQLMEEVCKPLQDINFAGKLVISIAAGINCDRLCEMLGQQVELVRVMPNTPSLIGKGMSGLYAKPQLTETDRLFATQLLQAVGEICWVQEESGINGIIAAAGSAPAYFFLFMEAMQQEAMNQGFDADTARLLVQQAALGAAELVKANPDTSLSTLRDQVTSKGGTTAEAINTFNQHQFSDIVAKAMQAAVSRAKEMEQLF

SEQ ID NO: 7870 - DNA, 828 bp, Neptuniibacter caesariensis
  CDS (1)..(828): transl_table=11
gtggataaacaacctgtattagcatttatcggcgcgggcaatatggctcgggcaatcattggtggtctgattagcaacggctaccctgcaaataagatctgggccagtgaacccgatgcagaacgtttatcagacttaaaagttcaaggtttgcagaccacaacggataataaccaggcagtgatggccgccgacgcggtaatacttgcggtgaaaccgcaggttcttaaaccggtcaccgaagcgatgaaagatgcggtccaggcaaaacagcccgtcattatttcagtcgctgcaggcattttatctaccagtatcgatcgttggctgggaggtaacaccgctatcgtccgctgcatgccaaatacaccggctctggtaggcacaggcgcgagtggtttgtacgcaaacagccaggtatctgatgaacaacgttccgctgctgaaactatcctcaaggcaacgggaattaccctttgggtcgacgaggagtcacaactagacgcagtgactgccgtatccggatcaggccctgcttactatttcctggtgatggaatctatgatccaagcgggcaaaaagctgggcttatccgaagaggtcgccactaagctaacattgcaaaccgctttgggggcagctcaaatggcatcatccagcgatgttgacccagcagagttgcgccgtcgggtaacctcacctaacggaacaacagagcaggcaattaagacatttatggatgaaggtttgccagcaacctttgaaaaagcgctgcaggcttgtaatgaccgctccgaagaattagcaaaagaactaggcgacgcttaa

SEQ ID NO: 7871 - protein, 275 aa, Neptuniibacter caesariensis
MDKQPVLAFIGAGNMARAIIGGLISNGYPANKIWASEPDAERLSDLKVQGLQTTTDNNQAVMAADAVILAVKPQVLKPVTEAMKDAVQAKQPVIISVAAGILSTSIDRWLGGNTAIVRCMPNTPALVGTGASGLYANSQVSDEQRSAAETILKATGITLWVDEESQLDAVTAVSGSGPAYYFLVMESMIQAGKKLGLSEEVATKLTLQTALGAAQMASSSDVDPAELRRRVTSPNGTTEQAIKTFMDEGLPATFEKALQACNDRSEELAKELGDA

SEQ ID NO: 7872 - DNA, 825 bp, delta proteobacterium MLMS-1
  CDS (1)..(825): transl_table=11
atgagtaaagaagcgtacaaacttgcttttattggcggcgggcagatggccggggcgttgcttaagggtattctggcggcagatctctaccgggccggggagatcgtggtggccgagcccgaggccgcccgccgggagttgctggctcgtgaattcggggtggcggtggtggccggggccgctgattttcccgccgcctgtccggtggtggtactggccgttaagccccaggtgctgggcaaagtcctggaaagttaccgggggcggctggccggtgagcgactgctgatttccattgccgccgggatctctctggcctttatcgaggaatgcctggcgccggaaccggtacgggtgatccgggtgatgcccaatactccggccctggtgcaggccggggcttcggctttggcccccggtagccgggccgatgccgatgacctggaggtgggccggcgactttttgccgccgtgggcagtgtcgtgatcctggaggaaaggcagttggacgcggttaccggtctcagtggcagtggcccggcctatgtatttaccttctttgaagctctggtggaggccggggtcaaggtggggttgagccgggaagtggcaaccgagttggcccgccagaccatttccggttccatgcaactggccgccgccgatcagcagcagaatcccgccgcactacgggccatggtgacttcgccgggaggcaccaccatcgccggcttgcatgttctggaacggggcggttttcgcggcctgttgatggatgccgtggaaacggccaccaggcgcagtgtcgagttgggccggggttga

SEQ ID NO: 7873 - protein, 274 aa, delta proteobacterium MLMS-1
MSKEAYKLAFIGGGQMAGALLKGILAADLYRAGEIVVAEPEAARRELLAREFGVAVVAGAADFPAACPVVVLAVKPQVLGKVLESYRGRLAGERLLISIAAGISLAFIEECLAPEPVRVIRVMPNTPALVQAGASALAPGSRADADDLEVGRRLFAAVGSVVILEERQLDAVTGLSGSGPAYVFTFFEALVEAGVKVGLSREVATELARQTISGSMQLAAADQQQNPAALRAMVTSPGGTTIAGLHVLERGGFRGLLMDAVETATRRSVELGRG

SEQ ID NO: 7874 - DNA, 819 bp, Oceanobacter sp. RED65
  CDS (1)..(819): transl_table=11
atgacaaccatcgcattcatcggtagtggtaatatggcgggggcgattatgggcggcctcatcgaagacggctatcaaccagacaatataattgctagtgatcctagtgaagaaaaactggctgagttgaagcaacgccatggcattcaaactacacaaaacaacatagacgccatcaagcgttccgatgtggtggtgctggcggtgaaaccacaagtcatggaacaagtgttggaaccgttgaaagcgactttggaagagacacagcctttattaatctcagttgctgcaggtattaatcaatacagtctacaacaatgggctggtgaccttgctatcgttcgctgtatgcctaacaccccatctcttgtaggcaaaggtgccagtggtttgttagccaacgataaagtaagcgaccaacaaaaatccattactgaagatattctaggagctgttggcctgagcgtatgggtcaataacgaacagcaattagattgggttaccgccgtatctggtagcggtccagcttattattttttatttatggaatgtatgattcaagccgcaaaaaatatgggcatggatgaagagcaagctaaaaaactaacattacaaaccgcgttgggtgctgccaccatggcacaaaaaagtgatgttgaacccgatcaattacgcaaaaatgttacatcacctaacggcaccacagagcaggcgattttgagttttcaaaatgccggcttagataagattgtaaaagatgccatggaagccgtcgtcaaacgcagtgaagaaatggtcaaagaattaggtgccaaatag

SEQ ID NO: 7875 - protein, 272 aa, Oceanobacter sp. RED65
MTTIAFIGSGNMAGAIMGGLIEDGYQPDNIIASDPSEEKLAELKQRHGIQTTQNNIDAIKRSDVVVLAVKPQVMEQVLEPLKATLEETQPLLISVAAGINQYSLQQWAGDLAIVRCMPNTPSLVGKGASGLLANDKVSDQQKSITEDILGAVGLSVWVNNEQQLDWVTAVSGSGPAYYFLFMECMIQAAKNMGMDEEQAKKLTLQTALGAATMAQKSDVEPDQLRKNVTSPNGTTEQAILSFQNAGLDKIVKDAMEAVVKRSEEMVKELGAK

SEQ ID NO: 7876 - DNA, 801 bp, Synechococcus sp. RS9916
  CDS (1)..(801): transl_table=11
gtgattggcctgggccgcatggctcaggctttgttgttgcccctcctggagcagaacgaccctgccgcggctgatgtgatcgctgtggtgggtcagcaagccacggcggatcgcctggcggcatcgttgcctggggatctcaaccttgtgtcagcgtcggattcccgcgccgcagcggcttggacggcgcccgtgcagctgctggcgatcaagccctaccaactggaccaagtggcagcgagtgcacctgccgtgcagggaccagagccacccctgctgatttcagtccttgcggggatcacccttgagcggctggaacagtccttccctgggcgtgtctgtgttcgggccgtgcccaacaccccgtctttggtgcgggcaggtctcaccggtttggcctggggccagggggtgacggacgcgcacaagcaacgggtgcaggcgttcttctcccccgtcagcgaggtgctggagctacccgaggaacggcttgatgtctttctggccctcacgtcatcggggccggcctatgtggccatgatggctgaggccatggccgacggtgctgtggccgttgggatgccccgtgatcaggctctgcacctggccaatcgcacgctggcgggcaccgctgctctgttgcacgagcaacaacttcatccggcccagctcaaagacatggtggcctcccctggaggaaccacgatggccgcgatccgtcgcctggagcaggcgggtcttcgatccgctctgatcgaggctgtggtggccgcggctgagcatggccgcaacttgcgctga

SEQ ID NO: 7877 - protein, 266 aa, Synechococcus sp. RS9916
MIGLGRMAQALLLPLLEQNDPAAADVIAVVGQQATADRLAASLPGDLNLVSASDSRAAAAWTAPVQLLAIKPYQLDQVAASAPAVQGPEPPLLISVLAGITLERLEQSFPGRVCVRAVPNTPSLVRAGLTGLAWGQGVTDAHKQRVQAFFSPVSEVLELPEERLDVFLALTSSGPAYVAMMAEAMADGAVAVGMPRDQALHLANRTLAGTAALLHEQQLHPAQLKDMVASPGGTTMAAIRRLEQAGLRSALIEAVVAAAEHGRNLR

SEQ ID NO: 7878 - DNA, 831 bp, Marinobacter sp. ELB17
  CDS (1)..(831): transl_table=11
ttgagcaaatcaccgaccatttcatttattggtgccggtaatatggcgagcgctattattggcggcatgctggataacggctatcaagccggcgaaatttgggtcagcgccccagacgacgagcatttgcaaggcttgcgcaagcgtttcggcatcagcgtaaccaccgacaaccgctactgcgcccaacaatctgacattgttgtattggcggtaaagccgcaggtcatggccagcgtgtgtgaagatattgccgcggtggtgcgcaatacccggccactgatggtttcaatcgcagcaggcttgacctccgacactatcgacggatggcttggcggtggcgtacctatggtgcgggtgatgcccaataccccgtcactggtgggcaaaggagccgcgggcctgtttgccaactcgcgggtcagcgaacagcaaaaaaacgacgttatggccatttttgacagcgtaggctctgccaactgggtgcagcaggaagaacaattacacgcagtaaccgcattgtctggcagcggccccgcctattttttcttgatgctggaggctctggaagaagccgccactaacgctggcatggcggcagaaacagcccgcgaactggccatccaaaccatggcaggtgccgcagaaatggcggcccgcagcgacttggaaccggcgcaactcaagcgtaatgtgatgtcacccggtggcactaccgagcaggcggtgaacacgttcgagcaaggtggtttgcgcgaactggtgcaaaaagcctactcagcggcctatacccgctctcaggaaatggccaaagaactggtcggtaaataa

SEQ ID NO: 7879 - protein, 276 aa, Marinobacter sp. ELB17
MSKSPTISFIGAGNMASAIIGGMLDNGYQAGEIWVSAPDDEHLQGLRKRFGISVTTDNRYCAQQSDIVVLAVKPQVMASVCEDIAAVVRNTRPLMVSIAAGLTSDTIDGWLGGGVPMVRVMPNTPSLVGKGAAGLFANSRVSEQQKNDVMAIFDSVGSANWVQQEEQLHAVTALSGSGPAYFFLMLEALEEAATNAGMAAETARELAIQTMAGAAEMAARSDLEPAQLKRNVMSPGGTTEQAVNTFEQGGLRELVQKAYSAAYTRSQEMAKELVGK

SEQ ID NO: 7880 - DNA, 828 bp, Moritella sp. PE36
  CDS (1)..(828): transl_table=11
atgatcacgaataaaaaaatcgcctttatcggtgcaggaaatatggctagcagccttatcacaggcatgatcgcagatggttatcctgccgagttaatttatgcagccagtccgacacggtcgcgcttagatgtattagcagaaaaatttgccattaataccacccaagacaatcacgctgctgtggcggcggcagatattattattctggcagtaaaaccacagttgatggcagaggtttgctctcatcttgcagaacaaagtagcaattaccgtggtaagttatttgtgtctgttgccgctggcgtaaccgttgaacgtttacagagtttattagcggacaatcaacctattgtacggaccatgccaaataccccagcgttagtacaaaaaggcatgacaggtttattcccatcaccagaagtgtctgataacgatatcaaaaccattgaccagatcatgatggcggttggtaaaacatgctgggtcgataacgaagctgatttaaataccattattgccgccacgggcagttcaccggcttatttcttcctcttcatggaagcaatgcaagaaagcattatcggcatgggattcagtaaacagcaagcaagagagctagtccagcaagcggcggctggttcagccgaattagtgatccaaaatccacacattgatttagccacattacgccaaaatgtaacctcaaaaggtggcacgacagcagaagcaatccgtacttttgaagaacaagatctacgcggtactgtcaatacagcaatgcaagcagcggtgtcccgcgctgaagaaatgcaaaaactattttaa

SEQ ID NO: 7881 - protein, 275 aa, Moritella sp. PE36
MITNKKIAFIGAGNMASSLITGMIADGYPAELIYAASPTRSRLDVLAEKFAINTTQDNHAAVAAADIIILAVKPQLMAEVCSHLAEQSSNYRGKLFVSVAAGVTVERLQSLLADNQPIVRTMPNTPALVQKGMTGLFPSPEVSDNDIKTIDQIMMAVGKTCWVDNEADLNTIIAATGSSPAYFFLFMEAMQESIIGMGFSKQQARELVQQAAAGSAELVIQNPHIDLATLRQNVTSKGGTTAEAIRTFEEQDLRGTVNTAMQAAVSRAEEMQKLF

SEQ ID NO: 7882 - DNA, 810 bp, Cyanothece sp. PCC 7424
  CDS (1)..(810): transl_table=11
gtgtctattcgtctaggaattattgggggtggagtgatggcagaagctatcctctcccgtctcattgaacaaaacatttatcctcctgacgctgttttggtgagtgaacctcagcctcaacggcgtgaatttttgcgtaaaacttacaaagtacaagttacttccgataatcgagagacaacaacggctcaagatgtgttattattagccgttaaaccccaaattttagataaagtcgccgaaaatttagcccatttatttcctaaacgttatcctcccttaattctttctattttagccggggtgactttaaagcgtttagaagctattttttcagagcaagctattattagagtcatgccgaatactcccgcaaccgtaggagccggcataacggcgatcgcagccggcaaaaaagtagagcctgaacatctggcgagcgctcgctcaatttttgcggcggtgggagaagtggtagaagtgcctgaaagtttgatggatggggtgacgggtttatccggttcgggcccggcttttgtggccattatgatcgaagcgttagctgatgggggagttgcagccgggttacctcgtcccattgcggctcaactggcactccaaacggttttagggacggcgcaattactccaacagacaaaacttcatccagcacaattaaaagatcaagtcacctctccgggaggtacgactattgccggtgtgactcagttagaaaagtccggttttcgcgcggcaattattgaggcagtcatggcagctaaacaacgctctcacgagttaggacgttaa

SEQ ID NO: 7883 - protein, 269 aa, Cyanothece sp. PCC 7424
MSIRLGIIGGGVMAEAILSRLIEQNIYPPDAVLVSEPQPQRREFLRKTYKVQVTSDNRETTTAQDVLLLAVKPQILDKVAENLAHLFPKRYPPLILSILAGVTLKRLEAIFSEQAIIRVMPNTPATVGAGITAIAAGKKVEPEHLASARSIFAAVGEVVEVPESLMDGVTGLSGSGPAFVAIMIEALADGGVAAGLPRPIAAQLALQTVLGTAQLLQQTKLHPAQLKDQVTSPGGTTIAGVTQLEKSGFRAAIIEAVMAAKQRSHELGR

SEQ ID NO: 7884 - DNA, 831 bp, Vitis vinifera
  CDS (1)..(831)
atggcgggtgtggctcctattccaatggatacattcaaattggggtttataggagctggaaaaatggcagagagcattgcgaaaggagtcgtccattcaggcctcatgcccgcttcccgaatctctactgctcctagaagttcgagtcgccaagatgcctttgaatcattgggcgtcaaaattttcgaaaccaatcagcgggtagttgaagacagtgatgtggttgttttttctgtgaaacctcaagttgttgaagatgtggtcctggagctgaggccgctactaacgaagaagaagcttttggtgtctgttgttgctggagttaaattgaaacatctacaggaatgggctggtcacagccgatttataagggtgatgccaaatactcctgctgctgttggcaaggcagcatcggttatgagcttgggaaaatctgcaacagaagaggatggaggactaatagcgaatttgtttggagcaattggcaagatatggagagctgatgagaagtacttcgatgcagtcactggcctgagtggcagtggcccagcctatatatatatagcaatagaagctttggctgatggaggggtagctgctggtctacctcgtgaacttgcatggaatctagcttctcagacggtattaggagcagcagatatggccatcagcacagggaagcatcctggtcagctcaaagatgatgtcgcatcacctggtggcacaaccattgctggtatttatgagttggagaagggtggattccgtgggatcttgatgaatgctgttgttgctgctgccaagcgaagccttgatctttctgagagctag

SEQ ID NO: 7885 - protein, 276 aa, Vitis vinifera
MAGVAPIPMDTFKLGFIGAGKMAESIAKGVVHSGLMPASRISTAPRSSSRQDAFESLGVKIFETNQRVVEDSDVVVFSVKPQVVEDVVLELRPLLTKKKLLVSVVAGVKLKHLQEWAGHSRFIRVMPNTPAAVGKAASVMSLGKSATEEDGGLIANLFGAIGKIWRADEKYFDAVTGLSGSGPAYIYIAIEALADGGVAAGLPRELAWNLASQTVLGAADMAISTGKHPGQLKDDVASPGGTTIAGIYELEKGGFRGILMNAVVAAAKRSLDLSES

SEQ ID NO: 7886 - DNA, 813 bp, Microcystis aeruginosa PCC 7806
  CDS (1)..(813): transl_table=11
gtgtctattcgtttaggaattattggcggtggagtgatggccgaggccattctcagccgtttattaaaaaaaaatgtttatagtccggaaacggtgttagtcagtgaaccccagtcccaacggcgcaacttttgggttaatacctatggagtgcaagtcagtgaggataaccgggaagctgctagggcaactgaggtgttaatcttagcggtaaaaccgcaaactttagagcaagtagtgaatagtttgctaggaatacccgaaaaacccctaattatctcgattttagcgggagttaccctcaatcgcttagaaatgggctttcccgatcgccccgtaatccggacgatgcccaataccccggctacggtgggacaaggggttacagcgatcgcatccggtcgttatgcggaaccggaacatctggccgtagctagagatatttttgctgcggtcggttcggtggtggaagttcccgaagctttgatggacgcggtaacgggattatcgggatcgggcccggcatttgtggccttgatggtggaagctttaagtgatggtggtgtggcggccggattaccacgatcaatcgcgtctcaattggctatagaaacagtgttagggacggcaaccctattaaaagaatcggccatacatccgggggaattaaaggatcgcgtcactagccccgggggaaccacgattgctggggtgagacaattagaaaaaggctcttttcgctcaactattatcgaggcagtagtggcggcctatcatagatctaaagatttagggcgtagttccgaaaagtaa

SEQ ID NO: 7887 - protein, 270 aa, Microcystis aeruginosa PCC 7806
MSIRLGIIGGGVMAEAILSRLLKKNVYSPETVLVSEPQSQRRNFWVNTYGVQVSEDNREAARATEVLILAVKPQTLEQVVNSLLGIPEKPLIISILAGVTLNRLEMGFPDRPVIRTMPNTPATVGQGVTAIASGRYAEPEHLAVARDIFAAVGSVVEVPEALMDAVTGLSGSGPAFVALMVEALSDGGVAAGLPRSIASQLAIETVLGTATLLKESAIHPGELKDRVTSPGGTTIAGVRQLEKGSFRSTIIEAVVAAYHRSKDLGRSSEK

SEQ ID NO: 7888 - DNA, 819 bp, Picea sitchensis
  CDS (1)..(819)
atggcgatggcagatggagcatttacattgggattcatcggagcaggcaagatggcggaggccatagctcgaggtctggataaatcaggggtacttccctcttcaagaatgcggactgcccatacccgacttcctcgtcgagaaacttttgcctcctttggcgttaccattatggaatcaaactcaaaggtagttgaagaatgcgaggttatagttcttggagtgaagccccaagttgttaaagaggttcttgtagacttgaagcctatactctcggaggacaagttgctggtgtcgattgcagcaggtgtcaaactaaaagatttggaggaatgggcaggaaaggcaagagtggtaagggtgatgccaaatacaccttgtcttgttggtgaaagtgcagcagttatgagcttgggtgagaaggctactgctgaggatgagaagctggtgaaggttctttttgaagcagttgggaaaatatggacagcgaaggaaaagcttcttgatgctgtcactggcctcagtgggagtgggccagcgtatatatatcttgccatagaggcattggctgatggaggtgttgcagctgggcttccacgggaacttgcattatcactggcttcccagacagttttgggagctgcgaagatggtgatagatactaagaaaaaccctggccaacttaaagatgaagtggcatctccagctggcaccaccataactggaattcatgagttggaaaaaggaggatttcgtgctactctcatgagtgctgtgattgctgcaacgaaaagaagtgaagagctttccaaaacatag

SEQ ID NO: 7889 - protein, 272 aa, Picea sitchensis
MAMADGAFTLGFIGAGKMAEAIARGLDKSGVLPSSRMRTAHTRLPRRETFASFGVTIMESNSKVVEECEVIVLGVKPQVVKEVLVDLKPILSEDKLLVSIAAGVKLKDLEEWAGKARVVRVMPNTPCLVGESAAVMSLGEKATAEDEKLVKVLFEAVGKIWTAKEKLLDAVTGLSGSGPAYIYLAIEALADGGVAAGLPRELALSLASQTVLGAAKMVIDTKKNPGQLKDEVASPAGTTITGIHELEKGGFRATLMSAVIAATKRSEELSKT

SEQ ID NO: 7890 - DNA, 801 bp, Clostridium sticklandii
  CDS (1)..(801): transl_table=11
atggataaaaaaattggatttataggatgcggaaatatggctcaggcaatgatatcagctttagtcaaatcaaagctaatagagtcaaatcaaataatagtaagcaatcgctcaaaaaatatacttgaaaaaatgaacaaggaatatggcattactattgcagctaacaacatagaagtagcagaaaaatgcgacatcgtgttcttggctgtaaagcaaaacctttatgaaatggttatgaaggaaatcaaagacagcgtaacaaaggataagatatttgtttcaatagcaccaggaaagactatggagtttctagaggctcatctaggagcatatgctaaaattcttagaactatgccaaacactccatctatggtaagcgaagggatgacagctatttgccccaattctaacatagcttcagaagagctagagctacttgttaagctaattgaaagctttggagcagtagaaataatagaagaaaaattgtttgatgctgtagttgcagtatcaggctcatctccagcctatgtattcatgtttatagaagccatggcagatgccgcagtgattcaagggatgcctagagctcaggcatatagatttgcagctcaagcagtgcttggaagtgcaaaaatggtactagaatctaagagccatcctggagaacttaaagacatggtatgctcgcctggaggcactactatagaagcagtagcagtgctagaagaaagagggatgcgctcggctgtaatagaggcaatgagaaaatgcgctcaaaaatccaaggagatgtag

SEQ ID NO: 7891 - protein, 266 aa, Clostridium sticklandii
MDKKIGFIGCGNMAQAMISALVKSKLIESNQIIVSNRSKNILEKMNKEYGITIAANNIEVAEKCDIVFLAVKQNLYEMVMKEIKDSVTKDKIFVSIAPGKTMEFLEAHLGAYAKILRTMPNTPSMVSEGMTAICPNSNIASEELELLVKLIESFGAVEIIEEKLFDAVVAVSGSSPAYVFMFIEAMADAAVIQGMPRAQAYRFAAQAVLGSAKMVLESKSHPGELKDMVCSPGGTTIEAVAVLEERGMRSAVIEAMRKCAQKSKEM

SEQ ID NO: 7892 - DNA, 843 bp, Drosophila melanogaster
  CDS (1)..(843)
atggccaagttggacgaaaagatcggcttcatcgggggcggaaacatggtctacgccataggatccggactggtgcgctgtgggatcgtgaaggctagccaggtgcaggtctccggtccccacattgagaacctgcaacggtggcgggatctgggagctgtgacctgcgacgacaactgcatggtcctggagcactcggacatagttttcatctgcgtaaagccacacatgctaacgccgtgtgccgcccagcttaagtacaagcacgtgccgtcggccaaggatgccagcaagctggtggtgtcggttctagcgggtaccagcctccaaacgctggaggaggccttcagcttcatgggcagttcggagctgaaggtgatacgcaccatgcccaatacatccatgcaggtgggcgagggctgcactgtttacactggcaacgcacgcgtttcgcatcacgacttggaaaagattcacctaatgctcaacgccctgggactggcgcaacaggtgcccgagtccatgatcgacgccgttacgccggtagctggatgcggtccggcatttgtttacaccatcatagaggcactggccgatggcggcgtcaaacagggcgttccgcgtcagatggctcttcagtttgcggctcagacgcttctgggagcggccaaaacggtgctgctcactggcaaacatccggcggtgctgcgggatgaagtctgttctcccggtggcgccaccatagtaggcgttcatgaactggaaaaggggaacctcaggtctactttaataaacgccgtggaaaagtcgtcacagcgttctgctgaactgggaaagaagtga

SEQ ID NO: 7893 - protein, 280 aa, Drosophila melanogaster
MAKLDEKIGFIGGGNMVYAIGSGLVRCGIVKASQVQVSGPHIENLQRWRDLGAVTCDDNCMVLEHSDIVFICVKPHMLTPCAAQLKYKHVPSAKDASKLVVSVLAGTSLQTLEEAFSFMGSSELKVIRTMPNTSMQVGEGCTVYTGNARVSHHDLEKIHLMLNALGLAQQVPESMIDAVTPVAGCGPAFVYTIIEALADGGVKQGVPRQMALQFAAQTLLGAAKTVLLTGKHPAVLRDEVCSPGGATIVGVHELEKGNLRSTLINAVEKSSQRSAELGKK

SEQ ID NO: 7894 - DNA, 849 bp, Ostreococcus tauri
  CDS (1)..(849)
atgcgcgacggatcgaccatcatgcgcgtgggtttcatcgggtacgggaacatggcggacgcgctggcgagcggattcgtcggcgcgaacgtggtcaagtttgccgatttgacgatgtgtaataaatccaacgtcgagcgacgcgagagcttcagggcgaggggagggacggtggtggagaccgcgagagacgtgacggagaagagtgatgtcatctttttggccgtcaaaccgccgtacatcaagagcgtgttggatgaagtgcgcagagagatctcggaggaggcgctcgagcccaaggttttcgtgagcgtcgccgcgggggtcacgctcgaggcgatggagggggtgtggacgacgcacgaccagaaaccaccggccatcgtgcgcgtgatgccgaacacgccgtgcttggtcggtgccgcggcgagcggaatatgcaaagggtcgacgtgctcggaggaaagcttgcaccgagcgctcgcgctcatgtccaccgtgggcgtgtgcaaagtgatcatggaatcgcagatgagcgctctgacgggcgtgagcggctccggaccggcgtatgtgttcgtgctcatcgaggccatggcggacggtggcgttcgagcgggacttccgagagacgtcgcgctggaactcgccgcgcagacgttttacggagcgtcaaaaatggtgctcgaaacgggcgagcatccgggcgtgctcaaggacaaagtgtgctctccgggcgggacaacgatcgcggcggtacacgcgctcgagcaggcgggcgttcgagccgccatgatgaatgcggtcctggcagcggcgaaccgaggcgacgaattagccaagatgtaa

SEQ ID NO: 7895 - protein, 282 aa, Ostreococcus tauri
MRDGSTIMRVGFIGYGNMADALASGFVGANVVKFADLTMCNKSNVERRESFRARGGTVVETARDVTEKSDVIFLAVKPPYIKSVLDEVRREISEEALEPKVFVSVAAGVTLEAMEGVWTTHDQKPPAIVRVMPNTPCLVGAAASGICKGSTCSEESLHRALALMSTVGVCKVIMESQMSALTGVSGSGPAYVFVLIEAMADGGVRAGLPRDVALELAAQTFYGASKMVLETGEHPGVLKDKVCSPGGTTIAAVHALEQAGVRAAMMNAVLAAANRGDELAKM

SEQ ID NO: 7896 - DNA, 831 bp, Aedes aegypti
  CDS (1)..(831)
atgaaaaacatttgttccaatttgcttaaaatgggtttcattggcggtgggaaaacggcacaggctatggcgaaaggttttatatccgccggcttggtgaagggagagaacatcaccgctagtttcagcccacaagacgatgttaatttgcaagcgttcaaagcgttaggcgctgggacatatctagacagcgttccggtcgtgaaacggtcggaagtagtgttcattacggtcaagccatgggtggttccagcggtgttgaagcaagtgctaacctgtagcaaagacaaactgtttatttcggtggcaatgggagttaagctgaaggaactggaagagtcgctgcttccaacggcacgcgtcatcagggtcatgcccaatacggctactttggtccgcgccggagcttccgtattcgtgcgtggttcggcggcaaccgaggatgattgctctctgacgcaagcgctgctagaatcggtggggacttgcgacgaggtaacggaacaactgatagaccccatcactgccttgtcgggaagcggcccgggttatgtgttcaccatgattgaggcgatggccgatggagccgtcaaaatgggcctttcgcgtgatttggcgtacaaattggcggcccagacggttatgggagccggcaaaatggttctggaaacgggagcccatccggggcagctgaaagatgacgttgctagcccgggagggtcaaccattacaggattatcatttttggagaagaatgcctttcgttacattgtcagtggtgctatcgaagctgctacccagagatgtcgcgaagtttcaggaaaggaataa

SEQ ID NO: 7897 - protein, 276 aa, Aedes aegypti
MKNICSNLLKMGFIGGGKTAQAMAKGFISAGLVKGENITASFSPQDDVNLQAFKALGAGTYLDSVPVVKRSEVVFITVKPWVVPAVLKQVLTCSKDKLFISVAMGVKLKELEESLLPTARVIRVMPNTATLVRAGASVFVRGSAATEDDCSLTQALLESVGTCDEVTEQLIDPITALSGSGPGYVFTMIEAMADGAVKMGLSRDLAYKLAAQTVMGAGKMVLETGAHPGQLKDDVASPGGSTITGLSFLEKNAFRYIVSGAIEAATQRCREVSGKE

SEQ ID NO: 7898 - DNA, 927 bp, Ustilago hordei
  CDS (1)..(927)
atgccaggatacacattagctgtcatcggatgcggtacaatgggcgtagccatcctttcgggtgtgcttgactcgcaacgctcccagcaagcccaagctgctgcttcaatggcatcgtccgtctcctccttgcacgattcttcagcaggcgatgacctcaccgaactacccaatcgctacatcgccactgtcaaccgagttgaatcggtccgtcgacttaataaaaccttcgctcaatatcccgacatcgagatccatgcaggcaagaacgtccaagcagcccgtgatgccgacgtcatcttgctcggttgcaaacctcaaatggtccaagacattatcgctgaagaaggaatgaaagaagcacttgatggcaaactcgtcatttccatctgtgccggtcttcgtatctcgcagattacagaatgggtcactcccaagacaaaagtcgttcgagctatgcccaatactccgtgcaagatcagggagggaatgaccattctcactcctctctcgcccaacctgcccaatgctgagcttgaccgcagcatcttgctttctatcttcagcgcagtgggcaaaagcaggtttttggacgagaagcatttcgatgcatgcactgcgctggccggatcgggtccagctttcgcatgcgtgttcttggaagcaatggcagatgggggtgtaatgatgggtttgccgagaacagaagcgttggagctggcagcgcagacaatgcagggagctgcaaggatggttatgcagagtggaatgcatcctgctgctatcaaggattcggtcactactcctggtggatgcacgattgctggtctgctcaacttggaggatggcaaggttcgaagcacggtggcgaggacgatccaggctgctgctgaacatgctagtggtcttgggcagacgaagaaatga

SEQ ID NO: 7899 - protein, 308 aa, Ustilago hordei
MPGYTLAVIGCGTMGVAILSGVLDSQRSQQAQAAASMASSVSSLHDSSAGDDLTELPNRYIATVNRVESVRRLNKTFAQYPDIEIHAGKNVQAARDADVILLGCKPQMVQDIIAEEGMKEALDGKLVISICAGLRISQITEWVTPKTKVVRAMPNTPCKIREGMTILTPLSPNLPNAELDRSILLSIFSAVGKSRFLDEKHFDACTALAGSGPAFACVFLEAMADGGVMMGLPRTEALELAAQTMQGAARMVMQSGMHPAAIKDSVTTPGGCTIAGLLNLEDGKVRSTVARTIQAAAEHASGLGQTKK

SEQ ID NO: 7900 - DNA, 819 bp, Aedes aegypti
  CDS (1)..(819)
atgagtaacatgctcaaaatcggttttctcggcggtggaaaaatggcacaagcgatggccaaaggattcatttcggcgggtttaacaaaatgtgaaaatatgacggcaagtttccatccatccgatttgccaaacattgaggctttcaaatcgtttggggctcagacttttacagaaaacgttcctgttgtgaagcgctcagacgtgatatttgtatcggtgaaaccaacagtagttccaactgtattggaaaatgtgcgatctgaaagtgatggaaaactcttcatttctatcgctatgggagtaacattggcagatttggagcagtcgctttcgtcaaatgctcgtgtaattagagtgatgcccaatacccctgcactggttcgcagtggagcttccgtatatgttcgaggtaagacagctacgccagatgattgttctgtaacgcaaaagcttttcgaggctatcggtacttgtgaagaagttgcggaaagtatgatggatcctgtgacagcactttccggtagcggaccggcatacatttttgtgctgatagaatcattagccgatggaggcgtaagaatgggtctaccaagggatttggcttatcgcttagcagcgcagacttttcttggcgctggtcaactggttcgtgatactggtcgtcatcctggacaattgaaagatgatgtaacgagcccagccggatcaactgctgcaggattggcgtttctggagcaaaatgcattccgacatgccgttgctggagcagtagaagcagcgacacttcgatgtcgcgaggtttcgggcaataaataa

SEQ ID NO: 7901 - protein, 272 aa, Aedes aegypti
MSNMLKIGFLGGGKMAQAMAKGFISAGLTKCENMTASFHPSDLPNIEAFKSFGAQTFTENVPVVKRSDVIFVSVKPTVVPTVLENVRSESDGKLFISIAMGVTLADLEQSLSSNARVIRVMPNTPALVRSGASVYVRGKTATPDDCSVTQKLFEAIGTCEEVAESMMDPVTALSGSGPAYIFVLIESLADGGVRMGLPRDLAYRLAAQTFLGAGQLVRDTGRHPGQLKDDVTSPAGSTAAGLAFLEQNAFRHAVAGAVEAATLRCREVSGNK

SEQ ID NO: 7902 - DNA, 882 bp, Aedes aegypti
  CDS (1)..(882)
atgagtgcctctaccggagcccgggacctttcaaagctaaatgtgggttttatcggtggtggaaacatggcttatgccattgctgctggactatttaaaacgggtgttctgcagccaaaccaagtaattgtttcggctaccaatttgaacaatttgagagtacgttggaatccgttgggtgtcactagagtaaccacgagcaatgcacaggtgctacaagaggcagaaatagtgtttctctgtgttaaaccgcatgttctaccggcatgcaaggagtccattctagttgaggccgagtcgattcaacatctggcctctcactgccatgaaaaagttatggtttcaattttggctggcgttaccttagcaaggttgaaggatacgttttcgtttttgaacatacaacacgtgcgcacgatgcccaacacaccaatgcaagttggagccggctgtaccatatatagtgcaggtttcggaaaacattgtccagggattgttctcagctattatgaagacatcaaatttatgctgaaccagctaggtttggcatatgaagtgaacgaagcacagatggatggtatcactggccttactggatgtggtcctgcctttgtctacgaaattatcgaagcgctagctgatggaggggtgaagcagggtattgctcgcgacatggctcttaagatggcagcacaaacagttatgggagctgcaaaaacagtactggaaactggaaagcatccggctgtgcttaaggacgaggtctgctccccgggaggagctaccattcatggtgtacatgagctcgaaaaaggtgcgatgcgagcaacgttgatgaacgcagtagaaaaatctgctgctcgagcaaaagaactctcttaa

SEQ ID NO: 7903 - protein, 293 aa, Aedes aegypti
MSASTGARDLSKLNVGFIGGGNMAYAIAAGLFKTGVLQPNQVIVSATNLNNLRVRWNPLGVTRVTTSNAQVLQEAEIVFLCVKPHVLPACKESILVEAESIQHLASHCHEKVMVSILAGVTLARLKDTFSFLNIQHVRTMPNTPMQVGAGCTIYSAGFGKHCPGIVLSYYEDIKFMLNQLGLAYEVNEAQMDGITGLTGCGPAFVYEIIEALADGGVKQGIARDMALKMAAQTVMGAAKTVLETGKHPAVLKDEVCSPGGATIHGVHELEKGAMRATLMNAVEKSAARAKELS

SEQ ID NO: 7904 - DNA, 864 bp, Triticum aestivum
  CDS (1)..(864)
  misc_feature (801)..(801): y is t or c
atggcggccgcgcctccccagcccgccgcgcccgcccccggccccgcgaacggcggcgacgcgttccgcctgggcttcgtcggcgcggggaacctggccgagagcatcgcgcgcggcgtcgcggcgtcgggcgtcctcccggcctccgccgtccgcaccgctccccaccgccgccccgagcgcggcgccgccttcgcctccctcggcgccaccatcctcgcctccaacgcccaggttgtggacggcagcgatgtgatcgtcatctccgtcaagccccagattgtgaagcaggttctggttgagctcaagcccttgctgtctgaagaaaagcttctggtctccatcgctgctggcatcaaaatgaaagatttgcaggattggtctggtcagcgcagaattattagagtaatgccaaacaccccctctgctgtcggacaagcagcatcagtgatgtgtctgggagagacagctactgagaaggatgaaaaccgtgtcaaaagcttatttagtgccattggaaaagtttggacagctgaagaaaaatattttgatgcggttactggcttgagtggtagtggtccggcctacattttcttggcaatagaggccatggctgatggtggagttgctgctgggcttcctcgggatcttgctcttggtcttgcagctcagacagtgctaggtgctgcaaccatggttagcgagacgggtaaacatccagggcagctgaaggatcaggtcacttcccctgcaggaactaccatagctggtgttcatgagctcgagaagggttcgtttcgyggcacactgataaatgccgttgttgctgccacaacaagatgccgagagctctcaaaaaattag

SEQ ID NO: 7905 - protein, 287 aa, Triticum aestivum
MAAAPPQPAAPAPGPANGGDAFRLGFVGAGNLAESIARGVAASGVLPASAVRTAPHRRPERGAAFASLGATILASNAQVVDGSDVIVISVKPQIVKQVLVELKPLLSEEKLLVSIAAGIKMKDLQDWSGQRRIIRVMPNTPSAVGQAASVMCLGETATEKDENRVKSLFSAIGKVWTAEEKYFDAVTGLSGSGPAYIFLAIEAMADGGVAAGLPRDLALGLAAQTVLGAATMVSETGKHPGQLKDQVTSPAGTTIAGVHELEKGSFRGTLINAVVAATTRCRELSKN

SEQ ID NO: 7906 - DNA, 1077 bp, Angiococcus disciformis
  CDS (1)..(1077): transl_table=11
gtggggcgtggacttcagccacttccaccggatgctccgcatcctcgaccggcacggtgcgagggtcgccggtggcaagggctgggagcacatggtcagccgcacctacggcctcgaagaggtgaatcaggccctggccgatgtcgagacgggtcgcatcgtgaagggactcatccgccccaatcccgttcgtacctcgcgatgacggccgattcgatggatgccaccgtgccctcgcggaggccagccctgggcttcatcggcggtggggtgatggccgaggccttgattggagcggtcaccgggggaggcctggccgcgcccggcacgctcctcgtcggagaggtcgacgaggagcgtcgccgggtgctccgcgagcagtatggcgtcgaggtgaccgcggacaacctcgcggcggcggacgcggaactggtcgtgctggccgtgaagccgcaacacctgggtgttgtcctccagcagctgcgcgggcagctccgtgaggacacgattgtcgtcagcatcatcgcgggcgcgcgcctgcagacgctgtgcgagggtctcgaacacccactcgtcgttcgcgcgatgcccaacacccccgcgcgggtccgcaaggcggccaccttctggattccaagcgcgggcttgagcgagccggcgctggtgcgcgtccgctcactgctgggcgcgctcggcaccgaagtggaggtcgccgacgaggccggcgtggagatggcgacgggcctcgccggccccatgcccgcgttcgtctatttcctcatcgaggcgttcatcgacgcgggcgtggccctggggctgccgcgtgatcaggccaccctggcgacggtggagagcatgcgcggaagcctggagttgctgcatcgcagccaggagtccccggcggcgttgcgcaagcaggtcacgagccctggtggcgcgacgctggccggcttgaaggtgttcgagagcgcgggcgtccgggatgcgatggacgcggcggtgcgcgcggtgcacgcgcgcgcgcaggagctcgggcggcttccgctcgccccgctcgagcccgggaaagagggctga

SEQ ID NO: 7907 - protein, 358 aa, Angiococcus disciformis
MGRGLQPLPPDAPHPRPARCEGRRWQGLGAHGQPHLRPRRGESGPGRCRDGSHREGTHPPQSRSYLAMTADSMDATVPSRRPALGFIGGGVMAEALIGAVTGGGLAAPGTLLVGEVDEERRRVLREQYGVEVTADNLAAADAELVVLAVKPQHLGVVLQQLRGQLREDTIVVSIIAGARLQTLCEGLEHPLVVRAMPNTPARVRKAATFWIPSAGLSEPALVRVRSLLGALGTEVEVADEAGVEMATGLAGPMPAFVYFLIEAFIDAGVALGLPRDQATLATVESMRGSLELLHRSQESPAALRKQVTSPGGATLAGLKVFESAGVRDAMDAAVRAVHARAQELGRLPLAPLEPGKEG

SEQ ID NO: 7908 - DNA, 822 bp, Nostoc sp
  CDS (1)..(822): transl_table=11
atgctcgaagatttacaaattgcctttatcggtggtggcacgatgggcgaaatgataatggctagattgttatcaactaaaattgttccaaaacccgatctaattatagtcagcgatccagtttctgcgcgatgccttcatttagaaagtgaatatggagtaagtactacaacctgcaatatagaagcggttgttggcgcgtctattgtgatattggcggtgaaaccgcaggttttagcagaggttctggctatacttaagggtaaaatttcacctgatgctttagtaattagtattgtgagtggagcgagtattccatatctgtgcgaagggttgaatcatcctgctgttgtccgtacaatgccgaatatagcagtacaagttgggcatgggactacggtttggagtgcatcatcaagtgtgacagaaatacagcgatcgcatactcaagtcattttacaagcattaggtaaggaatttcctacccaaaatgaacattaccttgatatggcaacggcgttgagtagcgcagggactggatttatatttctgtacatagaggcgatgattgatgctggggttcagatgggtttaactcggacacaagcccaagaactaacattgcatacgattgctggcagtgtagaactgatgtttcagactgatgaacatgccagcagtcttacgaaacaaggtacgagtcctgggggagtgactgctgttggcctttacgagttagaaaaaggtggtatgcgaactctcatctctaatgcagtgcttgctgctttgagtcgcactcaacaattaggtactggagtttag

SEQ ID NO: 7909 - protein, 273 aa, Nostoc sp
MLEDLQIAFIGGGTMGEMIMARLLSTKIVPKPDLIIVSDPVSARCLHLESEYGVSTTTCNIEAVVGASIVILAVKPQVLAEVLAILKGKISPDALVISIVSGASIPYLCEGLNHPAVVRTMPNIAVQVGHGTTVWSASSSVTEIQRSHTQVILQALGKEFPTQNEHYLDMATALSSAGTGFIFLYIEAMIDAGVQMGLTRTQAQELTLHTIAGSVELMFQTDEHASSLTKQGTSPGGVTAVGLYELEKGGMRTLISNAVLAALSRTQQLGTGV

SEQ ID NO: 7910 - DNA, 828 bp, Hordeum vulgare var
  CDS (1)..(828)
atggcggccgcgcccccggcccccgcccccgcgttccgcctgggcttcgtcggcgcggggaacctggccgagagcatcgcgcggggcgtcgcggcgtcgggcgtcctcccggcctccgccgtccgcaccgcgccccaccgccgccccgagcgcgccgccgccttcgcctccctcggcgccaccatcctcgcctccaacgcccaggtcgtcgacgacagcgatgtgatcgtcatctccgtcaagccccagattgtgaagcaggttctggttgagctcaagcccttgctgtctgaagaaaagcttctcgtctccattgccgctggcatcaagatgaaagatttgcaggattggtctggtcagcgccgaattattagagtaatgccgaacactccctctgccgtcggacaagcagcatcagtgatgtgtctaggagagacggctactgagaatgatgaaaatcgtgtaaagagcttatttagtgccattggaaagttggcagccgaagaaaaatttgatccggttactggcttaagtggtagtggtccggcctacattttcttggcaatagaggccatggctgatggtggagttgctgctgggcttcctcgggatcttgctcttggtcttgcagctcagacagttctaggtgctgcaaccatggttagcgagacgggtaaacatccaggccagctgaaggatcaggtcacttcccctgcaggaactacgatagctggtgttcatgagctcgagaagggttcgttccgtggcacactgataaatgccgttgttgctgccacaacaagatgccgagagctctcgaaaaattag

SEQ ID NO: 7911 - protein, 275 aa, Hordeum vulgare var
MAAAPPAPAPAFRLGFVGAGNLAESIARGVAASGVLPASAVRTAPHRRPERAAAFASLGATILASNAQVVDDSDVIVISVKPQIVKQVLVELKPLLSEEKLLVSIAAGIKMKDLQDWSGQRRIIRVMPNTPSAVGQAASVMCLGETATENDENRVKSLFSAIGKLAAEEKFDPVTGLSGSGPAYIFLAIEAMADGGVAAGLPRDLALGLAAQTVLGAATMVSETGKHPGQLKDQVTSPAGTTIAGVHELEKGSFRGTLINAVVAATTRCRELSKN

SEQ ID NO: 7912 - DNA, 918 bp, Escherichia coli O6
  CDS (1)..(918): transl_table=11
ttgttgggtaatcctctattgtgtcgcgcttttgccttccggcatagttctgtttatgcttctgccagcgattatcaaaacaatgaatttcacggcaggagtgaggcaatggaaaagaaaatcggttttattggctgcggcaatatgggaaaagccattctcggcggtctgattgccagcggtcaggtgcttccagggcaaatctgggtatataccccctccccggataaagtcgccgccctgcatgaccagttcggcatcaacgccgcagaatcggcgcaagaagtagcgcaaatcgccgacatcatttttgccgccgttaaacctggcatcatgattaaagtgcttagcgaaatcacctccagcctgaataaagactctctggtcgtttctattgctgcaggtatcacactcgaccagcttgcccgcgcgctgggccatgaccggaaaattatccgcgccatgccgaacactcccgcgctggttaatgccgggatgacctccgtaacgccaaacgcgctggtaaccccagaagataccgctgatgtgctgaatattttccgctgctttggcgaagcggaagtaattgccgagccgatgatccacccggtggtcggtgtgagcggttcttcgccagcctacgtctttatgtttatcgaagcgatggccgacgccgccgtgctgggcgggatgccacgcgcccaggcgtataaatttgccgctcaggcggtaatgggttccgcaaaaatggtgctggaaacgggagaacatccaggggcactgaaagatatggtctgctcaccgggaggcaccaccattgaggcggtacgcgtactggaagagaaaggcttccgtgccgcagtgatcgaagcgatgacgaagtgtatggaaaaatcagaaaaactcagtaaatcctga

SEQ ID NO: 7913 - protein, 305 aa, Escherichia coli O6
MLGNPLLCRAFAFRHSSVYASASDYQNNEFHGRSEAMEKKIGFIGCGNMGKAILGGLIASGQVLPGQIWVYTPSPDKVAALHDQFGINAAESAQEVAQIADIIFAAVKPGIMIKVLSEITSSLNKDSLVVSIAAGITLDQLARALGHDRKIIRAMPNTPALVNAGMTSVTPNALVTPEDTADVLNIFRCFGEAEVIAEPMIHPVVGVSGSSPAYVFMFIEAMADAAVLGGMPRAQAYKFAAQAVMGSAKMVLETGEHPGALKDMVCSPGGTTIEAVRVLEEKGFRAAVIEAMTKCMEKSEKLSKS

SEQ ID NO: 7914 - DNA, 813 bp, Tigriopus californicus
  CDS (1)..(813)
atgagtgccaacctgagagttggtttcatcggagcgggtaaaatggcctcggccttagctcaaggcttcattaaaggtcaggccgtcaaatgtgcttcgcacgtgtctgccagttgtccaatcgctgacaagcatcttttggaacacatgaaacaaatgggttgtcagacattccattgcaataaagagctcatggattgctctgatgtggtcattctggccgtcaaacctcaaatcatgccattggttctccccgatatcaaatcattggtagcctctaaactcatggtgtcgattgcggcaggagtccagcttgcccagctccaagcagatcttaatcccgactccaagattgtccgattaatgcccaacaccccgtgtatcgtgcgggaaggggtgtcagtcttttgctcagggcctcaagttacaccacaagacaacgcaacggtaaaacaactctttggaacggttggacaaatcgatgaggttaaagaatcgatgattgatgcagtcacgggcgtgtcaggatctggccctgcctacatgtacttaatcattgaggcgatggcagacggtggggtcaagcaaggactcccaagagatctggcctacaagttggcagctcagacgatggtcggtgctggtcgtatggttttagacacacatactcatcctgctgtattgaaggacgaggtctgctcccccgggggtaccacgatcacggctttggacatgttggaaaagagcggccttaggaccagtatcatgcaggctgtggaggccgccaccaaacgatgtactcagatctcatga

SEQ ID NO: 7915 - protein, 270 aa, Tigriopus californicus
MSANLRVGFIGAGKMASALAQGFIKGQAVKCASHVSASCPIADKHLLEHMKQMGCQTFHCNKELMDCSDVVILAVKPQIMPLVLPDIKSLVASKLMVSIAAGVQLAQLQADLNPDSKIVRLMPNTPCIVREGVSVFCSGPQVTPQDNATVKQLFGTVGQIDEVKESMIDAVTGVSGSGPAYMYLIIEAMADGGVKQGLPRDLAYKLAAQTMVGAGRMVLDTHTHPAVLKDEVCSPGGTTITALDMLEKSGLRTSIMQAVEAATKRCTQIS

SEQ ID NO: 7916 - DNA, 825 bp, Vigna unguiculata
  CDS (1)..(825)
atggaaatcgctcccattcccgtcgacacctacaccctcggtttcatcggcgccggaaaaatggccgagtccattgcccgcggtgccgttcgctccggtgtcctgccgccttctcgcattcgcaccgccgtacactccaatcccgcgcgccgcacagcgttcgaatcattcggcgtcaccgttctctcatcgaacgacgaagtcgttcgccaaagcaacgtcgtcgttctatcggtcaaacctcaattagtgaaagacgtggtgtcgaaattgaagccgataatcacgaaggacaagcttttggtttcagtggctgctggcgtcaagttgaaagatcttcaggaatgggcagggagcgacagatttataagagtgatgcctaatacacctgctgcagttggcgaggcagcatcagttatgagcttaggggcagccgcaacagaggaagatggaaatgttatagctaaattatttgggtcaatcggcaaaatatggagagctgaagagaaatattttgatggaataactggcctgagtggtagtggtcctgcgtacatttatttagcaatagaagctttggctgatggaggagtagcagctggtctaccacgtgatctttcattaagtctagcttctcaaactgtattgggagcagcatcaatggtgacgcagagtgggaagcacccggggcaactgaaggatgacgttacttctcccggtgggacaacaattacgggcattcatgagttagaaaacggtgggttccgcggaacactgatgaatgctgttgttgctgctgctaagcgcagccgtgagctttcttga

SEQ ID NO: 7917 - protein, 274 aa, Vigna unguiculata
MEIAPIPVDTYTLGFIGAGKMAESIARGAVRSGVLPPSRIRTAVHSNPARRTAFESFGVTVLSSNDEVVRQSNVVVLSVKPQLVKDVVSKLKPIITKDKLLVSVAAGVKLKDLQEWAGSDRFIRVMPNTPAAVGEAASVMSLGAAATEEDGNVIAKLFGSIGKIWRAEEKYFDGITGLSGSGPAYIYLAIEALADGGVAAGLPRDLSLSLASQTVLGAASMVTQSGKHPGQLKDDVTSPGGTTITGIHELENGGFRGTLMNAVVAAAKRSRELS

SEQ ID NO: 7918 - DNA, 873 bp, Bradyrhizobium japonicum
  CDS (1)..(873): transl_table=11
atgggtcccggccttcgccgggacgacaccgaatttgtggtgaccacagtggcgaacagcactcttcaaaacatcaccggcaccatccttctcgccggcgccggcaagatgggcggcgcgatgctgaccggatggctggcgggcggactcgatccgcgccgtgtcgcggtggtcgacccgcacatcgcgcctgagatcagcgcgcttgccgccaagggcgtggcgctcaatcccgatgcgaaggcggcaggtcaggtcgagaccatggtcgtcgcggtgaagccgcagatgttccgcgaggccggcgcgaagctgaagcccttcgtctcggagaagacctccgtggtctcgatcatggcgggaaccacgatcgcctcgcttcaggaggtctgcggcggcgctgtcgtgcgcgcgatgccgaacacgccggccgcgatcggccgcggcatcacggtggcggttgcggcgaaaaacgtcagcaccgcgcaacgcgcggtggccgacgcgctgctgcgcgccaccggctcggtcgaatgggtcgaggatgaaagcctgatggatgcggtgaccgcggtgtccggctcgggaccggcctatgtgttcctgctcgccgaggaacttgcgcgcgccggtgtcgaagcgggattgcccgaggcgctggcgacgaagctcgcgcgcgaaacggtggcaggctcgggcgagctgctgcatcaatccgagctgccctccggcacgctgcgccagaacgtcacctcgcccggcggcaccacggccgcagcgctcggcgtgctgatgggcgagcccggcctgcgcgacctgatgatccgtgcaatcgcagcggcgacgcagcggtcgaaggaattggcgaagtag

SEQ ID NO: 7919 - protein, 290 aa, Bradyrhizobium japonicum
MGPGLRRDDTEFVVTTVANSTLQNITGTILLAGAGKMGGAMLTGWLAGGLDPRRVAVVDPHIAPEISALAAKGVALNPDAKAAGQVETMVVAVKPQMFREAGAKLKPFVSEKTSVVSIMAGTTIASLQEVCGGAVVRAMPNTPAAIGRGITVAVAAKNVSTAQRAVADALLRATGSVEWVEDESLMDAVTAVSGSGPAYVFLLAEELARAGVEAGLPEALATKLARETVAGSGELLHQSELPSGTLRQNVTSPGGTTAAALGVLMGEPGLRDLMIRAIAAATQRSKELAK

SEQ ID NO: 7920 - DNA, 816 bp, Zymomonas mobilis
  CDS (1)..(816): transl_table=11
atgagccatattcatttcatcggcagcggccaaatgtccgaagccatgatccgagccattatcaagcataaaaccgcttcggccagtgacatcaccgcctatgacatccggccggaacgggaaaaagaactgcatgacaattatggcatcacgacttttgccaaaccgaaaaaaaatattgaaaccctccaaaaagccgacattgttgttatcggggtcagaccacaagacgacctgaaagcggtgacagccgatattgctcaaaatgccaaagaaaaggccttgattgtttcgattgtcgctggtgtcacgcttgcccaatttgaagacctacttggcaaagaaagagctatcgcaagaattatcccgaacacactcaccgacaccggattgggctatagcggggtggtcatcaacaatcaggcagacaaagccctaaccgaaaaatttgtttccggttttgggaaatgcctctttttggaagaaagcctgatcgacatttttacgggttttggcgtctgcgggcccaattacgtctattattttatcgaagccttggttgatgccggcgtgctagctggcctgcctcgtgatattgcatgggaaaccacgatggaaaatctggtaggctcggtaaaaatgctggaaatatcaggtaagcatccacgccaattactggacatcaacaattcacctgccggtgtcggcatgaatagcctcttcgccttgaaccaaagcgacttcaccgcaggcctacaaaatagcgtcctcgcggctgtcaaaagaacaaccgaactaggccagaaaaaagattaa

SEQ ID NO: 7921 - protein, 271 aa, Zymomonas mobilis
MSHIHFIGSGQMSEAMIRAIIKHKTASASDITAYDIRPEREKELHDNYGITTFAKPKKNIETLQKADIVVIGVRPQDDLKAVTADIAQNAKEKALIVSIVAGVTLAQFEDLLGKERAIARIIPNTLTDTGLGYSGVVINNQADKALTEKFVSGFGKCLFLEESLIDIFTGFGVCGPNYVYYFIEALVDAGVLAGLPRDIAWETTMENLVGSVKMLEISGKHPRQLLDINNSPAGVGMNSLFALNQSDFTAGLQNSVLAAVKRTTELGQKKD

SEQ ID NO: 7922 - DNA, 822 bp, Nostoc sp
  CDS (1)..(822): transl_table=11
atgctcgaagatttacaaattgcctttatcggcggtggcacgatgggcgaaatgataattagtagattgttatcaacgaaaattgttccaaaagccgatctaattatagtcagcgatccagtttctgcgcgatgccttcatttagaaagggaatatggagtacgtactacaacctccaatatagaagcggttcttggcgtatctattgtgatattggcggtgaagccgcagattttggcagaggttctgggtatgcttaaggataaaattccacctaatgctttggtaattagtattgtgagtggagcgagtatttcatctctgtgccaagggttgaatcatcctgctgttgtccgtacaatgcccaatattgcagtacaagttggtcatgggactacagtgtggagtgcatcatcaagtgtgacagagatacagcgatcgcatacccaaataattttacaagcattaggtaaggaatttgctacccaaaatgaacattaccttgatatggcaacggcgttgagtagcgctgggactggatttgtgtttctgtacatcgaagcgatgattgatgctggtgttcagatgggtttaactcggacacaagctcaagaactaacattgcatacgattgctggtagtgtagaactgatgtttcagactcatgaacatccagcagttttacgaaacaaggtaacaagtcctgggggagtgactgctgctggtctttacgagttagaaaaaggtggtatgcgaactgttatttctaatgcagtgcttgccgctttgagccgcactcaacaattaggtaatatcagttaa

SEQ ID NO: 7923 - protein, 273 aa, Nostoc sp
MLEDLQIAFIGGGTMGEMIISRLLSTKIVPKADLIIVSDPVSARCLHLEREYGVRTTTSNIEAVLGVSIVILAVKPQILAEVLGMLKDKIPPNALVISIVSGASISSLCQGLNHPAVVRTMPNIAVQVGHGTTVWSASSSVTEIQRSHTQIILQALGKEFATQNEHYLDMATALSSAGTGFVFLYIEAMIDAGVQMGLTRTQAQELTLHTIAGSVELMFQTHEHPAVLRNKVTSPGGVTAAGLYELEKGGMRTVISNAVLAALSRTQQLGNIS

SEQ ID NO: 7924 - DNA, 831 bp, Arabidopsis thaliana
  CDS (1)..(831)
atggagattcttccgattccggcggagagtttcaaggtaggattcatcggagctggtaaaatggcggagagtatagctagaggtgtggttgcttccggtgtgcttcctcctaatcgtatatgcaccgccgttcactcaaatctcaatcgccgtgatgtcttcgaatcctttggcgtcaatgtcttctccactagcgaagaagttgttaaagaaagcgatgttgtcatattctctgtgaaacctcaagttgttaagaaggctgtcacagaattaaagtcgaagctttcaaagaataagattctggtttctgttgcagctggaatcaagttgaatgatttacaggaatggtctggtcaagatcgattcataagggtgatgcctaatacacctgccgctgttggtgaggcagcttcagttatgagccttggcacaggagcaacggaagaggatggagcaattgttgctatgttgtttggcgcggtggggaagatattgaaagctgatgagaaaatgtttgatgctgtcactggtctcagtggaagtggaccagcatacatatttttagcaattgaagctttagccgatggaggagtagctgctggtttaccccgagagcttgcattgagtttagcttcacagaccgttcttggagctgcaacgatggttagcaaaactgggaagcatccaggtgtgttgaaagatgatgttacctcacctggcggcactacaatagccggagttcatgaactagagaaaggctctttccgggcaacacttatgaatgcagttgttgctgcagctaaacgaagccgcgagctctcacagagctaa

SEQ ID NO: 7925 - protein, 276 aa, Arabidopsis thaliana
MEILPIPAESFKVGFIGAGKMAESIARGVVASGVLPPNRICTAVHSNLNRRDVFESFGVNVFSTSEEVVKESDVVIFSVKPQVVKKAVTELKSKLSKNKILVSVAAGIKLNDLQEWSGQDRFIRVMPNTPAAVGEAASVMSLGTGATEEDGAIVAMLFGAVGKILKADEKMFDAVTGLSGSGPAYIFLAIEALADGGVAAGLPRELALSLASQTVLGAATMVSKTGKHPGVLKDDVTSPGGTTIAGVHELEKGSFRATLMNAVVAAAKRSRELSQS

SEQ ID NO: 7926 - DNA, 894 bp, Bacillus subtilis
  CDS (1)..(894): transl_table=11
atgcgaacaaaaaagcgaacaaaggagatgttaccgatctttgatcaaaagaaagtagcctttataggagcaggatctatggcggaaggaatgatatcaggtatcgttcgagccaacaaaatcccgaaacaaaacatctgcgttacaaaccgcagcaatacagagcgattaactgaacttgaacttcaatatggcattaaaggcgccttgccgaaccaactatgtattgaagacatggatgtgctcattttggcaatgaagccaaaagacgccgaaaacgctctgtcatcactaaaatcacgtattcaaccccatcaattaatattgtcggtccttgccggcataactacctcttttattgaacaatcattgcttaatgaacagccggttgtcagagtgatgcccaacacttccagtatgattggcgcttctgcaacagctattgcccttggcaaatatgtgtcggaagacctgaagaagctggccgaagcattgctcggatgcatgggcgaagtctatacaatccaagaaaatcaaatggatatattcaccggaattgcaggcagcggacccgcgtatttttattatttaatggaattcattgaaaagacaggcgaggaagcgggcctcgataaacagttatctcgaagcatcggcgcacagacacttttaggtgccgcaaaaatgctcatggaaacaggagaacatcctgagatcttaagagataatatcacgtcaccgaacggaacgacagcagcggggctgcaagccttgaaaaagagcggcggcggagaagcgatttctcaagcaataaagcatgcggctaagcgttcaaaggaaatcagcgaagatatcgaaaaaactgcagcgccgctatcaggagtgataaagtga

SEQ ID NO: 7927 - protein, 297 aa, Bacillus subtilis
MRTKKRTKEMLPIFDQKKVAFIGAGSMAEGMISGIVRANKIPKQNICVTNRSNTERLTELELQYGIKGALPNQLCIEDMDVLILAMKPKDAENALSSLKSRIQPHQLILSVLAGITTSFIEQSLLNEQPVVRVMPNTSSMIGASATAIALGKYVSEDLKKLAEALLGCMGEVYTIQENQMDIFTGIAGSGPAYFYYLMEFIEKTGEEAGLDKQLSRSIGAQTLLGAAKMLMETGEHPEILRDNITSPNGTTAAGLQALKKSGGGEAISQAIKHAAKRSKEISEDIEKTAAPLSGVIK

SEQ ID NO: 7928 - DNA, 837 bp, Actinidia chinensis
  CDS (1)..(837)
atggcggcggcagcgtttgttccgattccgaccgatacatacaagctagggttcatcggcgccggcaaaatggcagagagcatagcccgaggcgtcgtcaagtcgggcgtcttgcccgcatccaggatccgaaccgcccatctcgggtccgctcgcagggaggctttcgagtccttcggcgtcaaggttctcgatcgcaacgaccaggtagtcgaagatagtgatgtcatcatcttctctgtcaaacctcagattgttaaggaagtggtcttgcagttgaggccactactttcggagaagcagcttttggtttctatcgttgcaggagttaaattaaaagagcttgaggattgggccggacacagccgatttattagggtgatgccgaatactcctgctgctgttggggaagcggcatccgttatgagcttgggggcaactgccactggggaggatggagaattaataactaagttgtttggagcaattggcaagatatggaaagctgatgagaaactgtttgatgccgtaactggcttgagtggtagcgggccagcatacattttcttagcgatagaggctttggctgatggaggggtggctgcaggtctaccacgagaacttgcactcggtctagcttctcaaactgtattgggagcagcgtctatggttgcgagaggagggaagcatccgggtcagcttaaagatgatgttgcatccgcaggtgggacaaccattgccgggattcatgagttggagaagggtggctttcgtgggaccttgatgaatgctgttgtttccgccaccaagcgaagccaagaaattttcaagagatag

SEQ ID NO: 7929 - protein, 278 aa, Actinidia chinensis
MAAAAFVPIPTDTYKLGFIGAGKMAESIARGVVKSGVLPASRIRTAHLGSARREAFESFGVKVLDRNDQVVEDSDVIIFSVKPQIVKEVVLQLRPLLSEKQLLVSIVAGVKLKELEDWAGHSRFIRVMPNTPAAVGEAASVMSLGATATGEDGELITKLFGAIGKIWKADEKLFDAVTGLSGSGPAYIFLAIEALADGGVAAGLPRELALGLASQTVLGAASMVARGGKHPGQLKDDVASAGGTTIAGIHELEKGGFRGTLMNAVVSATKRSQEIFKR

SEQ ID NO: 7930 - DNA, 813 bp, Corynebacterium glutamicum
  CDS (1)..(813): transl_table=11
atgacaacaattgctgtaatcggcggcggacaaatcggcgaggctttagtctcaggtttgatcgcggccaacatgaatccacaaaatattcgcgtcaccaaccgttcggaagagcgcggccaagagctgcgtgaccgctacggcatcctcaacatgacggataattcccaagccgcagacgaagccgacgtggtgttcctgtgcgtgaagccgaaatttatcgtcgaagtgctctccgaaatcaccggcactttggataacaactccgcacaaagtgttgtggtcagcatggccgcaggcatcagcatcgctgccatggaagaaagcgcctctgcggggctccccgtcgtgcgcgtcatgccgaacactccaatgctcgtgggcaagggcatgtcgactgtcaccaaaggccgctacgttgacgcggaacagttggaacaagtcaaggacttgttgagcaccgttggagacgtcctcgaagtcgcggaatcagacatcgacgcagtcaccgcgatgtccggatcctcccctgcatacctgttccttgtgaccgaagcgctcattgaggcaggagttaatctaggcctgccccgcgcgaccgctaaaaagctcgctgtggcctcattcgaaggtgctgcaaccatgatgaaggaaaccggcaaagaaccctcagaattgcgcgcaggcgtttcctcacccgcaggcaccaccgtcgcagccatccgagaactcgaagaaagcggaatccgaggcgctttctaccgcgcagcccaagcttgcgccgaccgatctgaagaactcggaaagcgctag

SEQ ID NO: 7931 - protein, 270 aa, Corynebacterium glutamicum
MTTIAVIGGGQIGEALVSGLIAANMNPQNIRVTNRSEERGQELRDRYGILNMTDNSQAADEADVVFLCVKPKFIVEVLSEITGTLDNNSAQSVVVSMAAGISIAAMEESASAGLPVVRVMPNTPMLVGKGMSTVTKGRYVDAEQLEQVKDLLSTVGDVLEVAESDIDAVTAMSGSSPAYLFLVTEALIEAGVNLGLPRATAKKLAVASFEGAATMMKETGKEPSELRAGVSSPAGTTVAAIRELEESGIRGAFYRAAQACADRSEELGKR

SEQ ID NO: 7932 - DNA, 813 bp, Corynebacterium melassecola
  CDS (1)..(813): transl_table=11
atgacaacaattgctgtaatcggcggcggacaaatcggcgaggctttagtctcaggtttgatcgcggccaacatgaatccacaaaatattcgcgtcaccaaccgttcggaagagcgcggccaagagctgcgtgaccgctacggcatcctcaacatgacggataattcccaagccgcagacgaagccgacgtggtgttcctgtgcgtgaagccgaaatttatcgtcgaagtgctctccgaaatcaccggcactttggataacaactccgcacaaagtgttgtggtcagcatggccgcaggcatcagcatcgccgccatggaagaaagcgcctctgcggggctccccgtcgtgcgcgtcatgccgaacactccaatgctcgtaggcaagggcatgtcgactgtcaccaaaggccgctacgtcgacgcggaacagttggaacaagtcaaggatctgttgagcaccgttggagacgtcctcgaagtcgcagaatcagacatcgacgcagtcaccgccatgtccggatcctcacccgcgtaccttttccttgtgacagaagcgctcattgaggcaggagttaacctaggcctgccccgcgcgaccgctaaaaagctcgctgtggcttcattcgaaggtgctgcaaccatgatgaaggaaaccggcaaagaaccctcagaattgcgcgcaggcgtttcctcacccgcaggcaccaccgtcgcagccatccgagaactcgaagaaagcggaatccgaggcgctttctaccgcgcagcccaagcttgcgccgaccgatccgaagaacttggaaaacactag

SEQ ID NO: 7933 - protein, 270 aa, Corynebacterium melassecola
MTTIAVIGGGQIGEALVSGLIAANMNPQNIRVTNRSEERGQELRDRYGILNMTDNSQAADEADVVFLCVKPKFIVEVLSEITGTLDNNSAQSVVVSMAAGISIAAMEESASAGLPVVRVMPNTPMLVGKGMSTVTKGRYVDAEQLEQVKDLLSTVGDVLEVAESDIDAVTAMSGSSPAYLFLVTEALIEAGVNLGLPRATAKKLAVASFEGAATMMKETGKEPSELRAGVSSPAGTTVAAIRELEESGIRGAFYRAAQACADRSEELGKH

SEQ ID NO: 7934 - DNA, 810 bp, Escherichia coli
  CDS (1)..(810): transl_table=11
atggaaaagaaaatcggttttattggctgcggcaatatgggaaaagccattctcggcggtctgattgccagcggtcaggtgcttccagggcaaatctgggtatacaccccctccccggataaagtcgccgccctgcatgaccagttcggcatcaacgccgcagaatcggcgcaagaagtggcgcaaatcgccgacatcatttttgctgccgttaaacctggcatcatgattaaagtgcttagcgaaatcacctccagcctgaataaagactctctggtcgtttctattgctgcaggtgtcacgctcgaccagcttgcccgcgcgctgggccatgaccggaaaattatccgcgccatgccgaacactcccgcactggttaatgccgggatgacctccgtaacgccaaacgcgctggtaaccccagaagataccgctgatgtgctgaatattttccgctgctttggcgaagcggaagtaattgctgagccgatgatccacccggtggtcggtgtgagcggttcttcgccagcctacgtatttatgtttatcgaagcgatggccgacgccgccgtgctgggcgggatgccacgcgcccaggcgtataaatttgccgctcaggcggtaatgggttccgcaaaaatggtgctggaaacgggagaacatccgggggcactgaaagatatggtctgctcaccgggaggcaccaccattgaagcggtacgcgtactggaagagaaaggcttccgtgctgcagtgatcgaagcgatgacgaagtgtatggaaaaatcagaaaaactcagcaaatcctga

SEQ ID NO: 7935 - protein, 269 aa, Escherichia coli
MEKKIGFIGCGNMGKAILGGLIASGQVLPGQIWVYTPSPDKVAALHDQFGINAAESAQEVAQIADIIFAAVKPGIMIKVLSEITSSLNKDSLVVSIAAGVTLDQLARALGHDRKIIRAMPNTPALVNAGMTSVTPNALVTPEDTADVLNIFRCFGEAEVIAEPMIHPVVGVSGSSPAYVFMFIEAMADAAVLGGMPRAQAYKFAAQAVMGSAKMVLETGEHPGALKDMVCSPGGTTIEAVRVLEEKGFRAAVIEAMTKCMEKSEKLSKS

SEQ ID NO: 7936 - DNA, 813 bp, Methanosarcina acetivorans
  CDS (1)..(813): transl_table=11
atggaaaatcaaaaaataggatttataggggcaggaaaaatgggctctgctctcatgcagggcaccataaaagcaggaatcgtaacacctgaaaatataggtgcaagtgatgtatacgagccctttttgaaagacctgcaggcaaaactgggaatccgggtgtcaaccgacaacgctgttatcgtccgagaatcggacattcttatccttgcagtaaagccccagaccctgagttcggtgctttcaaatctgaagaatgaaatcacttcggaaaaactcgtgatctcaattgctgcaggagtgcccctttccacatacgaggacgctctccttgaaggtaccagggttgtgcgtgtaatgccaaacatagcagccacagtttctgaagctgcttcagggattgctcccggaaagaatgcaactcctgaggacctgaaagctgccctcgagatcttttctgcagtcggcacagcagtccaggtgccggagtccctgatggatgccgttacagggctttcgggcagtggacctgcgtttattttcccggttattgaagcaatggctgacggggctgtccttgaagggatggataggaaaagcgccctcactcttgcagcccagactgtgctcggagccgcaaaaatggcgcttgaaacaggcatgcaccccggagaactcaaagatatggtcacatctcccgccggaactaccatccaggggattcactcccttgaagaagccggaatccgggctgcctttatgaatgcagtaataagagcaagtgaacgctcaaaggaactcggaaagaaataa

SEQ ID NO: 7937 - protein, 270 aa, Methanosarcina acetivorans
MENQKIGFIGAGKMGSALMQGTIKAGIVTPENIGASDVYEPFLKDLQAKLGIRVSTDNAVIVRESDILILAVKPQTLSSVLSNLKNEITSEKLVISIAAGVPLSTYEDALLEGTRVVRVMPNIAATVSEAASGIAPGKNATPEDLKAALEIFSAVGTAVQVPESLMDAVTGLSGSGPAFIFPVIEAMADGAVLEGMDRKSALTLAAQTVLGAAKMALETGMHPGELKDMVTSPAGTTIQGIHSLEEAGIRAAFMNAVIRASERSKELGKK

SEQ ID NO: 7938 - DNA, 885 bp, Mycobacterium leprae
  CDS (1)..(885): transl_table=11
atgctttccagcatggcaagaatcgcgatcatcggtggtggcagtattggtgaagcgttgttgtcggggcttctgcgggcggggaggcaggtcaaagacctggtggtggccgaacggatgcctgatcgcgcccgatacctagcggacacttactcggtgttggtgacgtcagtaaccgacgcggttgagaacgcaatgtttgtcgttgtcgctgtgaagccgaccgacgttgagtcagtgatgggggacctggttcaggcagccgcagtcgcgaatgacagcgctgagcaagtgttagtcaccgtggctgctggtgttacgatcacctatctcgagtccaagcttccggctggtacgccggtggttcgtgccatgccgaacgcagccgcgttggtgggcgcgggggttaccgtgttggccaaggggcgtttcgttactggacaacagttcgaggatgttttggccatgttcgacgcggtgggtggcgttctgacggttcctgagtcgcaaatggatgcggttaccgcggtatcgggttcaggcccggcatatttcttcttgctggtcgaagctctggtggatgccggcgtcgcggtgggtctgactcgtcaggtggctaccgaactggccgcgcagaccatggcggggtccgcggcaatgctactggagcgtatggatcaagatcggcattcagccgaggtggcgcctctgggcgcgcaggtggatgtcccggcggcgcaactacgcgccacgattacctcgcctggtggtactactgccgctgcgctgcgcgaactcgaacgtggcggactgcggatggtggtcgacgcagcggttcaggccgctaaaatccggtctgaacagctcagaattacatcggaataa

SEQ ID NO: 7939 - protein, 294 aa, Mycobacterium leprae
MLSSMARIAIIGGGSIGEALLSGLLRAGRQVKDLVVAERMPDRARYLADTYSVLVTSVTDAVENAMFVVVAVKPTDVESVMGDLVQAAAVANDSAEQVLVTVAAGVTITYLESKLPAGTPVVRAMPNAAALVGAGVTVLAKGRFVTGQQFEDVLAMFDAVGGVLTVPESQMDAVTAVSGSGPAYFFLLVEALVDAGVAVGLTRQVATELAAQTMAGSAAMLLERMDQDRHSAEVAPLGAQVDVPAAQLRATITSPGGTTAAALRELERGGLRMVVDAAVQAAKIRSEQLRITSE

SEQ ID NO: 7940 - DNA, 888 bp, Mycobacterium tuberculosis
  CDS (1)..(888): transl_table=11
atgcttttcggcatggcaaggatcgcgattatcggcggcggcagcatcggtgaggcattgctgtcgggtctgctgcgggcgggccggcaggtcaaagacctggtagtggccgagcggatgcccgatcgcgccaactacctggcgcagacctattcggtgttggtgacgtcggcggccgacgcggtggagaacgcgacgttcgtcgtcgtcgcggtcaaaccagccgacgtcgagccggtgatcgcggatctggcgaacgcgactgcggcggccgaaaacgacagtgctgagcaggtgttcgtcaccgtggtagcgggcatcacgatcgcgtatttcgaatccaagctaccggctgggacgccagtggtgcgtgcgatgccgaacgcggcggcattggtgggagcgggggttacagcgctggccaaaggccgctttgtcaccccgcaacagcttgaggaggtctcggccttgttcgacgcggtcggcggcgtgctgaccgttccggaatcgcagttggacgcggtgaccgcggtgtccggctcgggtccggcctatttctttctgctggtcgaggccctggtggatgccggagtcggggtgggcttgagccgtcaggtggccaccgatctcgccgcgcagacaatggctggctcagcggcgatgctgctggagcggatggagcaagaccagggtggcgccaatggcgagctgatggggctgcgcgtggaccttaccgcatcacggctgcgcgccgcggttacctcgccgggcggtacgaccgccgctgcgctgcgggaactcgaacgcggcgggtttcggatggctgtcgacgcggcggttcaagccgccaaaagccgctctgagcagctcagaattacaccggaatga

SEQ ID NO: 7941 - protein, 295 aa, Mycobacterium tuberculosis
MLFGMARIAIIGGGSIGEALLSGLLRAGRQVKDLVVAERMPDRANYLAQTYSVLVTSAADAVENATFVVVAVKPADVEPVIADLANATAAAENDSAEQVFVTVVAGITIAYFESKLPAGTPVVRAMPNAAALVGAGVTALAKGRFVTPQQLEEVSALFDAVGGVLTVPESQLDAVTAVSGSGPAYFFLLVEALVDAGVGVGLSRQVATDLAAQTMAGSAAMLLERMEQDQGGANGELMGLRVDLTASRLRAAVTSPGGTTAAALRELERGGFRMAVDAAVQAAKSRSEQLRITPE

SEQ ID NO: 7942 - DNA, 999 bp, Neurospora crassa
  CDS (1)..(999)
atggctgctcctcaagtaaagagctcctccgagctcaccatggccgttctcggctgcggaacgatgggcatctccatcctctccggcatcctctcctccctttcctccatcgcccaagacccctctccaccacccaccaacccccccgccctcccgcgccacttcatcgccaccgtgcgctccccatcctccgtcgccaaagtcgagtccgccctctccccgctcgtcaagccctccgtttctactctgcgcgtcctccaatccacctccaacgtctccgccgccgccgaagccgacatcatcctcctcgggtgcaagccctacatggtctctggcctactttccgcatccggcatgaaagatgctctgacagtcaagcacaccgaaggccacgcgcggtcccaaaagatcatcatttccatctgcgcgggcgtgacggttccggacctggagcgggtcttgcgcgaggacgtcggactgtccgctgataacttgccgattgtggtgcgcgcgatgcccaacacggccagcaagatcagagagagcatgacggttatcaacacggttgaccccccgctgccggataccgtcacggagctgctgacgtggatttttgagaggatcggcgaggtcgtgtatttgcctccgcacttgatggacgcgtgcacttctttgtgtgcttcgggcacggcgttcttcgcgctgatgatggaggcggcggcggatggaggtgtggcgatggggttgcctagggcggaggcgaacaggatggcggcgcagaccatgaggggtgctgctgggctcgtgctggagggagagcatccggcgatcttgagggagaaggtgagcacgccgggcgggtgcacgattggcgggttgttggtgttggaagagggtggggttagagcggcggttgcgagggcggttagggaggcgacggttgttgcgagcttgttgggaggagggggagcgaagaatgtcaatggtactaggcattag

SEQ ID NO: 7943 - protein, 332 aa, Neurospora crassa
MAAPQVKSSSELTMAVLGCGTMGISILSGILSSLSSIAQDPSPPPTNPPALPRHFIATVRSPSSVAKVESALSPLVKPSVSTLRVLQSTSNVSAAAEADIILLGCKPYMVSGLLSASGMKDALTVKHTEGHARSQKIIISICAGVTVPDLERVLREDVGLSADNLPIVVRAMPNTASKIRESMTVINTVDPPLPDTVTELLTWIFERIGEVVYLPPHLMDACTSLCASGTAFFALMMEAAADGGVAMGLPRAEANRMAAQTMRGAAGLVLEGEHPAILREKVSTPGGCTIGGLLVLEEGGVRAAVARAVREATVVASLLGGGGAKNVNGTRH

SEQ ID NO: 7944 - DNA, 822 bp, Pisum sativum
  CDS (1)..(822)
atggaaatccttcccattctctccgattcctacactctaggtttcatcggcgccggaaaaatggccgaaagcattgccaaaggcgcctcccgctccggcgtgttaccctcttcccgcatcgtaaccgctcactctaacccctctcgtcgagccgccttcgagtccatcggcatcaccgtcctttcttccaacgacgatgtcgttcgtgccagcaacgtcgtcgttttctcggttaaacctcaattagtgaaggacgttgtgttgaaattgaagccgctcctaactaaggacaagcttttggtttctgttgctgctggaatcaagttgaaagatcttcaggaatgggctggccacgaaagatttataagggtaatgccaaatacacctgctgcagttggccaggcggcatcagttatgagcttgggaggagctgcaacagaagaagatgcaaatcttatatcccaattatttgggtcaattggcaaaatatggaaagctgatgataagttttttgatgcaataactggtctaagtggcagtggtcctgcttatatttatttagcaatagaggctctggctgatggaggagtagcagctggtctaccgcgtgatcttgcattaagtctagcttctcagactgtactaggagcagcatcaatggcaacccttagtgggaagcatccaggacagctcaaggatgatgtcacttctcctggcgggacaacaattgcaggcgttcatgagttggaaaaagggggtttccgtggaacactgatgaatgctgttgttgctgccgctaaacgcagccgagagctttcctaa

SEQ ID NO: 7945 - protein, 273 aa, Pisum sativum
MEILPILSDSYTLGFIGAGKMAESIAKGASRSGVLPSSRIVTAHSNPSRRAAFESIGITVLSSNDDVVRASNVVVFSVKPQLVKDVVLKLKPLLTKDKLLVSVAAGIKLKDLQEWAGHERFIRVMPNTPAAVGQAASVMSLGGAATEEDANLISQLFGSIGKIWKADDKFFDAITGLSGSGPAYIYLAIEALADGGVAAGLPRDLALSLASQTVLGAASMATLSGKHPGQLKDDVTSPGGTTIAGVHELEKGGFRGTLMNAVVAAAKRSRELS

SEQ ID NO: 7946 - DNA, 822 bp, Pseudomonas aeruginosa
  CDS (1)..(822): transl_table=11
atgagcacaccccgcatagcgttcatcggcgccggcaacatggccgccagcctgatcggcggcctgcgcgcccaaggcgtgccggcggcgcagatccgcgccagcgacccgggcgccgagcaacgcgcgaagatcgccggcgagttcgccatcgacgtggtcgagtccaacgccgaggccgtggccgacgccgacgtcgtggtcctgtcggtcaagccgcaggccatgaaagccgtgtgccaggccttggcgccggcgctgaagccggagcaactgatcgtctccatcgccgccggcatcccctgcgccagcctcgaagcctggctcggccagccgcgcccggtggtccgctgcatgcccaacaccccggcgctgctgcgccagggcgccagcgggctgtacgccaacgcgcaggtcagcgccgcgcaatgcgagcaggccgggcagttgctgtccgcggtgggcatcgccctgtggctggacgacgaagcgcagatcgacgcggtgaccgcagtgtcgggcagcggcccggcgtatttcttcctgctgatgcaggccatgaccgacgccggcgagaagctcggcctgtcccgcgagacagcctcgcgcctgaccctgcagaccgccctcggtgcggcgcagatggcgctgtccagcgaggtcgagccggccgaactgcggcgccgggtgacttcgcccaacggcaccaccgaggcggcgatcaaatccttccaggccaacggcttcgaagcactggtggagcaggccctgaacgccgccagccagcgctccgccgagctggccgaacagcttggccaataa

SEQ ID NO: 7947 - protein, 273 aa, Pseudomonas aeruginosa
MSTPRIAFIGAGNMAASLIGGLRAQGVPAAQIRASDPGAEQRAKIAGEFAIDVVESNAEAVADADVVVLSVKPQAMKAVCQALAPALKPEQLIVSIAAGIPCASLEAWLGQPRPVVRCMPNTPALLRQGASGLYANAQVSAAQCEQAGQLLSAVGIALWLDDEAQIDAVTAVSGSGPAYFFLLMQAMTDAGEKLGLSRETASRLTLQTALGAAQMALSSEVEPAELRRRVTSPNGTTEAAIKSFQANGFEALVEQALNAASQRSAELAEQLGQ

SEQ ID NO: 7948 - DNA, 849 bp, Schizosaccharomyces pombe
  CDS (1)..(849)
atgtcggggttttgtgttcttggttgtggtacaatgggaaaagcacttttgactggaatctttgattccattgctgaaaatggaaacgatgtttctgacgaaattatcattccgaataagttctatgcttgtgtcaaatttcctaaagaaaaagaggatgttcaaaagcttttcggagatcgtgttaaagttgtaatgggggccaaagagaatgccgagatggctgcgattagtaacgttttgttgttgagttgtaagcctcaggccgcagaggatgttttgaattccccaaagatgaaagaagcgctcaaaggaaaattaattttgtcaattttggctggcaagaccatctcttcattgcaaagtatgcttgatgaaagtactagggtgattcgcattatgcccaatactgctagtcgaatccgtgaaagtatgagcgtaatttgcccgggacccaacgcaactgaagaagacataaagtttgctgaatgggtattcaatggcattggacgttcaatgaaacttcccgaaaagcttattgatgctgctaccgctgtatgtggaagtggacctgcttttgttgctactatgattgaggctatgacagatggtggtgtaatgatgggtattccgttccctcaggctcaggaattggctgcccaaactatggttggtacaggtcgtatggttttacaaggtcaacatcctgctatgattcgtaatgatgtttcaactcctgccggatgtacaattagtggtttgttggcattggaagatggaaaaattcgaagcacaatcgcacgtggtatagaacaagcaaccaagactgcttctggcctgggtaaatga

SEQ ID NO: 7949 - protein, 282 aa, Schizosaccharomyces pombe
MSGFCVLGCGTMGKALLTGIFDSIAENGNDVSDEIIIPNKFYACVKFPKEKEDVQKLFGDRVKVVMGAKENAEMAAISNVLLLSCKPQAAEDVLNSPKMKEALKGKLILSILAGKTISSLQSMLDESTRVIRIMPNTASRIRESMSVICPGPNATEEDIKFAEWVFNGIGRSMKLPEKLIDAATAVCGSGPAFVATMIEAMTDGGVMMGIPFPQAQELAAQTMVGTGRMVLQGQHPAMIRNDVSTPAGCTISGLLALEDGKIRSTIARGIEQATKTASGLGK

SEQ ID NO: 7950 - DNA, 825 bp, Glycine max
  CDS (1)..(825)
atggaaatctttccgattcccgccgaatcctacactctcggcttcatcggcgccggaaaaatggccgagtccattgcccgaggcgccgtccgctccggcgtcctgccgccttctcgcattcggaccgccgtccacttcaacctcgcccgccgtggcgccttcgagtccttcggcgtcaccgttctcccttcaaacgacgacgtcgttcgcgaaagcgacgtcgtcgttttgtcggtcaaacctcaattagtgaaagacgtggtgtcgaaattgacgccgcttttgacgaagcacaagcttttggtttcggtcgctgctggtaccaaattgaaagatcttcaggaatgggctgggaacgacagatttataagagtgatgcctaataccccagcagctgttggccaggcagcatctgtaatgagcttggggggatctgcaacggaagaagatggaaatattatagcccaattatttgggtcaattggcaaaatatggaaagctgaggaaaagtattttgatgcaataactggcctgagtggcagtggtcctgcttatgtttatttagcaatagaggctttggctgatggaggagtagcagctggtttaccacgtgatctttcattaagtctagcttctcaaactgtattaggggcagcatcaatggtctcccagactgggaagcacccgggacagctcaaagatgacgttacttctccaggtgggacaacaattacgggcattcatgagttagaaaatggtgggttccgtggaacactgatgaatgctgttgttgctgctgctaagcgcagccgagagctttcctga

SEQ ID NO: 7951 - protein, 274 aa, Glycine max
MEIFPIPAESYTLGFIGAGKMAESIARGAVRSGVLPPSRIRTAVHFNLARRGAFESFGVTVLPSNDDVVRESDVVVLSVKPQLVKDVVSKLTPLLTKHKLLVSVAAGTKLKDLQEWAGNDRFIRVMPNTPAAVGQAASVMSLGGSATEEDGNIIAQLFGSIGKIWKAEEKYFDAITGLSGSGPAYVYLAIEALADGGVAAGLPRDLSLSLASQTVLGAASMVSQTGKHPGQLKDDVTSPGGTTITGIHELENGGFRGTLMNAVVAAAKRSRELS

SEQ ID NO: 7952 - DNA, 816 bp, Staphylococcus epidermidis
  CDS (1)..(816): transl_table=11
atgaaacttgtattttatggtgctggtaatatggcgcaggcaatttttactggaattattaattccaacaatttaaatgcaaatgatatttatttaactaataaatccaatgaacaagcattaaaaagctttgcagaaaaattaggggttaattatagttatgatgatgaagcattactcaaagatgccgattatgtatttttaggtacaaagccccatgattttgaaaatttagctaatcgtattagagaacacattactaatgataataggtttatttctataatggcaggtttatctattgattatattcgtcagcagcttaataccaataatccattagctcgtattatgccaaatacaaatgctcaagttggacattcggttactggaataagtttttcaaataattttgatcctaaatctaaaaatgaagtggatgaattaatcaatgcatttggatcagttatagaagtctccgaagaacatctacatcaagttactgcaattacaggaagtgggcctgcatttttatatcatgtatttgaacaatatgtaaaagcaggtacagaattaggtttagaacgaaatcaagtcgaagaatctatacgcaatttaattattggaacaagtaaaatgattgagcgttcagacttaagtatgtctcaattaaggaaaaatattacatctaaaggtggtactacacaagctggacttgatgcactatctcaatatgatattgtatcgatgtttgaagattgtttaggtgcagctgtgaatagaagtatggaattatcacataaagaagatgaataa

SEQ ID NO: 7953 - protein, 271 aa, Staphylococcus epidermidis
MKLVFYGAGNMAQAIFTGIINSNNLNANDIYLTNKSNEQALKSFAEKLGVNYSYDDEALLKDADYVFLGTKPHDFENLANRIREHITNDNRFISIMAGLSIDYIRQQLNTNNPLARIMPNTNAQVGHSVTGISFSNNFDPKSKNEVDELINAFGSVIEVSEEHLHQVTAITGSGPAFLYHVFEQYVKAGTELGLERNQVEESIRNLIIGTSKMIERSDLSMSQLRKNITSKGGTTQAGLDALSQYDIVSMFEDCLGAAVNRSMELSHKEDE

SEQ ID NO: 7954 - DNA, 804 bp, Synechocystis sp
  CDS (1)..(804): transl_table=11
gtgtccattcaactcggtatcatcggcggtggagtaatggctgaagccatcctggcccgcttaatcgcagaaaagacctatgccccagaagaaataattgtgggggagccccacggtgcccggcgggattatctccaaaaaacctatcaagttcgggtttcccccgataaccaagaggcggctaatgtttctgaagtgctgctgttggccgtcaaaccccaggtgctagaccgggtgctagccagtttagcaggaggagccaatcgtcccctggtaatttccattttggccggggtttctctgcaaagaattcaaaagggttttcccgaccatgccatcatccgggccatgcccaatacccccgccaccgttggggccggtatgacggcgatcgccgcgaataaaatggtggagccggatcagttggctaaggctaaggccatcttttcggcggtgggcaatgtggtggaggtgccggaaaatttaatggatgcggtgacgggggtttccggttcgggaccggcctacgtagctttgatgatcgaagccctggccgatggtggtgttttggccggattacccagggcgatcgcccaaaaattggctttgcaaacagtgttgggcacagcggagttaatcaaggaaacggaggagcaccctgcccagattaaagataaagttaccagtccggggggcaccaccattgctggggtagcggtattggagaagatgggttttcgttccgccatcatcgaagcagtgcgggcggcctatcgccgttcccaggaattgggcaaaaaataa

SEQ ID NO: 7955 - protein, 267 aa, Synechocystis sp
MSIQLGIIGGGVMAEAILARLIAEKTYAPEEIIVGEPHGARRDYLQKTYQVRVSPDNQEAANVSEVLLLAVKPQVLDRVLASLAGGANRPLVISILAGVSLQRIQKGFPDHAIIRAMPNTPATVGAGMTAIAANKMVEPDQLAKAKAIFSAVGNVVEVPENLMDAVTGVSGSGPAYVALMIEALADGGVLAGLPRAIAQKLALQTVLGTAELIKETEEHPAQIKDKVTSPGGTTIAGVAVLEKMGFRSAIIEAVRAAYRRSQELGKK

SEQ ID NO: 7956 - DNA, 837 bp, Vibrio alginolyticus
  CDS (1)..(837): transl_table=11
atgatggaaatcagacaaatggaacataaaaaaatcgccttcattggtgctggcaacatggtgagagccattgtttctggcttggttgctaacggatacccagcgcaaaacattaccgcgacagctccttcagaggctcgccgtcttccgctagaacaagattttggcatccgtaccaccagcgataacatccaagctgcgaccgaagcggatgtggtggtattgtctgtgaaaccgcaaatgatggctgatgtttgtaaaccactgcaagcgatcgatttcactaataaactggtgatttctattgccgctggcatcaactgttcacgattggatgatatgctagccaccaaattgaacttggttcgtgttatgccaaatacgccatcacaacttgggttgggtatgagtgggttattcgcaccaattcatgtaaccgagcacgacaaagcttttgccgcagagttaatggaagcggtcggtaaagtatgttgggttgagcaagagtcaggtatcaataatgtgattgccgctgcgggcagtgctccagcatacttcttcctgtttatggaagcgatgcaagcagaagcgattgcgcaaggctttgataaagagagcgctcgactattggttcagcaagcggcactgggcgccgccagtatggtggttagcaacccagaaactgagctatcgaccctgcgtgagaacgtaacatcgaaaggtgggacaacggcagaagcactgcgtacattcaacgaacatcaactttcagatattgtcgctaaagccatgcaagctgctgtggctcgcgcggaagaaatggaaaaactgttttaa

SEQ ID NO: 7957 - protein, 278 aa, Vibrio alginolyticus
MMEIRQMEHKKIAFIGAGNMVRAIVSGLVANGYPAQNITATAPSEARRLPLEQDFGIRTTSDNIQAATEADVVVLSVKPQMMADVCKPLQAIDFTNKLVISIAAGINCSRLDDMLATKLNLVRVMPNTPSQLGLGMSGLFAPIHVTEHDKAFAAELMEAVGKVCWVEQESGINNVIAAAGSAPAYFFLFMEAMQAEAIAQGFDKESARLLVQQAALGAASMVVSNPETELSTLRENVTSKGGTTAEALRTFNEHQLSDIVAKAMQAAVARAEEMEKLF

SEQ ID NO: 7958 - DNA, 963 bp, Zalerion arboricola
  CDS (1)..(963)
atggcatccacagcaaaggaggggtcagaattgactttggcggtgataggttgtggtacaatgggcatagcaatcctctccggtatcctagcatctctcgacgaaatccacgcaccaaactcgcagtcctcagagacagacgaaacaccctcaaagctccccaccaaattcatagcctgtgtccgctcacccaaaggcgcagaaaagatcaaaaaagcactctcaccctacaaaacccccgtcaaaatcatccaaagcgacaatgtcaccgcctgtagagaggcagatgtagtattactaggctgtaaaccatatatggccgaaggcatattaggcgaagaggggatggtcgacgcgttaaaggggaaattgttgattagcatcctagctggcgttcccgcagagcagatatacgggtacatgtacggcaaaacaccagtgaacccagagaaagagggattatgtcaagtcgtgcgagcaatgccaaatacagcgtctgggatccgggaatccatgactgtgatcgcgacgtcgagtcccccattatcagctacaacttcgagtctgataacctggatcttcaaacgcattggcgatgtcgtccagctccccgctgctacaatggatgccagcaccgcgctgtgtggcagtggcccagccttttttgcgctcatactggaggctgcgattgatggggctgtggcgatggggttgccaagagcagaggctcagagaatggcggcgcagactatgaaaggggctgctggattggtattgtctggagagcatccggcgttgctgaaagataaagtgactacgccgggtgggtgcacgataggtgggctgatggtgctggaagaaggaggggtgagagggaccgtggctagagcagttagggaagctactgtggttgccagtcagcttggtaaaggggttcagggagtcaacggtacacgattttga

SEQ ID NO: 7959 - protein, 320 aa, Zalerion arboricola
MASTAKEGSELTLAVIGCGTMGIAILSGILASLDEIHAPNSQSSETDETPSKLPTKFIACVRSPKGAEKIKKALSPYKTPVKIIQSDNVTACREADVVLLGCKPYMAEGILGEEGMVDALKGKLLISILAGVPAEQIYGYMYGKTPVNPEKEGLCQVVRAMPNTASGIRESMTVIATSSPPLSATTSSLITWIFKRIGDVVQLPAATMDASTALCGSGPAFFALILEAAIDGAVAMGLPRAEAQRMAAQTMKGAAGLVLSGEHPALLKDKVTTPGGCTIGGLMVLEEGGVRGTVARAVREATVVASQLGKGVQGVNGTRF

SEQ ID NO: 7960 - DNA, 855 bp, Oryza sativa
  CDS (1)..(855)
atggcggcgccgcctcagcccgtgccggcgcccgcggccgcgtcgccggaggtgttccggctcgggttcatcggcccgggtaacctcgcggagagcatcgcccgcggcgtggcggcgtcgggcgtcctcccggccaccgcgatccgcaccgcgccacaccgccgccccgagcgcgccgaggccttctcatccatcggagctcacatcttggagaccaacgcgcaggtagttgatgacagtgacgtgatcgtcatctctgtgaagccgcagatcgtaaggcaggtactggttgagctaaaacccttgctgtcagaagaaaagcttctggtgtccattgctgctggcatcaagatggaagatctgcagggttggtctggtcatcgaagatttattagagtaatgccaaacaccccttcagctgttggacaagcagcatcagtgatgtgtttgggggagatggctactgagaatgatgaaaaccgtgtaagaagtttattcagtgccattggaaaagtttggacagctgaagaaaaatattttgatgctgtaactgggctaagtggtagtggcccggcttatattttcttagcaatagaggccatggctgatggtggagttgctgctggtcttcctcgggatcttgcacttggtcttgcatctcagacagttcttggtgctgcaaccatggtaaacaagactggaaaacatccgggtcagctgaaggatatggtcacttccccggcaggaaccaccataactgggatacaagagcttgagaagggtgcattccgtgggacgctgataaatgccgttgttgctgctacaaagcgttgccgtgaactttctcagagttaa

SEQ ID NO: 7961 - protein, 284 aa, Oryza sativa
MAAPPQPVPAPAAASPEVFRLGFIGPGNLAESIARGVAASGVLPATAIRTAPHRRPERAEAFSSIGAHILETNAQVVDDSDVIVISVKPQIVRQVLVELKPLLSEEKLLVSIAAGIKMEDLQGWSGHRRFIRVMPNTPSAVGQAASVMCLGEMATENDENRVRSLFSAIGKVWTAEEKYFDAVTGLSGSGPAYIFLAIEAMADGGVAAGLPRDLALGLASQTVLGAATMVNKTGKHPGQLKDMVTSPAGTTITGIQELEKGAFRGTLINAVVAATKRCRELSQS

SEQ ID NO: 7962 - DNA, 831 bp, Brassica napus
  CDS (1)..(831)
atggagaaacatcagataccgatggagtacttgacggttgggttcatcggagctggaaagatggcggagagcatagccagaggtatcgtcgcctctggtgtgcttcctccgcatcatatctcaaccgccgttcactcgaatcccgatcgccatgaagtcttccaatcctttggcgtcaatgtcttctccagtaatgaagaagtcgttgaagaaagcgatgttgtgattttctctgtgaaacctcaagttgttaagaaggccatcacggagttaaggtctaagctcacgaaggataagcttctggtttcagttgcagctggaattacgctgaaagatctacaggaatggtctggccaagatcggttcataagggtgatgcctaacacaccagcagcagttggtgagggagcttcagtaatgagcctcggaacagcggcaagtgaagaagatggagcacttgttgctaagttgtttggctcggtggggaagatgtttaaagccgatgagaaaatgtttgatgctgttactggtctcagtggaagtggaccagcatacatattcttagccattgaagctttagctgatgggggagtagctgctggtttaccccgagaactcgcacttggcttagcttcacaaacggttcttggagctgcaaccatggtgagcaagacagggaagcatccaggtgtgttgaaagatgatgttacttcaccaggcggaactactatagccggagttcatgaactagagaagggttctttccgtgcaacacttatgaatgctgttgttgctgcagctaatcgaagccgcgagctctcgcagagctga

SEQ ID NO: 7963 - protein, 276 aa, Brassica napus
MEKHQIPMEYLTVGFIGAGKMAESIARGIVASGVLPPHHISTAVHSNPDRHEVFQSFGVNVFSSNEEVVEESDVVIFSVKPQVVKKAITELRSKLTKDKLLVSVAAGITLKDLQEWSGQDRFIRVMPNTPAAVGEGASVMSLGTAASEEDGALVAKLFGSVGKMFKADEKMFDAVTGLSGSGPAYIFLAIEALADGGVAAGLPRELALGLASQTVLGAATMVSKTGKHPGVLKDDVTSPGGTTIAGVHELEKGSFRATLMNAVVAAANRSRELSQS

SEQ ID NO: 7964 - DNA, 831 bp, Brassica napus
  CDS (1)..(831)
atggagacgcttccaatttccgcggagagcttcaaggtagggttcatcggagctggaaagatggcggagagtatagccagaggcgtcgttgcctccgggatgcttcctccgaaccgcatctccaccgccgttcactcgaatctgaatcgccgtcaagtcttcgagtcctttggcgtcaatgtcttctccagtagcgaagaagttgttagagaaagcgatgttgtgatcttctctgtgaaacctcaagttgttaagaaggccatcacggaagtaaggtcaacgctctctaaggataaggttcttgtttccgttgctgcggggatcaagttgaaagatcttcaggaatggtctggtcaagatcgattcataagggtgatgcctaatacaccagctgcagttggtgaggcagcttcagtaatgagccttggaacagcggcaacggaagaagacggagcacttgtgactaagttgtttggctctgtggggaagatgttcaaagctgatgagaaaatgtttgatgctgtcactggtctcagtggaagtggaccagcgtacatattcttagccattgaagctttagctgatggaggagtagctgctggtttaccccgagaacttgctttgggtttagcttcacagacggtgcttggagctgcaacaatggtgagcaaaaccgggaagcatccgggtgtgttgaaagatgatgttacttcaccaggcgggactacaatagccggagttcatgaactggagaaaggttctttccgtgcaacacttatgaatgctgttgttgctgcagctaatcgaagccgtgaactctcacagagctaa

SEQ ID NO: 7965 - protein, 276 aa, Brassica napus
METLPISAESFKVGFIGAGKMAESIARGVVASGMLPPNRISTAVHSNLNRRQVFESFGVNVFSSSEEVVRESDVVIFSVKPQVVKKAITEVRSTLSKDKVLVSVAAGIKLKDLQEWSGQDRFIRVMPNTPAAVGEAASVMSLGTAATEEDGALVTKLFGSVGKMFKADEKMFDAVTGLSGSGPAYIFLAIEALADGGVAAGLPRELALGLASQTVLGAATMVSKTGKHPGVLKDDVTSPGGTTIAGVHELEKGSFRATLMNAVVAAANRSRELSQS

SEQ ID NO: 7966 - DNA, 834 bp, Hordeum vulgare
  CDS (1)..(834)
atggcggccgcgcccccggcccccgcccccgcgttccgcctgggcttcgtcggcgcggggaacctggccgagagcatcgcgcggggcgtcgcggcgtcgggcgtcctcccggcctccgccgtccgcaccgcgccctatcgtcgccccgagcgcgccgccgccttcgcctccctcggcgccaccatcctcgcctccaacgcccaggtcgtcgacgacagcgatgtgatcgtcatctccgtcaagccccagattgtgaagcaggatctggttgagctcaagcccttgctgtctgaagaaaagcttctcgtctccattgccgctggcatcaagatgaaagatttgcaggattggtctggtcagcgccgaattattagagtaatgccgaacactccctctgccgtcggacaagcagcatcagtgatgtgtctaggagagacggctactgagaatgatgaaaatcgtgtaaagagcttatttagtgccattggaaaagtttggacagccgaagaaaaatattttgatgcgcttactggcttgagtggtagtggtccggcctacattttcttggcaatagaggccatggctgatggtggagttgctgctgggcttcctcgggatcttgctcttggtcttgcagctcagacagttctaggtgctgcaaccatggttagcgagacgggtaaacatccaggccagctgaaggatcaggtcacttcccctgcaggaactacgatagctggtgttcatgagctcgagaagggttcgttccgtggcacactgataaatgccgttgttgctgccacaacaagatgccgagagctctcgaaaaattag

SEQ ID NO: 7967 - protein, 277 aa, Hordeum vulgare
MAAAPPAPAPAFRLGFVGAGNLAESIARGVAASGVLPASAVRTAPYRRPERAAAFASLGATILASNAQVVDDSDVIVISVKPQIVKQDLVELKPLLSEEKLLVSIAAGIKMKDLQDWSGQRRIIRVMPNTPSAVGQAASVMCLGETATENDENRVKSLFSAIGKVWTAEEKYFDALTGLSGSGPAYIFLAIEAMADGGVAAGLPRDLALGLAAQTVLGAATMVSETGKHPGQLKDQVTSPAGTTIAGVHELEKGSFRGTLINAVVAATTRCRELSKN

SEQ ID NO: 7968 - DNA, 867 bp, Triticum aestivum
  CDS (1)..(867)
atggcggccgcgcctccccagcccgccgcgcccgcgccccccgcccccgcgagcggcggcgacgcgttccgcctgggcttcgtcggcgcggggaacctggccgagagcatcgcgcgcggcgtcgcggcgtcgggcgtcctcccggcctccgccgtccgcaccgcgccccaccgccgccccgagcgcgccgccgccttcgcctccctcggcgccacaatcctcgcctccaacgcccaggttgtcgacgacagcgatgtgatcgtcatctccgtcaagccccagattgtgaagcaggttctggttgagctcaagcccttgctgtctgaagaaaagcttctggtctccatcgctgctggcatcaaaatgaaagatttgcaggattggtctggtcagcgcagaattattagagtaatgccaaacaccccctctgctgtcggacaagcagcatcagtgatgtgtctgggagagacagctactgagaaggatgaaaaccgtgtcaaaagcttatttagtgccattggaaaagtttggacagctgaagaaaaatattttgatgcggttactggcttgagtggtagtggtccggcctacattttcttggcaatagaggccatggctgatggtggagttgctgctgggcttcctcgggatcttgctcttggtcttgcagctcagacagtgctaggtgctgcaaccatggttagcgagacgggtaaacatcccgggcagctgaaggatcaggtcacttcccctgcaggaactaccatagctggtgttcatgagctcgagaagggttcgtttcgcggcacactgataaatgccgtcgttgctgccacaacaagatgccgagagctctcgaaaaattag

SEQ ID NO: 7969 - protein, 288 aa, Triticum aestivum
MAAAPPQPAAPAPPAPASGGDAFRLGFVGAGNLAESIARGVAASGVLPASAVRTAPHRRPERAAAFASLGATILASNAQVVDDSDVIVISVKPQIVKQVLVELKPLLSEEKLLVSIAAGIKMKDLQDWSGQRRIIRVMPNTPSAVGQAASVMCLGETATEKDENRVKSLFSAIGKVWTAEEKYFDAVTGLSGSGPAYIFLAIEAMADGGVAAGLPRDLALGLAAQTVLGAATMVSETGKHPGQLKDQVTSPAGTTIAGVHELEKGSFRGTLINAVVAATTRCRELSKN

SEQ ID NO: 7970 - DNA, 26 bp, Artificial sequence
  primer
atgacttacacattggcaattttagg

SEQ ID NO: 7971 - DNA, 26 bp, Artificial sequence
  primer
ctatttcttcttttggcctaattgtg

SEQ ID NO: 7972 - protein, 341 aa, Artificial sequence
  consensus sequence
  Variant (2)..(2): Xaa in position 2 is any amino acid
  Variant (4)..(4): Xaa in position 4 is any amino acid
  Variant (6)..(54): Xaa in position 6 to 54 is any amino acid
  Variant (55)..(106): Xaa in position 55 to 106 is any or no amino acid
  Variant (109)..(119): Xaa in position 109 to 119 is any amino acid
  Variant (120)..(140): Xaa in position 120 to 140 is any or no amino acid
  Variant (142)..(143): Xaa in position 142 to 143 is any amino acid
  Variant (146)..(159): Xaa in position 146 to 159 is any amino acid
  Variant (160)..(173): Xaa in position 160 to 173 is any or no amino acid
  Variant (175)..(175): Xaa in position 175 is any amino acid
  Variant (181)..(207): Xaa in position 181 to 207 is any amino acid
  Variant (208)..(216): Xaa in position 208 to 216 is any or no amino acid
  Variant (218)..(221): Xaa in position 218 to 221 is any amino acid
  Variant (222)..(224): Xaa in position 222 to 224 is any or no amino acid
  Variant (226)..(227): Xaa in position 226 to 227 is any amino acid
  Variant (228)..(228): Xaa in position 228 is any or no amino acid
  Variant (230)..(231): Xaa in position 230 to 231 is any amino acid
  Variant (233)..(235): Xaa in position 233 to 235 is any amino acid
  Variant (241)..(246): Xaa in position 241 to 246 is any amino acid
  Variant (249)..(256): Xaa in position 249 to 256 is any amino acid
  Variant (258)..(262): Xaa in position 258 to 262 is any amino acid
  Variant (264)..(272): Xaa in position 264 to 272 is any amino acid
  Variant (274)..(285): Xaa in position 274 to 285 is any amino acid
  Variant (286)..(304): Xaa in position 286 to 304 is any or no amino acid
  Variant (306)..(308): Xaa in position 306 to 308 is any amino acid
  Variant (310)..(310): Xaa in position 310 is any amino acid
  Variant (313)..(313): Xaa in position 313 is any amino acid
  Variant (317)..(330): Xaa in position 317 to 330 is any amino acid
  Variant (331)..(336): Xaa in position 331 to 336 is any or no amino acid
  Variant (338)..(340): Xaa in position 338 to 340 is any amino acid
GXGXMXXXXXXXXXXXXXXXXXXXXXXXXXXXXXXXXXXXXXXXXXXXXXXXXXXXXXXXXXXXXXXXXXXXXXXXXXXXXXXXXXXXXXXXXXXXXXXXXXXXXXKPXXXXXXXXXXXXXXXXXXXXXXXXXXXXXXXXSXXAGXXXXXXXXXXXXXXXXXXXXXXXXXXXXRXMPNTPXXXXXXXXXXXXXXXXXXXXXXXXXXXXXXXXXXXXGXXXXXXXEXXXDXXTXXXGSGPAXXXXXXEAXXXXXXXXGXXXXXAXXXXXXXXXGXXXXXXXXXXXXXXXXXXXXXXXXXXXXXXXLXXXVXSPXGTTXXXXXXXXXXXXXXXXXXXXAXXXA

SEQ ID NO: 7973 - protein, 49 aa, Artificial sequence
  protein pattern
  Variant (2)..(12): Xaa in position 2 to 12 is any amino acid
  Variant (14)..(14): Xaa in position 14 is Ala, Gly or Ser
  Variant (17)..(17): Xaa in position 17 is Phe or Tyr
  Variant (18)..(22): Xaa in position 18 to 22 is any amino acid
  Variant (23)..(23): Xaa in position 23 is Asp, Glu or Gln
  Variant (24)..(24): Xaa in position 24 is any amino acid
  Variant (25)..(25): Xaa in position 25 is Ile, Leu or Met
  Variant (26)..(27): Xaa in position 26 to 27 is any amino acid
  Variant (28)..(28): Xaa in position 28 is Ala, Glu, Gly, Gln, Ser or Thr
  Variant (29)..(29): Xaa in position 29 is Ala, Gly, Ile or Leu
  Variant (30)..(32): Xaa in position 30 to 32 is any amino acid
  Variant (34)..(34): Xaa in position 34 is Phe, Ile, Leu, Met or Val
  Variant (35)..(38): Xaa in position 35 to 38 is any amino acid
  Variant (39)..(39): Xaa in position 39 is Ala, Gly, Ser or Thr
  Variant (40)..(48): Xaa in position 40 to 48 is any amino acid
EXXXXXXXXXXXSXPAXXXXXXXXXXXXXXXXGXXXXXXXXXXXXXXXG

SEQ ID NO: 7974 - DNA, 969 bp, Saccharomyces cerevisiae
  CDS (1)..(969)
atgtataaatattcttattatataaggcgaaaaaatgaacgagaaaaaaaagtgttgaaagtatgcattcaactggctcttcaacaagagactcaatcaattaagcaatcgaagatggctattgatgctcaaaagcttgtggtggtcatcgtgatcgtggtcgtgcctttgctcttcaagttcattatcggaccgaagaccaagcctgtgctggatcccaaaaggaatgacttccaatcatttccgctggttgaaaaaaccatcttaacgcataatacttcgatgtacaagttcgggctacctcatgctgacgacgtactcggtttaccaattggtcagcatatcgtaattaaggccaatatcaatggtaaggatattaccagatcgtatacgcccacatcgttggatggagatacaaagggaaactttgaattactagtgaagtcttaccccacaggtaacgtttctaagatgattggagagttgaagataggtgactcgatccagatcaagggccctcgtgggaactatcattatgagagaaactgccgttcccatctagggatgattgctggtggtactggtattgcgcccatgtatcagatcatgaaagctattgccatggaccctcacgacactaccaaggtctctctagtctttgggaacgtccatgaggaggatattctgttgaagaaggaactggaagcgttggtggccatgaagccttcccaatttaagatagtttactacttagactctcctgaccgtgaagactggactggtggtgtaggatacattaccaaggatgtcatcaaggaacacttgcccgctgctacaatggacaacgttcaaattttgatctgtggtcctccagccatggttgcctcagttagaagaagtaccgtggacttggggttcagacgttccaaaccgctttccaagatggaagaccaggtgtttgtgttttaa

SEQ ID NO: 7975 - protein, 322 aa, Saccharomyces cerevisiae
MYKYSYYIRRKNEREKKVLKVCIQLALQQETQSIKQSKMAIDAQKLVVVIVIVVVPLLFKFIIGPKTKPVLDPKRNDFQSFPLVEKTILTHNTSMYKFGLPHADDVLGLPIGQHIVIKANINGKDITRSYTPTSLDGDTKGNFELLVKSYPTGNVSKMIGELKIGDSIQIKGPRGNYHYERNCRSHLGMIAGGTGIAPMYQIMKAIAMDPHDTTKVSLVFGNVHEEDILLKKELEALVAMKPSQFKIVYYLDSPDREDWTGGVGYITKDVIKEHLPAATMDNVQILICGPPAMVASVRRSTVDLGFRRSKPLSKMEDQVFVF

SEQ ID NO: 7976 - DNA, 894 bp, Glycine max
  CDS (1)..(894)
atgttggaactaccattcaacatggcacttcggtttcccaatttggatttcaagtctttaccctttgctgagaacctcaacactgaattgctaggtggcgtagttgctcttgttgccgttggctttacggttgcatatatttattatcgcacaaaacaccccaaaggaagcttggacccgaaaaatttcaaagaatttaaactcataaagaagactcagctcagccacaacgttgcaagattcagatttgcccttcctactccttcttcagtattaggccttcctgttggaaaaaacatacttgctagggggaaagatagccaaggagaggaagttatgagatcatatactccaatcacgttggattcagatattggctacttcgagttggttgtgaagatgtacccgaatggaaagatgtcccaccattttagacaaatgaaggaaggtgattacttggccgtgaggggccccaagggacgtttcagttacaagcctggccaggctagggcatttggaatgattgctgggggttcaggcataactccaatgtttcagctcataagagccattctagaaaaccctaaggacaaaacgaaggtgaaccttgtttacgccaatgtaacagtggacgacattctgttaaaagaagaactagataattttacaaacaaatttcctcaaaggtttgaagtctatcatgttcttaataagcctcctgaacaatggaatggtggcattggatttatatcgaaggagattattaaatcacattgtcctgaaccagcccacgatattcagatacttaggtgtggtccaccacctatgaataaagctatggctgctcatcttgacgcacttggctatacatcaaacatgcagttcgagttctaa

SEQ ID NO: 7977 - protein, 297 aa, Glycine max
MLELPFNMALRFPNLDFKSLPFAENLNTELLGGVVALVAVGFTVAYIYYRTKHPKGSLDPKNFKEFKLIKKTQLSHNVARFRFALPTPSSVLGLPVGKNILARGKDSQGEEVMRSYTPITLDSDIGYFELVVKMYPNGKMSHHFRQMKEGDYLAVRGPKGRFSYKPGQARAFGMIAGGSGITPMFQLIRAILENPKDKTKVNLVYANVTVDDILLKEELDNFTNKFPQRFEVYHVLNKPPEQWNGGIGFISKEIIKSHCPEPAHDIQILRCGPPPMNKAMAAHLDALGYTSNMQFEF

SEQ ID NO: 7978 - DNA, 837 bp, Glycine max
  CDS (1)..(837)
atggatttcttgcaagcaccagaaaatcagatacttgtgggtgtggccgtggccgttgtagccattgggcttggtgctgtctatctctattcatctaagaagcgcaaaggttgcttggacccattgaactttaaggtgttcaaacttgttaagcgtgcacagctgagccataatgttgctaagttcacatttgcacttccaacacctacatctgttttgggtcttccaattgggcaacacataagttgcaggggtaaagatgctcaaggtgaagacgttatcaaaccatatacccctactacattggattccgatgttggacattttgaactagttattaagatgtacccacaaggaaggatgtcacaccatttccgtgagatgcgtgttggtgactacctttctgtgaaaggacccaagggacgtttcaagtaccaacctggcgaggttagggcatttgggatgcttgctggaggctctggaatcaccccaatgtttcaagttgctagagctatattagaaaaccctaatgacaggaccaaagtacatcttatctatgccaatgttacgtatgaggacattcttttgaaggaagagcttgatggtcttgcttctaactatccagatcgattcaaaatatactatgtgttaaatcagcctcctgaggtatgggatggtggtgaaggatttgtgtcaaaggagatgattcaaacacattgccctgctccagcacaagatattaagatattgagatgtggccccccacctatgaacaaggccatggctgctcaccttgaagcccttggatatgctcctgagatgcagttccagttctga

SEQ ID NO: 7979 - protein, 278 aa, Glycine max
MDFLQAPENQILVGVAVAVVAIGLGAVYLYSSKKRKGCLDPLNFKVFKLVKRAQLSHNVAKFTFALPTPTSVLGLPIGQHISCRGKDAQGEDVIKPYTPTTLDSDVGHFELVIKMYPQGRMSHHFREMRVGDYLSVKGPKGRFKYQPGEVRAFGMLAGGSGITPMFQVARAILENPNDRTKVHLIYANVTYEDILLKEELDGLASNYPDRFKIYYVLNQPPEVWDGGEGFVSKEMIQTHCPAPAQDIKILRCGPPPMNKAMAAHLEALGYAPEMQFQF

SEQ ID NO: 7980 - DNA, 840 bp, Zea mays
  CDS (1)..(840)
atggagttcctgcagggccagaggctggagaccacgctggccgtcgcggccgctgtcgttgccgtcgcagccggctccgcctacctcttcctccgcagtaggaagcccaggggatgcctagaccccgagaacttcaaggagttcaaacttgttgagaagaagcagctgagtcataatgttgccaagttcaagtttgcgctcccaacacctacttctgtattgggtcttccaatcggacagcatataagctgcagaggacaggatgcttctggcgaggaagtgatcaagccttatactccaactactctggactctgatattggatcttttgagcttgttataaagatgtatccccaaggaagaatgtctcatcatttccgtgagacgaaagttggtgattatatgtctgtgaagggacctaagggccgtttcaagtacctacctggacaagtgagagcatttggaatggtagctggaggatcaggcattactccaatgttccaagtgacaagggcaatccttgagaacccaaaggacaacacgaaagtacacttaatctatgcaaatgtcacgtatgaggatattcttctgaaggaagaacttgacggcatggccaaaaactatcctgatcgtttcaagatctactatgtcttgaatcagcctcctgaagtctgggacggtggcgtcgggttcgtgtcgaaggaaatgatccagactcattgcccagcgcctgccgccgacattcaggtattgcgatgtggacctcctcccatgaacaaagccatggccgcgcacctggacggccttggctacacgaaggagatgcagtttcagttctaa

SEQ ID NO: 7981 - protein, 279 aa, Zea mays
MEFLQGQRLETTLAVAAAVVAVAAGSAYLFLRSRKPRGCLDPENFKEFKLVEKKQLSHNVAKFKFALPTPTSVLGLPIGQHISCRGQDASGEEVIKPYTPTTLDSDIGSFELVIKMYPQGRMSHHFRETKVGDYMSVKGPKGRFKYLPGQVRAFGMVAGGSGITPMFQVTRAILENPKDNTKVHLIYANVTYEDILLKEELDGMAKNYPDRFKIYYVLNQPPEVWDGGVGFVSKEMIQTHCPAPAADIQVLRCGPPPMNKAMAAHLDGLGYTKEMQFQF

SEQ ID NO: 7982 - DNA, 942 bp, Drosophila melanogaster
  CDS (1)..(942)
atgacggaattcgattttgtgccactcgccgtgggtgtggtagccgtactcgccggcgccctgatcgtccactatctgctgaataagaagtccacgaaaccacgccgggaacccaatcgcaccgctcggctgcgcacacttgtggatcccaatgacaagtacctgctgcctctcatcgaaaaggagaatctgagccatgacactaggagattccggtttggattgccctccaagcagcatgtccttggcctgcccgttggccagcacattcatctgatcgccaccatcgacaatgagctaataattcggccatacactccgatatcgtctgatgaggatgtgggctacgtggacctagtcgtcaaggtgtacttcaaggattcgcatcccaagttcccggccggcggcaaaatgacacaacacctggagcagctcgagttgggggacaagatctcgttccgtggtccctcgggtaggctacaatatctcggcaatggcaccttctccatcaaaaagttgcgcaaggatcctccaaagcacgtgaccgccaagcgggtcaacatgattgccggcggcactggcattactccaatgcttcaattggccagggaagttctcaagcgcagcgataaggataagactgaactggcgttgctgttcgccaatcagagcgaaaaggacattctactgcgtgcagagttggacgaactggcccagaagcatcctgaccagttcaagatctggtacacagtcgacaaggcaaacgaaggttggcagtatagcgttggcttcatcaatgaggaaatgatcgccgcccacctgcttccggccaaggacgataccattgtgttgctttgcggcccaccaccaatgattaactttgcctgcaatccggcgctggacaagcttggctaccatccggacacccgttttgcctactaa

SEQ ID NO: 7983 - protein, 313 aa, Drosophila melanogaster
MTEFDFVPLAVGVVAVLAGALIVHYLLNKKSTKPRREPNRTARLRTLVDPNDKYLLPLIEKENLSHDTRRFRFGLPSKQHVLGLPVGQHIHLIATIDNELIIRPYTPISSDEDVGYVDLVVKVYFKDSHPKFPAGGKMTQHLEQLELGDKISFRGPSGRLQYLGNGTFSIKKLRKDPPKHVTAKRVNMIAGGTGITPMLQLAREVLKRSDKDKTELALLFANQSEKDILLRAELDELAQKHPDQFKIWYTVDKANEGWQYSVGFINEEMIAAHLLPAKDDTIVLLCGPPPMINFACNPALDKLGYHPDTRFAY

SEQ ID NO: 7984 - DNA, 948 bp, Nasonia vitripennis
  CDS (1)..(948)
atggctgacgcaggagaagcacagcagcagatcgccggtccgaaggtcctgcctgtcttggctgctgtgggaacactcctagcagtaggcatagcagtgaagctctacctgtccttcaaagacaccaagaagaagaagaaagtactcctcgaagagccaacagtcaagtatgccctgcccctcgtcgaaaaacaaatcataagccatgacactagactatacaggtttggcctgccaacctcagagcatgtactcggtttacctattggtcagcatgtgcatttaactgccaaggtaaacgaagaagttatcattcgtgcatatactccagtttccagtgacgatgacaaagggcacgttgaccttgttgtcaaggtctacttcaaaaatgttcaccccaaattccctgagggaggcaaaatgtcgcagcatcttgagagtcttaaagtaggtgagactgtagacttcagaggaccgtctggtagactgatgtacaaaggccgtggttcattttccattaagatacttagaaaggaacctcccgtagagtataatgtttccaaggtagtaatgattgccggaggcacaggtatcacaccaatgttgcagctcattagagctatagccaaggatccagaagataagacaaaagtatctctgctttatgcgaaccagactgaaaaagacattctattgagggatgagttggaggaagttgccaagaaccatccagaccaagttaaggtttggtacactattgacacaagcactgaaggctggaagtacagtaccggttttgtcaatgctgacatgatctctgaacacatgtatccaccatcaccggatacaatagttctcatgtgtgggccgccaccgatgataaattacgcttgcacaccgaatctggataaactgggatatgattcaaaactgcgattcgcctactag

SEQ ID NO: 7985 - protein, 315 aa, Nasonia vitripennis
MADAGEAQQQIAGPKVLPVLAAVGTLLAVGIAVKLYLSFKDTKKKKKVLLEEPTVKYALPLVEKQIISHDTRLYRFGLPTSEHVLGLPIGQHVHLTAKVNEEVIIRAYTPVSSDDDKGHVDLVVKVYFKNVHPKFPEGGKMSQHLESLKVGETVDFRGPSGRLMYKGRGSFSIKILRKEPPVEYNVSKVVMIAGGTGITPMLQLIRAIAKDPEDKTKVSLLYANQTEKDILLRDELEEVAKNHPDQVKVWYTIDTSTEGWKYSTGFVNADMISEHMYPPSPDTIVLMCGPPPMINYACTPNLDKLGYDSKLRFAY

SEQ ID NO: 7986 - DNA, 843 bp, Chlamydomonas reinhardtii
  CDS (1)..(843)
atgcgcagcgttattacgctgctttcctactggcaagtcggcgctggactgcttgtggtgctagtccttattcaggctctggtgtttctccggaagaagaccaagaagccgttcctggaccccagcgagttccagccggtccccctggttgagaagacgctaatcacgcacaacaccgtgcgcctgcgcttcgcgctgccggatccggagcagcgcgtgggcctgcccatcggccagcacataagcttcaaggcgcagggcgaggatggcaaggacgtcatccggccgtacacccctgtgtcagatgacgaccagctgggcgccgtggactttgtcatcaagctgtaccccaccggcaagatgtcgcaggtgatcgccaagatgcagctgggtgacaccatgctgatgaaggggcccaagggccgtttcacctacacgcccaacatggtcaagcacttcggcatgctggctggcggcacgggcatcacgcccatgttccaggtgctgaacgccatcctgaagaacccgcgcgacaccacctccgtcacgctgctgtacggcaacctcacggaggaggacatcctgctgcgcaaggagttggacgagctggtggccatgcacggcaaccgcctcaccgtgtaccacgtgctcaacacgccgcccgtagacaaggagtggtcgggcggcagcggcttcatcagctcggagctcatccgcaccaagttcccggcgcccagctctgacatcatgacactgcgctgcggccccagccccatgatggtggccatggagaaggcgctcacggacctgggctacgccgaggacaagcagttccagttctga

SEQ ID NO: 7987 - protein, 280 aa, Chlamydomonas reinhardtii
MRSVITLLSYWQVGAGLLVVLVLIQALVFLRKKTKKPFLDPSEFQPVPLVEKTLITHNTVRLRFALPDPEQRVGLPIGQHISFKAQGEDGKDVIRPYTPVSDDDQLGAVDFVIKLYPTGKMSQVIAKMQLGDTMLMKGPKGRFTYTPNMVKHFGMLAGGTGITPMFQVLNAILKNPRDTTSVTLLYGNLTEEDILLRKELDELVAMHGNRLTVYHVLNTPPVDKEWSGGSGFISSELIRTKFPAPSSDIMTLRCGPSPMMVAMEKALTDLGYAEDKQFQF

SEQ ID NO: 7988 - DNA, 846 bp, Physcomitrella patens subsp. patens
  CDS (1)..(846)
atggagagcgtgttggagaggctgcagaatgaccaagttactcaagtgggcgttgcaatcgccttggtggcggtcgtcgcaggcgctgccttcctctattttgtgaaccgcaagaagaccattctcgtacctgagaaatggttgaaattcaagtgcgtgaagaaagagcaggtcagtcacaatgtggtcaagttgcgattcggcctccccactcccacttcggtgcttggtctcccgattggtcagcacatcagctgcatgggctttgattccgaaggtactgaagtcgttaggccgtatacccccaccaccctcgattccgaccttggttattttgagcttgttgtcaaggtttacaaggaagggaaagtgtcgtcttacttcggtcgcatgaaggagggcgagtaccttgccgctaagggtcccaagggacgctttaaatacaaacccaaccaagttagagaatttggaatggtggccggtggaactggtcttactcccatgtatcaggttgcaagagcgattctggagaactctcatgataagactaagatatctttgatatatgcaaatgtcacatatgaggacattttactcaaggatgatctcgaccgaatggcagcagaacgcccagaccagttcaaagtctactatgttctgaacgagcccccaacggagtggagtggaggtgtcgggtttgtgacgaaggatatgattgagagacattgtcctcctccagctgctgatgttcagattctgcgttgtggtcctccacccatgaacagggccatagcaggccattgtgaagctcttggatataccaaggagatgcaatttcagttctaa

SEQ ID NO: 7989 - protein, 281 aa, Physcomitrella patens subsp. patens
MESVLERLQNDQVTQVGVAIALVAVVAGAAFLYFVNRKKTILVPEKWLKFKCVKKEQVSHNVVKLRFGLPTPTSVLGLPIGQHISCMGFDSEGTEVVRPYTPTTLDSDLGYFELVVKVYKEGKVSSYFGRMKEGEYLAAKGPKGRFKYKPNQVREFGMVAGGTGLTPMYQVARAILENSHDKTKISLIYANVTYEDILLKDDLDRMAAERPDQFKVYYVLNEPPTEWSGGVGFVTKDMIERHCPPPAADVQILRCGPPPMNRAIAGHCEALGYTKEMQFQF

SEQ ID NO: 7990 - DNA, 1086 bp, Coprinopsis cinerea okayama7#130
  CDS (1)..(1086)
atgccgaaccaataccagctggcatttctcgcctctttcttcgtcactctcgcatccctcatcgcttctctccactttgcagtcgctttcttcaggtcaaagggctacgacatcggcgatctcatcctaataggtctcgacaagaagaacccaaacccaacagacggacgcgtagaaatagagaaaatacccgctatcatcatggagttcgtcaaaaacgctgacctggacgacattgtccagctcgccacgtcccccaccgtcctcgtcactgctggcatcgtcctcgccaccgctgtctatgtcaaactcttccacacaggccgaacagctcctctggaccctctcaattggaaggagttccccttgttgaagaccacaaaagtgtcgcctaatacggcaatctatcgtttcaagttgccccaccagcgcgacgtcttgggtctccccattggccagcacatctccgtctctgccgaaattaacggcaagaccatcgtccgaaactacacccccgtcagtctcgacgacgaccgcggtttcttcgacctcctcatcaagacctatgagaagggcaacatctctcgctatgtcactaccctcaaccctggtgacaagcttcgagtcaagggtccaaagggcaatttcaagtattcccccaaccttgttggtcacctctccatgatcgccggcggtaccggtattgcgcccatgatccagatcatccgcggtgttttgcgaaaccccctcgaccaaactaccctcaccctcatttacgccaacgttaacgaagaagacatcctcctccgcgccgaattggaggaactgctcgacgtccatggcgaacagaggttcaagatcttctacgtcctcaacaacccacctgttggctggaagggcggtgctggtttcgtgaccaaggaacacatcaaggagctcttgccaaaccctgctgaaaccaacagcaagatcctcatttgcggccctcctcccatggttaacgccatgaagaaaaaccttgacgaactcaaataccctctcccgaataccatcagcaagctccaagacaaggtctttgtcttctaa

SEQ ID NO: 7991 - protein, 361 aa, Coprinopsis cinerea okayama7#130
MPNQYQLAFLASFFVTLASLIASLHFAVAFFRSKGYDIGDLILIGLDKKNPNPTDGRVEIEKIPAIIMEFVKNADLDDIVQLATSPTVLVTAGIVLATAVYVKLFHTGRTAPLDPLNWKEFPLLKTTKVSPNTAIYRFKLPHQRDVLGLPIGQHISVSAEINGKTIVRNYTPVSLDDDRGFFDLLIKTYEKGNISRYVTTLNPGDKLRVKGPKGNFKYSPNLVGHLSMIAGGTGIAPMIQIIRGVLRNPLDQTTLTLIYANVNEEDILLRAELEELLDVHGEQRFKIFYVLNNPPVGWKGGAGFVTKEHIKELLPNPAETNSKILICGPPPMVNAMKKNLDELKYPLPNTISKLQDKVFVF

SEQ ID NO: 7992 - DNA, 966 bp, Culex quinquefasciatus
  CDS (1)..(966)
atgtccgattttgatgtcgtccccgtggcggttggcgtactggtggtcgtagccggtgccctcctcgccaactacctgctgaagaaggacaaatccaagtccggcggtggaaaatccagcggcggcgatgccaagaaggcggcctcgtcccagctgcgtacgctgatggacccgcaggaaaagtacatgcttccgctgattgagaaggaggagctgtcgcacgatacgcggcggttccggttcgggttgcactcgggagagcacgtgctggggctgcccgttggtcagcacatccacctgtcggcgacgatcaacgaggagctggtgattcgggcgtacacgccggtgtcctgcgacgatgacaagggctttgtggatctggtggtgaaggtttacaagaagggagtgcatccgaagttcccggagggtggcaagatgtcgcagcacttggagagcttggccattggggacaggattgcgttccgtggaccgtcggggcggttgcagtacctgggtgggggcaagttttcgattaagaaactgcggaaggacccggctcagatctacgaagctgataaggtcagcttgattgccggtggaactggaattacgccgatgttgcagctggttcgcgaagttctgaagaaggctgactccgacaaaactcaactgtcgctgatctttgccaatcaaaccgaagacgacattctcctcaagcccgagctggacgacctggccgcgcgctaccccgaacagttcaagctgtggtacacgctggaccgtcccaaccccgactggacccagggcaagggcttcatcacggacgagatgatcaaggagcatctgtttgccccctccccgtcaacgctggtcctgatgtgcggcccaccgccgatggtcaactacgcgtgcattccggcgctcgagaagctgggctaccaaatggatcgtaccttcgcctattaa

SEQ ID NO: 7993 - protein, 321 aa, Culex quinquefasciatus
MSDFDVVPVAVGVLVVVAGALLANYLLKKDKSKSGGGKSSGGDAKKAASSQLRTLMDPQEKYMLPLIEKEELSHDTRRFRFGLHSGEHVLGLPVGQHIHLSATINEELVIRAYTPVSCDDDKGFVDLVVKVYKKGVHPKFPEGGKMSQHLESLAIGDRIAFRGPSGRLQYLGGGKFSIKKLRKDPAQIYEADKVSLIAGGTGITPMLQLVREVLKKADSDKTQLSLIFANQTEDDILLKPELDDLAARYPEQFKLWYTLDRPNPDWTQGKGFITDEMIKEHLFAPSPSTLVLMCGPPPMVNYACIPALEKLGYQMDRTFAY

SEQ ID NO: 7994 - DNA, 960 bp, Culex quinquefasciatus
  CDS (1)..(960)
atgggcaatgtcgtccccgtggcagttggcgtactggtggtcgtagccggtgccctcctcgccaactacctgctgaagaaggacaaatccaagtccggcggtggcaaatccagcggcggcgatgccaagaaggcggcctcgtcccagctgcgtacgctgatggacccgcaggaaaagtacatgcttccgctgattgagaaggaggagctgtcgcacgatacgcggcggttccggttcgggttgcactccggagagcacgtgctggggctgcccgttggtcagcacatccacctgtcggcgacgatcaacgaggagctggtgattcgggcgtacacgccggtgtcctgcgacgatgacaagggctttgtggatctggtggtgaaggtttacaagaagggagtgcatccgaagttcccggagggtggcaagatgtcgcagcacttggagagcttggccattggggacaggattgcgttccgtggaccgtcggggcggttgcagtacctgggtgggggcaagttttcgattaagaaactgcggaaggacccggctcagatctacgaagctgataaggtcagcttgattgccggtggaactggaattacgccgatgttgcagctggttcgcgaagttctgaagaaggctgactccgacaaaactcaactgtcgctgatctttgccaatcaaaccgaagacgacattctcctcaagcccgagctggacgacctggccgcgcgctaccccgaacagttcaagctgtggtacacgctggaccgtcccaaccccgactggacccagggcaagggcttcatcacggacgagatgatcaaggagcatctgtttgccccctccccgtcaacgctggtcctgatgtgcggcccaccgccgatggtcaactacgcgtgcattccggcgctcgagaagctgggctaccaaatggatcgtaccttcgcctattaa

SEQ ID NO: 7995 - protein, 319 aa, Culex quinquefasciatus
MGNVVPVAVGVLVVVAGALLANYLLKKDKSKSGGGKSSGGDAKKAASSQLRTLMDPQEKYMLPLIEKEELSHDTRRFRFGLHSGEHVLGLPVGQHIHLSATINEELVIRAYTPVSCDDDKGFVDLVVKVYKKGVHPKFPEGGKMSQHLESLAIGDRIAFRGPSGRLQYLGGGKFSIKKLRKDPAQIYEADKVSLIAGGTGITPMLQLVREVLKKADSDKTQLSLIFANQTEDDILLKPELDDLAARYPEQFKLWYTLDRPNPDWTQGKGFITDEMIKEHLFAPSPSTLVLMCGPPPMVNYACIPALEKLGYQMDRTFAY

SEQ ID NO: 7996 - DNA, 966 bp, Anopheles gambiae str. PEST
  CDS (1)..(966)
atgggcctaactgtaaatcaggtaatgccggttgcgatcggcgtggtggtcgtagtggtcggtgccgccatcgccaactacctgctgaacggcaagaagggcaaatcgtcctcctcctcctccgcctccgccaagggcagcgctgggaaggaaccgaaaacgctgctcgatccgcaggagaagtatatgctgccactgatcgagaaggaggaaatttcgcacgatacgcgccggttccggtttgggctgccgagcgaaaagcacatcctgggactgccgatcggtcagcacattcatctgtccgccaccatcaacgacgagctggtgattcgtgcgtacacgccggtttcgtgcgatgacgaccacgggtacgtcgatctggtggtgaaggtgtacaagaagaacgtccacccgaagttcccggacggtggcaagatgtcgcagtacctggagggcatgagcatcggcgacaagattgcgttccgcggtccgtccggccggctgcagtacctcggcaatgggcggttctcgatcaagaagctgcgcaaggatccggcccaaatctacgaagcgacgcaagtgggcctaattgcgggtggaactggaatcactccgatgcttcagctgatccgtgaagtactgaaacattccgacaaggacaagaccaagctgtcgctcatttttgccaatcagaccgaagacgacatcctgctgaagcccgagctggacgatttggctgcccgctatcccgaccaattcaagctgtggtacacgctcgatcggcccaagcccgagtggacccagggcaagggtttcgtgacggacgagatgatcaaggagcgactgttcgagccctcgtcaaactcgctcgtgctaatgtgcggtccaccaccgatggtgaactatgcctgcattccagcactggaaaagctgggctatccgacggagcgcacctttgcctattaa

SEQ ID NO: 7997 - protein, 321 aa, Anopheles gambiae str. PEST
MGLTVNQVMPVAIGVVVVVVGAAIANYLLNGKKGKSSSSSSASAKGSAGKEPKTLLDPQEKYMLPLIEKEEISHDTRRFRFGLPSEKHILGLPIGQHIHLSATINDELVIRAYTPVSCDDDHGYVDLVVKVYKKNVHPKFPDGGKMSQYLEGMSIGDKIAFRGPSGRLQYLGNGRFSIKKLRKDPAQIYEATQVGLIAGGTGITPMLQLIREVLKHSDKDKTKLSLIFANQTEDDILLKPELDDLAARYPDQFKLWYTLDRPKPEWTQGKGFVTDEMIKERLFEPSSNSLVLMCGPPPMVNYACIPALEKLGYPTERTFAY

SEQ ID NO: 7998 - DNA, 834 bp, Vitis vinifera
  CDS (1)..(834)
atggacttcttggaagcgccagaaatccagattctgggtgtggctgtggctgctgtggcagttgtggctggggctgcatatttctattccaccaggaaacccaaaggctgcctagaccctgagaacttcaagcaattcaaacttgtcaagcgcacacagctcagccataatgtagcaaagttcagatttgatcttcctactcccacatcagtgttgggcctcccaattggacaacatataagttgcaagggtaaggatggtgagggtcaagaaattatcaaaccatataccccaactacattggattctgatgttggatattttgaacttgttataaagatgtatccacaaggaaggatgtcacatcattttcgagagatgcgtgtaggtgattatctggctgtaaagggacccaaggggcgtttcaggtatcaagttggccaagttagggcatttgggatgcttgctggaggttctggaattacaccaatgttccaagttgctagagctatattagaaaacccaaaagacaaaacgaaggtgcaccttatttatgctaacgttacatttgaggacattctcttgaaggaggaactggaaggcctttctgccagctaccctgatcactttaaagtttactatgttctgaatcagcctcctgaagcatggaacggtggcgtcgggtttgtatccaaggaaatgatcaaggcccattgccctgcacctgcatctgacattaagattctccgatgtggtccaccacccatgaacaaggccatggccgccatcctcaacgatattggatacacagatgagatgcagttccagttctaa

SEQ ID NO: 7999 - protein, 277 aa, Vitis vinifera
MDFLEAPEIQILGVAVAAVAVVAGAAYFYSTRKPKGCLDPENFKQFKLVKRTQLSHNVAKFRFDLPTPTSVLGLPIGQHISCKGKDGEGQEIIKPYTPTTLDSDVGYFELVIKMYPQGRMSHHFREMRVGDYLAVKGPKGRFRYQVGQVRAFGMLAGGSGITPMFQVARAILENPKDKTKVHLIYANVTFEDILLKEELEGLSASYPDHFKVYYVLNQPPEAWNGGVGFVSKEMIKAHCPAPASDIKILRCGPPPMNKAMAAILNDIGYTDEMQFQF

SEQ ID NO: 8000 - DNA, 843 bp, Vernicia fordii
  CDS (1)..(843)
atggatttggaattcttgcaaacacttgatgttcagattctcgtgggtgtagctgtggctgttttagccattggtattggtgctgtttttctcttttcctccaaaaagcctaaaggctgcttagatcctgagaattttaaggattttaaacttgttaatcgcactcagctgagccataatgttgcaaagttctcatttgcacttcctacgcctacttcagttttgggccttccaattggacaacatataagctgcaggggtaaggatagccaaggtgaagaggttattaaaccatataccccaactacattggattcagatgttggacattttgaattagttattaagatgtatccgcaaggaaggatgtcccatcacttccgagagatgcgtgttggtgattatctttctgtaaaaggacccaaggggcgttttaggtatcaacctgggcaggttagagcatttggaatgcttgctggaggctcaggcatcactccaatgttccaagttgccagagcgatattagaaaacccaaatgacaaaacaaaggtatacctcatttatgccaatgttacgtatgaggacattcttttaaagcaagaattggatggccttgctgctaattaccctgatcgcttcaaagtctactacgttttgaatcagcctcctgaagtatgggatggtggcgttggctttgtatcaaaggaaatgattgaaaatcactgccctgctcctgcatctgatatccagattctgagatgtggaccaccacctatgaacaaggccatggctgctcacctcgaagctcttgactacacgtctgatatgcagttccagttctga

SEQ ID NO: 8001 - protein, 280 aa, Vernicia fordii
MDLEFLQTLDVQILVGVAVAVLAIGIGAVFLFSSKKPKGCLDPENFKDFKLVNRTQLSHNVAKFSFALPTPTSVLGLPIGQHISCRGKDSQGEEVIKPYTPTTLDSDVGHFELVIKMYPQGRMSHHFREMRVGDYLSVKGPKGRFRYQPGQVRAFGMLAGGSGITPMFQVARAILENPNDKTKVYLIYANVTYEDILLKQELDGLAANYPDRFKVYYVLNQPPEVWDGGVGFVSKEMIENHCPAPASDIQILRCGPPPMNKAMAAHLEALDYTSDMQFQF

SEQ ID NO: 8002 - DNA, 840 bp, Vernicia fordii
  CDS (1)..(840)
atggagagcatacagtctcatagggcggagatgataaccatcgccgtcgcactctttgctattggcgccggcaccgcctattatttctatatcacctccaagaaacctaaaggttgcttggaccctgaaaaattcaaggaattcaaacttgttaagcgcactgaactcagccataatgtcgctaagtttaaatttgctctccccactccaacttcagttttgggattaccaattggacaacatatgagctgcagaggaaaagacagtctaggtgaagaagttatcaagccgtatactcccacaactttggactctgatcttggatactttgaactagttataaagatgtatccacaaggaaggatgtcccaccactttagggagatgtgtgaaggtgattgcttggctgtgaaggggcccaaggggcgcttcaagtatcaacctaaccaagttagagcttttgggatgcttgctggaggtactggaataactccaatgttccaagttgcccgggccatactagaaaatcctattgacaagaccaacatacaacttatttatgccaatgttacatttgaggacattcttttgaaggaagagctggataaccttgcaaacaattttcctaacctcttcagtgtctactatgttttgaatcagcctcctgaaggatgggatggtggcatagggttcgtatccaaggaaatgattcaaaaccactgccctccactagcaccagatgttcagatattgaggtgtggacctccaccaatgaataaggccatggctgctcacctagatgctcttggatacacttcccaaatgcagttccagttttag

SEQ ID NO: 8003 - protein, 279 aa, Vernicia fordii
MESIQSHRAEMITIAVALFAIGAGTAYYFYITSKKPKGCLDPEKFKEFKLVKRTELSHNVAKFKFALPTPTSVLGLPIGQHMSCRGKDSLGEEVIKPYTPTTLDSDLGYFELVIKMYPQGRMSHHFREMCEGDCLAVKGPKGRFKYQPNQVRAFGMLAGGTGITPMFQVARAILENPIDKTNIQLIYANVTFEDILLKEELDNLANNFPNLFSVYYVLNQPPEGWDGGIGFVSKEMIQNHCPPLAPDVQILRCGPPPMNKAMAAHLDALGYTSQMQFQF

SEQ ID NO: 8004 - DNA, 840 bp, Zea mays
  CDS (1)..(840)
atggatttcctgcaggagcaaagcgtcgagaccacagtggccgtcgccgtcgctgtcgccgccgtcgccgcaggcggcgccttcctcctccttcgatccaggaagcccaagggctgcttggatcctgagaacttcaggaagttcaaacttgttgaaaagaagcaaataagtcataatgttgccaggttcaagttcgctcttccaactccaacttctgtattgggccttccaatcggtcaacatatcagctgcagaggacaagacgctacaggtgaagaagtaatcaagccttatacccctactacattggattctgatcttggatattttgagcttgtcataaagatgtatccccaagggagaatgtcccatcatttccgcgagatgaaagttggtgattatttgtctgtgaagggacctaagggccgattcaagtaccacgttggccaagtgagggcatttggaatgctggctggtggatcaggcattactccaatgtttcaagttgccagagcaattcttgagaaccctaatgacaacaccaaggttcacttaatttatgctaatgtcacatatgaagacattcttctgaaggatgagctggacgacatggccaaaacctatcctggccgctttaagatctactatgtgttgaatcagcctcctgagaactggaacggtggtgttgggtttgtgtctaaggaaatgatccaatctcattgtccagcgcctgctgaggacattcagatcctgagatgtggtcctcctccgatgaacaaggccatggctgcacaccttgacgagctcaactacacaaaggagatgcagttccagttctaa

SEQ ID NO: 8005 - protein, 279 aa, Zea mays
MDFLQEQSVETTVAVAVAVAAVAAGGAFLLLRSRKPKGCLDPENFRKFKLVEKKQISHNVARFKFALPTPTSVLGLPIGQHISCRGQDATGEEVIKPYTPTTLDSDLGYFELVIKMYPQGRMSHHFREMKVGDYLSVKGPKGRFKYHVGQVRAFGMLAGGSGITPMFQVARAILENPNDNTKVHLIYANVTYEDILLKDELDDMAKTYPGRFKIYYVLNQPPENWNGGVGFVSKEMIQSHCPAPAEDIQILRCGPPPMNKAMAAHLDELNYTKEMQFQF

SEQ ID NO: 8006 - DNA, 987 bp, Arabidopsis thaliana
  CDS (1)..(987)
atggctacttccttcttccggcgactcgctaggtcagctccgattacattccctgtcgcatttggatctcaaagcaaatctggttctggcgctttccgattctccaccggtgcaatcgcggcactttccggtggattctcctattactacttgacatccggcaacaatctggtttatctggatcaagctaaggaagagacaggaccaaaaaccgctctaaaccctgataaatggctcgagttcaagcttcaagacactgctagagttagccacaacactcagttgttcaggttctcatttgacccctcagctgagttgggtctacatgttgcttcttgtctcctgacaagggctcctttaggctataatgctgaagggaaaacgaaatatgtcattagaccttacactcctatatcagatccagaggctaagggctattttgatttactgattaaggtatatcctgacggaaaaatgagtcagcattttgccagcttaaaaccgggggatgtgttggaagtaaaaggacccgttgaaaagttcaaatactcgccgaatatgaagaaacatattggcatgattgccggtggaagtgggattactccaatgcttcaggtgattgatgccattgtgaagaatcctgaggacaacacgcagatatcattgctttatgccaatgtgtctccagatgatatactcctgaagcagaagcttgatgtacttcaggctaaccacccaaatttgaagatattctatactgttgacaaccctactaaaaactggaaaggaggagtaggttacatttcaaaggatatggctctgaaaggcttacctcttcctaccgacgatactcttatccttgtatgcggtcctcctgggatgatggagcatatatctggaggcaaagctccagactggtcacaaggagaggtcaaggggattctcaaggaactcggatacacagaggaaatggtgttcaaattctga

SEQ ID NO: 8007 - protein, 328 aa, Arabidopsis thaliana
MATSFFRRLARSAPITFPVAFGSQSKSGSGAFRFSTGAIAALSGGFSYYYLTSGNNLVYLDQAKEETGPKTALNPDKWLEFKLQDTARVSHNTQLFRFSFDPSAELGLHVASCLLTRAPLGYNAEGKTKYVIRPYTPISDPEAKGYFDLLIKVYPDGKMSQHFASLKPGDVLEVKGPVEKFKYSPNMKKHIGMIAGGSGITPMLQVIDAIVKNPEDNTQISLLYANVSPDDILLKQKLDVLQANHPNLKIFYTVDNPTKNWKGGVGYISKDMALKGLPLPTDDTLILVCGPPGMMEHISGGKAPDWSQGEVKGILKELGYTEEMVFKF

SEQ ID NO: 8008 - DNA, 864 bp, Ashbya gossypii
  CDS (1)..(864)
atggattacaagtttgaagccctagtcaccgcactggtactggctgtgagtttcatttttatctacggcaagttcagcggagcgaagcagagccaaccagcggtcaagacaacgctgaataaggactggcaagagttctcactgttgaccaaaactgtgttaacccacaatacagcgatataccggtttggactgcctgaggccgatgccgtgctcgggcttcctatcgggcagcacatctcgatcagcggagtcatcgacggaaaggagatgttgcgctcgtacacgccgacgtcgctagattcagatgcaaccgggtactttgagctgctggtgaagtcgtacgagaagggtaacatctcgaagatgctggcggagctcgcgattggggaccggatcaaggtccgcggaccaaagggcttctaccactacgagcccaacatgtacaaggagatcggcatgattgcgggcggcaccggaatttctcccatgtaccagattattcgtgcgattttctcgaacccgcgggacaagacgcgagtctgcttggtgtacggtaaccagacaaaggacgatattttgctgaagcccgagcttgacgcgatggttgctgccaagccggaccagtttaagatcctctacatgttggataaagtcgctgaaggcgaacagtgggagggaaaactgggatacatcaccgaggcgatcatgcgcgagcacctaccggcgcctagcagcagtgcgcaactgctgctgtgcggcccgccaccaatggtttcttcggccaagcgcattgctgtttcgctgggatttgagaaggcgaaacctatttctaagaagggtgaccaagtttttgcattctaa

SEQ ID NO: 8009 - protein, 287 aa, Ashbya gossypii
MDYKFEALVTALVLAVSFIFIYGKFSGAKQSQPAVKTTLNKDWQEFSLLTKTVLTHNTAIYRFGLPEADAVLGLPIGQHISISGVIDGKEMLRSYTPTSLDSDATGYFELLVKSYEKGNISKMLAELAIGDRIKVRGPKGFYHYEPNMYKEIGMIAGGTGISPMYQIIRAIFSNPRDKTRVCLVYGNQTKDDILLKPELDAMVAAKPDQFKILYMLDKVAEGEQWEGKLGYITEAIMREHLPAPSSSAQLLLCGPPPMVSSAKRIAVSLGFEKAKPISKKGDQVFAF

SEQ ID NO: 8010 - DNA, 930 bp, Aspergillus clavatus
  CDS (1)..(930)
atgagtgcattgtcgtctgaaaatgttaatggggtctacattccctcggccttgctcgtcttcggcacctttctcgtgaagaaggaatttgttccctacgcagtggccctgactgctgttctggcaggtttcaagctgtttactggcgacagcaaagccagaaaggtccttaatcccaccgaatttcaggaatttgtcctcaaggagaagaccgatatctcgcacaatgtctccatctaccgctttgctcttccccgtcccaccgatatcttgggtctgccgatcggccagcacatttctctcgccgccaccattgagggccagcccaaggaggttgtgcgctcctacacccctatctcctcggacaatgaggccggttacttcgatctgctggtcaaggcctatccccagggtaacatctccaagcacttgaccaccctgaaggtcggcgacgtgatgaaggtgcgcggtcccaagggtgccatggtttacactcccaacatgtgccggcacatcggtatgattgctggcggtaccggtatcacccccatgctgcaggttatcaaggctatcattcgtaaccgtccccgcaacggcggcaccgatatcaccaaggtcgacctgatcttcgccaacgtcaaccccgaggacattctgctcaaggaggaactggacaagctggctgcagaggatgaggacttcaacatctactacgttctgaacaaccctccccagggctggactggcggtgttggtttcgttacccctgaaatgatcaaggaacgcctccctgctcccgctagcgacgtcaaggttctgctctgcggtcctccccccatgatcagcgccatgaagaaggccaccgagtctctcggattcaccaaggcccgcccggtcagcaagctcgaggaccaggtcttctgcttctaa

SEQ ID NO: 8011 - protein, 309 aa, Aspergillus clavatus
MSALSSENVNGVYIPSALLVFGTFLVKKEFVPYAVALTAVLAGFKLFTGDSKARKVLNPTEFQEFVLKEKTDISHNVSIYRFALPRPTDILGLPIGQHISLAATIEGQPKEVVRSYTPISSDNEAGYFDLLVKAYPQGNISKHLTTLKVGDVMKVRGPKGAMVYTPNMCRHIGMIAGGTGITPMLQVIKAIIRNRPRNGGTDITKVDLIFANVNPEDILLKEELDKLAAEDEDFNIYYVLNNPPQGWTGGVGFVTPEMIKERLPAPASDVKVLLCGPPPMISAMKKATESLGFTKARPVSKLEDQVFCF

SEQ ID NO: 8012 - DNA, 930 bp, Aspergillus fumigatus
  CDS (1)..(930)
atgagtgcattgtcatctgagaatatcaatggggtctacatcccgtcagccctcctcctcttcggcaccttcattgtgaagaaggagtttgtcccatatgcagtggctgtgaccgctatcctggctggactgaagctgttcacaggcggcaacaagcccagaaaagttctcaaccctaccgagttccaggaattcgttctcaaggagaagatcgacgtctcgcacaatgtttgcatctatcgctttgccctcccccgtcccaccgatatcctgggcttacccattggtcaacacatctccctcgctgccactatcgagggtcagccgaaagaagttgtccgctcctacactcccatttcttcggacaatgaggccggttactttgatttgctcgtaaaggcctatccccagggtaacatttccaagtacttgaccaccttgaagattggcgataccatgaaagtgcgcggtcccaagggtgccatggtctacactcctaacatgtgccgtcacattggtatgattgctggtggtactggcatcacccccatgttgcagatcatcaaggccgttattcgcaaccgccctcgcaatggcggcaacgacaccaccaaattggacctgatcttcgccaatgtcaacccagatgacatcctccttaaggaggagctggatatgctggctgctgaggatccggacttcaacatctactacgttctgaacaaccctccccaaggctggactggtggcgttggatttgttactcccgagatgatcaaggaacatctccctgcgcctgccagcgacgttaagattctgctctgcggcccccctcctatgatcagtgcgatgaagaaggctaccgagtcgctcggttacaccaaggctcgccccgtcagcaagcttgaggaccaggtcttctgcttttag

SEQ ID NO: 8013 - protein, 309 aa, Aspergillus fumigatus
MSALSSENINGVYIPSALLLFGTFIVKKEFVPYAVAVTAILAGLKLFTGGNKPRKVLNPTEFQEFVLKEKIDVSHNVCIYRFALPRPTDILGLPIGQHISLAATIEGQPKEVVRSYTPISSDNEAGYFDLLVKAYPQGNISKYLTTLKIGDTMKVRGPKGAMVYTPNMCRHIGMIAGGTGITPMLQIIKAVIRNRPRNGGNDTTKLDLIFANVNPDDILLKEELDMLAAEDPDFNIYYVLNNPPQGWTGGVGFVTPEMIKEHLPAPASDVKILLCGPPPMISAMKKATESLGYTKARPVSKLEDQVFCF

SEQ ID NO: 8014 - DNA, 1204 bp, Aspergillus oryzae
  CDS (58)..(936)
cgacatttgtatctcttactattccaatacccagggattgctggaggaattgtcaacatgagtgcctttgcttcggagaacttgacctccgccctcctggtggttggcacagccattttcgctgtcttggtcggcgcgaagtttctcggtggtagtggtaaacccagaaaggtcctgaaccctaccgagttccagaactttgtcttgaaggagaagaatgagatctctcacaacgtcgctatctatcgctttgccctgcctcgccccaccgacatcttgggtctgcccatcggtcaacacatctctctcgccgctaccattgaaggccagcccaaggaggttgtgcgctcttacacccccatctcctccgacaatgaggctggatactttgatctcctcgtcaaggcctaccctcagggtaacatttccaagtacctgaccaccctgaagatcggcgacaacatgaaggtgcgcggccccaagggtgccatggtgtacaccccgaacatgtgccgtcacattggtatgatcgccggaggaaccggtatcacccccatgctgcagatcatcaaggccatcatccgcaaccgcccccgcaacggtggtaatgacaccacccaggtggacctgatctttgccaacgtcaaccccgaggatatcctgctgaaggaagaactggagcagctcgtcaaggaggatgacggcttccgtgtctactatgtacttaacaacccccctgagggctggaccggtggtgttggattcgttactcctgacatgatcaaggagcgcctccctgctccggcccaggacatcaagatcatgctgtgcggcccccctcccatgatcagcgccatgaagaaggcgaccgagtctcttggatacaccaaggctcgccctgtcagcaagctcgaggaccaggtgttctgcttctaagaatttctgcctgtttgtgcttgatagcttatataacggataaatgcgcgtcttcccgttgcgacgttagctcgggtcgatgtgcggagactcatgttcgagatatgccatgctatgttggtgttggacccgggaaaaaatcccttaccatgtcgggacgatagatttagatgaagtgctcagtctagcagtttctcactaccatttaagtacgcacgatacctagaatttgaaacgatctcacttttcttgttgaacggacgcgtgg

SEQ ID NO: 8015 - protein, 292 aa, Aspergillus oryzae
MSAFASENLTSALLVVGTAIFAVLVGAKFLGGSGKPRKVLNPTEFQNFVLKEKNEISHNVAIYRFALPRPTDILGLPIGQHISLAATIEGQPKEVVRSYTPISSDNEAGYFDLLVKAYPQGNISKYLTTLKIGDNMKVRGPKGAMVYTPNMCRHIGMIAGGTGITPMLQIIKAIIRNRPRNGGNDTTQVDLIFANVNPEDILLKEELEQLVKEDDGFRVYYVLNNPPEGWTGGVGFVTPDMIKERLPAPAQDIKIMLCGPPPMISAMKKATESLGYTKARPVSKLEDQVFCF

SEQ ID NO: 8016 - DNA, 858 bp, Candida glabrata
  CDS (1)..(858)
atggatggcataaagattttggcgacgttctcggtactagtactgttctacaagctttttacgtacagcaagaaaggtggtgtttcacagaaggaggctgtgaaggcactgttgaagacagagtttagggagtttgagttggtagagaaggagcaattgacacataacactgcaaaatacaagttcaagctcgcagatgagtcacatgtgttggggttgccaattggtcagcatatcactgttaaaaccataattggtggcaagccagtgagcagatcatacacgccaacctctctggacgaagaatgtgtcgggttctttgagttgctagtcaaatcttatcctgaaggtaatatctccaagcacattggtgacatgaagattggtgaaaaaatcaacatatctggtcctagaggattctacgagtatgtgccaaatgttcataaacaccttgccatggttgctggtggtactggtataactccaatgtttcaaataatgaaggctattgcccgggaccccagtgataagaccagagtaactttgctgtatggtaacgtgctagaagaggacatacttttgaagcaagaattggatgaccttgtcaagcaaagaccggatcagttcaagatcacctatcttcttgacaaaccggagcgtgacgactgggaaggcggtgtaggctacgtgacattggatctcatgaaggaatccttcccatctgcggaagaggacgttcaattgctcgtctgtggtccgccaggcatggtttcttctgtcaagaggaacgccgtcgctctcggattcccaagggccaagcctgtctcaaagatggaagaccgtgtgtttgtcttctga

SEQ ID NO: 8017 - protein, 285 aa, Candida glabrata
MDGIKILATFSVLVLFYKLFTYSKKGGVSQKEAVKALLKTEFREFELVEKEQLTHNTAKYKFKLADESHVLGLPIGQHITVKTIIGGKPVSRSYTPTSLDEECVGFFELLVKSYPEGNISKHIGDMKIGEKINISGPRGFYEYVPNVHKHLAMVAGGTGITPMFQIMKAIARDPSDKTRVTLLYGNVLEEDILLKQELDDLVKQRPDQFKITYLLDKPERDDWEGGVGYVTLDLMKESFPSAEEDVQLLVCGPPGMVSSVKRNAVALGFPRAKPVSKMEDRVFVF

SEQ ID NO: 8018 - DNA, 927 bp, Coccidioides immitis
  CDS (1)..(927)
atgagctcttggacgtcaaaggagaatattaacggggtgtatatcccgtccgccctactgatcttcggtaccacaatcatcaagaaggaatggattgcgtatgcgacagctcttgctgttgtcctttcagcgtggaaattattcagtaacaagccgcgaaaagttttaaatcccacggagttccaaaactttgtcctcaaagacaagactattgtctcccacaatgtctgtatctaccgcttcgctctcccaagaccaaccgacatcctcggccttcccatcggccagcacatttctcttgctgccacaatccctggtcagtcgaaggagatcgtgcgctcctacactcccatctcctctgatgacgatgcgggctacttcgatcttctcgtcaagtcatacccacaaggaaatatctccaaacatttgactaccctccgcattggcgataaaatgaaggttcgtggaccaaagggtgccatggtctatactccaaatatggtccgtcatatcggtatgattgctggtggtaccggtatcactcccatgctccaggtcatcaaggctattatcaagggaaggccccgaaatgggggcaacgatactactcagatcgaccttatcttcgccaacgtgaacccagatgacattcttctcaaggaggaattggatcagcttgccaaggaagacgacgctttccgcatttactacgtccttaacaacccaccagagaaatggaacggtggtgttggcttcgttactccagatatgatcaaggctaaactccctgctccggccggtgatatcaaggttctcatttgcggacctccccccatggtcagcgccatgaagaaggccaccgagtccctcggatacaagaaggccaacctcgttagcaagcttgaggaccaggtcttctgtttctaa

SEQ ID NO: 8019 - protein, 308 aa, Coccidioides immitis
MSSWTSKENINGVYIPSALLIFGTTIIKKEWIAYATALAVVLSAWKLFSNKPRKVLNPTEFQNFVLKDKTIVSHNVCIYRFALPRPTDILGLPIGQHISLAATIPGQSKEIVRSYTPISSDDDAGYFDLLVKSYPQGNISKHLTTLRIGDKMKVRGPKGAMVYTPNMVRHIGMIAGGTGITPMLQVIKAIIKGRPRNGGNDTTQIDLIFANVNPDDILLKEELDQLAKEDDAFRIYYVLNNPPEKWNGGVGFVTPDMIKAKLPAPAGDIKVLICGPPPMVSAMKKATESLGYKKANLVSKLEDQVFCF

SEQ ID NO: 8020 - DNA, 885 bp, Cryptococcus neoformans
  CDS (1)..(885)
atgttcaccatcgaggttctcgctcagaagcttgctcctcatgccagcttcctcggcggtctcgtcgtcgctgctattctcggccttttcatcttcttccaggagaaggacagaaaagtacttgaccctgttgagtggaggtctttcaagctcgttgacaaggatcacttgtcccacaacactgctttgtaccgatttgcccttccccgagcatctgattctctcggtctccccatcggtcaacacatctctgtcgctgccgagattaatggcaagcaggttgttagatcttacactcccaccactttggatgacgacaaaggacactttgacttggttgtcaagacatacgagaagggtaacatctcccgatacctttctctcctcactatcggccaggaaattaaggtcaaaggtcctaagggcaagtttgtttacacccccaacatggcccctcaccttgtcatgattgccggcggtaccggtatcactcccatgtaccagattattaaatcctctatcaagactcccggcgacaagaccaggctttctttgatctacgccaacattcaggaagatgacatcttgctcaagaaggaaattgacgagctacaagccaagtccaacggccgttttgatgtcaagtacgttcttaacaaccctcctgagggctggactggtggtgttggtttcgtcaccaaagagatgattgaggaagctatgccttcttccggtgttggctctgctaatcacggtgagggtcacaaggtcttgatgtgcggccctcctcctatgatcaccgctatgaagggccacctcgcgcagatcggttaccctgctcctaggagcgtctccaagctcgaggaccaagttttccttttctaa

SEQ ID NO: 8021 - protein, 294 aa, Cryptococcus neoformans
MFTIEVLAQKLAPHASFLGGLVVAAILGLFIFFQEKDRKVLDPVEWRSFKLVDKDHLSHNTALYRFALPRASDSLGLPIGQHISVAAEINGKQVVRSYTPTTLDDDKGHFDLVVKTYEKGNISRYLSLLTIGQEIKVKGPKGKFVYTPNMAPHLVMIAGGTGITPMYQIIKSSIKTPGDKTRLSLIYANIQEDDILLKKEIDELQAKSNGRFDVKYVLNNPPEGWTGGVGFVTKEMIEEAMPSSGVGSANHGEGHKVLMCGPPPMITAMKGHLAQIGYPAPRSVSKLEDQVFLF

SEQ ID NO: 8022 - DNA, 855 bp, Debaryomyces hansenii
  CDS (1)..(855)
atgtcacaaccagagcctaatccctttattatatttgctactgttgcagcaataatctcttcagctgtagcatattatttctttcaattaagcagaaagaatgctccagttttaaagccaaatgatttccaaaagtttccattgattgaaaaaaccagagtttctcacaacacatgcgtttacagattcgggttaccacggtccaccgacagattaggtttgccaattggccaacatattgctattggagcaactattaatgacaaagaggtggttagatcttacactccaatctccaccgatgatgaattaggatactttgatttattgatcaaggcttatgaaaatggtaacatttcaagacacgttgagtccaagaagattggggaaaccatcgatatcagaggaccaaagggattcttcacctacaccccaggtatggttgaatcgtttggaatgattgctggtggtaccggtattactccaatgtaccagattttgaccgcgattttgagaaacccagaagataagactaaggtcagcttggtgtacgctaacgtgactgaagatgacattttgttgaaagaagaattgaacaagatggctagagaacacccggacagatttaagatttattacgttttaaacacccctccagaaaactggaccggtggtgtcggtttcgttactccagaaattatggataagcacttaccaaaggcttctgaagccacaaacttattattatgtggtcctccacctatgattagtgcaatgaagaaggctgccgttggcttaggctaccagaaggcaaagccggtctcaaaattaggcgatcaaatattcgttttctaa

SEQ ID NO: 8023 - protein, 284 aa, Debaryomyces hansenii
MSQPEPNPFIIFATVAAIISSAVAYYFFQLSRKNAPVLKPNDFQKFPLIEKTRVSHNTCVYRFGLPRSTDRLGLPIGQHIAIGATINDKEVVRSYTPISTDDELGYFDLLIKAYENGNISRHVESKKIGETIDIRGPKGFFTYTPGMVESFGMIAGGTGITPMYQILTAILRNPEDKTKVSLVYANVTEDDILLKEELNKMAREHPDRFKIYYVLNTPPENWTGGVGFVTPEIMDKHLPKASEATNLLLCGPPPMISAMKKAAVGLGYQKAKPVSKLGDQIFVF

SEQ ID NO: 8024 - DNA, 942 bp, Emericella nidulans
  CDS (1)..(942)
atgcctgtctcaagtgctctatcgctcgagaacatcactggggtctacgctccctccgctcttctggtcgtcggaacgttcattttgaagaaggaatgggttccttttgccgtggccctagctgcaggtttcgttgcatggaagctgtctgtcggcggtagcagcaagcccaggaaagtcctcaaccccaacgagttccagaacttcgttctgaaggaaaagaacgacatctcccacaacgtgaccatttaccgcttcgctctgccccgtcccaccgatattctcggtctccccatcggtcagcacatctctcttgccgccactatcgagggccagcccaaagaggttgtgcgctcctacacccccatctcgtccgacaatgaggccggttacttcgacctcctcgtcaaggcttacccccagggtaacatctctaagtaccttaccaccctgaaggttggcgataccatgaaggttcgcggccccaagggcgccatggtctacacccccaacatgtgccgccacattggtatgattgctggcggtactggtatcaccccgatgctccagataatcaaggccattattcgcaaccgcccgcgcaacggtggcaacgacaccacgcaggtggaccttatcttcgccaacgtcaaccccgatgatatccttctcaaggacgagcttgagaagcttgctgctgaggatgatggattccgcatctactacgttctcaacaacccgcctgagggatggactggtggtgttggcttcgtgactcctgacatgattaaggaacgtctccctgctcccgccagcgacatcaagatcctcctctgtggtcctcctcctatggtcagcgccatgaagaaggccaccgaatctctcggctacaccaaggcccgtcccgtcagcaagctggaggaccaggtcttctgcttttaa

SEQ ID NO: 8025 - protein, 313 aa, Emericella nidulans
MPVSSALSLENITGVYAPSALLVVGTFILKKEWVPFAVALAAGFVAWKLSVGGSSKPRKVLNPNEFQNFVLKEKNDISHNVTIYRFALPRPTDILGLPIGQHISLAATIEGQPKEVVRSYTPISSDNEAGYFDLLVKAYPQGNISKYLTTLKVGDTMKVRGPKGAMVYTPNMCRHIGMIAGGTGITPMLQIIKAIIRNRPRNGGNDTTQVDLIFANVNPDDILLKDELEKLAAEDDGFRIYYVLNNPPEGWTGGVGFVTPDMIKERLPAPASDIKILLCGPPPMVSAMKKATESLGYTKARPVSKLEDQVFCF

SEQ ID NO: 8026 - DNA, 846 bp, Kluyveromyces lactis
  CDS (1)..(846)
atggttcctgggaagttcattttcactgcgacctttgtgttactgtgcactatcattgccgttgttttggaataccaatcaaagaaggataagccagtgctagataaggagaagttacaggaatttccattggtggcaaagacagtgttgactcataatactgctatttacagatttggtttaccaaagtctacacaggtattagggcttccaattggtcaacatatttctgttcaagcaaacatcaatggcaaggatattttaaggtcttatacaccaacttcgttggactcggacgccgtcggtcactttgaacttttaattaagtcctacgaaaagggtaacatttcaaagcattttgcacagctcaacattggtgacaaaattaaggtacgtggcccaaagggtttctaccattaccaacctaacatgaatgaagaaatcggtatgatcgctggtggtactggtattgctccaatgtatcaaattatgaaatcaatttttgccaacgattccgataaaaccaaggtatctttagtctatggtaatcaaactgaggaggatatccttttgaagaaggaattggacgcatttgttgaaagaaaaccagatcaattcaaggtttattacttgttagataaggctccagaagcttggactggtggtgttgggtatatcaccgttgatactatgaaagaacgtcttccagctccagctgaaggcgtccaacttttggtgtgcggtccgcctcctatggtttcatctattaagagaaatgctgtcactttaggttacgagaaagctaaacctatttctaagatgggagaccaaatctttgtattttaa

SEQ ID NO: 8027 - protein, 281 aa, Kluyveromyces lactis
MVPGKFIFTATFVLLCTIIAVVLEYQSKKDKPVLDKEKLQEFPLVAKTVLTHNTAIYRFGLPKSTQVLGLPIGQHISVQANINGKDILRSYTPTSLDSDAVGHFELLIKSYEKGNISKHFAQLNIGDKIKVRGPKGFYHYQPNMNEEIGMIAGGTGIAPMYQIMKSIFANDSDKTKVSLVYGNQTEEDILLKKELDAFVERKPDQFKVYYLLDKAPEAWTGGVGYITVDTMKERLPAPAEGVQLLVCGPPPMVSSIKRNAVTLGYEKAKPISKMGDQIFVF

SEQ ID NO: 8028 - DNA, 930 bp, Magnaporthe grisea
  CDS (1)..(930)
atggcaccccctctaagttccaaggtttacgtcgacggggtctacatccccgcggcgctcattgtcatcggcaccgccatcgtcaagagggactgggtcgtctacagtgtcgcccttgctttggctctcggcacatggaagttcttccagctcaagcccaaaaaggtccttgacccaacaaaatttcaggagttcgagctcaaggagaagaccattatatcccacaatgtcgccatctaccgtatccagctcccatcgccgtcttcgatccttggtcttcccatcggccagcacatctccatcggcgccgacatcccccagcccgacggcagcagcaaagaggttgtgcggtcctacaccccgatcagcggtgacgagcagcccggctacgtcgacctgctgatcaagtcgtaccccaccggtaacatctccaagtacatggccgggctctcggtcggccagagcatccgcgtcaggggccccaagggcgcctttgtgtaccagcccaacatggtccgtcacttcggcatgatcgccggcggtaccggcatcacccccatgctccaggtcgttcgcgccatcgtccgcggccgtgccgctggcgacaccacccaggtcgacctgatctttgccaatgtcaccaaggaggatatcctgctcaaggaggaccttgatgcgctcgcggccgaggacaagggattcagggtacactacgttttggacaggccgcctgagggctggactggtggcgttggctttgttacacaggacatgatcaccaaatggctccccaagccggcagacgatgtcaagatcctgctgtgcggtcccccgcctatggttagcggtctgaagaaggctaccgaggctttgggcttcaagaaggcgcgccccgtgagcaagcttgaggatcaggtctttgccttctaa

SEQ ID NO: 8029 - protein, 309 aa, Magnaporthe grisea
MAPPLSSKVYVDGVYIPAALIVIGTAIVKRDWVVYSVALALALGTWKFFQLKPKKVLDPTKFQEFELKEKTIISHNVAIYRIQLPSPSSILGLPIGQHISIGADIPQPDGSSKEVVRSYTPISGDEQPGYVDLLIKSYPTGNISKYMAGLSVGQSIRVRGPKGAFVYQPNMVRHFGMIAGGTGITPMLQVVRAIVRGRAAGDTTQVDLIFANVTKEDILLKEDLDALAAEDKGFRVHYVLDRPPEGWTGGVGFVTQDMITKWLPKPADDVKILLCGPPPMVSGLKKATEALGFKKARPVSKLEDQVFAF

SEQ ID NO: 8030 - DNA, 897 bp, Mortierella alpina
  CDS (1)..(897)
atgactctgtccaaccctgccatcgctgctgcctcgggcgtcattctcgccggcgcatacctgatcgacccctccgcattgccctttgtcgccgccggtgtcgccgccacctgggccagagttctcttcaagaagaccgctgtcaaaactcccccaatggatcccaaggagtaccgcaagttcaagctggttgacaaggtccactgcagccccaacactgccatgtacaagttcgcgctcccacatgaggatgatcttttgaacttgcccattggccagcatatctcgatcatggccaacattaacggcaaggatatctcgcgcagctacactcccaccagcagcagcgacgatgttggacactttgttctctgcatcaagtcctaccctcaaggaaacatctccaagatgtttagcgaactttcgatcggtgattctatcaatgctcgtggacccaagggccagttcagctacacccccaacatgtgccgcgccattggtatgattgccggcggtactggtctcacccccatgctccagattattcgtgccattgtcaagaaccccgaggacaagacccaggtcaacttcatctttgccaacgtcacagaggaggacatcatcttgaaggctgagctcgacctcctgtcacagaagcaccctcagttcaaggtttactacgttttgaacaacgctcccgagggctggaccggcggcgttggatttgttaacgctgatatgatcaaggagcacatgcctgcgcctgctgccgacatcaaggtcttgctttgcggtccccctcccatggtctccgccatgtccaagatcacccaggatctcggatacgacaaggtcaatgccgtctcgaagctccccgaccaggtcttcaagttttaa

SEQ ID NO: 8031 - protein, 298 aa, Mortierella alpina
MTLSNPAIAAASGVILAGAYLIDPSALPFVAAGVAATWARVLFKKTAVKTPPMDPKEYRKFKLVDKVHCSPNTAMYKFALPHEDDLLNLPIGQHISIMANINGKDISRSYTPTSSSDDVGHFVLCIKSYPQGNISKMFSELSIGDSINARGPKGQFSYTPNMCRAIGMIAGGTGLTPMLQIIRAIVKNPEDKTQVNFIFANVTEEDIILKAELDLLSQKHPQFKVYYVLNNAPEGWTGGVGFVNADMIKEHMPAPAADIKVLLCGPPPMVSAMSKITQDLGYDKVNAVSKLPDQVFKF

SEQ ID NO: 8032 - DNA, 1388 bp, Neurospora crassa
  CDS (153)..(1085)
ggaatccctttttttcttatcaagaggagctcttcgtcttgccttacccacctcgccgtcctcctcctcctccttctttcttttcttcttcttttcttccctcctcatccttcttcttaggtaaccgactagaagggacaaagacagacaccatgtccgaggaatcgctgctcgagcgcaagtactttgacgggatctacatccccgctggccttttggtcttcggcaccgtcatcgtcaagaaggaatggactctctacgccgcccttgcggccctcatcttgggtgccatcaagtattttaggatgctccccaagaaggttctcaagcccgctgtcttccaggagttcgagctcaaggagaagaccatcatctcccacaacgtcgccatctaccgcttcaagctccccactcccgactccgtcctcggcctgcccatcggccaacacatctccatcggcgccgccatcgagcaacccgacggctccaccaaggagattgtgcgttcctacaccccgatctcgggcgaccatcaacccggctacttcgacctgctcatcaagtcctacccgaccggcaacatctccaagcacatggcctcgctgcaagtcggccagaccatccgcgtcaagggtcccaagggcgcctttgtgtacacccccaacatggtccgtcactttggcatggtcgccggcggtaccggcatcacgcccatgctgcaagtcatccgcgccattgtccggggccgcgccgcgggcgaccgcaccgaggtcgatctcattttcgccaacgttactgcgcaggacattctcttgaaggaagacctggatgcgctggtggctcaggacaagggtatcagggtccactacgtcctcgatcgcccgcctgagggctggaccggtggtgtcggctttgtcacgcaagagatggtggagaagctgctgcccaagccggcgagtgatgtcaagattctgctgtgcggccctcccccgatgattagtgggttgaagaaggcgacggaggcgttgggcttccagaaggctaggccggttagcaagttggaggatcaggtgtttgctttctaagcgagtcttgaagcaagtcatgcatcggatgctttggcgtgtctgcttccaactagaggaggactctaggaggaacatgatggtggggagtgtcagtaatgagatgggttggaaaaggaaaaggttcggttactacgcgtcatgagaggcctgccccctgagagcgctgtcgccgataccggaaggatctaaaaaggggcttcgcgaagctgttcagttctatgcacatgacaggtcgtggagccagcttttcctccctatatatatacctataatttgctcgaatttaggtaccatcctatc

SEQ ID NO: 8033 - protein, 310 aa, Neurospora crassa
MSEESLLERKYFDGIYIPAGLLVFGTVIVKKEWTLYAALAALILGAIKYFRMLPKKVLKPAVFQEFELKEKTIISHNVAIYRFKLPTPDSVLGLPIGQHISIGAAIEQPDGSTKEIVRSYTPISGDHQPGYFDLLIKSYPTGNISKHMASLQVGQTIRVKGPKGAFVYTPNMVRHFGMVAGGTGITPMLQVIRAIVRGRAAGDRTEVDLIFANVTAQDILLKEDLDALVAQDKGIRVHYVLDRPPEGWTGGVGFVTQEMVEKLLPKPASDVKILLCGPPPMISGLKKATEALGFQKARPVSKLEDQVFAF

SEQ ID NO: 8034 - DNA, 849 bp, Phaeosphaeria nodorum
  CDS (1)..(849)
atggcgttctcaccgcaagcattgttgccgtatgtcgtgcttttcgtcgcagctgttggaggatggaaggtctacagcagtggatccaagaaggtgctgaagcccaatgagttccaggagtttgagctcgaggagaagactgtcctttcgcacaacaccgccatctaccgcttcaagcttccacgtaagaccgatatcctcggcctccccatcggtcagcacatctccctcggcgccaccatcgaaggtcagcccaaagaagtcgttcgctcgtacacgcccatctcctccgatgaagacaaaggccacttcgacctcctcatcaagtcgtaccccaccggaaacatctccaagtatgtcgcgaacctcaaagtcggcgagaaaatgcgcgtcaagggccccaagggcgcaatggtctacacacccaacatggtcaggcacttcggcatgatttcaggcggcaccggcatcactcccatgctgcaggtcgtcaaggctattatccggggccgcggccagggcgacactaccgaggtcgatctcatcttcgcaaacgtaaaccccgaggacattctgctcaaggaggatctcgatgcgcttgcagcaaaggaccccaagttcagggtacactacgtgctcaacaaccctccagagggctggaccggcggcgttggattcgtcactgcggatatgatcaaggagaagttgcctgcgcctgccagcgacgtcaagattctggtttgcggtcctcctcctatggttgctgcgatgaagaaggcgactgagagcttgggctacgcaaaggctaagccagtcagcaagctcgaggaccaggtcttctgcttctaa

SEQ ID NO: 8035 - protein, 282 aa, Phaeosphaeria nodorum
MAFSPQALLPYVVLFVAAVGGWKVYSSGSKKVLKPNEFQEFELEEKTVLSHNTAIYRFKLPRKTDILGLPIGQHISLGATIEGQPKEVVRSYTPISSDEDKGHFDLLIKSYPTGNISKYVANLKVGEKMRVKGPKGAMVYTPNMVRHFGMISGGTGITPMLQVVKAIIRGRGQGDTTEVDLIFANVNPEDILLKEDLDALAAKDPKFRVHYVLNNPPEGWTGGVGFVTADMIKEKLPAPASDVKILVCGPPPMVAAMKKATESLGYAKAKPVSKLEDQVFCF

SEQ ID NO: 8036 - DNA, 855 bp, Pichia guilliermondii
  CDS (1)..(855)
atgtcgcaaaacgaacccaaccctttggtcatcttctccacccttgccgccatcattttggccgccgtggccgtgtacgttgttaaactcaacaagaaaaatggtcctgttttgaaacctgatgtgtttcaaaaattcccattgatcgagaagactagactctcccacaacacttgtatttaccgttttggtttgcccaagtccaccgatcgtcttggcttgcccattggccagcacatctccattggggccaccatcaatggaaaggaagtggtgagatcgtacactcctatttctagagatgacgagttgggttactttgatttgctcatcaagacgtacgagcaaggtaacatttcgcgtcatgtggacagtaagtctgttggagaccacattgaagtcagaggaccaaaaggtttcttcacttacacccctaacatggttgaacacttgggcatgattgccggaggtactggtatcgctccaatgtaccaggttttaactgctattttgaccaacccggatgataagactaagatctctttggtgtatgctaatgttactgaagaggatattttgttgagagccgaattggacttgtttgccaaggaacaccccgacagattcaaggtgcactacgttttgaacaacgctcccgagaactggaacggcagtgtcggatttgttacaccggaaataatggagaagcatttacccaacaaggaccaagatggttacttattattatgtggtcccccacccatgatcagcgccatgaaaaagaacgccgtcactcttgggtaccccaaggccagaccagtgtccaagttgggcgacaaggtttttgttttctag

SEQ ID NO: 8037 - protein, 284 aa, Pichia guilliermondii
MSQNEPNPLVIFSTLAAIILAAVAVYVVKLNKKNGPVLKPDVFQKFPLIEKTRLSHNTCIYRFGLPKSTDRLGLPIGQHISIGATINGKEVVRSYTPISRDDELGYFDLLIKTYEQGNISRHVDSKSVGDHIEVRGPKGFFTYTPNMVEHLGMIAGGTGIAPMYQVLTAILTNPDDKTKISLVYANVTEEDILLRAELDLFAKEHPDRFKVHYVLNNAPENWNGSVGFVTPEIMEKHLPNKDQDGYLLLCGPPPMISAMKKNAVTLGYPKARPVSKLGDKVFVF

SEQ ID NO: 8038 - DNA, 996 bp, Pichia stipitis
  CDS (50)..(904): transl_table=12
atcgatctcgcttgccagacagacagatacttcccatatagacatcaccatggccgacacagaaccctcgccgctttttgtcttctcgactatcgcgataatcattctgaccttcgtgattttctactttgttcagcaaagcaagaagaacacccccgttttgaagccagacaccttccagaagtttcctctcattgaaaagacacgcgtttcacacaactccagtgtctaccgtttcggtttgcccaaatcgaccgatcgtttgggcttgcctattggccagcacatctccatcggagctaccataggcggtaaggaagttgtcagatcctacactcctatctctaccgatgacgaattgggctacttcgacttgttgatcaagacttacgaaaacggaaacatctccaagcatgtcgactccaagaaagttggcgaatacgtcgagatcagggggccaaagggtttcttcacctacactccaaacatggttaagtcgttcggtatgattgctggtggtaccggaattgctcctatgtaccagatcatcaccgccatcttgagaaacccagccgacaagaccaaaatctcgttgatctacgccaacgttactgaatcagacatcttgttgaagtcggaattggacaaatgggctgaagaacacccagacaatttctcggtccattacgtattgaacgaggctcctgaaaactggaagggctcggttggctttgtcactccagaaatcattgactcgaaattgccaaaggcttctgacgactccaacttgttgttgtgtggtcctcctcctatgatcagtgctatgaagaaggctgctgtgggtttgggctttgccaaagctaagcctgtgtccaaattgggcgaccaggtctttgtcttctaagctcttatcaactcgatgttagaagagtatagacacgatataaagatatttataaatagttattcagatgaatgaacagaatctgagtcctg

SEQ ID NO: 8039 - protein, 284 aa, Pichia stipitis
MADTEPSPLFVFSTIAIIILTFVIFYFVQQSKKNTPVLKPDTFQKFPLIEKTRVSHNSSVYRFGLPKSTDRLGLPIGQHISIGATIGGKEVVRSYTPISTDDELGYFDLLIKTYENGNISKHVDSKKVGEYVEIRGPKGFFTYTPNMVKSFGMIAGGTGIAPMYQIITAILRNPADKTKISLIYANVTESDILLKSELDKWAEEHPDNFSVHYVLNEAPENWKGSVGFVTPEIIDSKLPKASDDSNLLLCGPPPMISAMKKAAVGLGFAKAKPVSKLGDQVFVF

SEQ ID NO: 8040 - DNA, 906 bp, Schizosaccharomyces pombe
  CDS (1)..(906)
atggccaaacaaactcttcttagtaccccgttgcatggagtctatattccagtgtttttgatcatctttggtacttacattgtgaaacgcgaatgggtgggttacgctattgttgtggcattctctcttggttttcataagttctggcgtggacgcgttcgtaaagtattgagtgataaaattcaacaatttgaacttagtgataaagctgtattgaaccacaacactgccatttatcgtttccgtctgcctcgcgctaacgatgttcttggtctccccataggacaacatttaaaggtctttgttgatgttgatggtaaggagtattccagatcttacactcctctgtcttccgatgctgacaaaggttattttgatttgctcgtaaagtcttaccccaatggcaaagtgagtaagaagttttctgaacttaagattggtgataccatcggtgttcgtggccctaagggaaattggaagcatcgcactggcctcgcgcgccattttggcatgatcgcaggcggaacaggtattactcctatgcttcaaatcattcgtgctgttctttctaattttgaagatccaacggaaatcactcttttatatgctaatgtatcagagggtgatattgttcttcgtgatgagattgacgcacttgctaagaaggatcctcgttttaccgttcattatgttttgaacaatcctcctgaaaactggaagggaagtgttggatttgttactcaagaacttatcaaggcgcatttccctgctccttctcctgaaaccaaagttcttatttgtggccctactcccatggttaattcactcagagaagctacagttgcattgggatatgaaaagtcccgagccatttcgaagcttgaggatcaagtatttgtcttttag

SEQ ID NO: 8041 - protein, 301 aa, Schizosaccharomyces pombe
MAKQTLLSTPLHGVYIPVFLIIFGTYIVKREWVGYAIVVAFSLGFHKFWRGRVRKVLSDKIQQFELSDKAVLNHNTAIYRFRLPRANDVLGLPIGQHLKVFVDVDGKEYSRSYTPLSSDADKGYFDLLVKSYPNGKVSKKFSELKIGDTIGVRGPKGNWKHRTGLARHFGMIAGGTGITPMLQIIRAVLSNFEDPTEITLLYANVSEGDIVLRDEIDALAKKDPRFTVHYVLNNPPENWKGSVGFVTQELIKAHFPAPSPETKVLICGPTPMVNSLREATVALGYEKSRAISKLEDQVFVF

SEQ ID NO: 8042 - DNA, 975 bp, Ustilago maydis
  CDS (1)..(975)
atggtcctgatcgagcaagtcgttctggttgcttccatcttgatcactttcggtacttgtcttgccgcaaccaagtacgccgctaggcttttcccccacttcgaaccgcttcaattctacgacgaggcaaccaacccaatggagctcaacattgttctcgcttttgtggtgggcctgatcggctcagtggtagttttgctctactttgactcgcagaagatcaagcccgtgctcaaccccacccaatggcagcagtatcgtctcatggagaagcagaagctctccgacaacactgccctctaccgcttcaagcttccccgttcgaacaacatcctcggcctgcccatcggacagcacatttccgtacaggcgaacatgggcggcaagaccgttgttcgttcgtacacgcccacttcctcggacgatgaccatggattctttgatctcgttgtcaagtcgtacgagcagggcaatgtgtccaagtacattggctccatgaagatcggcgatctcctctcggtcaagggccccaaaggtcagatgcgttacgctcccggtctctcgcgccacattggcatgatcgccggtggtaccggtctcaccccttgcttgcagatcatccgtgccgccctcaagaaccccgccgacaagactcagattgactttatctacgctaacgtcaaggagactgacatcttgctcaaggacgaactcgatgagctggcccttaagcacaaggaccagttccgcatctcctacttcctcaatgaggcccctgaaggctggaagggcggcgttggcttcgtcaccaaggaggctttggagaaaaacctgcctaaacccgcaaatgacatcaaggtcctcatgtgtggtccgccgcccatgatcaaggccatgaccggacacctcgaggctcttggatacgaaaagcctcgcaccgtcagcaagctcgaggatcaggtcttctgcttctaa

SEQ ID NO: 8043 - protein, 324 aa, Ustilago maydis
MVLIEQVVLVASILITFGTCLAATKYAARLFPHFEPLQFYDEATNPMELNIVLAFVVGLIGSVVVLLYFDSQKIKPVLNPTQWQQYRLMEKQKLSDNTALYRFKLPRSNNILGLPIGQHISVQANMGGKTVVRSYTPTSSDDDHGFFDLVVKSYEQGNVSKYIGSMKIGDLLSVKGPKGQMRYAPGLSRHIGMIAGGTGLTPCLQIIRAALKNPADKTQIDFIYANVKETDILLKDELDELALKHKDQFRISYFLNEAPEGWKGGVGFVTKEALEKNLPKPANDIKVLMCGPPPMIKAMTGHLEALGYEKPRTVSKLEDQVFCF

SEQ ID NO: 8044 - DNA, 873 bp, Yarrowia lipolytica
  CDS (1)..(873)
atgcgctcctcttcttcacgacaacctcaaatgcagtcctattacgccatcgccaccgtgtgggcgctcatcattggcgccgccacctactacttcttctccaactccaagcccaaggctgtcttgcagcgaggagatacggccttcaaggagttccctctcatccagaagacggtgctctctcacaattcggccatctatcgatttggcctgccccgaccctcccacgtgctgggtctgcccatcggacagcacgtgtcgctttctgccaacattggaggcaaggaggtgctgcgttcctacacccccacctcgtccgacctgtacgacaagggctacttcgacattctcatcaagacctacccccagggaaacatctccaagtacgtgtctgagctggccattggtgacactatgaaggtgcggggccccaagggcaactttgtctacaaccacggcctggtcgagtccttcggcatggtttgtggaggaaccggcatcacccccatgtaccagattctgcgacacattgccgccgatcccgccgacaacaccaaggttaacctcgtctacgccaacgtgaaccacgacgacattctgctcaagaaggagctggacgccattgccgccgagaacgacaacatcaagatccactacgtgctcaacaacgctcccgaggactggaccggttccgtgggctttgtcaccaaggagattctcgagaagcactgcccccctcctggccccaacaccaagctgcttctgtgtggcccccctcccatgatctctgctctcaagaaggcttccgtcgagctcggatacgagaaggcccgacctgtcagcaaacttgaggatcaggtctttgccttttaa

SEQ ID NO: 8045 - protein, 290 aa, Yarrowia lipolytica
MRSSSSRQPQMQSYYAIATVWALIIGAATYYFFSNSKPKAVLQRGDTAFKEFPLIQKTVLSHNSAIYRFGLPRPSHVLGLPIGQHVSLSANIGGKEVLRSYTPTSSDLYDKGYFDILIKTYPQGNISKYVSELAIGDTMKVRGPKGNFVYNHGLVESFGMVCGGTGITPMYQILRHIAADPADNTKVNLVYANVNHDDILLKKELDAIAAENDNIKIHYVLNNAPEDWTGSVGFVTKEILEKHCPPPGPNTKLLLCGPPPMISALKKASVELGYEKARPVSKLEDQVFAF

SEQ ID NO: 8046 - DNA, 969 bp, Saccharomyces cerevisiae; identical to SEQ ID NO: 7974
  CDS (115)..(969)

SEQ ID NO: 8047 - protein, 284 aa, Saccharomyces cerevisiae
MAIDAQKLVVVIVIVVVPLLFKFIIGPKTKPVLDPKRNDFQSFPLVEKTILTHNTSMYKFGLPHADDVLGLPIGQHIVIKANINGKDITRSYTPTSLDGDTKGNFELLVKSYPTGNVSKMIGELKIGDSIQIKGPRGNYHYERNCRSHLGMIAGGTGIAPMYQIMKAIAMDPHDTTKVSLVFGNVHEEDILLKKELEALVAMKPSQFKIVYYLDSPDREDWTGGVGYITKDVIKEHLPAATMDNVQILICGPPAMVASVRRSTVDLGFRRSKPLSKMEDQVFVF

SEQ ID NO: 8048 - DNA, 936 bp, Oryza sativa
  CDS (1)..(936)
atggcggcgctgctgcttcgtaggctcgccgggacccaccgcggccgcgtgcctctggccgccgccgccgccgtcaccggtggagcggcgctcttctgcgcctcgtctcccccaaccatcgcgctcatggaggagaagggcgaggatgccgctgctaaagttgcgcttaacccagacaagtggctagagttcaagctccaggagaaggcaacagttagccacaattcacaattatttagattttcgtttgacccatctactaagttgggtcttgatgttgcttcatgtctcataacaagggctccaataggagaggaagtggagggaggaagaaaatttgtcattcgcccgtacacacctatctctgatccagattctaaaggatattttgacctgctaatcaaggtttatcctgatgggaaaatgagtcagtatttcgcaagtctgaaaccaggagatgttgttgaggtcaaagggcccattgaaaagctcagatatagcccaaatatgaagaaacaaattggcatgatcgctggtgggactggcataacaccaatgctgcaggttgtcagggctatcctaaaaaaccctgatgacaacactcaggtttccttaatttatgccaatgtgtcaccagatgatatcttgctgaaaagggaattagatagacttgccagtagctatcctaatttcaaggtattctacacggtggacaaaccatcaaatgattggaggggtggtgttggctacatatccaaggacattgccttgaaaggtttgccacggccaggggaggattctctgatccttgtttgtggtcctccaggtatgatgaatcatatatccggtgacaaggcaaaggatagatcgcagggcgagctcaccggcattctgaaagagttaggatacactgcagagatggtatacaagttctga

SEQ ID NO: 8049 - protein, 311 aa, Oryza sativa
MAALLLRRLAGTHRGRVPLAAAAAVTGGAALFCASSPPTIALMEEKGEDAAAKVALNPDKWLEFKLQEKATVSHNSQLFRFSFDPSTKLGLDVASCLITRAPIGEEVEGGRKFVIRPYTPISDPDSKGYFDLLIKVYPDGKMSQYFASLKPGDVVEVKGPIEKLRYSPNMKKQIGMIAGGTGITPMLQVVRAILKNPDDNTQVSLIYANVSPDDILLKRELDRLASSYPNFKVFYTVDKPSNDWRGGVGYISKDIALKGLPRPGEDSLILVCGPPGMMNHISGDKAKDRSQGELTGILKELGYTAEMVYKF

SEQ ID NO: 8050 - DNA, 840 bp, Oryza sativa
  CDS (1)..(840)
atggatctcctgcacggggagagcgtccagaccacggtggccatcgccgtcgccgtcgtcgcggtcgccgcgggcggcgccttcctcctcctccggtccaggaagcccaagggctgtttggatcctgagaacttcaagaagtttaaacttgtggaaaagaagcaaataagtcataacgtggccagattcaaatttgctcttccaactccaacctctgtattgggccttccaattggtcagcatatcagttgcagaggacaagatgctacaggcgaagaagtaatcaaaccttatacccctactacattggattctgatctagggcattttgagcttgttattaagatgtaccctcaaggaagaatgtcacaccatttccgtgaaatgaaagttggtgattatatgtctgtgaagggacctaagggtcgtttcagataccaagttgggcaagtgagagcttttggaatgctagctggtggatcaggcatcactcccatgttccaagttgcaagggcaattcttgagaaccctaatgatatcacaaaagttcatttagtctatgcaaatgtcacgcatgacgacattcttctgaaggaagaactggacaacatggccaaaacctaccctgatcgctttaagatctactatgtcttgaatcagcctcctgaagtctggaacggtggcgttgggtttgtgtcacaggacatgattaaagctcatttgccagcacctgccgaggacattcaaatcttgaggtgtggtcctcctccgatgaacaaggcaatggctgcgcaccttgatgagctcgggtacaccaaggagatgcagttccagttctaa

SEQ ID NO: 8051 - protein, 279 aa, Oryza sativa
MDLLHGESVQTTVAIAVAVVAVAAGGAFLLLRSRKPKGCLDPENFKKFKLVEKKQISHNVARFKFALPTPTSVLGLPIGQHISCRGQDATGEEVIKPYTPTTLDSDLGHFELVIKMYPQGRMSHHFREMKVGDYMSVKGPKGRFRYQVGQVRAFGMLAGGSGITPMFQVARAILENPNDITKVHLVYANVTHDDILLKEELDNMAKTYPDRFKIYYVLNQPPEVWNGGVGFVSQDMIKAHLPAPAEDIQILRCGPPPMNKAMAAHLDELGYTKEMQFQF

SEQ ID NO: 8052 - DNA, 849 bp, Oryza sativa
  CDS (1)..(849)
atggagttcctgcaggggcagagcacggagaccgccgtggccgtggcggtggccgtcgtcgccgtggccgccggcgccgccttcctcctcctcctcctccgcagcagcaagaagcccaagggctgcttggaccctgagaacttcaaggagtttaagcttgtggagaagaggcagatcagtcataatgtggccaagttcagatttgctctaccaacccctgcttctgtgctggggcttccaattggccaacatatcagttgcagagggcaggatgctactggcgaggaagtaatcaagccttatactccaactacgctggattctgatcttggacggtttgagcttgttattaagatgtatccccaaggaagaatgtctcatcattttcatgagatgaaagttggtgactatttatctgtgagaggacctaagggtcgcttcaaataccaacctgggcaagtaagagcatttggaatgttagctggaggatcaggcattaccccaatgttccaagtcacaagagcaattcttgaaaacccaagtgacaatacgaaagtgcacttaatctatgccaatgtcacatatgatgacattcttctaaaggaagaattggatagtatggttgaaacctatcccgatcgcttcaagatatactatgtattaaatcagcctccagaaatctggaatggtggtgttgggtttgtgtcaatggaaatgatccaaacccattgcccggcacctgctgctgacattcagatattgagatgcggacctcctcccatgaacaaagccatggctgaacacctggagaatcttggctacacgaaggaaatgcagttccaattctaa

SEQ ID NO: 8053 - protein, 282 aa, Oryza sativa
MEFLQGQSTETAVAVAVAVVAVAAGAAFLLLLLRSSKKPKGCLDPENFKEFKLVEKRQISHNVAKFRFALPTPASVLGLPIGQHISCRGQDATGEEVIKPYTPTTLDSDLGRFELVIKMYPQGRMSHHFHEMKVGDYLSVRGPKGRFKYQPGQVRAFGMLAGGSGITPMFQVTRAILENPSDNTKVHLIYANVTYDDILLKEELDSMVETYPDRFKIYYVLNQPPEIWNGGVGFVSMEMIQTHCPAPAADIQILRCGPPPMNKAMAEHLENLGYTKEMQFQF

SEQ ID NO: 8054 - DNA, 846 bp, Brassica napus
  CDS (1)..(846)
atggatacagagttcctccgaaccctcgatcgccagattctcttgggcgtcttcgtcgctttcgtcgcagttggtgctggtgctgcttactatctctcttcctccaaaaaacgcagagggtgtttggatccggagaacttcaaggagttcaagcttgttaagaagcaacaacttagtcacaatgtggctaaattcgtatttgagcttcctacttcttcctccgtcttgggtcttcccattggtcaacacatcagctgcaggggaaaggatgctcaaggagaggatgttattaagccctacactcccacaaccttagattctgaccttggacgttttgaacttgttattaagatgtatccgcaaggaaggatgtctcatcatttcagggagatgcgtgttggagaccatcttgctgttaagggaccaaagggaaggttcaagtatcagccaggtcagtttagggcatttggaatgcttgctggaggctcaggcatcactcccatgttccaagtggcaagagcgattcttgaaaacccaacagacaagacaaaggtgcacctcatttacgccaatgtcacatacgatgacattctcttaaaggaagaattggagagtcttacagccaattacccagatcaattcaaaatctactatgttttgaaccagcctccggagacatgggatggtggtgttggatttgtatcaaaggatatgatccaggctcattgccctgcacctgcatccgatattcaggtcttgagatgtggaccaccaccaatgaacaaggccatggctgcaaaccttgaagctcttggttactctccagagatgcagttccagttctga

SEQ ID NO: 8055 - protein, 281 aa, Brassica napus
MDTEFLRTLDRQILLGVFVAFVAVGAGAAYYLSSSKKRRGCLDPENFKEFKLVKKQQLSHNVAKFVFELPTSSSVLGLPIGQHISCRGKDAQGEDVIKPYTPTTLDSDLGRFELVIKMYPQGRMSHHFREMRVGDHLAVKGPKGRFKYQPGQFRAFGMLAGGSGITPMFQVARAILENPTDKTKVHLIYANVTYDDILLKEELESLTANYPDQFKIYYVLNQPPETWDGGVGFVSKDMIQAHCPAPASDIQVLRCGPPPMNKAMAANLEALGYSPEMQFQF

SEQ ID NO: 8056 - DNA, 852 bp, Brassica napus
  CDS (1)..(852)
atggatacagagttcctccaaaacctcgatcgccagattctcttgggcgtcttcgtcgctttcgtcgcagttggtgctggtgctggtgctgcttactatctctcttcctccaaaaaacgcagagggtgtttggatccggagaacttcaaggagttcaagcttgttacaaaggaacaacttagtcacaatgtggctaaatttgtatttgagcttccaacttctacctccgtcttgggtcttcccattggtcaacacatcagctgcaggggaaaggatgctcaaggagaggatgttattaagccctacactcccacaaccttagattctgaccttggacgttttgaacttgttattaagatgtatccgcaaggaaggatgtctcatcatttcagggagatgcgtgttggagaccatcttgctgttaagggaccaaagggaaggttcaagtatcagccaggtcagtttagggcatttggaatgcttgctggaggttcaggcatcactcccatgttccaagttgcaagagcgattcttgaaaacccaacagacaagacaaaggtgcacctcatttatgctaatgtcacatacgatgacattctcttaaaggaagagttggagagtcttacctccaattacccagatcaattcaaaatctactatgttttgaaccagcctccggagacatgggatggtggtgttggatttgtatcaaaggatatgatccaggctcattgccctgcacctgcatccgatattcaggtcctaagatgtggaccacctcccatgaacaaggccatggctgcaaaccttgaagctcttggttactctccagagatgcagttccagttctga

SEQ ID NO: 8057 - protein, 283 aa, Brassica napus
MDTEFLQNLDRQILLGVFVAFVAVGAGAGAAYYLSSSKKRRGCLDPENFKEFKLVTKEQLSHNVAKFVFELPTSTSVLGLPIGQHISCRGKDAQGEDVIKPYTPTTLDSDLGRFELVIKMYPQGRMSHHFREMRVGDHLAVKGPKGRFKYQPGQFRAFGMLAGGSGITPMFQVARAILENPTDKTKVHLIYANVTYDDILLKEELESLTSNYPDQFKIYYVLNQPPETWDGGVGFVSKDMIQAHCPAPASDIQVLRCGPPPMNKAMAANLEALGYSPEMQFQF

SEQ ID NO: 8058 - DNA, 990 bp, Brassica napus
  CDS (1)..(990)
atggcgacctccttcttccgacgactcgctaggtcagctccgatcgcggcattccccgccgcactccgatcgcaaatcaaatctggtcatggtactttccgattctccgccggcgcgatcgcggcactttccggcggattctcctgttactacctcacctccggcaacaatctggcgtatctggatcaagctaaggaagagactggacccaaaacagctctgaaccctgacaaatggctcgagttcaagcttcaggacactgctacagttagccacaacaccaagttgttcaggttctcatttgacccctcagccaatttgggtctgcatgttgcttcttgtctcctcacaagggctcctttaggctacaatgcggaagggaaaacgaaatatgtcgttagaccttacactcctatatcagacccagaggctaagggctatttcgatctactgattaaggtatacccagatgggaaaatgagtcagcattttgccagcttaaaaccgggggatgtgttggaagtgaaaggacccattgagaagttcaaatattcgcctaatatgaagaaacatattggcatgattgctggtggaagtgggattactccaatgcttcaggtgattgataccattgtgaagaatcctgaggacaacacaaagataacattactttatgccaatgtttctccggatgatatacttctcaagcaaaagctcgattcacttcaggcaaaccacccaaatctgaaggtattctatactgttgacaatcctactaaaaattggaaaggaggagtaggttacgtttcaaaggatatggctctgaaaggcttacctcttcctgctgacgatacacttatcctcgtgtgtggtcctcctgggatgatggagcatgtatccggaggcaaagctccagactggtcacaaggagaggttaagggaatactcaaggaactcggattcacagagcaaatggttttcaaattctga

SEQ ID NO: 8059 - protein, 329 aa, Brassica napus
MATSFFRRLARSAPIAAFPAALRSQIKSGHGTFRFSAGAIAALSGGFSCYYLTSGNNLAYLDQAKEETGPKTALNPDKWLEFKLQDTATVSHNTKLFRFSFDPSANLGLHVASCLLTRAPLGYNAEGKTKYVVRPYTPISDPEAKGYFDLLIKVYPDGKMSQHFASLKPGDVLEVKGPIEKFKYSPNMKKHIGMIAGGSGITPMLQVIDTIVKNPEDNTKITLLYANVSPDDILLKQKLDSLQANHPNLKVFYTVDNPTKNWKGGVGYVSKDMALKGLPLPADDTLILVCGPPGMMEHVSGGKAPDWSQGEVKGILKELGFTEQMVFKF

SEQ ID NO: 8060 - DNA, 894 bp, Glycine max
  CDS (1)..(894)
atgttggaactaccattcaacatggcacttcggtttcccaatttggatttcaagtctttaccctttgctgagaacctcaacactgaattgctaggtggcgtagttgctcttgttgccgttggctttacggttgcatatatttattatcgcacaaaacaccccaaaggaagcttggacccgaaaaatttcaaagaatttaaactcataaagaagactcagctcagccacaacgttgcaagattcagatttgcccttcctactccttcttcagtattaggccttcctgttggaaaaaacatacttgctagggggaaagatagccaaggagaggaagttatgagatcatatactccaatcacgttggattcagatattggctacttcgagttggttgtgaagatgtacccgaatggaaagatgtcccaccattttagacaaatgaaggaaggtgattacttggccgtgaggggccccaagggacgtttcagttacaagcctggccaggctagggcatttggaatgattgctgggggttcaggcataactccaatgtttcagctcataagagccattctagaaaaccctaaggacaaaacgaaggtgaaccttgtttacgccaatgtaacagtggacgacattctgttaaaagaagaactagataattttacaaacaaatttcctcaaaggtttgaagtctatcatgttcttaataagcctcctgaacaatggaatggtggcattggatttatatcgaaggagattattaaatcacattgtcctgaaccagcccacgatattcagatacttaggtgtggtccaccacctatgaataaagccatggctactcatcttgacgcacttggctacacatcaaacatgcagttcgagttctaa

SEQ ID NO: 8061 - protein, 297 aa, Glycine max
MLELPFNMALRFPNLDFKSLPFAENLNTELLGGVVALVAVGFTVAYIYYRTKHPKGSLDPKNFKEFKLIKKTQLSHNVARFRFALPTPSSVLGLPVGKNILARGKDSQGEEVMRSYTPITLDSDIGYFELVVKMYPNGKMSHHFRQMKEGDYLAVRGPKGRFSYKPGQARAFGMIAGGSGITPMFQLIRAILENPKDKTKVNLVYANVTVDDILLKEELDNFTNKFPQRFEVYHVLNKPPEQWNGGIGFISKEIIKSHCPEPAHDIQILRCGPPPMNKAMATHLDALGYTSNMQFEF

SEQ ID NO: 8062 - DNA, 894 bp, Glycine max
  CDS (1)..(894)
atgttggaactaccattcaacatggcacttcggtttcccaatttggatttcaagtctttaccctttgctgagaacctcaacactgaattgctaggtggcgtagttgctcttgttgccgttggctttacggttgcatatatttattatcgcacaaaacaccccaaaggaagcttggacccgaaaaatttcaaagaatttaaactcataaagaagactcagctcagccacaacgttgcaagattcagatttgcccttcctactccttcttcagtattaggccttcctgttggaaaaaacatacttgctagggggaaagatagccaaggagaggaagttatgagatcatatactccaatcacgttggattcagatattggctacttcgagttggttgtgaagatgtacccgaatggaaagatgtcccaccattttagacaaatgaaggaaggtgattacttggccgtgaggggccccaagggacgtttcagttacaagcctggccaggctagggcatttggaatgattgctgggggctcaggcataactccaatgtttcagctcataagagccattctagaaaaccctaaggacaaaacaaaggtgaaccttgtttacgccaatgtaacagtggacgacattctgttaaaagaagaactagataactttacaaacaaatttcctcaaagatttgaagtctaccatgttcttaataagcctcctgaacaatggaatggtggcattggatttatatcgaaggagattattaaatcacattgtcctgaaccagcccaagatattcagatacttaggtgtggtccaccacctatgaataaagccatggctactcatcttgacgcacttggctacacatctaacatgcagttcgagttctaa

SEQ ID NO: 8063 - protein, 297 aa, Glycine max
MLELPFNMALRFPNLDFKSLPFAENLNTELLGGVVALVAVGFTVAYIYYRTKHPKGSLDPKNFKEFKLIKKTQLSHNVARFRFALPTPSSVLGLPVGKNILARGKDSQGEEVMRSYTPITLDSDIGYFELVVKMYPNGKMSHHFRQMKEGDYLAVRGPKGRFSYKPGQARAFGMIAGGSGITPMFQLIRAILENPKDKTKVNLVYANVTVDDILLKEELDNFTNKFPQRFEVYHVLNKPPEQWNGGIGFISKEIIKSHCPEPAQDIQILRCGPPPMNKAMATHLDALGYTSNMQFEF

SEQ ID NO: 8064 - DNA, 837 bp, Glycine max
  CDS (1)..(837)
atggaattttcgcagagtcacagggtagagatgataagcatggcagttgctcttgttgccattgttggtggcaccgcttactattactacgtcaccaagaagccaaaagggtgcttggatcctgagaacttcaaagaatttaaacttgttaaacgcactcaactcagccataatgttgccacgttccgatttgatcttcctactcctaagtcagtgttgggacttcctattggacaacatatcagctgcagagggaaggatagtcttggtgaagaagttgtgaaaccatatactcctacaacattggatactgatgttggatactttgaattggttgtgaagatgtatccacaaggacggatgtctcatcactttagggagatacgtgaaggtgattacatggctgtgaagggaccaaagggacgttttaagtaccagcccaaccaagtaagagctttgggtatgattgctggtggcactggcatcaccccaatgtttcaagttacaagagctatattagaaaaccaacaggacaaaaccaacataaatttgatatatgccaatgtcacatttgatgacattcttttgaaggaagagctggatgcctttgccattaagttccctaatcaattcaaagtttactatgttctaaatcagccaccagaaatatgggacggtggtgttggattcgtcactaaggaaatgatccaaacagatttccctgcaccagcatcagatattaagatattaaggtgtggaccacctcccatgaacaaggctatggctgctaatcttgaagctcttggatacagtccccaaatgcagtttcagttttaa

SEQ ID NO: 8065 - protein, 278 aa, Glycine max
MEFSQSHRVEMISMAVALVAIVGGTAYYYYVTKKPKGCLDPENFKEFKLVKRTQLSHNVATFRFDLPTPKSVLGLPIGQHISCRGKDSLGEEVVKPYTPTTLDTDVGYFELVVKMYPQGRMSHHFREIREGDYMAVKGPKGRFKYQPNQVRALGMIAGGTGITPMFQVTRAILENQQDKTNINLIYANVTFDDILLKEELDAFAIKFPNQFKVYYVLNQPPEIWDGGVGFVTKEMIQTDFPAPASDIKILRCGPPPMNKAMAANLEALGYSPQMQFQF

SEQ ID NO: 8066 - DNA, 873 bp, Glycine max
  CDS (1)..(873)
atggcacttcggttccccaagttggatttcaagtcttttccctttactgagaacctcaaccctgaattgctaggtcacgtagttgctcttgttgccgttggctttacggctgcttatatttactatcgcgcaaaacaccccaaaggaagcttggaccccaaaaatttcaaggaatttaaactcataaagaagactcagctcagccataacgttgcaagattcaaatttgcccttcctactccttcttcggtattgggccttcctgttggaaaaaacatacttgctaggggaaaagatagccaaggagaggaagttatgagatcatatactccaatcacgttggattcaaatattggctacttcgagttggttgtgaagatgtacccgaatggaaagatgtcccaccattttagacaaatgaaggaaggtgatttcttggccgtgaggggccccaagggacgtttcacttacaaacctggccaagttagggcatttggaatgattgctgggggctcaggcataactccaatgtttcagctcataagagccattcttgaaaaccctaaggacaaaacaaaggtgcaccttgtttacgccaatgtaacagtggacgacattctgttaaaggaagaactagataactttgcaaacaaatttgctcaaagatttgaagtctaccatgttcttaataagcctcctgaacaatggaatggtggcattggatttatatcgaaggagattattaaatcacattgtcctgaaccagcccaagatattcagatacttaggtgtggtccaccacctatgaataaagccatggctactcatcttgacgcacttggctacacatctaacatgcagttcgagttctaa

SEQ ID NO: 8067 - protein, 290 aa, Glycine max
MALRFPKLDFKSFPFTENLNPELLGHVVALVAVGFTAAYIYYRAKHPKGSLDPKNFKEFKLIKKTQLSHNVARFKFALPTPSSVLGLPVGKNILARGKDSQGEEVMRSYTPITLDSNIGYFELVVKMYPNGKMSHHFRQMKEGDFLAVRGPKGRFTYKPGQVRAFGMIAGGSGITPMFQLIRAILENPKDKTKVHLVYANVTVDDILLKEELDNFANKFAQRFEVYHVLNKPPEQWNGGIGFISKEIIKSHCPEPAQDIQILRCGPPPMNKAMATHLDALGYTSNMQFEF

SEQ ID NO: 8068 - DNA, 837 bp, Glycine max
  CDS (1)..(837)
atggatttcttgcaagcacaagaaaatcagatacttgtgggtgtggccgtggccgttgtagccattgggcttggtgcagtatatctctattcatccaagaagaccaaaggttgcttggacccagagaactttaaggcattcaaacttgttaagcgtgcacagctgagccataatgttgcaaagttcacatttgcactcccaacacctacatctgttttgggtcttccaattgggcaacacataagttgcaggggtaaagatgctcaaggtgaagaggttatcaaaccatatactcctactactttggattccgatgttggacattttgaactagttattaagatgtacccacaaggaaggatgtcacaccatttccgtgagatgcgtgttggtgactacctttccgtgaaaggacctaagggacgtttcaagtaccaacctggcgaggttagggcttttgggatgcttgctggagggtctggaatcaccccaatgttccaagttgccagagctatattagaaaaccctaatgacaggaccaaagtacatcttatctatgccaatgttacgtatgaggacattcttttgaaggaagagctggacggtcttgcttctaactatccagatcgattcaaaatatactatgtgttaaatcagcctcctgaggtatgggatggtggtgaaggatttgtgtcaaaggagatgattcaaacacattgccctgctccagcacaagatattaagatattgagatgtggccccccacctatgaacaaggccatggctgctcaccttgaagcccttggatatgcttctgagatgcagttccagttctga

SEQ ID NO: 8069 - protein, 278 aa, Glycine max
MDFLQAQENQILVGVAVAVVAIGLGAVYLYSSKKTKGCLDPENFKAFKLVKRAQLSHNVAKFTFALPTPTSVLGLPIGQHISCRGKDAQGEEVIKPYTPTTLDSDVGHFELVIKMYPQGRMSHHFREMRVGDYLSVKGPKGRFKYQPGEVRAFGMLAGGSGITPMFQVARAILENPNDRTKVHLIYANVTYEDILLKEELDGLASNYPDRFKIYYVLNQPPEVWDGGEGFVSKEMIQTHCPAPAQDIKILRCGPPPMNKAMAAHLEALGYASEMQFQF

SEQ ID NO: 8070 - DNA, 933 bp, Hordeum vulgare
  CDS (1)..(933)
atggcggctctgctgatgcgtaggctcgccgggtcctaccgcggccgcgcgccgctggccgccgccgccgccgcgggcggggccgcgctcttctacgcctcgtcgaaccccaccatcgcgcacatggaggagaagggggaggacgccgccgccaaagttgctcttaaccccgagaaatggttagaattcaagctccaggagaaggcaacagttagtcatgattcagagctattcagattttcgtttgacccatctactaagctgggcctggatgttgcctcatgtctcgtaacaagggcccccataggtcaggaagtggagggaagaagaaaatacgttattcgcccgtacacgcctatctctgacccagattctaaaggacacttcgacctattaatcaaggtttatcctgatgggaaaatgagtcagcattttgctagtttgaagccaggagatgttctcgaagtcaaagggcccattgaaaagctcagatatagcccaaatatgaaaagacaaattggcatgattgctggtggtactggcataacaccaatgctgcaagttgttagggccatcctgaaaaaccctgatgataacactcaggtttccttgatttacgccaatgtgtcaccagatgatatcttgctgaaaagggagttagatagacttgccagcagctatcctaatttcaaggtattttatacagttgataaaccatcaagtgactggaggggtggtgttggctacatatcaaaggacatggttttgaaaggtttgccaggcccaggggaggattctcttattcttgtttgtggtcctcctggaatgatgaatcacatatctggagataaggcaaaggattattcacaaggcgaggtcactggccttctcaaagatttagggtacacgtcacagatggtatacaaattttag

SEQ ID NO: 8071 - protein, 310 aa, Hordeum vulgare
MAALLMRRLAGSYRGRAPLAAAAAAGGAALFYASSNPTIAHMEEKGEDAAAKVALNPEKWLEFKLQEKATVSHDSELFRFSFDPSTKLGLDVASCLVTRAPIGQEVEGRRKYVIRPYTPISDPDSKGHFDLLIKVYPDGKMSQHFASLKPGDVLEVKGPIEKLRYSPNMKRQIGMIAGGTGITPMLQVVRAILKNPDDNTQVSLIYANVSPDDILLKRELDRLASSYPNFKVFYTVDKPSSDWRGGVGYISKDMVLKGLPGPGEDSLILVCGPPGMMNHISGDKAKDYSQGEVTGLLKDLGYTSQMVYKF

SEQ ID NO: 8072 - DNA, 840 bp, Hordeum vulgare
  CDS (1)..(840)
atggagttcctgcatgggcagagcacggagaccacggtggccgtcgcggtggccgtcgtcgccgtggccgccggcgccggattcctcctcctccgcagcaagaaacccaagggctgcttggatgccgagaatttcaaagagtttaaacttgtgcagaagagacagatcagtcataacgtggccaagttcaaatttgctctcccgacacctacttctgtgttgggccttccaattggccaacatataagctgcagagggcaggatgctactggtgaggaagtaatcaagccttacactccgactacactggattctgatattggatactttgagcttgttataaaaatgtatccccaaggaagaatgtctcatcattttcgtgagatgaaagttggtgactacatgtctgtgaaggggccaaagggccgtttcaagtaccagcctggtcaagtgagagcatttggaatgatagctggaggatcaggcattacgccaatgttccaagtcacaagggcaattcttgagaacccaagcgacaatacaaaaattcacttgatctacgctaatgtcacatatgacgacatccttctgctggaagaactagacaatatggctaaaaactatcctgatcgcttcaagatctactatgtcttgaatcagccacctgaagtctgggatggtggtgttgggtttgtgtcaaaggaaatgatccaagctcactgcccagcgcctgccgccgacattcagatattgagatgtggacctcctccaatgaacaaagccatggctgcaaacctagacgaccttggctacaccaaggagatgcagttccagttctaa

SEQ ID NO: 8073 - protein, 279 aa, Hordeum vulgare
MEFLHGQSTETTVAVAVAVVAVAAGAGFLLLRSKKPKGCLDAENFKEFKLVQKRQISHNVAKFKFALPTPTSVLGLPIGQHISCRGQDATGEEVIKPYTPTTLDSDIGYFELVIKMYPQGRMSHHFREMKVGDYMSVKGPKGRFKYQPGQVRAFGMIAGGSGITPMFQVTRAILENPSDNTKIHLIYANVTYDDILLLEELDNMAKNYPDRFKIYYVLNQPPEVWDGGVGFVSKEMIQAHCPAPAADIQILRCGPPPMNKAMAANLDDLGYTKEMQFQF

SEQ ID NO: 8074 - DNA, 840 bp, Triticum aestivum
  CDS (1)..(840)
atggatttcctgcaggggcggagcgtcgagaccatggtggccgtcgccgtcgcggtcgtcgccgtcgccgtgggcggcgcactcctcctccgccgatccaagaggcccaagggctgcttggatcctgagaacttcaagaagtttaaacttgtggaaaagacacaaataagccataatgttgccaaattccgatttgctcttccaacccctacctctgtgttaggccttccaattggtcaacatatcagttgcagaggtcaagatgctacaggtgaagaagtaatcaagccttacacacctactacattggattctgatctcggaaattttcagcttgttataaagatgtaccctcaaggaagaatgtcgcatcacttccgtgaaatgaaagttggtgattatatgtctgtgaagggacctaagggtcgtttcaagtaccaagtaggacaagtgagagctttcggaatgctggctggtggatctggcattactccgatgttccaagttgcaagggcaattctcgagaaccctaatgacaaaacgaaggttcatctagtctatgcaaatgtcacacctgaagacattcttctgaaggaagagctggacagcctggccgaagaatatcctgaccgcttcaagatcttctacgtgttgaatcagcctcctgaagtctggaatggtggtgttggctttgtgtcccaggacatgattaagactcactgtccagcacctgctgaggatatccagatcttgagatgcggccctcctccgatgaacaaggcgatggctgcacaccttgaggagctcggatacacaaaggagatgcagttccagttctaa

SEQ ID NO: 8075 - protein, 279 aa, Triticum aestivum
MDFLQGRSVETMVAVAVAVVAVAVGGALLLRRSKRPKGCLDPENFKKFKLVEKTQISHNVAKFRFALPTPTSVLGLPIGQHISCRGQDATGEEVIKPYTPTTLDSDLGNFQLVIKMYPQGRMSHHFREMKVGDYMSVKGPKGRFKYQVGQVRAFGMLAGGSGITPMFQVARAILENPNDKTKVHLVYANVTPEDILLKEELDSLAEEYPDRFKIFYVLNQPPEVWNGGVGFVSQDMIKTHCPAPAEDIQILRCGPPPMNKAMAAHLEELGYTKEMQFQF

SEQ ID NO: 8076 - DNA, 840 bp, Triticum aestivum
  CDS (1)..(840)
atggagttcctgcaggggcagagcacggagaccacggtggccgtcgcggtcgccgtcgtcgccgtggccgccggcgccggattcctcctcctccgcagcaagaaacccaagggctgcttggatgctgagaatttcaaagagtttaaactcgtgcagaagagacagatcagtcataatgtggccaagttcaaatttgctctcccgacacctacttcagtgttgggccttccaattggccaacatataagctgcagagggcaggatgctactggtgaggaagtaatcaagccttatactcctactacactggattctgatattggatactttgagcttgttataaagatgtatccccaaggaagaatgtctcatcattttcgtgagatgaaggttggcgactacatgtctgtgaaggggccaaagggccgtttcaagtaccagcctgggcaagtgagagcatttggaatgatagctggaggatcaggcattacaccaatgttccaagtcacaagggcaattcttgagaacccaaacgacaatacaaaagttcacttgatctacgctaatgtcacatatgacgacattcttctgctggaagaactggacaatatggctaaaaactatcctgatcgcttcaagatctactatgtcttgaatcagccacctgaagtctgggatggtggtgttgggtttgtgtcaaaggaaatgatccaagctcactgcccagcgcctgctgccgacattcaggtattgagatgcggacctcctccgatgaacaaagccatggctgcaaacctggatgaccttggctacaccaaggagatgcagttccagttctag

SEQ ID NO: 8077 - protein, 279 aa, Triticum aestivum
MEFLQGQSTETTVAVAVAVVAVAAGAGFLLLRSKKPKGCLDAENFKEFKLVQKRQISHNVAKFKFALPTPTSVLGLPIGQHISCRGQDATGEEVIKPYTPTTLDSDIGYFELVIKMYPQGRMSHHFREMKVGDYMSVKGPKGRFKYQPGQVRAFGMIAGGSGITPMFQVTRAILENPNDNTKVHLIYANVTYDDILLLEELDNMAKNYPDRFKIYYVLNQPPEVWDGGVGFVSKEMIQAHCPAPAADIQVLRCGPPPMNKAMAANLDDLGYTKEMQFQF

SEQ ID NO: 8078 - DNA, 840 bp, Triticum aestivum
  CDS (1)..(840)
atggatttcctgcaggggcggagcgtcgagaccatggtggccgtcgccgtcgcggtcgtcgccgtcgccgtgggcgccgcactcctcctccgccggtccaagaggcccaagggctgcttggatcctgagaacttcaggaagtttaaacttgtggaaaagacacaaataagccataatgttgccaaattccgatttgctcttccaacccctacctctgtgttaggccttccaattggtcaacatatcagttgcagaggtcaagatgctaccggtgaagaagtaatcaagccttacacacctactacattggattctgatcttggaaattttcagcttgttataaagatgtaccctcaaggaagaatgtcgcatcacttccgtgaaatgaaagttggtgattatatgtctgtaaagggacctaagggtcgtttcaagtaccaagtaggacaagtgagagctttcggaatgctggctggtggatctggcatcactccgatgttccaagttgcaagggcaattctcgagaaccctaatgacaaaacgaaggttcatctagtctatgcaaatgtcacacctgaagacattcttctgaaggaagagctggacagcctggccgaagaatatcctgaccgcttcaagatcttctacgtgttgaatcagcctcctgaagtctggaatggtggtgttggctttgtgtcccaggacatgattaagactcactgtccagcacctgctgaggatatccagatcttgagatgcggccctcctccgatgaacaaggcgatggctgcacaccttgaggagctcggatacacaaaggagatgcagttccaattctaa

SEQ ID NO: 8079 - protein, 279 aa, Triticum aestivum
MDFLQGRSVETMVAVAVAVVAVAVGAALLLRRSKRPKGCLDPENFRKFKLVEKTQISHNVAKFRFALPTPTSVLGLPIGQHISCRGQDATGEEVIKPYTPTTLDSDLGNFQLVIKMYPQGRMSHHFREMKVGDYMSVKGPKGRFKYQVGQVRAFGMLAGGSGITPMFQVARAILENPNDKTKVHLVYANVTPEDILLKEELDSLAEEYPDRFKIFYVLNQPPEVWNGGVGFVSQDMIKTHCPAPAEDIQILRCGPPPMNKAMAAHLEELGYTKEMQFQF

SEQ ID NO: 8080 - DNA, 29 bp, Artificial sequence
  primer
atgtataaatattcttattatataaggcg

SEQ ID NO: 8081 - DNA, 25 bp, Artificial sequence
  primer
ttaaaacacaaacacctggtcttcc

SEQ ID NO: 8082 - protein, 299 aa, Artificial sequence
  consensus sequence
  Variant (2)..(2): Xaa in position 2 is any amino acid
  Variant (4)..(5): Xaa in position 4 to 5 is any amino acid
  Variant (7)..(9): Xaa in position 7 to 9 is any amino acid
  Variant (13)..(17): Xaa in position 13 to 17 is any amino acid
  Variant (19)..(19): Xaa in position 19 is any amino acid
  Variant (22)..(25): Xaa in position 22 to 25 is any amino acid
  Variant (26)..(26): Xaa in position 26 is any or no amino acid
  Variant (31)..(31): Xaa in position 31 is any amino acid
  Variant (36)..(49): Xaa in position 36 to 49 is any amino acid
  Variant (50)..(55): Xaa in position 50 to 55 is any or no amino acid
  Variant (59)..(60): Xaa in position 59 to 60 is any amino acid
  Variant (61)..(61): Xaa in position 61 is any or no amino acid
  Variant (63)..(65): Xaa in position 63 to 65 is any amino acid
  Variant (66)..(66): Xaa in position 66 is any or no amino acid
  Variant (68)..(68): Xaa in position 68 is any amino acid
  Variant (70)..(70): Xaa in position 70 is any amino acid
  Variant (72)..(73): Xaa in position 72 to 73 is any amino acid
  Variant (75)..(75): Xaa in position 75 is any amino acid
  Variant (77)..(78): Xaa in position 77 to 78 is any amino acid
  Variant (79)..(87): Xaa in position 79 to 87 is any or no amino acid
  Variant (89)..(90): Xaa in position 89 to 90 is any amino acid
  Variant (92)..(99): Xaa in position 92 to 99 is any amino acid
  Variant (102)..(106): Xaa in position 102 to 106 is any amino acid
  Variant (109)..(109): Xaa in position 109 is any amino acid
  Variant (111)..(113): Xaa in position 111 to 113 is any amino acid
  Variant (115)..(122): Xaa in position 115 to 122 is any amino acid
  Variant (123)..(138): Xaa in position 123 to 138 is any or no amino acid
  Variant (141)..(141): Xaa in position 141 is any amino acid
  Variant (145)..(145): Xaa in position 145 is any amino acid
  Variant (151)..(151): Xaa in position 151 is any amino acid
  Variant (153)..(155): Xaa in position 153 to 155 is any amino acid
  Variant (158)..(162): Xaa in position 158 to 162 is any amino acid
  Variant (163)..(167): Xaa in position 163 to 167 is any or no amino acid
  Variant (169)..(169): Xaa in position 169 is any amino acid
  Variant (171)..(173): Xaa in position 171 to 173 is any amino acid
  Variant (175)..(176): Xaa in position 175 to 176 is any amino acid
  Variant (180)..(182): Xaa in position 180 to 182 is any amino acid
  Variant (188)..(188): Xaa in position 188 is any amino acid
  Variant (192)..(199): Xaa in position 192 to 199 is any amino acid
  Variant (200)..(201): Xaa in position 200 to 201 is any or no amino acid
  Variant (203)..(205): Xaa in position 203 to 205 is any amino acid
  Variant (207)..(207): Xaa in position 207 is any amino acid
  Variant (209)..(210): Xaa in position 209 to 210 is any amino acid
  Variant (212)..(214): Xaa in position 212 to 214 is any amino acid
  Variant (215)..(216): Xaa in position 215 to 216 is any or no amino acid
  Variant (218)..(218): Xaa in position 218 is any amino acid
  Variant (221)..(221): Xaa in position 221 is any amino acid
  Variant (224)..(233): Xaa in position 224 to 233 is any amino acid
  Variant (235)..(235): Xaa in position 235 is any amino acid
  Variant (237)..(242): Xaa in position 237 to 242 is any amino acid
  Variant (243)..(249): Xaa in position 243 to 249 is any or no amino acid
  Variant (251)..(251): Xaa in position 251 is any amino acid
  Variant (258)..(267): Xaa in position 258 to 267 is any amino acid
  Variant (268)..(280): Xaa in position 268 to 280 is any or no amino acid
  Variant (284)..(288): Xaa in position 284 to 288 is any amino acid
  Variant (289)..(296): Xaa in position 289 to 296 is any or no amino acid
  Variant (298)..(298): Xaa in position 298 is any amino acid
FXLXXKXXXSHNXXXXXFXLPXXXXXLGLPXGQHIXXXXXXXXXXXXXXXXXXXXYTPXXXDXXXXGXFXLXXKXYXXXXXXXXXXXGXXSXXXXXXXXGDXXXXXGPXGXXXYXXXXXXXXXXXXXXXXXXXXXXXXGMXAGGXGITPMXQXXXAIXXXXXXXXXXDXTXXXLXXANVXXXDILLKXELDXXXXXXXXXXFXXXYXLXXPXXXXXWXGGXGFXXXXXXXXXXPXPXXXXXXXXXXXXXLXCGPPPMXXXXXXXXXXXXXXXXXXXXXXXLGYXXXXXXXXXXXXXFXF

SEQ ID NO: 8083 - protein, 22 aa, Artificial sequence
  protein pattern
  Variant (3)..(3): Xaa in position 3 is Ile, Leu or Val
  Variant (7)..(7): Xaa in position 7 is Ser or Thr
  Variant (9)..(9): Xaa in position 9 is Ile or Leu
  Variant (10)..(10): Xaa in position 10 is Ala, Ser or Thr
  Variant (12)..(13): Xaa in position 12 to 13 is any amino acid
  Variant (15)..(15): Xaa in position 15 is Ile, Leu or Val
  Variant (16)..(17): Xaa in position 16 to 17 is any amino acid
  Variant (18)..(18): Xaa in position 18 is Ala, Ser or Thr
  Variant (19)..(19): Xaa in position 19 is Ala, Ile or Val
  Variant (20)..(21): Xaa in position 20 to 21 is any amino acid
  Variant (22)..(22): Xaa in position 22 is Asp, Gly or Asn
GMXAGGXGXXPXXQXXXXXXXX

SEQ ID NO: 8084 - protein, 21 aa, Artificial sequence
  protein pattern
  Variant (2)..(2): Xaa in position 2 is any amino acid
  Variant (5)..(5): Xaa in position 5 is any amino acid
  Variant (7)..(7): Xaa in position 7 is Phe or Tyr
  Variant (8)..(8): Xaa in position 8 is Ile or Val
  Variant (9)..(9): Xaa in position 9 is Asn, Ser or Thr
  Variant (10)..(10): Xaa in position 10 is any amino acid
  Variant (11)..(11): Xaa in position 11 is Asp or Glu
  Variant (12)..(17): Xaa in position 12 to 17 is any amino acid
  Variant (19)..(20): Xaa in position 19 to 20 is any amino acid
  Variant (21)..(21): Xaa in position 21 is Ala, Glu, Gly, Ser or Thr
WXGGXGXXXXXXXXXXXPXXX

SEQ ID NO: 8085 - protein, 21 aa, Artificial sequence
  protein pattern
  Variant (2)..(2): Xaa in position 2 is any amino acid
  Variant (3)..(3): Xaa in position 3 is Ile, Leu or Val
  Variant (4)..(4): Xaa in position 4 is any amino acid
  Variant (5)..(5): Xaa in position 5 is Phe or Leu
  Variant (6)..(6): Xaa in position 6 is Ile, Leu or Val
  Variant (7)..(7): Xaa in position 7 is Phe or Tyr
  Variant (8)..(8): Xaa in position 8 is Ala or Gly
  Variant (10)..(12): Xaa in position 10 to 12 is any amino acid
  Variant (13)..(13): Xaa in position 13 is Asp, Glu, Gln, Ser or Thr
  Variant (19)..(19): Xaa in position 19 is any amino acid
  Variant (20)..(20): Xaa in position 20 is Asp, Glu or Lys
TXXXXXXXNXXXXDILLKXXL

SEQ ID NO: 8086 - protein, 20 aa, Artificial sequence
  protein pattern
  Variant (2)..(2): Xaa in position 2 is any amino acid
  Variant (4)..(8): Xaa in position 4 to 8 is any amino acid
  Variant (9)..(9): Xaa in position 9 is Ile, Leu or Val
  Variant (10)..(10): Xaa in position 10 is Ser or Thr
  Variant (11)..(11): Xaa in position 11 is any amino acid
  Variant (12)..(12): Xaa in position 12 is Asp or Asn
  Variant (13)..(13): Xaa in position 13 is Ser, Thr or Val
  Variant (14)..(15): Xaa in position 14 to 15 is any amino acid
  Variant (16)..(16): Xaa in position 16 is Phe or Tyr
  Variant (17)..(17): Xaa in position 17 is any amino acid
  Variant (18)..(18): Xaa in position 18 is Phe or Ile
  Variant (19)..(19): Xaa in position 19 is any amino acid
  Variant (20)..(20): Xaa in position 20 is Phe or Leu
FXLXXXXXXXXXXXXXXXXX

SEQ ID NO: 8087 - protein, 16 aa, Artificial sequence
  protein pattern
  Variant (2)..(2): Xaa in position 2 is any amino acid
  Variant (4)..(4): Xaa in position 4 is Asp, Glu or Gln
  Variant (6)..(6): Xaa in position 6 is Leu or Val
  Variant (7)..(7): Xaa in position 7 is Ile or Val
  Variant (9)..(9): Xaa in position 9 is any amino acid
  Variant (11)..(11): Xaa in position 11 is Glu or Pro
  Variant (12)..(12): Xaa in position 12 is any amino acid
  Variant (14)..(14): Xaa in position 14 is any amino acid
  Variant (15)..(15): Xaa in position 15 is Ile, Met or Val
GXFXLXXKXYXXGXXS

SEQ ID NO: 8088 - protein, 23 aa, Artificial sequence
  protein pattern
  Variant (3)..(3): Xaa in position 3 is any amino acid
  Variant (4)..(4): Xaa in position 4 is Ile, Leu, Met or Val
  Variant (5)..(6): Xaa in position 5 to 6 is any amino acid
  Variant (7)..(7): Xaa in position 7 is Lys or Arg
  Variant (10)..(10): Xaa in position 10 is any amino acid
  Variant (11)..(11): Xaa in position 11 is Glu or Gly
  Variant (12)..(14): Xaa in position 12 to 14 is any amino acid
  Variant (16)..(17): Xaa in position 16 to 17 is any amino acid
  Variant (18)..(18): Xaa in position 18 is Gly or Asn
  Variant (19)..(22): Xaa in position 19 to 22 is any amino acid
  Variant (23)..(23): Xaa in position 23 is Phe, Ile or Leu
GDXXXXXGPXXXXXYXXXXXXXX

SEQ ID NO: 8089 - protein, 12 aa, Artificial sequence
  protein pattern
  Variant (4)..(4): Xaa in position 4 is Ile or Val
  Variant (8)..(8): Xaa in position 8 is Ile, Leu or Val
  Variant (9)..(11): Xaa in position 9 to 11 is any amino acid
  Variant (12)..(12): Xaa in position 12 is Ala, Gly, Thr or Val
GLPXGQHXXXXX

SEQ ID NO: 8090 - DNA, 474 bp, Arabidopsis thaliana
  CDS (1)..(474)
atgtcgcttattccaagcttcttcggcaacaacaggcgaagcaacagcatcttcgacccgttctcactcgacgtttgggatccattcaaggaactgcaattcccgtcgtcgctctccggagaaacatcggcgataacgaacgcacgtgtggactggaaagagacggcggaggcgcacgtgttcaaggccgatctgccggggatgaagaaagaggaggttaaagtggagatagaggacgacagtgtgctcaagatcagtggagagagacacgtggagaaagaggagaagcaggacacgtggcatcgtgtggagaggtcgagcgggcaattctcgaggaagtttaagctgccggagaatgtgaagatggatcaagtcaaggcttccatggagaacggagttctgactgtgacggtgcctaaagtggaagaggctaagaagaaggctcaagttaagtctattgatatctctggctaa

SEQ ID NO: 8091 - protein, 157 aa, Arabidopsis thaliana
MSLIPSFFGNNRRSNSIFDPFSLDVWDPFKELQFPSSLSGETSAITNARVDWKETAEAHVFKADLPGMKKEEVKVEIEDDSVLKISGERHVEKEEKQDTWHRVERSSGQFSRKFKLPENVKMDQVKASMENGVLTVTVPKVEEAKKKAQVKSIDISG

SEQ ID NO: 8092 - DNA, 721 bp, Arabidopsis thaliana
  CDS (63)..(530)
aatcataaaatcgaaattcaattcgtcggaaaattgttcagatttcgaaatcaaccgagaaaatgtcgctgattccaagcttcttcggcaacaacaggcgaatcaacaacaacatattcgatccattctcactcgacgtatgggatccattcaaggaacttcaattcccgtcaccgtcttcgtcggcgatagcaaacggacgtgtggattggaaagagacggcggaggcgcacgtgttcaaggcggatttaccggggatgaagaaagaagaggttaaagtagagattgaggatgatagtgtgcttaagatcagcggagagagacacgttgagaaagaggagaagcaggacacgtggcatcgtgtagagagatcgagtgggggattctcgaggaagtttaggttaccggagaatgtgaagatggatcaagttaaagcttcaatggagaatggtgttttgactgtgactgtgcctaaagtggagactaataagaagaaggctcaagttaagtctattgatatctctggctaagccaatttagcttgatttgagttctctctgggtcttgactttgtgtgtgtgtgtctctgatgattatggttcttcgtttgattgtagttttaaactaataatcaatggaagctagtaacttgtgtgacaagtaaatgtatggtggagaaatgtgtgtatttggattataatagaaatacctattttcatcc

SEQ ID NO: 8093 - protein, 155 aa, Arabidopsis thaliana
MSLIPSFFGNNRRINNNIFDPFSLDVWDPFKELQFPSPSSSAIANGRVDWKETAEAHVFKADLPGMKKEEVKVEIEDDSVLKISGERHVEKEEKQDTWHRVERSSGGFSRKFRLPENVKMDQVKASMENGVLTVTVPKVETNKKKAQVKSIDISG

SEQ ID NO: 8094 - DNA, 462 bp, Arabidopsis thaliana
  CDS (7)..(462)
atgtcgatgattccaagtttcttcaacaacaacagacgaagcaacatctttgatccattctctcttgacgtatgggatccattcaaggaactaacatcatcatcactttctcgtgagaactcagcgatcgtgaacgcacgtgtggactggagagagacgcctgaggcccacgtgtttaaagctgacttgcctggattgaagaaggaggaagttaaagttgagattgaggaggatagtgttttgaagatcagtggagagagacacgtggagaaagaagataagaatgacacgtggcaccgtgtggagagatcgagtggacagtttacgaggaggtttaggttgccggagaatgtgaagatggatcaggttaaggctgcgatggagaatggtgtgttgactgttacggtgcctaaggctgagactaagaaggctgatgttaagtctattcagatctctggttga

SEQ ID NO: 8095 - protein, 151 aa, Arabidopsis thaliana
MIPSFFNNNRRSNIFDPFSLDVWDPFKELTSSSLSRENSAIVNARVDWRETPEAHVFKADLPGLKKEEVKVEIEEDSVLKISGERHVEKEDKNDTWHRVERSSGQFTRRFRLPENVKMDQVKAAMENGVLTVTVPKAETKKADVKSIQISG

SEQ ID NO: 8096 - DNA, 468 bp, Zea mays
  CDS (1)..(468)
atgtcgctcgtgagtcggcgcagcagcaacgtgttggaccccttctccctcgacctctggtgggaccccttcgacatgttccgctccatcgtcccgtcggcggcctcctccgggggttccgagaccgccgccttcgccaacgcccgcgtggactggaaggagacgcccgaggcgcacgtgttcaaggccgacctccccggcgtcaagaaggaggaggtcaaggtcgaggtggaggacggcaacgtgctcgtcatcagcggcaagcgcagcagggaggaggaggacaagaacgacaagtggcaccgcgtcgagcgcagcagcggccagttcgtgcggcgcttccgcctgcctgagaacgccaaggtggacgaggtgaaggcgggcctcgagaacggcgtgctcacggtcaccgtgcctaagacggaggtgaagaagcccgaggtgaaggctatcgagatctctggttga

SEQ ID NO: 8097 - protein, 155 aa, Zea mays
MSLVSRRSSNVLDPFSLDLWWDPFDMFRSIVPSAASSGGSETAAFANARVDWKETPEAHVFKADLPGVKKEEVKVEVEDGNVLVISGKRSREEEDKNDKWHRVERSSGQFVRRFRLPENAKVDEVKAGLENGVLTVTVPKTEVKKPEVKAIEISG

SEQ ID NO: 8098 - DNA, 453 bp, Oryza sativa
  CDS (1)..(453)
atgtcgctagtgcggagcggcaacgtgttggacccgatgtcggtggacttctgggcggacgccgacccgttcggcgccgtgcgctccctcgcggagcggtgccccgtgctcaccaacgtccgcgtcgactggaaggagacgccgacggcgcacgtcttcacggccgacctccccggcgtccggaaggatcaggccaaggtggaggtggaggacggcggcgtgctcgtcatcagcggcgagcgcgccagggaggaggacgtcgacgggaagaacgacgagcggtggcaccacgtggagcgcagcagcggcaagttccagaggcggttccgcctgccgcgcggcgcgcgggtggaccaggtgagcgcgtccatggacaatggggtgctcacggtcaccgtgcccaaggaggagaccaagaagccgcagctgaaggctatccccatctcgggctga

SEQ ID NO: 8099 - protein, 150 aa, Oryza sativa
MSLVRSGNVLDPMSVDFWADADPFGAVRSLAERCPVLTNVRVDWKETPTAHVFTADLPGVRKDQAKVEVEDGGVLVISGERAREEDVDGKNDERWHHVERSSGKFQRRFRLPRGARVDQVSASMDNGVLTVTVPKEETKKPQLKAIPISG

SEQ ID NO: 8100 - DNA, 501 bp, Oryza sativa
  CDS (1)..(501)
atgtctctggtgaagctgtttgatacgttggcgttcgacgcctggaacccgttcagcatctttgggacgacggtggcggcggacgcgtggctggcgagcgacacgtcggcgttcgccaacacgtacatcgagagccgggagacggcggaggcgtacgtgttccgggcggacctgccggcgggggtgaagaaggaggaggtgcgggtggaggtggacgaggggaacgtgctggtgatcaccggcgagcgcagcgtccggcgggaggagaagggccagcggtcgcaccacatcgagcgcagctgcgccaccttcttcggcaggttccacctccccgacgacgccgtcgtcgacctcgtcagggcgtccatggacggcggcatgctcaccgtcaccgtgcccaaggtggtcactgacaagcagcccgccatcgccgccgccgcacccgtccccgccgtcgtcgcacccgctgtcgaggcgaaggcaatcgaagccagcccgtag

SEQ ID NO: 8101 - protein, 166 aa, Oryza sativa
MSLVKLFDTLAFDAWNPFSIFGTTVAADAWLASDTSAFANTYIESRETAEAYVFRADLPAGVKKEEVRVEVDEGNVLVITGERSVRREEKGQRSHHIERSCATFFGRFHLPDDAVVDLVRASMDGGMLTVTVPKVVTDKQPAIAAAAPVPAVVAPAVEAKAIEASP

SEQ ID NO: 8102 - DNA, 450 bp, Oryza sativa
  CDS (1)..(450)
atgtcgctcgtgaggcgcagcaacgtgttcgaccccttcgctgacttctgggaccccttcgacggcgtcttccgctccctcgtcccggcgacctccgaccgcgacaccgccgctttcgccaacgcccgcgtcgactggaaggagacgccggagtcgcacgtcttcaaggccgacctccccggcgtcaagaaggaggaggtgaaggtggaggtggaggagggcaacgtgctggtgatcagcgggcagcgcagcaaggagaaggaggacaagaacgacaagtggcaccgcgtggagcgcagcagcgggcagttcatgcggcggttcaggctgccggagaacgccaaggtggaccaggtgaaggccagcatggagaacggcgtgctcaccgtcaccgtgcccaaggctgaggtcaagaagcccgaggtgaaggccattgagatctctggctga

SEQ ID NO: 8103 - protein, 149 aa, Oryza sativa
MSLVRRSNVFDPFADFWDPFDGVFRSLVPATSDRDTAAFANARVDWKETPESHVFKADLPGVKKEEVKVEVEEGNVLVISGQRSKEKEDKNDKWHRVERSSGQFMRRFRLPENAKVDQVKASMENGVLTVTVPKAEVKKPEVKAIEISG

SEQ ID NO: 8104 - DNA, 453 bp, Oryza sativa
  CDS (1)..(453)
atgtcgctggtgaggcgcagcaacgtgttcgacccattctccctcgacctctgggaccccttcgacagcgtgttccgctccgtcgtcccggccacctccgacaacgacaccgccgccttcgccaacgcccgcatcgactggaaggagacgccggagtcgcacgtcttcaaggccgacctccccggcgtcaagaaggaggaggtgaaggtggaggtggaggaaggcaacgtgctggtgatcagcggccagcgcagcaaggagaaggaggacaagaacgacaagtggcaccgcgtggagcgcagcagcgggcagttcatgcggcggttcaggctgccggagaacgccaaggtggaccaggtgaaggccggactggagaacggcgtgctcactgtcaccgtgcccaaggccgaggtcaagaagcctgaggtgaaggccattgagatctccggttaa

SEQ ID NO: 8105 - protein, 150 aa, Oryza sativa
MSLVRRSNVFDPFSLDLWDPFDSVFRSVVPATSDNDTAAFANARIDWKETPESHVFKADLPGVKKEEVKVEVEEGNVLVISGQRSKEKEDKNDKWHRVERSSGQFMRRFRLPENAKVDQVKAGLENGVLTVTVPKAEVKKPEVKAIEISG

SEQ ID NO: 8106 - DNA, 453 bp, Oryza sativa
  CDS (1)..(453)
atgtcgctggtgaggcgcagcaacgtgttcgaccccttctccctcgacctctgggaccccttcgacagcgtgttccgctccgtcgtcccggccacctccgacaacgacaccgccgccttcgccaacgcccgcatcgactggaaggagacgccggagtcgcacgtcttcaaggccgacctccccggcgtcaagaaggaggaggtgaaggtggaggtggaggaaggcaacgtgctggtgatcagcggccagcgcagcaaggagaaggaggacaagaacgacaagtggcaccgcgtggagcgcagcagcgggcagttcatgcggcggttccggctgccggagaacgccaaggtggaccaggtgaaggccggcatggagaacggcgtgctcaccgtcaccgtgcccaaggccgaggtcaagaagcccgaggtgaaggccattgagatctctggctaa

SEQ ID NO: 8107 - protein, 150 aa, Oryza sativa
MSLVRRSNVFDPFSLDLWDPFDSVFRSVVPATSDNDTAAFANARIDWKETPESHVFKADLPGVKKEEVKVEVEEGNVLVISGQRSKEKEDKNDKWHRVERSSGQFMRRFRLPENAKVDQVKAGMENGVLTVTVPKAEVKKPEVKAIEISG

SEQ ID NO: 8108 - DNA, 534 bp, Oryza sativa
  CDS (1)..(534)
atgtcgatgatcactagcatgctggggcggaagcagaacgcgcagcagaagggcggaggcggcggcgggcgcaccggcggtggcggcggcggcgagatcgagccggtgagcgtggacatcatggagccgttcatggacgcgatctcgctgacggcgttcgcggcggcgccgtcggcggcggcggcggcggcgggcgtgccgtcgacggcgagcatggactggaaggagacggcggcggcgcacgtgttcatggcggacatgcccggggtgcggagggaggaggtgcgggtggaggtggaggaggagaaggtgctcaggatcagcgggcagcgggcgcgcgccgcggaggagaagggcgagcggtggcaccgcgtcgagcggagctccgagcggttcgttcgcaccgtccgcctgccgcccaacgccaacaccgacggcgtccacgccgcgctcgacaacggcgtcctcaccatcaccatccccaaggacaacgacaggaagcctcacgccaggatcatccccatcaccaattaa

SEQ ID NO: 8109 - protein, 177 aa, Oryza sativa
MSMITSMLGRKQNAQQKGGGGGGRTGGGGGGEIEPVSVDIMEPFMDAISLTAFAAAPSAAAAAAGVPSTASMDWKETAAAHVFMADMPGVRREEVRVEVEEEKVLRISGQRARAAEEKGERWHRVERSSERFVRTVRLPPNANTDGVHAALDNGVLTITIPKDNDRKPHARIIPITN

SEQ ID NO: 8110 - DNA, 486 bp, Oryza sativa
  CDS (1)..(486)
atgtcgctgatccgccgcagcaacgtgttcgaccccttctccctcgacctctgggaccccttcgacggcttccccttcggctccggcggcagcagcagcggcagcatcttcccgtccttcccgcgcggcgcctcctccgagaccgcggccttcgccggcgcgcggatcgactggaaggagacgcccgaggcgcacgtgttcaaggcggacgtgccggggctgaagaaggaggaggtcaaggtggaggtggacgacggcaacatcctgcagatcagcggcgagcgcaacaaggagcaggaggagaagacggaccagtggcaccgcgtggagcgcagcagcggcaagttcctccgcaggttccgcctccccgacaacgccaagccggagcagatcaaggcgtccatggagaacggcgtgctcaccgtcacggttcccaaggaggaggccaagaagcccgacgtcaagtccatccagatctccggctag

SEQ ID NO: 8111 - protein, 161 aa, Oryza sativa
MSLIRRSNVFDPFSLDLWDPFDGFPFGSGGSSSGSIFPSFPRGASSETAAFAGARIDWKETPEAHVFKADVPGLKKEEVKVEVDDGNILQISGERNKEQEEKTDQWHRVERSSGKFLRRFRLPDNAKPEQIKASMENGVLTVTVPKEEAKKPDVKSIQISG

SEQ ID NO: 8112 - DNA, 465 bp, Oryza sativa
  CDS (1)..(465)
atgtcgatgatccgccgcagcaacgtgttcgaccccttctccctcgacctctgggaccccttcgacggcttccccttcggctccggcagcggcagcctcttccctcgcgccaactccgacgcggcggccttcgccggcgcgcggatcgactggaaggagacgcccgaggcgcacgtgttcaaggcggacgtgccggggctgaagaaggaggaggtcaaggtggaggttgaggacggcaacgtcctccagatcagcggcgagcgcatcaaggagcaggaggagaagacggacaagtggcaccgcgtggagcgcagcagcggcaagttcctccgcaggttccggctgccggagaacaccaagccggagcagatcaaggcgtccatggagaacggcgtgctcaccgtcaccgtgcccaaggaggagcccaagaagcccgacgtcaagtccatccagatcaccggctag

SEQ ID NO: 8113 - protein, 154 aa, Oryza sativa
MSMIRRSNVFDPFSLDLWDPFDGFPFGSGSGSLFPRANSDAAAFAGARIDWKETPEAHVFKADVPGLKKEEVKVEVEDGNVLQISGERIKEQEEKTDKWHRVERSSGKFLRRFRLPENTKPEQIKASMENGVLTVTVPKEEPKKPDVKSIQITG

SEQ ID NO: 8114 - DNA, 486 bp, Oryza sativa
  CDS (1)..(486)
atgtcgctgatccgccgcagcaacgtgttcgaccccttctccctcgacctctgggaccccttcgacggcttccccttcggctccggcagcagaagcagcggcagcatcttcccgtccttcccccgcggcacctcctccgagaccgcggccttcgccggcgcgcgcatcgactggaaggagacgccggaggcgcacgtgttcaaggcggacgtgccggggctgaagaaggaggaggtcaaggtggaggtggaggacggcaacgtcctccagatcagcggcgagcgcagcaaggagcaggaggagaagacggacaagtggcaccgcgtggagcgcagcagcggcaagttcctccgcaggttccggctgccggagaacaccaagccggagcagatcaaggcgtccatggagaacggcgtgctcaccgtcaccgtgcccaaggaggagcccaagaagcccgacgtcaagtccatccaggttaccggctag

SEQ ID NO: 8115 - protein, 161 aa, Oryza sativa
MSLIRRSNVFDPFSLDLWDPFDGFPFGSGSRSSGSIFPSFPRGTSSETAAFAGARIDWKETPEAHVFKADVPGLKKEEVKVEVEDGNVLQISGERSKEQEEKTDKWHRVERSSGKFLRRFRLPENTKPEQIKASMENGVLTVTVPKEEPKKPDVKSIQVTG

SEQ ID NO: 8116 - DNA, 480 bp, Oryza sativa
  CDS (1)..(480)
atgtcgctgatccgccgcggcaacgcgttcgaccccttctccctcgacctctgggatcccgtcgacggcttccccttcggctccggcggcagcagcagcagcagcggcagcctcttccctcgggccaactccgacgcggcggccttcgccggcgcgcgcatcgactggaaggagacgcccgaggtgcacgtgttcaaggcggacgtgccggggctgaagaaggaggaggtcaaggtggaggtggacgacggcaacatcctgcagatcagcggcgagcgcagcagggagcaggaggagaagtcggacaagtggcaccgcgtggagcgcagcagcggcaagttcctccgcaggttccgcctccccgagaacaccaagccggagcagatcaaggcgtccatggagaatggcgtgctcaccgtcaccgtgcccaaggaagagcccaagaagcccgacgtcaagtccatccagatctccggctag

SEQ ID NO: 8117 - protein, 159 aa, Oryza sativa
MSLIRRGNAFDPFSLDLWDPVDGFPFGSGGSSSSSGSLFPRANSDAAAFAGARIDWKETPEVHVFKADVPGLKKEEVKVEVDDGNILQISGERSREQEEKSDKWHRVERSSGKFLRRFRLPENTKPEQIKASMENGVLTVTVPKEEPKKPDVKSIQISG

SEQ ID NO: 8118 - DNA, 462 bp, Glycine max
  CDS (1)..(462)
atgtctatcatcccaaacttgttcggtggtcgacgaagcaacgtcttcgacccagtttctctggacgtgtgggacccattggaagggtttccgttttccacagccaacgctggcgaaagtagtgccatagccaacactcgcgtggactggaaggagacaccgcaggctcacgtgttcagcgttgaccttcccgggttgaagaaggaggatgtcaaggtcgaagttgaagacggaagggtgctgcagattagtggtgagaaaaccaaagaacaagaacagaaagatgataggtggcaccgcattgaaagaagcactgggaagttcatgaggaggttcaggcttcccgagaatgctaaaatggatcaggtcaaagctgctatggagaatggggtgctgactgttactgtgcccaaggaagaacagaagaagcctcaagtcaagtctattcaaatctctggttaa

SEQ ID NO: 8119 - protein, 153 aa, Glycine max
MSIIPNLFGGRRSNVFDPVSLDVWDPLEGFPFSTANAGESSAIANTRVDWKETPQAHVFSVDLPGLKKEDVKVEVEDGRVLQISGEKTKEQEQKDDRWHRIERSTGKFMRRFRLPENAKMDQVKAAMENGVLTVTVPKEEQKKPQVKSIQISG

SEQ ID NO: 8120 - DNA, 462 bp, Glycine max
  CDS (1)..(462)
atgtctctgattccaagtttcttcggtggccgaaggagcagtgttttcgaccctttctccctcgatgtgtgggaccccttcaaggattttccatttcccagttctctttctgctgaaaattcagcgtttgtgagcacacgagtggattggaaggagacaccagaagcacacgtgttcaaggctgatattccagggctgaagaaggaggaagtgaagctggagattcaagatggcagagttcttcagataagcggagagaggaatgttgaaaaagaagacaagaatgatacgtggcatcgcgtggagcgaagcagtggcaagttggtgaggaggtttagattgccggagaatgctaaagtggaccaagtgaaggcttccatggaaaatggggttctcactgtaactgttcctaaggaagagattaagaagcctgatgttaaggccatagacatctctggttaa

SEQ ID NO: 8121 - protein, 153 aa, Glycine max
MSLIPSFFGGRRSSVFDPFSLDVWDPFKDFPFPSSLSAENSAFVSTRVDWKETPEAHVFKADIPGLKKEEVKLEIQDGRVLQISGERNVEKEDKNDTWHRVERSSGKLVRRFRLPENAKVDQVKASMENGVLTVTVPKEEIKKPDVKAIDISG

SEQ ID NO: 8122 - DNA, 462 bp, Glycine max
  CDS (1)..(462)
atgtctttgattccaagtttctttggtggcagaaggagcaatgttttggatcctttctccctcgatgtgtgggacccttttaaggattttccttttcccacttctctttctgctgaaaattcagcgtttgtgagcacacgagtggattggaaggagacaccagaagcacacgtgttcaaggctgatattccagggctgaagaaggaggaagtgaagctggagattcaagatgacagaattcttcagataagtggagagaggaacgttgagaaggaagacaagaacgacacgtggcaccgcgtggagcgaagcagtggtaagttcatgaggagtttcagattgccagataatgctaaagtggatcaagttaaggcttccatggaaaatggggttctcactgtaactgttccaaaggaagagattaagaagcctgatgttaaggccatagaaatttctggttaa

SEQ ID NO: 8123 - protein, 153 aa, Glycine max
MSLIPSFFGGRRSNVLDPFSLDVWDPFKDFPFPTSLSAENSAFVSTRVDWKETPEAHVFKADIPGLKKEEVKLEIQDDRILQISGERNVEKEDKNDTWHRVERSSGKFMRSFRLPDNAKVDQVKASMENGVLTVTVPKEEIKKPDVKAIEISG

SEQ ID NO: 8124 - DNA, 462 bp, Glycine max
  CDS (1)..(462)
atgtctctgattccaagtttcttcggtggccgaaggagcagtgttttcgaccctttctccctcgatgtgtgggagccctttaaggattttccatttcccagttctctttctgctgaaaattcagcctttgtgagcacacgagtggattggaaggagacaccagaagcacacgtgttcaaggctgatattccagggctgaagaaggaggaagtgaagctggagattcaagatgacagagttcttcagataagcggagagaggaatgttgaaaaagaagacaagaatgatacgtggcatcgcgtggagcgaagcagtggtaagttcatgaggaggtttagattgccggagaatgctaaagtggatcaagttaaggcttccatggaaaatggggttctcactgtaactgttcctaaggaagagattaagaagcctgatgttaaggccattgacatctctggttaa

SEQ ID NO: 8125 - protein, 153 aa, Glycine max
MSLIPSFFGGRRSSVFDPFSLDVWEPFKDFPFPSSLSAENSAFVSTRVDWKETPEAHVFKADIPGLKKEEVKLEIQDDRVLQISGERNVEKEDKNDTWHRVERSSGKFMRRFRLPENAKVDQVKASMENGVLTVTVPKEEIKKPDVKAIDISG

SEQ ID NO: 8126 - DNA, 453 bp, Glycine max
  CDS (1)..(453)
atgtcactgataccaagtttcttcggtggtcgaaggagcaatgttttcgaccctttctcgctcgacgtatgggaccccttcaaggatttgtctttcccttctgctgaagattcagctttcttgaaaacacgagtggattggaaggagaccccagaagcgcacgtgttcaaggctgatattccggggctgaagaaggagcaagtgaaagtggagattgaagatgacaaggttcttcagataagcggagagaggagtgttgagaaagaagacaagaacgataagtggcaccgcgtggagcgtagcagtggtaagttcttgaggaagttcagattgccagaaaacgctaaagtcgatcaagttaaggcttctattgaaaatggggttctcactgtcaccgttccaaaggaagaggtcaaaaaacctgatgttaaggccgtgcaaatctctggttaa

SEQ ID NO: 8127 - protein, 150 aa, Glycine max
MSLIPSFFGGRRSNVFDPFSLDVWDPFKDLSFPSAEDSAFLKTRVDWKETPEAHVFKADIPGLKKEQVKVEIEDDKVLQISGERSVEKEDKNDKWHRVERSSGKFLRKFRLPENAKVDQVKASIENGVLTVTVPKEEVKKPDVKAVQISG

SEQ ID NO: 8128 - DNA, 465 bp, Glycine max
  CDS (1)..(465)
atgtctctgattccaggtttcttcggtgcccgaaggagcaacgtcttcgatccattctcactcgacatttgggatcccttcaaggattttcatgttcccacttcttctgtttctgctgaaaattctgcattcgtgagcactcgtgtggattggaaggaaaccccagaggcacacgtgttcaaggctgatattccagggctgaagaaagaggaagtcaaggttcagattgaagatgatagggttcttcagattagcggagagaggaacgttgagaaggaagacaagaacgacacgtggcatcgcgtggagcgtagcagtggtaagttcgtgagaaggttcagattgccggagaatgcaaaagtgaatgaagtgaaggcttctatggaaaatggggttctcactgtcactgttcctaaggaagaggttaagaagcctgatgtcaaggccattgaaatctctggttga

SEQ ID NO: 8129 - protein, 154 aa, Glycine max
MSLIPGFFGARRSNVFDPFSLDIWDPFKDFHVPTSSVSAENSAFVSTRVDWKETPEAHVFKADIPGLKKEEVKVQIEDDRVLQISGERNVEKEDKNDTWHRVERSSGKFVRRFRLPENAKVNEVKASMENGVLTVTVPKEEVKKPDVKAIEISG

SEQ ID NO: 8130 - DNA, 465 bp, Glycine max
  CDS (1)..(465)
atgtcattgattccaagtattttcggtggcccaaggagcaacgtgttcgatccattctcactcgatatgtgggatcccttcaaggattttcatgttcccacttcttctgtttctgctgaaaattctgcatttgtgaacacacgtgtggattggaaggagacccaagaggcacacgtgctcaaggctgatattccagggctgaagaaagaggaagtgaaggttcagattgaagatgatagggttcttcagattagcggagagaggaacgttgagaaggaagacaagaacgacacgtggcatcgcgtggagcgtagcagtggaaagttcatgagaaggttcagattgccagagaatgcaaaagtggagcaagtaaaggcttgtatggaaaatggggttctcactgttactattccaaaggaagaggttaagaagtctgatgttaagcctatagaaatctctggttaa

SEQ ID NO: 8131 - protein, 154 aa, Glycine max
MSLIPSIFGGPRSNVFDPFSLDMWDPFKDFHVPTSSVSAENSAFVNTRVDWKETQEAHVLKADIPGLKKEEVKVQIEDDRVLQISGERNVEKEDKNDTWHRVERSSGKFMRRFRLPENAKVEQVKACMENGVLTVTIPKEEVKKSDVKPIEISG

SEQ ID NO: 8132 - DNA, 465 bp, Glycine max
  CDS (1)..(465)
atgtctctgattccaggtttcttcggtggccgaaggagcaacgtgttcgatccattctcactcgacatgtgggatcccttcaaggattttcatgttcccacttcttctgtttctgctgaaaattctgcattcgtgagcactcgtgtggattggaaggagaccccagaggcacacgtgttcaaggctgatattccagggctgaagaaagaggaagtcaaggttcagattgaagatgatagggttcttcagattagcggagagaggaacgttgaaaaggaagacaagaacgacacgtggcatcgcgtggagcgtagcagtggtaagttcacgagaaggttcagattgccggagaatgcaaaagtgaatgaagtgaaggcttctatggaaaatggggttctcactgtcactgttcctaaggaagaggttaagaagcctgatgttaaggccattgaaatctctggttga

SEQ ID NO: 8133 - protein, 154 aa, Glycine max
MSLIPGFFGGRRSNVFDPFSLDMWDPFKDFHVPTSSVSAENSAFVSTRVDWKETPEAHVFKADIPGLKKEEVKVQIEDDRVLQISGERNVEKEDKNDTWHRVERSSGKFTRRFRLPENAKVNEVKASMENGVLTVTVPKEEVKKPDVKAIEISG

SEQ ID NO: 8134 - DNA, 486 bp, Glycine max
  CDS (1)..(486)
atgtctctaatcccaaatttcttcggtggcagaaggagcaacgttttcgatcctttttccctcgacgtctgggaccccttcaaggattttcctttcccaaacactctttcttcagcttcctttcctgaattttctcgggaaaattctgcattcgtgagcactcgtgtggattggaaggagaccccagaagcacacgtattcaaggctgatattccagggctgaagaaggaggaagtgaaggttcagattgaagatgataaggttcttcagataagcggagagaggaacgttgagaaggaagataggaataacacgtggcatcgcgtggagcgtagcagcggcaagttcatgaggaggttcagattgccggagaatgcaaaagtggataaagtgaaggcttctatggaaaatggggttctcactgtcactgttcccaaggaagaggttaagaaggctgatgtgaagaacattcaaatctctggttaa

SEQ ID NO: 8135 - protein, 161 aa, Glycine max
MSLIPNFFGGRRSNVFDPFSLDVWDPFKDFPFPNTLSSASFPEFSRENSAFVSTRVDWKETPEAHVFKADIPGLKKEEVKVQIEDDKVLQISGERNVEKEDRNNTWHRVERSSGKFMRRFRLPENAKVDKVKASMENGVLTVTVPKEEVKKADVKNIQISG

SEQ ID NO: 8136 - DNA, 459 bp, Glycine max
  CDS (1)..(459)
atgtctctcattccaaacattttcggtggccgtaggagcaatgtgttcgatcccttcaaggattttcctttcccaaattccgtctctacttccttccctgagttttctcgggaaaattctgcgtttgtgagcactcgtgtggattggaaggagaccccagaggcgcacgtgttcaaggccgatattcccgggctgaagaaggaggaagtgaaggtgcagattgaagatgataaggtgcttcagatcagcggagagaggaacgttgagaatgaagataagaacgacacgtggcatcgcgtggagcgtagcagtggaaagttcatgaggaggttcagattgccggagaatgcaaaagtgaatgaagtgaaggcttctatggaaaatggggttcttactgttactgttcctaagaaagaggttaagaatcatgatgttaaggccatagaaatctctggttaa

SEQ ID NO: 8137 - protein, 152 aa, Glycine max
MSLIPNIFGGRRSNVFDPFKDFPFPNSVSTSFPEFSRENSAFVSTRVDWKETPEAHVFKADIPGLKKEEVKVQIEDDKVLQISGERNVENEDKNDTWHRVERSSGKFMRRFRLPENAKVNEVKASMENGVLTVTVPKKEVKNHDVKAIEISG

SEQ ID NO: 8138 - DNA, 486 bp, Glycine max
  CDS (1)..(486)
atgtctctaatcccaaacttcttcggtggccggagaaacaatgtgttcgatcctttctcactggacgtgtgggatcccttcaaggattttcctttcccaaatacgctttcttcagcttccttccctgaattttctcgggaaaattcagcatttgtgagcacccgtgtggactggaaggagaccccagaggcgcacgtgttcaaggcagatattccaggactgaagaaggaggaagtgaaggtgcagattgaagacgataaggttcttcatataagcggagagaggaacgttgagaaggaagataagaacgacacgtggcatcgagtggagcgtagcagtggcaagttcatgagaaggttcagattgccggagaacgctaaagtggagcaagtgaaggcttctatggaaaatggggttcttactgtcactgtccccaaggaagaggttaagaagcctgatgttaaggccatagaaatctctggttaa

SEQ ID NO: 8139 - protein, 161 aa, Glycine max
MSLIPNFFGGRRNNVFDPFSLDVWDPFKDFPFPNTLSSASFPEFSRENSAFVSTRVDWKETPEAHVFKADIPGLKKEEVKVQIEDDKVLHISGERNVEKEDKNDTWHRVERSSGKFMRRFRLPENAKVEQVKASMENGVLTVTVPKEEVKKPDVKAIEISG

SEQ ID NO: 8140 - DNA, 462 bp, Glycine max
  CDS (1)..(462)
atgtctctgattccaagtatttttggtggccgaaggagcaacgtgttcgatcctttctcccttgacgtgtgggaccctttcaaggattttcattttcccacttctctttctgctgaaaattctgcatctgtgaacactcgtgtggattggaaagaaaccccagaagcacacgtgttcaaggctgatattccagggctgaagaaggaggaagtgaaggtggaaattgaagatgatagggttcttcagataagcggagagaggaaccttgagaaggaagataagaacgacacgtggcatcgcctggagcgtagcagtggcaagttcatgaggaggttcaggttgccggagaatgctaaagtggagcaagtgaaggcttctatggaaaatggggttcttactgtcactgttcccaaggaagaggttaagaagcctgatgttaaggccattgaaatctctggttaa

SEQ ID NO: 8141 - protein, 153 aa, Glycine max
MSLIPSIFGGRRSNVFDPFSLDVWDPFKDFHFPTSLSAENSASVNTRVDWKETPEAHVFKADIPGLKKEEVKVEIEDDRVLQISGERNLEKEDKNDTWHRLERSSGKFMRRFRLPENAKVEQVKASMENGVLTVTVPKEEVKKPDVKAIEISG

SEQ ID NO: 8142 - DNA, 462 bp, Glycine max
  CDS (1)..(462)
atgtctctgattccaagtttcttcagtggcccaaggagcaacgtgtttgatcctttctcacttgacgtgtgggatcccttcaaggattttcactttcccacttctgtttctgctgaaaattctgcatttgtgagcactcgggtggattggaaggagaccccagaagcacacgtgctcaaggcagatattccagggctgaagaaagaggaagtgaaggtgcagattgaagatgatagggttcttcagataagcggagagaggaaccttgagaaggaagataagaacgacacgtggcatcgagtggagcgtagcagtggcaagttcatgagaaggttcagattgccggagaatgctaaagtggagcaagtgaaggcttctatggaaaatggggttctcactgttactgttcccaaggaagagattaagaagcctgatgttaaagccatagaaatctctgcttaa

SEQ ID NO: 8143 - protein, 153 aa, Glycine max
MSLIPSFFSGPRSNVFDPFSLDVWDPFKDFHFPTSVSAENSAFVSTRVDWKETPEAHVLKADIPGLKKEEVKVQIEDDRVLQISGERNLEKEDKNDTWHRVERSSGKFMRRFRLPENAKVEQVKASMENGVLTVTVPKEEIKKPDVKAIEISA

SEQ ID NO: 8144 - DNA, 462 bp, Glycine max
  CDS (1)..(462)
atgtctctgattccaaactttttcggtggccgtaggagcaatgtgtttgatcctttctcccttgaagtgtgggatcccttcaaggattttcattttccctcttctgtttctgctgaaaatttagcatttgtaagcactcgtgtggattggaaggagactccagaagcgcacgtgttgaaggcagatattccagggctgaagaaggaggaagtgaaggtgcagattgaagatgatagggttcttcagataagcggagagaggaaccttgagaaggaagacaagaacgacacgtggcatcgcgtggagcgtagcagcggcaagttcatgaggaggttcaggttgccggagaatgttaaagtggagcaagtgaaggcttctatggaaaatggtgttctcactgttactgttcccaagaaagaggttaagaagcctgatgttaaagccatagaaatctctgcttaa

SEQ ID NO: 8145 - protein, 153 aa, Glycine max
MSLIPNFFGGRRSNVFDPFSLEVWDPFKDFHFPSSVSAENLAFVSTRVDWKETPEAHVLKADIPGLKKEEVKVQIEDDRVLQISGERNLEKEDKNDTWHRVERSSGKFMRRFRLPENVKVEQVKASMENGVLTVTVPKKEVKKPDVKAIEISA

SEQ ID NO: 8146 - DNA, 462 bp, Glycine max
  CDS (1)..(462)
atgtctctgattccaagtattttcggtggcagaaggagcaacgtgttcgatcctttctccctcgacgtgtgggatcccttcaaggattttcattttcccacttctctttctgctgaaaattctgcatttgtgaacactcgtgtggattggaaagaaaccccagaagcacacgtgttcgaggctgatattccagggctgaagaaggaggaagtgaaggtgcagattgaagatgatagggttcttcagataagcggagagaggaaccttgagaaggaagacaagaacgacacgtggcatcgcgtggagcgtagcagcggcaacttcatgaggaggttcaggttgccggagaatgctaaagtggagcaagtgaaggcttctatggaaaatggtgttctcacagttaccgttcccaaagaagaggttaagaagcctgatgttaaggccattgaaatctctggttaa

SEQ ID NO: 8147 - protein, 153 aa, Glycine max
MSLIPSIFGGRRSNVFDPFSLDVWDPFKDFHFPTSLSAENSAFVNTRVDWKETPEAHVFEADIPGLKKEEVKVQIEDDRVLQISGERNLEKEDKNDTWHRVERSSGNFMRRFRLPENAKVEQVKASMENGVLTVTVPKEEVKKPDVKAIEISG

SEQ ID NO: 8148 - DNA, 474 bp, Glycine max
  CDS (1)..(474)
atgtctatcatcccaaacttgttcggtggtagacgaagcaacgtcttcgacccattctctctggacgtatgggaccctttcgaggggtttcctttttccacaggtcacgtgccttcctctggtggggaaagcagtgccatagccaacactcgcgtggactggaaggagactccggcggctcacgtgttcaacgttgatcttcccgggttgaagaaggaggaagtgaaggttgaagttgaagatgggagggtgctgcagattagtggtgagaggaccaaagaacaagaacagaaagatgataggtggcaccgcgttgaaagaagcactgggaagttcatgaggaggttcaggcttcccgagaatgccaaaatggatcaggtcaaggctgctatggagaatggagtgctaactgttactgtgcccaaggaggaagacaagaaacctcaagtcaagtcaattcaaatatctgcctag

SEQ ID NO: 8149 - protein, 157 aa, Glycine max
MSIIPNLFGGRRSNVFDPFSLDVWDPFEGFPFSTGHVPSSGGESSAIANTRVDWKETPAAHVFNVDLPGLKKEEVKVEVEDGRVLQISGERTKEQEQKDDRWHRVERSTGKFMRRFRLPENAKMDQVKAAMENGVLTVTVPKEEDKKPQVKSIQISA

SEQ ID NO: 8150 - DNA, 459 bp, Zea mays
  CDS (1)..(459)
atgtcgctcgtgaggcgcagcaacgtgttcgaccccttctcgatggacctctgggatcccttcgacaccatgttccgctccatcgtcccgtcggcgacctccaccaactccgagactgccgccttcgccagcgcccgcatcgactggaaggagacgcccgaggcgcacgtcttcaaggccgacctccccggcgtcaagaaggaggaggtcaaggttgaggtcgaagacggcaacgtgctggtcatcagcggccagcgcagcagggagaaggaggacaaggacgacaagtggcaccgtgtcgagcgcagcagtggccagttcatcaggcgcttccgcctgccggatgacgccaaggtggatcaggtcaaggctggcctcgagaacggcgtgctcacggtcaccgtgcctaaggcggaagagaagaagcctgaggtgaaggctattgagatctctggttga

SEQ ID NO: 8151 - protein, 152 aa, Zea mays
MSLVRRSNVFDPFSMDLWDPFDTMFRSIVPSATSTNSETAAFASARIDWKETPEAHVFKADLPGVKKEEVKVEVEDGNVLVISGQRSREKEDKDDKWHRVERSSGQFIRRFRLPDDAKVDQVKAGLENGVLTVTVPKAEEKKPEVKAIEISG

SEQ ID NO: 8152 - DNA, 480 bp, Zea mays
  CDS (1)..(480)
atgtcgctgattcgccgtggaaacgcattcgaccccttctccctcgacctctgggaccccttcgagggcttcttccccttcggctccggcggcgtccgcagcctcgttccctcgttgccgcgcaccagctcggagaccgcggcatttgccggcgcgcggatcgactggaaggagacccccgaagcgcacgtgttcaaggcggacgtgccggggctgaggaaggaggaggtcaaggtggaggtcgaggacggcaacgtcctgcagatcagcggcgagcgcaacaaggagcacgaggagaagaacgacaggtggcaccgggtggagcgcagcagcggcaagttccttcgcaggttcagactgccggacaacgccaaggcagaccagatcaaggcgtccatggagaacggcgtgctcaccgtcaccgtgcccaaggaggaggccaagaaggccgacgtcaagaacgtccagatcaccggctag

SEQ ID NO: 8153 - protein, 159 aa, Zea mays
MSLIRRGNAFDPFSLDLWDPFEGFFPFGSGGVRSLVPSLPRTSSETAAFAGARIDWKETPEAHVFKADVPGLRKEEVKVEVEDGNVLQISGERNKEHEEKNDRWHRVERSSGKFLRRFRLPDNAKADQIKASMENGVLTVTVPKEEAKKADVKNVQITG

SEQ ID NO: 8154 - DNA, 477 bp, Zea mays
  CDS (1)..(477)
atgtcgctgatccgccgcagcaacgtgttcgatcccttctccctcgacctctgggacccctttgagggcttccccttcggctccggcaacagcagcagtctcttccactcgttcccgcggaccagctcggagaccgcggccttcgctggcgcgcggatcgactggaaggagactccagaggcgcacgtgttcaaggccgacgtaccggggctgaagaaggaggaggtcaaggtggaggtcgaggacggcaacgtccttcagatcagcggcgagcgcaacaaggagcaggaggagaagacggacacctggcaccgcgtggagcggagcagcgggaggttcctgcgcaggttccgactgcccgagaacgccaagacggagcagatcacggccgccatggagaacggcgtgcttacagtcactgtgccgaaggaggacgccaagaagcctgaagtgaagtccattcagatctccggctag

SEQ ID NO: 8155 - protein, 158 aa, Zea mays
MSLIRRSNVFDPFSLDLWDPFEGFPFGSGNSSSLFHSFPRTSSETAAFAGARIDWKETPEAHVFKADVPGLKKEEVKVEVEDGNVLQISGERNKEQEEKTDTWHRVERSSGRFLRRFRLPENAKTEQITAAMENGVLTVTVPKEDAKKPEVKSIQISG

SEQ ID NO: 8156 - DNA, 465 bp, Zea mays
  CDS (1)..(465)
atgtcgctggtgaggcgcggcagcgtgttcgacccattctccgtggacctcttcgaccccttcgacagcgtgttccgctccatcgtgccgtcgtcgtcgtcggcggcggcggcctccgagaccgccgccttcgccagcgcccgcatcgactggaaggagacgcccgaggcgcacgtgttcaaggccgacctccccggcgtgaagaaggaggaggtgaaggtggaggtggaggacggcaacgtgctgctcatcagcgggcagcgcagcagggagaaggaggacaagggcgacaagtggcatcgcgtggagcgcagcagcggccagttcgtgcggcgcttccgcctccccgagaacgccaagacggaggaggtgagggccgcgcttgagaacggcgtgctcacggtcaccgtgcccaaggccgaggtcaagaagcccgaggtgaagagcatccagatctccggctga

SEQ ID NO: 8157 - protein, 154 aa, Zea mays
MSLVRRGSVFDPFSVDLFDPFDSVFRSIVPSSSSAAAASETAAFASARIDWKETPEAHVFKADLPGVKKEEVKVEVEDGNVLLISGQRSREKEDKGDKWHRVERSSGQFVRRFRLPENAKTEEVRAALENGVLTVTVPKAEVKKPEVKSIQISG

SEQ ID NO: 8158 - DNA, 465 bp, Zea mays
  CDS (1)..(465)
atgtcgctggtgaggcgcagcagcgtgttcgacccattctctgtggacctcttcgaccccttcgacagcatgttccgctccatcgtgccgccgtcgttgtcgtcgtcggcggcctccgagaccgccgccttcgccagcgcccgcatcgactggaaggagacgcccgaggcgcacgtgttcaaggccgacctccccggcgtgaagaaggaggaggtcaaggtggaggtggaggacggcaacgtgctgctcatcagcgggcagcgcagcagggagaaggaggacaagggcgacaagtggcaccgcgtggagcgcagcagcggccagttcgtgcggcgcttccgcctgccggagaacgccaagacggaggaggtgagggccgcgctggagaacggcgtgctcacggtcaccgtgcccaaggccgaggtcaagaagcccgaggttaagagcatccagatctccgtctga

SEQ ID NO: 8159 - protein, 154 aa, Zea mays
MSLVRRSSVFDPFSVDLFDPFDSMFRSIVPPSLSSSAASETAAFASARIDWKETPEAHVFKADLPGVKKEEVKVEVEDGNVLLISGQRSREKEDKGDKWHRVERSSGQFVRRFRLPENAKTEEVRAALENGVLTVTVPKAEVKKPEVKSIQISV

SEQ ID NO: 8160 - DNA, 468 bp, Zea mays
  CDS (1)..(468)
atgtcgctcgtgagtcggcgcagcagcaacgtgttcgaccccttctccctcgacctctgggaccccttcgacatgttccgctccatcgtcccgtcggcggcctcctccggcggcggttccgagaccgccgccttcgccaacgcccgcgtggactggaaggagacgcccgaggcgcacgtgttcaaggccgacctccccggcatcaagaaggaggaggtcaaggtcgaggtggaggacggcaacgtgctcgtcatcagcggcaagcgcagcagggaggaggaggacaagaacgacaagtggcaccgcgtcgagcgcagcagcggccagttcatgaggcgcttccgcctgcctgagaacgccaaggtcgacgaggtgaaggctggcctcgagaacggcgtgctcacggtcaccgtgcccaagacggaggtgaagaagcccgaggtgaaggctatcgagatctctggttga

SEQ ID NO: 8161 - protein, 155 aa, Zea mays
MSLVSRRSSNVFDPFSLDLWDPFDMFRSIVPSAASSGGGSETAAFANARVDWKETPEAHVFKADLPGIKKEEVKVEVEDGNVLVISGKRSREEEDKNDKWHRVERSSGQFMRRFRLPENAKVDEVKAGLENGVLTVTVPKTEVKKPEVKAIEISG

SEQ ID NO: 8162 - DNA, 474 bp, Zea mays
  CDS (1)..(474)
atgtcgccggcgcgcagcagcagcagcaacgtcttcgatccgctgtcgctggacttctggccgtcgtccgccgacccgttcggcgtcgtccggccgctggcggagcagtgccccgtcctcaccaacgtgcgcgtcgactggaaggagacccccgaggcgcacgtgttcagggccgaccttccgggcgtcaggaaggaggctgccaaggtcgaggtggaggacggcaacgtgctcgtcatcagcggcgagcgcgccagggaggaggaggagaaggaggaggccggcaaggacgaggcgtggcgctggcgcctcgtcgagcgcagcagcggcaggttccagaggcggttccgcctgccgcgcggcgccaggctggaccaggttcacgcgtccatggagaacggcgtgctcaccgtcaccgtgcccaaggaggaggccaagaagccgcaggtcagggctgtcgagatctctggttga

SEQ ID NO: 8163 - protein, 157 aa, Zea mays
MSPARSSSSNVFDPLSLDFWPSSADPFGVVRPLAEQCPVLTNVRVDWKETPEAHVFRADLPGVRKEAAKVEVEDGNVLVISGERAREEEEKEEAGKDEAWRWRLVERSSGRFQRRFRLPRGARLDQVHASMENGVLTVTVPKEEAKKPQVRAVEISG

SEQ ID NO: 8164 - DNA, 459 bp, Zea mays
  CDS (1)..(459)
atgtcgctggtgaggcgcagcagcgtgttcgacccattctccgtggacctcttcgacccgttcgacagcatgttccgctccatcgtgccgtcgtcgtcgtcgtcgggctccgagaccgccgccttcgccagcgcccgcatcgactggaaggagacgcccgaggcgcacgtgttcaaggccgacctccccggcgtgaagaaagaggaggtcaaggtggaggtggaggacggcaacgtgctgctcatcagcgggcagcgcagcagggagaaggaggacaagggcgacaagtggcaccgcgtggagcgcagcagcggccagttcgtgcggcgcttccgcctgccggagaacgccaagacggaggaggtgagggccgcgctggagaacggcgtgctcacggtcaccgtgcccaaggccgaggtcaagaagcccgaggtgaagagcatccagatctccggctga

SEQ ID NO: 8165 - protein, 152 aa, Zea mays
MSLVRRSSVFDPFSVDLFDPFDSMFRSIVPSSSSSGSETAAFASARIDWKETPEAHVFKADLPGVKKEEVKVEVEDGNVLLISGQRSREKEDKGDKWHRVERSSGQFVRRFRLPENAKTEEVRAALENGVLTVTVPKAEVKKPEVKSIQISG

SEQ ID NO: 8166 - DNA, 489 bp, Zea mays
  CDS (1)..(489)
atgtcgctgattcgccgtggaagcgcattcgaccccttctccctcgacctctgggaccccttccagggctttcccttcggctctggaagcagcagcagcagcagcctgttcccctcgttcggaggcaccaccaccagctcggagacggccgccttcgccggcgctcgcgtcgactggaaggagacgccggaggcgcacgtgttcaagaccgacgtgccggggctgaagaaggaggaggttaaggtggagctggaggacggcaacgtgctccagatcagcggcgagcgcagcaaggagcaggaggagaagagggacacctggcaccgcgtggagcgcagcagcggcaagttcctgcgcaggttccgcctgccggagaacgccaggacggagcagatcagtgcgtccatggagaacggcgtgctcaccgtcaccgtgcctaaggaggaggccaagaaggccgacgtcaagtctatccagatctccggctag

SEQ ID NO: 8167 - protein, 162 aa, Zea mays
MSLIRRGSAFDPFSLDLWDPFQGFPFGSGSSSSSSLFPSFGGTTTSSETAAFAGARVDWKETPEAHVFKTDVPGLKKEEVKVELEDGNVLQISGERSKEQEEKRDTWHRVERSSGKFLRRFRLPENARTEQISASMENGVLTVTVPKEEAKKADVKSIQISG

SEQ ID NO: 8168 - DNA, 459 bp, Zea mays
  CDS (1)..(459)
atgtcgctcgtgaggcgcagcaacgtgttcgaccccttctcgatggacctctgggaccccttcgacaccatgttccgctccatcgtcccgtcggcggcctccaccaactccgagaccgccgtcttcgccagcgcccgcatcgactggaaggagacgcccgaggcgcacgtgttcaaggccgacctccccggcgtcaagaaggaggagatcaaggtcgaggtcgaggacggcaacgtgctggtcatcagcggccagcgcagcagggagaaggaggacaaggacgacaagtggcaccgcgtcgagcgcagcagcggccagttcgtcaggcgcttccgcctgccagagaacgccaaggtggatcaggtcaaggctggcctcgagaacggcgtgctcacggtcaccgtgcccaaggcggaggagaagaagcctgaggtgaaggctattgagatatctggttga

SEQ ID NO: 8169 - protein, 152 aa, Zea mays
MSLVRRSNVFDPFSMDLWDPFDTMFRSIVPSAASTNSETAVFASARIDWKETPEAHVFKADLPGVKKEEIKVEVEDGNVLVISGQRSREKEDKDDKWHRVERSSGQFVRRFRLPENAKVDQVKAGLENGVLTVTVPKAEEKKPEVKAIEISG

SEQ ID NO: 8170 - DNA, 459 bp, Zea mays
  CDS (1)..(459)
atgtcgctcgtgaggcgcagcaacgtgttcgaccccttctccatggacctctgggaccccttcgacaccatgttccgctccatcgtcccgtcggcgacctccaccaactccgagactgccgccttcgccagcgcccgcatcgactggaaggagacgcccgaggcgcacgtgttcaaggccgacctccccggcgtcaagaaggaagaggtcaaggtcgaggtcgaggacggcaacatgctggtcatcagcggccagcgcagcagggagaaggaggacaaggacgacaagtggcaccgcgtcgagcgcagcagcggccagttcgtcaggcgcttccgcctgccggagaacaccaaggtggatcaggtcaaggctggcctcgagaacggcgtgctcacggtcaccgtgcccaaggcggaggagaagaagcctgaggtgaaggctattgagatctctggttga

SEQ ID NO: 8171 - protein, 152 aa, Zea mays
MSLVRRSNVFDPFSMDLWDPFDTMFRSIVPSATSTNSETAAFASARIDWKETPEAHVFKADLPGVKKEEVKVEVEDGNMLVISGQRSREKEDKDDKWHRVERSSGQFVRRFRLPENTKVDQVKAGLENGVLTVTVPKAEEKKPEVKAIEISG

SEQ ID NO: 8172 - DNA, 465 bp, Zea mays
  CDS (1)..(465)
  misc_feature (406)..(406): m is a or c
atgtcgctggtgaggcgcagcagcgtgttcgacccattctccgtggacctcttcgaccccttcgacagcatgttccgctccatcgtgccgtcgtcgccgtcgtcggcggcggcctccgagactgccgccttcgccagcgcccgcatcgactggaaggagacgcccgaggcgcacgtgttcaaggccgacctccccggcgtgaagaaggaggaggtgaaggtggaggtggaggacggcaacgtgctgctcatcagcgggcagcgcagcagggagaaggaggacaagggcgacaagtggcaccgcgtggagcgcagcagcggccagttcgtgcggcgcttccgcctccccgagaacgccaagaccgaggaggtgagggccgcgctggagaacggcgtgctcacggtcmccgtgcccaaggccgaggtcaagaagcctgaggttaagagcatccagatctccggctga

SEQ ID NO: 8173 - protein, 154 aa, Zea mays
  misc_feature (136)..(136): The Xaa at location 136 stands for Pro, or Thr.
MSLVRRSSVFDPFSVDLFDPFDSMFRSIVPSSPSSAAASETAAFASARIDWKETPEAHVFKADLPGVKKEEVKVEVEDGNVLLISGQRSREKEDKGDKWHRVERSSGQFVRRFRLPENAKTEEVRAALENGVLTVXVPKAEVKKPEVKSIQISG

SEQ ID NO: 8174 - DNA, 474 bp, Arabidopsis thaliana
  CDS (1)..(474)
atgtctctaattccaagcatcttcggaggaagaagaacaaacgttttcgatccgttctcgctggatgttttcgatccgttcgaaggtttcttgacgccgtcaggattggcaaacgcacccgctatggatgtggcagcgttcacaaacgctaaagtggattggagggagacacctgaggcgcacgtgttcaaggcggatttaccgggactgaggaaggaagaggtgaaagtggaggttgaggatggcaacatacttcagataagtggagagaggagcaatgagaatgaagagaagaatgacaagtggcaccgtgtggagcggtcgagtgggaagttcacgaggaggtttaggctgccggagaatgctaagatggaggaaatcaaagccagtatggaaaatggtgtgttgtcggttaccgtgcccaaggtgccagagaaaaagccagaggttaagtccattgatatctctggttaa

SEQ ID NO: 8175 - protein, 157 aa, Arabidopsis thaliana
MSLIPSIFGGRRTNVFDPFSLDVFDPFEGFLTPSGLANAPAMDVAAFTNAKVDWRETPEAHVFKADLPGLRKEEVKVEVEDGNILQISGERSNENEEKNDKWHRVERSSGKFTRRFRLPENAKMEEIKASMENGVLSVTVPKVPEKKPEVKSIDISG

SEQ ID NO: 8176 - DNA, 462 bp, Arabidopsis thaliana; identical to SEQ ID NO: 8094
  CDS (1)..(462)

SEQ ID NO: 8177 - protein, 153 aa, Arabidopsis thaliana
MSMIPSFFNNNRRSNIFDPFSLDVWDPFKELTSSSLSRENSAIVNARVDWRETPEAHVFKADLPGLKKEEVKVEIEEDSVLKISGERHVEKEDKNDTWHRVERSSGQFTRRFRLPENVKMDQVKAAMENGVLTVTVPKAETKKADVKSIQISG

SEQ ID NO: 8178 - DNA, 471 bp, Arabidopsis thaliana
  CDS (1)..(471)
atgtctctagttccgagcttttttggaggccgaagaacaaacgtgttcgacccattttcactagacgtatgggatccgttcgaaggattcttgacgcccgggttgacaaacgcacctgccaaggacgtggcagcgttcacaaacgctaaagtggactggagggagacacctgaagcgcatgtgttcaaggcggacgtgcctgggcttaagaaggaagaggtgaaggtggaggttgaagatggtaacatacttcagataagcggtgagaggagcagtgagaatgaagagaagagtgacacatggcaccgtgtggagcggtcaagtgggaagttcatgaggaggtttcggttgccagagaatgcaaaggtggaggaagtaaaggcgagtatggagaatggggtgttgtcggttacggtgccgaaagttcaggagagtaagccggaggtcaagtccgttgatatctctggttaa

SEQ ID NO: 8179 - protein, 156 aa, Arabidopsis thaliana
MSLVPSFFGGRRTNVFDPFSLDVWDPFEGFLTPGLTNAPAKDVAAFTNAKVDWRETPEAHVFKADVPGLKKEEVKVEVEDGNILQISGERSSENEEKSDTWHRVERSSGKFMRRFRLPENAKVEEVKASMENGVLSVTVPKVQESKPEVKSVDISG

SEQ ID NO: 8180 - DNA, 486 bp, Arabidopsis thaliana
  CDS (1)..(486)
atgtctctcattccaagcatttttggaggacgcagatcaaacgtctttgatccgttctcgcaagacttatgggatccattcgaaggattcttcacgccatcttctgcgttggcaaacgcttcaaccgctcgtgatgtggcagcgtttacaaacgcaagagtggattggaaggaaacgccggaggcacatgtgttcaaagcggacttgccaggcctgaagaaggaagaagtcaaggttgaggttgaagacaagaacgttctgcagattagcggagagaggagcaaggagaacgaagagaagaacgataagtggcaccgtgtggagagagctagtgggaagtttatgagaaggtttaggttaccggagaatgcaaagatggaagaagtgaaggcaacaatggagaatggtgtgcttacggttgtggttccgaaagcgcctgagaagaagcctcaagtcaagtccatcgatatctccggggctaattga

SEQ ID NO: 8181 - protein, 161 aa, Arabidopsis thaliana
MSLIPSIFGGRRSNVFDPFSQDLWDPFEGFFTPSSALANASTARDVAAFTNARVDWKETPEAHVFKADLPGLKKEEVKVEVEDKNVLQISGERSKENEEKNDKWHRVERASGKFMRRFRLPENAKMEEVKATMENGVLTVVVPKAPEKKPQVKSIDISGAN

SEQ ID NO: 8182 - DNA, 468 bp, Physcomitrella patens subsp. patens
  CDS (1)..(468)
atggctctctcgctgtttggcagccgtggcaacggtgtgttcgatcccttcgagttcggcagtgtgtgggatcctttctcggcgccggagagcgggctgtcccggaaattggctggcgacgcgcacgctggggcgaatacgcggatcgattggcgtgaaacgcctgaggcgcacatctttaaagcagacctgcctgggctgaggaaggaagaggtgaaaatacaagtggtggaggggaagtcgctggagattagcggcgagaggaaaagagaggagttgcagaaaggcgatacatggcatcgggtggaacgcgcgcaaggcagttttctgcgacggttccggcttccggagggtgcaaacgtggacgaagtgaaggcgcaggtacaggacggggttttgacagtgacagtgacagttcccaagcttcagaaaccgaagccacaggtgcgccagatagagatcgcatga

SEQ ID NO: 8183 - protein, 155 aa, Physcomitrella patens subsp. patens
MALSLFGSRGNGVFDPFEFGSVWDPFSAPESGLSRKLAGDAHAGANTRIDWRETPEAHIFKADLPGLRKEEVKIQVVEGKSLEISGERKREELQKGDTWHRVERAQGSFLRRFRLPEGANVDEVKAQVQDGVLTVTVTVPKLQKPKPQVRQIEIA

SEQ ID NO: 8184 - DNA, 462 bp, Physcomitrella patens subsp. patens
  CDS (1)..(462)
atggctctatcgctgttcggcggtcgtggcaacagtgtgttggatcccttcgagttcggcggtgtgtgggatcctttctcggtgctggagagcgggccgtcccggcgatttgcaggcgacgcgcaggccgtggcgaacacgcggatcgattggcgtgaaacgccggaggcgcacatcttcaaagcggacctgcctgggctgaagaaggaagaggtgaaagtgcgagtggtggaggggaggacgctggagatcagcggcgagaggaagaaagaggaggtgcagaagggcgatacctggcaccgggtggagcgtgcgcagggcagttttatgcgacggttccggctgccggagggcaccaacacggacgaagtgaaggcgcaggtgcaggacggagttctgacggtgacagttcccaagcttcaggaaccgaagccacaagtgcgccagatagagatcgcgtga

SEQ ID NO: 8185 - protein, 153 aa, Physcomitrella patens subsp. patens
MALSLFGGRGNSVLDPFEFGGVWDPFSVLESGPSRRFAGDAQAVANTRIDWRETPEAHIFKADLPGLKKEEVKVRVVEGRTLEISGERKKEEVQKGDTWHRVERAQGSFMRRFRLPEGTNTDEVKAQVQDGVLTVTVPKLQEPKPQVRQIEIA

SEQ ID NO: 8186 - DNA, 462 bp, Physcomitrella patens subsp. patens
  CDS (1)..(462)
atggctctatcgctgttcggcggtcgtggcaacagtgtgttcgatcccttcgagttcggcggtgtgtgggatcctttctcggtgctggagggcgggccgtcccggcgatttgcaggcgacgcgcaggccgtggcgaacacgcggatcgattggcgtgaaacgccggaggcgcacatcttcaaagcggacctgcctgggctgaagaaggaagaggtgaaagtgcgagtggtggaggggaggacgctggagatcagcggcgagaggaagaaagaggaggtgcagaagggcgatacctggcaccgggtggagcgtgcgcagggcagttttatgcgacggttccggctgccggagggcaccaacacggacgaagtgaaggcgcaggtgcaggacggagttctgacggtgacagttcccaagcttcaggaaccgaagccacaagtgcgccagatagagatcgcgtga

SEQ ID NO: 8187 - protein, 153 aa, Physcomitrella patens subsp. patens
MALSLFGGRGNSVFDPFEFGGVWDPFSVLEGGPSRRFAGDAQAVANTRIDWRETPEAHIFKADLPGLKKEEVKVRVVEGRTLEISGERKKEEVQKGDTWHRVERAQGSFMRRFRLPEGTNTDEVKAQVQDGVLTVTVPKLQEPKPQVRQIEIA

SEQ ID NO: 8188 - DNA, 465 bp, Physcomitrella patens subsp. patens
  CDS (1)..(465)
atggcgctttcgttgttcggtggtcgtggcaacagcgtgtttgatcccttcgatttcggcagcgcatgggatccttttcagtctctgctaggatctgcgccgtctttgcaatttgcacgagatgcacacagcatggccagcactcagattgattggcgtgagacaccagaggcgcatatcttcaaggccgatctgcccgggctgaggaaagaggaggtgcacgtgcaggttctggatgggaaggtattggagatcagtggggagaggaagaaggaggaggtgcagaggggtgatacctggcatcgtgtagaacgcagcagcggcagtttcttgcggcgtttccggctcccggataacgcgaatgtggacgtggtgaacgcgcaggtgcaggatggagtgctgacggtgacagtaccaaaggttgagaagccgaagccacaagtgcgacagattcaaatcgcttga

SEQ ID NO: 8189 - protein, 154 aa, Physcomitrella patens subsp. patens
MALSLFGGRGNSVFDPFDFGSAWDPFQSLLGSAPSLQFARDAHSMASTQIDWRETPEAHIFKADLPGLRKEEVHVQVLDGKVLEISGERKKEEVQRGDTWHRVERSSGSFLRRFRLPDNANVDVVNAQVQDGVLTVTVPKVEKPKPQVRQIQIA

SEQ ID NO: 8190 - DNA, 471 bp, Physcomitrella patens subsp. patens
  CDS (1)..(471)
atggctctgtcgctctttggacgtggaggacatgacattttcgattccttgacatctggtgtgattaaggatcctttcgaagccttctcggtgtcagagaacacaccgtctcggcagtatgcacgagacactcatgctgtcgcgaacacgcaagtagattggcgggagactcctgagtcgcacatttttaaagctgatcttcctggactaactaaagacgatgtgaaggttcaattggtggatggaaagaccttggaaatagctggacagaggaagaaagaagatgtgcatcatggtgacacatggcatcgtgttgagcgagcacacggcagttttttacggcggtttcgacttcctgaaaacaccatcgctgacgaggtgaaagcccacgtactagacggtgtgctcgtcgtcacggtccctaaactgaagaagccaaaacctcaagttcgccagattgaaattctttaa

SEQ ID NO: 8191 - protein, 156 aa, Physcomitrella patens subsp. patens
MALSLFGRGGHDIFDSLTSGVIKDPFEAFSVSENTPSRQYARDTHAVANTQVDWRETPESHIFKADLPGLTKDDVKVQLVDGKTLEIAGQRKKEDVHHGDTWHRVERAHGSFLRRFRLPENTIADEVKAHVLDGVLVVTVPKLKKPKPQVRQIEIL

SEQ ID NO: 8192 - DNA, 465 bp, Physcomitrella patens subsp. patens
  CDS (1)..(465)
atggcgctttcgttgctcggtggtcgtggcaacagcatttttgatcctttcgatttcggcagcgcgtgggatccttttcagtctctgctgggatctgcaccgtctttgcagtttgcgcgagatgcacacagtatggccagcactcagattgattggtgtgagaccccagaggcgcatatcttcaaggccgatttgcctgggctgaggaaagaggaggtgcacgtgcaggttttggatgggaaggtattggagatcagtggagagaagaagaaggaggaggtgcagaagggcgatacctggcatcgtgtagaacgcagtagcggcagtttcttgcggcgtttccggctcccggagcatgcaaatacggagatggtgaatgcgcaggtgcaggatggagtgctgacggtgacagtaccaaagcttgagaagccaaagccacgagtgcgacagatcgaaatcgcttga

SEQ ID NO: 8193 - protein, 154 aa, Physcomitrella patens subsp. patens
MALSLLGGRGNSIFDPFDFGSAWDPFQSLLGSAPSLQFARDAHSMASTQIDWCETPEAHIFKADLPGLRKEEVHVQVLDGKVLEISGEKKKEEVQKGDTWHRVERSSGSFLRRFRLPEHANTEMVNAQVQDGVLTVTVPKLEKPKPRVRQIEIA

SEQ ID NO: 8194 - DNA, 468 bp, Laccaria bicolor S238N-H82
  CDS (1)..(468)
atgtcggttttctactacgagccatactacgactttgaccgcctcctcgacgacatcttcacaccgcgcacagcgcgcaacggcgtccataagcgtgctctgcaaagcgatgctacccccgagggggccgtgcgtgctttaaagccaagaatggacctgcacgaagacaaagaaaaaaacctcgtaacagccacattcgagttccctggatcgaaaaaggaggatgtccacctcgagattcataatggccgtctagtcgtgtcgattgagaacaagatttcggaagagcatgatgagagcgggtatgcggtgcgcgagcggaggtatgggaagtattcgaggactttgcagttgccacagggcgtcaaggacgatgagattaaagcggggatggaggatggggtgttgaccgtaacgttccccaagtcaggtgctgagcttgctccgaagaagatcactatttcgtaa

SEQ ID NO: 8195 - protein, 155 aa, Laccaria bicolor S238N-H82
MSVFYYEPYYDFDRLLDDIFTPRTARNGVHKRALQSDATPEGAVRALKPRMDLHEDKEKNLVTATFEFPGSKKEDVHLEIHNGRLVVSIENKISEEHDESGYAVRERRYGKYSRTLQLPQGVKDDEIKAGMEDGVLTVTFPKSGAELAPKKITIS

SEQ ID NO: 8196 - DNA, 447 bp, Vitis vinifera
  CDS (1)..(447)
atgtcgctcttcattccaagctgcatgttcgatccattctctctggatatttgggatcccttcaaaggcttccctttctccacaactcttgccgaccctgaaagatccgccttttctagcaccagttgtgactggaaggaaactccagatgctcacatcttcaaggctgatcttcctggattaaagaaggaagaggtgacggttgaggttgaagagggccgggtgcttcaaatcagtggagaaaggagcaaagagcaagaagacaagaatggaaaatggcatcagattgaaagaagcagaggaaagttccttcgcagattcagacttcctgaaaatgcaaagatggatgaggttaaagccagcatggagaatggtgtgcttactgtaacggttccgaaagaggaggtgaagaagcctaaggttaaggccattgagatctccggctag

SEQ ID NO: 8197 - protein, 148 aa, Vitis vinifera
MSLFIPSCMFDPFSLDIWDPFKGFPFSTTLADPERSAFSSTSCDWKETPDAHIFKADLPGLKKEEVTVEVEEGRVLQISGERSKEQEDKNGKWHQIERSRGKFLRRFRLPENAKMDEVKASMENGVLTVTVPKEEVKKPKVKAIEISG

SEQ ID NO: 8198 - DNA, 480 bp, Vitis vinifera
  CDS (1)..(480)
atgtcgctaattcctcgccgatccaatgtttttgatccattctctctggacgtatgggatccatttgagtgttggccattcaacagcaacttccgctctctctctgatcagatccgctccggtttccccgctgaaacgtcgtcctttgtccaggccagggtcgactggaaggaaaccccaaattctcacgtcttcaaggctgatgtgcctgggctgaagaaggaggagctgaaggtggaggttgaagacgggcgggttcttcagatcagtggacagagaaaccgcgaactggaggagaagacagacacttggcaccgtgtggagcgtagcagcggcagcttcttgaggaggttccggctgccggaggacgccaaggtggatcaggtgaaggcggccatggaggatggtgtgttgactgtgactgtgccaaaggaggcggccaagaagcccgatgtgaagtccattcaaatctctggctga

SEQ ID NO: 8199 - protein, 159 aa, Vitis vinifera
MSLIPRRSNVFDPFSLDVWDPFECWPFNSNFRSLSDQIRSGFPAETSSFVQARVDWKETPNSHVFKADVPGLKKEELKVEVEDGRVLQISGQRNRELEEKTDTWHRVERSSGSFLRRFRLPEDAKVDQVKAAMEDGVLTVTVPKEAAKKPDVKSIQISG

SEQ ID NO: 8200 - DNA, 495 bp, Vitis vinifera
  CDS (1)..(495)
atgtcgctcatttcaagtgttcttggtagtggccgccgaagcaacatcttcgatcccttttctctggacatatgggatccctttgaagggtttcccttcaccacccctctcgccaacgtcccctcctcgactcgcgagacctctgcctttgcaaacgcacgcattgactggaaagagactcctgaagctcacgtcttcaaggctgatcttccggggttgaagaaagaggaggtgaaggttgaggttgaagagggcagagtgctgcaaattagcggagaaaggagtacggagcaagaggaaaagaaagacaagtggcatcgggtggagaggagcagcggcaagttccttcgtcggttcaggttgccggagaatgcaaagatggatgaagttaaagctagcctggagaatggtgtgctaaccgtgactgtcccaaaagaagaggtgaagaaggctgaggtgaaggcatcgagatctctggctaaagccttgagttga

SEQ ID NO: 8201 - protein, 164 aa, Vitis vinifera
MSLISSVLGSGRRSNIFDPFSLDIWDPFEGFPFTTPLANVPSSTRETSAFANARIDWKETPEAHVFKADLPGLKKEEVKVEVEEGRVLQISGERSTEQEEKKDKWHRVERSSGKFLRRFRLPENAKMDEVKASLENGVLTVTVPKEEVKKAEVKASRSLAKALS

SEQ ID NO: 8202 - DNA, 483 bp, Vitis vinifera
  CDS (1)..(483)
atgtcgctcatttcaagtgttcttggtagtgaccgccgaagcaacatcttcgatcccttttctctagaaatctgggatccctttgaaggatttcccttcaccacccctctcgccaacgtccccccctcgactcgcgagacctctgccttcaccaacgcacgcattgactggaaagagactcctgaagctcacgtcttcaaggctgatcttccggggttgaagaaagaggaggtgaaggttgaggttgaagagggcagagtgctgcaaattagcggagaaaggagtaaagagcaagaggaaaagaaagacaagtggcatcgggtggagaggagcagcggcaagttccttcgtcggttcaggttgccggagaatgcaaagatggatgaagctgaagctagcctggagaatggtgtgctaaccgtgactgtcccaaaagaagaggtgaagaaggctgaggtgaaggccatcgagatctcaggctaa

SEQ ID NO: 8203 - protein, 160 aa, Vitis vinifera
MSLISSVLGSDRRSNIFDPFSLEIWDPFEGFPFTTPLANVPPSTRETSAFTNARIDWKETPEAHVFKADLPGLKKEEVKVEVEEGRVLQISGERSKEQEEKKDKWHRVERSSGKFLRRFRLPENAKMDEAEASLENGVLTVTVPKEEVKKAEVKAIEISG

SEQ ID NO: 8204 - DNA, 483 bp, Vitis vinifera
  CDS (1)..(483)
atggcactcatttcaagtgttcttggtggtggccgacggagcaacatctttgatcccatctctctagatatctgggatcccttcgaaggctttccttttagcaccactcttgccaacgttcctaacagcgctcgcgaaacctctgccttcgtcaacacccgtattgattggaaagagactcccgaagctcatgttttcaaggcggatcttccagggttgaagaaggaggaagtgaaggttgaggttgaagagggcagagtacttaaaattagtggagagaggagtaaggagcaggaggagaaaaatgataaatggcatcgggtggagaggagcagcggcaagttccttcgccggttcaggttgccggagaatgctaagatggatcaagtcaaggctactatggagaacggtgtgctaactgtgagggttccaaaagaagaggtgaagaagccggaggtcaaggcgatcgagatatctggttaa

SEQ ID NO: 8205 - protein, 160 aa, Vitis vinifera
MALISSVLGGGRRSNIFDPISLDIWDPFEGFPFSTTLANVPNSARETSAFVNTRIDWKETPEAHVFKADLPGLKKEEVKVEVEEGRVLKISGERSKEQEEKNDKWHRVERSSGKFLRRFRLPENAKMDQVKATMENGVLTVRVPKEEVKKPEVKAIEISG

SEQ ID NO: 8206 - DNA, 483 bp, Vitis vinifera
  CDS (1)..(483)
atggcactcatttcaagtgttcttggtggtggccgacggagcaacatctttgatcccatctctctagatatctgggatcccttcgaaggctttccttttagcaccactcttgccaacgttcctaacagtgctcgcgaaacctctgccttcgtcaacacccgtattgattggaaagagactcccgaagctcatgttttcaaggcggatcttccagggttgaagaaggaggaagtgaaggttgaggttgaagagggcagagtacttaaaattagtggagagaggactaaagagcaggaggagaaaaatgataaatggcatcgggtggagaggagcagcggcaagttccttcgccggttcaggttgccggagaatgcaaagatggatgaagtcaaggctactatggagaacggtgtgctaactgtgagggttccaaaagaagaggtgaagaagccggaggtgaaggcgatcgagatatctggttaa

SEQ ID NO: 8207 - protein, 160 aa, Vitis vinifera
MALISSVLGGGRRSNIFDPISLDIWDPFEGFPFSTTLANVPNSARETSAFVNTRIDWKETPEAHVFKADLPGLKKEEVKVEVEEGRVLKISGERTKEQEEKNDKWHRVERSSGKFLRRFRLPENAKMDEVKATMENGVLTVRVPKEEVKKPEVKAIEISG

SEQ ID NO: 8208 - DNA, 456 bp, Vitis vinifera
  CDS (1)..(456)
atgtctctaattccaagcttcttcggcggtcgacggaacaacacgttcgacctgtgggatccattccaagacttcccattcaccagcggtgctctatcggttcccggagaaacggcgtcgtttgcgagcactcgcattgattggaaggagaccccggaagcccacgtcttcaaggccgatcttccaggggtaaagaaagaggaagtgaaggtggaggttgaggaagggaggattctgcagatcagtggagataggagtgttgagaaggaggagaagaatgacaagtggcaccgagtggagcgcagcagcggcaagttcatgcggcggttcagattgccggagaatgtgaaggtggatgaggtgaaggctgccatggagaatggtgttcttacagttactgttcccaaggctgaggtccagaaacctgatgtcaaggccatcgatatttctggttga

SEQ ID NO: 8209 - protein, 151 aa, Vitis vinifera
MSLIPSFFGGRRNNTFDLWDPFQDFPFTSGALSVPGETASFASTRIDWKETPEAHVFKADLPGVKKEEVKVEVEEGRILQISGDRSVEKEEKNDKWHRVERSSGKFMRRFRLPENVKVDEVKAAMENGVLTVTVPKAEVQKPDVKAIDISG

SEQ ID NO: 8210 - DNA, 456 bp, Vitis vinifera
  CDS (1)..(456)
atgtctttaattccaagcttcttcggcggtcgacggaacaacatgttcgacctgtgggatccattccaggacttcccattcatcggcggggctctatcggttcccggagaaacggcgtcgttcgcgaacactcgcattgattggaaggagacaccggaggcccacgtcttcaaggccgatcttcctggggtaaagaaagaggaagtgaaggtagaggttgaggaagggaggattttgcagatcagtggagataggagtgttgagaaggaggagaagaatgacaagtggcaccgagtggagcgcagcagcggccagttcatgaggcggttcaggttgccggagaatgtgaaggtggaggaggtgaaggctgccatggagaatggtgttcttactgttactgttcccaaggcagaggtcaacaaacccgatgtcaaggccatcgatatttctggttga

SEQ ID NO: 8211 - protein, 151 aa, Vitis vinifera
MSLIPSFFGGRRNNMFDLWDPFQDFPFIGGALSVPGETASFANTRIDWKETPEAHVFKADLPGVKKEEVKVEVEEGRILQISGDRSVEKEEKNDKWHRVERSSGQFMRRFRLPENVKVEEVKAAMENGVLTVTVPKAEVNKPDVKAIDISG

SEQ ID NO: 8212 - DNA, 456 bp, Vitis vinifera
  CDS (1)..(456)
atgtctctaattccaagcttcttcagcggtcgacggaacaacatgttcgacttgtgggatccgttccaagacttcccattcaccggcggtgctctatcggttcccggagaaacggcgtcgttcgcgaacactcgcattgattggaaggagaccccggaggcccacgtcttcaaggccgatcttcctggggtaaagaaagaggaagtgaaggtagaggttgaggaagggaggattttgcagatcagtggagataggagtgttgagaaggaggagaagaatgacaagtggcaccgagtggagcgcagcagcggccagttcatgaggcggttcaggttgccggagaatgtgaaggtggaggaggtgaaggctgccatggagaatggtgttcttactgttactgttcccaaggcagaggtcaagaaacccgatgtcaaggctatcgatatttctggttga

SEQ ID NO: 8213 - protein, 151 aa, Vitis vinifera
MSLIPSFFSGRRNNMFDLWDPFQDFPFTGGALSVPGETASFANTRIDWKETPEAHVFKADLPGVKKEEVKVEVEEGRILQISGDRSVEKEEKNDKWHRVERSSGQFMRRFRLPENVKVEEVKAAMENGVLTVTVPKAEVKKPDVKAIDISG

SEQ ID NO: 8214 - DNA, 456 bp, Vitis vinifera
  CDS (1)..(456)
atgtctctaattccaagcttcttcggcggtcgacggaacaacacgttcgacctgtgggatccattccaagacttcccattcaccggcggtgctctatcggttcccggggaaacggcgtcgtttgcgagcactcgcattgattggaaggagaccccggaagcccacgtcttcaaggccgatcttccaggggtaaagaaagaggaagtgaaggtggaggttgaggaagggaggattctgcagatcagtggagataggagtgttgagaaggaggagaagaatgacaagtggcaccgagtggagcgcagtagcggcaagttcatgcggcggttcagattgccggagaatgtgaaggtggatgaggtgaaggctgccatggagaatggtgttcttacagttactgttcccaaggctgaggtccagaaacctgatgtcaaggccatcgacatttctggttga

SEQ ID NO: 8215 - protein, 151 aa, Vitis vinifera
MSLIPSFFGGRRNNTFDLWDPFQDFPFTGGALSVPGETASFASTRIDWKETPEAHVFKADLPGVKKEEVKVEVEEGRILQISGDRSVEKEEKNDKWHRVERSSGKFMRRFRLPENVKVDEVKAAMENGVLTVTVPKAEVQKPDVKAIDISG

SEQ ID NO: 8216 - DNA, 456 bp, Vitis vinifera
  CDS (1)..(456)
atgtctttaattccaagcttcttcggcggtcgacggaacaacatgttcgacctgtgggatccattccaggacttcccattcatcggcggtgctctatcggttcccggagaaacggcgtcgttcgcgaacactcgcattgattggaaggagacaccggaggcccacgtcttcaaggccgatcttcctggggtaaagaaagaggaagtaaaggtggaggttgaggaagggaggattttgcagatcagtggagataggagtgttgagaaggaggagaagaatgacaagtggcaccgagtggagcgcagcagcggccagttcatgaggcggttcaggttgccggagaatgtgaaggtggaggaggtgaaggctgccatggagaatggtgttcttactgttactgttcccaaggcagaggtcaagaaacccgatgtcaaggctatcgatatttctggttga

SEQ ID NO: 8217 - protein, 151 aa, Vitis vinifera
MSLIPSFFGGRRNNMFDLWDPFQDFPFIGGALSVPGETASFANTRIDWKETPEAHVFKADLPGVKKEEVKVEVEEGRILQISGDRSVEKEEKNDKWHRVERSSGQFMRRFRLPENVKVEEVKAAMENGVLTVTVPKAEVKKPDVKAIDISG

SEQ ID NO: 8218 - DNA, 456 bp, Vitis vinifera
  CDS (1)..(456)
atgtctctaattccaaacttcttaggcggtcgacggaacaacatgttcgacatgtgggatccgttccaagacttcccattcaccggcggggctctatcggttcccggagaaacggcgtcgtttgcgaacacacgcattgattggaaggagaccccggaggcccacgtcttcaaggccgatcttcctggggtaaagaaagaggaagtaaaggtggaggttgaggaagggaggatactgcagatcagtggagataggagcattgaaaaggaggaaaagaatgacaagtggcaccgagtggagcgcagcagcggcaagttcatgcggtggttcaggttgccggagaatgtgaaggtggaggaggtgaaggctggcatggagaatggggttcttaccgttattgttcccaaggcagaggtcaagaaacctgatgtcaaggtcatagacatttccggttga

SEQ ID NO: 8219 - protein, 151 aa, Vitis vinifera
MSLIPNFLGGRRNNMFDMWDPFQDFPFTGGALSVPGETASFANTRIDWKETPEAHVFKADLPGVKKEEVKVEVEEGRILQISGDRSIEKEEKNDKWHRVERSSGKFMRWFRLPENVKVEEVKAGMENGVLTVIVPKAEVKKPDVKVIDISG

SEQ ID NO: 8220 - DNA, 435 bp, Vitis vinifera
  CDS (1)..(435)
atggctttgattcctcgtttctttggaaacccaagtgtttctgacccatttcctcgtgaaatgtgggacccgctcttcggctccggtgaggcatcatccttggccaatttgcagattgattggaaggagacgcctgaggctcatgtcttcaaggcagaccttcctgggctgaagaaagaggaggtgaaagtggaggttgaagaagggagagtgctgaagataagtggggagagaagcatggagaaggaggacaagaatgataagtggcaccgcgtagagcggagccatggcaagttcctgaggagtttcaggttgccggaaaatgctaaggtggatgctgtgaaggctgcaatggagaatggtgttcttactgttactgttcctaagaaggaagtgaaaaaacatgaggtcaagtccattgagatcagcggttga

SEQ ID NO: 8221 - protein, 144 aa, Vitis vinifera
MALIPRFFGNPSVSDPFPREMWDPLFGSGEASSLANLQIDWKETPEAHVFKADLPGLKKEEVKVEVEEGRVLKISGERSMEKEDKNDKWHRVERSHGKFLRSFRLPENAKVDAVKAAMENGVLTVTVPKKEVKKHEVKSIEISG

SEQ ID NO: 8222 - DNA, 480 bp, Populus trichocarpa
  CDS (1)..(480)
atggcatccctcattcctagcttcttcggcagccgaaagaccaacgtgttcgatccattttctctcgacatttgggatcctttcgaggacctcttctcttctacactggccaatgttcctgcctcaactggcgaaacatcagcttttgtcaatgcaagaatcgattggaaagagactccagaagctcacgttttcaaagctgaccttccggggctaaagaaagaggaggtcaaagtggaggtggaagagggtagaatcctgcaaatcagtggagagaggagcaaagaacaggagggaaaaaatgataagtggcatcgaattgagaggagcagcggcaagtttttacgcaggttcaggttgcctgggaacgcaaagatggatcaagtgaaagccagcatggagaatggagtgcttactgtgactattcccaaggcagaggaaaagaaggccgaggtcaaggccattgagatttcaggctaa

SEQ ID NO: 8223 - protein, 159 aa, Populus trichocarpa
MASLIPSFFGSRKTNVFDPFSLDIWDPFEDLFSSTLANVPASTGETSAFVNARIDWKETPEAHVFKADLPGLKKEEVKVEVEEGRILQISGERSKEQEGKNDKWHRIERSSGKFLRRFRLPGNAKMDQVKASMENGVLTVTIPKAEEKKAEVKAIEISG

SEQ ID NO: 8224 - DNA, 453 bp, Populus trichocarpa
  CDS (1)..(453)
atgtcaatagttccaattggcaaccaggatggcacaatcacaaatccgttctctttaaactcatgggatcctgaagatttcttcacttcactagacctttgggacccgtttcaaaactttccattcccttccgtactttccactccatttccttcattttcaaggcaaacccaggtaaactggagggaaacatcaagagcccatgtgtttagagctgtttttcctgattttggcagagaagatgtgcttgtttacattgatgatgataatatgcttcaagtaagcacccaggatggtaagtttatgagcaagtttaagttgcctgataatgctagaagggatcaggtcaaggctgatatggtgaatggtgtgctcactgttactattccaaaggaagaagttgccagttataggcctaatgtcagggttgtcgagatcgaaggttctggctga

SEQ ID NO: 8225 - protein, 150 aa, Populus trichocarpa
MSIVPIGNQDGTITNPFSLNSWDPEDFFTSLDLWDPFQNFPFPSVLSTPFPSFSRQTQVNWRETSRAHVFRAVFPDFGREDVLVYIDDDNMLQVSTQDGKFMSKFKLPDNARRDQVKADMVNGVLTVTIPKEEVASYRPNVRVVEIEGSG

SEQ ID NO: 8226 - DNA, 423 bp, Populus trichocarpa
  CDS (1)..(423)
atgtctctgattcgatcattgcttagcaacccactttccactgacatctggtcaccatttggttcaagtactaatgagatatcaagtttcgctagcgcgcatgttgattggaaggagaccccagaagctcatgtattcaaggctgatcttcctgggctgaagaaagaggaagtgaaggttgagattgaagaaggaagggttcttcagataagtggagaaagaagtgttgagaaggaggataaaaacgataagtggcatcgtgttgagagaggtcgtggcaaattccttaggaggttctggttgcctgagaatgctaaagttgatgaagtgaaggcatcaatggagaatggggttttgactgttacgattcccaaggccgaggagaagaagcctgaggtcaagtccattgagatcagcggctga

SEQ ID NO: 8227 - protein, 140 aa, Populus trichocarpa
MSLIRSLLSNPLSTDIWSPFGSSTNEISSFASAHVDWKETPEAHVFKADLPGLKKEEVKVEIEEGRVLQISGERSVEKEDKNDKWHRVERGRGKFLRRFWLPENAKVDEVKASMENGVLTVTIPKAEEKKPEVKSIEISG

SEQ ID NO: 8228 - DNA, 462 bp, Populus trichocarpa
  CDS (1)..(462)
atgtccatctatggcgaagtgcacaaccctttcaataactttgatgtttgggatccctaccatcatgacaatcactctggagcccctttcgctgcaccacgcccagctttctcctacgaagcaacagtgccccttgttagtaccaagatacactggaaggagactccagaggcacatatgttcagagttgatcttcctgggcttacaaaagatgaagtgaaggtggagttagagcaaggcaatgtcatttgcgtaattggtgaaaagattatcgagaaagaagagaaggccgaccattcgtaccatttggaacgtagtggtggcaagtttgttcgaagctttaggttgcctgagaactcaaaggctaagaacatgaaggcttgtatggaaaatggggtgcttaccatcacagttcccaagaaggacatgaataagacctccagactcatccacgttggatga

SEQ ID NO: 8229 - protein, 153 aa, Populus trichocarpa
MSIYGEVHNPFNNFDVWDPYHHDNHSGAPFAAPRPAFSYEATVPLVSTKIHWKETPEAHMFRVDLPGLTKDEVKVELEQGNVICVIGEKIIEKEEKADHSYHLERSGGKFVRSFRLPENSKAKNMKACMENGVLTITVPKKDMNKTSRLIHVG

SEQ ID NO: 8230 - DNA, 489 bp, Populus trichocarpa
  CDS (1)..(489)
atgtctctcatcccaagctccctctttggtggccgaagaaccaacgtctttgatcctttctctcttgacatctgggaccctttccaggactttcccttcacaagcacagccctgtcagccccacgttcagaggtcgccaaagaaacatcagcatttgccagcacacgcatagactggaaggagaccccagaggctcatgttttcaaggctgatcttccagggctgaaaaaagaggaagtgaaagtggagatagaggaaggcaaggttttacaaataagtggagagagaagcaaggagaatgaagagaaaaatgacaagtggcatagagttgagagatcgagtggtaagttcttgaggaggttcagattgcctgagaatgctaaagctgatcaggtgaaggctagtatggaaaacggggtcttgacagtgactgtgcctaaagaggaagtcaagaagcctgatgttaagtccattgagatctccggctga

SEQ ID NO: 8231 - protein, 162 aa, Populus trichocarpa
MSLIPSSLFGGRRTNVFDPFSLDIWDPFQDFPFTSTALSAPRSEVAKETSAFASTRIDWKETPEAHVFKADLPGLKKEEVKVEIEEGKVLQISGERSKENEEKNDKWHRVERSSGKFLRRFRLPENAKADQVKASMENGVLTVTVPKEEVKKPDVKSIEISG

SEQ ID NO: 8232 - DNA, 480 bp, Populus trichocarpa
  CDS (1)..(480)
atgatggcaatggttccaagcttctttaacaatcgacgaggcagtagcattttggacccattctctgcttttgacatttgggatccactcaaggacttccctttcacttcctctaattccctcatctctcgtgaaaattcagcttctgttaacacccgcattgattggaaagagaccccagaagcccatgtcttcaaggctgatcttccagggcttaagaaggaggaggtgaaggttgagattgaagatgacagagtcctccagattagcggagagaggagcgtggagaaggaagacaagaacgacacatggcatcgtgtggagcgtagcagtggcaagttcttgaggaggtttaggctgcctgagaatgccaagatggaccaaattaaggcttgtatggagaatggggttcttaccgtcactgtgcctacggaggaagtcaagaaacctgatgtcaagactgttgaaatctctgaatga

SEQ ID NO: 8233 - protein, 159 aa, Populus trichocarpa
MMAMVPSFFNNRRGSSILDPFSAFDIWDPLKDFPFTSSNSLISRENSASVNTRIDWKETPEAHVFKADLPGLKKEEVKVEIEDDRVLQISGERSVEKEDKNDTWHRVERSSGKFLRRFRLPENAKMDQIKACMENGVLTVTVPTEEVKKPDVKTVEISE

SEQ ID NO: 8234 - DNA, 468 bp, Populus trichocarpa
  CDS (1)..(468)
atggcaatgattccaagcttcttcaacaaccgatcacgagacatcatcttcgaccctttctcttctttcgatccattcaaggacttccctttcccttcttcttccctcatctctcgtgagaattcagctttcgttaacactcgcattgactggaaagagaccccagaagcccatgtcttcaaagctgatctcccggggcttaaaaaggaggaagtgaaagtcgagattgaagatgacagggtgcttcaaattagcggggagaggaacgtggagaaggaagacaagaatgatacatggcatcgtgttgaacgtagcagtggcaagttcttgagaaggttcaagctgcctgagaatgccaagatagatcaagtcaaggctggtttggagaatggggtgcttactgttactgtgccgaaggaggaagtcaagaaacctgatgtcaagaaagctattgaaatatctggttga

SEQ ID NO: 8235 - protein, 155 aa, Populus trichocarpa
MAMIPSFFNNRSRDIIFDPFSSFDPFKDFPFPSSSLISRENSAFVNTRIDWKETPEAHVFKADLPGLKKEEVKVEIEDDRVLQISGERNVEKEDKNDTWHRVERSSGKFLRRFKLPENAKIDQVKAGLENGVLTVTVPKEEVKKPDVKKAIEISG

SEQ ID NO: 8236 - DNA, 471 bp, Populus trichocarpa
  CDS (1)..(471)
atgtcgatgatcccaagtttctttggcaaccgaaggagcagcatcttcgatcctttctctcttgacgtttgggaccctttaaaggatttcccttttccttccccttccttccctcgcgatgaaaactctgcttttgttaacactcgcatcgactggaaggaaaccccagaagcccatgtcttcaaggccgatcttcctggcctcagaaaagaggaagtgaaggtccagattgaagatgatagggttctccaaatcagcggagagaggaatgtcgagaaggaagacaagaacgatacttggcatcgcgtggagaggagcagtggcaaattctcgaggaggtttaggctgcctgaaaataccaagatgaatcaggtcaaggcttctatggaaaatggggttctcacggtgaccgtgcccaaggaagaagcagtcaagaaacctgaagtcaagagcattgaaatctctggttga

SEQ ID NO: 8237 - protein, 156 aa, Populus trichocarpa
MSMIPSFFGNRRSSIFDPFSLDVWDPLKDFPFPSPSFPRDENSAFVNTRIDWKETPEAHVFKADLPGLRKEEVKVQIEDDRVLQISGERNVEKEDKNDTWHRVERSSGKFSRRFRLPENTKMNQVKASMENGVLTVTVPKEEAVKKPEVKSIEISG

SEQ ID NO: 8238 - DNA, 489 bp, Populus trichocarpa
  CDS (1)..(489)
atgtctcttatcccaagcaccctctttggtggccgaagaagtaacatctttgatcctttctctcttgacatctgggaccctttccaggactttcccttcactagcacagccatatcagccccacgatcagagttcgccaacgaaacaacggcatttgccaacacacgcatagactggaaggagacccccgaggctcacgttttcaaggctgatctcccaggcctgaagaaagaggaagtcaaagtggagttagaggaaggcagggttttgcaaataagtggagagagaagcaaagagagagaagagaaaaatgacaagtggcatagagtggagaggtcaagtgggaagttcttaaggagattcaggttgcctgagaatgcaaaacttgatcaacttaaggctaatatggaaaacggggtcttgactgtgactgtgcctaaagaggaagtcaaaaaacctgatgttaaggccatcgagatcaccggctga

SEQ ID NO: 8239 - protein, 162 aa, Populus trichocarpa
MSLIPSTLFGGRRSNIFDPFSLDIWDPFQDFPFTSTAISAPRSEFANETTAFANTRIDWKETPEAHVFKADLPGLKKEEVKVELEEGRVLQISGERSKEREEKNDKWHRVERSSGKFLRRFRLPENAKLDQLKANMENGVLTVTVPKEEVKKPDVKAIEITG

SEQ ID NO: 8240 - DNA, 453 bp, Populus trichocarpa
  CDS (1)..(453)
atgtcaatagtcccaattggtaaccaaggcggtgcaatcacaaatcccgcctctttagacacatgggatcctgaagacttcttcacttcactggatctttgggacccatttcaaaacttcccattcccttccttgttttccactcactttcctgcctttccaacgcaaacccaagtgaactggaaggaaacatcaagggcccatgtgttcagagctgtgtttcctgggtttggtagagaagatgtgcttgtttatattgatgatgatgatatgcttcaaataagtaccgaggatggtaagttcatgagcaaattcaagttgcctgataatgctagaagggatcagattaaggctgatatggtgaatggagtgcttgctgttactattcctaagcaagaagttgccagttataggcccgatgttagggttgttgagattgaaggttctgactga

SEQ ID NO: 8241 - protein, 150 aa, Populus trichocarpa
MSIVPIGNQGGAITNPASLDTWDPEDFFTSLDLWDPFQNFPFPSLFSTHFPAFPTQTQVNWKETSRAHVFRAVFPGFGREDVLVYIDDDDMLQISTEDGKFMSKFKLPDNARRDQIKADMVNGVLAVTIPKQEVASYRPDVRVVEIEGSD

SEQ ID NO: 8242 - DNA, 459 bp, Populus trichocarpa
  CDS (1)..(459)
atggcaatgatcccaagcttcttcgacaacagacgaggcaccatctttgatccattcacttgggaacccttcaaggacttccctttcccttcatcctcacttgtctctcatgacaattcagcctttgttaacacgcgcatcgattggaaagagaccccagaagcccatgtctttaaggccgatcttcctggtcttaagaaggaggaggtgaaggtggaggttgaggatgacagggtgcttcagatcagcggggagaggaacgtggagaaggaggacaagaatgacacatggcatcgtgtcgagcgtagcagcggcaagttcctgaggaggttcagactgcctgagaatgctaaggtggatcaggtcaaggcttctatggagaatggggtgcttacagtgactgtgccgaaggaggaagttaagaaacctgatgtcaaggctattgaaatctctggttga

SEQ ID NO: 8243 - protein, 152 aa, Populus trichocarpa
MAMIPSFFDNRRGTIFDPFTWEPFKDFPFPSSSLVSHDNSAFVNTRIDWKETPEAHVFKADLPGLKKEEVKVEVEDDRVLQISGERNVEKEDKNDTWHRVERSSGKFLRRFRLPENAKVDQVKASMENGVLTVTVPKEEVKKPDVKAIEISG

SEQ ID NO: 8244 - DNA, 459 bp, Populus trichocarpa
  CDS (1)..(459)
atggcaatgatcccaagcttcttcgacaacagacgaggcaccatctttgatccattcacttgggaacccttcaaggacttctctttcccttcatcctcacttgtctctcatgacaattcagcctttgtcaagacgcgcatcgattggaaagagaccccagaagcccatgtctttaaggccgatcttcctggtcttaagaaggaggaggtgaaggtggagattgaggatgacagggtgcttcagatcagcggggagaggaacgtggagaaggaggacaagaatgacacatggcatcgtgtcgagcgtagcagcggcaagttcgtgaggaggttcagactgcctgagaatgctaaggtggatcaggtcaaggcttctatggagaatggggtgcttacagtgacggtgccgaaggaggaagtcaagaaacctgatgtcaaggctattgaaatctctggttga

SEQ ID NO: 8245 - protein, 152 aa, Populus trichocarpa
MAMIPSFFDNRRGTIFDPFTWEPFKDFSFPSSSLVSHDNSAFVKTRIDWKETPEAHVFKADLPGLKKEEVKVEIEDDRVLQISGERNVEKEDKNDTWHRVERSSGKFVRRFRLPENAKVDQVKASMENGVLTVTVPKEEVKKPDVKAIEISG

SEQ ID NO: 8246 - DNA, 483 bp, Populus trichocarpa
  CDS (1)..(483)
atggaaatgattccaagcttcttagacaaccaccgaggcagaagcattatcgatccattctcttcttttgatatttggaatccgttcaaggacttctctcctttcacttccacctcaaattctctcctttctcatgaaaattcagcttttgtaaacacccgcgtggattggaaagagacaccagaagcccatgtcttcaaggcagatcttccagggcttaaaaaagaggaagtgaaggtcggagttgaagatgacagggtgcttcagattagcggagaaaggaatgtagagaaggaagacaagaacgatacatggcatagggtggagcgaagcagtggcaagttcttgaggaggtttaggctgcccaaggatgcgaaaatggatcaggtcaaggcttctatggaaaacggagttcttattgtgactgtgcctaaagaggagctcaagaaacctggtgtcaaggctattgaaatctctggttaa

SEQ ID NO: 8247 - protein, 160 aa, Populus trichocarpa
MEMIPSFLDNHRGRSIIDPFSSFDIWNPFKDFSPFTSTSNSLLSHENSAFVNTRVDWKETPEAHVFKADLPGLKKEEVKVGVEDDRVLQISGERNVEKEDKNDTWHRVERSSGKFLRRFRLPKDAKMDQVKASMENGVLIVTVPKEELKKPGVKAIEISG

SEQ ID NO: 8248 - DNA, 477 bp, Populus trichocarpa
  CDS (1)..(477)
atggcaacgattccaagcttcttttacaaccaacgagccaacagtattttcgacccagtctctgcattcgacgtttgggatccactcaaagacttccctttcacttccccgcattcactcatctctcgtgaaaactcagcctttgtcaacacccgcattgattggaaagagaccccagaagcccatgtattcgaggcagatcttccggggctaaaaagagaggaagtgaaggtcgaaatcgaagatgacagagtgcttcagatcagcggagagaggaatgtggagaaggaagaccagaacgatacatggcatcgtgtggagcgtagctgtggcaagttcctgaggaggttcaggctgcctgagaatgcgaaaatggatcatgtcaaggcttctatggagaacggggttcttactgtcactgtgcctaaagaggaagtcaagaaacctgaagtcaaggcgattgacatctctagttaa

SEQ ID NO: 8249 - protein, 158 aa, Populus trichocarpa
MATIPSFFYNQRANSIFDPVSAFDVWDPLKDFPFTSPHSLISRENSAFVNTRIDWKETPEAHVFEADLPGLKREEVKVEIEDDRVLQISGERNVEKEDQNDTWHRVERSCGKFLRRFRLPENAKMDHVKASMENGVLTVTVPKEEVKKPEVKAIDISS

SEQ ID NO: 8250 - DNA, 480 bp, Populus trichocarpa
  CDS (1)..(480)
atggcaatgattccgagcttctttaacaaccgccgaggcggcagcatcttcgactcattctccgcattcgacatttgggatccactcaaagagttccctttcacttccacctcaaattctctcctttctcgtgaaaattcagcctttgtcaacacccgcattgattggaaagagacaccagaagcccatgtcttcaaggcagatcttccagggcttaaaaaagaggaagtgaaggtcgaaattgaagatgacagggtgcttcagattagcggagaaaggaatgtggagaaggaagacaagaacgatgcatggcatagggtggagcgaagcagtggcaagttcttgaggaggtttaggctgcctgagaatgcaaaaatggatcaggtcaaggcttctatggaaaatggagtacttaccgtgactgtgcctaaagaagagatcaagaaacctgatgtcaaggctattgaaatctctggttga

SEQ ID NO: 8251 - protein, 159 aa, Populus trichocarpa
MAMIPSFFNNRRGGSIFDSFSAFDIWDPLKEFPFTSTSNSLLSRENSAFVNTRIDWKETPEAHVFKADLPGLKKEEVKVEIEDDRVLQISGERNVEKEDKNDAWHRVERSSGKFLRRFRLPENAKMDQVKASMENGVLTVTVPKEEIKKPDVKAIEISG

SEQ ID NO: 8252 - DNA, 489 bp, Populus trichocarpa
  CDS (1)..(489)
atgtctctcatcccaagctccctctttggtggccgaagaaccaacgtctttgatcctttctctcttgacatctgggaccctttccaggactttcccttcacaagcacagccctatcagccccacgctcagaggtcgccaaagaaacatcagcatttgccagcacacgcatagactggaaggagaccccagaggctcatgttttcaaggctgatcttccagggctgaaaaaagaggaagtgaaagtggagatagaggaaggtaaggttttacaaataagtggagagagaagtaaagagaaggaagagaaaaatgacaagtggcatagagttgagagatcgagtggtaagttcatgaggaggttcagattgcctgagaatgctaaagctgatcaggtgaaggctagtatggaaaatggggtcttgacagtgactgtgcctaaagaggaagtcaagaagcctgatgttaagtccattgagatctccggctga

SEQ ID NO: 8253 - protein, 162 aa, Populus trichocarpa
MSLIPSSLFGGRRTNVFDPFSLDIWDPFQDFPFTSTALSAPRSEVAKETSAFASTRIDWKETPEAHVFKADLPGLKKEEVKVEIEEGKVLQISGERSKEKEEKNDKWHRVERSSGKFMRRFRLPENAKADQVKASMENGVLTVTVPKEEVKKPDVKSIEISG

SEQ ID NO: 8254 - DNA, 489 bp, Methylacidiphilum infernorum V4
  CDS (1)..(489): transl_table=11
atggctgatctattatccaagagaagttcttttttgccttccctttgggatcctttcaaggaacttgaagagatgaggagaaagatggcttctctttttgaaaaaccactggaactcctgacttccgaggagatcgagccctttgaactgagtgagtggcggccatttacagatattaccgaggatgacaaggagttcctagtgaaaatggatcttcccgggataaaaaaggaagaggtcaaggtatcgatacaaaataatatcttgactgtttctggggaaagaaaggtggaaaaggaagaaaaagataaaaagaaaagatacatccgggtagaacgggcctatggggcatttagccggagttttgaattacccgagggggttgagaaagataaaatatccgctgagtttaaagatggtgtcctttatctccatatgcccaagggagaacaagcgcagccgaaaaccgtagaagttaaggtaagttga

SEQ ID NO: 8255 - protein, 162 aa, Methylacidiphilum infernorum V4
MADLLSKRSSFLPSLWDPFKELEEMRRKMASLFEKPLELLTSEEIEPFELSEWRPFTDITEDDKEFLVKMDLPGIKKEEVKVSIQNNILTVSGERKVEKEEKDKKKRYIRVERAYGAFSRSFELPEGVEKDKISAEFKDGVLYLHMPKGEQAQPKTVEVKVS

SEQ ID NO: 8256 - DNA, 471 bp, Desulfotalea psychrophila LSv54
  CDS (1)..(471): transl_table=11
atgactatatttccgcggagtaggaggaacattatgtcgcttgtgaaatggaatccttggcgagagattgaagatgtttttgaccgcaatattaagagagtgccgtccaggctaagtgatctgggatttgctacaagcgaagactggactcccaaggtggacatcagtgagaccgataaagagtttattatcaaggcagagcttcctgaggtaaaacgggaagatgttaaggtgacggtagataagggtgttcttacaatttgtggagagagaaagcaggaaagagaagaagagggcaagacgttccatcgagttgagagatattacggtagttttacccggagcttcaccctgcctgaaaatgtcgatgagtctaaggttgatgccagctataaggacgggatgctcaatttgaaaattgaaaaaactgaagaggcaaaaccgacaagtattgaggtggagattaagtag

SEQ ID NO: 8257 - protein, 156 aa, Desulfotalea psychrophila LSv54
MTIFPRSRRNIMSLVKWNPWREIEDVFDRNIKRVPSRLSDLGFATSEDWTPKVDISETDKEFIIKAELPEVKREDVKVTVDKGVLTICGERKQEREEEGKTFHRVERYYGSFTRSFTLPENVDESKVDASYKDGMLNLKIEKTEEAKPTSIEVEIK

SEQ ID NO: 8258 - DNA, 492 bp, Syntrophus aciditrophicus SB
  CDS (1)..(492): transl_table=11
atgattagaaacctgttgcccaccgtatggcggagaagcgaaacgcccctgcgacgcgcagaggaaagccccttcttggccctgcatcgggaaatgaaccggatgttcgacgacttttcccgaggctttgacttgtcgccctttgatggcggatggagttggggcttttcgcccccggtcgacgttcgggaggacgaaaaagaggtcaccgtgaaggccgagctgccgggcatggaggagaaggacattgaggtgaatcttgccgacaatggcctcacgatcaagggggagaagaaggccgagaaggaagagaaggggaaggacaattggtatcgggagacgagctacggtgccttccataggttcatcccgcttcccgaaggactcgacaaggagaaagttgatgctcgcttcaagaacggcgtcttgaccgttacccttcgccggttggaagaggccaaggggaagaagatcgctatcaaagcggaatag

SEQ ID NO: 8259 - protein, 163 aa, Syntrophus aciditrophicus SB
MIRNLLPTVWRRSETPLRRAEESPFLALHREMNRMFDDFSRGFDLSPFDGGWSWGFSPPVDVREDEKEVTVKAELPGMEEKDIEVNLADNGLTIKGEKKAEKEEKGKDNWYRETSYGAFHRFIPLPEGLDKEKVDARFKNGVLTVTLRRLEEAKGKKIAIKAE

SEQ ID NO: 8260 - DNA, 492 bp, Rubrobacter xylanophilus DSM 9941
  CDS (1)..(492): transl_table=11
ttgagtagtcggcgagaaagggaggtggaggccatgtcgctcagtccgttcaggggcttcttcgacttccagaacgagatgaaccggatgttcgacgaggtctttcgggggcttgcgcgccgttccaggggcgaggcggagcggcgtttcgagtggtcgccggcggtggacgtcttcagccgggacggggacctcgtgatcaaggccgagctccccggggtgcgtcgggaggacgtggacataacgctgcaggacggggttctcaccatctccggcgagcgcagggccagccgggaggaggagcggggcgaggggtacctcgtccgggagaggctctacggctccttccggcgcagcttccagctgcctgagggggtggacgagagcgggatccaggcgcgcttcgaggacggggtgctcgaggtaaccgtgcggggtgcggcccgggagactcagcccaagaggatccagatagagggtcccggcgcctag

SEQ ID NO: 8261 - protein, 163 aa, Rubrobacter xylanophilus DSM 9941
MSSRREREVEAMSLSPFRGFFDFQNEMNRMFDEVFRGLARRSRGEAERRFEWSPAVDVFSRDGDLVIKAELPGVRREDVDITLQDGVLTISGERRASREEERGEGYLVRERLYGSFRRSFQLPEGVDESGIQARFEDGVLEVTVRGAARETQPKRIQIEGPGA

SEQ ID NO: 8262 - DNA, 510 bp, Stigmatella aurantiaca DW4/3-1
  CDS (1)..(510): transl_table=11
atggccgatttgtctgttcgtcgtgggactggaagtactccgcagcgcacccgtgagtgggatccctttcagcagatgcaggagctgatgaactgggatccgttcgagctggcgaaccacccgtggtttgccaatcgccaaggcccgccggcgttcgtccccgctttcgaggtgagggagacgaaggaagcctacatcttcaaggcggacctgccgggggtggatgagaaggacatcgaggtgacgctcacgggagaccgcgtctcggtgagtggcaagagagagcgcgagaagcgcgaagagtctgaacgcttctatgcctatgagcgcagcttcggctcgttcagccgcgcgttcacccttccggaaggcgtggatggagacaacgtccgggccgacctgaagaatggggtgttgacgctcacgctgcccaagcggcccgaggtgcaacccaagcgcatccaagtggccagcagcggcacggagcagaaggaacacatcaaggcgtag

SEQ ID NO: 8263 - protein, 169 aa, Stigmatella aurantiaca DW4/3-1
MADLSVRRGTGSTPQRTREWDPFQQMQELMNWDPFELANHPWFANRQGPPAFVPAFEVRETKEAYIFKADLPGVDEKDIEVTLTGDRVSVSGKREREKREESERFYAYERSFGSFSRAFTLPEGVDGDNVRADLKNGVLTLTLPKRPEVQPKRIQVASSGTEQKEHIKA

SEQ ID NO: 8264 - DNA, 453 bp, Dorea longicatena DSM 13814
  CDS (1)..(453): transl_table=11
atgatgatgcctagtattttgggagaaaacttatttgatgattttatgaacgatttcagattacctgcatttccggatgtagacaaagaactgtatggaaaacatgcaaagaatttaatgaagacagatgtaaaagaaaccgagaaaggttatgaagtagatatggatcttccgggatttaagaaagatgaaattcagatggagctgaatgatggagtgcttaccatcagcgcagccaaaggactggacaaagatgaggaagacaagaaaggtaactacatcagaaaagagcgttatgcaggcagcatgagcagaagtttctatgtaggaaaatacgtaaccgtagaggatgtacatccgaaatacgagaacggaatcctctccttcagtgttccgaaagaggaagcaaaaccagtggaagaaaagaaaaattatatttccattgagggataa

SEQ ID NO: 8265 - protein, 150 aa, Dorea longicatena DSM 13814
MMMPSILGENLFDDFMNDFRLPAFPDVDKELYGKHAKNLMKTDVKETEKGYEVDMDLPGFKKDEIQMELNDGVLTISAAKGLDKDEEDKKGNYIRKERYAGSMSRSFYVGKYVTVEDVHPKYENGILSFSVPKEEAKPVEEKKNYISIEG

SEQ ID NO: 8266 - DNA, 498 bp, Methylobacterium nodulans ORS 2060
  CDS (1)..(498): transl_table=11
atgagaaatctgattccctggggacgcagccgcaattcggtcccgagcagcgcaaccggctccgaggtgagcccgttcctgacgctgcaccgtgagatgaatcggctgttcgatgatgtgttcagccgcttcgagacgggcatgccgtccttgcttgggccgtcctggccgagcatcgaggtgagcgcatcggacagggaggtccgcgtctcggccgagctgccgggcctggaggacaaggatgtcgagatcctggtggacgatgatgtcctgaccatccgcggcgagaagaaggccgagacggaggacaaggagcgcggcttcagtgagcgcacctacggccgcttcgagcgcgtgatcccgctgccctacggcgtggaggaggacagggcgcaggcgtcgttcaagaacggcgtcctcaccgtcaccctgccgaagtcggccaaggcgcaggagcgcgccaagcgcatcgccatcaacggcaagagcaacgcatag

SEQ ID NO: 8267 - protein, 165 aa, Methylobacterium nodulans ORS 2060
MRNLIPWGRSRNSVPSSATGSEVSPFLTLHREMNRLFDDVFSRFETGMPSLLGPSWPSIEVSASDREVRVSAELPGLEDKDVEILVDDDVLTIRGEKKAETEDKERGFSERTYGRFERVIPLPYGVEEDRAQASFKNGVLTVTLPKSAKAQERAKRIAINGKSNA

SEQ ID NO: 8268 - DNA, 471 bp, bacterium Ellin514
  CDS (1)..(471): transl_table=11
atgaataacttaacaagatggcagcggccggatctctcagcctggcccacgtttggcaaactgtttggtctgcgcaacgaattagaacgtttatttgacgtgccgttttcggaactcgcccaaggctccaaccttttaagcatttggaacccggccattgacgtttacgaagataaagacaacgtcaccgtcaaagccgagcttcccggaatgaaaaaggaggaaatcgaagtctccctgcacgatggcgccctcgtcatctcgggtgagcgcaagagtgaagagaaatttgaaaacgccgaaacttatcgcgctgaacgattcgtcggacgcttccatcgcaccgtgacactcccgtcctctgtcaaaggcgaccaggtcaaagcgcaatataaggatggcatcctgaccatcacacttccgaaagcggaggaagccaaaccaaagcaaatcgaagtcaacatcgcgtaa

SEQ ID NO: 8269 - protein, 156 aa, bacterium Ellin514
MNNLTRWQRPDLSAWPTFGKLFGLRNELERLFDVPFSELAQGSNLLSIWNPAIDVYEDKDNVTVKAELPGMKKEEIEVSLHDGALVISGERKSEEKFENAETYRAERFVGRFHRTVTLPSSVKGDQVKAQYKDGILTITLPKAEEAKPKQIEVNIA

SEQ ID NO: 8270 - DNA, 465 bp, Rosa chinensis
  CDS (1)..(465)
atgtcgcttatcccaaatttccgacgaaacagcgtcttcgacctcgatctctgggacccattcagggatttccaattcccttcttcatctctctccacattccctgaatttcctggcgagaattcggctttcatcaacaccaggatcgactggaaggagaccccagaagcccatgtgttcaaggccgaccttccggggctgaagaaagaagaggtcaaggttgagattgaaaatgacagggtgctgcagatcagcggagagaggaagatagagaaggaggacaagaacgacaagtggcaccgggtcgagagaagcagcggcaagttctccaggaggttcaggcttcctgagaatgcgaagcttgatgagattaaggctgctatggagaatggagttctcagggtgactgttcctaaggcaaaggtgaagaggcctgatgtcaaagccattgaaatttctgggtaa

SEQ ID NO: 8271 - protein, 154 aa, Rosa chinensis
MSLIPNFRRNSVFDLDLWDPFRDFQFPSSSLSTFPEFPGENSAFINTRIDWKETPEAHVFKADLPGLKKEEVKVEIENDRVLQISGERKIEKEDKNDKWHRVERSSGKFSRRFRLPENAKLDEIKAAMENGVLRVTVPKAKVKRPDVKAIEISG

SEQ ID NO: 8272 - DNA, 474 bp, Ageratina adenophora
  CDS (1)..(474)
atgtcgatcattccaagcttctttaccggccgcaggagcaacgtattcgacccattctccatcgagatctgggacccgtttcagggcttctctagtgcaatcagcaacctccctgaatcgtcacgtgaaaccgcagcaatcgccaacgccagaatcgactggaaggagacgccggaggctcacgtgttcaaggcggatttaccaggtctgaagaaggaggaagtgaaggtggaggtggaagaaggtagggtgttgcagatcagcggagagagaagcaaagaaaacgaggagaagaatgagaaatggcatagggtggagaggagctccgggaagtttgtgaggaggttcaggctgccggagaatgcaaaattggagggggtgaaagcagccatggagaacggagtgcttacggtgacggtgcccaaggcggaagagaagaagccggaggtgaaatccatcgacatttcgggctaa

SEQ ID NO: 8273 - protein, 157 aa, Ageratina adenophora
MSIIPSFFTGRRSNVFDPFSIEIWDPFQGFSSAISNLPESSRETAAIANARIDWKETPEAHVFKADLPGLKKEEVKVEVEEGRVLQISGERSKENEEKNEKWHRVERSSGKFVRRFRLPENAKLEGVKAAMENGVLTVTVPKAEEKKPEVKSIDISG

SEQ ID NO: 8274 - DNA, 450 bp, Oryza sativa subsp. indica
  CDS (1)..(450)
atgtcgctcgtgaggcgcagcaacgtgttcgaccccttcgccgacttctgggaccccttcgacggcgtcctccgctccctcgtcccggcgacctccgaccgcgacaccgccgctttcgccaacgcccgcgtcgactggaaggagacgccggagtcgcacgtcttcaaggccgacctccccggcgtgaagaaggaggaggtgaaggtggaggtggaggagggcaacgtgctggtgatcagcgggcagcgcagcaaggagaaggaggacaagaacgacaagtggcaccgcgtggagcgcagcagcgggcagttcatgcggcggttccggctgccggagaacgccaaggtggaccaggtgaaggccagcatggagaacggcgtgctcaccgtcaccgtgcccaaggctgaggtcaataagcccgaggtgaaggccattgagatctctggctga

SEQ ID NO: 8275 - protein, 149 aa, Oryza sativa subsp. indica
MSLVRRSNVFDPFADFWDPFDGVLRSLVPATSDRDTAAFANARVDWKETPESHVFKADLPGVKKEEVKVEVEEGNVLVISGQRSKEKEDKNDKWHRVERSSGQFMRRFRLPENAKVDQVKASMENGVLTVTVPKAEVNKPEVKAIEISG

SEQ ID NO: 8276 - DNA, 465 bp, Oryza sativa subsp. indica
  CDS (1)..(465)
atgtcgctgatccgccgcagcaacgtgttcgaccccttctccctcgacctctgggaccccttcgacggcttccccttcggctccggcagcggcagcctcttccctcgcgccaactccgacgcggcggccttcgccggcgcgcggatcgactggaaggagacgcccgaggcgcacgtgttcaaggcggacgtgccggggctgaagaaggaggaggtcaaggtggaggttgaggacggcaacgtcctccagatcagcggcgagcgcatcaaggagcaggaggagaagacggacaagtggcaccgcgtggagcgcagcagcggcaagttcctccgcaggttccggctgccggagaacaccaagccggagcagatcaaggcgtccatggagaacggcgtgctcaccgtcaccgtgcccaaggaggagcccaagaagcccgacgtcaagtccatccagatcaccggctag

SEQ ID NO: 8277 - protein, 154 aa, Oryza sativa subsp. indica
MSLIRRSNVFDPFSLDLWDPFDGFPFGSGSGSLFPRANSDAAAFAGARIDWKETPEAHVFKADVPGLKKEEVKVEVEDGNVLQISGERIKEQEEKTDKWHRVERSSGKFLRRFRLPENTKPEQIKASMENGVLTVTVPKEEPKKPDVKSIQITG

SEQ ID NO: 8278 - DNA, 483 bp, Oryza sativa subsp. indica
  CDS (1)..(483)
atgtcgctgatccgccgcagcaacgtgttcgaccccttctccctcgacccctgggaccccttcgacggcttccccttcggctccggcagaagcagcggcagcatcttcccgtccttcccccgcggcacctcctccgagaccgcggccttcgccggcgcgcgcatcgactggaaggagacgccggaggcgcacgtgttcaaggcggacgtgccggggctgaagaaggaggaggtcaaggtggaggtggaggacggcaacgtcctccagatcagcggcgagcgcagcaaggagcaggaggagaagacggacaagtggcaccgcgtggagcgcagcagcggcaagttcctccgcaggttccggctgccggagaacaccaagccggagcagatcaaggcgtccatggagaacggggtgctcaccgtcaccgtgcccaaggaggagcccaagaagcccgacgtcaagtccatccaggttaccggctag

SEQ ID NO: 8279 - protein, 160 aa, Oryza sativa subsp. indica
MSLIRRSNVFDPFSLDPWDPFDGFPFGSGRSSGSIFPSFPRGTSSETAAFAGARIDWKETPEAHVFKADVPGLKKEEVKVEVEDGNVLQISGERSKEQEEKTDKWHRVERSSGKFLRRFRLPENTKPEQIKASMENGVLTVTVPKEEPKKPDVKSIQVTG

SEQ ID NO: 8280 - DNA, 480 bp, Oryza sativa subsp. indica
  CDS (1)..(480)
atgtcgctgatccgccgcggcaacgcgttcgaccccttctccctcgacctctgggatcccttcgacggcttccccttcggctccggcggcagcagcagcagcagcggcagcctcttccctcgggccaactccgacgcggcggccttcgccggcgcgcgcatcgactggaaggagacgcccgaggtgcacgtgttcaaggcggacgtgccggggctgaagaaggaggaggtcaaggtggaggtggacgacggcaacatcctgcagatcagcggcgagcgcagcagggagcaggaggagaagtcggacaagtggcaccgcgtggagcgcagcagcggcaagttcctccgcaggttccgcctccccgagaacaccaagccggagcagatcaaggcgtccatggagaatggcgtgctcaccgtcaccgtgcccaaggaagagcccaagaagcccgacgtcaagtccatccagatctccggctag

SEQ ID NO: 8281 - protein, 159 aa, Oryza sativa subsp. indica
MSLIRRGNAFDPFSLDLWDPFDGFPFGSGGSSSSSGSLFPRANSDAAAFAGARIDWKETPEVHVFKADVPGLKKEEVKVEVDDGNILQISGERSREQEEKSDKWHRVERSSGKFLRRFRLPENTKPEQIKASMENGVLTVTVPKEEPKKPDVKSIQISG

SEQ ID NO: 8282 - DNA, 486 bp, Oryza sativa subsp. japonica
  CDS (1)..(486)
atgtcgctgatccgccgcagcaacgtgttcgaccccttctccctcgacctctgggaccccttcgacggcttccccttcggctccggcagcagaagcagcggcagcatcttcccgtccttcccccgcggcacctcctccgagaccgcggccttcgccggcgcgcgcatcgactggaaggagacgccggaggcgcacgtgttcaaggcggacgtgccggggctgaagaaggaggaggtcaaggtggaggtggaggacggcaacgtcctccagatcagcggcgagcgcagcaaggagcaggaggagaagacggacaagtggcaccgcgtggagcgcagcagcggcaagtacctccgcaggttccggctgccggagaacaccaagccggagcagatcaaggcgtccatggagaacggcgtgctcaccgtcaccgtgcccaaggaggagcccaagaagcccgacgtcaagtccatccaggttaccggctag

SEQ ID NO: 8283 - protein, 161 aa, Oryza sativa subsp. japonica
MSLIRRSNVFDPFSLDLWDPFDGFPFGSGSRSSGSIFPSFPRGTSSETAAFAGARIDWKETPEAHVFKADVPGLKKEEVKVEVEDGNVLQISGERSKEQEEKTDKWHRVERSSGKYLRRFRLPENTKPEQIKASMENGVLTVTVPKEEPKKPDVKSIQVTG

SEQ ID NO: 8284 - DNA, 489 bp, Agave tequilana
  CDS (1)..(489)
atggctctgattcctcagatctttggccagaggagcaacatcttcgaccctttttcactcgatgtttgggatcctttccaaggctggcctttcgaccgctcagtcaccggcggccagtctcggcccagcggcgcactgagcgagacctcttcttttgccaacacccgcatcgactggaaggagacccccgaggcccacgtcttcaaggccgacctcccggggctgaagaaggaagaggtgaaggtggaggttgaagaagggagggtgcttcagatcagcggagagcgcagcaaagagcaggaagagaagaacgacaagtggcaccgggtcgagaggagcagcgggaggttccttcgaaggttcaggctgccggagaacgcgaagatggatcaggtgaaggcggcgatggagaacggcgtgctgactgtgactgtgccgaaagaagaggtcaagaagccagaggtgaaagccatcgaggtctctggttga

SEQ ID NO: 8285 - protein, 162 aa, Agave tequilana
MALIPQIFGQRSNIFDPFSLDVWDPFQGWPFDRSVTGGQSRPSGALSETSSFANTRIDWKETPEAHVFKADLPGLKKEEVKVEVEEGRVLQISGERSKEQEEKNDKWHRVERSSGRFLRRFRLPENAKMDQVKAAMENGVLTVTVPKEEVKKPEVKAIEVSG

SEQ ID NO: 8286 - DNA, 462 bp, Agave tequilana
  CDS (1)..(462)
atgtcgatcgttccctctggattcggcccccgcatcctcgaccccttctcatccctcgacctctgggacccctttgccaacttcccattcttcaacaacaattccctctctgttcctcgctccaccttagccagtgagacctcggcgttcgccaatacgcgcatcgactggaaggagacgcctgaggcccatgtcttcaaggccgacctccctgggctaaagaaggaggaggtgaaggttgagattgaagaaggcagggtcctgcagatcagcggggagcggagcaaggagcaggaggagaagaacgacaagtggcaccgtatcgagaggagcaccgggaggttcctgaggaggttcaggctgccggagaacacgaaggtggaccaggtaaaggcagcaatggagaatggggtgctgacgatcaccgtgccgaaggaggaggtcaagaagcctgaggtgtag

SEQ ID NO: 8287 - protein, 153 aa, Agave tequilana
MSIVPSGFGPRILDPFSSLDLWDPFANFPFFNNNSLSVPRSTLASETSAFANTRIDWKETPEAHVFKADLPGLKKEEVKVEIEEGRVLQISGERSKEQEEKNDKWHRIERSTGRFLRRFRLPENTKVDQVKAAMENGVLTITVPKEEVKKPEV

SEQ ID NO: 8288 - DNA, 486 bp, Agave tequilana
  CDS (1)..(486)
atggctctgattccacaaatctttgggcagcgaaccaacgtcttcgacccattctccctcgacatctgggatcccttccagggctggcctttcgaccgctccatcaccggccagtctcggccgagcggtgctctcagcgagacctctgcgtttgccaacacccgcattgattggaaggagacccccgaggcccatgtcttcaaggccgacctccccgggctgaagaaggaagaggtgaaggtggaggttgaggaaggaagagtgcttcagatcagcggagagcgcagcaaagagaaggaggagaagaatgaaaagtggcacagggtcgagaggagcagcggcaaattccttcgaaggttcaggctgcctgagaacgcgaagatggagcaggtgaaggcgagcatggagaatggcgtgctgactgtgactgtgcccaaagaggaggtcaagaagcccgaggtgaagcccatcgagatctctggctga

SEQ ID NO: 8289 - protein, 161 aa, Agave tequilana
MALIPQIFGQRTNVFDPFSLDIWDPFQGWPFDRSITGQSRPSGALSETSAFANTRIDWKETPEAHVFKADLPGLKKEEVKVEVEEGRVLQISGERSKEKEEKNEKWHRVERSSGKFLRRFRLPENAKMEQVKASMENGVLTVTVPKEEVKKPEVKPIEISG

SEQ ID NO: 8290 - DNA, 489 bp, Agave tequilana
  CDS (1)..(489)
atggctttgattcctcaagtggttgggcggatgagcagcatattcgaccctttctcccccgacatctgggatcctttccaaggctggcctttcgaccgctcgcccactgctgatcaatctcgatccggcggtgctctgaacgagacctcggccttcaccgacacccgcattgattggaaggagactcccgaggcccacgtcttcaaggcggacctcccggggctcaagaaggaagaagtgaaggtggaggttgaggatggcagggtgcttcagatcagcggagagcggagcaaagagaaagaagataagaatgacaagtggcacagggtagagaggagcatcggcaaattcctcagaaggttcaggctgccggagaacgcgaagacggagcaggtgaaggcgagcatggagaacggcgtgctcaccgtgactgtgcccaaagaggaaatcaagaagcccggggtgaaggccattgaaatctctggctga

SEQ ID NO: 8291 - protein, 162 aa, Agave tequilana
MALIPQVVGRMSSIFDPFSPDIWDPFQGWPFDRSPTADQSRSGGALNETSAFTDTRIDWKETPEAHVFKADLPGLKKEEVKVEVEDGRVLQISGERSKEKEDKNDKWHRVERSIGKFLRRFRLPENAKTEQVKASMENGVLTVTVPKEEIKKPGVKAIEISG

SEQ ID NO: 8292 - DNA, 480 bp, Agave tequilana
  CDS (1)..(480)
atggctctgattcctcagatctttgggcagaggaccaacatcttcgatcccttctccctagacgtctgggatcctttccagggctggcctttcgaccggtctctcacatcaaaaagcggcggcgctgtgagcgagacgtctgcgtttgccaacacccgcatcgattggaaggagacccccgaggcccacgtcttcaaggccgacctgccggggataaagaaggaagaggtgaaggtggaggttgaagaagggagagtgcttcagatcagcggagagcgcagcagagaggaggaggagaagaatgacaagtggcacagggtcgagaggagcagcggcaaattccttcgaaggttcaggctgccggagaacgtgaagatggatcaggtgaaggccagcatggagaatggtgtgctgacagtaactgtgcctaaagaggaagtcaagaagcctgaagtgaaggccattgaagtctctggctga

SEQ ID NO: 8293 - protein, 159 aa, Agave tequilana
MALIPQIFGQRTNIFDPFSLDVWDPFQGWPFDRSLTSKSGGAVSETSAFANTRIDWKETPEAHVFKADLPGIKKEEVKVEVEEGRVLQISGERSREEEEKNDKWHRVERSSGKFLRRFRLPENVKMDQVKASMENGVLTVTVPKEEVKKPEVKAIEVSG

SEQ ID NO: 8294 - DNA, 486 bp, Agave tequilana
  CDS (1)..(486)
atggctctgattccacaaatctttgggcagcgaaccaacgtcttcgacccattctccctcgacatctgggatcccttccagggctggcctttcgaccgctccatcaccggccagtctcggccgagcggtgctctcagcgagacctctgcgtttgccaacacccgcattgattggaaggagacccccgaggcccatgtcttcaaggccgacctccccgggctgaagaaggaagaggtgaaggtgggggttgaggaaggaagagtgcttcagatcagcggagagcgcagcaaagagaaggaggagaagaatgaaaagtggcacagggtcgagaggagcagcggcaaattccttcgaaggttcaggctgcctgagaacgcgaagatggagcaggtgaaggcgagcatggagaatggcgtgctgactgtgactgtgcccaaagaggaggtcaagaagcccgaggtgaagcccatcgagatctctggctga

SEQ ID NO: 8295 - protein, 161 aa, Agave tequilana
MALIPQIFGQRTNVFDPFSLDIWDPFQGWPFDRSITGQSRPSGALSETSAFANTRIDWKETPEAHVFKADLPGLKKEEVKVGVEEGRVLQISGERSKEKEEKNEKWHRVERSSGKFLRRFRLPENAKMEQVKASMENGVLTVTVPKEEVKKPEVKPIEISG

SEQ ID NO: 8296 - DNA, 486 bp, Agave tequilana
  CDS (1)..(486)
atggctctgatccctcaaatctttgggcagaggaccaacgtcttcgaccctttctccctcgacatctgggatcccttccaaggctggcctttcgaccgctccatcaccggccagtctcggccgagcgatgctctgagcgagacctctgcgtttgccaacgcccgcatcgattggaaggagacccccgaggcccacgtcttcaaggccgacctcccggggctgaagaaggaagaggtgaaggtggaggttgaggaagggagagtgcttcagatcagcggagagcgcagtaaagagaaggaggagaagaatgaaaagtggcacagggtcgagaggagcagcggcaaattccttcgaaggttcaggttgcctgagaacgcgaaaatggagcaggtgaaggcgagcatggagaatggcgtgctgactgtgactgtgcccaaagaggaggtcaagaagcccgaggtgaagcctatcgagatctctggttaa

SEQ ID NO: 8297 - protein, 161 aa, Agave tequilana
MALIPQIFGQRTNVFDPFSLDIWDPFQGWPFDRSITGQSRPSDALSETSAFANARIDWKETPEAHVFKADLPGLKKEEVKVEVEEGRVLQISGERSKEKEEKNEKWHRVERSSGKFLRRFRLPENAKMEQVKASMENGVLTVTVPKEEVKKPEVKPIEISG

SEQ ID NO: 8298 - DNA, 486 bp, Agave tequilana
  CDS (1)..(486)
atggctctgattccacaaatttttgggcagaggaccaacgtcttcgaccccttctccctcgacacctgggatcccttccaaggctggcctttcgaccgctccatcaccggtcagtctcggccgagcggtgctctgagcgagacctctgcgtttgccaacacccgcattgattggaaggagacccccgaggcccacgtcttcaaggccgacctcccggggctgaagaaggaagaggtgaaggtggaggttgaggaagggagagtgcttcagatcagcggagagcgcagtaaggaggaggaggagaagaatgacaagtggcacagggtcgagaggagcagcggcaaattccttcgaaggttcaggctgcctgagaacgcgaagatggagcaggtgaaggcgagcatggagaatggcgtgctgactgtgactgtgcccaaaaaggaggtaaagaagactgaggtgaaggctatcgagatctctggctga

SEQ ID NO: 8299 - protein, 161 aa, Agave tequilana
MALIPQIFGQRTNVFDPFSLDTWDPFQGWPFDRSITGQSRPSGALSETSAFANTRIDWKETPEAHVFKADLPGLKKEEVKVEVEEGRVLQISGERSKEEEEKNDKWHRVERSSGKFLRRFRLPENAKMEQVKASMENGVLTVTVPKKEVKKTEVKAIEISG

SEQ ID NO: 8300 - DNA, 486 bp, Agave tequilana
  CDS (1)..(486)
atggctctgattccacaaatttttgggcagaggaccaacgtcttcgaccccttctccctcgacccctgggatcccttccaaggctggcctttcgaccgctccatcaccggccagtctcggccgagcggtgctctgagcgagacctctgcgtttgccaacgcccgcatcgattggaaggagacccccgaggcccacgtcttcaaggctgacctgccggggctgaagaaggaagaggtgaaggtggaggtcgaggaagggagagtgcttcagatcagcggagagcgcagcgaagagaaggaagagaagaatgaaaagtggcacagggtcgagaggagcagcggcaaattccttcgaaggttcaggctgcctgagaacgcgaagatggagcaggtgaaggcgagcatggagaatggcgtgctgactgtgactgtgcccaaagaggaggtcaagaagcctgaggtgaagcccatcgagatctctggttaa

SEQ ID NO: 8301 - protein, 161 aa, Agave tequilana
MALIPQIFGQRTNVFDPFSLDPWDPFQGWPFDRSITGQSRPSGALSETSAFANARIDWKETPEAHVFKADLPGLKKEEVKVEVEEGRVLQISGERSEEKEEKNEKWHRVERSSGKFLRRFRLPENAKMEQVKASMENGVLTVTVPKEEVKKPEVKPIEISG

SEQ ID NO: 8302 - DNA, 483 bp, Vitis vinifera
  CDS (1)..(483)
  misc_feature (9)..(9): w is a or t
  misc_feature (28)..(28): r is g or a
atggcactwatttcaagtgttcttggtrgtggccgacggagcaacatctttgatcccatctctctagatatctgggatcccttcgaaggctttccttttagcaccactcttgccaacgttcctaacaccgctcgcgaaacctctgccttcgtcaacacccgtattgattggaaagagactcccgaagctcatgttttcaaggcggatcttccagggttgaagaaggaggaagtgaaggttgaagttgaagagggcagagtacttaaaattagtggagagaggactaaagagcaggaggagaaaaatgataaatggcatcgggtggagaggagcagcggcaagttccttcgccggttcaggttgccggagaatgcaaagatggatgaagtcaaggctactatggagaacggtgtgctaactgtgagggttccaaaagaagaggtgaagaagccggaggtcaaggcgatcgagatatctggttaa

SEQ ID NO: 8303 - protein, 160 aa, Vitis vinifera
  misc_feature (10)..(10): The Xaa at location 10 stands for Gly, or Ser.
MALISSVLGXGRRSNIFDPISLDIWDPFEGFPFSTTLANVPNTARETSAFVNTRIDWKETPEAHVFKADLPGLKKEEVKVEVEEGRVLKISGERTKEQEEKNDKWHRVERSSGKFLRRFRLPENAKMDEVKATMENGVLTVRVPKEEVKKPEVKAIEISG

SEQ ID NO: 8304 - DNA, 483 bp, Vitis vinifera
  CDS (1)..(483)
atgtcgctcatttcaagtgttcttggtagtgaccgccgaagcaacatcttcgatcccttttctctagaaatctgggatccctttgaaggatttcccttcaccacccctctcgccaacgtccccccctcgactcgcgagacctctgccttcaccaacgcacgcattgactggaaagagactcctgaagctcacgtcttcaaggctgatcttccggggttgaagaaagaggaggtgaaggtcgaggttgaagagggcagagtgctgcagattagcggagaaaggagtaaggagcaagaggaaaagaaagacaagtggcatcgggtggagaggagcagcggcaagttccttcgtcggttcaggttgccggagaatgcaaagatggatgaagttaaagctagcctggagaatggtgtgctaaccgtgactgtcccaaaagaagaggtgaagaaggctgaggtgaaggccatcgagatatctggttaa

SEQ ID NO: 8305 - protein, 160 aa, Vitis vinifera
MSLISSVLGSDRRSNIFDPFSLEIWDPFEGFPFTTPLANVPPSTRETSAFTNARIDWKETPEAHVFKADLPGLKKEEVKVEVEEGRVLQISGERSKEQEEKKDKWHRVERSSGKFLRRFRLPENAKMDEVKASLENGVLTVTVPKEEVKKAEVKAIEISG

SEQ ID NO: 8306 - DNA, 480 bp, Vitis vinifera
  CDS (1)..(480)
atgtcgctaattcctcgccgatccaatgtttttgatccattctctctggacgtatgggatccatttgagggttggccattcaacagcaacttccgctctctctctgatcagatccgctccggtttccccgctgaaacgtcgtcctttgtccaggccagggtcgactggaaggaaaccccaaattctcacgtcttcaaggctgatgtgcctgggctgaagaaggaggagctgaaggtggaggttgaagacgggcgggttcttcagatcagcggacagagaaaccgcgaactggaggagaagacagacacttggcaccgtgtggagcgtagcagcggcagcttcttgaggaggttccggctgccggaggacgccaaggtggatcaggtgaaggcggccatggaggatggtgtgttgactgtgactgtgccaaaggaggcggccaagaagcccgatgtgaagtccattcaaatctctggctga

SEQ ID NO: 8307 - protein, 159 aa, Vitis vinifera
MSLIPRRSNVFDPFSLDVWDPFEGWPFNSNFRSLSDQIRSGFPAETSSFVQARVDWKETPNSHVFKADVPGLKKEELKVEVEDGRVLQISGQRNRELEEKTDTWHRVERSSGSFLRRFRLPEDAKVDQVKAAMEDGVLTVTVPKEAAKKPDVKSIQISG

SEQ ID NO: 8308 - DNA, 483 bp, Vitis vinifera
  CDS (1)..(483)
  misc_feature (72)..(72): m is a or c
  misc_feature (189)..(189): y is t or c
  misc_feature (287)..(287): m is a or c
  misc_feature (288)..(288): r is g or a
  misc_feature (289)..(289): r is g or a
  misc_feature (412)..(412): k is g or t
  misc_feature (476)..(476): w is a or t
atgtcgctcatttcaagtgttcttggtagtggccgccgaagcaacatcttcgatcccttttctctggacatmtgggatccctttgaaggatttcccttcaccacccctctcgccaacgtcccctcctcgactcgcgagacctctgccttcaccaacgcacgcattgactggaaagagactcctgaagcycacgtcttcaaggctgatcttccggggttgaagaaagaggaggtgaaggttgaggttgaagagggcagagtgctgcaaattagcggagaaaggagtamrragcaagaggaaaagaaagacaagtggcatcgggtggagaggagcagcggcaagttccttcgtcggttcaggttgccggagaatgcaaagatggatgaagttaaagctagcctggagaatggtktgctaaccgtgactgtcccaaaagaagaggtgaagaaggctgaggtgaaggccatcgagatctwtggctaa

SEQ ID NO: 8309 - protein, 160 aa, Vitis vinifera
  misc_feature (96)..(96): The Xaa at location 96 stands for Lys, or Thr.
  misc_feature (97)..(97): The Xaa at location 97 stands for Glu, or Lys.
  misc_feature (138)..(138): The Xaa at location 138 stands for Leu, or Val.
  misc_feature (159)..(159): The Xaa at location 159 stands for Phe, or Tyr.
MSLISSVLGSGRRSNIFDPFSLDIWDPFEGFPFTTPLANVPSSTRETSAFTNARIDWKETPEAHVFKADLPGLKKEEVKVEVEEGRVLQISGERSXXQEEKKDKWHRVERSSGKFLRRFRLPENAKMDEVKASLENGXLTVTVPKEEVKKAEVKAIEIXG

SEQ ID NO: 8310 - DNA, 483 bp, Vitis vinifera
  CDS (1)..(483)
  misc_feature (375)..(375): k is g or t
  misc_feature (393)..(393): r is g or a
  misc_feature (396)..(396): w is a or t
  misc_feature (427)..(427): r is g or a
atggcactcatttcaagtgttcttggtggtggccgacggagcaacatctttgatcccatctctctagatatctgggatcccttcgaaggctttccttttagcaccactcttgccaacgttcctaacagcgctcgcgaaacctctgccttcgtcaacacccgtattgattggaaagagactcccgaagctcatgttttcaaggcggatcttccagggttgaagaaggaggaagtgaaggttgaggtcgaagagggcagagtacttaaaattagtggagagaggactaaagagcaggaagagaaaaatgataaatggcatcgggtggagaggagcagcggcaagttccttcgccggttcaggttgccggagaatgckaagatggatcaagtcaargcwactatggagaacggtgtgctaactgtgaggrttccaaaagaagaggtgaagaagccggaggtgaaggcgatcgagatatctggttaa

SEQ ID NO: 8311 - protein, 160 aa, Vitis vinifera
  misc_feature (143)..(143): The Xaa at location 143 stands for Ile, or Val.
MALISSVLGGGRRSNIFDPISLDIWDPFEGFPFSTTLANVPNSARETSAFVNTRIDWKETPEAHVFKADLPGLKKEEVKVEVEEGRVLKISGERTKEQEEKNDKWHRVERSSGKFLRRFRLPENAKMDQVKATMENGVLTVRXPKEEVKKPEVKAIEISG

SEQ ID NO: 8312 - DNA, 483 bp, Vitis vinifera
  CDS (1)..(483)
  misc_feature (9)..(9): s is g or c
atggcactsatttcaagtgttcttggtggtggccgacggagcaacatctttgatcccatctctctagatatctgggatcccttcgaaggctttccttttagcaccactcttgccaacgttcctaacagcgctcgcgaaacctctgccttcgtcaacacccgtattgattggaaagagactcccgaagctcatgttttcaaggcggatcttccagggttgaagaaggaggaagtgaaggttgaggtcgaagagggcagagtacttaaaattagtggagagaggactaaagagcaggaagagaaaaatgataaatggcatcgggtggagaggagcagcggcaagttccttcgccggttcaggttgccggagaatgctaagatggatcaagtcaaggctactatggagaacggtgtgctaactgtgagggttccaaaagaagaggtgaagaagccggaggtgaaggcgatcgagatatctggttaa

SEQ ID NO: 8313 - protein, 160 aa, Vitis vinifera
MALISSVLGGGRRSNIFDPISLDIWDPFEGFPFSTTLANVPNSARETSAFVNTRIDWKETPEAHVFKADLPGLKKEEVKVEVEEGRVLKISGERTKEQEEKNDKWHRVERSSGKFLRRFRLPENAKMDQVKATMENGVLTVRVPKEEVKKPEVKAIEISG

SEQ ID NO: 8314 - DNA, 474 bp, Ageratina adenophora
  CDS (1)..(474)
atgtcaatcattccgagcttctttaccggtagcaggagcagcgttttcgatccgttttccagcgaaatctgggaccccttccagggcttctctagtgccatcagcaaccttccagaatcgtcacgtgaaacagcagcaatcgccaacgccagaatcgactggaaagagacgccggaggctcacgtgttcaaggcggacttaccaggtctgaagaaggaggaagtgaaggtggaggtggaagaaggtagggtgttgcagatcagcggagagaggagcagagaaaacgaggagaagaatgagaaatggcatagggtggagaggagctccgggaagtttgtgaggaggttcaggctgccggagaatgcaaaattggaggaggttaaagctgccatggagaacggtgtgctgacggtgacggtgcccaaggcggaggagaagaagccggacgtgaagtctattgacatttccggctaa

SEQ ID NO: 8315 - protein, 157 aa, Ageratina adenophora
MSIIPSFFTGSRSSVFDPFSSEIWDPFQGFSSAISNLPESSRETAAIANARIDWKETPEAHVFKADLPGLKKEEVKVEVEEGRVLQISGERSRENEEKNEKWHRVERSSGKFVRRFRLPENAKLEEVKAAMENGVLTVTVPKAEEKKPDVKSIDISG

SEQ ID NO: 8316 - DNA, 462 bp, Vitis vinifera
  CDS (1)..(462)
atgtcgctaattcctcgccgatccaatgtttttgatccattctctctggacgtatgggatccatttgacaacttccgctctctctctgatcagatccgctccggtttccccgctgaaacgtcgtcctttgtccaggccagggtcgactggaaggaaaccccaaattctcacgtcttcaaggctgatgtgcctgggctgaagaaggaggagctgaaggtggaggttgaagacgggcgggttcttcagatcagtggacagagaaaccgcgaactggaggagaagacagacacttggcaccgtgtggagcgtagcagcggcagcttcttgaggaggttccggctgccggaggacgccaaggtggatcaggtgaaggcggccatggaggatggtgtgttgactgtgactgtgccaaaggaggcggccaagaagcccgatgtgaagtccattcaaatctctggctga

SEQ ID NO: 8317 - protein, 153 aa, Vitis vinifera
MSLIPRRSNVFDPFSLDVWDPFDNFRSLSDQIRSGFPAETSSFVQARVDWKETPNSHVFKADVPGLKKEELKVEVEDGRVLQISGQRNRELEEKTDTWHRVERSSGSFLRRFRLPEDAKVDQVKAAMEDGVLTVTVPKEAAKKPDVKSIQISG

SEQ ID NO: 8318 - DNA, 435 bp, Vitis vinifera
  CDS (1)..(435)
atgtctctaattccaagcttcttcagcggtcgacggaacaacatgttcgacttgtgggatccgttccaagacttcccattcaccggcgaaacggcgtcgttcgcgaacactcgcattgattggaaggagaccccggaggcccacgtcttcaaggccgatcttcctggggtaaagaaagaggaagtgaaggtagaggttgaggaagggaggattttgcagatcagtggagataggagtgttgagaaggaggagaagaatgacaagtggcaccgagtggagcgcagcagcggccagttcatgaggcggttcaggttgccggagaatgtgaaggtggaggaggtgaaggctgccatggagaatggtgttcttactgttactgttcccaaggcagaggtcaagaaacccgatgtcaaggctatcgatatttctggttga

SEQ ID NO: 8319 - protein, 144 aa, Vitis vinifera
MSLIPSFFSGRRNNMFDLWDPFQDFPFTGETASFANTRIDWKETPEAHVFKADLPGVKKEEVKVEVEEGRILQISGDRSVEKEEKNDKWHRVERSSGQFMRRFRLPENVKVEEVKAAMENGVLTVTVPKAEVKKPDVKAIDISG

SEQ ID NO: 8320 - DNA, 405 bp, Vitis vinifera
  CDS (1)..(405)
atgtctgtgattccaagcttcttcagcgatccgttccaagacttcccattcaccagcgaaacggcgtcgttcgcgaacactcgcattgattggaaggagaccccggaggcccacgtcttcaaggccgatcttcctggggtaaagaaagaggaagtaaaggtggaggttgaggaagggaggattttgcagatcagtggagataggagtgttgagaaggaggagaagaatgacaagtggcaccgagtggagcgcagcagcggccagttcatgaggcggttcaggttgccggagaatgtgaaggtggaggaggtgaaggctgccatggagaatggtgttcttactgttactgttcccaaggcagaggtcaagaaacccgatgtcaaggctatcgatatttctggttga

SEQ ID NO: 8321 - protein, 134 aa, Vitis vinifera
MSVIPSFFSDPFQDFPFTSETASFANTRIDWKETPEAHVFKADLPGVKKEEVKVEVEEGRILQISGDRSVEKEEKNDKWHRVERSSGQFMRRFRLPENVKVEEVKAAMENGVLTVTVPKAEVKKPDVKAIDISG

SEQ ID NO: 8322 - DNA, 477 bp, Gossypium hirsutum
  CDS (1)..(477)
atgtctctcattccaagcttctttggcaaccgtcgcagcagtgcctttgatccattctctcttgatgtttgggatcctttcaaggacttccctttctcttctccttcatcactctccacgggctcttcggaaacttcggcttttgtcaacacccgaatcgattggaaggaaaccccagaatctcacgtgttcaaggctgatgttccggggcttaagaaagaagaagtgaaagttgaggttgaagatgacagggtgcttcagataagcggggagaggaatgtagagaaggaagacaagaaggacacatggcatcgggtggaacgcagtagtggcaagttcatgaggaggttcagactgccggagaatgccaagatggatcagataaaggcttccatggaaaatggagtgcttactgttactattcccaaacttgaagtcaaaaagcccgatgtgaagtccattgaaatttccggataa

SEQ ID NO: 8323 - protein, 158 aa, Gossypium hirsutum
MSLIPSFFGNRRSSAFDPFSLDVWDPFKDFPFSSPSSLSTGSSETSAFVNTRIDWKETPESHVFKADVPGLKKEEVKVEVEDDRVLQISGERNVEKEDKKDTWHRVERSSGKFMRRFRLPENAKMDQIKASMENGVLTVTIPKLEVKKPDVKSIEISG

SEQ ID NO: 8324 - DNA, 462 bp, Gossypium hirsutum
  CDS (1)..(462)
atgtctttgattccaagcttcttcggcaacagacgcagcaacaacgtgttcgacccattctctctcgacctctgggacccactcaaggacttccccgtctcaacacggtcaccggaaacctctgccttcgtcgacgctcggattgactggagggaaacgccggaagctcacgtgttcaaagccgatgtgccggggcttaagaaagaagaagtgaaagtacaggtagaagatgatagggtgttacagataagtggagaaaggaacgtggagaaagaagataagaacgatacgtggcaccgccttgaacggagcagcggcaagtttatgaggaggttcaggttgccggaaaatgttaagatgggtcaagttaaggcttcaatggaaaatggggtgctgaccgtgactgttccgaaaatggaagttaaaaagcctgatgtcaaggctattgacatttctggttaa

SEQ ID NO: 8325 - protein, 153 aa, Gossypium hirsutum
MSLIPSFFGNRRSNNVFDPFSLDLWDPLKDFPVSTRSPETSAFVDARIDWRETPEAHVFKADVPGLKKEEVKVQVEDDRVLQISGERNVEKEDKNDTWHRLERSSGKFMRRFRLPENVKMGQVKASMENGVLTVTVPKMEVKKPDVKAIDISG

SEQ ID NO: 8326 - DNA, 465 bp, Gossypium hirsutum
  CDS (1)..(465)
atgattccaagcttttatggcagccgccgcagcaatgtctttgatcctttctctcttgatgtatgggatcctttcaaggacttccccctttcttcttcactcacctcacaaaccccggaaacctcagcgtttgtgaatacccgaattgactggaaagaaaccccagaagcgcacgtgttcaaggctgatgttccggggcttaagaaagaagaggtcaaagtggaggttgaagatgacagggtgcttcagataagcggagagaggaacatggagaaggaagacaagaatgacacatggcatcgcgtggaacgtagcagtgggaagtttatgaggaggttcaggttgcctgagaatgctaagatggatcagatcaaggcttccatggaaaatggtgtgcttactgtcactgttcccaaactggaagtgaaaaagcccgatgtcaaggctattgacatttctggctaa

SEQ ID NO: 8327 - protein, 154 aa, Gossypium hirsutum
MIPSFYGSRRSNVFDPFSLDVWDPFKDFPLSSSLTSQTPETSAFVNTRIDWKETPEAHVFKADVPGLKKEEVKVEVEDDRVLQISGERNMEKEDKNDTWHRVERSSGKFMRRFRLPENAKMDQIKASMENGVLTVTVPKLEVKKPDVKAIDISG

SEQ ID NO: 8328 - DNA, 480 bp, Gossypium hirsutum
  CDS (1)..(480)
atggcaatgattcctaccatctttggcaacaacaggcgcagcagcctcttcgacccgttttcgttggacttgtgggatccctccaaggagttcgatttcccaacggtcacatcgtttccttcactttcccgagaaaactccgctttcgtcaacacgcgcgtggactggaaggagacaccggaggcacacgtgttcaaggcggacctcccgggggtgaagaaagaggaggtgaaggtggagatcgaaggcgatagggttctccaaatcagcggagagaggcacgtggagaaggaagagaggaacgacacgtggcatcgagtggagcggagcagcgggaagttctcgcggaggttcaggttgccggagaatgtgagaatgggcgacgtgaaggcttccatggaaaatggggttcttactattactgttcctaaagttgagatgaagaaacctgagatcaaattcgttgaaatctctggttaa

SEQ ID NO: 8329 - protein, 159 aa, Gossypium hirsutum
MAMIPTIFGNNRRSSLFDPFSLDLWDPSKEFDFPTVTSFPSLSRENSAFVNTRVDWKETPEAHVFKADLPGVKKEEVKVEIEGDRVLQISGERHVEKEERNDTWHRVERSSGKFSRRFRLPENVRMGDVKASMENGVLTITVPKVEMKKPEIKFVEISG

SEQ ID NO: 8330 - DNA, 456 bp, Picea sitchensis
  CDS (1)..(456)
atgtctctcattcctcgcttattcggcagccgatctagcgttttcgatccattctcactggatctatggaacccttatgaagttgggaattctccatttttgcgggatgatgcaacagctatagccaacactcatctcgactggaaggaaacttctgacgcgcacatcttcaaggctgatcttccaggtttgaggaaagaggaggtaaagatcgaggtggaagatgaccgagtcctaaagatcagcggtgaacgcaagaaagaagaagagcaaaagaatgacaagtggcaccgaattgagcgctcctacgggagatttcttcggcgtttccggctaccagaaaataccaaggtggaggaggtgaaggctacaatggaaaacggagtgctaactgtcacggtccctaagcagtctcagcctaagcctgaggttagagccattgaaatctctggttaa

SEQ ID NO: 8331 - protein, 151 aa, Picea sitchensis
MSLIPRLFGSRSSVFDPFSLDLWNPYEVGNSPFLRDDATAIANTHLDWKETSDAHIFKADLPGLRKEEVKIEVEDDRVLKISGERKKEEEQKNDKWHRIERSYGRFLRRFRLPENTKVEEVKATMENGVLTVTVPKQSQPKPEVRAIEISG

SEQ ID NO: 8332 - DNA, 456 bp, Picea sitchensis
  CDS (1)..(456)
atgtctctcattcctcgcttattcggcagccgatctagcgtttttgatccattctcactggatctatggaacccttatgaagttgggaattctccatttttgcgggatgatgcaacagctatagccaacactcatctcgactggaaggaaacttctgacgcgcacatcttcaaggctgatcttccaggtttgaggaaagaggaggtaaagatcgaggtggaagatgaccgagtcctaaagatcagcggtgaacgcaagaaagaagaagagcaaaagaatgacaagtggcaccgaattgagcgctcctacgggaaatttcttcggcgtttccggctaccagaaaataccaaggtggaggaggtgaaggctacaatggaaaacggagtgctaactgtcacggtccctaagcagtctcagcctaagcctgaggttagagccattgaaatctctggttaa

SEQ ID NO: 8333 - protein, 151 aa, Picea sitchensis
MSLIPRLFGSRSSVFDPFSLDLWNPYEVGNSPFLRDDATAIANTHLDWKETSDAHIFKADLPGLRKEEVKIEVEDDRVLKISGERKKEEEQKNDKWHRIERSYGKFLRRFRLPENTKVEEVKATMENGVLTVTVPKQSQPKPEVRAIEISG

SEQ ID NO: 8334 - DNA, 528 bp, Picea sitchensis
  CDS (1)..(528)
atggcactgactcctttcttcggtcgatcgacagccggtagcctgtgggatccatgggaccgcaacggcagactgttcgatccgttggttcctgtgtctcaaatatgggacgcctttgatttcggcagtgcgctggactcccctgccttttctttcacacgggacgcgcaggccatcgccaacacgaggcttgactggaaggaaacccccgacgctcacgttttcaccgcggatttgcctgggctgaaaaaagaagaagtaaagatcgaagtggtagacaacggcagtctgcgaataagtggggaaagacacaaggaggatgttcaggacacggaccagtggcatcgggtggagcggtcaagcgggagattcatgaggcaatttcggctgccggaaaatgtgaatgcagacggcatatctgctaaattgcagaacggtgttctgaccgtcaaagtccccaagactaaaccagacgccggctccgctagcgatgttaaaagtattgatatttctgcgactgataagtga

SEQ ID NO: 8335 - protein, 175 aa, Picea sitchensis
MALTPFFGRSTAGSLWDPWDRNGRLFDPLVPVSQIWDAFDFGSALDSPAFSFTRDAQAIANTRLDWKETPDAHVFTADLPGLKKEEVKIEVVDNGSLRISGERHKEDVQDTDQWHRVERSSGRFMRQFRLPENVNADGISAKLQNGVLTVKVPKTKPDAGSASDVKSIDISATDK

SEQ ID NO: 8336 - DNA, 483 bp, Picea sitchensis
  CDS (1)..(483)
atgtctctcgttcctcgcttattcggcagccgatctagcgttttcgatccattctcactggatctatgggacccttttgaatctgcgaattctccatttttgggggatatagggcactctgcaaggaatgatgcaacagccatagccaacactcggctcgactggaaggaaacttctgacgctcacatcttcaaggctgatcttccaggtttgaggaaagaggaggtaaagatcgaggtggaagatgaccgagtcctaaagatcagcggtgaacgcaagaaagaagaagagcaaaagaacgacaagtggcaccgaatcgagcggtctcacgggaaatttcttcggcgtttccggctaccggaaaatgcgaaagtggaggaggtgaaggctacaatggaaaacggagtgctaactgttacggtccctaagcagcctcaacctcagcctaagcctgaggttagagccattgaaatctccggttaa

SEQ ID NO: 8337 - protein, 160 aa, Picea sitchensis
MSLVPRLFGSRSSVFDPFSLDLWDPFESANSPFLGDIGHSARNDATAIANTRLDWKETSDAHIFKADLPGLRKEEVKIEVEDDRVLKISGERKKEEEQKNDKWHRIERSHGKFLRRFRLPENAKVEEVKATMENGVLTVTVPKQPQPQPKPEVRAIEISG

SEQ ID NO: 8338 - DNA, 477 bp, Picea sitchensis
  CDS (1)..(477)
atgtctctcgttcctcgtttctttggcagacgatccagcgttttcgatccgttttcactggatttatgggacccttttgaatctgggaattctccatttttgggggatataggaaatcttgcaaggaatgatgcaacggccatagccaacactcagctcgactggaaggaaacttctgacgcgcacatcttcaaggctgatcttccaggtctgaagaaagaggaggtaaagatagaggtggaagacgacagggttttacagattagtggtgaacgcaagaaagaagaagagaaaaagaacgataagtggcaccgtatcgagcgctctcacggcaaatttcttcgacgtttccggctaccggaaaatgcgaaggtggaggaggtgaaggctgcaatggaaaatggagtgctcaccgtgacggttcccaagcagcctcagcctaaagctgaggttagagccatcgaaatctctggttaa

SEQ ID NO: 8339 - protein, 158 aa, Picea sitchensis
MSLVPRFFGRRSSVFDPFSLDLWDPFESGNSPFLGDIGNLARNDATAIANTQLDWKETSDAHIFKADLPGLKKEEVKIEVEDDRVLQISGERKKEEEKKNDKWHRIERSHGKFLRRFRLPENAKVEEVKAAMENGVLTVTVPKQPQPKAEVRAIEISG

SEQ ID NO: 8340 - DNA, 483 bp, Picea sitchensis
  CDS (1)..(483)
atgtcgataattcccagttttttcggacgatcatccagagcgttcgatcccttctccttggatgtatgggaacctttccaagcattcacagatttggccgccgggggaccatccgagcaatttgtaaaggaagcttctgccgtagccaatactcagatcgactggaaggaaacgtcggaggcgcatattttcaaggctgatcttccaggtctgaagaaagaagatgtgaaaatagaattggaagagggccaaagaattctccagataagcggggagcgcagcaaagaagaagagcacaagaacgacaaatggcaccgtattgagagatcccgcggaaagttccttcggcgtttccggctgccggagaatgcaaaggtggaagagatcaaggcgagcatggaaaacggggtgctgactgtaacagtgccgaagcagcctgaaccccaacctcctcagcccaaatccatcgagatctctggctga

SEQ ID NO: 8341 - protein, 160 aa, Picea sitchensis
MSIIPSFFGRSSRAFDPFSLDVWEPFQAFTDLAAGGPSEQFVKEASAVANTQIDWKETSEAHIFKADLPGLKKEDVKIELEEGQRILQISGERSKEEEHKNDKWHRIERSRGKFLRRFRLPENAKVEEIKASMENGVLTVTVPKQPEPQPPQPKSIEISG

SEQ ID NO: 8342 - DNA, 477 bp, Picea sitchensis
  CDS (1)..(477)
atgtctctcgttcctcgcttattcggcagccgatctagcgttttcgatccattctcactggatctatgggacccttttgaatctgcgaattctccatttttgggcgatacagggcactctgcaaggaatgatgcaacagccatagccaacactcggctcgactggaaggaaacttctggcgcgcacatcttcaaggctgatcttccaggtttgaggaaagaggaggtaaagatcgaggtggaagatgaccgagtcctaaagatcagcggtgaacgcaagaaagaagaagagcaaaagaacgacaagtggcaccgaattgagcgctcctacgggaaatttcttcggcgtttccggctaccagaaaataccaaggtggaggaggtgaaggctacaatggaaaacggagtgctaactgtcacggtccctaagcagtctcagcctaagtctgaggttagagccattgaaatttccggttaa

SEQ ID NO: 8343 - protein, 158 aa, Picea sitchensis
MSLVPRLFGSRSSVFDPFSLDLWDPFESANSPFLGDTGHSARNDATAIANTRLDWKETSGAHIFKADLPGLRKEEVKIEVEDDRVLKISGERKKEEEQKNDKWHRIERSYGKFLRRFRLPENTKVEEVKATMENGVLTVTVPKQSQPKSEVRAIEISG

SEQ ID NO: 8344 - DNA, 477 bp, Picea sitchensis
  CDS (1)..(477)
atgtctctcgttcctcgtttctttggcagacgatccagcgttttcgatccgttttcactggatttatgggacccttttgaatctgggaattctccattttggggggatataggaaatcttgcaaggaatgatgcaacggccatagccaacactcagctcgactggaaggaaacttctgacgcgcacatcttcaaggctgatcttccaggtctgaagaaagaggaggtaaagatagaggtggaagacgacagggttttacagattagtggtgaacgcaagaaggaagaagagaaaaagaacgataagtggcaccgtatcgagcgctctcacggaaaatttcttcgacgtttccggctaccggaaaatgcgaaggtggaggaggtgaaggctgcaatggaaaatggagtgctcaccgtgacggttcccaagcagcctcagcctaaagctgaggttagagccatcgaaatctctggttaa

SEQ ID NO: 8345 - protein, 158 aa, Picea sitchensis
MSLVPRFFGRRSSVFDPFSLDLWDPFESGNSPFWGDIGNLARNDATAIANTQLDWKETSDAHIFKADLPGLKKEEVKIEVEDDRVLQISGERKKEEEKKNDKWHRIERSHGKFLRRFRLPENAKVEEVKAAMENGVLTVTVPKQPQPKAEVRAIEISG

SEQ ID NO: 8346 - DNA, 477 bp, Picea sitchensis
  CDS (1)..(477)
atgtctctcgttcctcgtttctttggcagacgatccagcgttttcgatccgttttcactggatttatgggacccttttgaatctgggaattctccatttttgggggatataggaaatcttgcaaggaatgatgcaacggccatagccaacactcagatcgactggaaggaaacttctgacgcgcacatcttcaaggctgatcttccaggtctgaagaaagaggaggtaaagatagaggtggaagacgacagggttttacagattagtggtgaacgcaagaaagaagaagagaaaaagaacgataagtggcaccgtatcgagcgctctcacgggaaatttcttcgacgtttccggctaccggaaaatgcgaaggtggaggaggtgaaggctgcaatggaaaatggagtgctcaccgtgacggttcccaagcagcctcagcctaaagctgaggttagagccatcgaaatctctggttaa

SEQ ID NO: 8347 - protein, 158 aa, Picea sitchensis
MSLVPRFFGRRSSVFDPFSLDLWDPFESGNSPFLGDIGNLARNDATAIANTQIDWKETSDAHIFKADLPGLKKEEVKIEVEDDRVLQISGERKKEEEKKNDKWHRIERSHGKFLRRFRLPENAKVEEVKAAMENGVLTVTVPKQPQPKAEVRAIEISG

SEQ ID NO: 8348 - DNA, 483 bp, Picea sitchensis
  CDS (1)..(483)
atgtctctcgttcctcgcttattcggcagccgatctagcgttttcgatccattctcactggatctatgggacccttttgaatctgcgaattctccatttttgggcgatacagggcactctacaaggaatgatgcaacagccatagccaacactcggctcgactggaaggaaacttctgacgcgcacatcttcaaggctgatcttccaggtttgaggaaagaggaggtaaagatcgaggtggaagatgaccgagtcctaaagatcagcggtgaacgcaagaaagaagaagagcaaaagaacgtcaagtggcaccgaattgagcgctcctacgggaaatttcttcgtcgtttccggctaccagaaaataccaaggtggaggaggtgaaggctacaatggaaaacggagtgctaactgtcacggtccctaagcagcctcagcctcagcctaagcctgaggttagagccattgaaatctccggttaa

SEQ ID NO: 8349 - protein, 160 aa, Picea sitchensis
MSLVPRLFGSRSSVFDPFSLDLWDPFESANSPFLGDTGHSTRNDATAIANTRLDWKETSDAHIFKADLPGLRKEEVKIEVEDDRVLKISGERKKEEEQKNVKWHRIERSYGKFLRRFRLPENTKVEEVKATMENGVLTVTVPKQPQPQPKPEVRAIEISG

SEQ ID NO: 8350 - DNA, 483 bp, Picea sitchensis
  CDS (1)..(483)
atgtcgataattcccagctttttcggacgatcatcgagagcgttcgatcccttttccttggaagtatgggatcctttccaagcattcacaggtttggccgccggcggaccatccgggcgatttgtaaaggaagcttctgccgtagccaatactcagatcgactggaaggaaacgtcggaggcgcatatattcaaggctgatcttccaggtctgaagaaagaagaggtgaaaatagaattggaagagggccaaagaattctccagataagcggggagcgcagcaaagaagaagagcacaagaacgacaaatggcaccgcattgagcgatcccgcggaaaattccttcggcgtttccggctgccggagaatgcaaaggtggaagagatgaaggcgagcatggaaaacggggtgctgactgtgacagtgccgaagcagcctgaaccccaacctcctcaatacaaatccatcgagatctatggctga

SEQ ID NO: 8351 - protein, 160 aa, Picea sitchensis
MSIIPSFFGRSSRAFDPFSLEVWDPFQAFTGLAAGGPSGRFVKEASAVANTQIDWKETSEAHIFKADLPGLKKEEVKIELEEGQRILQISGERSKEEEHKNDKWHRIERSRGKFLRRFRLPENAKVEEMKASMENGVLTVTVPKQPEPQPPQYKSIEIYG

SEQ ID NO: 8352 - DNA, 483 bp, Picea sitchensis
  CDS (1)..(483)
atgtcgataattcccagctttttcggacgatcatccagagtggtcgatcccttttccttggatgtatgggaacctttccaagcattcacagatttggccgccgggggaccatccgggcaatttgtaaaggaagcttctgccgtatccaatactcagatcgactggaaggaaacgtcggaggcgcatattttcaaggctgatcttccaggtctgaagaaagaagatgtgaaaatagagttggaagagggccaaagaattctccagataagcggggagcgcagcaaagaagaagagcacaagaacgacaaatggtaccgtattgagagatcccgcggaaagttccttcggcgtttccggctgccggagaatgcaaaggtggaagaaatcaaggcgagcatggaaaacggggtgctgactgtgacagtgccgaagcagcctgaaccccaacctcctcagcccaaatccatcgagatctctggctga

SEQ ID NO: 8353 - protein, 160 aa, Picea sitchensis
MSIIPSFFGRSSRVVDPFSLDVWEPFQAFTDLAAGGPSGQFVKEASAVSNTQIDWKETSEAHIFKADLPGLKKEDVKIELEEGQRILQISGERSKEEEHKNDKWYRIERSRGKFLRRFRLPENAKVEEIKASMENGVLTVTVPKQPEPQPPQPKSIEISG

SEQ ID NO: 8354 - DNA, 468 bp, Ageratina adenophora
  CDS (1)..(468)
atgccgatcgtcccaagcttattcggtggtcgccggagcaacatcttcgatccactttcgttcgacgtttgggatcctttcaaagacttcccgttcccatcttcatccatcgtttcaaacgaaacttctggtttcgtaaacgcccgtgtggattggaaggaaacaccagaagctcatgtgttcaaggccgatcttcctggaatcaagaaagaagaagtgaaggtggaggttgaagacgacagggtgttacagattactggcgagagaaacgtcgagaaagaagataagaatgataaatggcatcggatcgaacgcagcagcgggaagtttacgaagagattcaggttgccggagaatgctaaattggatcaggtgaaagcagccatggaaaacggagtgctcacgattactgttcctaaagaagaagtgaagaagactgatgtcaaatccattgaaatcaatggttag

SEQ ID NO: 8355 - protein, 155 aa, Ageratina adenophora
MPIVPSLFGGRRSNIFDPLSFDVWDPFKDFPFPSSSIVSNETSGFVNARVDWKETPEAHVFKADLPGIKKEEVKVEVEDDRVLQITGERNVEKEDKNDKWHRIERSSGKFTKRFRLPENAKLDQVKAAMENGVLTITVPKEEVKKTDVKSIEING

SEQ ID NO: 8356 - DNA, 471 bp, Rosa hybrid cultivar
  CDS (1)..(471)
atggctctcagtctctttggcaccggccgacgcagcaacgtcttcgacccattttccctcgacatctgggacccctttcagggcataggctctctcgtcaactcctcctccactgccggcgacacctccgccttcgctcagacccgaatcgactggaaggagaccccggaggcccacatcttcaaggcggacctccccggactgaagaaggaagaagtgaaggttgagctggaggaagggaatgtccttcagatcagcggagagaggagcagggagcaggaggagaagaatgacaagtggcacagggtggagaggagcagcggcaagttcctgaggaggttcaggctgccggataatgcaaaggtggaacatgtcagggcttctatggagaatggggttctcactgtgactgtgcccaaagcagaggagcagaagccccaggtcaagagcatcgacatttctggagcctaa

SEQ ID NO: 8357 - protein, 156 aa, Rosa hybrid cultivar
MALSLFGTGRRSNVFDPFSLDIWDPFQGIGSLVNSSSTAGDTSAFAQTRIDWKETPEAHIFKADLPGLKKEEVKVELEEGNVLQISGERSREQEEKNDKWHRVERSSGKFLRRFRLPDNAKVEHVRASMENGVLTVTVPKAEEQKPQVKSIDISGA

SEQ ID NO: 8358 - DNA, 477 bp, Oryza sativa subsp. japonica
  CDS (1)..(477)
atgtcgctgatccgccgcagcaacgtgttcgaccccttctccctcgacctctgggaccccttcgacggcttccccttcggctccggcagcggcagcatcttcccgtccttcccgcgcggcgcctcctccgagaccgcggccgtcgccggcgcgcggatcgactggaaggagacgcccgaggcgcacgtgttcaaggcggacgtgccggggctgaagaaggaggaggtcaaggtggaggtggaggacggcaacatcctgcagatcagcggcgagcgcaacaaggagcaggaggagaagacggaccagtggcaccgcgtggagcgcagcagcggcaagttcctccgcaggttccgcctccccgacaacgccaagccggagcagatcaaggcgtccatggagaacggcgtgctcaccgtcaccgtgcccaaggaggaggccaagaagcccgacgtcaagtccatccagatctccggctag

SEQ ID NO: 8359 - protein, 158 aa, Oryza sativa subsp. japonica
MSLIRRSNVFDPFSLDLWDPFDGFPFGSGSGSIFPSFPRGASSETAAVAGARIDWKETPEAHVFKADVPGLKKEEVKVEVEDGNILQISGERNKEQEEKTDQWHRVERSSGKFLRRFRLPDNAKPEQIKASMENGVLTVTVPKEEAKKPDVKSIQISG

SEQ ID NO: 8360 - DNA, 462 bp, Cleome spinosa
  CDS (1)..(462)
atgtcgctgatcccgagcttcttcggtaacagaagcagcagaatcttcgaccctttctctctggatatgtgggatccgttgaaggattttccgttcccgtcgtcgtccctttcccgagaaaactcggcgatagcgagcgcgcgagtggactggagggagacggcggaggcgcacgtgttcaaagcggaccttcccgggatgaagaaggaagaggtgaaggtggagatagaagacgacagtgtcctcaagataagcggagagcgacacgtggaggaggacaagagcgacacgtggcaccgcgtggagagatcgagcggaaaattctcccggagattcaggctgccggagaacgtgaagatggaccaggtccgggcttcaatggagaacggcgtgctgactgtgacggttcctaaggttgagacgaagaaccccgacgtcaaatccattcaaatctctggctaa

SEQ ID NO: 8361 - protein, 153 aa, Cleome spinosa
MSLIPSFFGNRSSRIFDPFSLDMWDPLKDFPFPSSSLSRENSAIASARVDWRETAEAHVFKADLPGMKKEEVKVEIEDDSVLKISGERHVEEDKSDTWHRVERSSGKFSRRFRLPENVKMDQVRASMENGVLTVTVPKVETKNPDVKSIQISG

SEQ ID NO: 8362 - DNA, 492 bp, Capsella rubella
  CDS (1)..(492)
atgtcgatgattccaagcttcttcaacaacaacaacaacagacgaagcaacaacttctacgatccattctcactagaggcatgggatcctttcagagagctaacactaacaacaccatcttcttcacttctttcccgagataactcagccatcgtgaacgcacgtgtcgactggagagagacgccggaggctcacgtgttcaaagccgacttgcctggactgaagaaagaagaagtgaaagtcgagatcgaggaagacaagagtgttttaaagatcagcggagagagacacgtggagaaggaagacaagaacgacacgtggcaccgtgtcgagaggtcgagcggacagtttactaggaggtttaggttgcctgagaatgtgaagatggatcagatcaacgctgctatggagaatggtgttttgactgttactgtgcctaaagctgagacgaacaaggctgatgtgacgcggtctattcagattactggctga

SEQ ID NO: 8363 - protein, 163 aa, Capsella rubella
MSMIPSFFNNNNNRRSNNFYDPFSLEAWDPFRELTLTTPSSSLLSRDNSAIVNARVDWRETPEAHVFKADLPGLKKEEVKVEIEEDKSVLKISGERHVEKEDKNDTWHRVERSSGQFTRRFRLPENVKMDQINAAMENGVLTVTVPKAETNKADVTRSIQITG

SEQ ID NO: 8364 - DNA, 444 bp, Aegilops longissima
  CDS (1)..(444)
atgtcgatcgtgaggcggacgaacgtgttcgaccccttcgcggaccccttcgacaccttccgctccatcgtcccggcgatcacaggcggcagcagcgagacggccgcgttcaccaacgcccggatggactggaaggagacgcctgaggcgcacgtcttcaaggccgatcttccaggggtgaagaaggaggaggtcaaggtggaggtggaggacggcaacatgctcgtcgtcagcggcgagcggagcagggagaaggaggacaagaatgacaagtggcaccgcgtggagcgcagcagcggcaagttcgtgcggcgcttccgcctgccggaggacgccaaggtggaggaggtgaaggccgggctggagaatggggtgctcaccgtcaccgtgcccaaggcccaggtcaagaagcccgaggtgaagtccatccagatctccggctga

SEQ ID NO: 8365 - protein, 147 aa, Aegilops longissima
MSIVRRTNVFDPFADPFDTFRSIVPAITGGSSETAAFTNARMDWKETPEAHVFKADLPGVKKEEVKVEVEDGNMLVVSGERSREKEDKNDKWHRVERSSGKFVRRFRLPEDAKVEEVKAGLENGVLTVTVPKAQVKKPEVKSIQISG

SEQ ID NO: 8366 - DNA, 456 bp, Aegilops longissima
  CDS (1)..(456)
atgtcgatcgtgaggcggacgaacgtgttcgaccccttcgccgacctttgggcggacccctttgacaccttccgctccatcgtcccagcgatctcaggcagcagcagcgagacggcggcgttcgccaacgcccggatggactggaaggagacccctgaggcgcacgtcttcaaggccgacctccccggcgtgaagaaggaggaggtcaaggtggaggtggaggacggcaacgtgctcgtcgtcagcggcgagcgcacaaaggagaaggaggacaggaacgacaagtggcaccgtgtggagcgcagcagcggcaagttcgtcaggcgcttccgactgccggaggacgctaaggtggaggaggtgaaggccgggctggagaacggggtgctcaccgtcaccgtgcccaaggccaaggtcaagaagcccgaggtgaaggccatccagatctccggctga

SEQ ID NO: 8367 - protein, 151 aa, Aegilops longissima
MSIVRRTNVFDPFADLWADPFDTFRSIVPAISGSSSETAAFANARMDWKETPEAHVFKADLPGVKKEEVKVEVEDGNVLVVSGERTKEKEDRNDKWHRVERSSGKFVRRFRLPEDAKVEEVKAGLENGVLTVTVPKAKVKKPEVKAIQISG

SEQ ID NO: 8368 - DNA, 456 bp, Aegilops longissima
  CDS (1)..(456)
atgtcgatcgtgaggcggacgaacgtgttcgaccccttcaccgacctctgggcggaccccttcgacaccttccgctccatcatcccggcgatctcaggcagcaccagcgagacggccgcgttcgccaacgcttgcgtggactggaaggagacccctgaagcacacgtcttcaaggccgaccttccaggggtgaagaaggaggaggtcaaggtggaggtggaggacggcaacgtgcttattgtcagcggcgagcgcacaaaggagaaggaggacaagaacgacaagtggcaccgcgtggaacgcagcagcggcaagttcgtgcggcgtttccggctgccggaggacgccatggtggaggaggtgaaggccgggctggagaacggtgtgctcaccgtcaccgtgcccaaggctgaggtcaagaagcctgaggtgaaagccatccagatctccggctga

SEQ ID NO: 8369 - protein, 151 aa, Aegilops longissima
MSIVRRTNVFDPFTDLWADPFDTFRSIIPAISGSTSETAAFANACVDWKETPEAHVFKADLPGVKKEEVKVEVEDGNVLIVSGERTKEKEDKNDKWHRVERSSGKFVRRFRLPEDAMVEEVKAGLENGVLTVTVPKAEVKKPEVKAIQISG

SEQ ID NO: 8370 - DNA, 456 bp, Aegilops peregrina
  CDS (1)..(456)
atgtcgatcgtgaggcggacgaacgtgctcgaccccttcgccgacctctgggcggaccccttcgacaccttccgctccatcgtcccggcgatctcaggcagcaccagcgagacggccgcgttcgccaacgctcgcgtggactggaaggagacccctgaagcacacgtcttcaaggccgaccttccaggggtgaagaaggaggaggtcaaggtggaggtggaggacggcaacgtgctcgtcgtcagcggcgagcgcacaaaggagaaggaggacaagaaccacaagtggcaccgcgtggaacgcagcagcggcaagttcgtgcggcgtttccggctgccggaggacgccatggtggaggaggtgaaggccgggctgaagaacggtgtgctcaccgtcaccgtgcccaagactgaggtcaagaagcctgaggtgaaagccatccagatctccggctga

SEQ ID NO: 8371 - protein, 151 aa, Aegilops peregrina
MSIVRRTNVLDPFADLWADPFDTFRSIVPAISGSTSETAAFANARVDWKETPEAHVFKADLPGVKKEEVKVEVEDGNVLVVSGERTKEKEDKNHKWHRVERSSGKFVRRFRLPEDAMVEEVKAGLKNGVLTVTVPKTEVKKPEVKAIQISG

SEQ ID NO: 8372 - DNA, 456 bp, Aegilops kotschyi
  CDS (1)..(456)
atgtcgatcgtgaggcggacgaacgtgctcgaccccttcgccgacctctgggcggaccccttcgacaccttccgctccatcgtcccggcgatctcaggcggcaccagcgagaaggccgcgttcgccaacgctcgcgtggactggaaggagacccctgaggcacacgtcttcaaggccgaccttccaggggtgaagaaggaggaggtcaaggtggaggtggaggacggcaacgtactcgtcgtcagcggcgagcgcacaaaggagaaggaggacaagaaccacaagtggcaccgcgtggaacgcagcagcggcaagttcgtgcggcgtttccggctgccggaggacgccatggtggaggaggtgaaggccgggctggagaacggtgtgctcaccgtcaccgtgcccaagactgaggtcaagaagcctgaggtgaaagccatccagatctccggctag

SEQ ID NO: 8373 - protein, 151 aa, Aegilops kotschyi
MSIVRRTNVLDPFADLWADPFDTFRSIVPAISGGTSEKAAFANARVDWKETPEAHVFKADLPGVKKEEVKVEVEDGNVLVVSGERTKEKEDKNHKWHRVERSSGKFVRRFRLPEDAMVEEVKAGLENGVLTVTVPKTEVKKPEVKAIQISG

SEQ ID NO: 8374 - DNA, 456 bp, Aegilops kotschyi
  CDS (1)..(456)
atgtcgatcgtgaggcggacgaacgtgttcgaccccattgccgacctctgggtggaccctttcgacaccttccgctccattgtcccggcgattgcaggcggaaacagcgagacggccgcgtttgctaatgctcgcgtggactggaaggagacgcctgaggcacacgtcttcaaggccgatcttccgggagtgaagaaggaggaggtcaaggttgaggtggaagacgacaacgtgctcgtcatcagcggtgagcgcaccaaggagaaggaggacaagaacgacaggtggcaccgcgtggagcgcaggagcggcaagttcgtgcggcgcttccgtctgcccgaggacgccaaggtggaggaggtgaaggccggactggagaacggcgtgctcaccgtcaccgtgcccaaggctgaggtcaagaagcccgaggtgaaggccatccagatctccggctga

SEQ ID NO: 8375 - protein, 151 aa, Aegilops kotschyi
MSIVRRTNVFDPIADLWVDPFDTFRSIVPAIAGGNSETAAFANARVDWKETPEAHVFKADLPGVKKEEVKVEVEDDNVLVISGERTKEKEDKNDRWHRVERRSGKFVRRFRLPEDAKVEEVKAGLENGVLTVTVPKAEVKKPEVKAIQISG

SEQ ID NO: 8376 - DNA, 456 bp, Triticum turgidum subsp. dicoccoides
  CDS (1)..(456)
atgtcgatcgtgaggcggacgaacgtgttcgaccccttcgccgacctctgggctgaccccttcgacaccttccgctccatcgtcccggcgatctcaggcggcagcagcgagacggccgcgttcgccaacgcccgggtggactggaaggagacgcccgaggcgcacgtcttcaaggccgacctccccggcgtgaagaaggaggaggtcaaggtggaggtggaggacggcaacgtgctcgtcgtcagcggcgagcgcacaaaggaggaggaggacaagaacgacaagtggcaccgcgtggagcgcagcagcggcaagttcgtcaggcgcttccgcctccccgaggacgccaaggtggaggaggtgaaggccgggctggagaacggcgtgctcaccgtcaccgtgcccaaggcccaggtcaagaagcctgaggtgaaggccatccagatctccggctga

SEQ ID NO: 8377 - protein, 151 aa, Triticum turgidum subsp. dicoccoides
MSIVRRTNVFDPFADLWADPFDTFRSIVPAISGGSSETAAFANARVDWKETPEAHVFKADLPGVKKEEVKVEVEDGNVLVVSGERTKEEEDKNDKWHRVERSSGKFVRRFRLPEDAKVEEVKAGLENGVLTVTVPKAQVKKPEVKAIQISG

SEQ ID NO: 8378 - DNA, 456 bp, Triticum turgidum subsp. dicoccon
  CDS (1)..(456)
atgtcgatcgtgaggcggacgaacgtgttcgaccccttcgccgacctctgggctgaccccttcgacaccttccgctccatcgtcccggcgatctcaggcggcagcagcgagacggccgcgttcgccaacgcccgggtggactggaaggagacgcccgaggcgcacgtcttcaaggccgacctccccggcgtgaagaaggaggaggtcaaggtggaggtggaggacggcaaagtgctcgtcgtcagcggcgagcgcacaaaggagaaggaggacaagaacgacaagtggcaccgcgtggagcgcagcagcggcaagttcgtcaggcgcttccgcctccccgaggacgccaaggtggaggaggtgaaggccgggctggagaacggcgtgctcaccgtcaccgtgcccaaggccgaggtcaagaagcctgaggtgaaggccatccagatctccggctga

SEQ ID NO: 8379 - protein, 151 aa, Triticum turgidum subsp. dicoccon
MSIVRRTNVFDPFADLWADPFDTFRSIVPAISGGSSETAAFANARVDWKETPEAHVFKADLPGVKKEEVKVEVEDGKVLVVSGERTKEKEDKNDKWHRVERSSGKFVRRFRLPEDAKVEEVKAGLENGVLTVTVPKAEVKKPEVKAIQISG

SEQ ID NO: 8380 - DNA, 456 bp, Triticum turgidum subsp. dicoccon
  CDS (1)..(456)
atgtcgatcgtgaggcggacgaacgtgttcgaccccttcgccgacctttgggcggaccccttcgacaccttccgttccatcgtcccggcgatctcaggcggcagcagcgagacggccgcgctcgccaacgcccgtgtggactggaaggagacccccgaggcgcacgtcttcaaggtcgacctccccggcgtgaagaaggaggaggtcaaggtggaggtggaggacggcaacgtgctcgtcgtcagcggcgagcggagcagggagaaggaggacaagaacgacaagtggcaccgcgtggagcgcagcagcggcaagttcgtgcggcgtttccggctgccggaggacgccaaggtggaggaggtcaaggccgggctggaaaacggcgtgctcaccgtccccgtgcccaaggccgaggtcaagaaccccgaggtgaaggccatccaattctccggctga

SEQ ID NO: 8381 - protein, 151 aa, Triticum turgidum subsp. dicoccon
MSIVRRTNVFDPFADLWADPFDTFRSIVPAISGGSSETAALANARVDWKETPEAHVFKVDLPGVKKEEVKVEVEDGNVLVVSGERSREKEDKNDKWHRVERSSGKFVRRFRLPEDAKVEEVKAGLENGVLTVPVPKAEVKNPEVKAIQFSG

SEQ ID NO: 8382 - DNA, 456 bp, Triticum turgidum subsp. durum (durum wheat)
  CDS (1)..(456)
atgtcgatcgtgaggcggacgaacgtgttcgacccctttgccgacctctgggcggaccccttcgacaccttccgctccatcgtcccggcgatctctggcggcagcagcgagacggcggccttcgccaatgcccggatggactggaaggagacccccgaggagcatgtcttcaagactgatcttctaggtgtgaaaaaggaggaggtcaaggtggaggtggaggacggcaatgtgctcgtcgtcagcggcgagcgcacaaaggagaaggaggacaagaacgacaagtggcaccgcgtagagcgcagcagcggcaagttcgtgcggcgcttccgcctccccgaggacggcaaggtggaggaggtgaaggccgggctggagaacggtgtgctcaccgtcaccgtgcccaaggccgaggtcaagaagcccgaggtgaaggccatccagatctccggctga

SEQ ID NO: 8383 - protein, 151 aa, Triticum turgidum subsp. durum (durum wheat)
MSIVRRTNVFDPFADLWADPFDTFRSIVPAISGGSSETAAFANARMDWKETPEEHVFKTDLLGVKKEEVKVEVEDGNVLVVSGERTKEKEDKNDKWHRVERSSGKFVRRFRLPEDGKVEEVKAGLENGVLTVTVPKAEVKKPEVKAIQISG

SEQ ID NO: 8384 - DNA, 456 bp, Triticum monococcum
  CDS (1)..(456)
atgtcgatcgtgaggcggacgaacgtgttcgaccccttcgccgacctctgggcggaccccttcgacaccttccgctccatcgtcccggcgatctcaggcggcggcagcgagacggctgcgttcgccaacgcccggatggactggaaggaggcccccgaagcgcacgtcttcaaggccgacctccccggcgtgaagaaggaggaggtcaaggtggaggtggaggacggcaacgtgctcgtcgtcagcggcgagcgtacaaaggagaaggaggacaagaacgacaagtggcaccgcgtggagcgcagcagcggcaagttcgtgcggcgcttccggctgccggaggacgccaaggtggaggaggtgaaggccgggctggagaacggggtgcccaccgtcaccgtgcccaaggccgaggtcaagaagcccgaggtgaaggccatccagatctccggctga

SEQ ID NO: 8385 - protein, 151 aa, Triticum monococcum
MSIVRRTNVFDPFADLWADPFDTFRSIVPAISGGGSETAAFANARMDWKEAPEAHVFKADLPGVKKEEVKVEVEDGNVLVVSGERTKEKEDKNDKWHRVERSSGKFVRRFRLPEDAKVEEVKAGLENGVPTVTVPKAEVKKPEVKAIQISG

SEQ ID NO: 8386 - DNA, 456 bp, Triticum monococcum
  CDS (1)..(456)
atgtcgatcgtgaggcggacgaacgtgtttgaccccttcgccgacctctgggccgaccccttcgacaccttccgctccatcgtcccggcgatctcaggcaacaacagcgagacagctgcgttcgccaacgcccggatggactggaaggagacccccgaggcgcacgtcttcaaggccgacctccccggcgtgaagaaggaggaggtcaaggtggaggtggaggacggcaacgtgctcgtcgtcagcggcgagcgtacaaaggagaaggaggacaagaacgacaagtggcaccgcgtggagcgcagcagcggcaagttcgtcaggcgcttccggctgccggaggacgccaaggtggaggaggtgaaggccgggctggagaacggggtgctcaccgtcaccgtgcccaaggcccaggtcaagaagcccgaggtgaaggccatccagatctccggctga

SEQ ID NO: 8387 - protein, 151 aa, Triticum monococcum
MSIVRRTNVFDPFADLWADPFDTFRSIVPAISGNNSETAAFANARMDWKETPEAHVFKADLPGVKKEEVKVEVEDGNVLVVSGERTKEKEDKNDKWHRVERSSGKFVRRFRLPEDAKVEEVKAGLENGVLTVTVPKAQVKKPEVKAIQISG

SEQ ID NO: 8388 - DNA, 456 bp, Triticum monococcum
  CDS (1)..(456)
atgtcgatcgtgaggcggacgaacgtgttcgaccccttcgccgacctctgggcggaccccttcgacaccttccgctccatcgtcccggcgatctcaggcggcggcagcgagacggctgcgttcgccaacgcccggatggactggaaggagacccccgaagcgcacgtcttcaaggccgacctccccggcgtgaagaaggaggaggtcaaggtggaggtggaggacggcaacgtgctcgtcgtcagcggcgagcgtacaaaggagaaggaggacaagaacgacaagtggcaccgcgtggagcgcagcagcggcaagttcgtgcggcgcttccggctgccggaggacgccaaggtggaggaggtgaaggccgggctggagaacggggtgctcaccgtcacagtgcccaaggcccaggtcaagaagcccgaggtgaaggccatccagatctccggctga

SEQ ID NO: 8389 - protein, 151 aa, Triticum monococcum
MSIVRRTNVFDPFADLWADPFDTFRSIVPAISGGGSETAAFANARMDWKETPEAHVFKADLPGVKKEEVKVEVEDGNVLVVSGERTKEKEDKNDKWHRVERSSGKFVRRFRLPEDAKVEEVKAGLENGVLTVTVPKAQVKKPEVKAIQISG

SEQ ID NO: 8390 - DNA, 456 bp, Triticum monococcum
  CDS (1)..(456)
atgtcgatcgtgaggcggacgaacgtgttcgaccccttcgccgacctctgggcggaccccttcgacaccttccgctccatcgtcccggcgatctcaggcggcggcagcgagacggctgcgttcgccaacgcccggatggactggaaggagacccccgaagcgcacgtcttcaagcccgacctccccggcgtgaagaaggaggaggtcaaggtggaggtggaggacggcaacgtgctcgtcgtcagcggcgagcgtacaaaggagaaggaggacaagaacgacaagtggcaccgcgtggagcgcagcagcggcaagttcgtgcggcgcttccggctgccggaggacgccaaggtggaggaggtgaaggccgggctggagaacggggtgctcaccgtcaccgtgcccaaggccgaggtcaagaagcccgaggtgaaggccatccagatctccggctga

SEQ ID NO: 8391 - protein, 151 aa, Triticum monococcum
MSIVRRTNVFDPFADLWADPFDTFRSIVPAISGGGSETAAFANARMDWKETPEAHVFKPDLPGVKKEEVKVEVEDGNVLVVSGERTKEKEDKNDKWHRVERSSGKFVRRFRLPEDAKVEEVKAGLENGVLTVTVPKAEVKKPEVKAIQISG

SEQ ID NO: 8392 - DNA, 465 bp, Malus domestica
  CDS (1)..(465)
atgactctcagtctctttggcggacgacgaagcaacgtcttcgaccccttctctctggacatctgggaccctttcgagggcttcggcgatctggccaacatcccctcctccgcccgtgaaaccaccgccatcgccaacacgcgcatcgactggaaggagaccccgaaggcccacatcttcaaggtggacctcccggggataaaaaaggaggaggtgaaagtggaggtggaggacgggagggtcctgcagatcagcggcgagaggagccgggagcaggaggagaaaaacgacaagtggcacagggtggagaggagcagtggcaagtttatgaggaggttcaggctgccggagaacgcgaagattgatcaggtgaaggcggcgatggagaatggggtgctgactgtgactgtgccgaaagaggaggagaagaagcctgaggtcaaggccattgacatctccggctaa

SEQ ID NO: 8393 - protein, 154 aa, Malus domestica
MTLSLFGGRRSNVFDPFSLDIWDPFEGFGDLANIPSSARETTAIANTRIDWKETPKAHIFKVDLPGIKKEEVKVEVEDGRVLQISGERSREQEEKNDKWHRVERSSGKFMRRFRLPENAKIDQVKAAMENGVLTVTVPKEEEKKPEVKAIDISG

SEQ ID NO: 8394 - DNA, 456 bp, Triticum aestivum
  CDS (1)..(456)
atgtcgatcgtgaggcggagcaatgtgttcgaccccttcgccgacctctgggccgaccccttcgacaccttccgctccatcgtcccggcgatcttaggcggcaacaatgagacagctgcgttcgcgaacgcccggatggactggaaggagacgcctgaggcacacgtcttcaaggccgacctccccggcgtgaagaaggaggaggtcaaggtggaggtggaggacggcaacgtgctcgtcgtcagcggcgagcgcacaaaggagaaggaggacaagaacgacaagtggcaccgcgtggagcgcagcagcggcaagtttgtcgggcggttccggctgccggaggacgccaaggtggaggaggtgaaggccgggctggagaacggcgtgctcaccgtcaccgtgcccaaggccgaggtcaagaagcccgaggtcaaggccatcgagatatccggctga

SEQ ID NO: 8395 - protein, 151 aa, Triticum aestivum
MSIVRRSNVFDPFADLWADPFDTFRSIVPAILGGNNETAAFANARMDWKETPEAHVFKADLPGVKKEEVKVEVEDGNVLVVSGERTKEKEDKNDKWHRVERSSGKFVGRFRLPEDAKVEEVKAGLENGVLTVTVPKAEVKKPEVKAIEISG

SEQ ID NO: 8396 - DNA, 453 bp, Camellia sinensis
  CDS (1)..(453)
atgtcgatgatcccaagcttcttcggcaatcgacaaggcagcagcattttcgatcccttctctcttgaccccttcagaaactctcccttctccgaattttcccaggaaaattccgcaatcgccaacgctcgcgtggactggaaggaaactccggaagctcacttgtttaaggccgatctaccggggctgaagaaggaggaagtgaaggtggagatcgaggacgacagagttctgcagattagcggagagagaaaggtggagaaggaggagaagaacgatacttggcacagggttgagcgcagcagcgggaagttcatgaggaggttcatgctgctggaaaacgcgaggatggatcaagtgaaagcttccatggagaacggagttctgactgtcacgattccgaaggaggaagtgaagaagcctgaaatcaagtctattgatatctctggttag

SEQ ID NO: 8397 - protein, 150 aa, Camellia sinensis
MSMIPSFFGNRQGSSIFDPFSLDPFRNSPFSEFSQENSAIANARVDWKETPEAHLFKADLPGLKKEEVKVEIEDDRVLQISGERKVEKEEKNDTWHRVERSSGKFMRRFMLLENARMDQVKASMENGVLTVTIPKEEVKKPEIKSIDISG

SEQ ID NO: 8398 - DNA, 492 bp, Zea mays
  CDS (1)..(492)
atgtcgctgattcgccgtggaagcgcattcgaccccttctccctcgacctctgggaccccttccagggcttatttcccttcggctctggaagcagcagcagcagcagcctgttcccctcgttcggaggcaccaccaccagctcggagacggccgccttcgccggcgctcgcgtcgactggaaggagacgccggaggcgcacgtgttcaagaccgacgtgccggggctgaagaaggaggaggtgaaggtggagctggaggacggcaacgtgctccagatcagcggcgagcgctgcaaggagcaggaggagaagacggacacctggcaccgcgtggagcgcagcagcggcaagttcctgcgcaggttccgcctgacggagaacgccaggacggagcagatcagtgcgtccatggagaacggcgtgctcaccgtcaccgtgcctaaggaggaggccaagaaggccgacgtcaagtctatccagatctccggctag

SEQ ID NO: 8399 - protein, 163 aa, Zea mays
MSLIRRGSAFDPFSLDLWDPFQGLFPFGSGSSSSSSLFPSFGGTTTSSETAAFAGARVDWKETPEAHVFKTDVPGLKKEEVKVELEDGNVLQISGERCKEQEEKTDTWHRVERSSGKFLRRFRLTENARTEQISASMENGVLTVTVPKEEAKKADVKSIQISG

SEQ ID NO: 8400 - DNA, 483 bp, Arachis hypogaea
  CDS (1)..(483)
atgtctatgatcccaagcgtgttcggtggaagacgtagcaacatcttggacccattctctttggacgtatgggaccctttccaggacattttctcggtcgctatgtcgggtcccaatgcgtcagcgtcggcacgtgaagccagcgccatagcaagcacccgggtggactggaaggagactccggaggcgcacgtgttcaatgtggatcttccggggctgaagaaggaagaagtgaaggtggaggttgaggacgggagggtgctgcagataagtggtgagaggagcagggagcaagagcagaaggatgacaggtggcaccgcgtggagagaagtacgggcaagttcatgaggaggttcaggctgcccgagaatgctaatatggatgagatcagggcagctatggagaatggcgtgctgaccataactgtccctaaggttgaagagaagaagcctgaaatcaagtctattcagatctctggctaa

SEQ ID NO: 8401 - protein, 160 aa, Arachis hypogaea
MSMIPSVFGGRRSNILDPFSLDVWDPFQDIFSVAMSGPNASASAREASAIASTRVDWKETPEAHVFNVDLPGLKKEEVKVEVEDGRVLQISGERSREQEQKDDRWHRVERSTGKFMRRFRLPENANMDEIRAAMENGVLTITVPKVEEKKPEIKSIQISG

SEQ ID NO: 8402 - DNA, 471 bp, Vigna unguiculata
  CDS (1)..(471)
atgtcgctcattccaagtttcttcggcacagggcgaaggaccaacgtcttcgaccccttctcccttgacgtgtgggacccattcgaaaccgcactctcctttccgcgctccgaggtctcgagcgagacggcggcgatcgccaacacgcgcatcgactggaaggagacgccggaggcgcacgtgttcaaagcggatctcccggggctgaagaaggaagaggtgaaggtggagatcgaggaggggagggtgcttcagatcagcggccagaggacgaaggagaaggaggacaagaacgacaagtggcaccgcgtggagcgtagcagcggcagcttcctccgccgcttccggctgccggagaacgccaaagtcaatgaggttaaggctgctatggagaacggagtgctcacagtcactgttcccaaggaggaagtgaagaagcccgatgtgaaacccgttcagatcactggctag

SEQ ID NO: 8403 - protein, 156 aa, Vigna unguiculata
MSLIPSFFGTGRRTNVFDPFSLDVWDPFETALSFPRSEVSSETAAIANTRIDWKETPEAHVFKADLPGLKKEEVKVEIEEGRVLQISGQRTKEKEDKNDKWHRVERSSGSFLRRFRLPENAKVNEVKAAMENGVLTVTVPKEEVKKPDVKPVQITG

SEQ ID NO: 8404 - DNA, 474 bp, Brassica rapa subsp. chinensis
  CDS (1)..(474)
atgtctctaatcccaagctttttcggtggccgaagaacaaacgtgttcgacccattctcgctagacctgtatgacccgttcgaaggattcttaacgccttcagggatgacaaacgcaacctccaaggacgtggcagcgttcacaaacgcgaaagtggactggagggagacaccagaggcgcacgtgttcaaggcggacttgccggggctgaagaaggaagaagtgaaggtggaggttgaagatggcaacatacttcagataagtggagagagaagcagcgagaatgaagagaagagtgacaagtggcaccgtgtggagaggtcaagtgggaagttcatgaggaggtttaagttgccggagaacgcgaaggtagatgaagtgaaagcttgtatggagaacggtgtgttgtcggtcacggtgcctaagatgcctgagaggaagcctgaggtcaagtctattgacatctccggctaa

SEQ ID NO: 8405 - protein, 157 aa, Brassica rapa subsp. chinensis
MSLIPSFFGGRRTNVFDPFSLDLYDPFEGFLTPSGMTNATSKDVAAFTNAKVDWRETPEAHVFKADLPGLKKEEVKVEVEDGNILQISGERSSENEEKSDKWHRVERSSGKFMRRFKLPENAKVDEVKACMENGVLSVTVPKMPERKPEVKSIDISG

SEQ ID NO: 8406 - DNA, 459 bp, Zea mays
  CDS (1)..(459)
atgtcgctcgtgaggcgcagcaacgtgttcgaccccttctccatggacctctgggaccccttcgacaccatgttccgctccatcgtcccgtcggcggtctccaccaactccgagaccgccgccttcgccagcgcccgcatcgactggaaggagacgcccgaggcgcacgtgttcaaggccgacctccccggcgtcaagaaggaggaggtcaaggtcgaggtcgaggacggcaacgtgctggtcatcagcggccagcgcagcagggagaaggaggacaaggacgacaagtggcaccgcgtcgagcgcagcagcggccagttcgtcaggcgcttccgtctgccggagaacgccaaggtggaccaggtcaaggctggcctcgagaatggcgtgctcacggtcaccgtgcccaaggcggaggagaagaagcctgaggtgaaggctattgagatctctggttga

SEQ ID NO: 8407 - protein, 152 aa, Zea mays
MSLVRRSNVFDPFSMDLWDPFDTMFRSIVPSAVSTNSETAAFASARIDWKETPEAHVFKADLPGVKKEEVKVEVEDGNVLVISGQRSREKEDKDDKWHRVERSSGQFVRRFRLPENAKVDQVKAGLENGVLTVTVPKAEEKKPEVKAIEISG

SEQ ID NO: 8408 - DNA, 450 bp, Zea mays
  CDS (1)..(450)
atgtcgccggcgagcagcagcaacccgctgtcgctggacttctgggcgtcgtccgccgacccgttcggcgtcgtccggccgctggcggagcagtgccccgtcctcaccaacgtgcgcgtcgactggaaggagacccccgaggcgcacgtgttcagggccgaccttccgggcgtcaggaaggaggctgccaaggtcgaggtggaggacggcaacgtgctcgtcatcagcggcgagcgcgccagggaggaggaggaggccggcaaggacgaggcgtggcgctggcgcctcgtcgagcgcagcagcggcaggttccagaggcggttccgcctgccgcgcggcgccaggctggaccaggttcacgcgtccatggagaacggcgtgctcaccgtcaccgtgcccaaggaggaggccaagaagccgcaggtcagggctgtcgagatctctggttga

SEQ ID NO: 8409 - protein, 149 aa, Zea mays
MSPASSSNPLSLDFWASSADPFGVVRPLAEQCPVLTNVRVDWKETPEAHVFRADLPGVRKEAAKVEVEDGNVLVISGERAREEEEAGKDEAWRWRLVERSSGRFQRRFRLPRGARLDQVHASMENGVLTVTVPKEEAKKPQVRAVEISG

SEQ ID NO: 8410 - DNA, 477 bp, Zea mays
  CDS (1)..(477)
atgtcgctgatccgccgcagcaacgtgttcgatcccttctccctcgacctctgggacccctttgagggcttccccttcggctccggcaacagcagcagtctcttcccctcgttcccgcggaccagctcggagaccgcggccttcgctggcgcgcggatcgactggaaggagactccagaggcgcacgtgttcaaggccgacgtaccggggctgaagaaggaggaggtcaaggtggaggtcgaggacggcaacgtccttcagatcagcggcgagcgcaacaaggagcaggaggagaagacggacacctggcaccgcgtggagcggagcagcgggaggttcctgcgcaggttccgactgcccgagaacgccaagacggagcagatcacggccgccatggagaacggcgtgcttacagtcactgtgccgaaggaggacgccaagaagcctgaagtgaagtccattcagatctccggctag

SEQ ID NO: 8411 - protein, 158 aa, Zea mays
MSLIRRSNVFDPFSLDLWDPFEGFPFGSGNSSSLFPSFPRTSSETAAFAGARIDWKETPEAHVFKADVPGLKKEEVKVEVEDGNVLQISGERNKEQEEKTDTWHRVERSSGRFLRRFRLPENAKTEQITAAMENGVLTVTVPKEDAKKPEVKSIQISG

SEQ ID NO: 8412 - DNA, 486 bp, Medicago truncatula
  CDS (1)..(486)
atgtcgttgattccaagtttctttggtggccgaggccgaaggagcaacgttttcgatccattctcccttgacgtttgggacccattcaaggattttcctttcaccaattcttcactttctgcttcttcattccctcaggagaattctgcttttgtgagcaccaggattgattggaaggagaccccagaagctcatgtgttcaaggctgatcttcctggactgaagaaggaggaagtgaaggttgaaattgaagatgatagggttcttcagataagcggtgagaggaactttgaaaaagaagataagaatgatcaatggcatcgtgtggagcgtagcagtggaaaattcatgaggaggtttagattaccagagaatgcgaaaatggatcaagtgaaagctgctatggagaatggtgttctcgctgtcactgtccctaaggaagagatcaagaagcctgaagtcaaagccattgaaatctctggttaa

SEQ ID NO: 8413 - protein, 161 aa, Medicago truncatula
MSLIPSFFGGRGRRSNVFDPFSLDVWDPFKDFPFTNSSLSASSFPQENSAFVSTRIDWKETPEAHVFKADLPGLKKEEVKVEIEDDRVLQISGERNFEKEDKNDQWHRVERSSGKFMRRFRLPENAKMDQVKAAMENGVLAVTVPKEEIKKPEVKAIEISG

SEQ ID NO: 8414 - DNA, 483 bp, Picea sitchensis
  CDS (1)..(483)
atgtctctcgttcctcgcttattcggcagccgatctagcgttttcgatccattctctctggatctatgggacccttttgaatctgcaaattctccttttttgggcgatacagggcactctgcaaggaatgatgcaacagccatagccaacactcggctcgactggaaggaaacttctgacgtgcacatcttcaaggctgatcttccaggtttgaggaaagaggaggtaaagatcgaggtggaagatgaccgagtcctaaagatcagcggtgaacgcaagaaagaagaagagcaaaagaacgacaagtggcaccgaatcgagcggtctcacgggaaatttcttcggcgtttccggctaccggaaaatgcgaaggtggaggaggtgaaggctacaatggaaaacggagtgctaactgtcacggtccctaagcagcctcagcctcagcctaagcctgaggttagagccattgaaatctccggttaa

SEQ ID NO: 8415 - protein, 160 aa, Picea sitchensis
MSLVPRLFGSRSSVFDPFSLDLWDPFESANSPFLGDTGHSARNDATAIANTRLDWKETSDVHIFKADLPGLRKEEVKIEVEDDRVLKISGERKKEEEQKNDKWHRIERSHGKFLRRFRLPENAKVEEVKATMENGVLTVTVPKQPQPQPKPEVRAIEISG

SEQ ID NO: 8416 - DNA, 456 bp, Ricinus communis
  CDS (1)..(456)
atggcaatgattccgagcttctttggtaacccaagaagcaacattttcgatcccttctcctctttcgatctttgggatccattcaaagacttcccctttccttcatcttcactcgtgtctcgtgaaaattctgcttttgtgaatgctcgcatggactggaaggagactccagaagctcatgtattcaaggctgaccttccgggacttaagaaggaggaagtgaaagtggagattgaagatgacagggttcttcaaatcagcggagaaaggaatgtggagaaggaagacaagagtgatacttggcatcgtgtggagcgcagcagtggcaagttcttgaggaggtttaggctgccagaggatgcgaagatggatcaggttaaagcttcaatggaggatggtgttctgacagtgactgttcctaaagaagaagtcaagaaacctgatgttaaatattga

SEQ ID NO: 8417 - protein, 151 aa, Ricinus communis
MAMIPSFFGNPRSNIFDPFSSFDLWDPFKDFPFPSSSLVSRENSAFVNARMDWKETPEAHVFKADLPGLKKEEVKVEIEDDRVLQISGERNVEKEDKSDTWHRVERSSGKFLRRFRLPEDAKMDQVKASMEDGVLTVTVPKEEVKKPDVKY

SEQ ID NO: 8418 - DNA, 483 bp, Ricinus communis
  CDS (1)..(483)
atgtctctgactccattcttcagcagccgaagaaacaacatcttcgatccattctcacttgacatgtgggatccattcaaagacttccccttcccttctttcccctcatcatcatcatcatcgctgttccctgatggaaactctgcttatgttaacacacgcatagactggaaagaaaccccacagtctcacatctttaaggctgatcttcctggtcttaggaaagaagaagtcaaagttgagattgaggataacaatgttcttcaaatcagcggcgagaagcatgtggaaaaggaagacaagaatgacacttggcatcgtgttgaacgcagcagcggtaagttcttgaggaggtttaggctgcccgagaatgctaagatggatcaaattaaagcttctatggagaatggtgtccttactgttactgttccaaaagttgaggtcaagaaacctgaggttaagtctattgagatttctggttaa

SEQ ID NO: 8419 - protein, 160 aa, Ricinus communis
MSLTPFFSSRRNNIFDPFSLDMWDPFKDFPFPSFPSSSSSSLFPDGNSAYVNTRIDWKETPQSHIFKADLPGLRKEEVKVEIEDNNVLQISGEKHVEKEDKNDTWHRVERSSGKFLRRFRLPENAKMDQIKASMENGVLTVTVPKVEVKKPEVKSIEISG

SEQ ID NO: 8420 - DNA, 474 bp, Ricinus communis
  CDS (1)..(474)
atggcaatgattccaagctttttcgataacccacgaagcaacatcttcgatcccttctcttcttttgacttttgggatccattcaaagacttcccatttccatctccatcttcattagtctctcgtggaaattctgcgtttattaatactcggatagactggaaggagactccagaagcccatatcttcaaggctgatcttcctgggctgaaaaaagaggaagtgaaagtggaaattgaagatgacagagtccttcagatcagcggagaaaggaatgtggagaaggaagataagaatgatacctggcatcgtgtggaacgcagcagcggcaagttcttgaggaggtttaggctgccggagaatgccaaaatggatcaagttaaggcttctatggagaatggagttctcacagtgactgttcctaaggaggaaataaagaaacctgatatcaaagctgttgaaatctctggctga

SEQ ID NO: 8421 - protein, 157 aa, Ricinus communis
MAMIPSFFDNPRSNIFDPFSSFDFWDPFKDFPFPSPSSLVSRGNSAFINTRIDWKETPEAHIFKADLPGLKKEEVKVEIEDDRVLQISGERNVEKEDKNDTWHRVERSSGKFLRRFRLPENAKMDQVKASMENGVLTVTVPKEEIKKPDIKAVEISG

SEQ ID NO: 8422 - DNA, 477 bp, Ricinus communis
  CDS (1)..(477)
atggcaatgattccaagcttctttggtaacccaagaagcagcatcttcgatcccttctcctctttcgatctctgggatccattcaaagacttcccatttccttcttcatcttccctcgtctctcgtgagaattctgcatttgtgaatgcccgcatggactggaaggagactccagaagctcatgttttcaaggctgaccttccggggcttaaaaaggaggaagtgaaagtagaaatcgaagatgacagagttcttcaaatcagcggagaaaggaatgtggagaaggaagacaagaatgatacttggcatcgtgtggagcgcagcagaggcaagtttttgaggaggtttaggctaccggagaatgcgaagatggatcaaattaaagcttcaatggagaatggagtactcactgtcactgttccaaaagatcaggaaatgaagagacctgatgttaagggtattgagatttctggttga

SEQ ID NO: 8423 - protein, 158 aa, Ricinus communis
MAMIPSFFGNPRSSIFDPFSSFDLWDPFKDFPFPSSSSLVSRENSAFVNARMDWKETPEAHVFKADLPGLKKEEVKVEIEDDRVLQISGERNVEKEDKNDTWHRVERSRGKFLRRFRLPENAKMDQIKASMENGVLTVTVPKDQEMKRPDVKGIEISG

SEQ ID NO: 8424 - DNA, 462 bp, Ricinus communis
  CDS (1)..(462)
atggcaatgactccgagcttcttcggcaacccaagaagcagcaacttcgatcctttctcctctttcgacttctgggatccattcaaagactttccatcttcaattgtctctcgtcagaattctgcttttgttaacacgcgcatagactggaaggagactccagaggctcacatcttcaaggctgatcttcctgggcttaaaaaggaggaagtgaaagtagaaattgaagatgacagagttcttcaaatcagcggagagaggaatgtggagaaggaagacaagaatgacacctggcatcgtgtggaacgcagcagtggcaagttcatgagaaggtttaggctgccggagaatgcaaagatggatcaggttaaagcttctatggagaacggagttcttacagtgattgtccctaaagtggaagtcaagaaacctgaagttaaggctattgatatttctggttga

SEQ ID NO: 8425 - protein, 153 aa, Ricinus communis
MAMTPSFFGNPRSSNFDPFSSFDFWDPFKDFPSSIVSRQNSAFVNTRIDWKETPEAHIFKADLPGLKKEEVKVEIEDDRVLQISGERNVEKEDKNDTWHRVERSSGKFMRRFRLPENAKMDQVKASMENGVLTVIVPKVEVKKPEVKAIDISG

SEQ ID NO: 8426 - DNA, 474 bp, Ricinus communis
  CDS (1)..(474)
atggcaatgattccaagtttcttcagtaacccaagaagcaacatcttcgatcccttctcctctttcgacttgtgggatccattcaaagacttcccatttccatcttcactagtccctcgtgaaaattacgctttcgttaatgctcgcatagactggaaggagactccagaagctcacatagtcaaggctgatcttcccggtcttagaaaagaggaagtgagggtggaaattgaagatggcagagtccttcaaatcagcggagaaaggaatgtggagaaggaagataagaatgatacttggcatcgtgtggaacgcagcagtggcaagttcttgaggaggtttaggatgccggagaatgcaaagattgatcaagttaaagcttcaatggagaatggagttcttactgttactgttcccaaggaggaaatcaagaaacctgatgtcagaccgatcgaaatctccgggttgagttaa

SEQ ID NO: 8427 - protein, 157 aa, Ricinus communis
MAMIPSFFSNPRSNIFDPFSSFDLWDPFKDFPFPSSLVPRENYAFVNARIDWKETPEAHIVKADLPGLRKEEVRVEIEDGRVLQISGERNVEKEDKNDTWHRVERSSGKFLRRFRMPENAKIDQVKASMENGVLTVTVPKEEIKKPDVRPIEISGLS

SEQ ID NO: 8428 - DNA, 489 bp, Ricinus communis
  CDS (1)..(489)
atgtctcttgttccgagcagcatttttggtggccgaagaaccaacatcttcgacccattctctcttgatatctgggaccctttccatgacttcccatttacaagcacagccctagcaactcctcggtctgaaatcgccaacgagacatcggcgttcgcgaacacacgcatggactggaaagaaacacctgaagctcatgttttcaaggctgatctcccagggctaaagaaagaagaagtgaaggtggagatagaggaaggtaaggttttgcaaataagtggtgaaagaagcaaagagaaggaagagaagaacgataagtggcatagagttgaaagatcaagtgggaagtttatgagaaggtttagattgccagataacgctaagattgatcaggttaaagctagcatggagaatggagttttgactgttactgttcctaaagaggaggtcaagaaacctgatgtgaaggccattgatatctctggttaa

SEQ ID NO: 8429 - protein, 162 aa, Ricinus communis
MSLVPSSIFGGRRTNIFDPFSLDIWDPFHDFPFTSTALATPRSEIANETSAFANTRMDWKETPEAHVFKADLPGLKKEEVKVEIEEGKVLQISGERSKEKEEKNDKWHRVERSSGKFMRRFRLPDNAKIDQVKASMENGVLTVTVPKEEVKKPDVKAIDISG

SEQ ID NO: 8430 - DNA, 501 bp, Ricinus communis
  CDS (1)..(501)
atggctctaagcattggaggcagaaggagcaacatcttcgatcctttctcactagacatctgggatccgtttgagggcttccctctattcaccggaactgtggccaatgtcccatcaactcagcgcgagacagccgcgatggccaccacacgggtggattggagagagactccagaggctcacaaattcactgttgatcttccaggattaaagaaagaggaagtgaaagtggaagttgaggatggaagggtactccaaatcagtggagagaggagcagagagcaagaggacaaggatgataagtggcatcgagttgagagaagcagtggcaagttcctgaggaggttcaggttgccagagaatgcaaagatggatgaaatcaaagctactatggagaacggtgtgcttaatgttattgtgcctaaggaggagccaaagaaacctgagattaagtctattgagatcagtacttctcgctcccaggacccaactcatacttga

SEQ ID NO: 8431 - protein, 166 aa, Ricinus communis
MALSIGGRRSNIFDPFSLDIWDPFEGFPLFTGTVANVPSTQRETAAMATTRVDWRETPEAHKFTVDLPGLKKEEVKVEVEDGRVLQISGERSREQEDKDDKWHRVERSSGKFLRRFRLPENAKMDEIKATMENGVLNVIVPKEEPKKPEIKSIEISTSRSQDPTHT

SEQ ID NO: 8432 - DNA, 471 bp, Ricinus communis
  CDS (1)..(471)
atgtcacttattcctagcatctttggcagccgcagaacaaatgtgttcgacccattctctcttgatctttgggatccctttgacggcctcttcaactctgcaaacttacctgcatctgcccgagaaacttcagctctagctaatgcaagaattgactggaaagaaacaccggaagctcacattttcaaagcggatgtgcctggactcaagaaagaggaagtgaaagtagaggttgaagaaggcagaattcttcagataagtggagaaagaagcaaagagcaggaggagaagaacgacaaatggcaccgtgttgagaggagcagtggcaagtttttcaggaggtttaggttgcctgagaatgctaagatggaggaggttaaagctagcatggagaatggtgttcttactgtcactgttcctaaggaagaggagaagaagcctgaagtcaagtctgttcaaatctcaggctga

SEQ ID NO: 8433 - protein, 156 aa, Ricinus communis
MSLIPSIFGSRRTNVFDPFSLDLWDPFDGLFNSANLPASARETSALANARIDWKETPEAHIFKADVPGLKKEEVKVEVEEGRILQISGERSKEQEEKNDKWHRVERSSGKFFRRFRLPENAKMEEVKASMENGVLTVTVPKEEEKKPEVKSVQISG

SEQ ID NO: 8434 - DNA, 471 bp, Ricinus communis
  CDS (1)..(471)
atgtctctaattcctagcatctttggcagccgcagaacaaatgtggtcgatccattctctcttgatcgttgggatccctttgacagcctcttcaactccgcaaatttacctgcatcagcccgagaaacttcagctctagctaatgcaagaattgactggaaagaaacaccagaagctcacattttcaaagccgatgtgcctggactcaagaaagaggaagtgaaagttgagattgaagaaggcagaattcttcagataagtggagaaagaagcaaagagcaggaagagaagaacgacagatggcaccgtgttgagaggagcagcggcaagtttttgagaaggtttaggttgcctgagaatgctaagatggaagaggttaaagctagcatggagaatggtgttcttactgtcactgttcctaaggaaaaggagaagaagcctgaagtcaagtctgttcaaatttccggctaa

SEQ ID NO: 8435 - protein, 156 aa, Ricinus communis
MSLIPSIFGSRRTNVVDPFSLDRWDPFDSLFNSANLPASARETSALANARIDWKETPEAHIFKADVPGLKKEEVKVEIEEGRILQISGERSKEQEEKNDRWHRVERSSGKFLRRFRLPENAKMEEVKASMENGVLTVTVPKEKEKKPEVKSVQISG

SEQ ID NO: 8436 - DNA, 477 bp, Zea mays
  CDS (1)..(477)
atgtcgctgatccgccgcagcaacgagttcgatcccttctccctcgacctctgggacccctttgagggcttccccttcggctccggcaacagcagcagtctcttcccctcgttcccgcggaccagctcggagaccgcggccttcgctggcgcgcggatcgactggaaggagactccagaggcgcacgtgttcaaggccgacgtaccggggctgaagaaggaggaggtcaaggtggaggtcgaggacggcaacgtccttcagatcagcggcgagcgcaacaaggagcaggaggagaagacggacacctggcaccgcgtggagcggagcagcgggaggttcctgcgcaggttccgactgcccgagaacgccaagacggagcagatcacggccgccatggagaacggcgtgcttacagtcactgtgccgaaggaggacgccaagaagcctgaagtgaagtccattcagatctccggctag

SEQ ID NO: 8437 - protein, 158 aa, Zea mays
MSLIRRSNEFDPFSLDLWDPFEGFPFGSGNSSSLFPSFPRTSSETAAFAGARIDWKETPEAHVFKADVPGLKKEEVKVEVEDGNVLQISGERNKEQEEKTDTWHRVERSSGRFLRRFRLPENAKTEQITAAMENGVLTVTVPKEDAKKPEVKSIQISG

SEQ ID NO: 8438 - DNA, 474 bp, Brassica campestris
  CDS (1)..(474)
atgtctctaatcccaagctttttcggtggccgaagaacaaacgtgttcgacccattctcgctagacctgtatgacccgttcgaaggattcttaacgccttcagggatgacaaacgcaacctcgaaggacgtggcagcgttcacaaacgcgaaagtggactggagggagacaccagaggcgcacgtgttcaaggcggacttgccggggctgaaaaaggaagaagtgaaggtggaggttgaagatggcaacatacttcagataagtggagagagaagcagcgagaatgaagagaagagtgacaggtggcaccgtgtggagaggtcaagtgggaagttcatgaggaggtttaagttgccggagaacgcgaaggtagatgaagtgaaagctagtatggagaacggtgtgttgtcggtcacggtgcctaagatggctgagaggaagcctgaggtcaagtctattgacatctccggctaa

SEQ ID NO: 8439 - protein, 157 aa, Brassica campestris
MSLIPSFFGGRRTNVFDPFSLDLYDPFEGFLTPSGMTNATSKDVAAFTNAKVDWRETPEAHVFKADLPGLKKEEVKVEVEDGNILQISGERSSENEEKSDRWHRVERSSGKFMRRFKLPENAKVDEVKASMENGVLSVTVPKMAERKPEVKSIDISG

SEQ ID NO: 8440 - DNA, 453 bp, Agrostis stolonifera var. palustris
  CDS (1)..(453)
atgtcgatcgtgaggtggagcaacgtgttcgaccccttctccctcgacctctgggcagaccccttcgacgccttccgctccatcctccctgcggcctccggcaaccacgacaccgcagccttcgtgaacgctcgcatggactggaaggagacgccggaagcgcacgtcttcaaagcagacctgcccggcgtgaagaaggaggaggtcaaggtggaggtcgagggtggcaacgtgctcgtcgtcagcggagagcgcaagggagaaggaggacaagaacgacaagtggcaaccctggaacgcagctccggcaagtttgtcaggcgcttcaggctgccggagaacgccaaggtggaggaggtgaaggccgggctggagaacggcgtgctcaccgtcaccgtgcccaaggctgaggtcaaaaagcccgaggtgaaggccatcgagatctcaggctaa

SEQ ID NO: 8441 - protein, 150 aa, Agrostis stolonifera var. palustris
MSIVRWSNVFDPFSLDLWADPFDAFRSILPAASGNHDTAAFVNARMDWKETPEAHVFKADLPGVKKEEVKVEVEGGNVLVVSGERKGEGGQERQVATLERSSGKFVRRFRLPENAKVEEVKAGLENGVLTVTVPKAEVKKPEVKAIEISG

SEQ ID NO: 8442 - DNA, 471 bp, Fragaria ananassa
  CDS (1)..(471)
atggctctaagtctctttggcaatagccgacgcagcaacgtcttcgatcccttttccctcgacacctgggaccctttccagggatttggccctctcatgaactcctcctccaccgccggcgacacctcagccttcgcgcagactcgaatcgactggaaggagactccggaggctcatgtcttcaaggcggacctgcccggactgaagaaggaagaagtgaaggttgagctggaggaagggaatgtccttcagatcagcggagagaggagcaaggagcaggaggagaagaacgacaagtggcacagggtggagaggagcagtggcaagttcgtgaggaggttcaggctgccggacaatgcaaaggtggatcaggttaaggctgctatggagaatggggtgcttactgtgactgtgcccaaagcaccggagccgaagccccaggttaagagcatcgacatctctggagcctaa

SEQ ID NO: 8443 - protein, 156 aa, Fragaria ananassa
MALSLFGNSRRSNVFDPFSLDTWDPFQGFGPLMNSSSTAGDTSAFAQTRIDWKETPEAHVFKADLPGLKKEEVKVELEEGNVLQISGERSKEQEEKNDKWHRVERSSGKFVRRFRLPDNAKVDQVKAAMENGVLTVTVPKAPEPKPQVKSIDISGA

SEQ ID NO: 8444 - DNA, 465 bp, Solanum peruvianum
  CDS (1)..(465)
atgtctctgatcccaagaatcttcggcgaccgacgaagcagtagcatgttcgatccattttcaattgacgtatttgatccatttagggaattaggctttccaggtaccaattcacgggagacctctgcatttgctaacactcgaatcgattggaaggaaactccagaagctcatgtgttcaaagccgatcttccagggcttaagaaggaggaagtgaaagtggagatcgaagaagatagggttcttcagatcagcggagagaggaacgtggagaaagaagataagaacgatacttggcatcgtgtggaacgcagcagtggaaaattcatgaggagatttagacttccggagaacgcaaagatggatcaagttaaggcttctatggagaatggagtgctgactgtcactgttccaaaggaagaagtgaagaaacctgatgtcaagtctattgaaatctctggttaa

SEQ ID NO: 8445 - protein, 154 aa, Solanum peruvianum
MSLIPRIFGDRRSSSMFDPFSIDVFDPFRELGFPGTNSRETSAFANTRIDWKETPEAHVFKADLPGLKKEEVKVEIEEDRVLQISGERNVEKEDKNDTWHRVERSSGKFMRRFRLPENAKMDQVKASMENGVLTVTVPKEEVKKPDVKSIEISG

SEQ ID NO: 8446 - DNA, 474 bp, Cuscuta japonica
  CDS (1)..(474)
atgtctctaattccgagtttcttcgagggtcgccggagcaacgcctttgatccgttctccctggagttatgggatccgtttttctcaaacacggtggctaatttatccggtagctcctccgcacgagaggcgtctgccttcgccaacgctcggattgactggaaggaaacgccggaggctcacattttcaaggccgacgttcccgggctgaagaaggaggaggtgaaggttgaggttgaggaaggcaaggtgctgcagattagcggggagaggagcaaagagaaggaggagaagaacgacacctggcaccgtgtggagaggagcagcggcaagtttttgcggagtttcaggttgccggagaatgctaaggttgatcaggtaaaggctgctatggagaacggcgtgctcacggtcactgtgccaaaggtggaagagaagaaggcggaggtgaaaagtattcagatctccggttaa

SEQ ID NO: 8447 - protein, 157 aa, Cuscuta japonica
MSLIPSFFEGRRSNAFDPFSLELWDPFFSNTVANLSGSSSAREASAFANARIDWKETPEAHIFKADVPGLKKEEVKVEVEEGKVLQISGERSKEKEEKNDTWHRVERSSGKFLRSFRLPENAKVDQVKAAMENGVLTVTVPKVEEKKAEVKSIQISG

SEQ ID NO: 8448 - DNA, 480 bp, Medicago truncatula
  CDS (1)..(480)
atgtcgctgattccaagtttctttggtggccgaaggagcaacgttttcgatccattctcccttgatgtttgggatccctttaaggatttttcatttcccaattctgcactttctgcttcttcatttcctcaggagaattctgcttttgtgagcaccaggattgattggaaggagaccccagaagcacacgtgtttaaagctgatcttcctggactgaagaaggaagaagtgaaggttgaaattgaagatgacagagttcttcagattagtggagagaggaacgttgagaaagaagacaagaacaaccaatggcatcgcgtggagcgtagcagtggaaagtttatgaggaggttcagattgcccgaaaatgccaagatggatcaggtgaaagctgcaatggagaatggtgttctcactgtaactgttccaaaagaagaagttaagaaacctgatgttaagtctattgagatctctggttga

SEQ ID NO: 8449 - protein, 159 aa, Medicago truncatula
MSLIPSFFGGRRSNVFDPFSLDVWDPFKDFSFPNSALSASSFPQENSAFVSTRIDWKETPEAHVFKADLPGLKKEEVKVEIEDDRVLQISGERNVEKEDKNNQWHRVERSSGKFMRRFRLPENAKMDQVKAAMENGVLTVTVPKEEVKKPDVKSIEISG

SEQ ID NO: 8450 - DNA, 468 bp, Codonopsis lanceolata
  CDS (1)..(468)
atggcactaattccaagcatcttcggtgggcggcggagcaacgtcttcgacccattctcccatgatatctgggacccattccaaggtctgtccagcgccttagccaacgctcgagaccaagaaaccgccgcgatcgccaacactcgtatagactggaaggagaccccggaggcgcacgtcttcaaggctgatctaccgggtctgaagaaggaggaaatcaaagtcgaagttgaggacgggagggtattgcagattagcggggagaggagcaaggagcaggaagagaagaccgacacgtggcaccgagtggagaggagcgtggggaagtttcaccggagatttaggttaccggaaaacgcaaaggtggatcaggtgacggctagtatggagaacggcgtgttgacggtgacggtgcccaagaaggaggagaagaagcccgaggttaaggctattgatatttccggctga

SEQ ID NO: 8451 - protein, 155 aa, Codonopsis lanceolata
MALIPSIFGGRRSNVFDPFSHDIWDPFQGLSSALANARDQETAAIANTRIDWKETPEAHVFKADLPGLKKEEIKVEVEDGRVLQISGERSKEQEEKTDTWHRVERSVGKFHRRFRLPENAKVDQVTASMENGVLTVTVPKKEEKKPEVKAIDISG

SEQ ID NO: 8452 - DNA, 492 bp, Helianthus annuus
  CDS (1)..(492)
atgtcgatcattccaaatttcttcggccgcagacgaacaaactgcttcgaccccttctctctagacgtgtgggacccattcgaaggcttccctttcaacaacaacaacttcggatccttatccgaccaagtccgatcatcatccgaaacatcgtcgttcgtgaacgctaatgttgactggagagagactaatgatgcgcatgtgtttaaggcggatgtacccggactgaagaaggaggaagtgaaggtagaggtggaggacgatcgagtgttgcagatcagtggagagaggaataaggagagtgaagagaaaggggacacgtggcaccgtgtggagaggagtagtgggaagtttgtgaggaggtttaggttgccagagaatgcgaaggtggatcaggtgaaggctgcgatggagaacggtgtgttgacggttactgtgccgaaagttgaagtgaagaagcctgatgtgaagtccattcagatttctggttag

SEQ ID NO: 8453 - protein, 163 aa, Helianthus annuus
MSIIPNFFGRRRTNCFDPFSLDVWDPFEGFPFNNNNFGSLSDQVRSSSETSSFVNANVDWRETNDAHVFKADVPGLKKEEVKVEVEDDRVLQISGERNKESEEKGDTWHRVERSSGKFVRRFRLPENAKVDQVKAAMENGVLTVTVPKVEVKKPDVKSIQISG

SEQ ID NO: 8454 - DNA, 471 bp, Helianthus annuus
  CDS (1)..(471)
atgtcgatcattccaagcttctttaccggtaacggaagcaacatattcgacccattctccagcgaaatctgggaccccttccagggcctctcaagtgtcatcaacaacctccctgaatcatctcgtgaaacaacagccatagccaataccagaatcgactggaaggagacaccagaggctcacgtgttcaaggcggacctgccaggtctgaagaaggaggaggtgaaggtggaggttgaagaaggtagagtgttgcagataagcggagagaggagcagagaaaatgtagagaagaatgacaagtggcataggatggagaggagctctgggaagtttttgaggcggtttaggttgccggagaatgcgaaaatggatcaggtgaaggcggcgatggagaacggtgtgctgacggtcaccgtgccgaaggcggaagtgaaaaagcccgaggtgaaggctattgatatttcttga

SEQ ID NO: 8455 - protein, 156 aa, Helianthus annuus
MSIIPSFFTGNGSNIFDPFSSEIWDPFQGLSSVINNLPESSRETTAIANTRIDWKETPEAHVFKADLPGLKKEEVKVEVEEGRVLQISGERSRENVEKNDKWHRMERSSGKFLRRFRLPENAKMDQVKAAMENGVLTVTVPKAEVKKPEVKAIDIS

SEQ ID NO: 8456 - DNA, 456 bp, Hordeum vulgare
  CDS (1)..(456)
atgtcgatcgtgaggaggagcaacgtgctggaccccttcgccgacctctgggccgaccccttggacaccttccgctccatcttcccggcgatctcaggcgggaacagcgagacagctgttcgcgaacgccggatggactggaaaggaagacgccttgaggcacatgtcttcaaggctgatcttcctggcgtgaagaaagaggaggtcaaggtggaggtggaggacggcaacgtgctcatcgtcagcggcgagcgcaccaaagagaaggaggacaagaacgacaagtggcatcgggtggagcgcaggagcgggaagttcgtgcggccgttccgcctgccagaggacggcaaggttgatgaagtgaaggccggactggagaacggtgtgctcaccgtcaccgtgcccaaagccgaggtcaagaagcccgaggtgaaggccatcgagatctccggctga

SEQ ID NO: 8457 - protein, 151 aa, Hordeum vulgare
MSIVRRSNVLDPFADLWADPLDTFRSIFPAISGGNSETAVRERRMDWKGRRLEAHVFKADLPGVKKEEVKVEVEDGNVLIVSGERTKEKEDKNDKWHRVERRSGKFVRPFRLPEDGKVDEVKAGLENGVLTVTVPKAEVKKPEVKAIEISG

SEQ ID NO: 8458 - DNA, 480 bp, Nicotiana tabacum
  CDS (1)..(480)
atggctatgattccaagtttctttggtggtagaaggagcaatattttcgacccgttttcacttgatatatttgatccgtttgagggctttccattttcaggcactgttgctaacgttccatcttctgctcgtgaaacttctgcttttgcaaatgcaagaattgattggaaagaaaccccagattcccatatcttcaaaatggatgttccagggattaagaaagaggaagtgaaagttgaagtagaagaaggaagagtattacagataagtggagaaaggagcagagagcaagaggagaagaacgacacgtggcatcgtatggaaagaagcagtggcaagtttatgagaaggtttaggctgccaggaaatgccaaaatggaggaaattaaagctgctatggaaaatggagtactcactgtaactgtaccaaaagaagaagagaagaaatctgaagtgaaagctattgacatctctggttaa

SEQ ID NO: 8459 - protein, 159 aa, Nicotiana tabacum
MAMIPSFFGGRRSNIFDPFSLDIFDPFEGFPFSGTVANVPSSARETSAFANARIDWKETPDSHIFKMDVPGIKKEEVKVEVEEGRVLQISGERSREQEEKNDTWHRMERSSGKFMRRFRLPGNAKMEEIKAAMENGVLTVTVPKEEEKKSEVKAIDISG

SEQ ID NO: 8460 - DNA, 453 bp, Pennisetum americanum
  CDS (1)..(453)
atgtcgcttgtgaggcgcggcaacgtctttgaccccttctccatggacctctgggaccccttcgacaacatgttccgctccatcgtcccgtcgtcctcctcctccgacaccgccgccttcgccaacgcccgcatcgactggaaggagacccccgaggtgcacgtcttcaaggccgacctccccggcgtcaagaaggaggaggtcaaggtggaggtggaggacggcaacgtcctggtgatcagcggccagcgcagcaaggagaaggaggacaagaacgacaggtggcaccgcgtcgagcgcagcagcggccagttcgtgaggcgcttccgcctgccggaggacgccaagacggaccaggtgaatgccgggctggagaacggcgtgctcacggtcaccgtgcccaaggcagaggggaagaagccagaggtcaaggccatcgagatctccggttga

SEQ ID NO: 8461 - protein, 150 aa, Pennisetum americanum
MSLVRRGNVFDPFSMDLWDPFDNMFRSIVPSSSSSDTAAFANARIDWKETPEVHVFKADLPGVKKEEVKVEVEDGNVLVISGQRSKEKEDKNDRWHRVERSSGQFVRRFRLPEDAKTDQVNAGLENGVLTVTVPKAEGKKPEVKAIEISG

SEQ ID NO: 8462 - DNA, 459 bp, Pennisetum americanum
  CDS (1)..(459)
atgtcgctggtgagtcgcagcagcgtgttcgaccctttctccatggacctctgggaccccttcgatagcatgttccgctccatcgtccagtcggcggggagccccgactccgacaccgccgccttcgccgccgcgcgcatcgactggaaggagacccccgaagcgcacgtcttcaaggctgacctcccaggcgtcaagaaggaggaggtcaaggtcgaggtggaggatggcaacgtcctcgtcatcagcggccagcgcagcaaggagaaggaggacaagaacgacaggtggcaccgcgtcgagcgcagcagcggccagttcatgaggaggtttcgcctgccggggaacgccaaggtggaccaggtgaaggctgggctcgagaacggcgtgctcacggtcaccgtgcccaaggccgaggagaagaagcccgaggtgaaggccattgagatctctggttaa

SEQ ID NO: 8463 - protein, 152 aa, Pennisetum americanum
MSLVSRSSVFDPFSMDLWDPFDSMFRSIVQSAGSPDSDTAAFAAARIDWKETPEAHVFKADLPGVKKEEVKVEVEDGNVLVISGQRSKEKEDKNDRWHRVERSSGQFMRRFRLPGNAKVDQVKAGLENGVLTVTVPKAEEKKPEVKAIEISG

SEQ ID NO: 8464 - DNA, 480 bp, Pennisetum americanum
  CDS (1)..(480)
atgtcgctgatccggcgcagcaacgtgttcgaccccttctccctcgacctctgggaccccttcgagggcttccccttcggttccggcagcaacagcggcagcctctttccctcgttcccgcgaaccagctcggagaccgcggccttcgccggcgcgcggatcgactggaaggagacccccgaggcacacgtgttcaaggccgacgtcccggcgctcaagaaggaggaggtgaaggtggaggtcgaggacggcaacgtcctccagatcagcggcgagcgcaacaaggagcaggaggagaagacggacacctggcaccgcgtggagcgcagcagcggcaagttcatgcgcaggttccggctccccgagaacgccaagacggaccagatcagggcgtccatggagaacggcgtgctcaccgtcaccgtgcccaaggaggaggtcaagaagcccgaggtgaagtccatccagatctcaggttag

SEQ ID NO: 8465 - protein, 159 aa, Pennisetum americanum
MSLIRRSNVFDPFSLDLWDPFEGFPFGSGSNSGSLFPSFPRTSSETAAFAGARIDWKETPEAHVFKADVPALKKEEVKVEVEDGNVLQISGERNKEQEEKTDTWHRVERSSGKFMRRFRLPENAKTDQIRASMENGVLTVTVPKEEVKKPEVKSIQISG

SEQ ID NO: 8466 - DNA, 486 bp, Pseudotsuga menziesii
  CDS (1)..(486)
atgtcgatcattcccagctttttcggcaggcgatcatccagcgcgttcgacccgttttcgttggatgtatgggatcctttccgagcattcacagatttgtccggcggggggccatctggccaatttgtaaatgaagcttcggccgtagctaatactcagatcgactggaaagaaacgccagaggctcacattttcaaggctgatctccccggtctgaagaaagaggaggtcaaaatagaattggaggaaggccaaaggattctccagataagcggggagcgcagcaaagaagaagagcaaaagaacgacaagtggcaccgcattgagcgatcccgcggaaagttccttcggcgcttccggctgccggacaatgcgaaggttgaagagatcaaagcggccatggaaaacggggtgctgactgtgacagtgccgaagcagcctgaaccgcaacctcctcaacccaaatccatcgagatctctggttga

SEQ ID NO: 8467 - protein, 161 aa, Pseudotsuga menziesii
MSIIPSFFGRRSSSAFDPFSLDVWDPFRAFTDLSGGGPSGQFVNEASAVANTQIDWKETPEAHIFKADLPGLKKEEVKIELEEGQRILQISGERSKEEEQKNDKWHRIERSRGKFLRRFRLPDNAKVEEIKAAMENGVLTVTVPKQPEPQPPQPKSIEISG

SEQ ID NO: 8468 - DNA, 486 bp, Pseudotsuga menziesii
  CDS (1)..(486)
atgtcgatcattcccagctttttcggcaggcgatcatccagcgcgttcgacccgttttcattggatgtatgggatcctttccgagcattcacagatttggccgccgggggtccatctggccaatttgtaaatgaagcttcggccatagccaatactcagatcgactggaaagaaacgccagaggcgcacattttcaaggctgatctcccgggtctgaagaaagaggaggtgaaaatagaattggaggaaggccaaagaattctccagataagcggggagcgcagcaaagaagaagagcaaaagaacaacaagtggcaccgcattgagcgatcccgcggaaagttccttcggcgcttccggctgccggacaatgcgaaggttgaagagatcaaggcggccatggaaaacggggtgctgactgtgacagtgccgaagcagcctgaaccccaacctcctcaacccaaatccatcgagatctctggttaa

SEQ ID NO: 8469 - protein, 161 aa, Pseudotsuga menziesii
MSIIPSFFGRRSSSAFDPFSLDVWDPFRAFTDLAAGGPSGQFVNEASAIANTQIDWKETPEAHIFKADLPGLKKEEVKIELEEGQRILQISGERSKEEEQKNNKWHRIERSRGKFLRRFRLPDNAKVEEIKAAMENGVLTVTVPKQPEPQPPQPKSIEISG

SEQ ID NO: 8470 - DNA, 456 bp, Triticum aestivum
  CDS (1)..(456)
atgtcgatcgtgaggcggacgaacgtgttcgaccccttcgccgacctctgggcggaccccttcgacaccttccgctccatcgtcccggcgatctcaggcggcggcagcgagacggctgcgttcgccaacgcccggatggactggaaggagacccccgaagcgcacgtcttcaaggccgacctccccggcgtgaagaaggaggaggtcaaggtggaggtggaggacggcaacgtgctcgtcgtcagcggcgagcgtacaaaggagaaggaggacaagaacgacaagtggcaccgcgtggagcgcagcagcggcaagttcgtgcggcgcttccggctgctggaggacgccaaggtggaggaggtgaaggccgggctggagaacggggtgctcaccgtcaccgtgcccaaggccgaggtcaagaagcccgaggtgaaggccatccagatctccggctga

SEQ ID NO: 8471 - protein, 151 aa, Triticum aestivum
MSIVRRTNVFDPFADLWADPFDTFRSIVPAISGGGSETAAFANARMDWKETPEAHVFKADLPGVKKEEVKVEVEDGNVLVVSGERTKEKEDKNDKWHRVERSSGKFVRRFRLLEDAKVEEVKAGLENGVLTVTVPKAEVKKPEVKAIQISG

SEQ ID NO: 8472 - DNA, 468 bp, Codonopsis lanceolata
  CDS (1)..(468)
atggcactaattccaagcatcttcggtgggcggcggagcaacgtcttcgacccattctcccatgatatctgggacccattccaaggtctgtccagcgccttagccaacgctcgagaccaagaaaccgccgcgatcgccaacactcgtatagactggaaggagaccccggaggcgcacgtcttcaaggctgatctaccgggtctgaagaaggaggaaatcaaagtcgaagttgaggacgggagggtattgcagattagcggggagaggagcaaggagcaggaagagaagaccgacacgtggcaccgagtggagaggagcgtggggaagtttcaccggagatttaggttaccggaaaacgcaaaggtggatcaggtgacggctagtatggagaacggcgtgttgacggtgacggtgcccaagaaggaggagaaagagcccgaggttaaggctattgatatttccggctga

SEQ ID NO: 8473 - protein, 155 aa, Codonopsis lanceolata
MALIPSIFGGRRSNVFDPFSHDIWDPFQGLSSALANARDQETAAIANTRIDWKETPEAHVFKADLPGLKKEEIKVEVEDGRVLQISGERSKEQEEKTDTWHRVERSVGKFHRRFRLPENAKVDQVTASMENGVLTVTVPKKEEKEPEVKAIDISG

SEQ ID NO: 8474 - DNA, 465 bp, Carica papaya
  CDS (1)..(465)
atgtctctgattccaagcttctttggaaaccgaggaagcagtatattcgacccctcctcgctcgacgtttgggatccattcaaggattttcctttcccttcctcgtcaatttctcgagaaaattccgcctttgttaacacgagtgtggactgggaggagacaccggaggcgcacgtcttcagggcagatcttcccggtctgaaaaaggaggaggtgaaagtggagttagaggatgacagggtgctgcagatcagcggggagagacacgtggagaaggaggacaagaacgacacttggcaccgggttgagcgcagcagcggtaagttttcgaggaggttcagattgccagagaacgtgaagatggaccaggtgaaggcttcaatggagaacggggtacttactgttacggtgcccaaagcagaggcgaagaagcctgacgttaaggccattgagatctctggttga

SEQ ID NO: 8475 - protein, 154 aa, Carica papaya
MSLIPSFFGNRGSSIFDPSSLDVWDPFKDFPFPSSSISRENSAFVNTSVDWEETPEAHVFRADLPGLKKEEVKVELEDDRVLQISGERHVEKEDKNDTWHRVERSSGKFSRRFRLPENVKMDQVKASMENGVLTVTVPKAEAKKPDVKAIEISG

SEQ ID NO: 8476 - DNA, 465 bp, Prunus persica
  CDS (1)..(465)
atggctctaagcctctttggtggccgacgaagcaacgtcttcgatccgttctctcttgacatctgggaccccttagagggccttggcactctggccaacatcccaccctctgctcgcgaaacgactgccatcgccaacactcgcattgactggaaagaaaccccagaagcccacatcttcatcgctgacctcccggggctgaagaaggaggaagtgaaagttgaggttgatgacgggaaggtgcttcatattagcggagagaggagcagagagcaggaggagaagaacgacaagtggcacaggattgagaggagcaccggcaagttttcgaggaggttcaggttgccggataatgcgaaaattgatcaggtaaaggctagcatggagaatggggttctcaccgtgactgtgcccaaggaggaggagaagcggccacaggtcaaggccattgacatctctggctaa

SEQ ID NO: 8477 - protein, 154 aa, Prunus persica
MALSLFGGRRSNVFDPFSLDIWDPLEGLGTLANIPPSARETTAIANTRIDWKETPEAHIFIADLPGLKKEEVKVEVDDGKVLHISGERSREQEEKNDKWHRIERSTGKFSRRFRLPDNAKIDQVKASMENGVLTVTVPKEEEKRPQVKAIDISG

SEQ ID NO: 8478 - DNA, 480 bp, Capsicum frutescens
  CDS (1)..(480)
atgtctatgattccaagcttcttcggtggtcgcaggagcaacatcttcgacccagtctccctcgacctatgggatccgttcgagggcttcccaatttcaagcacaatcgccaacaccccctcctctgctcgtgaaacctctgctttcccaaatgcaagaatcgattggaaagagaccccacaagcgcacatcttcaaagtagacgttccggggatcaagagagaggaagtgaaagtccaagttgaagaaggaaggatactacagataaccggtgagaggagcagagagcaagaggagaagaatgatcagtggcaccgtatggagaggagcagtggcaagtttttgaggagatttaggctgccggagaatacgaagatgggggaaattaaagcagctatggagaatggagtgctcactgtaactgttcctaaagaagaggagaagagatctgaggtgaaggcaattgatatctctggttaa

SEQ ID NO: 8479 - protein, 159 aa, Capsicum frutescens
MSMIPSFFGGRRSNIFDPVSLDLWDPFEGFPISSTIANTPSSARETSAFPNARIDWKETPQAHIFKVDVPGIKREEVKVQVEEGRILQITGERSREQEEKNDQWHRMERSSGKFLRRFRLPENTKMGEIKAAMENGVLTVTVPKEEEKRSEVKAIDISG

SEQ ID NO: 8480 - DNA, 477 bp, Pisum sativum
  CDS (1)..(477)
atgtctttgattccaagtttctttggcaaccgaaggagtaacgtatacgatccattctccctcgacgtttgggaccccttgaaggattttccatttccaagttctgcactctctgcttcattccctcgagagaattctgcttttgtatccacgcgagtggactggaaggagaccccagaagcacacgtgttcaaggctgaccttcctggactgaagaaggaggaagtgaaagttgaagttgaagatgatagggttctacagataagcggagagagaagcgttgagaaagaagataagaacgatgaatggcatcgcgtggaacgtagcagtggaaagttcttaagaaggttcagattacctgagaatgctaaaatgggtcaagtgaaagcttccatggagaacggtgttcttactgttaccgttcctaaggaagagatcaagaagcctgatgttaagtccattgagatctctggttga

SEQ ID NO: 8481 - protein, 158 aa, Pisum sativum
MSLIPSFFGNRRSNVYDPFSLDVWDPLKDFPFPSSALSASFPRENSAFVSTRVDWKETPEAHVFKADLPGLKKEEVKVEVEDDRVLQISGERSVEKEDKNDEWHRVERSSGKFLRRFRLPENAKMGQVKASMENGVLTVTVPKEEIKKPDVKSIEISG

SEQ ID NO: 8482 - DNA, 486 bp, Pseudotsuga menziesii
  CDS (1)..(486)
atgtcgatcattcccagctttttcggcaggcgatcatccagcgcgttcgacccattttcgttggatgtatgggatcctttccgagcattcacagatttggccgccgggggtccatctggccaatttgtaaatgaagcttcggccgtagccaatactcagatcgactggaaagaaacgccagaggcgcacattttcaaggctgatctcccgggtctgaagaaagaggaggtgaaaatagagttggaggaaggccaaagaattctccagataagcggggagcgcagcaaagaagaagagcaaaagaacgacaagtggcaccgcattgagcgatcccacggaaagtttcttcggcgcttccggctgccggacaatgcaaaggttgaagagatcaaggcggccatggaaaacggggtgctgactgtgacagtgccgaaggagcctgaaccgcaacctcctcaacccaaatccatcgagatctctggttga

SEQ ID NO: 8483 - protein, 161 aa, Pseudotsuga menziesii
MSIIPSFFGRRSSSAFDPFSLDVWDPFRAFTDLAAGGPSGQFVNEASAVANTQIDWKETPEAHIFKADLPGLKKEEVKIELEEGQRILQISGERSKEEEQKNDKWHRIERSHGKFLRRFRLPDNAKVEEIKAAMENGVLTVTVPKEPEPQPPQPKSIEISG

SEQ ID NO: 8484 - DNA, 486 bp, Arabidopsis thaliana
  CDS (1)..(486)
atgtctctcattccaagcattttcggaggacgcagatcaaacgtctttgatccgttctcgcaagacgtatgggatccattcgaaggattcttcacgccatcttctgcgttagcaaacgcttcaaccgctcgtgatgtggcagcgtttacaaacgcaagagtggactggaaggaaacgccggaggcacatgtgttcaaagcggacttgccagggctgaagaaggaggaagtcaaggttgaggttgaagacaagaacgtactgcagattagcggagagaggagcaaggagaacgaagagaagaacgataagtggcaccgtgtggagagagctagtgggaagtttatgagaaggtttaggttaccggagaatgcaaagatggaagaagtgaaggcaacaatggagaatggtgtgcttacggttgtggttccgaaagcgcctgagaagaagcctcaagtcaagtccatcgatatctccggggctaattga

SEQ ID NO: 8485 - protein, 161 aa, Arabidopsis thaliana
MSLIPSIFGGRRSNVFDPFSQDVWDPFEGFFTPSSALANASTARDVAAFTNARVDWKETPEAHVFKADLPGLKKEEVKVEVEDKNVLQISGERSKENEEKNDKWHRVERASGKFMRRFRLPENAKMEEVKATMENGVLTVVVPKAPEKKPQVKSIDISGAN

SEQ ID NO: 8486 - DNA, 468 bp, Arabidopsis thaliana
  CDS (1)..(468)
atgtcgctgattccaagcttcttcggcaacaacaggcgaatcaacaacaacatattcgatccattctcactcgacgtatgggatccattcaaggaacttcaattcccgtcaccgtcttcgtcggcgatagcaaacgcacgtgtggattggaaagagacggcggaggcgcacgtgttcaaggcggatttaccggggatgaagaaagaagaggttaaagtagagattgaggatgatagtgtgcttaagatcagcggagagagacacgttgagaaagaggagaagcaggacacgtggcatcgtgtagagagatcgagtgggggattctcgaggaagtttaggttaccggagaatgtgaagatggatcaagttaaagcttcaatggagaatggtgttttgactgtgactgtgcctaaagtggagactaataagaagaaggctcaagttaagtctattgatatctctggctaa

SEQ ID NO: 8487 - protein, 155 aa, Arabidopsis thaliana
MSLIPSFFGNNRRINNNIFDPFSLDVWDPFKELQFPSPSSSAIANARVDWKETAEAHVFKADLPGMKKEEVKVEIEDDSVLKISGERHVEKEEKQDTWHRVERSSGGFSRKFRLPENVKMDQVKASMENGVLTVTVPKVETNKKKAQVKSIDISG

SEQ ID NO: 8488 - DNA, 468 bp, Helianthus annuus
  CDS (1)..(468)
atgtcgatcatcccaagcttgttcgctggccgaaggagcagcgtctttgacccattttccctcgacgtttgggacccattcagagacttccccatttcgtcttcctctgatgtttcaagggaaacttctgcgttggtaaacgcccgtgtggattggaaggaaacgccagaagctcatgtgttcaaggccgatcttcctgggatcaagaaagaagaagtgaaggtggaggtggaagacggaaacatattacagatcaccggtgagaggaatgtggagaaagaagataagaatgataagtggcatcgggttgaacgaagcagtggcaaattcacaaggaggttcaggttgccggagaatgctaaaatggatcaggtgaaagcggccatggaaaacggggtgcttacaattacggtgcccaaagaagaagtgaagaaacccgatgtcaagtctattgaaatctccggttaa

SEQ ID NO: 8489 - protein, 155 aa, Helianthus annuus
MSIIPSLFAGRRSSVFDPFSLDVWDPFRDFPISSSSDVSRETSALVNARVDWKETPEAHVFKADLPGIKKEEVKVEVEDGNILQITGERNVEKEDKNDKWHRVERSSGKFTRRFRLPENAKMDQVKAAMENGVLTITVPKEEVKKPDVKSIEISG

SEQ ID NO: 8490 - DNA, 468 bp, Helianthus annuus
  CDS (1)..(468)
atgtcgatcgtcccaagcttattcggtagccgacgcagcagcatcttcgacccattttccctatacgtttgggacccattcagagacttccctatttcaacttcatctgaagtttcaagggaaacttctgctttggtaaacgcccgtgtggattggaaggaaacgccagaagctcatgtgttcaaggccgatcttcctgggatcaagaaagaagaagtgaaggtggaggtggaagacggaaacatcttacaaatcaccggtgagaggaacgtggagaaagaagataagaatgataagtggcatcgggttgaaagaagcagcggaaaattcacaaggaggttcaggttgccggagaatgctaaaatggatcaggtgaaggcggctatggaaaacggagtgcttacaattacggtgcctaaagaagaagcaaagaaacctgacgtcaagtctattgaaatctccggttaa

SEQ ID NO: 8491 - protein, 155 aa, Helianthus annuus
MSIVPSLFGSRRSSIFDPFSLYVWDPFRDFPISTSSEVSRETSALVNARVDWKETPEAHVFKADLPGIKKEEVKVEVEDGNILQITGERNVEKEDKNDKWHRVERSSGKFTRRFRLPENAKMDQVKAAMENGVLTITVPKEEAKKPDVKSIEISG

SEQ ID NO: 8492 - DNA, 477 bp, Retama raetam
  CDS (1)..(477)
atgtctctaattcctagcgtttttggcactggacgaaggaccaacgtgttcgacccattctccctcgacatatgggacccattccaagacttcccattgcgcaccattgctccctccggcttcgacaccgagacagccgccgtggcaaacacccgaattgactggaaagagacaccggaggcgcacgtgttcaaggcagacctaccagggctgaagaaggaagaggtgaaggtggaagtggaggaaggtcgtgttctgcagataagtggtgagaggactaaggagaaggaagacaagaacgacacgtggcatcgcgtggagtgcagcgctggccgattcctccgccgtttcaggctgccggagaatgccaaggtggaacaagtgaaggctagcttggagaacggtgtgctcactgttactgtccctaaggaagaggttaagaagcctgatgtcaagcctgttcagatcactggctga

SEQ ID NO: 8493 - protein, 158 aa, Retama raetam
MSLIPSVFGTGRRTNVFDPFSLDIWDPFQDFPLRTIAPSGFDTETAAVANTRIDWKETPEAHVFKADLPGLKKEEVKVEVEEGRVLQISGERTKEKEDKNDTWHRVECSAGRFLRRFRLPENAKVEQVKASLENGVLTVTVPKEEVKKPDVKPVQITG

SEQ ID NO: 8494 - DNA, 453 bp, Hordeum vulgare
  CDS (1)..(453)
atgtcgatcgtgaggcgtagcaacgcgttcgaccccttcgccgacctctgggctgacccgttcgacaccttccgctccatcgtcccggcgttctctggcaacagcgagacggccgccttcgccaatgctcgcgtcgactggaaggagaccccggaggcgcacgtcttcaaggccgaccttcccggcgtgaagaaggaggaggtcaaggtggaggtggaggacggcaacgtgctcgttgtcagcggcgagcgcactaaggagaaggaggacaagaacgacaagtggcaccgcgtggagcgtagcagcggcaagttcgtgaggcgcttccgcctgccggaggacgccaaggtggaggaggtgaaggccggactggagaacggtgtgctcaccgtcaccgtgcccaagacagaggtcaagaagcccgaggtgaaggccatcgagatctccggctga

SEQ ID NO: 8495 - protein, 150 aa, Hordeum vulgare
MSIVRRSNAFDPFADLWADPFDTFRSIVPAFSGNSETAAFANARVDWKETPEAHVFKADLPGVKKEEVKVEVEDGNVLVVSGERTKEKEDKNDKWHRVERSSGKFVRRFRLPEDAKVEEVKAGLENGVLTVTVPKTEVKKPEVKAIEISG

SEQ ID NO: 8496 - DNA, 474 bp, Brassica oleracea
  CDS (1)..(474)
atgtctctaatcccaagctttttcggtggccgaagaacaaacgtgttcgacccattctcgctagacctgtatgacccgttcgaaggattcttaacgccttcagggatgacaaacacaacctccaaggacgtggcagcgttcacaaacgcgaaagtggactggagggagacagcagaggcgcacgtgttcaaggcggacttgccggggctgaagaaggaagaagtgaaggtggaggttgaagatggcaacatacttaagataagtggagagagaagcagcgagaatgaagagaagagtgacaagtggcaccgtgtggagaggtcaagtgggaagttcatgaggaggtttaaattgccggagaacgcgaaggtagatgaagtaaaagctagtatggagaacggtgtgttgtcggtcacggtgcctaagatgcctgagaggaagcctgaggtcaagtctatggacatctccggctaa

SEQ ID NO: 8497 - protein, 157 aa, Brassica oleracea
MSLIPSFFGGRRTNVFDPFSLDLYDPFEGFLTPSGMTNTTSKDVAAFTNAKVDWRETAEAHVFKADLPGLKKEEVKVEVEDGNILKISGERSSENEEKSDKWHRVERSSGKFMRRFKLPENAKVDEVKASMENGVLSVTVPKMPERKPEVKSMDISG

SEQ ID NO: 8498 - DNA, 483 bp, Malus domestica
  CDS (1)..(483)
atgtcgttaattcccaactcccgacgaggaagcagcagcgttttcgacccattctccctcaatctgtgggaccctttcaaggatttcccgttcccttcctcctcatcactctccgcatttcctgaattttctcgggagaattcggcttttgtgaacactagggtcgactggaaggagacccccgaagcccatgtgttcaaggcggacgttccggggctgaaaaaagaggaggtgaaggtggaggtggaagacgacagggtgcttaagatcagcggagagaggaacgtggaggaggaggataaaaacgacaagtggtacagagtggagaggagcagcggcaagttcttgaggaggtttcagcttccggagaacgcaaaggttgatcagattaaggctgccatggagaatggagttctaagtgtcactgttccgaaggcggagttgaagaacgttgacgtcagagccattgaaatttcgggttga

SEQ ID NO: 8499 - protein, 160 aa, Malus domestica
MSLIPNSRRGSSSVFDPFSLNLWDPFKDFPFPSSSSLSAFPEFSRENSAFVNTRVDWKETPEAHVFKADVPGLKKEEVKVEVEDDRVLKISGERNVEEEDKNDKWYRVERSSGKFLRRFQLPENAKVDQIKAAMENGVLSVTVPKAELKNVDVRAIEISG

SEQ ID NO: 8500 - DNA, 474 bp, Helianthus annuus
  CDS (1)..(474)
atgtcgatcgtctcaagcttgttcggtggccgaaggagcagcgtcttcgaccccttttccctagacgtttgggacccattcagagacttccccatttcgtcttcctctgatgtttcaagggaaacttctgcgttggtaaacgcccgtgtggattggaaggaaacgccagaagctcatgtgttcaaggcggatcttccagggatcaaaaaggaagaagtgaaggtggaggtagaagacggaaacatcttaaaaatcaccggtgagaggaacatcgagaaagaagataagaatgacaaatggcatcgggttgaacgaagcagtggcaaattcacaaggaggttcaggttgccggagaatgctaaaatggatcaggtgaaagcggccatggaaaacggggtgcttacaattacggtgcccaaagaagaagtgaagaaacccgatgtcaagtctattggagatctctggttagaataa

SEQ ID NO: 8501 - protein, 157 aa, Helianthus annuus
MSIVSSLFGGRRSSVFDPFSLDVWDPFRDFPISSSSDVSRETSALVNARVDWKETPEAHVFKADLPGIKKEEVKVEVEDGNILKITGERNIEKEDKNDKWHRVERSSGKFTRRFRLPENAKMDQVKAAMENGVLTITVPKEEVKKPDVKSIGDLWLE

SEQ ID NO: 8502 - DNA, 480 bp, Nicotiana tabacum
  CDS (1)..(480)
atgtctctgattccaagcttctttgatggccgcaggagcaacatcttcgatccattctccctcaacatatgggatcctttcgagggcttccctttctccggcacggtcgccaacattccaacctctactcgtgaaaccgctgctttctcgagtgctcgaattgattggaaagagaccccagaatcccatgtctttaaggtggatcttcctggaattaagaaagaggaggtgaaggtggaggtagaagaaggaagagttctacaaattagtggcgagagaagcagagagcaagaggagaagaacgataaatggcacagcatggagaggagcagcggaaagttccttaggaggtttaggttgccggagaatatcaaaatggaagagattaaggcaactatggagaatggggtgctcactgtgactgtcccaaaaatggaggaaaagaaacctgaggtgaaggccattgacatctctggttaa

SEQ ID NO: 8503 - protein, 159 aa, Nicotiana tabacum
MSLIPSFFDGRRSNIFDPFSLNIWDPFEGFPFSGTVANIPTSTRETAAFSSARIDWKETPESHVFKVDLPGIKKEEVKVEVEEGRVLQISGERSREQEEKNDKWHSMERSSGKFLRRFRLPENIKMEEIKATMENGVLTVTVPKMEEKKPEVKAIDISG

SEQ ID NO: 8504 - DNA, 465 bp, Solanum lycopersicum
  CDS (1)..(465)
atgtctctgatcccaagaattttcggcgatcgacgaagcagcagcatgttcgatccattttcaattgacgtatttgatccattcagggaattaggcttcccaagtaccaattcaggggagagctctgcatttgccaacacacgaatagactggaaggaaactccagaagctcatgtgttcaaggttgatcttccagggcttaagaaggaggaagtcaaagtggaagtcgaggaggatagggttcttcagatcagcggagagaggaacgtggagaaggaagataagaatgataagtggcatcgcatggagcgaagcagcgggaaattcatgaggagatttagacttccggagaatgcaaagatggatcaagttaaggcgtctatggagaatggagtgcttactgttactgttccaaaggaagaggtgaagaagcctgaggtcaagtccattgagatctctggttaa

SEQ ID NO: 8505 - protein, 154 aa, Solanum lycopersicum
MSLIPRIFGDRRSSSMFDPFSIDVFDPFRELGFPSTNSGESSAFANTRIDWKETPEAHVFKVDLPGLKKEEVKVEVEEDRVLQISGERNVEKEDKNDKWHRMERSSGKFMRRFRLPENAKMDQVKASMENGVLTVTVPKEEVKKPEVKSIEISG

SEQ ID NO: 8506 - DNA, 465 bp, Solanum lycopersicum
  CDS (1)..(465)
atgtctctgatcccaagaattttcggcgatcgacgaagcagcagcatgttcgatccattttcaattgacgtatttgatccattcagggaattaggcttcccaagtaccaattcaggggagagctctgcatttgccaacacacgaatagactggaaggaaactccagaagctcatgtgttcaaggttgatcttccagggcttaagaaggaggaagtcaaagaggaagtcgaggaggatagggttcttcagatcagcggagagaggaacgtggagaaggaagataagaatgataagtggcatcgcatggagcgaagcagcgggaaattcatgaggagatttagacttccggagaatgcaaagatggatcaagttaaggcgtctatggagaatggagtgcttactgttactgttccaaaggaagaggtgaagaagcctgaggtcaagcccattgagatctctggttaa

SEQ ID NO: 8507 - protein, 154 aa, Solanum lycopersicum
MSLIPRIFGDRRSSSMFDPFSIDVFDPFRELGFPSTNSGESSAFANTRIDWKETPEAHVFKVDLPGLKKEEVKEEVEEDRVLQISGERNVEKEDKNDKWHRMERSSGKFMRRFRLPENAKMDQVKASMENGVLTVTVPKEEVKKPEVKPIEISG

SEQ ID NO: 8508 - DNA, 465 bp, Solanum lycopersicum
  CDS (1)..(465)
atgtctctgatcccaagaattttcggcgatcgacgaagcagcagcatgttcgatccattttcaatcgacgtatttgatccattcagggaattaggcttcccaggtaccaattcaggggagagctctgcatttgccaacacacgaatagactggaaggaaactccagaagctcatgtgttcaaggctgatcttccagggcttaagaaggaggaagtcaaagtggaagtcgaggaggatagggttcttcagatcagcggagagaggaacgtggagaaggaagataagaatgacaagtggcatcgcgtggagcgaagcagcgggaaattcatgaggagatttagacttccggagaatgcaaagatggatcaagttaaggcttcaatggagaacggagtgcttactgttactgttccaaaagaagaggtgaagaagcctgaggtcaagtccattgagatctctggttaa

SEQ ID NO: 8509 - protein, 154 aa, Solanum lycopersicum
MSLIPRIFGDRRSSSMFDPFSIDVFDPFRELGFPGTNSGESSAFANTRIDWKETPEAHVFKADLPGLKKEEVKVEVEEDRVLQISGERNVEKEDKNDKWHRVERSSGKFMRRFRLPENAKMDQVKASMENGVLTVTVPKEEVKKPEVKSIEISG

SEQ ID NO: 8510 - DNA, 462 bp, Glycine max
  CDS (1)..(462)
atggattggatcggagcgtaccgcggaggccagagaagcagggactggtgcgacccttcatcaccattcactgatttgtgggaccctcgtcgtgtcggtgacgctgatgatatcacctcctctctcgcccatgctcacgttgactggcgtgagactgataaagctcatatcttccgtgctgatcttccaggggtgaagaaagaggatctgaaggtgcaggtggaggagaataagatcctgcagataagcggggagagggtgaaggagaaggaggaccagaacgacaagtggcaccgcgtcgagaggcagtgcggaagcttcctccgccgcttccggctgccggaggatgccaaccccaaccagatcagctgcacgctcgaaaacggggtgctgaacgtcaccgtgcccaaggtggagaagaagccggagaacaagaacgtgaggcagattgatgtggtttga

SEQ ID NO: 8511 - protein, 153 aa, Glycine max
MDWIGAYRGGQRSRDWCDPSSPFTDLWDPRRVGDADDITSSLAHAHVDWRETDKAHIFRADLPGVKKEDLKVQVEENKILQISGERVKEKEDQNDKWHRVERQCGSFLRRFRLPEDANPNQISCTLENGVLNVTVPKVEKKPENKNVRQIDVV

SEQ ID NO: 8512 - DNA, 465 bp, Quercus suber
  CDS (1)..(465)
atggcgctcagtcttttcggtggccgaagaagcaacgtgttcgaccctttctcactggacatctgggacccatttgagggcttcagtgctgtagccagcgttcctccctcggctcgtgaaaccacagcttttgctacagcacgcattgattggaaggaaaccccagaggcacatattttcaaggctgatcttccaggtctgaagaaggaggaagtgaaagttgaggttgaggatggtaatgtgttgcaaataagtggggagaggagcaaagagcacgaggaaaagaatgataagtggcacagggttgagaggagctgtggcaagtttatgaggaggtttaggttgccagagaatgcgaaggtggatcaggtgaaggctaatatggagaatggagtgctcactgtgatggtgcctaaggaagagcagaagaagcctgcggtcaaggccatcgagatctctggctaa

SEQ ID NO: 8513 - protein, 154 aa, Quercus suber
MALSLFGGRRSNVFDPFSLDIWDPFEGFSAVASVPPSARETTAFATARIDWKETPEAHIFKADLPGLKKEEVKVEVEDGNVLQISGERSKEHEEKNDKWHRVERSCGKFMRRFRLPENAKVDQVKANMENGVLTVMVPKEEQKKPAVKAIEISG

SEQ ID NO: 8514 - DNA, 453 bp, Corylus avellana
  CDS (1)..(453)
atgtcgatcgtcccaaacaatgagcgagagcgcagtgtctccaatccctcctccagagacctgtgggacgtcttccggagcttcagagagaaccaccttcaggacccattcagcgatttacctttcgcttctacactctccacgctcttccctcactccccgttcgggagctcggtgaacaccaggctcgactggagggagaccccgagagcccacgtgctgaaggcttctcttccggggttcgtggacgaggacgtgttggtggagctccaagacgaccgagtgctccaggtgagcgtcgagagtggcaagttcgtgagcaggttcaaggtccctgacgatgcgatgctcgaccagttgaaggcctcgatgcacaatggggttctcactgtgactattccgaaagcggaggcgagcaggccaaccgttcggaccatcgagatctctggctaa

SEQ ID NO: 8515 - protein, 150 aa, Corylus avellana
MSIVPNNERERSVSNPSSRDLWDVFRSFRENHLQDPFSDLPFASTLSTLFPHSPFGSSVNTRLDWRETPRAHVLKASLPGFVDEDVLVELQDDRVLQVSVESGKFVSRFKVPDDAMLDQLKASMHNGVLTVTIPKAEASRPTVRTIEISG

SEQ ID NO: 8516 - DNA, 465 bp, Castanea sativa
  CDS (1)..(465)
atggcgctcagtcttttcggtggccgaagaagcaacgtgttcgaccctttctcactggacatatgggacccatttgagggcttcagtgctgtagccaacgttcctccctcggctcgtgaaaccacagcttttgctacagcacgcattgattggaaggaaaccccagaggcacacattttcaaggctgatcttccgggtctgaagaaggaggaagtgaaagttgaggttgaggatgggaatgtgttgcaaataagcggggagaggagcaaagagcatgaggaaaagaatgataagtggcacagggttgagaggagctgtggcaagtttcttaggaggtttaggttgccagagaatgcgaaggtggagcaggtgaaggccaatatggagaatggagtgctcactgtgattgtgcctaaggaggagcagaaaaagactgaggtcaagtccatcgagatctctggttaa

SEQ ID NO: 8517 - protein, 154 aa, Castanea sativa
MALSLFGGRRSNVFDPFSLDIWDPFEGFSAVANVPPSARETTAFATARIDWKETPEAHIFKADLPGLKKEEVKVEVEDGNVLQISGERSKEHEEKNDKWHRVERSCGKFLRRFRLPENAKVEQVKANMENGVLTVIVPKEEQKKTEVKSIEISG

SEQ ID NO: 8518 - DNA, 441 bp, Funaria hygrometrica
  CDS (1)..(441)
atggcactgtctctgttcgggcgtggcagcggcagcttcttcgatccgttcgacctgtcgctgctggagagcgggccttcgcggcagtttgcgcgcgacgcgcatgcggtgcccaacacgcagattgattggcgtgagacgccggaggcgcaatcttcaaaggcggacctgcccgggttgaagaaggaggaggtgaaggtgcagctggtggacggcaagacgttggagatcagcggggagaggaggaaggaagaggtgcacaaggacgatacatggcaccgcgtggagcgcgcgcacggcagcttcctgcggcggttccggctgcccgataacagcaacgtggaagcagtggaagcgcaggtgcaggacggagtgctcacggtgaccatcccgaagatccagaagccaaagccccaggtgcgacagatcgagatcgcgtag

SEQ ID NO: 8519 - protein, 146 aa, Funaria hygrometrica
MALSLFGRGSGSFFDPFDLSLLESGPSRQFARDAHAVPNTQIDWRETPEAQSSKADLPGLKKEEVKVQLVDGKTLEISGERRKEEVHKDDTWHRVERAHGSFLRRFRLPDNSNVEAVEAQVQDGVLTVTIPKIQKPKPQVRQIEIA

SEQ ID NO: 8520 - DNA, 450 bp, Funaria hygrometrica
  CDS (1)..(450)
atggcgatctacgtcaaccgccggaataacatctggaacatgcctgaccctatggatattatgatgaatttcttcgaagatactcccgccaggtcgatcgcccgggatgctcatgccttggcgagtacgaatgtggattggaaggagactccgactgagcatgtgattaaggcagatttaccgggattgaagaaagaggaggtccatgttcaggttgagggcgacagaaccttgagcattagcgggcagcgcaagcatgaggaggtccagaagacagatacttggcatcgcgtggagcgtagcagcggccaattcatgaggaaatttcggttgcctgagaatgccaatcttgaacagatctcggcccaagtgcaggacggagtcttgacagttaaaattcccaagttggagaagcagaagcctcactcgcgcaccattgagattggatag

SEQ ID NO: 8521 - protein, 149 aa, Funaria hygrometrica
MAIYVNRRNNIWNMPDPMDIMMNFFEDTPARSIARDAHALASTNVDWKETPTEHVIKADLPGLKKEEVHVQVEGDRTLSISGQRKHEEVQKTDTWHRVERSSGQFMRKFRLPENANLEQISAQVQDGVLTVKIPKLEKQKPHSRTIEIG

SEQ ID NO: 8522 - DNA, 462 bp, Funaria hygrometrica
  CDS (1)..(462)
atggctctctcgctgtttggcggtcgtggcaacagtgtgttcgatccctttgagtttggcagtgtgtgggatccttttacggtgctggagagcgggccatcacgacaacttgcaagcgacgtgcaggctgtggcgagcacgcggatcgactggcgtgaaacacccgaggcgcatattttcaaagcggacctgcctggattgacgaaggaagaggtgaaagtgcaagtgttggaggggaggacgctggagatctgtggcgaaaggaagaaagaggaagtgcagaagagcgatacctggcatcgaatggagcgcgcgcaggggagttttatgcggcggttccggctgccagagggcaccaacacggacgatgtgaaggcgcaagtgcaggacggggttttgactgtgacagttcccaaagttcagaagccgaagccacaggttcggcagatagagattgcgtga

SEQ ID NO: 8523 - protein, 153 aa, Funaria hygrometrica
MALSLFGGRGNSVFDPFEFGSVWDPFTVLESGPSRQLASDVQAVASTRIDWRETPEAHIFKADLPGLTKEEVKVQVLEGRTLEICGERKKEEVQKSDTWHRMERAQGSFMRRFRLPEGTNTDDVKAQVQDGVLTVTVPKVQKPKPQVRQIEIA

SEQ ID NO: 8524 - DNA, 462 bp, Funaria hygrometrica
  CDS (1)..(462)
atggctctgtcgctgttcggcggtcgtggcagcagcatcctggatcctttcgagttcggcagcgtgtgggatcctttctcggtactggagaatgggccgtctcggcgatttgcgagcgacgcgcacgccgtggcaaacacgcggatcgactggcgtgaaacaccggaggcgcacgtcttcaaagccgacctgcctgggctgaagaaggaggaggtgaaggtgcaagtggtggaggggaggacgctggagatcagcggcgagaggaagaaagaggaggtgcagaagggcgatacatggcatcgggtggagcgcgcgcagggcagtttcatgcgacggttccggctgccggagggcacgaacgtggatgaagtgaaggcgcaggtgcaggacggggtcctgacggtgacaattcccaagcttcagaaaccgaagccacaagtgcggcagatagagatcgcgtga

SEQ ID NO: 8525 - protein, 153 aa, Funaria hygrometrica
MALSLFGGRGSSILDPFEFGSVWDPFSVLENGPSRRFASDAHAVANTRIDWRETPEAHVFKADLPGLKKEEVKVQVVEGRTLEISGERKKEEVQKGDTWHRVERAQGSFMRRFRLPEGTNVDEVKAQVQDGVLTVTIPKLQKPKPQVRQIEIA

SEQ ID NO: 8526 - DNA, 486 bp, Chenopodium rubrum
  CDS (1)..(486)
atgtcgctaatcccaaacaactggttcaacaccggccgccgcagcaacatcttcgacccattctccctcgatgagatatgggacccattcttcggcctcccctccaccctctccaccgtccctcgctccgaaaccgccgccgagaccgccgccttcgcaaacgcccgcattgactggaaagagacaccggaggcccacgtcttcaaagccgaccttcccggtgttaagaaagaggaggttaaagtcgaggttgaagatggaaacgtgctcaggatcagcgggcagcgggcaagagagaaggaagagaagaatgatacttggcaccgtgttgagaggagctccggtcagtttatgaggaagtttaggctgcccgagaatgcgaaagttgatcaggtgaaagctggtatggagaatggggttcttacagttactgtgcctaagaatgaagctcctaagcctcaggttaaagctatcaacgtctattaa

SEQ ID NO: 8527 - protein, 161 aa, Chenopodium rubrum
MSLIPNNWFNTGRRSNIFDPFSLDEIWDPFFGLPSTLSTVPRSETAAETAAFANARIDWKETPEAHVFKADLPGVKKEEVKVEVEDGNVLRISGQRAREKEEKNDTWHRVERSSGQFMRKFRLPENAKVDQVKAGMENGVLTVTVPKNEAPKPQVKAINVY

SEQ ID NO: 8528 - DNA, 474 bp, Daucus carota
  CDS (1)..(474)
atgtcgatcattccaagcttttttggaggccggagaagcaacgtgttcgacccattctctcttgatgtatgggatcctttcaaagattttcctcttgttacctcctctgcctctgagttcggaaaagagactgcagcgtttgtcaatacgcacattgactggaaggagactccccaggctcatgtgttcaaggccgatcttccagggctgaagaaagaagaggtgaaggtagagcttgaagaaggaaaggttcttcagatcagcggagagcggaacaaagagaaggaggagaagaacgacaagtggcaccgcgtggaacgtagcagtggcaagtttctaaggaggttcaggcttccagagaatgcaaaggtggatgaggtgaaagctgctatggcgaatggggtggttactgttactgttccaaaggtggagatcaagaagccggaggtcaaggccattgatatttctggttaa

SEQ ID NO: 8529 - protein, 157 aa, Daucus carota
MSIIPSFFGGRRSNVFDPFSLDVWDPFKDFPLVTSSASEFGKETAAFVNTHIDWKETPQAHVFKADLPGLKKEEVKVELEEGKVLQISGERNKEKEEKNDKWHRVERSSGKFLRRFRLPENAKVDEVKAAMANGVVTVTVPKVEIKKPEVKAIDISG

SEQ ID NO: 8530 - DNA, 462 bp, Helianthus annuus
  CDS (1)..(462)
atgtcaatcattccaagctttttcaccagcaaaagaagcaacatattcgacccattctccctagacacatgggacccgttccaagggatcatctccaccgaacccgcgcgggaaaccgcagcgatcgtgaacgcgagaatcgactggaaagagacgcccgaggcgcacgtgttaaaagccgacttacccgggatgaagaaggaagaggtgaaggtggaagtggaagacgggagggtgttgcagataagtggagagaggtgtagagagcaggaggagaaggatgacacgtggcatagggttgagaggagtagtgggaagtttattaggcggtttcggttgccggagaatgcgaagatggatgaggtgaaggcgatgatggagaacggtgtgttgacggtggttgtgcctaaggaggaggaggagaagaagccgatggtgaaggctattgatatttctgggtag

SEQ ID NO: 8531 - protein, 153 aa, Helianthus annuus
MSIIPSFFTSKRSNIFDPFSLDTWDPFQGIISTEPARETAAIVNARIDWKETPEAHVLKADLPGMKKEEVKVEVEDGRVLQISGERCREQEEKDDTWHRVERSSGKFIRRFRLPENAKMDEVKAMMENGVLTVVVPKEEEEKKPMVKAIDISG

SEQ ID NO: 8532 - DNA, 477 bp, Pisum sativum
  CDS (1)..(477)
atgtctctgattccaagtttctttagtggccgaaggagcaatgttttcgatcctttctccctggacgtctgggatcctttgaaggactttccattttcaaattcttcaccttccgcttcattccctcgtgagaatcctgcttttgtgagcacacgagttgactggaaggaaacaccggaagcgcatgttttcaaggctgatcttcctgggctgaaaaaggaggaagtgaaagttgaagttgaagatgatagggttctacagataagcggagagagaagcgttgagaaagaagataagaatgatgaatggcatcgcgtggaacgtagcagtggaaagttcttaagaaggttcagattgcctgagaatgctaaaatggataaagtgaaagcttccatggagaacggcgttctgacagtgaccgttccaaaagaagagataaagaaggctgaggttaagtctattgagatttctggttaa

SEQ ID NO: 8533 - protein, 158 aa, Pisum sativum
MSLIPSFFSGRRSNVFDPFSLDVWDPLKDFPFSNSSPSASFPRENPAFVSTRVDWKETPEAHVFKADLPGLKKEEVKVEVEDDRVLQISGERSVEKEDKNDEWHRVERSSGKFLRRFRLPENAKMDKVKASMENGVLTVTVPKEEIKKAEVKSIEISG

SEQ ID NO: 8534 - DNA, 465 bp, Solanum lycopersicum
  CDS (1)..(465)
atgtctctgatcccaagaattttcggcgatcgacgaagcagcagcatgttcgatccattttcaattgacgtatttgatccattcagggaattaggcttcccaagtaccaattcaggggagagctctgcatttgccaacacacgaatagactggaaggaaactccagaacctcatgtgttcaaggttgatcttccagggcttaagaaggaggaagtcaaagtggaagtcgaggaggatagggttcttcagatcagcggagagaggaacgtggagaaggaagataagaatgataagtggcatcgcatggagcgaagcagcgggaaattcatgaggagatttagacttccggagaatgcaaagatggatcaagttaaggcgtctatggagaatggagtgcttactgttactgttccaaaggaagaggtgaagaagcctgaggtcaagtccattgagatctctggttaa

SEQ ID NO: 8535 - protein, 154 aa, Solanum lycopersicum
MSLIPRIFGDRRSSSMFDPFSIDVFDPFRELGFPSTNSGESSAFANTRIDWKETPEPHVFKVDLPGLKKEEVKVEVEEDRVLQISGERNVEKEDKNDKWHRMERSSGKFMRRFRLPENAKMDQVKASMENGVLTVTVPKEEVKKPEVKSIEISG

SEQ ID NO: 8536 - DNA, 465 bp, Solanum peruvianum
  CDS (1)..(465)
atgtctctgatcccaagaattttcggcgatcgacgaagcagcagcatgttcgatccattttcaattgacgtatttgatccattcagggaattaggcttcccaggtaccaattcaggggagacctctgcgtttgccaacactcgaatagactggaaggaaactccagaagctcatgtgttcaaggctgatcttccagggcttaagttggaggaagtaaaagtggaagtcgaggaggatagggttcttcagatcagcggagagaggaacatggagaaagaagataagaatgataagtggcagcgcgtggagcgaagcagcgggaaattcatgaggagatttagacttccggagaatgcaaagatggatcaagttaaggcttcaatggagaatggagtgcttactgttacagttccgaaggaagaaatgaagaagcctgatgtgaagtccattgagatctctggttaa

SEQ ID NO: 8537 - protein, 154 aa, Solanum peruvianum
MSLIPRIFGDRRSSSMFDPFSIDVFDPFRELGFPGTNSGETSAFANTRIDWKETPEAHVFKADLPGLKLEEVKVEVEEDRVLQISGERNMEKEDKNDKWQRVERSSGKFMRRFRLPENAKMDQVKASMENGVLTVTVPKEEMKKPDVKSIEISG

SEQ ID NO: 8538 - DNA, 456 bp, Triticum aestivum
  CDS (1)..(456)
atgtcgatcgtgaggcggagcaacgtgttcgaccccttcgccgacctttgggcggaccccttcgacaccttccgttccatcgtcccggcgatctcaggcggcagcagcgagacggccgcgttcgccaacgcccgtgtggactggaaggagacccccgaggcgcacgtcttcaaggtcgacctccccggcgtgaagaaggaggaggtcaaggtggaggtggaggacggcaacgtgctcgtcgtcagcggcgagcggagcagggagaaggaggacaagaacgacaagtggcaccgcgtggagcgcagcagcggcaagttcgtgcggcgtttccggctgccggaggacgccaaggtggaggaggtcaaggccgggctggagaacggcgtgctcaccgtcaccgtgcccaaggccgaggtcaagaagcccgaggtgaaggccatcgagatctccggctga

SEQ ID NO: 8539 - protein, 151 aa, Triticum aestivum
MSIVRRSNVFDPFADLWADPFDTFRSIVPAISGGSSETAAFANARVDWKETPEAHVFKVDLPGVKKEEVKVEVEDGNVLVVSGERSREKEDKNDKWHRVERSSGKFVRRFRLPEDAKVEEVKAGLENGVLTVTVPKAEVKKPEVKAIEISG

SEQ ID NO: 8540 - DNA, 480 bp, Daucus carota
  CDS (1)..(480)
atgtcgatcattccgagcttttttggcagccgaagaagcaacgttttaaacccgttctctctcgacatctgggatcctttccaggactaccctctcatcacctcctcaggtacttcctctgagttcggaaaagagactgcagcgtttgccaatacgcacattgactggaaggagactccccaggctcatgtgttcaaggctgatcttccgggcttaaagaaagaagaggtgaaggtagaggttgaagaaggaaaggttcttcagatcagcggagagcggaacaaagaaaaggaggagaagaacaacaagtggcaccgtgtggaattcagcagtggcaagtttctgaggaggttcaggcttccagagaatgcaaatgtggatgaggtgaaagctggaatggagaatggagtgttaactgttactgttccaaaggtggagatgaagaagcccgaggtcaagtccattcatatatctggctaa

SEQ ID NO: 8541 - protein, 159 aa, Daucus carota
MSIIPSFFGSRRSNVLNPFSLDIWDPFQDYPLITSSGTSSEFGKETAAFANTHIDWKETPQAHVFKADLPGLKKEEVKVEVEEGKVLQISGERNKEKEEKNNKWHRVEFSSGKFLRRFRLPENANVDEVKAGMENGVLTVTVPKVEMKKPEVKSIHISG

SEQ ID NO: 8542 - DNA, 477 bp, Medicago sativa
  CDS (1)..(477)
atgtcactgattccaagtttcttcggcggccgaaggagcaacgttttcgatccattctccctcgacgtttgggaccccttcaaggattttcctttcaacaattctgcactttctgcttcattccctcgtgagaattccgcatttgtgagcacacgagtcgactggaaggagactccagaagcgcatgtgttcaaggcggatcttccaggaatgaagaaggaggaagtgaaggtagagattgaagatgatagggttcttcagatcagcggagagagaagcgttgagaaagaagataagaacgatcaatggcatcgcttggagcgtagcagtggaaagttcatgaggagatttagattgcctgagaatgcgaaaatggatcaagtgaaagctgcaatggagaatggtgttctcactgtcactgtgccaaaagaagaggttaagaagcctgaagtgaagaccattgatatctctggttag

SEQ ID NO: 8543 - protein, 158 aa, Medicago sativa
MSLIPSFFGGRRSNVFDPFSLDVWDPFKDFPFNNSALSASFPRENSAFVSTRVDWKETPEAHVFKADLPGMKKEEVKVEIEDDRVLQISGERSVEKEDKNDQWHRLERSSGKFMRRFRLPENAKMDQVKAAMENGVLTVTVPKEEVKKPEVKTIDISG

SEQ ID NO: 8544 - DNA, 465 bp, Solanum peruvianum
  CDS (1)..(465)
atgtcactgatcccaagaatcttcggcgatcgacgaagcaccagcgtgttcgatccattttcaattgacgtatttgatccattcaaggaattaggctttacagtttccaattcaggggagacctctgcatttgctaacacccgaatcgactggaaggaaactccagaagctcatgtgttcaaggctgatcttccaggacttaagaaggaggaagtaaaagtggaagtcgaggaggatcgtgttcttcagatcagcggagagaggaacgtggagaaagaagacaagaacgatacttggcaccgtgtggaacgcagcagcgggaaattcatgagaagatttagacttccggagaatgcaaagatggatcaagttaaggcgtctatggagaatggagtgcttactgttactgttccgaaggaggaggtgaataaccctgatgtcaagtccattgagatctctggttaa

SEQ ID NO: 8545 - protein, 154 aa, Solanum peruvianum
MSLIPRIFGDRRSTSVFDPFSIDVFDPFKELGFTVSNSGETSAFANTRIDWKETPEAHVFKADLPGLKKEEVKVEVEEDRVLQISGERNVEKEDKNDTWHRVERSSGKFMRRFRLPENAKMDQVKASMENGVLTVTVPKEEVNNPDVKSIEISG

SEQ ID NO: 8546 - DNA, 465 bp, Glycine max
  CDS (1)..(465)
atgtcattgattccaagtattttcggtggcccaaggagcaacgtgttcgatccattctcactcgatatgtgggatcccttcaaggattttcatgttcccacttcttctgtttctgctgaaaattctgcatttgtgaacacacgtgtggattggaaggagacccaagaggcacacgtgctcaaggctgatattccagggctgaagaaagaggaagtgaaggttcagattgaagatgatagggttcttcagattagcggagagaggaacgttgagaaggaagacaagaacgacacgtggcatcgcgtggaccgtagcagtggaaagttcatgagaaggttcagattgccagagaatgcaaaagtggagcaagtaaaggcttgtatggaaaatggggttctcactgttactattccaaaggaagaggttaagaagtctgatgttaagcctatagaaatctctggttaa

SEQ ID NO: 8547 - protein, 154 aa, Glycine max
MSLIPSIFGGPRSNVFDPFSLDMWDPFKDFHVPTSSVSAENSAFVNTRVDWKETQEAHVLKADIPGLKKEEVKVQIEDDRVLQISGERNVEKEDKNDTWHRVDRSSGKFMRRFRLPENAKVEQVKACMENGVLTVTIPKEEVKKSDVKPIEISG

SEQ ID NO: 8548 - DNA, 486 bp, Glycine max
  CDS (1)..(486)
atgtctctaatcccaaacttcttcggtggccggagaaacaatgtgttcgatcctttctcactggacgtgtgggatcccttcaaggattttcctttcccaaatacgctttcttcagcttccttccctgaattttctcgggaaaattcagcatttgtgagcacccgtgtggactggaaggagaccccagaggcgcacgtgttcaaggcagatattccaggactgaagaaggaggaagtgaaggtgcagattgaagacgataaggttcttcagataagcggagagaggaacgttgagaaggaagataagaacgacacgtggcatcgagtggagcgtagcagtggcaagttcatgagaaggttcagattgccggagaacgctaaagtggagcaagtgaaggcttctatggaaaatggggttcttactgtcactgttcccaaggaagaggttaagaagcctgatgttaaggccatagaaatctctggttaa

SEQ ID NO: 8549 - protein, 161 aa, Glycine max
MSLIPNFFGGRRNNVFDPFSLDVWDPFKDFPFPNTLSSASFPEFSRENSAFVSTRVDWKETPEAHVFKADIPGLKKEEVKVQIEDDKVLQISGERNVEKEDKNDTWHRVERSSGKFMRRFRLPENAKVEQVKASMENGVLTVTVPKEEVKKPDVKAIEISG

SEQ ID NO: 8550 - DNA, 462 bp, Brassica napus
  CDS (1)..(462)
atgtcgttgattccaagcttcttcggtaacaacaggcgtggcagcaacagcttcttcgatcctttctccctcgacgtttgggatccactcagggagttctcttccctttcccgagacaactccgcgatcgtgaacgcgcgtgtggactggagggagacgcccgaggcgcacgtgttcaaggcggacttgcctggactcaaaaaggaggaagtgaaggtggagatcgaggaagacagcgtgctgaagatcagtggagagagacacgtggagaaggaggataagaacgacacgtggcaccgtgtggagagatcgagcgggcagttcacgaggaagtttaggcttcctgagaacgtgaagatggatcaggtgaaggctgcgatggagaatggtgtgctgactgtgacggtgcctaaggcggagaccaagaaggctgatgtcaagtctatccagatctctggctga

SEQ ID NO: 8551 - protein, 153 aa, Brassica napus
MSLIPSFFGNNRRGSNSFFDPFSLDVWDPLREFSSLSRDNSAIVNARVDWRETPEAHVFKADLPGLKKEEVKVEIEEDSVLKISGERHVEKEDKNDTWHRVERSSGQFTRKFRLPENVKMDQVKAAMENGVLTVTVPKAETKKADVKSIQISG

SEQ ID NO: 8552 - DNA, 483 bp, Brassica napus
  CDS (1)..(483)
atgtctctaattccaagccttttcagtggacgcagatcaaacgtttttgatcccttctcgcttgacgcatgggatccattccaaggattcttcactccttccgcgttaggaaacgcttccggctcaaccgctcgtgacattgcagcgtttacaaacgcgagagttgactggaaggagacgccagaggcacacgtgttcaaggccgacttgccggggctgaagaaagaagaagtgaaggttgaggttgaagacaaggacattcttcagataagcggagagaggagcaaggagaacgaggagaagagcgacaagtggcaccgcgtggagagggcaagcgggaagtttatgaggaggtttaagttgccggagaatgcgaagatggaggaagtgaaggcgacgatggagaacggtgtgcttacggttacggtgccgaaagcgcctgagaagaagcctgaggttaagtctattgatatctctggctaa

SEQ ID NO: 8553 - protein, 160 aa, Brassica napus
MSLIPSLFSGRRSNVFDPFSLDAWDPFQGFFTPSALGNASGSTARDIAAFTNARVDWKETPEAHVFKADLPGLKKEEVKVEVEDKDILQISGERSKENEEKSDKWHRVERASGKFMRRFKLPENAKMEEVKATMENGVLTVTVPKAPEKKPEVKSIDISG

SEQ ID NO: 8554 - DNA, 471 bp, Brassica napus
  CDS (1)..(471)
atgtcgatgattccgagcttcttcggcaacaacaggcgcggcggcagcagcttcttcgatcctttttctcttgacgtttgggatccgttcaaggactttccatcatcctcttcgttttcgcgggagaactccgcgattgtgaacgcgcgtgtggactggagggagactcctgaggcgcacgtgttcaaggccgatttgccgggactgaagaaagaggaagtgaaggtggagatcgaggatgacagcgtgttgaagatcagcggggagaggcacgtggagaaggaggataagaacgacacgtggcaccgtgtggagaggtcgagcgggcagttcacgaggaagttcaggctgccggagaatgtgaagatggatcaggtgaaggctgcgatggagaacggggttctgactgtgactgtgccaaaggcggagatgaagaaaactgatgtcaaatctattcagatctctggctga

SEQ ID NO: 8555 - protein, 156 aa, Brassica napus
MSMIPSFFGNNRRGGSSFFDPFSLDVWDPFKDFPSSSSFSRENSAIVNARVDWRETPEAHVFKADLPGLKKEEVKVEIEDDSVLKISGERHVEKEDKNDTWHRVERSSGQFTRKFRLPENVKMDQVKAAMENGVLTVTVPKAEMKKTDVKSIQISG

SEQ ID NO: 8556 - DNA, 471 bp, Brassica napus
  CDS (1)..(471)
atgtcgatgattccgagcttctttggaaacaacaggcgtggcagcagcagcttcttcgatccgttttctctagatgtttgggacccgttcaaggacttttcatcatcttcttcgttttcccgagaaaactctgcgatcgtgaacgcgcgcgtggactggagggagacgccggaggcgcacgtgttcaaggcggacttacctggactgaagaaggaggaagtgaaggtcgaggttgaggacaacaacgtgttgaagatcagtggtcagaggcacgtggagaaggaggacaagagcgacacgtggcaccgcgtggagaggtcgaggggacagttcacgaggaagtttaggctgccggagaacgtgaagatggaccaggtgaaggctgcgttggagaacggagtcctgactgtgacggtgcctaaggtagagacggagaaggctagtgtcagatctgttcagatatctggctga

SEQ ID NO: 8557 - protein, 156 aa, Brassica napus
MSMIPSFFGNNRRGSSSFFDPFSLDVWDPFKDFSSSSSFSRENSAIVNARVDWRETPEAHVFKADLPGLKKEEVKVEVEDNNVLKISGQRHVEKEDKSDTWHRVERSRGQFTRKFRLPENVKMDQVKAALENGVLTVTVPKVETEKASVRSVQISG

SEQ ID NO: 8558 - DNA, 483 bp, Brassica napus
  CDS (1)..(483)
atgtctctaatcccaagcttttttggaggacggagatcaaacgcttttaaccccttctcgctagatgcatgggatccattcgaaggattcttcactccttcctcgttagcaaacgcatccggttcaaccgctcgtgaaatggcagcgtttacaaacgcaagagtggactggaaggagactcctgaggcacacatgttcaaagccgacttgcctggattgaagaaagaggaagtgaaggttgaggttgaagacaagaacatacttcagataagcggagagaggagcaaggagaacgaagagaagagcgacaaatggcaccgtgtggagagggcaagcgggaagtttatgaggaggtttaagttacctgagaatgctaagatggaagaagtgaaggcggcaatggagaacggtgtgcttacgattacggtgccgaaagctcctgagaagaagcatgaggtcaagtctgttgacatctctggctaa

SEQ ID NO: 8559 - protein, 160 aa, Brassica napus
MSLIPSFFGGRRSNAFNPFSLDAWDPFEGFFTPSSLANASGSTAREMAAFTNARVDWKETPEAHMFKADLPGLKKEEVKVEVEDKNILQISGERSKENEEKSDKWHRVERASGKFMRRFKLPENAKMEEVKAAMENGVLTITVPKAPEKKHEVKSVDISG

SEQ ID NO: 8560 - DNA, 474 bp, Brassica napus
  CDS (1)..(474)
atgtctctaatcccgagctttttcggtggccgaagaacaaacgtgttcgacccattctcgctagacctgtatgacccgttcgaaggattcttaacgccttcagggatgacaaacgcaccatccaaggacgtggcagcgttcacaaacgcgaaagtggactggagggagacaccagaggcgcacgtgttcaaggcggacttgccggggctgaagaaggaagaagtgaaggtggaggttgaagatggcaacatacttcagataagtggagagagaagcagcgagaatgaagagaagagtgacaagtggcaccgtgtggagaggtcaagtgggaagttcatgaggaggtttaagttgccggagaacgcgaaggtagatgaagtgaaagctagtatggagaacggtgtgttgtcggtcacggtgcctaagatggctgagaggaagcctgaggtcaagtctattgacatctccggctaa

SEQ ID NO: 8561 - protein, 157 aa, Brassica napus
MSLIPSFFGGRRTNVFDPFSLDLYDPFEGFLTPSGMTNAPSKDVAAFTNAKVDWRETPEAHVFKADLPGLKKEEVKVEVEDGNILQISGERSSENEEKSDKWHRVERSSGKFMRRFKLPENAKVDEVKASMENGVLSVTVPKMAERKPEVKSIDISG

SEQ ID NO: 8562 - DNA, 459 bp, Brassica napus
  CDS (1)..(459)
atgtctctagttccaagccttttcggaggacgcagatcaaacgcttttgatccgttctcgctagatgcatgggatccatttgaaggactcttaacgccttcctcggctcgtgacatggcagcattcacaaacgcaagagtggactggaaggagacgccggaggcacacgtgttcaaagcggacttgccggggctgaagaaagaggaagtgaaggttgaggttgaagacaagaacatactgcaaataagtggagagaggagcaaggagaacgaagagaagaacgacaagtggcaccgtgtggagagagcaagtgggaagtttatgaggaggtttaagttgcctgagaatgcgaagatggaagaagtgaaggcgacaatggagaatggtgtgcttacggttacggtaccaaaggcgcctgagaagaagcctgaagtcaagtctattgatatctcaggctga

SEQ ID NO: 8563 - protein, 152 aa, Brassica napus
MSLVPSLFGGRRSNAFDPFSLDAWDPFEGLLTPSSARDMAAFTNARVDWKETPEAHVFKADLPGLKKEEVKVEVEDKNILQISGERSKENEEKNDKWHRVERASGKFMRRFKLPENAKMEEVKATMENGVLTVTVPKAPEKKPEVKSIDISG

SEQ ID NO: 8564 - DNA, 465 bp, Glycine max
  CDS (1)..(465)
atgtctctgattccaggtttcttcggtgcccgaaggagcaacgtcttcgatccattctcactcgacatttgggatcccttcaaggattttcatgttcccacttcttctgtttctgctgaaaattctgcattcgtgagcactcgtgtggattggaaggaaaccccagaggcacacgtgttcaaggctgatattccagggctgaagaaagaggaagtcaaggttcagattgaagatgatagggttcttcagattagcggagagaggaacgttgagaaggaagacaagaacgacacgtggcatcgcgtggagcgtagcagtggtaagttcgtgagaaggtttagattgccggagaatgcaaaagtgaatgaagtgaaggcttctatggaaaatggggttctcactgtcactgttcctaaggaagaggctaagaagcctgatgtcaaggccattgaaatctctggttga

SEQ ID NO: 8565 - protein, 154 aa, Glycine max
MSLIPGFFGARRSNVFDPFSLDIWDPFKDFHVPTSSVSAENSAFVSTRVDWKETPEAHVFKADIPGLKKEEVKVQIEDDRVLQISGERNVEKEDKNDTWHRVERSSGKFVRRFRLPENAKVNEVKASMENGVLTVTVPKEEAKKPDVKAIEISG

SEQ ID NO: 8566 - DNA, 459 bp, Glycine max
  CDS (1)..(459)
atgtctctcattccaaacattttcggtggccgtaggagcaatgtgttcgatcccttcaaggattttcctttcccaaattccgtctctacttccttccctgagttttctcgggaaaattctgcgtttgtgagcactcgtgtggattggaaggagaccccagaggcgcacgtgttcaaggccgatattcccgggctgaagaaggaggaagtgaaggtgcagattgaagatgataaggtgcttcagatcagcggagagaggaacgttgagaaggaagataagaacgacacgtggcatcgcgtggagcgtagcagtggaaagttcatgaggaggttcagattgccggagaatgcaaaagtgaatgaagtgaaggcttctatggaaaatggggttcttactgttactgttcctaaggaagaggttaagaatcatgatgttaaggccatagaaatctctggttaa

SEQ ID NO: 8567 - protein, 152 aa, Glycine max
MSLIPNIFGGRRSNVFDPFKDFPFPNSVSTSFPEFSRENSAFVSTRVDWKETPEAHVFKADIPGLKKEEVKVQIEDDKVLQISGERNVEKEDKNDTWHRVERSSGKFMRRFRLPENAKVNEVKASMENGVLTVTVPKEEVKNHDVKAIEISG

SEQ ID NO: 8568 - DNA, 489 bp, Glycine max
  CDS (1)..(489)
atgagaagagttggtggtgatgttttgaacgtggatttggctgctgcagtgaacaacctcttcaatcttcctgaaactatggagaagttcatgtttccttcttctcgtgctcatgatcaccaccatgaaaccagaggggtctctagcatcattccagtggacattttggacactcccaaggagtatacattctttatggatgttcctggtctctccaagtctgaaattcaggtgacggttgaagatgagaacacacttgttataagaagcaatgggaagaggaagcgtcaagatggagaggatgaagggtgcaagtatcttaggttggagaggagagggcctcagaatttgcagaggaagtttcgtttgcctgagaatgctaatgtgtcagccattacagctaaatgcgaaaatggggttctcactgtggttgttgagaagcatcctcctccccaaaaatcaaaaactgttgaagttgccattgcttga

SEQ ID NO: 8569 - protein, 162 aa, Glycine max
MRRVGGDVLNVDLAAAVNNLFNLPETMEKFMFPSSRAHDHHHETRGVSSIIPVDILDTPKEYTFFMDVPGLSKSEIQVTVEDENTLVIRSNGKRKRQDGEDEGCKYLRLERRGPQNLQRKFRLPENANVSAITAKCENGVLTVVVEKHPPPQKSKTVEVAIA

SEQ ID NO: 8570 - DNA, 477 bp, Triticum aestivum
  CDS (1)..(477)
atgtcgctgattccccgcggcaaagctttcgaccccttctcccttgacctctcggaccccttcgatggcttccccttcggctccggcggcatcagcagcttcttcccctcgttcccgcgcgcatcctccgagaccgcggccttcgccggcgcgcggatcgactggaaggagactcccgaggcgcacgtgttcaaggcggacgtgccggggctgaaaaaggaggaagtgaaggtggaggtcgaggacggcaacgtgctccagatcagcggcgagcgcaacaaagagcaggaggagaagacgggcacgtggcacagggtggagcgcagcagcggcaagttcctgcgcaggttccgcctcccggacaacgccaaggcggaccagatcaaggcggccatggagaacggcgtgctcacagtcaccgtgcccaagaaggaggtcaaggagccggaggtcaagtccatccagatttctggctag

SEQ ID NO: 8571 - protein, 158 aa, Triticum aestivum
MSLIPRGKAFDPFSLDLSDPFDGFPFGSGGISSFFPSFPRASSETAAFAGARIDWKETPEAHVFKADVPGLKKEEVKVEVEDGNVLQISGERNKEQEEKTGTWHRVERSSGKFLRRFRLPDNAKADQIKAAMENGVLTVTVPKKEVKEPEVKSIQISG

SEQ ID NO: 8572 - DNA, 474 bp, Triticum aestivum
  CDS (1)..(474)
atgtcgctgattccccgcggcaacgccttcgaccccttctccctcgacctctggaaccccttcgacggcttccccttcggctccggcagcagcggcggcggcggcagcctcttcccctcgttcccgcgcatcagctccgagaccgcggccttcgccggcgcgcggatcgactggaaggagacgcccgaggcgcacgtgttcaaggcggacgtgccggggctgaagaaggaggaagtggaggacggcaacgtgctccagatcagcggcgagcgcaacaaagagaaggaggagaagaccgacacgtggcacagggtggagcgcagcagcggcaagttcctgcgcaggttcaggctcccggaggacgccaaggtggagcagatcaaggcggccatggagaacggcgtgctcaccgtcaccgtggccaaggaggaggccaagaagcccgaggtcaagtccatcctgatctccggatag

SEQ ID NO: 8573 - protein, 157 aa, Triticum aestivum
MSLIPRGNAFDPFSLDLWNPFDGFPFGSGSSGGGGSLFPSFPRISSETAAFAGARIDWKETPEAHVFKADVPGLKKEEVEDGNVLQISGERNKEKEEKTDTWHRVERSSGKFLRRFRLPEDAKVEQIKAAMENGVLTVTVAKEEAKKPEVKSILISG

SEQ ID NO: 8574 - DNA, 468 bp, Triticum aestivum
  CDS (1)..(468)
atgtcgctgatccgccgtggcgacgtgttcgaccccttctcgctcgacctctgggaccccttcgacggcttccccttcggctccggcagcggcagcatcttcccgcgcaccaccagctccgacaccgcggccttcgccggcgcgcgcatcgactggaaggagacgcccgaggcgcacgtgttcaaggcggacgtcccggggctgaagaaggaggaggtgaaggttgaggtggacgacggcaacgtgctgcagatcagcggcgagcggaacaaggagcaggagcagaagaccgacacctggcaccgcgtggagcgcagcagcggcaagttcctgcgccggttcaggctcccggacaacgtgaagtccgaggagatcaaggcggccatggagaacggcgtgctcaccgtcaccgtgcccaaggcggaggccaagaagcccgacgtcaagcccgtccagatcacgggatag

SEQ ID NO: 8575 - protein, 155 aa, Triticum aestivum
MSLIRRGDVFDPFSLDLWDPFDGFPFGSGSGSIFPRTTSSDTAAFAGARIDWKETPEAHVFKADVPGLKKEEVKVEVDDGNVLQISGERNKEQEQKTDTWHRVERSSGKFLRRFRLPDNVKSEEIKAAMENGVLTVTVPKAEAKKPDVKPVQITG

SEQ ID NO: 8576 - DNA, 474 bp, Triticum aestivum
  CDS (1)..(474)
atgtcgctgatccgccgcagcaacgtgttcgaccccttctccctcgacttcttcgacccattcgaaggcttccccttcggctccggcaacagcagcagcggcagtctcgtcccgcgcacctcctccgacacagcggccttcgcgggcgcgcgcatcgactggaaggagacgtccgaggcgcacgtgttcaaggcggacgtgccggggctgaagaaggaggaggtgaaggtggaggtggaggacggcaacatcctccagatcagcggcgagcggaagaaggagcaggaggagaagaccgacacctggcaccgcgtggagcgcagcagcggcaagttcctgcgcaggttctgcctcccggacaacgccaaggcggagcaggtgaaggcgtccatggagaacggcgtgctcaccgtcaccgtgcccaaggaggaggccaagaagcccgaggtcaagtccatccagatctcaggctag

SEQ ID NO: 8577 - protein, 157 aa, Triticum aestivum
MSLIRRSNVFDPFSLDFFDPFEGFPFGSGNSSSGSLVPRTSSDTAAFAGARIDWKETSEAHVFKADVPGLKKEEVKVEVEDGNILQISGERKKEQEEKTDTWHRVERSSGKFLRRFCLPDNAKAEQVKASMENGVLTVTVPKEEAKKPEVKSIQISG

SEQ ID NO: 8578 - DNA, 477 bp, Zea mays
  CDS (1)..(477)
atgtcgctgatccgccgcagcaacgtgttcgatcccttctccctcgacctctgggacccctttgagggcttccccttcggctccggcagcagcagcagtctcttcccctcgttcccgcggaccagctcggagaccgcggccttcgctggcgcgcggatcgactggaaggagactccagaggcgcacgtgttcaaggccgacgtaccggggctgaagaaggaggaggtcaaggtggaggtcgaggacggcaacgtccttcagatcagcggcgaacgcaacaaggagcaggaggagaagacggacacctggcaccgcgtggagcggagcagcgggaggttcctgcgcaggttccgactgcccgagaacgctaagacggagcagatcacggccgccatggagaacggcgtgcttacagtcactgtgccgaaggaggacgccaagaagcctgaagtgaagtccattcagatctccggctag

SEQ ID NO: 8579 - protein, 158 aa, Zea mays
MSLIRRSNVFDPFSLDLWDPFEGFPFGSGSSSSLFPSFPRTSSETAAFAGARIDWKETPEAHVFKADVPGLKKEEVKVEVEDGNVLQISGERNKEQEEKTDTWHRVERSSGRFLRRFRLPENAKTEQITAAMENGVLTVTVPKEDAKKPEVKSIQISG

SEQ ID NO: 8580 - DNA, 477 bp, Linum usitatissimum
  CDS (1)..(477)
atgtcgctgattccaagcttcttcggtaaccgccgatccgaccccttctccgccctggatatgtgggatccgattagggatttctcctccttcaacttcccctcctcatctctgatcctcggcggcggggagaactctgctttcgtgaacacgcggatcgactggaaggagactccagaggcgcacgtgttcaaggcggacctcccggggctgaagaaggaggagattaaggtcgaggtggaggaagatcgggtgctgcagatcagcggggaaaggaacgtggagaaggaggataagaacgacacgtggcacagggttgagaggagcagtgggaaattcatgaggaggttcaggctccccgagaatgctaagatggaggaggttaaggcggcgatggagaacggcgtgctgacggtgacggttcccaaggcggaggtgaagaagcctgaagtcaaggccattgagatatctggttaa

SEQ ID NO: 8581 - protein, 158 aa, Linum usitatissimum
MSLIPSFFGNRRSDPFSALDMWDPIRDFSSFNFPSSSLILGGGENSAFVNTRIDWKETPEAHVFKADLPGLKKEEIKVEVEEDRVLQISGERNVEKEDKNDTWHRVERSSGKFMRRFRLPENAKMEEVKAAMENGVLTVTVPKAEVKKPEVKAIEISG

SEQ ID NO: 8582 - DNA, 483 bp, Zea mays
  CDS (1)..(483)
atgtcgctcgtgagtcgccgcagcagcaacgtgttggacttggaccccttctccctcgacctctggtgggaccccttcgacatgttccgctccatcgtcccgtcggcggcctcctccggcggcggttccgagaccgccgccttcgccaacgcccgcgtcgactggaaggagacgcccgaggcgcacgtgttcaaggccgacctccccggcgtcaagaaggaggaggtcaaggtcgaggtgaaggacggcaacgtgctcgtcatcagcggcaagcgcagcagggaggaggaggaggaggacaagaacggcaagtggcaccgcgtcgagcgcagcagcggccagttcatgaggcgcttccgcctgcctgagaacgccaagctggacgaggtgaaggctggcctcgagaacggcgtgctcacggtcaccgtgcccaagacggaggtgaagaagcccgaggtgaaggctatcgagatctctggttga

SEQ ID NO: 8583 - protein, 160 aa, Zea mays
MSLVSRRSSNVLDLDPFSLDLWWDPFDMFRSIVPSAASSGGGSETAAFANARVDWKETPEAHVFKADLPGVKKEEVKVEVKDGNVLVISGKRSREEEEEDKNGKWHRVERSSGQFMRRFRLPENAKLDEVKAGLENGVLTVTVPKTEVKKPEVKAIEISG

SEQ ID NO: 8584 - DNA, 477 bp, Hordeum vulgare
  CDS (1)..(477)
atgtcgctgatccgtcgcagcaacgtgttcgaccccttctccctcgacttcttcgaccccttcgacggcttccccttcggctccggcagcagcaacagcggcggcagcctcgtcccgcgcacctcctctgacacggcggccttcgcgggggcgcgcatcgactggaaggagacccccgaggcgcacgtgttcaaggcggacgtgccggggctgaagaaggaggaggtgaaggtggaggtggaggacggcaacatcctccagatcagcggcgagaggaacaaggagcaggaggagaagacggacacctggcacagggtggagcgcagcagcggcaagttcctgcgcaggttcaggctcccggagaacgccaaggcggagcaggtgaaggcgtccatggagaacggcgtgctcaccgtcaccgtgcccaaagaggaggccaagaagcccgaggtcaagtccatccagatctccggctag

SEQ ID NO: 8585 - protein, 158 aa, Hordeum vulgare
MSLIRRSNVFDPFSLDFFDPFDGFPFGSGSSNSGGSLVPRTSSDTAAFAGARIDWKETPEAHVFKADVPGLKKEEVKVEVEDGNILQISGERNKEQEEKTDTWHRVERSSGKFLRRFRLPENAKAEQVKASMENGVLTVTVPKEEAKKPEVKSIQISG

SEQ ID NO: 8586 - DNA, 456 bp, Hordeum vulgare
  CDS (1)..(456)
atgtcgatcgtgaggcgtagcaacgtgttcgaccccttcgccgacctctgggcggaccccttcgacaccttccgctccatcgtcccggcaatctcaggcggcaacagcgagacagctgcgttcgccaacgcccggatggactggaaggagacgcccgaggcgcacgtcttcaaggctgatcttcctggcgtgaagaaggaggaggtcaaggtggaggtggaggacggcaacgtgctcgtcgtcagcggcgaacgcactaaggagaaggaggacaagaacgataagtggcaccgcgtggagcgtagcagcggcaagtttgtgaggcgcttccgcctgccggaggatgccaaggtggaggaggtgaaggccgggctggagaacggtgtgctcaccgtcaccgtgcccaagacagaggtcaagaagcccgaggtgaaggccatcgagatctccggctga

SEQ ID NO: 8587 - protein, 151 aa, Hordeum vulgare
MSIVRRSNVFDPFADLWADPFDTFRSIVPAISGGNSETAAFANARMDWKETPEAHVFKADLPGVKKEEVKVEVEDGNVLVVSGERTKEKEDKNDKWHRVERSSGKFVRRFRLPEDAKVEEVKAGLENGVLTVTVPKTEVKKPEVKAIEISG

SEQ ID NO: 8588 - DNA, 456 bp, Hordeum vulgare
  CDS (1)..(456)
atgtcgatcgtgaggaggagcaacgtgttggaccccttcgccgacctctgggccgacccattcgacaccttccgctccatcttcccggcgatctcaggcgggaacagcgagacagctgcgttcgcgaacgcccggatggactggaaggagacgcctgaggcacatgtcttcaaggctgatcttcctggcgtgaagaaggaggatgtcaaggtggaggtggaggacggcaacgtgctcatcgtcagcggcgagcgcaccaaagagaaggaggacaagaacgacaagtggcatcgggtggagcgcagcagcgggaagttcgtgcggcgcttccgcctgccagacgacgccaaggttgatgaagtgaaggccggactggagaacggtgtgctcaccgtcaccgtgcccaaagccgaggtcaagaagcccgaggtgaaggccatcgagatctccggctga

SEQ ID NO: 8589 - protein, 151 aa, Hordeum vulgare
MSIVRRSNVLDPFADLWADPFDTFRSIFPAISGGNSETAAFANARMDWKETPEAHVFKADLPGVKKEDVKVEVEDGNVLIVSGERTKEKEDKNDKWHRVERSSGKFVRRFRLPDDAKVDEVKAGLENGVLTVTVPKAEVKKPEVKAIEISG

SEQ ID NO: 8590 - DNA, 492 bp, Helianthus annuus
  CDS (1)..(492)
atgtcgatcattccaaatttcttcggccgcagacgaacaaacgtcttcgaccccttctctctagacgtgtgggacccattcgaaggcttccctttcaacaacaacaacttcggatccttatccgaccaagtccgatcatcatccgaaacatcgtcgttcgtgaacgctaatgttgactggagagagactaatgatgcgcatgtgtttaaggcggatgtacccggactgaagaaggaggaagtgaaggtagaggtggaggacgatcgagtgttgcagatcagtggagagaggaataaggagagtgaagagaaaggggacacgtggcaccgtgtggagaggagtagtgggaagtttgtgaggaggtttaggttgccagagaatgcgaaggtggatcaggtgaaggctgcgatggagaacggtgtgttgacggttactgtgccgaaagttgaagtgaagaagcctgatgtgaagtccattcagatttctggttag

SEQ ID NO: 8591 - protein, 163 aa, Helianthus annuus
MSIIPNFFGRRRTNVFDPFSLDVWDPFEGFPFNNNNFGSLSDQVRSSSETSSFVNANVDWRETNDAHVFKADVPGLKKEEVKVEVEDDRVLQISGERNKESEEKGDTWHRVERSSGKFVRRFRLPENAKVDQVKAAMENGVLTVTVPKVEVKKPDVKSIQISG

SEQ ID NO: 8592 - DNA, 642 bp, Brassica napus
  CDS (1)..(642)
atggcgtcatccctcgctcttaggagacttctctcatccactgtcgctcctggttcccgtagctttcttcgtccacaagctgcctctcgcctcctcaacaccaacgcggtcaggagctatgacggaggtgaaaatgaacgcggtgttgatatagaccgacgctctgatcgctctgtttctcgccgtggtgatgatattttcacagacgtgttcgatcccttttcaccgacgaggagtattagccaggtgctgaatctgatggaccagttcatggagaatcctctgttgtcggctagtcggggcatgggagcttctggagctcggcggggttgggatatcaaggagaaagacgatgccctctacttgaggatcgacatgcctgggctgagcagagaggatgtgaagctggctttggagaacgacactctggttataagaggagaagggaaagatgtggacgatggtggcgaggaaggtggagagactggtaataggagattcacaagtcggattggactgccggagaaggtatacaagaccgatgagattaaggcggaaatgaagaacggggttttgaaagttgtggtcccgaagatgaaggaagaagagagaaacgatgttcgtcagatcgaaatcaactga

SEQ ID NO: 8593 - protein, 213 aa, Brassica napus
MASSLALRRLLSSTVAPGSRSFLRPQAASRLLNTNAVRSYDGGENERGVDIDRRSDRSVSRRGDDIFTDVFDPFSPTRSISQVLNLMDQFMENPLLSASRGMGASGARRGWDIKEKDDALYLRIDMPGLSREDVKLALENDTLVIRGEGKDVDDGGEEGGETGNRRFTSRIGLPEKVYKTDEIKAEMKNGVLKVVVPKMKEEERNDVRQIEIN

SEQ ID NO: 8594 - DNA, 594 bp, Brassica napus
  CDS (1)..(594)
atgaagcacttgccatacttccctctgttaagcctcttagtaggagctctgatacttggaaacatcaaaccaagtgaagggtctctgtcttctgcagtagacactccaggaagcttgctatccgatctctggctagacaggtttcctgatccgttcaagatcttggagagaatcccactaggactcgagagggaccagagtgtggctctgtctccagcgagagttgactggaaagagacagcagaaggacatgagatcatgctggatgtgcccggtctgaaaaaggatgaagtgaagatagaggtggaggagaatcgagtcctctcagtcagtggagagaggaaaagagaggaagagaagaaaggagatcagtggcacagagttgagagatcgtatggaaagttttggagacagttcaagctacctgataatgttgatatggaatctgtcaaggccaagcttgagaatggtgtgctcactattaatcttacaaagcttgctcctgaaaaggtcaagggtcctagagttgttaacattgcagctgaagaagaccaaactgcaaagatcagctcctctgaatccaaagagctgtga

SEQ ID NO: 8595 - protein, 197 aa, Brassica napus
MKHLPYFPLLSLLVGALILGNIKPSEGSLSSAVDTPGSLLSDLWLDRFPDPFKILERIPLGLERDQSVALSPARVDWKETAEGHEIMLDVPGLKKDEVKIEVEENRVLSVSGERKREEEKKGDQWHRVERSYGKFWRQFKLPDNVDMESVKAKLENGVLTINLTKLAPEKVKGPRVVNIAAEEDQTAKISSSESKEL

SEQ ID NO: 8596 - DNA, 474 bp, Brassica napus
  CDS (1)..(474)
atgtctctaatcccaagctttttcggtggccgaagaacaaacgtgttcgacccattctcgctagacctgtatgacccgttcgaaggattcttaacgccttcagggatgacaaacgcaacctccaaggacgtggcagcgttcacaaacgcgaaagtggactggagggagacaccagaggcgcacgtgttcaaggcggacttgccggggctgaagaaggaagaagtgaaggtggaggttgaagatggcaacatacttcagataagtggagagagaagcagcgagaatgaagagaagagtgacaagtggcaccgtgtggagaggtcaagtgggaagttcatgaggaggtttaagttgccggagaacgcgaaggtagatgaagtgaaagctagtatggagaacggtgtgttgtcggtcacggtgcctaagatggctgagaggaagcctgaggtcaagtctattgacatctccggctaa

SEQ ID NO: 8597 - protein, 157 aa, Brassica napus
MSLIPSFFGGRRTNVFDPFSLDLYDPFEGFLTPSGMTNATSKDVAAFTNAKVDWRETPEAHVFKADLPGLKKEEVKVEVEDGNILQISGERSSENEEKSDKWHRVERSSGKFMRRFKLPENAKVDEVKASMENGVLSVTVPKMAERKPEVKSIDISG

SEQ ID NO: 8598 - DNA, 474 bp, Brassica napus
  CDS (1)..(474)
atgtcgatgattccgaccttcttcggcaacaacaggcgcgggggcaacagcttcttcgatccgttttgtctagatgtttgggacccgttcaaggactttccctcatcttcctcttcgttttcccgagaaaactctgtgatcgtgaacgcgcgtgtggactggagggagacgccggaggcgcacgtgttcaaggcggacttacctggactgaagaaggaggaagtgaaggtcgaggtcgaggacaacaacgtgttgaagatcagtggtcagaggcacgtggagaaggaggacaagagcgacacgtggcaccgcgtggagaggtcgagcggacagttcacgaggaagtttaggctgccggagaacgtgaagatggaccaggtgaaggctgcattggagaacggagtcctgactgtgacggtgcctaaggtagagacggaggaggctagtgtcagatctgttcagatatctggctga

SEQ ID NO: 8599 - protein, 157 aa, Brassica napus
MSMIPTFFGNNRRGGNSFFDPFCLDVWDPFKDFPSSSSSFSRENSVIVNARVDWRETPEAHVFKADLPGLKKEEVKVEVEDNNVLKISGQRHVEKEDKSDTWHRVERSSGQFTRKFRLPENVKMDQVKAALENGVLTVTVPKVETEEASVRSVQISG

SEQ ID NO: 8600 - DNA, 600 bp, Brassica napus
  CDS (1)..(600)
atggcgtcatcaacgtctctagcactcaggaggcttatctcttcctccgtcgtccctcgctccgttcgtccagcggcttctctgcgcctcttcaataccaacgcagctaggagctacgaagagggagatgataggaaccatcgccctaaccggacagtttctccccgcggtggcgatttcttctcagacatgttcgatccgtttacaccaacgaggagcttgagccaggtgcttaatttcatggatcagatcggcgaaagccctctggcatcatctaggagcgatgggatgggagctcgtggatgggacgtgaaagagaaagacgacgggttgcacctgaggatcgatatgccggggctgagcagagaggatgtgaagctcgctctggaacaaaacacactcgtgatcaaaggcgaagggaaaacagaggaagaagaagaagaagatggacggaagttttcgagcaggataggattaccagagaaagtatacaagacggatgagataaaggcggagatgaagaacggcgtgttgaaagtcgttgtgcccaagttgaaagaggatgagcgtaacaaggttcgccacatccaagttgactaa

SEQ ID NO: 8601 - protein, 199 aa, Brassica napus
MASSTSLALRRLISSSVVPRSVRPAASLRLFNTNAARSYEEGDDRNHRPNRTVSPRGGDFFSDMFDPFTPTRSLSQVLNFMDQIGESPLASSRSDGMGARGWDVKEKDDGLHLRIDMPGLSREDVKLALEQNTLVIKGEGKTEEEEEEDGRKFSSRIGLPEKVYKTDEIKAEMKNGVLKVVVPKLKEDERNKVRHIQVD

SEQ ID NO: 8602 - DNA, 462 bp, Brassica napus
  CDS (1)..(462)
atgtcgatgattccaagcttcttcggtaacaacaggcgtggcagcaacagcttcttcgatcctttctcccttgacgtttgggatccactcagggagctctcttccctttcccgagacaactccgcgatcgtgaacgcgcgtgtggactggagggagacgcccgaggcgcacgtgttcaaggcggacttgcctggactcaaaaaggaggaagtgaaggtggagatcgaggaagacagcgtgctgaagatcagtggagagagacacgtggagaaggaggataagaacgacacgtggcaccgtgtggagagatcgagcgggcagttcacgaggaagtttaggcttcctgagaacgtgaagatggatcaggtgaaggctgcgatggagaacggtgtgctgactgtgacggtgcctaaggcggagaccaagaaggctgatgtcaagtctatccagatctctggctga

SEQ ID NO: 8603 - protein, 153 aa, Brassica napus
MSMIPSFFGNNRRGSNSFFDPFSLDVWDPLRELSSLSRDNSAIVNARVDWRETPEAHVFKADLPGLKKEEVKVEIEEDSVLKISGERHVEKEDKNDTWHRVERSSGQFTRKFRLPENVKMDQVKAAMENGVLTVTVPKAETKKADVKSIQISG

SEQ ID NO: 8604 - DNA, 483 bp, Brassica napus
  CDS (1)..(483)
atgtctctaatcccaagcttttttggaggacggagatcaaacgcttttaaccccttctcgctagatgcatgggatccattcgaaggattcttcactccttcctcgttagcaaacgcatccggttcaaccgctcgtgacatggcagcgtttacaaacgcaagagtggactggaaggagacgcccgaggcacacgtgttcaaagccgacttgccggggctgaagaaagaggaagtgaaggttgaggttgaagacaagaacatacttcagataagcggagagaggagcaaggagaacgaagagaagaacgacaaatggcaccgtgtggagagggcaagcgggaagtttatgaggaggtttaagttgcctgagaatgcgaagatggaagaagtgaaggcgacgatggagaacggtgtgcttacggttacggtgccgaaagcgcctgagaagaagcctgaagtcaagtctattgacatctctggctaa

SEQ ID NO: 8605 - protein, 160 aa, Brassica napus
MSLIPSFFGGRRSNAFNPFSLDAWDPFEGFFTPSSLANASGSTARDMAAFTNARVDWKETPEAHVFKADLPGLKKEEVKVEVEDKNILQISGERSKENEEKNDKWHRVERASGKFMRRFKLPENAKMEEVKATMENGVLTVTVPKAPEKKPEVKSIDISG

SEQ ID NO: 8606 - DNA, 594 bp, Brassica napus
  CDS (1)..(594)
atggcgtcatcaacgtctctagcactcaggaggcttatctcttcctccgtcgtccctcgctccgttcgtccagcggcttctctgcgcctcttcaataccaacgcagctaggagctacgaagagggagatgataggaaccatcgcccttaccggacagtttctccccgcggtggcgatttcttctcagacatgttcgatccgtttacaccgacgaggagcttgagccaggtgcttaatttcatggatcagatcggcgaaagccctctggcatcatctatgcgcggtgggatgggagctcgtggatgggacgtgaaagagaaagacgacgggttgcacctgaggatcgatatgccggggctgagcagagaggatgtgaagctctctctggaacagaacactctcgtgatcaaaggcgaagggggtgaagaagaagaagaagatggacggaagttttcgagcaggataggattacctgagaaagtatacaagacggatgagataaaggcggagatgaagaacggcgtgttgaaagtcgttgtgcccaagttgaaagaggctgagcgtaacacggttcgccacatccaagttgcctaa

SEQ ID NO: 8607 - protein, 197 aa, Brassica napus
MASSTSLALRRLISSSVVPRSVRPAASLRLFNTNAARSYEEGDDRNHRPYRTVSPRGGDFFSDMFDPFTPTRSLSQVLNFMDQIGESPLASSMRGGMGARGWDVKEKDDGLHLRIDMPGLSREDVKLSLEQNTLVIKGEGGEEEEEDGRKFSSRIGLPEKVYKTDEIKAEMKNGVLKVVVPKLKEAERNTVRHIQVA

SEQ ID NO: 8608 - DNA, 483 bp, Brassica napus
  CDS (1)..(483)
atgtctctaattccaagccttttcggaggacgcaggtcaaacgttttcgatccgttctcactagacgcatgggatccattcgagggcttcttcactccttccgcgttagcaaacgcttccggctcaaccgctcgtgacattgcagcgtttacgaacgcgagagtggactggaaggagacgcccgaggcacacgtgttcaaagctgatttgccagggctgaagaaagaagaggtgaaggttgaggttgaagacaagaacatacttcagataagcggagagaggagcaaggagaacgaagagaagaacgacaagtggcaccgcgtggagagggcaagcgggaagtttatgaggaggtttaagttgccggagaatgcgaagatggaggaagtgaaggcgacgatggagaacggtgtgcttacggttacggtgccgaaagcgcctgagaagaagcctgaagttaagtctattgatatctctggctaa

SEQ ID NO: 8609 - protein, 160 aa, Brassica napus
MSLIPSLFGGRRSNVFDPFSLDAWDPFEGFFTPSALANASGSTARDIAAFTNARVDWKETPEAHVFKADLPGLKKEEVKVEVEDKNILQISGERSKENEEKNDKWHRVERASGKFMRRFKLPENAKMEEVKATMENGVLTVTVPKAPEKKPEVKSIDISG

SEQ ID NO: 8610 - DNA, 594 bp, Brassica napus
  CDS (1)..(594)
atgaagcacttgccttacttccctctgttaagcctcttcgtaggagctctgatacttggaaacaccaaaccaagtgaagggtctctgtcttccgcaatagacactccgggaagcttgctatccgatctctggctagacaggtttcctgatccgttcaagattttggagagaatcccactagaactcgagagggaccagagcgtggctctgtctccagctagagttgactggaaagaaacagcagaaggacatgagatcatgctggatgtgcctggtctaaagaaggatgaagtgaagatagaggtggaggagaatcgagtcctttcagtcagtggagagaggaaaagagaggaagagaagaaaggagatcagtggcatagagttgagagatcatatggaaagttctggagacagttcaagctacctgataatgttgatatggaatctgtcaaggccaagcttgagaatggtgttctcactattaacctcacaaagctggctcctgaaaaggtcaagggtcctagagttgttaacattgcagctgaagaagaccaaaccgcaaagatcagctcctctgaatccaaagagctgtga

SEQ ID NO: 8611 - protein, 197 aa, Brassica napus
MKHLPYFPLLSLFVGALILGNTKPSEGSLSSAIDTPGSLLSDLWLDRFPDPFKILERIPLELERDQSVALSPARVDWKETAEGHEIMLDVPGLKKDEVKIEVEENRVLSVSGERKREEEKKGDQWHRVERSYGKFWRQFKLPDNVDMESVKAKLENGVLTINLTKLAPEKVKGPRVVNIAAEEDQTAKISSSESKEL

SEQ ID NO: 8612 - DNA, 480 bp, Glycine max
  CDS (1)..(480)
atgtcgttgattccaagtttcttcggcaccgggcgaagaaccaacgtcttcgaccccttctccctcgacgtgtgggacccattccatggcttccccggcaccaccgccctctccgctccgcgctccgagacggcggccttcgccaacacgcgcatcgactggaaggagacggcggaggcgcacgtgttcaaggcagacctgccggggctgaagaaggaagaggtgaaggtggagatcgaggaggagggaagggtgctgcagataagcggacagagaacaaaggagaaggaggacaagaacgacacgtggcaccgcctcgaacgctccagcggcagctttctccgccgcttccgcctgccggagaacgcgaaactcgatcaggtgaaggccggcatggagaacggagtgctcactgtcactgttcccaaggtggatgtcaagaagcccgatgtcaagcccgttcagatcactgaaggctaa

SEQ ID NO: 8613 - protein, 159 aa, Glycine max
MSLIPSFFGTGRRTNVFDPFSLDVWDPFHGFPGTTALSAPRSETAAFANTRIDWKETAEAHVFKADLPGLKKEEVKVEIEEEGRVLQISGQRTKEKEDKNDTWHRLERSSGSFLRRFRLPENAKLDQVKAGMENGVLTVTVPKVDVKKPDVKPVQITEG

SEQ ID NO: 8614 - DNA, 594 bp, Glycine max
  CDS (1)..(594)
atgaggcactttttagtactagtaccactgatcttgcttgtttttgctggtttcccatccaaagcaaaagggtctctgctaccattcacaaatcatccaaataccctcttggctgatctatggtctaatcatttccctgatccatttcgcgtgttagagcaaatcccatttggggttgacaaagatgaaacattcacagctctatcatcacatgcaagagtggattggaaggagacaccagaagggcatgtcataatgctagatgtgccagggttgaagagagatgagatcaagatagaagtggaagggaatagagtgctgagagtgagtggagaaaggaagagggaagaggagaaggaaggggatcactggcatagagtggagagatcctatggcaaattctggaggcagttcaaggtgccagacaatgtggacttggattctgtcaaggctaagatggagaatggagtgcttactctcacaatgaacaagttgtcacctgataaggtcaaaggtccaaggttggtcagcattgcaggggatgatgagcaagctcccaagctcaagggtaatgaagacaagcaggagctttga

SEQ ID NO: 8615 - protein, 197 aa, Glycine max
MRHFLVLVPLILLVFAGFPSKAKGSLLPFTNHPNTLLADLWSNHFPDPFRVLEQIPFGVDKDETFTALSSHARVDWKETPEGHVIMLDVPGLKRDEIKIEVEGNRVLRVSGERKREEEKEGDHWHRVERSYGKFWRQFKVPDNVDLDSVKAKMENGVLTLTMNKLSPDKVKGPRLVSIAGDDEQAPKLKGNEDKQEL

SEQ ID NO: 8616 - DNA, 435 bp, Glycine max
  CDS (1)..(435)
atggctggcactatctttggataccctttcagacacttcatctggggtcacccaccaattttcaaagaatggtccggctcaacagccctcttagattggctcgaatcacccactgcccacatcttaaaaattaacgttccaggattcagcaaggaagacataaaggtgcagattgaggatgggaatattcttcacatcaaaggggaagtttggagagaggagcctcaagcaaaggagaaggatactgtttggcatgtggctgagagaggcactgggaagggagggttctcaagggaaattgaattgccagagaatgtgaaggtggatcagattaaggcacaggtggagaatggagtcctcactatagttgtgcctaaagatgcaacacccaaaacgcctaaagtgagaaacattaacatcactagcaggctttaa

SEQ ID NO: 8617 - protein, 144 aa, Glycine max
MAGTIFGYPFRHFIWGHPPIFKEWSGSTALLDWLESPTAHILKINVPGFSKEDIKVQIEDGNILHIKGEVWREEPQAKEKDTVWHVAERGTGKGGFSREIELPENVKVDQIKAQVENGVLTIVVPKDATPKTPKVRNINITSRL

SEQ ID NO: 8618 - DNA, 516 bp, Glycine max
  CDS (1)..(516)
atgtccctcctttcctccggtggcttcttcggccgcagaagaaacgacccgccaccccaccaacccacgtgggaccactaccaggcccaggaccatcaccaccctctgggagtttcccagccccaccacccaccccccttcatgtccttccccagtgactcctcgccggtgctcaacaccgccctcatagagtggaaggagaccccggaggcgcacgtttacaatgcgcacctcccgggctacaagcgcaacgacgtgcgcgtggaggtcgacgacgaccgggtgctctgcatcgtgtgcgggaagagcgtcgagaaggaggagcagaggggaggctggcaccgcgtcgagctctccagtggacagttcgttcagcgcctcactttgcctgagaattccatggtggatcatgttaaggcctatatggataacggggtgctcactatcacggttcctaaacaccacagaggggtcaataaccgtgttagaaacattaacatctcttctcgtccgtga

SEQ ID NO: 8619 - protein, 171 aa, Glycine max
MSLLSSGGFFGRRRNDPPPHQPTWDHYQAQDHHHPLGVSQPHHPPPFMSFPSDSSPVLNTALIEWKETPEAHVYNAHLPGYKRNDVRVEVDDDRVLCIVCGKSVEKEEQRGGWHRVELSSGQFVQRLTLPENSMVDHVKAYMDNGVLTITVPKHHRGVNNRVRNINISSRP

SEQ ID NO: 8620 - DNA, 462 bp, Glycine max
  CDS (1)..(462)
atgtctctgattccaaactttttcggtggccgtaggagcaatgtgtttgatcctttctcccttgaagtgtgggatcccttcaaggattttcattttccctcttctgtttctgctgaaaattctgcatctgtgaacactcgtgtggattggaaagaaaccccagaagcacacgtgttcaaggcagatattccagggctgaagaaggaggaagtgaaggtggaaattgaagatgatagggttcttcagataagcggagagaggaaccttgagaaggaagataagaacgacacgtggcatcgcgtggagcgtagcagcggcaagttcatgaggaggttcaggttgccggagaatgctaaagtggagcaagtgaaggcttctatggaaaatggggttctcactgtcactgttcccaaggaagaggttaagaagcctgatgttaaggccattgaaatctctggttaa

SEQ ID NO: 8621 - protein, 153 aa, Glycine max
MSLIPNFFGGRRSNVFDPFSLEVWDPFKDFHFPSSVSAENSASVNTRVDWKETPEAHVFKADIPGLKKEEVKVEIEDDRVLQISGERNLEKEDKNDTWHRVERSSGKFMRRFRLPENAKVEQVKASMENGVLTVTVPKEEVKKPDVKAIEISG

SEQ ID NO: 8622 - DNA, 486 bp, Glycine max
  CDS (1)..(486)
atgtctctaatcccaaacttcttcggtggccggagaaacaatgtgttcgatcctttctcactggacgtgtgggatcccttcaaggattttcctttcccaaatacgctttcttcagcttccttccctgaattttctcgggaaaattcagcatttgtgagcacccgtgtggactggaaggagaccccagaggcgcacgtgttcaaggcagatattccaggactgaagaaggaggaagtgaaggtgcagattgaagacgataaggttcttcagataagcggagagaggaacgttgagaaggaagataagaacgacacgtggcatcgagtggagcgtagcagtggcaagttcatgagaaggttcagattgccggagaacgctaaagtggagcaagtgaaggcttctatggaaaatggggttcttactgtcactgttcccaaggaagaggttaagaagcctgatgttaaggccatagacatctctggttaa

SEQ ID NO: 8623 - protein, 161 aa, Glycine max
MSLIPNFFGGRRNNVFDPFSLDVWDPFKDFPFPNTLSSASFPEFSRENSAFVSTRVDWKETPEAHVFKADIPGLKKEEVKVQIEDDKVLQISGERNVEKEDKNDTWHRVERSSGKFMRRFRLPENAKVEQVKASMENGVLTVTVPKEEVKKPDVKAIDISG

SEQ ID NO: 8624 - DNA, 594 bp, Glycine max
  CDS (1)..(594)
atggctcgcacaattacaattgcagcaatgtgtcttcttctctcattagtgtccctctgtgtcaccaccaacgcattaatgccatacacacgtagcaccctctgggacatgatgctccaatccgaggacccatttggaatcttggaacagaacccattcaacaacatacccaacatcagaggaggagccgagactctcgccctggcacgtgcggattggaaggaaacccccagcgcgcacgtgatagtgctggacctacccgggatgaaaaagaaggacgtgaagatcgaggtggaggagagtcgcgtgttacgtatcagcggcgagaggaagggagaggaagaagaagaagaagaagaggttgagggcgagaagtggcatagggctgaaaggactaacgggaagttcatgagacagttccggttgccggtgaatgcggacttggagaaggttacggcgaggcttgaaaatggggtgctgaggatcacggtgggcaagtttggtgaggacaagaagaggcagcctaaggttattgacattgctcagagggattctgctgctgagaatgtgaagcccaccaagcctcaaatgtaa

SEQ ID NO: 8625 - protein, 197 aa, Glycine max
MARTITIAAMCLLLSLVSLCVTTNALMPYTRSTLWDMMLQSEDPFGILEQNPFNNIPNIRGGAETLALARADWKETPSAHVIVLDLPGMKKKDVKIEVEESRVLRISGERKGEEEEEEEEVEGEKWHRAERTNGKFMRQFRLPVNADLEKVTARLENGVLRITVGKFGEDKKRQPKVIDIAQRDSAAENVKPTKPQM

SEQ ID NO: 8626 - DNA, 456 bp, Hordeum vulgare
  CDS (1)..(456)
atgtcgatcgtgaggcggagcaacgtgttcgaccccttcgccgacctctgggcggaccccttcgacaccttccgctccatcgtcccggcgatctcaggcggcaacagcgagacagctgcgttcgccaacgcccggatggactggaaggagacgcccgaggcgcacgtcttcaaggctgatcttcctggcgtgaagaaggaggaggtcaaggtggaggtggaggacggcaacgtgctcgtcgtcagcggcgagcgcactaaggagaaggaggacaagaacgacaagtggcaccgtgtggagcgcagcagcggcaagtttgtgaggcgcttccgcctgccggaggacgccaaggtggaggaggtgaaggccgggctggagaacggtgtgctcaccgtcaccgtgcccaaggccgaggtcaagaagcccgaggtgaaggccatcgagatctccggctga

SEQ ID NO: 8627 - protein, 151 aa, Hordeum vulgare
MSIVRRSNVFDPFADLWADPFDTFRSIVPAISGGNSETAAFANARMDWKETPEAHVFKADLPGVKKEEVKVEVEDGNVLVVSGERTKEKEDKNDKWHRVERSSGKFVRRFRLPEDAKVEEVKAGLENGVLTVTVPKAEVKKPEVKAIEISG

SEQ ID NO: 8628 - DNA, 477 bp, Hordeum vulgare
  CDS (1)..(477)
atgtcgctgatccgccgcagcaacgtgttcgaccccttctccctcgacttcttcgaccccttcgacggcttccccttcggctccggcagcagcaacagcggcggcacccccgtcccgcgcacctcctctgacacggcggccttcgcgggggcgcgcatcgactggaaggagacgcccgaggcgcacgtgttcaaggcggacgtgccggggctgaagaaggaggaggtgaaggtggaggtggaggacggcaacatcctccagatcagcggcgagaggaacaaggagcaggaggagaagacggacacctggcacagggtggagcgcagcagcggcaagttcctgcgcaggttcaggctcccggagaacgccaaggcggagcaggtgaaggcgtccatggagaacggcgtgctcaccgtcaccgtgcccaaagaggaggccaagaagcccgaggtcaagtccatccagatctccggctag

SEQ ID NO: 8629 - protein, 158 aa, Hordeum vulgare
MSLIRRSNVFDPFSLDFFDPFDGFPFGSGSSNSGGTPVPRTSSDTAAFAGARIDWKETPEAHVFKADVPGLKKEEVKVEVEDGNILQISGERNKEQEEKTDTWHRVERSSGKFLRRFRLPENAKAEQVKASMENGVLTVTVPKEEAKKPEVKSIQISG

SEQ ID NO: 8630 - DNA, 501 bp, Oryza sativa
  CDS (1)..(501)
atggagagcgccatgttcgggctggagacgccgctgatgacggcgctgcagcacctgctcgacatccccgacggcgagggcggcgccgccgggaagcagggcgcgaccggtggcccgacgcgtgcgtacgtgcgcgacgcccgcgccatggcggcgacccccgccgacgtgaaggatctgcccggggcgtacgcgttcgtggtggacatgcctgggctcaagtcctccgacatcaaggtgcaggtggaggaggagaggctgctggtgatcagcggggagcggcggcgcggcggcggggaggaggagaaggaggagtcgtgcaagtacctgcggatggagcggcggatgggcaagttcatgcgcaagttcgtgctccccgacaacgccgacgtcgacaagatctccgccgtgtgccaggacggcgtgctcaccgtcaccgtcgagaagctcccgccgccggagcccaagaagcccaagaccatcgaggtcaaggtcgcgtga

SEQ ID NO: 8631 - protein, 166 aa, Oryza sativa
MESAMFGLETPLMTALQHLLDIPDGEGGAAGKQGATGGPTRAYVRDARAMAATPADVKDLPGAYAFVVDMPGLKSSDIKVQVEEERLLVISGERRRGGGEEEKEESCKYLRMERRMGKFMRKFVLPDNADVDKISAVCQDGVLTVTVEKLPPPEPKKPKTIEVKVA

SEQ ID NO: 8632 - DNA, 504 bp, Zea mays
  CDS (1)..(504)
atgtctctggtaaggctcctggacacgctggccctggactcgtgggtgcggaaccccttcaccatcttcggcacggcggtggccgccgacgcgtggctggccagcgacacgtcggcgttcgccaacacgcacatcgagagccgggacacggcggccgcctacgtgttcagcgccgcgctcccgccgggcgtcaagaaggaggaggtgacggtggagctggacgagggcaacgtgctggtcatcgccggcgagcgcagcgtgtgccgccaggagcgcagcgacgacgggtgccaccacatcgagcgcagccgcgccaccttcctcgccaggttccacctgcccgaggacgccgccgtcgacggcgtcagggccgccttggacgccggcaggctcaccgtcaccgtgcccaaggtcggggccgccgccgccgccatcgtgcccgagaagcccgccgccgacgcgccggcgctggcgcccgtgcccgtcgaggccggcccctgctga

SEQ ID NO: 8633 - protein, 167 aa, Zea mays
MSLVRLLDTLALDSWVRNPFTIFGTAVAADAWLASDTSAFANTHIESRDTAAAYVFSAALPPGVKKEEVTVELDEGNVLVIAGERSVCRQERSDDGCHHIERSRATFLARFHLPEDAAVDGVRAALDAGRLTVTVPKVGAAAAAIVPEKPAADAPALAPVPVEAGPC

SEQ ID NO: 8634 - DNA, 465 bp, Zea mays
  CDS (1)..(465)
atgtcgccggcgcgcagcagcagcagcaacgtcttcgacccgctgtcgctggacttctgggcgtcgttcgccgacccgttcggcgtcgtccggccgctggcggagcagtgccccgtcctcaccaacgtgcgcgtcgactggaaggagacccccgaggcgcacgtgttcagggccgaccttccgggcgtcaggaaggaggctgccaaggtcgaggtggaggacggcaacgtgctcgtcatcagcggcgagcgcgccagggaggaggaggaggccggcaaggacgaggcgtggcgctggcgcctcgccgagcgcagcagcggcaggttcaagaggcggttccgcctgccgcgcggcgccaggctggaccaggttcacgcgtccatggagaacggcgtgctcaccgtcaccgtgcccaaggaggaggccaagaagccgcaggtcagggctgtcgagatctctggttga

SEQ ID NO: 8635 - protein, 154 aa, Zea mays
MSPARSSSSNVFDPLSLDFWASFADPFGVVRPLAEQCPVLTNVRVDWKETPEAHVFRADLPGVRKEAAKVEVEDGNVLVISGERAREEEEAGKDEAWRWRLAERSSGRFKRRFRLPRGARLDQVHASMENGVLTVTVPKEEAKKPQVRAVEISG

SEQ ID NO: 8636 - DNA, 474 bp, Triticum aestivum
  CDS (1)..(474)
atgtcgctgatccgccgcagcaacgtgttcgaccccttctccctcgacttcttcgaccccttcgacggcttccccttcggctccggcagcaacagcagcggcagcctcatcccgcgcacctcctccgacacggcggccttcgcgggcgcgcgcatcgactggaaggagacgcccgaggcgcacgtgttcaaggcggacgtgccggggctgaagaaggaggaggtgaaggtggaggtggaggacggcaacatcctccagatcagcggcgagcggaacaaggagcaggaggagaagaccgacacctggcaccgcgtggagcgcagcagcggcaagttcctccgcaggttccggctgccggagaacgccaaggcggagcaggtgaaggcgtccatggagaacggcgtgctcaccgtcaccgtgcccaaggaggaggccaagaagcccgaggtcaagtccatccagatctccggctag

SEQ ID NO: 8637 - protein, 157 aa, Triticum aestivum
MSLIRRSNVFDPFSLDFFDPFDGFPFGSGSNSSGSLIPRTSSDTAAFAGARIDWKETPEAHVFKADVPGLKKEEVKVEVEDGNILQISGERNKEQEEKTDTWHRVERSSGKFLRRFRLPENAKAEQVKASMENGVLTVTVPKEEAKKPEVKSIQISG

SEQ ID NO: 8638 - DNA, 477 bp, Triticum aestivum
  CDS (1)..(477)
atgtcgctgatccgccgcagcaacgtgttcgaccccttctccctcgacttcttcgacccttttgacggcttccccttcggctccggcagcagcaacagcggcggcagcctcgtcccgcgcacctcctccgacacggcggccttcgcgggcgcgcgcatcgactggaaggagacgcccgaggcgcacgtgttcaaggcggacgtccccgggctgaagaaggaggaggtgaaggtggaggtggaggacggcaacatcctccagatcagcggcgagcggaacaaggagcaggaggagaagaccgacacctggcacagggtggagcgcagcagcggcaagttcctccgcaggttccggctcccggagaacgccaaggcggagcaggtgaaggcgtcgatggagaacggcgtgctcaccgtcaccgtgcccaaggaggaggccaagaagcccgacgtcaagtccatccagatctccggctag

SEQ ID NO: 8639 - protein, 158 aa, Triticum aestivum
MSLIRRSNVFDPFSLDFFDPFDGFPFGSGSSNSGGSLVPRTSSDTAAFAGARIDWKETPEAHVFKADVPGLKKEEVKVEVEDGNILQISGERNKEQEEKTDTWHRVERSSGKFLRRFRLPENAKAEQVKASMENGVLTVTVPKEEAKKPDVKSIQISG

SEQ ID NO: 8640 - DNA, 456 bp, Triticum aestivum
  CDS (1)..(456)
atgtcgatcgtgcggcggagcaacgtgttcgaccccttcgccgacctctgggcggaccccttcgacaccttccgctccatcgtcccggcgatctctggcggcagcagcgagacggccgcgttcgccaacgcccggatggactggaaggagacccccgaggcgcacgtcttcaaggccgacctccccggcgtgaagaaggaggaggtcaaggtggaggtggaggacggcaacgtgctcgtcgtcagcggcgagcgcacaaaggagaaggaggacaagaacgacaagtggcaccgcgtggagcgcagcagcggcaagtttgtcaggcggttccggctgccggaggacgccaaggtggaggaggtgaaggccgggctggagaacggcgtgctcaccgtcaccgtgcccaaggccgaggtcaagaagcccgaggtcaaggccatcgagatatccggctga

SEQ ID NO: 8641 - protein, 151 aa, Triticum aestivum
MSIVRRSNVFDPFADLWADPFDTFRSIVPAISGGSSETAAFANARMDWKETPEAHVFKADLPGVKKEEVKVEVEDGNVLVVSGERTKEKEDKNDKWHRVERSSGKFVRRFRLPEDAKVEEVKAGLENGVLTVTVPKAEVKKPEVKAIEISG

SEQ ID NO: 8642 - DNA, 456 bp, Triticum aestivum
  CDS (1)..(456)
atgtcgatcgtgaggcggagcaacgtgttcgaccccttcgccgacctctgggcggaccccttcgacaccttccgctccatcgtcccggcgatctcaggcggcaacagcgagacggccgcgttcgccaacgctcgcgtggactggaaggagactcccgaggcgcacgtcttcaaggccgaccttccaggagtgaagaaggaggaggtcaaggtggaggtggaggacggcaacgtgctcgtcgtcagtggcgagcgcacaaaggagaaggaggacaagaacgacaagtggcaccgcatggagcgcagcagcggcaagttcgtgcggcgcttccgcctccccgaggacgccaaggtggaggaggtgaaggccgggctggagaacggcgtgctcaccgtcaccgtgcccaaggccgaggtcaagaagcccgaggtgaaggccatcgagatctccggttga

SEQ ID NO: 8643 - protein, 151 aa, Triticum aestivum
MSIVRRSNVFDPFADLWADPFDTFRSIVPAISGGNSETAAFANARVDWKETPEAHVFKADLPGVKKEEVKVEVEDGNVLVVSGERTKEKEDKNDKWHRMERSSGKFVRRFRLPEDAKVEEVKAGLENGVLTVTVPKAEVKKPEVKAIEISG

SEQ ID NO: 8644 - DNA, 456 bp, Triticum aestivum
  CDS (1)..(456)
atgtcgatcgtgcggcggagcaacgtcttcgaccccttcgccgacctctgggcggaccccttcgacaccttccgctccatcgtcccggcgatctcaggtggcagcagcgagacggccgcgttcgccaatgctcgcatggactggaaggagacccccgaggcgcacgtcttcaaggccgaccttccaggcgtgaagaaggaggaggtcaaggtggaggtggaggacggcaacgtgctcgtcgtcagcggcgagcgcaccaaggaaaaggaggacaagaacgacaagtggcaccgcgtggagcgcagcagcggcaagttcgtcaggcggttccggctgccggaggacgccaaggtggaggaggtgaaggccgggctggagaacggtgtgctcaccgtcaccgtgcccaaggccgaggtcaagaagcccgaggtgaaggccatccagatctccggctga

SEQ ID NO: 8645 - protein, 151 aa, Triticum aestivum
MSIVRRSNVFDPFADLWADPFDTFRSIVPAISGGSSETAAFANARMDWKETPEAHVFKADLPGVKKEEVKVEVEDGNVLVVSGERTKEKEDKNDKWHRVERSSGKFVRRFRLPEDAKVEEVKAGLENGVLTVTVPKAEVKKPEVKAIQISG

SEQ ID NO: 8646 - DNA, 459 bp, Triticum aestivum
  CDS (1)..(459)
atgtcgatcgtgcggcggagcaacgtgttcgaccccttcgccgacctctgggcggaccccttcgacgccttccgctccatcgtcccggcgatctcaggcggcagcagcagcgagacggccgcgttcgccagtgctcgcgtggactggaaggagacccccgaggcgcacgtcttcaaggccgacctccccggcgtgaagaaggaggaggtcaaggtggaggtggaggacggcaacgtgctcgtcgtcagcggcgagcggagcagggagaaggaggacaagaacgacaagtggcaccgcgtggagcgcagcagcggcaagttcgcgaggcgcttccggctgccggaggacgccaaggtggaggaggtgaaggccgggctggagaacggcgtgctcaccgtcaccgtgccaaaggcccacgtcaagaagcccgaggtgaaggccatcgagatatccggctga

SEQ ID NO: 8647 - protein, 152 aa, Triticum aestivum
MSIVRRSNVFDPFADLWADPFDAFRSIVPAISGGSSSETAAFASARVDWKETPEAHVFKADLPGVKKEEVKVEVEDGNVLVVSGERSREKEDKNDKWHRVERSSGKFARRFRLPEDAKVEEVKAGLENGVLTVTVPKAHVKKPEVKAIEISG

SEQ ID NO: 8648 - DNA, 468 bp, Triticum aestivum
  CDS (1)..(468)
atgtcgctgatccgtcgcagcaacgtgttcgaccccttctccctcgacctctgggaccccttcgacggcttccccttcggctccgacggcagcggcagcctcgtcccgcgcacctcctctgacacggtggccttcgccggcgcgcggatcgactggaaggagacgcccgtggcgcacgtgttcaaggcggacgtgccagggctgaagaaggaggaggtgaaggtggaggtggaggacggcaacatcctccagatcagcggcgagcggaacaaggagcaggaggagaagaccgacacgtggcaccgcgtggagcgcagcagcggcaagttcctgcgcaggttcaggctcccggagaacgccaaggcggagcaggtgaaggcgtccatggagaacggcgtgctcaccgtcaccgtgcccaaggaggaggccaagaagcccgaggtcaagtccatccagatctccagctag

SEQ ID NO: 8649 - protein, 155 aa, Triticum aestivum
MSLIRRSNVFDPFSLDLWDPFDGFPFGSDGSGSLVPRTSSDTVAFAGARIDWKETPVAHVFKADVPGLKKEEVKVEVEDGNILQISGERNKEQEEKTDTWHRVERSSGKFLRRFRLPENAKAEQVKASMENGVLTVTVPKEEAKKPEVKSIQISS

SEQ ID NO: 8650 - DNA, 474 bp, Triticum aestivum
  CDS (1)..(474)
atgtcgctgatccgccgcagcaacgtgtttgaccccttctccctcgacttcttcgacccattcgaaggcttccccttcggctccggcaacagcggcagcggcagcctcgtcccgcgcacctcctcggacacggcggccttcgcgggcgcgcgcatcgactggaaggagacgcccgaggcgcacgtgttcaaggcggacgtgccggggctgaagaaggaggaggtgaaggtggaggtggaggacggcaacatcctccagatcagcggcgagcggaacaaggagcaggaggagaagactgacacctggcaccgcgtggagcgcagcagtggtaagttcctgcgcaggttccggctcccggagaacgccaaggcggagcaggtgaaggcgtccatggagaacggcgtgctcaccgtcaccgtgcccaaggtggaggccaagaagcccgaggtcaagtccatccatatctccggctag

SEQ ID NO: 8651 - protein, 157 aa, Triticum aestivum
MSLIRRSNVFDPFSLDFFDPFEGFPFGSGNSGSGSLVPRTSSDTAAFAGARIDWKETPEAHVFKADVPGLKKEEVKVEVEDGNILQISGERNKEQEEKTDTWHRVERSSGKFLRRFRLPENAKAEQVKASMENGVLTVTVPKVEAKKPEVKSIHISG

SEQ ID NO: 8652 - DNA, 462 bp, Glycine max
  CDS (1)..(462)
atgtctttgattccaagtttctttggtggcagaaggagcaatgttttggatcctttctccctcgatgtgtgggacccttttaaggattttccttttcccacttctctttctgctgaaaattcagcgtttgtgagcacacgagtggattggaaggagacaccagaagcacacgtgttcaaggctgatattccagggctgaagaaggaggaagtgaagctggagattcaagatgacagaattcttcagataagtggagagaggaacgttgagaaggaagacaagaacgacacgtggcaccgcgtggagcgaagcagtggtaagttcatgaggagtttcagattgccagagaatgctaaagtggatcaagttaaggcttccatggaaaatggggttctcactgtaactgttccaaaggaagagattaagaagcctgatgttaaggccatagaaatttctggttaa

SEQ ID NO: 8653 - protein, 153 aa, Glycine max
MSLIPSFFGGRRSNVLDPFSLDVWDPFKDFPFPTSLSAENSAFVSTRVDWKETPEAHVFKADIPGLKKEEVKLEIQDDRILQISGERNVEKEDKNDTWHRVERSSGKFMRSFRLPENAKVDQVKASMENGVLTVTVPKEEIKKPDVKAIEISG

SEQ ID NO: 8654 - DNA, 483 bp, Zea mays
  CDS (1)..(483)
atggacgcgaggatgttcgggctggagaaccccctggtggcggcgctgcatcacctgctggacgtgcccgatggcgacgccggagcgggcggcgacaaggcgggcggcggcgccacgcgcacctacgtccgcgacgcgcgcgccatggcggccaccccggccgacgtcaaggagctcgcgggagcgtacgcgttcgtggtggacatgccggggctgagcacgggcgacatcagggtgcaggtggaggacgagcgggtgctggtgatcagcggcgagcggcgccgggaggagcgcgaggacgccaagtacctgcgcatggagcggcggatgggcaagttcatgcgcaagttcgtgctgccggacaacgccgacgtggacaaggtcgccgccgtgtgcagggacggcgtgctcacggtgaccgtcgagaagctgcccccgccggagcccaagaagcccaagaccatcgagattaaggtcgcctga

SEQ ID NO: 8655 - protein, 160 aa, Zea mays
MDARMFGLENPLVAALHHLLDVPDGDAGAGGDKAGGGATRTYVRDARAMAATPADVKELAGAYAFVVDMPGLSTGDIRVQVEDERVLVISGERRREEREDAKYLRMERRMGKFMRKFVLPDNADVDKVAAVCRDGVLTVTVEKLPPPEPKKPKTIEIKVA

SEQ ID NO: 8656 - DNA, 501 bp, Zea mays
  CDS (1)..(501)
atgtctctggtaaggctcctggacacgctggccctggactcgtgggtgcggaaccccttcaccatcttcggcacggcggtggccgccgacgcgtggctggccagcgacacgtcggcgttcgccaacacgcacatcgagagccgggacacggcggccgcctacgtgttcagcgccgcgctcccgccgggcgtcaagaaggaggaggtcacggtggagctggacgagggcaacgtgctggtcatcgccggcgagcgcagcgtgtgccgccaggagcgcagcgacggctgccaccacatcgagcgcagccgcgccaccttcctcgccaggttccacctgcccgaggacgccgccgtcgacggcgtcagggccgccttggacgccggcaggctcaccgtcaccgtgcccaaggtcggggccgccgccgccgccatcgtgcccgagaagcccgccgccgacgcgccggcgctggcgcccgtgcccgtcgaggccggcccctgctga

SEQ ID NO: 8657 - protein, 166 aa, Zea mays
MSLVRLLDTLALDSWVRNPFTIFGTAVAADAWLASDTSAFANTHIESRDTAAAYVFSAALPPGVKKEEVTVELDEGNVLVIAGERSVCRQERSDGCHHIERSRATFLARFHLPEDAAVDGVRAALDAGRLTVTVPKVGAAAAAIVPEKPAADAPALAPVPVEAGPC

SEQ ID NO: 8658 - DNA, 465 bp, Zea mays
  CDS (1)..(465)
atgtcgctggtgaggcgcagcagcgtgttcgacccattctccgtggacctcttcgaccccttcgacagcatgttccgctccatcgtgccgtcgtcgtcgtcggcggcggcggcctccgagaccgccgccttcgccagcgcccgcatcgactggaaggagacgcccgaggcgcacgtgttcaaggccgacctccccggcgtgaagaaggaggaggtgaaggtggaggtggaggacggcaacgtgctgctcatcagcgggcagcgcagcagggagaaggaggacaagggcgacaagtggcaccgcgtggagcgcagcagcggccagttcgtgcggcgcttccgcctccccgagaacgccaagaccgaggaggtgagggccgcgctggagaacggcgtgctcacggtcaccgtgcccaaggccgaggtcaagaagcctgaggttaagagcatccagatctccggctga

SEQ ID NO: 8659 - protein, 154 aa, Zea mays
MSLVRRSSVFDPFSVDLFDPFDSMFRSIVPSSSSAAAASETAAFASARIDWKETPEAHVFKADLPGVKKEEVKVEVEDGNVLLISGQRSREKEDKGDKWHRVERSSGQFVRRFRLPENAKTEEVRAALENGVLTVTVPKAEVKKPEVKSIQISG

SEQ ID NO: 8660 - DNA, 483 bp, Zea mays
  CDS (1)..(483)
atgtcgctcgtgagtcgccgcagcagcaacgtgttcgacttcgaccccttctccctcgacctctggtgggaccccttcgacatgttccgctccatcgtcccgtcggcggcctcctccggcggcggttccgagaccgccgccttcgccaacgcccgcgtcgactggaaggagacgcccgaggcgcacgtgttcaaggccgacctccccggcgtcaagaaggaggaggtcaaggtcgaggtgaaggacggcaacgtgctcgtcatcagcggcaagcgcagcagggaggaggaggacaagaacaagaacgacaagtggcaccgcgtcgagcgcagcagcggccagttcatgaggcgcttccgcctgcctgagaacgccaagctggacgaggtgaaggctggcctcgagaacggcgtgctcacggtcaccgtgcccaagacggaggtgaagaagcccgaggtgaaggctatcgagatctctggttga

SEQ ID NO: 8661 - protein, 160 aa, Zea mays
MSLVSRRSSNVFDFDPFSLDLWWDPFDMFRSIVPSAASSGGGSETAAFANARVDWKETPEAHVFKADLPGVKKEEVKVEVKDGNVLVISGKRSREEEDKNKNDKWHRVERSSGQFMRRFRLPENAKLDEVKAGLENGVLTVTVPKTEVKKPEVKAIEISG

SEQ ID NO: 8662 - DNA, 483 bp, Zea mays
  CDS (1)..(483)
atgtcgctcgtgagtcgccgcagcagcaacgtgttggacttggaccccttctccctcgacctctggtgggaccccttcgacatgttccgctccatcgtcccgtcggcggcctcctccggcggcggttccgagaccgccgccttcgccaacgcccgcgtcgactggaaggagacgcccgaggcgcacgtgttcaaggccgacctccccggcgtcaagaaggaggaggtcaaggtcgaggtgaaggacggcaacgtgctcgtcatcagcggcaagcgcagcagggaggaggaggaggaggacaagaacggcaagtggcaccgcgtcgagcgcagcagcggccagttcatgaggcgcttccgcctgcctgagaacgccaagctggacgaggtgaaggctggcctcgagaacggcgtgctcacggtcaccgtgcccaagacggaggtgaagaagcccgaggtgaaggctatcgagatctctgtttga

SEQ ID NO: 8663 - protein, 160 aa, Zea mays
MSLVSRRSSNVLDLDPFSLDLWWDPFDMFRSIVPSAASSGGGSETAAFANARVDWKETPEAHVFKADLPGVKKEEVKVEVKDGNVLVISGKRSREEEEEDKNGKWHRVERSSGQFMRRFRLPENAKLDEVKAGLENGVLTVTVPKTEVKKPEVKAIEISV

SEQ ID NO: 8664 - DNA, 654 bp, Zea mays
  CDS (1)..(654)
atgtcgaggagagccgcagcagcgctcgcgctcgcgtgcctcgccgtgatggcggcggcactggcggacggcgcgctgctcccgtggttcggcgaagggaggcgcgggggcgacgaggccgcggcggcggcggcgtctccgctgtccgggcccggggtgggcctcctggccgacccgttccggatcctggagcacgtccccttgggcttcgaccgggacgacgtggccatggtctccatggcgcgcgcggactggcgcgagactcccgacgcgcacgagatcgtggtggacgtgcccgggatgcgcagggaggacctcaagatcgaggtggaggactacagccgggtgctgcgagtcagcggcgagcggcggcgcgcggaggagcacaggggcgaccactggcaccgcgaggagcgctcccacggcaggttctggcgccagttccgcctccccgagaacgccgacctcgactccgtcggcgccagcctcgacaacggcgtcctcaccgtgcggttccggaagctggcccccgagcaggtcaagggcccgcgcgtcgttgggattgccgggggagacggtgacggcgacgcgaagaagagtattggcggcggcgccggggatggtcatcatcagaccaagaaggtggagctctga

SEQ ID NO: 8665 - protein, 217 aa, Zea mays
MSRRAAAALALACLAVMAAALADGALLPWFGEGRRGGDEAAAAAASPLSGPGVGLLADPFRILEHVPLGFDRDDVAMVSMARADWRETPDAHEIVVDVPGMRREDLKIEVEDYSRVLRVSGERRRAEEHRGDHWHREERSHGRFWRQFRLPENADLDSVGASLDNGVLTVRFRKLAPEQVKGPRVVGIAGGDGDGDAKKSIGGGAGDGHHQTKKVEL

SEQ ID NO: 8666 - DNA, 21 bp, Artificial sequence
  primer
atgtcgcttattccaagcttc

SEQ ID NO: 8667 - DNA, 20 bp, Artificial sequence
  primer
ttagccagagatatcaatag

SEQ ID NO: 8668 - protein, 231 aa, Artificial sequence
  consensus sequence
  Variant (2)..(7): Xaa in position 2 to 7 is any amino acid
  Variant (8)..(26): Xaa in position 8 to 26 is any or no amino acid
  Variant (28)..(28): Xaa in position 28 is any amino acid
  Variant (29)..(36): Xaa in position 29 to 36 is any or no amino acid
  Variant (39)..(39): Xaa in position 39 is any amino acid
  Variant (40)..(47): Xaa in position 40 to 47 is any or no amino acid
  Variant (51)..(57): Xaa in position 51 to 57 is any amino acid
  Variant (58)..(81): Xaa in position 58 to 81 is any or no amino acid
  Variant (83)..(85): Xaa in position 83 to 85 is any amino acid
  Variant (86)..(88): Xaa in position 86 to 88 is any or no amino acid
  Variant (92)..(92): Xaa in position 92 is any amino acid
  Variant (93)..(93): Xaa in position 93 is any or no amino acid
  Variant (100)..(100): Xaa in position 100 is any amino acid
  Variant (105)..(105): Xaa in position 105 is any amino acid
  Variant (107)..(107): Xaa in position 107 is any amino acid
  Variant (109)..(109): Xaa in position 109 is any amino acid
  Variant (118)..(118): Xaa in position 118 is any amino acid
  Variant (120)..(122): Xaa in position 120 to 122 is any amino acid
  Variant (123)..(124): Xaa in position 123 to 124 is any or no amino acid
  Variant (126)..(126): Xaa in position 126 is any amino acid
  Variant (132)..(132): Xaa in position 132 is any amino acid
  Variant (133)..(133): Xaa in position 133 is any or no amino acid
  Variant (135)..(135): Xaa in position 135 is any amino acid
  Variant (137)..(137): Xaa in position 137 is any amino acid
  Variant (138)..(144): Xaa in position 138 to 144 is any or no amino acid
  Variant (146)..(146): Xaa in position 146 is any amino acid
  Variant (148)..(148): Xaa in position 148 is any amino acid
  Variant (149)..(149): Xaa in position 149 is any or no amino acid
  Variant (153)..(153): Xaa in position 153 is any amino acid
  Variant (157)..(157): Xaa in position 157 is any amino acid
  Variant (159)..(159): Xaa in position 159 is any amino acid
  Variant (160)..(161): Xaa in position 160 to 161 is any or no amino acid
  Variant (163)..(163): Xaa in position 163 is any amino acid
  Variant (171)..(172): Xaa in position 171 to 172 is any amino acid
  Variant (174)..(177): Xaa in position 174 to 177 is any amino acid
  Variant (178)..(178): Xaa in position 178 is any or no amino acid
  Variant (181)..(182): Xaa in position 181 to 182 is any amino acid
  Variant (188)..(189): Xaa in position 188 to 189 is any amino acid
  Variant (196)..(198): Xaa in position 196 to 198 is any amino acid
  Variant (199)..(209): Xaa in position 199 to 209 is any or no amino acid
  Variant (212)..(212): Xaa in position 212 is any amino acid
  Variant (215)..(215): Xaa in position 215 is any amino acid
  Variant (216)..(226): Xaa in position 216 to 226 is any or no amino acid
  Variant (228)..(228): Xaa in position 228 is any amino acid
MXXXXXXXXXXXXXXXXXXXXXXXXXDXXXXXXXXXPFXXXXXXXXXDPFXXXXXXXXXXXXXXXXXXXXXXXXXXXXXXXAXXXXXXDWKXXETPEAHXFKADXPXGXKKEEVKVEXEXXXXXLXISGERXXEXEXXXXXXXXKXDXXWHRXERSXGXXXFXRRFRLPEXXKXXXXXKAXXENGVLXXTVTVPKXXXXXXXXXXXXXXKPXVKXXXXXXXXXXXXIXISG

SEQ ID NO: 8669 - protein, 20 aa, Artificial sequence
  protein pattern
  Variant (2)..(6): Xaa in position 2 to 6 is any amino acid
  Variant (8)..(8): Xaa in position 8 is any amino acid
  Variant (9)..(9): Xaa in position 9 is Ile, Leu, Met or Val
  Variant (11)..(11): Xaa in position 11 is Asp or Asn
  Variant (15)..(15): Xaa in position 15 is any amino acid
  Variant (16)..(16): Xaa in position 16 is Ile or Val
  Variant (17)..(18): Xaa in position 17 to 18 is any amino acid
KXXXXXAXXEXGVLXXXXPK

SEQ ID NO: 8670 - protein, 13 aa, Artificial sequence
  protein pattern
  Variant (3)..(3): Xaa in position 3 is Ala, Asn, Pro or Ser
  Variant (4)..(4): Xaa in position 4 is any amino acid
  Variant (7)..(7): Xaa in position 7 is any amino acid
  Variant (9)..(9): Xaa in position 9 is any amino acid
  Variant (10)..(10): Xaa in position 10 is Ala, Pro, Thr or Val
  Variant (12)..(12): Xaa in position 12 is Ile, Leu, Met or Val
ETXXAHXFXXDXP

SEQ ID NO: 8671 - protein, 16 aa, Artificial sequence
  protein pattern
  Variant (2)..(2): Xaa in position 2 is His or Tyr
  Variant (4)..(4): Xaa in position 4 is any amino acid
  Variant (8)..(8): Xaa in position 8 is any amino acid
  Variant (10)..(10): Xaa in position 10 is any amino acid
  Variant (12)..(12): Xaa in position 12 is any amino acid
  Variant (13)..(13): Xaa in position 13 is any or no amino acid
  Variant (15)..(15): Xaa in position 15 is any or no amino acid
WXRXERSXGXFXXRXF

SEQ ID NO: 8672 - protein, 11 aa, Artificial sequence
  protein pattern
  Variant (2)..(2): Xaa in position 2 is Ile, Leu, Met or Val
  Variant (3)..(3): Xaa in position 3 is any amino acid
  Variant (9)..(10): Xaa in position 9 to 10 is any amino acid
  Variant (11)..(11): Xaa in position 11 is Ile, Leu or Val
GXXKEEVKXXX

SEQ ID NO: 8673 - DNA, 702 bp, Arabidopsis thaliana
  CDS (1)..(699)
atggctctagctcgtctggctttgagaaaccttcaacaaaaactgtctcctagtttgatgggtcaatcttgtgaaagaggtttggtcggaaatcgacataatccaatgaagctaaacagattcatggctacttcggctggtgaacaagaggataagatgaacacagaagtgagtgtgtctgagaagaaatctcctcgacagaatttcccccggagacgtggccgaaaaagcctctggcgtaacaccgacgatcatggctacttcactcccaccctaaatgagttctttcctccgactataggaaatactctgatacaagcaacagagaatatgaacagaattttcgacaacttcaacgtgaatccattccaactaatgggtcaagtgaaagagcaagacgactgttacaagctcagatacgaggttccagggctaaccaaagaagacgtgaagatcacggtaaatgatggaatcttgacgattaaaggagatcacaaggcggaggaagagaaaggctcacctgaggaagacgagtactggtcttcaaagagttatggttactacaacacgagcttatcgttgcctgatgatgctaaggttgaggacattaaggcggagctcaagaatggtgtgcttaatcttgtgattcctaggacggagaagccaaagaagaatgttcaggagatttctgttgagtagtaa

SEQ ID NO: 8674 - protein, 232 aa, Arabidopsis thaliana
MALARLALRNLQQKLSPSLMGQSCERGLVGNRHNPMKLNRFMATSAGEQEDKMNTEVSVSEKKSPRQNFPRRRGRKSLWRNTDDHGYFTPTLNEFFPPTIGNTLIQATENMNRIFDNFNVNPFQLMGQVKEQDDCYKLRYEVPGLTKEDVKITVNDGILTIKGDHKAEEEKGSPEEDEYWSSKSYGYYNTSLSLPDDAKVEDIKAELKNGVLNLVIPRTEKPKKNVQEISVE

SEQ ID NO: 8675 - DNA, 660 bp, Oryza sativa
  CDS (1)..(660)
atggctttagctcgccaatgcctcagcaaacgcctcgccgccggctgcgctctggcgaggccactgcacgcggcgtcgccggtggcggcggcggctgccaattctcatgggccgctcaactttcgtgccctcttctcgtcggcgggagccgacgccgccgccaccaccggcggctgcgctcctgcgaaaggcgacggtcacagccgtgaggtcgccgtcgtggaccgctcgcgccgccgctggccgtggcgagacctccgcgacttcgtcccgctccgcctcgtcgacggcatcgggagcgcgctgtcgcaggtggcggagacgctgacccggccgctgacggggaaggtgcgggaggacgaggagcggtacaggctgcggttcgaggtgccgggcctcgggaaggacgacgtccgcgtctacgtggacgacggcgtgctcgccatccacggcgagaagcgcgacgtggtggaggaggaccgcggccgcgacggcgacggcgagtgctgggcggcggcgacgtaccacgccggcctgctcctcccggaggacgcggtggcggaggggatcacggcggaggtgagggacggcgtgctgcacgtcaccgtgccccgctcgccggagaggaagaggagcgtcaccgaggtcaaggtgcggtag

SEQ ID NO: 8676 - protein, 219 aa, Oryza sativa
MALARQCLSKRLAAGCALARPLHAASPVAAAAANSHGPLNFRALFSSAGADAAATTGGCAPAKGDGHSREVAVVDRSRRRWPWRDLRDFVPLRLVDGIGSALSQVAETLTRPLTGKVREDEERYRLRFEVPGLGKDDVRVYVDDGVLAIHGEKRDVVEEDRGRDGDGECWAAATYHAGLLLPEDAVAEGITAEVRDGVLHVTVPRSPERKRSVTEVKVR

SEQ ID NO: 8677 - DNA, 723 bp, Oryza sativa
  CDS (1)..(723)
atggctgctccattcgctctcgtcagccgtgtctcgccagcggcgcgcctccccatccgcgccgcctggaggagggcgaggccgacggtcgggctcccgtcctcggggagggcccgccagctcgccgtggcctccgcggcgcaggagaacagggacaacaccgccgtcgatgtccacgtcaaccaggacggcgggaaccagcaggggaacgccgtgcagcgccgcccgcgccgctcgtcggcgttggacggcatctccccgttcggcctcgtggacccgatgtcgccgatgcggacgatgcggcagatgctggacacgatggaccggattttcgacgacgtcgcgctggggttccccgccacgccgcggaggtcgctggcgacgggggaggtgcggatgccgtgggacgtcatggaggacgacaaggaggtgaggatgcggttcgacatgccgggcctgtcgcgggaggaggtgaaggtgatggtggaggacgacgcgctcgtcatccgcggggagcacaagaaggaggagggcgagggcgcggagggctccggcgacgggtggtggaaggagcgcagcgtgagctcctacgacatgcggctcgcgctccccgacgagtgcgacaagagcaaggtccgcgccgagctcaagaacggcgtgctgctcgtcaccgtgcccaagacggaggtggagcgcaaggtcatcgacgtgcaggtccagtag

SEQ ID NO: 8678 - protein, 240 aa, Oryza sativa
MAAPFALVSRVSPAARLPIRAAWRRARPTVGLPSSGRARQLAVASAAQENRDNTAVDVHVNQDGGNQQGNAVQRRPRRSSALDGISPFGLVDPMSPMRTMRQMLDTMDRIFDDVALGFPATPRRSLATGEVRMPWDVMEDDKEVRMRFDMPGLSREEVKVMVEDDALVIRGEHKKEEGEGAEGSGDGWWKERSVSSYDMRLALPDECDKSKVRAELKNGVLLVTVPKTEVERKVIDVQVQ

SEQ ID NO: 8679 - DNA, 639 bp, Glycine max
  CDS (1)..(639)
atggcgtcctctctcattgcgaagcgcttcctctcctcttccctcctctccaggtccctccttcgccccgccgcttccgcttcccaccgctctttcaacaccaacgccatgcgccagtatgacaaccgcgccgacgaccacagcaccgacatcgatcgtcactccgaacgctctttccctagcactgcgcgccgcgacgatatcttctcaggtaatgtgttggatccattttttccgactcggagtttgagccaggttctgaacatgatggaccaggtcatggacaatccgttcctctccgcgtcgcgcgggatcggagctggcgctggagtgcgtcgcggatgggacgcgagggagacagaggatgctctgcatctgcgcgtggacatgcctgggctcggcaaggaagacgtgaagatctccgtggagcagaacactctcattatcaaaggtgaaggtgctaaagaaggcgatgaagaagagagcgctcgtcgctacactagcaggattgacttgccggacaagctctacaagattgaccagatcagagctgagatgaagaacggtgtgctcaaggtcgttgtgccgaaaatgaaggaggaagagaggaaagacgtgatcagtgttaaggttgagtag

SEQ ID NO: 8680 - protein, 212 aa, Glycine max
MASSLIAKRFLSSSLLSRSLLRPAASASHRSFNTNAMRQYDNRADDHSTDIDRHSERSFPSTARRDDIFSGNVLDPFFPTRSLSQVLNMMDQVMDNPFLSASRGIGAGAGVRRGWDARETEDALHLRVDMPGLGKEDVKISVEQNTLIIKGEGAKEGDEEESARRYTSRIDLPDKLYKIDQIRAEMKNGVLKVVVPKMKEEERKDVISVKVE

SEQ ID NO: 8681 - DNA, 636 bp, Glycine max
  CDS (1)..(636)
atggcgtcctctctcattgcgaagcgcttcctctcctcttccctcctctccaggtccctccttcgccccgccgcttccgcttcccaccgctctttcaacaccaacgccatgcgccagtatgacaaccgcgccgacgaccacagcaccgacatcgatcgtcactccgaacgctctttccctagcactgcgcgccgcgacgatatcttctcagatgtgttggatccattttttccgactcggagtttgagccaggttctgaacatgatggaccaggtcatggacaatccgttcctctccgcgtcgcgcgggatcggagctggcgctggagtgcgtcgcggatgggacgcgagggagacagaggatgctctgcatctgcgcgtggacatgcctgggctcggcaaggaagacgtgaagatctccgtggagcagaacactctcattatcaaaggtgaaggtgctaaagaaggcgatgaagaagagagcgctcgtcgctacactagcaggattgacttgccggacaagctctacaagattgaccagatcagagctgagatgaagaacggtgtgctcaaggtcgttgtgccgaaaatgaaggaggaagagaggaaagacgtgatcagtgttaaggttgagtag

SEQ ID NO: 8682 - protein, 211 aa, Glycine max
MASSLIAKRFLSSSLLSRSLLRPAASASHRSFNTNAMRQYDNRADDHSTDIDRHSERSFPSTARRDDIFSDVLDPFFPTRSLSQVLNMMDQVMDNPFLSASRGIGAGAGVRRGWDARETEDALHLRVDMPGLGKEDVKISVEQNTLIIKGEGAKEGDEEESARRYTSRIDLPDKLYKIDQIRAEMKNGVLKVVVPKMKEEERKDVISVKVE

SEQ ID NO: 8683 - DNA, 678 bp, Glycine max
  CDS (1)..(678)
atggctttggcacgtttggctttgaaaaacttgcaacaaagggtgtgtgcttcctctttcttgagtggcaatgttcacaagcagaggtggaacaatgagttgctgagaaggtttggtactgcagctggggacaagggaaaatctgaaggcactgaagttgctgtcactgaagggaaaaagtctaataggatgttcccaaggaggaggggcagaagatgggcttggagaaatgaggatcatgatgacttccctcctgctctttatgagttgtttccttcagggcttgggagtgcactgatgcaggcaagtaataacatcaacaggctgtttgagaacatgaatctgacaccttggtctctgactagtgggcgtgtgaaagagaaggatgaccattacaaactacggtacgagatgccggggatcgccaaagaggacgtgaagatcaccattgatgatgatggggtgttgacaataaagggagagcacaaggaagagaaagatgatgatgagcaatattggtcatcaagtagctatggatactataacacaagcctgattttgcctgatgatgctaaagctgatgacattaaggcagagttgaaggatggtgtcctaactctaatcattcctaagactcagaacccccaaaaggatgtgaaacaagtcacaatagaatga

SEQ ID NO: 8684 - protein, 225 aa, Glycine max
MALARLALKNLQQRVCASSFLSGNVHKQRWNNELLRRFGTAAGDKGKSEGTEVAVTEGKKSNRMFPRRRGRRWAWRNEDHDDFPPALYELFPSGLGSALMQASNNINRLFENMNLTPWSLTSGRVKEKDDHYKLRYEMPGIAKEDVKITIDDDGVLTIKGEHKEEKDDDEQYWSSSSYGYYNTSLILPDDAKADDIKAELKDGVLTLIIPKTQNPQKDVKQVTIE

SEQ ID NO: 8685 - DNA, 678 bp, Arabidopsis thaliana
  CDS (1)..(678)
atggctctagctcgtctggctttgagaaaccttcaacaaaaactgtctcctagtttgatgggtcaatcttgtgaaagaggtttggtcggaaatcgacataatccaatgaagctaaacagattcatggctacttcggctggtgaacaagaggataagatgaacacagaagtgagtgtgtctgagaagaaatctcctcgacagaatttcccccggagacgtggccgaaaaagcctctggcgtaacaccgacgatcatggctacttcactcccaccctaaatggaaatactctgatacaagcaacagagaatatgaacagaattttcgacaacttcaacgtgaatccattccaactaatgggtcaagtgaaagagcaagacgactgttacaagctcagatacgaggttccagggctaaccaaagaagacgtgaagatcacggtaaatgatggaatcttgacgattaaaggagatcacaaggcggaggaagagaaaggctcacctgaggaagacgagtactggtcttcaaagagttatggttactacaacacgagcttatcgttgcctgatgatgctaaggttgaggacattaaggcggagctcaagaatggtgtgcttaatcttgtgattcctaggacggagaagccaaagaagaatgttcaggagatttctgttgagtag

SEQ ID NO: 8686 - protein, 225 aa, Arabidopsis thaliana
MALARLALRNLQQKLSPSLMGQSCERGLVGNRHNPMKLNRFMATSAGEQEDKMNTEVSVSEKKSPRQNFPRRRGRKSLWRNTDDHGYFTPTLNGNTLIQATENMNRIFDNFNVNPFQLMGQVKEQDDCYKLRYEVPGLTKEDVKITVNDGILTIKGDHKAEEEKGSPEEDEYWSSKSYGYYNTSLSLPDDAKVEDIKAELKNGVLNLVIPRTEKPKKNVQEISVE

SEQ ID NO: 8687 - DNA, 636 bp, Zea mays
  CDS (1)..(636)
atggctttagctcgtctgtgcctcaacagggccatcgctggccgcgcgcaggcgctggcgaggccggcgctcgccgcagccccggcgacagatccgaaacttcactcgcttctctcaacctcggcagccgactctgccgcctcaggcgaggcaaaccgccgagatgtcgccgtgtcggagcgctccgcccccaatcgccgctgggcgtggcgagacctccgcgacttcaccccgttcagcctcgtggacggtctcgggagcgcgctgtcgcaggtggcggagaccctgggccgcccgctggagcgcctggcgccgtcgcggctgctgtccgggaaggtgcgcgaggacgaggcgcggtaccggctgcgtttcgaggtgccgggcctcggcaagggcgacgtgcgcgtggccgtggaggacggggtgctggtcatcgagggcgagaagcgtgagcacggggaggagggcgacggcggcgagtggtggtcgaccagcgggtaccacgccagcctgctgctcccggacgacgcgcgcgccgaggggatcaccgccgaggtgaaggacggcgtgctgtacgtcaccgtgccgcgcaccggggagcgcaagcggaacgtcaccgaggtgaaggtgcagtga

SEQ ID NO: 8688 - protein, 211 aa, Zea mays
MALARLCLNRAIAGRAQALARPALAAAPATDPKLHSLLSTSAADSAASGEANRRDVAVSERSAPNRRWAWRDLRDFTPFSLVDGLGSALSQVAETLGRPLERLAPSRLLSGKVREDEARYRLRFEVPGLGKGDVRVAVEDGVLVIEGEKREHGEEGDGGEWWSTSGYHASLLLPDDARAEGITAEVKDGVLYVTVPRTGERKRNVTEVKVQ

SEQ ID NO: 8689 - DNA, 729 bp, Physcomitrella patens subsp. patens
  CDS (1)..(729)
atggccgctcgcacactctctcgtgtggttaccagtccagctaagtctttccttagtacgttcaaagatgctctcatagagcaaggacgttcgccactgccacgccaagcgccgtatgcagttgtccagcggatgggcgtctctggcagtgcacaaactacctcgcatggtgactacgattctcaaagtcagttggagaaacctcagaatgaaggcaagtctcctcagaggaggaatcaaggcggtcttagaagaggtgtaccacgggatttggcgagtgcgtttcttgatgtttgggatccttatccgggcaatagaaccttgaagcagatgttgaatacagtagaccgtctttttgatgatccttttttcagcgccgcaccttctcgacccactagcgtcgccttggacttccgcacaccttgggatgtgaaggaagacgagagtgctttcagacttcggttcgacatgccgggtcttcagaaggatgaggtgagagtttgtgtcgaagatggtgatttagtgatcaagggcgagcacaaggttgaggaaaagaacgaatataattggtcctctcgcagttttggtagctacaacacccgtatgacgttgcctgaaaatattaagattgacgaagtgaaagcggagctcaagaatggtgttctacacgtctttgtgcccaaatcaaaggaagagcccaagaaaaatgtcaacattaatattgagtga

SEQ ID NO: 8690 - protein, 242 aa, Physcomitrella patens subsp. patens
MAARTLSRVVTSPAKSFLSTFKDALIEQGRSPLPRQAPYAVVQRMGVSGSAQTTSHGDYDSQSQLEKPQNEGKSPQRRNQGGLRRGVPRDLASAFLDVWDPYPGNRTLKQMLNTVDRLFDDPFFSAAPSRPTSVALDFRTPWDVKEDESAFRLRFDMPGLQKDEVRVCVEDGDLVIKGEHKVEEKNEYNWSSRSFGSYNTRMTLPENIKIDEVKAELKNGVLHVFVPKSKEEPKKNVNINIE

SEQ ID NO: 8691 - DNA, 717 bp, Physcomitrella patens subsp. patens
  CDS (1)..(717)
atggcttcaagcacggctaagtccgggttgtgtaccttcatggatgcgttcacggggactagatgcccgccgtcgattgctgtgtcatgccgaccgccatggtctggtgttcgccggttggctgtcgttagcagtgctcaacaagataatgtcagtgagaattcagatgtgtcgcagacacagatgcagaagcaaaatgagggatcaagaccacctgtttctaggagatcaacggggttaagaagaggcgactctctaagagatctggcttcttcattttttgatatctgggatccttttgttggtgacaggagcttgaggcagatgctgaacaccgtggaacgtctctttgcggatcctatcttcggcagcccctctccagccactgcattggacctccgcacaccttgggatgtgaaagaggatgatgacgcttacaaacttcggtttgacatgccaggcctcagcaaggaagaggtgaaagtttcagtagaagatggtgatcttgttatcaagggggagcacaatgcagaggaacagaaggaagagaattggtcttcccgcagctatggcagttataatacgcgcatggctttgcctgagaacgctttgtttgagaacatcaaagcagagcttaagaatggagttctatacgtcgttgtgcccaagtccaaggaagatccccagaaaaaagttattgatatcaacgtgcagtaa

SEQ ID NO: 8692 - protein, 238 aa, Physcomitrella patens subsp. patens
MASSTAKSGLCTFMDAFTGTRCPPSIAVSCRPPWSGVRRLAVVSSAQQDNVSENSDVSQTQMQKQNEGSRPPVSRRSTGLRRGDSLRDLASSFFDIWDPFVGDRSLRQMLNTVERLFADPIFGSPSPATALDLRTPWDVKEDDDAYKLRFDMPGLSKEEVKVSVEDGDLVIKGEHNAEEQKEENWSSRSYGSYNTRMALPENALFENIKAELKNGVLYVVVPKSKEDPQKKVIDINVQ

SEQ ID NO: 8693 - DNA, 702 bp, Vitis vinifera
  CDS (1)..(702)
atggccttggctcgtttggctttgaggagtctgcagcagagggttccctcttcttcttcttcttctttgctgagccctagtctcagtgagagagctctgactggacagaggtgggggccggagattgtgaagaggttctcggcaacgcctgatgctgcctctgacaagccatctggtgagaaaacagaggttgctgtttctgaaggtgacagaaagcccaagctcttccccaggaagcagaggaagaggagcctttggaggaacaatagaaacgattttgtcccttccctgaatgagttgttccctccaagcataggaaatgccctgatgcaagcaacccaacacatgaacaggctacttgagaatttagcaccttcacgtctgataggcagattaaaagagcaggaccagtgctacaaactccgctacgaaatgcccggattgaccaaagaggatgtgaagatctcagttgaagatgggatcttatccataagaggagagcacaaggaggaggaggaagaaggctcagatgatgagcattggtcagctacaagctatgggtactatgacacgagcctcttgttgcctaccgatgccaaaattgaagaaatcaaagctgagctgaaggatggtgtcctcaccatcattatacccaggaatgaaaagaaggggaaagatgtgaaggaggttcagatccagtaa

SEQ ID NO: 8694 - protein, 233 aa, Vitis vinifera
MALARLALRSLQQRVPSSSSSSLLSPSLSERALTGQRWGPEIVKRFSATPDAASDKPSGEKTEVAVSEGDRKPKLFPRKQRKRSLWRNNRNDFVPSLNELFPPSIGNALMQATQHMNRLLENLAPSRLIGRLKEQDQCYKLRYEMPGLTKEDVKISVEDGILSIRGEHKEEEEEGSDDEHWSATSYGYYDTSLLLPTDAKIEEIKAELKDGVLTIIIPRNEKKGKDVKEVQIQ

SEQ ID NO: 8695 - DNA, 732 bp, Populus trichocarpa
  CDS (1)..(732)
atgagtttggcacgtttggccttgaggaatttgccccaaaggacgagcttctctgcttcttcttcagtgaatcatggagttagcattgatggtgttctcggtggggttcgaaggcaaaggtggaaccatgatgggttgttgaagaggtttatgacaacaacaacaagcgatcaaatagcaggccgtgagacatcagatggcaaagaagtagctatcgacaaggatagtgacaagtctaagctgtttcgcaggaagaaaggcaagaaaggtctctggaggaagagtgatggaattgattttgttcctgcactttatgagttttttccttcaggtcttggaaatgcacttgtgcaagcaactgataacatcaacaagctgttccaaaacttgcatattccggcaccctcgaacctcataggccgcgttaaagagaaagatgaatgctataaattacgatacgaggttccgggtgtatccaaggaggacttaaagatcgccatcgatgatggggttttgacaataaagggagagctcaaggaagaggaggaagaaggatcagacggcgagcactggtcaatgaggagctatggatgttataatactagcattatgttgcctgatgatgctaaaactgatgaaattaaggctgagttgaaggatggtgtgctatacattaccattccaagaactgaaaagcctaaaaaggatgtcaaggagattgatatccattaa

SEQ ID NO: 8696 - protein, 243 aa, Populus trichocarpa
MSLARLALRNLPQRTSFSASSSVNHGVSIDGVLGGVRRQRWNHDGLLKRFMTTTTSDQIAGRETSDGKEVAIDKDSDKSKLFRRKKGKKGLWRKSDGIDFVPALYEFFPSGLGNALVQATDNINKLFQNLHIPAPSNLIGRVKEKDECYKLRYEVPGVSKEDLKIAIDDGVLTIKGELKEEEEEGSDGEHWSMRSYGCYNTSIMLPDDAKTDEIKAELKDGVLYITIPRTEKPKKDVKEIDIH

SEQ ID NO: 8697 - DNA, 660 bp, Oryza sativa subsp. indica
  CDS (1)..(660)
atggctttagctcgccaatgcctcagcaaacacctcgccgccggctgcgctctggcgaggccactgcacgcggcgtcgccggtggcggcggcggctgccaattctcatgggccgctcaactttcgtgccctcttctcgtcggcgggagccgacgccgccgccaccaccggcggctgcgctcctgcgaaaggcggcggtcacagccgtgaggtcgccgtcgtggaccgctcgcgccgccgctggccgtggcgagacctccgcgacttcgtcccgctccgcctcgtcgacggcatcgggagcgcgctgtcgcaggtggcggagacgctgacccggccgctgacggggaaggtgcgggaggacgaggagcggtacaggctgcggttcgaggtgccgggcctcgggaaggacgacgtccgcgtctacgtggacgacggcgtgctcgccatccacggcgagaagcgcgacgtggtggaggaggaccgcggccgcgacggcgacggcgagtgctgggcggcggcgacgtaccacgccggcctgctcctcccggaggacgcggtggcggaggggatcacggcggaggtgagggacggcgtgctgcacgtcaccgtgccccgctcgcctgagaggaagaggagcgtcaccgaggtcaaggtgcggtag

SEQ ID NO: 8698 - protein, 219 aa, Oryza sativa subsp. indica
MALARQCLSKHLAAGCALARPLHAASPVAAAAANSHGPLNFRALFSSAGADAAATTGGCAPAKGGGHSREVAVVDRSRRRWPWRDLRDFVPLRLVDGIGSALSQVAETLTRPLTGKVREDEERYRLRFEVPGLGKDDVRVYVDDGVLAIHGEKRDVVEEDRGRDGDGECWAAATYHAGLLLPEDAVAEGITAEVRDGVLHVTVPRSPERKRSVTEVKVR

SEQ ID NO: 8699 - DNA, 732 bp, Funaria hygrometrica
  CDS (1)..(732)
atggccgctcgcacactctctcgtgtggtcgccagtccagccaggtcttttctgagtacgttcagagatactttcttgatgcaaggacgttcgccactgccacgccaagcgccattttcagtcgcccagcggatggccgtctctggcagcgcacaaactgtctccgatgatgactacgaatcacgaagtcagttggagaaaatgcagaatgagagcaatgcgtcacagaagagaagtcaaggcggtcttagacgagttgtaccaagggatttggcgtcttcctttttcgatatctgggatcctttcctgggcaacaaaagcttgaggcagatgttaaatacagttgaccgtctctttgatgatcccttcttcagcgcagcaccttctcgacccactggcatcgcccttgactttcgcacaccttgggacgtgaaagaagacaacgagtcttttagacttcgattcgacatgccaggtcttgggaaagatgaggtgaaagtttatgtcgaagatggtgacttggtgatcaagggcgtgcacagagcagaggaacagaaggagaataattggtcctcccgcagttatggtagctacaatacccgcatgaccttgcccgaaaatgtcaagattgacgaagtgaaggcggagctgaagaatggtgttctacaggtcgttgtacccaaatccaaggaagagcccaagaaaaatgtcatcgacatcaatgttgagtga

SEQ ID NO: 8700 - protein, 243 aa, Funaria hygrometrica
MAARTLSRVVASPARSFLSTFRDTFLMQGRSPLPRQAPFSVAQRMAVSGSAQTVSDDDYESRSQLEKMQNESNASQKRSQGGLRRVVPRDLASSFFDIWDPFLGNKSLRQMLNTVDRLFDDPFFSAAPSRPTGIALDFRTPWDVKEDNESFRLRFDMPGLGKDEVKVYVEDGDLVIKGVHRAEEQKENNWSSRSYGSYNTRMTLPENVKIDEVKAELKNGVLQVVVPKSKEEPKKNVIDINVE

SEQ ID NO: 8701 - DNA, 762 bp, Ricinus communis
  CDS (1)..(762)
atgtccatgcttctgcttaaatatcaccaattccgttctcttatgcatcacccatcatatccttgttacagctttcaaaagagttcgtcaaaggatgtaggcttcaatttcactcccaagaagaacagtgtcatcaaggccatggcagcatcagagagcagagacaatcttgatcacctgcagagagtcaatggcaagcagcatcaacaacaggctcaacccaagaaaagagtggctcgtgttgcaccagtagggttgtgggacaggtttccgacagcaagaacagttcagcagatgatggaaacaatggaaagaatgatggatgacccatttacatactctagcagctggccaactccagctgcaccaattgaaggaagtggatatggaagaggaaggacgccatgggagataaaagaaggagaaaatgaatacaaaatgaggtttgacatgcctggaatgaccaaagaagatgttaaggtgtgggttgaggagaagatgttggttgtgaaagcagagaaactgccaaagcagaaagtgaacgaagaacgaaatggagaagatcaaaaagcaaaagcagaagcagaagaagaagaagaagagtggtctgctaagagctatggaaggtacagtagtagaattgcgttgcctgagaatattcaatttgagaagataaaagctgaggttaaagatggtgtcttgtatattaccatacctaaagctagtaactttgccaagattcttgatatcaatgttcaatga

SEQ ID NO: 8702 - protein, 253 aa, Ricinus communis
MSMLLLKYHQFRSLMHHPSYPCYSFQKSSSKDVGFNFTPKKNSVIKAMAASESRDNLDHLQRVNGKQHQQQAQPKKRVARVAPVGLWDRFPTARTVQQMMETMERMMDDPFTYSSSWPTPAAPIEGSGYGRGRTPWEIKEGENEYKMRFDMPGMTKEDVKVWVEEKMLVVKAEKLPKQKVNEERNGEDQKAKAEAEEEEEEWSAKSYGRYSSRIALPENIQFEKIKAEVKDGVLYITIPKASNFAKILDINVQ

SEQ ID NO: 8703 - DNA, 711 bp, Ricinus communis
  CDS (1)..(711)
atggctttcgcacgtttggctttgaggagtttatcacaaagggttagctcctctgcttcttctttggtgggtcatggtgttattgaaaggagtgtcggtgatggtgtgcaaagccaaagatggaatcgagaattgttgaagaggtttatggcaacagcttctggtgaggcatcagacgggaaagaagttgctgtaagtgaacgtgataacaagaagtctaagctgttttctaagaagaaagggaagagaggtctttggaggaggaacggtggagaatttgttccacaactctatgagttcttcccttcagggctaggaaatgccctcttgcaagcaactgaaaacatcaacaggctatttgaaaacctgaatttgtcaccatcaaacctgatgagaagattgaaagagaaagaggaatgctacaagctgcgatacgaggtgccaggagtaacaaaagaggacctgaagatcaccgttgatgatggggttttaacaataaaaggagagcacaaggaagaggaagaagaagaaggatcagatgatgagcactggtcaatgaggagctatggatactataacacaagtgttctgcttcctgatgatgctaaagctgatgaaattaaggctgagttgaagaatggtgttcttcatattaccattccaagaactgaacagcctaaaaaggatgtgaaggaggttcaaatccactga
